United States Patent Application Publication US 2022/0213167 A1 - sequence listing, part 23

SEQ ID NO: 480839 - protein, 13 aa, Homo sapiens
  CDR3 for alpha chain variable domain of TCR clone 240420 (TRAV8-3, TRAJ4)
WVFYSGGYNKVIF

SEQ ID NO: 480840 - protein, 14 aa, Homo sapiens
  CDR3 for beta chain variable domain of TCR clone 240420 (TRBV7-9, TRBJ2-3)
CASSLEDGTDTQYF

SEQ ID NO: 480841 - protein, 15 aa, Homo sapiens
  CDR3 for alpha chain variable domain of TCR clone 240421 (TRAV35, TRAJ58)
CAGRRQETSGSRLTF

SEQ ID NO: 480842 - protein, 15 aa, Homo sapiens
  CDR3 for beta chain variable domain of TCR clone 240421 (TRBV20-1, TRBJ2-7)
CSARDRVSGMDEQYF

SEQ ID NO: 480843 - protein, 13 aa, Homo sapiens
  CDR3 for alpha chain variable domain of TCR clone 240422 (TRAV8-3, TRAJ37)
CAVPSGNTGKLIF

SEQ ID NO: 480844 - protein, 12 aa, Homo sapiens
  CDR3 for beta chain variable domain of TCR clone 240422 (TRBV11-2, TRBJ2-1)
CASSPGNHEQFF

SEQ ID NO: 480845 - protein, 14 aa, Homo sapiens
  CDR3 for alpha chain variable domain of TCR clone 240423 (TRAV8-3, TRAJ30)
CAVGDMNRDDKIIF

SEQ ID NO: 480846 - protein, 14 aa, Homo sapiens
  CDR3 for beta chain variable domain of TCR clone 240423 (TRBV19, TRBJ2-1)
CASPTFVLSGEQFF

SEQ ID NO: 480847 - protein, 14 aa, Homo sapiens
  CDR3 for alpha chain variable domain of TCR clone 240424 (TRAV1-2, TRAJ8)
CAGREDTGFQKLVF

SEQ ID NO: 480848 - protein, 12 aa, Homo sapiens
  CDR3 for beta chain variable domain of TCR clone 240424 (TRBV29-1, TRBJ2-3)
CSVTGGADTQYF

SEQ ID NO: 480849 - protein, 18 aa, Homo sapiens
  CDR3 for alpha chain variable domain of TCR clone 240425 (TRAV26-2, TRAJ45)
CVLRVDKYSGGGADGLTF

SEQ ID NO: 480850 - protein, 11 aa, Homo sapiens
  CDR3 for beta chain variable domain of TCR clone 240425 (TRBV29-1, TRBJ2-5)
CSEDRTGTQYF

SEQ ID NO: 480851 - protein, 12 aa, Homo sapiens
  CDR3 for alpha chain variable domain of TCR clone 240426 (TRAV8-3, TRAJ26)
CAGDNYGQNFVF

SEQ ID NO: 480852 - protein, 16 aa, Homo sapiens
  CDR3 for beta chain variable domain of TCR clone 240426 (TRBV11-3, TRBJ2-5)
CASSSVVAGSTETQYF

SEQ ID NO: 480853 - protein, 15 aa, Homo sapiens
  CDR3 for alpha chain variable domain of TCR clone 240427 (TRAV38-1, TRAJ37)
CAFIHGSGNTGKQIF

SEQ ID NO: 480854 - protein, 12 aa, Homo sapiens
  CDR3 for beta chain variable domain of TCR clone 240427 (TRBV7-9, TRBJ2-7)
CASSFGSYEQYF

SEQ ID NO: 480855 - protein, 13 aa, Homo sapiens
  CDR3 for alpha chain variable domain of TCR clone 240428 (TRAV3, TRAJ9)
CCETNTGGFKTIF

SEQ ID NO: 480856 - protein, 18 aa, Homo sapiens
  CDR3 for beta chain variable domain of TCR clone 240428 (TRBV25-1, TRBJ1-2)
CASSGLQNGQGLIFGYTF

SEQ ID NO: 480857 - protein, 14 aa, Homo sapiens
  CDR3 for alpha chain variable domain of TCR clone 240429 (TRAV1-2, TRAJ16)
CAVNRFSDDQKLLF

SEQ ID NO: 480858 - protein, 14 aa, Homo sapiens
  CDR3 for beta chain variable domain of TCR clone 240429 (TRBV19, TRBJ2-1)
CASPTFVLSGEQFF

SEQ ID NO: 480859 - protein, 16 aa, Homo sapiens
  CDR3 for alpha chain variable domain of TCR clone 240430 (TRAV26-2, TRAJ45)
CTTASPIGGGADGLTF

SEQ ID NO: 480860 - protein, 14 aa, Homo sapiens
  CDR3 for beta chain variable domain of TCR clone 240430 (TRBV11-2, TRBJ2-5)
CASSRTGGIETQYF

SEQ ID NO: 480861 - protein, 14 aa, Homo sapiens
  CDR3 for alpha chain variable domain of TCR clone 240431 (TRAV13-1, TRAJ40)
CAASMTSGTYKYIF

SEQ ID NO: 480862 - protein, 16 aa, Homo sapiens
  CDR3 for beta chain variable domain of TCR clone 240431 (TRBV27, TRBJ2-2)
CASSFRGLVRTGELFF

SEQ ID NO: 480863 - protein, 15 aa, Homo sapiens
  CDR3 for alpha chain variable domain of TCR clone 240432 (TRAV26-1, TRAJ40)
CIVRAVPSRTYKYIF

SEQ ID NO: 480864 - protein, 14 aa, Homo sapiens
  CDR3 for beta chain variable domain of TCR clone 240432 (TRBV19, TRBJ2-1)
CASKDPGLANEQFF

SEQ ID NO: 480865 - protein, 14 aa, Homo sapiens
  CDR3 for alpha chain variable domain of TCR clone 240433 (TRAV1-2, TRAJ8)
CAVREDTGFQKLVF

SEQ ID NO: 480866 - protein, 14 aa, Homo sapiens
  CDR3 for beta chain variable domain of TCR clone 240433 (TRBV25-1, TRBJ1-1)
CASTLLGGNTEVFF

SEQ ID NO: 480867 - protein, 13 aa, Homo sapiens
  CDR3 for alpha chain variable domain of TCR clone 240434 (TRAV23/DV6, TRAJ12)
CAPRVDSSYKLIF

SEQ ID NO: 480868 - protein, 12 aa, Homo sapiens
  CDR3 for beta chain variable domain of TCR clone 240434 (TRBV7-6, TRBJ2-5)
CASSLSQESQYF

SEQ ID NO: 480869 - protein, 12 aa, Homo sapiens
  CDR3 for alpha chain variable domain of TCR clone 240435 (TRAV3, TRAJ20)
CAVRDGDYKLSF

SEQ ID NO: 480870 - protein, 14 aa, Homo sapiens
  CDR3 for beta chain variable domain of TCR clone 240435 (TRBV20-1, TRBJ1-5)
CSARGRGSNQHQHF

SEQ ID NO: 480871 - protein, 12 aa, Homo sapiens
  CDR3 for alpha chain variable domain of TCR clone 240436 (TRAV27, TRAJ21)
CAGVRQLQQILL

SEQ ID NO: 480872 - protein, 16 aa, Homo sapiens
  CDR3 for beta chain variable domain of TCR clone 240436 (TRBV7-3, TRBJ2-2)
CASSLKRGTLSGELFF

SEQ ID NO: 480873 - protein, 14 aa, Homo sapiens
  CDR3 for alpha chain variable domain of TCR clone 240437 (TRAV16, TRAJ42)
CALLAGGSQGNLIF

SEQ ID NO: 480874 - protein, 15 aa, Homo sapiens
  CDR3 for beta chain variable domain of TCR clone 240437 (TRBV6-3, TRBJ2-7)
CASSSPGTVFYEQYF

SEQ ID NO: 480875 - protein, 13 aa, Homo sapiens
  CDR3 for alpha chain variable domain of TCR clone 240438 (TRAV20, TRAJ9)
CAVPDTGGFKTIF

SEQ ID NO: 480876 - protein, 15 aa, Homo sapiens
  CDR3 for beta chain variable domain of TCR clone 240438 (TRBV27, TRBJ2-7)
CDSSKAGRGGYEQYF

SEQ ID NO: 480877 - protein, 18 aa, Homo sapiens
  CDR3 for alpha chain variable domain of TCR clone 240439 (TRAV14/DV4, TRAJ3)
CAMREGSGGYSSASKIIF

SEQ ID NO: 480878 - protein, 12 aa, Homo sapiens
  CDR3 for beta chain variable domain of TCR clone 240439 (TRBV2, TRBJ2-7)
CASSSGGWEQYF

SEQ ID NO: 480879 - protein, 15 aa, Homo sapiens
  CDR3 for alpha chain variable domain of TCR clone 240440 (TRAV19, TRAJ9)
CALSEARTGGFKTIF

SEQ ID NO: 480880 - protein, 17 aa, Homo sapiens
  CDR3 for beta chain variable domain of TCR clone 240440 (TRBV20-1, TRBJ2-2)
CSASGSGQGGLTGELFF

SEQ ID NO: 480881 - protein, 12 aa, Homo sapiens
  CDR3 for alpha chain variable domain of TCR clone 240441 (TRAV12-3, TRAJ17)
CAMTLTGNKLTF

SEQ ID NO: 480882 - protein, 15 aa, Homo sapiens
  CDR3 for beta chain variable domain of TCR clone 240441 (TRBV4-2, TRBJ2-1)
CASSPSGGLYNEQFF

SEQ ID NO: 480883 - protein, 12 aa, Homo sapiens
  CDR3 for alpha chain variable domain of TCR clone 240442 (TRAV3, TRAJ7)
CADLLWEQQTRF

SEQ ID NO: 480884 - protein, 15 aa, Homo sapiens
  CDR3 for beta chain variable domain of TCR clone 240442 (TRBV27, TRBJ2-5)
CASSLYPRGGETQYF

SEQ ID NO: 480885 - protein, 11 aa, Homo sapiens
  CDR3 for alpha chain variable domain of TCR clone 240443 (TRAV35, TRAJ34)
CWARNTDKLIF

SEQ ID NO: 480886 - protein, 14 aa, Homo sapiens
  CDR3 for beta chain variable domain of TCR clone 240443 (TRBV12-4, TRBJ1-1)
CASSLGTGGTEAFF

SEQ ID NO: 480887 - protein, 11 aa, Homo sapiens
  CDR3 for alpha chain variable domain of TCR clone 240444 (TRAV2, TRAJ13)
CASGGYQKVTF

SEQ ID NO: 480888 - protein, 16 aa, Homo sapiens
  CDR3 for beta chain variable domain of TCR clone 240444 (TRBV7-3, TRBJ2-1)
CASSLSSVGGAKEQFF

SEQ ID NO: 480889 - protein, 13 aa, Homo sapiens
  CDR3 for alpha chain variable domain of TCR clone 240445 (TRAV1-1, TRAJ23)
CAVVANQGGKLIF

SEQ ID NO: 480890 - protein, 16 aa, Homo sapiens
  CDR3 for beta chain variable domain of TCR clone 240445 (TRBV2, TRBJ2-1)
CASSVGGSLSYNEQFF

SEQ ID NO: 480891 - protein, 12 aa, Homo sapiens
  CDR3 for alpha chain variable domain of TCR clone 240446 (TRAV16, TRAJ56)
CAPTGANSKLTF

SEQ ID NO: 480892 - protein, 17 aa, Homo sapiens
  CDR3 for beta chain variable domain of TCR clone 240446 (TRBV27, TRBJ2-6)
CASSLTGFASGDNVLTF

SEQ ID NO: 480893 - protein, 14 aa, Homo sapiens
  CDR3 for alpha chain variable domain of TCR clone 240447 (TRAV14/DV4, TRAJ34)
CAMREGRPHRQAHL

SEQ ID NO: 480894 - protein, 15 aa, Homo sapiens
  CDR3 for beta chain variable domain of TCR clone 240447 (TRBV6-5, TRBJ1-2)
CASSYSQAFNYGYTF

SEQ ID NO: 480895 - protein, 18 aa, Homo sapiens
  CDR3 for alpha chain variable domain of TCR clone 240448 (TRAV13-1, TRAJ52)
CAAKNPNAGGTSYGKLTF

SEQ ID NO: 480896 - protein, 15 aa, Homo sapiens
  CDR3 for beta chain variable domain of TCR clone 240448 (TRBV7-3, TRBJ2-1)
CASSLRAGSYNEQFF

SEQ ID NO: 480897 - protein, 15 aa, Homo sapiens
  CDR3 for alpha chain variable domain of TCR clone 240449 (TRAV3, TRAJ4)
CAVRDGTGGYNKLIF

SEQ ID NO: 480898 - protein, 20 aa, Homo sapiens
  CDR3 for beta chain variable domain of TCR clone 240449 (TRBV7-8, TRBJ2-2)
CASSHLFPGPTIHITGELFF

SEQ ID NO: 480899 - protein, 13 aa, Homo sapiens
  CDR3 for alpha chain variable domain of TCR clone 240450 (TRAV8-1, TRAJ9)
CAVNSVGGCKTIF

SEQ ID NO: 480900 - protein, 15 aa, Homo sapiens
  CDR3 for beta chain variable domain of TCR clone 240450 (TRBV11-2, TRBJ2-3)
CASSGRDGLTDTQYF

SEQ ID NO: 480901 - protein, 11 aa, Homo sapiens
  CDR3 for alpha chain variable domain of TCR clone 240451 (TRAV21, TRAJ41)
CAVRSGYALNF

SEQ ID NO: 480902 - protein, 14 aa, Homo sapiens
  CDR3 for beta chain variable domain of TCR clone 240451 (TRBV7-9, TRBJ2-7)
CASSPKTSFYEQYF

SEQ ID NO: 480903 - protein, 13 aa, Homo sapiens
  CDR3 for alpha chain variable domain of TCR clone 240452 (TRAV1-2, TRAJ9)
CAALNTGGFKPIF

SEQ ID NO: 480904 - protein, 13 aa, Homo sapiens
  CDR3 for beta chain variable domain of TCR clone 240452 (TRBV11-2, TRBJ1-2)
CASSLDSPSGYTF

SEQ ID NO: 480905 - protein, 13 aa, Homo sapiens
  CDR3 for alpha chain variable domain of TCR clone 240453 (TRAV20, TRAJ20)
CAVRDFNDYKLSF

SEQ ID NO: 480906 - protein, 16 aa, Homo sapiens
  CDR3 for beta chain variable domain of TCR clone 240453 (TRBV12-5, TRBJ2-5)
CASGPRTSGNQETQYF

SEQ ID NO: 480907 - protein, 15 aa, Homo sapiens
  CDR3 for alpha chain variable domain of TCR clone 240454 (TRAV38-1, TRAJ37)
CAFIHGSGHTGKLIF

SEQ ID NO: 480908 - protein, 14 aa, Homo sapiens
  CDR3 for beta chain variable domain of TCR clone 240454 (TRBV29-1, TRBJ2-5)
CSVETSGSGETQYF

SEQ ID NO: 480909 - protein, 14 aa, Homo sapiens
  CDR3 for alpha chain variable domain of TCR clone 240455 (TRAV1-2, TRAJ16)
CAVNRFSDDQKLLF

SEQ ID NO: 480910 - protein, 15 aa, Homo sapiens
  CDR3 for beta chain variable domain of TCR clone 240455 (TRBV7-3, TRBJ2-2)
ELSLKRGTLSGELFF

SEQ ID NO: 480911 - protein, 13 aa, Homo sapiens
  CDR3 for alpha chain variable domain of TCR clone 240456 (TRAV8-3, TRAJ28)
CAAGAVGSYQLTF

SEQ ID NO: 480912 - protein, 14 aa, Homo sapiens
  CDR3 for beta chain variable domain of TCR clone 240456 (TRBV25-1, TRBJ1-1)
CASTHLGGNTEAFF

SEQ ID NO: 480913 - protein, 11 aa, Homo sapiens
  CDR3 for alpha chain variable domain of TCR clone 240457 (TRAV4, TRAJ18)
CLVGERSVAQP

SEQ ID NO: 480914 - protein, 18 aa, Homo sapiens
  CDR3 for beta chain variable domain of TCR clone 240457 (TRBV11-2, TRBJ2-3)
CASSLGGASRGAPNTQYF

SEQ ID NO: 480915 - protein, 12 aa, Homo sapiens
  CDR3 for alpha chain variable domain of TCR clone 240458 (TRAV4, TRAJ6)
CLAPGGSYIPTF

SEQ ID NO: 480916 - protein, 12 aa, Homo sapiens
  CDR3 for beta chain variable domain of TCR clone 240458 (TRBV6-5, TRBJ2-3)
CASSDTTDTQHF

SEQ ID NO: 480917 - protein, 15 aa, Homo sapiens
  CDR3 for alpha chain variable domain of TCR clone 240459 (TRAV3, TRAJ22)
CALRDRGGSARQLTF

SEQ ID NO: 480918 - protein, 14 aa, Homo sapiens
  CDR3 for beta chain variable domain of TCR clone 240459 (TRBV19, TRBJ1-5)
CASSLGLIGQPQHF

SEQ ID NO: 480919 - protein, 14 aa, Homo sapiens
  CDR3 for alpha chain variable domain of TCR clone 240460 (TRAV8-3, TRAJ27)
CAGGRKTNAGKSTF

SEQ ID NO: 480920 - protein, 15 aa, Homo sapiens
  CDR3 for beta chain variable domain of TCR clone 240460 (TRBV11-3, TRBJ2-5)
CASSLRGRVQETQYF

SEQ ID NO: 480921 - protein, 15 aa, Homo sapiens
  CDR3 for alpha chain variable domain of TCR clone 240461 (TRAV8-4, TRAJ37)
CAVSTRSGDPGKLIF

SEQ ID NO: 480922 - protein, 13 aa, Homo sapiens
  CDR3 for beta chain variable domain of TCR clone 240461 (TRBV19, TRBJ2-7)
CASSKQGGYEQYF

SEQ ID NO: 480923 - protein, 10 aa, Homo sapiens
  CDR3 for alpha chain variable domain of TCR clone 240462 (TRAV1-2, TRAJ20)
CALNDYKLSF

SEQ ID NO: 480924 - protein, 16 aa, Homo sapiens
  CDR3 for beta chain variable domain of TCR clone 240462 (TRBV20-1, TRBJ2-2)
CSASASGIPGAGELFF

SEQ ID NO: 480925 - protein, 15 aa, Homo sapiens
  CDR3 for alpha chain variable domain of TCR clone 240463 (TRAV3, TRAJ37)
CAVIRSSSNTGKLIF

SEQ ID NO: 480926 - protein, 15 aa, Homo sapiens
  CDR3 for beta chain variable domain of TCR clone 240463 (TRBV25-1, TRBJ1-4)
CASSKRIATNEKLFF

SEQ ID NO: 480927 - protein, 15 aa, Homo sapiens
  CDR3 for alpha chain variable domain of TCR clone 240464 (TRAV3, TRAJ22)
CAVRDRGGSARQLTF

SEQ ID NO: 480928 - protein, 14 aa, Homo sapiens
  CDR3 for beta chain variable domain of TCR clone 240464 (TRBV7-7, TRBJ2-2)
CASSRDRSTGELYF

SEQ ID NO: 480929 - protein, 18 aa, Homo sapiens
  CDR3 for alpha chain variable domain of TCR clone 240465 (TRAV21, TRAJ52)
CAVMPSPAGGTSYGKLTF

SEQ ID NO: 480930 - protein, 14 aa, Homo sapiens
  CDR3 for beta chain variable domain of TCR clone 240465 (TRBV7-2, TRBJ2-1)
CASSLEGGYNEQFF

SEQ ID NO: 480931 - protein, 15 aa, Homo sapiens
  CDR3 for alpha chain variable domain of TCR clone 240466 (TRAV8-3, TRAJ45)
CASSYSGGGADGTTF

SEQ ID NO: 480932 - protein, 13 aa, Homo sapiens
  CDR3 for beta chain variable domain of TCR clone 240466 (TRBV10-3, TRBJ2-7)
CASKLAVNYEQYF

SEQ ID NO: 480933 - protein, 14 aa, Homo sapiens
  CDR3 for alpha chain variable domain of TCR clone 240467 (TRAV1-2, TRAJ8)
CAVIEDTGFQKLVF

SEQ ID NO: 480934 - protein, 13 aa, Homo sapiens
  CDR3 for beta chain variable domain of TCR clone 240467 (TRBV24-1, TRBJ2-2)
CATSDWSTGELFF

SEQ ID NO: 480935 - protein, 13 aa, Homo sapiens
  CDR3 for alpha chain variable domain of TCR clone 240468 (TRAV16, TRAJ54)
CALMVQGAKKLVF

SEQ ID NO: 480936 - protein, 12 aa, Homo sapiens
  CDR3 for beta chain variable domain of TCR clone 240468 (TRBV18, TRBJ2-7)
CASSTAMGEQYF

SEQ ID NO: 480937 - protein, 14 aa, Homo sapiens
  CDR3 for alpha chain variable domain of TCR clone 240469 (TRAV26-1, TRAJ21)
CIGRPPYNFNKFYF

SEQ ID NO: 480938 - protein, 14 aa, Homo sapiens
  CDR3 for beta chain variable domain of TCR clone 240469 (TRBV11-3, TRBJ2-1)
CASSATTSGSIQFF

SEQ ID NO: 480939 - protein, 15 aa, Homo sapiens
  CDR3 for alpha chain variable domain of TCR clone 240470 (TRAV12-3, TRAJ42)
CAMITSVGSQGNLIF

SEQ ID NO: 480940 - protein, 14 aa, Homo sapiens
  CDR3 for beta chain variable domain of TCR clone 240470 (TRBV7-8, TRBJ2-5)
CASSATGGQETQYF

SEQ ID NO: 480941 - protein, 15 aa, Homo sapiens
  CDR3 for alpha chain variable domain of TCR clone 240471 (TRAV3, TRAJ5)
CAVRDLDTGRRALTP

SEQ ID NO: 480942 - protein, 13 aa, Homo sapiens
  CDR3 for beta chain variable domain of TCR clone 240471 (TRBV12-4, TRBJ2-7)
CASSPTEAYEQYF

SEQ ID NO: 480943 - protein, 13 aa, Homo sapiens
  CDR3 for alpha chain variable domain of TCR clone 240472 (TRAV8-3, TRAJ21)
CAVGAYNFNKFYF

SEQ ID NO: 480944 - protein, 16 aa, Homo sapiens
  CDR3 for beta chain variable domain of TCR clone 240472 (TRBV19, TRBJ2-1)
CASSMGGGGSYNEQFF

SEQ ID NO: 480945 - protein, 11 aa, Homo sapiens
  CDR3 for alpha chain variable domain of TCR clone 240473 (TRAV8-3, TRAJ36)
CAVGATGATTS

SEQ ID NO: 480946 - protein, 17 aa, Homo sapiens
  CDR3 for beta chain variable domain of TCR clone 240473 (TRBV4-2, TRBJ1-1)
CASTQFGGGSGNTEAFF

SEQ ID NO: 480947 - protein, 11 aa, Homo sapiens
  CDR3 for alpha chain variable domain of TCR clone 240474 (TRAV3, TRAJ21)
CAVGNFNKFHF

SEQ ID NO: 480948 - protein, 16 aa, Homo sapiens
  CDR3 for beta chain variable domain of TCR clone 240474 (TRBV5-1, TRBJ2-1)
CASSLTLAGGRNEQFF

SEQ ID NO: 480949 - protein, 14 aa, Homo sapiens
  CDR3 for alpha chain variable domain of TCR clone 240475 (TRAV26-1, TRAJ34)
CIVRVAYNTDKLIF

SEQ ID NO: 480950 - protein, 14 aa, Homo sapiens
  CDR3 for beta chain variable domain of TCR clone 240475 (TRBV5-4, TRBJ1-2)
CASTRQTDNYGYTF

SEQ ID NO: 480951 - protein, 15 aa, Homo sapiens
  CDR3 for alpha chain variable domain of TCR clone 240476 (TRAV12-2, TRAJ50)
CAVNGLETSYDKVIF

SEQ ID NO: 480952 - protein, 16 aa, Homo sapiens
  CDR3 for beta chain variable domain of TCR clone 240476 (TRBV5-1, TRBJ1-3)
CASSPWAPSSGNTIYF

SEQ ID NO: 480953 - protein, 14 aa, Homo sapiens
  CDR3 for alpha chain variable domain of TCR clone 240477 (TRAV1-2, TRAJ16)
CSVNRFSDGQKLLF

SEQ ID NO: 480954 - protein, 17 aa, Homo sapiens
  CDR3 for beta chain variable domain of TCR clone 240477 (TRBV7-8, TRBJ2-6)
CASSAGTGGAGANVLTF

SEQ ID NO: 480955 - protein, 12 aa, Homo sapiens
  CDR3 for alpha chain variable domain of TCR clone 240478 (TRAV13-1, TRAJ49)
CAASPMGNQFYF

SEQ ID NO: 480956 - protein, 15 aa, Homo sapiens
  CDR3 for beta chain variable domain of TCR clone 240478 (TRBV10-3, TRBJ2-1)
CAISDVQDRAYEQFF

SEQ ID NO: 480957 - protein, 18 aa, Homo sapiens
  CDR3 for alpha chain variable domain of TCR clone 240479 (TRAV29/DV5, TRAJ37)
CSVLLRSEGSGNTGKLIF

SEQ ID NO: 480958 - protein, 14 aa, Homo sapiens
  CDR3 for beta chain variable domain of TCR clone 240479 (TRBV5-1, TRBJ1-1)
CASSLAVGSGEAFF

SEQ ID NO: 480959 - protein, 11 aa, Homo sapiens
  CDR3 for alpha chain variable domain of TCR clone 240480 (TRAV8-4, TRAJ26)
CAGGEGQNFVF

SEQ ID NO: 480960 - protein, 15 aa, Homo sapiens
  CDR3 for beta chain variable domain of TCR clone 240480 (TRBV6-3, TRBJ2-7)
CASSSPGTVFYEQYF

SEQ ID NO: 480961 - protein, 13 aa, Homo sapiens
  CDR3 for alpha chain variable domain of TCR clone 240481 (TRAV13-1, TRAJ10)
CAATLGGGNKLTF

SEQ ID NO: 480962 - protein, 11 aa, Homo sapiens
  CDR3 for beta chain variable domain of TCR clone 240481 (TRBV11-2, TRBJ1-1)
CASSINTEAFF

SEQ ID NO: 480963 - protein, 15 aa, Homo sapiens
  CDR3 for alpha chain variable domain of TCR clone 240482 (TRAV12-2, TRAJ42)
CAVNSHGGSQGNPIF

SEQ ID NO: 480964 - protein, 13 aa, Homo sapiens
  CDR3 for beta chain variable domain of TCR clone 240482 (TRBV27, TRBJ1-1)
CASSVSANTEAFF

SEQ ID NO: 480965 - protein, 13 aa, Homo sapiens
  CDR3 for alpha chain variable domain of TCR clone 240483 (TRAV17, TRAJ5)
CAPMDTGRRALTF

SEQ ID NO: 480966 - protein, 15 aa, Homo sapiens
  CDR3 for beta chain variable domain of TCR clone 240483 (TRBV20-1, TRBJ1-1)
CSASRGVTGNTEAFF

SEQ ID NO: 480967 - protein, 14 aa, Homo sapiens
  CDR3 for alpha chain variable domain of TCR clone 240484 (TRAV35, TRAJ50)
CAGHRKTSYDKVIF

SEQ ID NO: 480968 - protein, 13 aa, Homo sapiens
  CDR3 for beta chain variable domain of TCR clone 240484 (TRBV7-7, TRBJ2-3)
CASSLSRADKQDF

SEQ ID NO: 480969 - protein, 12 aa, Homo sapiens
  CDR3 for alpha chain variable domain of TCR clone 240485 (TRAV12-3, TRAJ17)
CAMTLTGNKLTF

SEQ ID NO: 480970 - protein, 15 aa, Homo sapiens
  CDR3 for beta chain variable domain of TCR clone 240485 (TRBV5-1, TRBJ1-1)
CASSLNDFKNTEAFF

SEQ ID NO: 480971 - protein, 16 aa, Homo sapiens
  CDR3 for alpha chain variable domain of TCR clone 240486 (TRAV8-3, TRAJ13)
CAVGAYPSGGYLKVTF

SEQ ID NO: 480972 - protein, 15 aa, Homo sapiens
  CDR3 for beta chain variable domain of TCR clone 240486 (TRBV19, TRBJ1-5)
CASSIVWADNQPRHF

SEQ ID NO: 480973 - protein, 13 aa, Homo sapiens
  CDR3 for alpha chain variable domain of TCR clone 240487 (TRAV8-6, TRAJ49)
CAVITNTGNQFYF

SEQ ID NO: 480974 - protein, 15 aa, Homo sapiens
  CDR3 for beta chain variable domain of TCR clone 240487 (TRBV6-3, TRBJ2-7)
CASSSPGTVFYEPYF

SEQ ID NO: 480975 - protein, 15 aa, Homo sapiens
  CDR3 for alpha chain variable domain of TCR clone 240488 (TRAV1-2, TRAJ12)
CADARWMDSSYKLIF

SEQ ID NO: 480976 - protein, 11 aa, Homo sapiens
  CDR3 for beta chain variable domain of TCR clone 240488 (TRBV29-1, TRBJ2-5)
CSEDRKGTQYF

SEQ ID NO: 480977 - protein, 17 aa, Homo sapiens
  CDR3 for alpha chain variable domain of TCR clone 240489 (TRAV1-2, TRAJ8)
CAVRDPDANTGFQKLVF

SEQ ID NO: 480978 - protein, 16 aa, Homo sapiens
  CDR3 for beta chain variable domain of TCR clone 240489 (TRBV7-9, TRBJ2-2)
CASSGVGGANTGELFF

SEQ ID NO: 480979 - protein, 12 aa, Homo sapiens
  CDR3 for alpha chain variable domain of TCR clone 240490 (TRAV12-1, TRAJ23)
CVVNNQGGELIF

SEQ ID NO: 480980 - protein, 16 aa, Homo sapiens
  CDR3 for beta chain variable domain of TCR clone 240490 (TRBV11-1, TRBJ2-7)
CASSAQTGTLSYEQYF

SEQ ID NO: 480981 - protein, 14 aa, Homo sapiens
  CDR3 for alpha chain variable domain of TCR clone 240491 (TRAV26-1, TRAJ39)
CIVRGSRAGNMLNF

SEQ ID NO: 480982 - protein, 14 aa, Homo sapiens
  CDR3 for beta chain variable domain of TCR clone 240491 (TRBV25-1, TRBJ1-1)
CASTHLGGNTEAFF

SEQ ID NO: 480983 - protein, 15 aa, Homo sapiens
  CDR3 for alpha chain variable domain of TCR clone 240492 (TRAV8-4, TRAJ36)
CAVRKSWTGANNLFF

SEQ ID NO: 480984 - protein, 16 aa, Homo sapiens
  CDR3 for beta chain variable domain of TCR clone 240492 (TRBV5-1, TRBJ2-3)
CASSLEGGSFTDTQYF

SEQ ID NO: 480985 - protein, 10 aa, Homo sapiens
  CDR3 for alpha chain variable domain of TCR clone 240493 (TRAV12-1, TRAJ9)
CNTGGFKTIF

SEQ ID NO: 480986 - protein, 15 aa, Homo sapiens
  CDR3 for beta chain variable domain of TCR clone 240493 (TRBV6-1, TRBJ2-7)
CASSESMGDFYEQYF

SEQ ID NO: 480987 - protein, 10 aa, Homo sapiens
  CDR3 for alpha chain variable domain of TCR clone 240494 (TRAV21, TRAJ31)
CAVANARLMF

SEQ ID NO: 480988 - protein, 13 aa, Homo sapiens
  CDR3 for beta chain variable domain of TCR clone 240494 (TRBV4-1, TRBJ1-1)
CASSRKMNTEAFF

SEQ ID NO: 480989 - protein, 15 aa, Homo sapiens
  CDR3 for alpha chain variable domain of TCR clone 240495 (TRAV17, TRAJ28)
CATVDSGAGSDQLTF

SEQ ID NO: 480990 - protein, 13 aa, Homo sapiens
  CDR3 for beta chain variable domain of TCR clone 240495 (TRBV4-2, TRBJ1-1)
CASSQAGNTEAFF

SEQ ID NO: 480991 - protein, 15 aa, Homo sapiens
  CDR3 for alpha chain variable domain of TCR clone 240496 (TRAV26-1, TRAJ29)
CIVRVEGSGNTPLVF

SEQ ID NO: 480992 - protein, 15 aa, Homo sapiens
  CDR3 for beta chain variable domain of TCR clone 240496 (TRBV7-9, TRBJ1-5)
CASSQGHQPNQTQDF

SEQ ID NO: 480993 - protein, 13 aa, Homo sapiens
  CDR3 for alpha chain variable domain of TCR clone 240497 (TRAV35, TRAJ35)
CAGTNALGMCCIA

SEQ ID NO: 480994 - protein, 14 aa, Homo sapiens
  CDR3 for beta chain variable domain of TCR clone 240497 (TRBV19, TRBJ2-1)
CASPTFVLSGEQFF

SEQ ID NO: 480995 - protein, 15 aa, Homo sapiens
  CDR3 for alpha chain variable domain of TCR clone 240498 (TRAV21, TRAJ53)
CATLNSGGSNYKLTF

SEQ ID NO: 480996 - protein, 14 aa, Homo sapiens
  CDR3 for beta chain variable domain of TCR clone 240498 (TRBV7-2, TRBJ2-7)
CASSPKTSFYEQDF

SEQ ID NO: 480997 - protein, 14 aa, Homo sapiens
  CDR3 for alpha chain variable domain of TCR clone 240499 (TRAV1-2, TRAJ16)
CAVNRFSDGQKLLF

SEQ ID NO: 480998 - protein, 15 aa, Homo sapiens
  CDR3 for beta chain variable domain of TCR clone 240499 (TRBV7-9, TRBJ2-1)
CASSLLIGSYNEQFF

SEQ ID NO: 480999 - protein, 14 aa, Homo sapiens
  CDR3 for alpha chain variable domain of TCR clone 240500 (TRAV17, TRAJ6)
CATNPAGGSYIPTF

SEQ ID NO: 481000 - protein, 15 aa, Homo sapiens
  CDR3 for beta chain variable domain of TCR clone 240500 (TRBV2, TRBJ2-5)
CASSGTVAAGETQYL

SEQ ID NO: 481001 - protein, 14 aa, Homo sapiens
  CDR3 for alpha chain variable domain of TCR clone 240501 (TRAV12-2, TRAJ53)
CAVKGGGSNYKLTF

SEQ ID NO: 481002 - protein, 15 aa, Homo sapiens
  CDR3 for beta chain variable domain of TCR clone 240501 (TRBV11-2, TRBJ2-2)
CASSSDRVNAGELSF

SEQ ID NO: 481003 - protein, 13 aa, Homo sapiens
  CDR3 for alpha chain variable domain of TCR clone 240502 (TRAV20, TRAJ20)
CAVRWVRDYKLSF

SEQ ID NO: 481004 - protein, 17 aa, Homo sapiens
  CDR3 for beta chain variable domain of TCR clone 240502 (TRBV11-2, TRBJ2-6)
CASSQRDIFSGANVLTF

SEQ ID NO: 481005 - protein, 12 aa, Homo sapiens
  CDR3 for alpha chain variable domain of TCR clone 240503 (TRAV12-2, TRAJ34)
CAVNFFTDKLIF

SEQ ID NO: 481006 - protein, 17 aa, Homo sapiens
  CDR3 for beta chain variable domain of TCR clone 240503 (TRBV20-1, TRBJ2-3)
CSASLLGRGGSADTQYS

SEQ ID NO: 481007 - protein, 13 aa, Homo sapiens
  CDR3 for alpha chain variable domain of TCR clone 240504 (TRAV3, TRAJ21)
CAVREPDFNKFYF

SEQ ID NO: 481008 - protein, 13 aa, Homo sapiens
  CDR3 for beta chain variable domain of TCR clone 240504 (TRBV3-1, TRBJ2-2)
CASLARGSGELFF

SEQ ID NO: 481009 - protein, 14 aa, Homo sapiens
  CDR3 for alpha chain variable domain of TCR clone 240505 (TRAV8-4, TRAJ13)
CAVTLSGGYQKVTF

SEQ ID NO: 481010 - protein, 14 aa, Homo sapiens
  CDR3 for beta chain variable domain of TCR clone 240505 (TRBV7-2, TRBJ1-2)
CDSSQTGSTYGYTF

SEQ ID NO: 481011 - protein, 15 aa, Homo sapiens
  CDR3 for alpha chain variable domain of TCR clone 240506 (TRAV27, TRAJ38)
CAARRNAGNNRKLIC

SEQ ID NO: 481012 - protein, 14 aa, Homo sapiens
  CDR3 for beta chain variable domain of TCR clone 240506 (TRBV7-8, TRBJ2-3)
CASSLEAGTDTQYF

SEQ ID NO: 481013 - protein, 13 aa, Homo sapiens
  CDR3 for alpha chain variable domain of TCR clone 240507 (TRAV13-1, TRAJ5)
CAASDTGRRALTF

SEQ ID NO: 481014 - protein, 12 aa, Homo sapiens
  CDR3 for beta chain variable domain of TCR clone 240507 (TRBV28, TRBJ2-3)
CASSVDRDTQYF

SEQ ID NO: 481015 - protein, 14 aa, Homo sapiens
  CDR3 for alpha chain variable domain of TCR clone 240508 (TRAV1-2, TRAJ16)
CAVNRFSAGQKLLF

SEQ ID NO: 481016 - protein, 15 aa, Homo sapiens
  CDR3 for beta chain variable domain of TCR clone 240508 (TRBV7-9, TRBJ1-6)
CAGSSPGRGNSPLHF

SEQ ID NO: 481017 - protein, 18 aa, Homo sapiens
  CDR3 for alpha chain variable domain of TCR clone 240509 (TRAV21, TRAJ52)
CAVRPSPAGGTSYGKLTF

SEQ ID NO: 481018 - protein, 17 aa, Homo sapiens
  CDR3 for beta chain variable domain of TCR clone 240509 (TRBV25-1, TRBJ2-1)
CASSAYGQERGVYEQFF

SEQ ID NO: 481019 - protein, 17 aa, Homo sapiens
  CDR3 for alpha chain variable domain of TCR clone 240510 (TRAV12-2, TRAJ4)
CAVNVRPVPGGYNKLIF

SEQ ID NO: 481020 - protein, 17 aa, Homo sapiens
  CDR3 for beta chain variable domain of TCR clone 240510 (TRBV6-3, TRBJ2-1)
CASSYSSGTRGLDEQFF

SEQ ID NO: 481021 - protein, 14 aa, Homo sapiens
  CDR3 for alpha chain variable domain of TCR clone 240511 (TRAV12-1, TRAJ34)
CGEPASYNTDKLIF

SEQ ID NO: 481022 - protein, 12 aa, Homo sapiens
  CDR3 for beta chain variable domain of TCR clone 240511 (TRBV11-2, TRBJ2-2)
CASSLGGGELFF

SEQ ID NO: 481023 - protein, 14 aa, Homo sapiens
  CDR3 for alpha chain variable domain of TCR clone 240512 (TRAV26-1, TRAJ38)
CIADNAGDNRKLIW

SEQ ID NO: 481024 - protein, 13 aa, Homo sapiens
  CDR3 for beta chain variable domain of TCR clone 240512 (TRBV7-9, TRBJ2-3)
CASSPGSTDTQYF

SEQ ID NO: 481025 - protein, 17 aa, Homo sapiens
  CDR3 for alpha chain variable domain of TCR clone 240513 (TRAV3, TRAJ6)
CAVRDGPRAGGRDIPTF

SEQ ID NO: 481026 - protein, 14 aa, Homo sapiens
  CDR3 for beta chain variable domain of TCR clone 240513 (TRBV7-2, TRBJ2-7)
CASSPKTSFYEQYF

SEQ ID NO: 481027 - protein, 14 aa, Homo sapiens
  CDR3 for alpha chain variable domain of TCR clone 240514 (TRAV1-2, TRAJ16)
FAANRFSDGQKLLF

SEQ ID NO: 481028 - protein, 12 aa, Homo sapiens
  CDR3 for beta chain variable domain of TCR clone 240514 (TRBV28, TRBJ2-3)
CASSLYRDTQYF

SEQ ID NO: 481029 - protein, 14 aa, Homo sapiens
  CDR3 for alpha chain variable domain of TCR clone 240515 (TRAV4, TRAJ34)
CLVGDLYNTDKLIF

SEQ ID NO: 481030 - protein, 13 aa, Homo sapiens
  CDR3 for beta chain variable domain of TCR clone 240515 (TRBV7-9, TRBJ1-2)
CASSLKQNYGYTF

SEQ ID NO: 481031 - protein, 11 aa, Homo sapiens
  CDR3 for alpha chain variable domain of TCR clone 240516 (TRAV1-2, TRAJ31)
CAVNNNARLMF

SEQ ID NO: 481032 - protein, 13 aa, Homo sapiens
  CDR3 for beta chain variable domain of TCR clone 240516 (TRBV20-1, TRBJ2-7)
CSARTGAGYEQYF

SEQ ID NO: 481033 - protein, 17 aa, Homo sapiens
  CDR3 for alpha chain variable domain of TCR clone 240517 (TRAV26-1, TRAJ11)
CIVRVGQSNSGYSTLTF

SEQ ID NO: 481034 - protein, 14 aa, Homo sapiens
  CDR3 for beta chain variable domain of TCR clone 240517 (TRBV12-5, TRBJ2-5)
CASGSRTHQETQYF

SEQ ID NO: 481035 - protein, 16 aa, Homo sapiens
  CDR3 for alpha chain variable domain of TCR clone 240518 (TRAV12-2, TRAJ32)
CAVNLGQGGAKNKLIF

SEQ ID NO: 481036 - protein, 15 aa, Homo sapiens
  CDR3 for beta chain variable domain of TCR clone 240518 (TRBV20-1, TRBJ2-7)
CSARGPLAGGREQYV

SEQ ID NO: 481037 - protein, 14 aa, Homo sapiens
  CDR3 for alpha chain variable domain of TCR clone 240519 (TRAV26-1, TRAJ44)
CISSLPGTASKLTF

SEQ ID NO: 481038 - protein, 16 aa, Homo sapiens
  CDR3 for beta chain variable domain of TCR clone 240519 (TRBV19, TRBJ2-1)
CASSKAGPSSYNEQFF

SEQ ID NO: 481039 - protein, 19 aa, Homo sapiens
  CDR3 for alpha chain variable domain of TCR clone 240520 (TRAV1-2, TRAJ8)
CAVEHRLSETCIWNWHPTS

SEQ ID NO: 481040 - protein, 13 aa, Homo sapiens
  CDR3 for beta chain variable domain of TCR clone 240520 (TRBV5-5, TRBJ1-2)
CASSFWRGEDYTF

SEQ ID NO: 481041 - protein, 22 aa, Homo sapiens
  CDR3 for alpha chain variable domain of TCR clone 240521 (TRAV8-3, TRAJ30)
CAVGGCTEMTRSSLEKGHDFIF

SEQ ID NO: 481042 - protein, 15 aa, Homo sapiens
  CDR3 for beta chain variable domain of TCR clone 240521 (TRBV7-2, TRBJ2-7)
CASSLSGALTYEQYF

SEQ ID NO: 481043 - protein, 12 aa, Homo sapiens
  CDR3 for alpha chain variable domain of TCR clone 240522 (TRAV1-1, TRAJ15)
CAVGQAGTAVIF

SEQ ID NO: 481044 - protein, 16 aa, Homo sapiens
  CDR3 for beta chain variable domain of TCR clone 240522 (TRBV12-4, TRBJ2-7)
CASSPEGQGSSYEQYF

SEQ ID NO: 481045 - protein, 14 aa, Homo sapiens
  CDR3 for alpha chain variable domain of TCR clone 240523 (TRAV9-2, TRAJ39)
CALYIYNAGNMLTF

SEQ ID NO: 481046 - protein, 14 aa, Homo sapiens
  CDR3 for beta chain variable domain of TCR clone 240523 (TRBV20-1, TRBJ2-7)
CSAPELAGVGEQYF

SEQ ID NO: 481047 - protein, 13 aa, Homo sapiens
  CDR3 for alpha chain variable domain of TCR clone 240524 (TRAV13-1, TRAJ39)
CAASIWAGNMLTF

SEQ ID NO: 481048 - protein, 14 aa, Homo sapiens
  CDR3 for beta chain variable domain of TCR clone 240524 (TRBV4-1, TRBJ2-7)
CASSQVAGGDEQYF

SEQ ID NO: 481049 - protein, 11 aa, Homo sapiens
  CDR3 for alpha chain variable domain of TCR clone 240525 (TRAV21, TRAJ34)
CAVTNTDKLIF

SEQ ID NO: 481050 - protein, 15 aa, Homo sapiens
  CDR3 for beta chain variable domain of TCR clone 240525 (TRBV28, TRBJ2-3)
CAPTFRDWSTDTQYF

SEQ ID NO: 481051 - protein, 15 aa, Homo sapiens
  CDR3 for alpha chain variable domain of TCR clone 240526 (TRAV3, TRAJ22)
CAVRDRGGSASQLTF

SEQ ID NO: 481052 - protein, 16 aa, Homo sapiens
  CDR3 for beta chain variable domain of TCR clone 240526 (TRBV5-4, TRBJ2-3)
CASPQPGAGGSDTQYF

SEQ ID NO: 481053 - protein, 16 aa, Homo sapiens
  CDR3 for alpha chain variable domain of TCR clone 240527 (TRAV38-1, TRAJ56)
CAFMKRQTGANSKLTF

SEQ ID NO: 481054 - protein, 14 aa, Homo sapiens
  CDR3 for beta chain variable domain of TCR clone 240527 (TRBV7-2, TRBJ2-7)
CASSPKTSFYEQYF

SEQ ID NO: 481055 - protein, 17 aa, Homo sapiens
  CDR3 for alpha chain variable domain of TCR clone 240528 (TRAV13-1, TRAJ52)
CAAGRNACGTSYGKLTF

SEQ ID NO: 481056 - protein, 13 aa, Homo sapiens
  CDR3 for beta chain variable domain of TCR clone 240528 (TRBV7-2, TRBJ1-1)
CASNLKGAKVAFF

SEQ ID NO: 481057 - protein, 15 aa, Homo sapiens
  CDR3 for alpha chain variable domain of TCR clone 240529 (TRAV12-2, TRAJ53)
CAVKTGGGSNYKLTF

SEQ ID NO: 481058 - protein, 15 aa, Homo sapiens
  CDR3 for beta chain variable domain of TCR clone 240529 (TRBV5-1, TRBJ2-5)
CASSLGLGEIKTQYF

SEQ ID NO: 481059 - protein, 15 aa, Homo sapiens
  CDR3 for alpha chain variable domain of TCR clone 240530 (TRAV12-2, TRAJ53)
CAVNGGGGSYYKLTF

SEQ ID NO: 481060 - protein, 13 aa, Homo sapiens
  CDR3 for beta chain variable domain of TCR clone 240530 (TRBV3-1, TRBJ1-1)
CASSPGVITEAFF

SEQ ID NO: 481061 - protein, 14 aa, Homo sapiens
  CDR3 for alpha chain variable domain of TCR clone 240531 (TRAV12-2, TRAJ40)
CAVKIPSGTYKYIF

SEQ ID NO: 481062 - protein, 14 aa, Homo sapiens
  CDR3 for beta chain variable domain of TCR clone 240531 (TRBV20-1, TRBJ1-1)
CSGQTRIGGTEAFF

SEQ ID NO: 481063 - protein, 13 aa, Homo sapiens
  CDR3 for alpha chain variable domain of TCR clone 240532 (TRAV3, TRAJ20)
CAVRPLNDYKLSF

SEQ ID NO: 481064 - protein, 12 aa, Homo sapiens
  CDR3 for beta chain variable domain of TCR clone 240532 (TRBV6-1, TRBJ2-1)
CATYGLNNEQIF

SEQ ID NO: 481065 - protein, 12 aa, Homo sapiens
  CDR3 for alpha chain variable domain of TCR clone 240533 (TRAV17, TRAJ20)
CATYSSDYKLSF

SEQ ID NO: 481066 - protein, 12 aa, Homo sapiens
  CDR3 for beta chain variable domain of TCR clone 240533 (TRBV11-2, TRBJ2-2)
CASSLGGGELFF

SEQ ID NO: 481067 - protein, 15 aa, Homo sapiens
  CDR3 for alpha chain variable domain of TCR clone 240534 (TRAV17, TRAJ10)
CATFLLTGGGNKLTF

SEQ ID NO: 481068 - protein, 16 aa, Homo sapiens
  CDR3 for beta chain variable domain of TCR clone 240534 (TRBV7-9, TRBJ2-3)
CASSPWREVGTDTQYF

SEQ ID NO: 481069 - protein, 14 aa, Homo sapiens
  CDR3 for alpha chain variable domain of TCR clone 240535 (TRAV8-4, TRAJ9)
CAVRINTGGFKTIF

SEQ ID NO: 481070 - protein, 14 aa, Homo sapiens
  CDR3 for beta chain variable domain of TCR clone 240535 (TRBV20-1, TRBJ2-4)
CSASGRVGENIQYF

SEQ ID NO: 481071 - protein, 13 aa, Homo sapiens
  CDR3 for alpha chain variable domain of TCR clone 240536 (TRAV30, TRAJ39)
CGTEKNAGNMLTF

SEQ ID NO: 481072 - protein, 16 aa, Homo sapiens
  CDR3 for beta chain variable domain of TCR clone 240536 (TRBV12-4, TRBJ1-5)
CASSRPVGGSNQPQHF

SEQ ID NO: 481073 - protein, 11 aa, Homo sapiens
  CDR3 for alpha chain variable domain of TCR clone 240537 (TRAV12-3, TRAJ27)
CAMANAGRSTF

SEQ ID NO: 481074 - protein, 13 aa, Homo sapiens
  CDR3 for beta chain variable domain of TCR clone 240537 (TRBV9, TRBJ2-7)
CASSVAEYYEQYF

SEQ ID NO: 481075 - protein, 12 aa, Homo sapiens
  CDR3 for alpha chain variable domain of TCR clone 240538 (TRAV12-3, TRAJ17)
CAMTLTGNKLTF

SEQ ID NO: 481076 - protein, 18 aa, Homo sapiens
  CDR3 for beta chain variable domain of TCR clone 240538 (TRBV4-3, TRBJ1-6)
CASSQETPASSYNSPLHC

SEQ ID NO: 481077 - protein, 17 aa, Homo sapiens
  CDR3 for alpha chain variable domain of TCR clone 240539 (TRAV3, TRAJ42)
CAMRDRDYGGSQGNLIF

SEQ ID NO: 481078 - protein, 15 aa, Homo sapiens
  CDR3 for beta chain variable domain of TCR clone 240539 (TRBV29-1, TRBJ2-1)
CSVPTGLALYNEQFF

SEQ ID NO: 481079 - protein, 12 aa, Homo sapiens
  CDR3 for alpha chain variable domain of TCR clone 240540 (TRAV17, TRAJ57)
CATDGGSEKLVF

SEQ ID NO: 481080 - protein, 12 aa, Homo sapiens
  CDR3 for beta chain variable domain of TCR clone 240540 (TRBV29-1, TRBJ2-2)
CSVDKYTGEVFF

SEQ ID NO: 481081 - protein, 13 aa, Homo sapiens
  CDR3 for alpha chain variable domain of TCR clone 240541 (TRAV2, TRAJ40)
CAVVTSGTYKYIL

SEQ ID NO: 481082 - protein, 15 aa, Homo sapiens
  CDR3 for beta chain variable domain of TCR clone 240541 (TRBV3-1, TRBJ2-2)
CASSTTTGPTGELFF

SEQ ID NO: 481083 - protein, 16 aa, Homo sapiens
  CDR3 for alpha chain variable domain of TCR clone 240542 (TRAV23/DV6, TRAJ9)
CAASIGGNTGGFKTIF

SEQ ID NO: 481084 - protein, 14 aa, Homo sapiens
  CDR3 for beta chain variable domain of TCR clone 240542 (TRBV7-2, TRBJ2-1)
CASSRGGARNEQFF

SEQ ID NO: 481085 - protein, 14 aa, Homo sapiens
  CDR3 for alpha chain variable domain of TCR clone 240543 (TRAV29/DV5, TRAJ37)
CAASGSGKPGKLIF

SEQ ID NO: 481086 - protein, 17 aa, Homo sapiens
  CDR3 for beta chain variable domain of TCR clone 240543 (TRBV4-1, TRBJ2-7)
CASSPFLTSGGVVEQYF

SEQ ID NO: 481087 - protein, 12 aa, Homo sapiens
  CDR3 for alpha chain variable domain of TCR clone 240544 (TRAV17, TRAJ12)
CATLRSSYKLIF

SEQ ID NO: 481088 - protein, 13 aa, Homo sapiens
  CDR3 for beta chain variable domain of TCR clone 240544 (TRBV7-3, TRBJ2-5)
CASSFRGGETQYF

SEQ ID NO: 481089 - protein, 13 aa, Homo sapiens
  CDR3 for alpha chain variable domain of TCR clone 240545 (TRAV21, TRAJ57)
CAVTQGGSEKLVF

SEQ ID NO: 481090 - protein, 15 aa, Homo sapiens
  CDR3 for beta chain variable domain of TCR clone 240545 (TRBV20-1, TRBJ1-1)
CSASRGVTGNTEAFF

SEQ ID NO: 481091 - protein, 12 aa, Homo sapiens
  CDR3 for alpha chain variable domain of TCR clone 240546 (TRAV8-3, TRAJ4)
PAFSGCYNKLIF

SEQ ID NO: 481092 - protein, 13 aa, Homo sapiens
  CDR3 for beta chain variable domain of TCR clone 240546 (TRBV20-1, TRBJ1-3)
CSAGAYSGNTIYF

SEQ ID NO: 481093 - protein, 18 aa, Homo sapiens
  CDR3 for alpha chain variable domain of TCR clone 240547 (TRAV26-1, TRAJ20)
CCVLLHRQSRSNDYKLSF

SEQ ID NO: 481094 - protein, 15 aa, Homo sapiens
  CDR3 for beta chain variable domain of TCR clone 240547 (TRBV19, TRBJ1-2)
CASSVGQVLNYGYTF

SEQ ID NO: 481095 - protein, 14 aa, Homo sapiens
  CDR3 for alpha chain variable domain of TCR clone 240548 (TRAV12-2, TRAJ13)
CAVKKTGGYQKVTF

SEQ ID NO: 481096 - protein, 13 aa, Homo sapiens
  CDR3 for beta chain variable domain of TCR clone 240548 (TRBV4-2, TRBJ1-1)
CASSQAGNTEAFF

SEQ ID NO: 481097 - protein, 14 aa, Homo sapiens
  CDR3 for alpha chain variable domain of TCR clone 240549 (TRAV12-2, TRAJ6)
CASKWGGGSYIPTF

SEQ ID NO: 481098 - protein, 13 aa, Homo sapiens
  CDR3 for beta chain variable domain of TCR clone 240549 (TRBV2, TRBJ1-1)
CASSEGGNTETFF

SEQ ID NO: 481099 - protein, 16 aa, Homo sapiens
  CDR3 for alpha chain variable domain of TCR clone 240550 (TRAV12-2, TRAJ10)
CAVNRVLTGGGNKLTF

SEQ ID NO: 481100 - protein, 12 aa, Homo sapiens
  CDR3 for beta chain variable domain of TCR clone 240550 (TRBV28, TRBJ2-7)
CASRFSSYERYF

SEQ ID NO: 481101 - protein, 11 aa, Homo sapiens
  CDR3 for alpha chain variable domain of TCR clone 240551 (TRAV21, TRAJ17)
CAAPAGNKLTF

SEQ ID NO: 481102 - protein, 13 aa, Homo sapiens
  CDR3 for beta chain variable domain of TCR clone 240551 (TRBV24-1, TRBJ2-2)
CATSDWSTGELFF

SEQ ID NO: 481103 - protein, 12 aa, Homo sapiens
  CDR3 for alpha chain variable domain of TCR clone 240552 (TRAV21, TRAJ31)
CVLSGNNARIMF

SEQ ID NO: 481104 - protein, 16 aa, Homo sapiens
  CDR3 for beta chain variable domain of TCR clone 240552 (TRBV27, TRBJ2-5)
CASSFGPGGTKETQYF

SEQ ID NO: 481105 - protein, 12 aa, Homo sapiens
  CDR3 for alpha chain variable domain of TCR clone 240553 (TRAV36/DV7, TRAJ17)
CAVEAAGNKLTF

SEQ ID NO: 481106 - protein, 12 aa, Homo sapiens
  CDR3 for beta chain variable domain of TCR clone 240553 (TRBV7-8, TRBJ2-7)
CASSLGDREQYF

SEQ ID NO: 481107 - protein, 15 aa, Homo sapiens
  CDR3 for alpha chain variable domain of TCR clone 240554 (TRAV21, TRAJ53)
CATLNSGGSNYKLTF

SEQ ID NO: 481108 - protein, 13 aa, Homo sapiens
  CDR3 for beta chain variable domain of TCR clone 240554 (TRBV12-4, TRBJ2-7)
CASRFVPTAEQYF

SEQ ID NO: 481109 - protein, 11 aa, Homo sapiens
  CDR3 for alpha chain variable domain of TCR clone 240555 (TRAV13-1, TRAJ6)
CATLGSYIPTF

SEQ ID NO: 481110 - protein, 16 aa, Homo sapiens
  CDR3 for beta chain variable domain of TCR clone 240555 (TRBV19, TRBJ2-2)
CASRSPGTGATGELFF

SEQ ID NO: 481111 - protein, 18 aa, Homo sapiens
  CDR3 for alpha chain variable domain of TCR clone 240556 (TRAV21, TRAJ52)
CAVRPSPAGGTSYGKLTF

SEQ ID NO: 481112 - protein, 17 aa, Homo sapiens
  CDR3 for beta chain variable domain of TCR clone 240556 (TRBV4-1, TRBJ1-4)
CASSQEGPRGVEEKLLF

SEQ ID NO: 481113 - protein, 13 aa, Homo sapiens
  CDR3 for alpha chain variable domain of TCR clone 240557 (TRAV29/DV5, TRAJ31)
CAASRNNNARLMF

SEQ ID NO: 481114 - protein, 13 aa, Homo sapiens
  CDR3 for beta chain variable domain of TCR clone 240557 (TRBV27, TRBJ2-7)
CASSLTTGYEQYF

SEQ ID NO: 481115 - protein, 12 aa, Homo sapiens
  CDR3 for alpha chain variable domain of TCR clone 240558 (TRAV13-1, TRAJ21)
CAAKECFNKFYF

SEQ ID NO: 481116 - protein, 14 aa, Homo sapiens
  CDR3 for beta chain variable domain of TCR clone 240558 (TRBV7-2, TRBJ2-7)
CASSPKTSFYEQYF

SEQ ID NO: 481117 - protein, 13 aa, Homo sapiens
  CDR3 for alpha chain variable domain of TCR clone 240559 (TRAV12-3, TRAJ33)
CAMSANSNYQLIW

SEQ ID NO: 481118 - protein, 14 aa, Homo sapiens
  CDR3 for beta chain variable domain of TCR clone 240559 (TRBV5-1, TRBJ1-5)
CASSLGQGAQPQHF

SEQ ID NO: 481119 - protein, 11 aa, Homo sapiens
  CDR3 for alpha chain variable domain of TCR clone 240560 (TRAV12-1, TRAJ30)
CVVNVQDKIIF

SEQ ID NO: 481120 - protein, 12 aa, Homo sapiens
  CDR3 for beta chain variable domain of TCR clone 240560 (TRBV27, TRBJ2-2)
CASKLFTGELFF

SEQ ID NO: 481121 - protein, 18 aa, Homo sapiens
  CDR3 for alpha chain variable domain of TCR clone 240561 (TRAV13-1, TRAJ52)
CAAKNPNAGGTSYGKLPF

SEQ ID NO: 481122 - protein, 18 aa, Homo sapiens
  CDR3 for beta chain variable domain of TCR clone 240561 (TRBV12-4, TRBJ2-4)
CASSRTGAVDVAKNIQYF

SEQ ID NO: 481123 - protein, 12 aa, Homo sapiens
  CDR3 for alpha chain variable domain of TCR clone 240562 (TRAV12-1, TRAJ40)
CVFYSGTYKYIF

SEQ ID NO: 481124 - protein, 17 aa, Homo sapiens
  CDR3 for beta chain variable domain of TCR clone 240562 (TRBV20-1, TRBJ2-1)
CSASSSGLAGSYNEQFF

SEQ ID NO: 481125 - protein, 16 aa, Homo sapiens
  CDR3 for alpha chain variable domain of TCR clone 240563 (TRAV14/DV4, TRAJ20)
CAMREGRSRDDYKLSV

SEQ ID NO: 481126 - protein, 17 aa, Homo sapiens
  CDR3 for beta chain variable domain of TCR clone 240563 (TRBV15, TRBJ1-1)
CATSRVGGADGDTEAFF

SEQ ID NO: 481127 - protein, 13 aa, Homo sapiens
  CDR3 for alpha chain variable domain of TCR clone 240564 (TRAV2, TRAJ40)
CAVCTSGTYKYIF

SEQ ID NO: 481128 - protein, 14 aa, Homo sapiens
  CDR3 for beta chain variable domain of TCR clone 240564 (TRBV19, TRBJ2-1)
CASPTCVLSGEQFF

SEQ ID NO: 481129 - protein, 13 aa, Homo sapiens
  CDR3 for alpha chain variable domain of TCR clone 240565 (TRAV22, TRAJ29)
CAVGGSGNTPLVF

SEQ ID NO: 481130 - protein, 14 aa, Homo sapiens
  CDR3 for beta chain variable domain of TCR clone 240565 (TRBV19, TRBJ1-5)
CASRAPDSFLSQHF

SEQ ID NO: 481131 - protein, 11 aa, Homo sapiens
  CDR3 for alpha chain variable domain of TCR clone 240566 (TRAV3, TRAJ21)
CAVGNFNKFYF

SEQ ID NO: 481132 - protein, 13 aa, Homo sapiens
  CDR3 for beta chain variable domain of TCR clone 240566 (TRBV7-6, TRBJ1-2)
CASSLVADYGYTF

SEQ ID NO: 481133 - protein, 14 aa, Homo sapiens
  CDR3 for alpha chain variable domain of TCR clone 240567 (TRAV2, TRAJ37)
CAVDFTSNTGKLIF

SEQ ID NO: 481134 - protein, 13 aa, Homo sapiens
  CDR3 for beta chain variable domain of TCR clone 240567 (TRBV2, TRBJ1-1)
CASSEGGNTEAFF

SEQ ID NO: 481135 - protein, 12 aa, Homo sapiens
  CDR3 for alpha chain variable domain of TCR clone 240568 (TRAV2, TRAJ9)
CAVGAGGFKTIF

SEQ ID NO: 481136 - protein, 15 aa, Homo sapiens
  CDR3 for beta chain variable domain of TCR clone 240568 (TRBV28, TRBJ2-1)
CASSIIAGGRSEQFF

SEQ ID NO: 481137 - protein, 10 aa, Homo sapiens
  CDR3 for alpha chain variable domain of TCR clone 240569 (TRAV36/DV7, TRAJ56)
CAGPAEELTF

SEQ ID NO: 481138 - protein, 13 aa, Homo sapiens
  CDR3 for beta chain variable domain of TCR clone 240569 (TRBV7-9, TRBJ2-7)
CASSFWSSYEQYF

SEQ ID NO: 481139 - protein, 16 aa, Homo sapiens
  CDR3 for alpha chain variable domain of TCR clone 240570 (TRAV12-3, TRAJ53)
CAMSVGSGGSNYKLTF

SEQ ID NO: 481140 - protein, 11 aa, Homo sapiens
  CDR3 for beta chain variable domain of TCR clone 240570 (TRBV29-1, TRBJ2-5)
CSVATGETQYF

SEQ ID NO: 481141 - protein, 17 aa, Homo sapiens
  CDR3 for alpha chain variable domain of TCR clone 240571 (TRAV12-2, TRAJ52)
CAVNPYAGGTSYGKLTF

SEQ ID NO: 481142 - protein, 13 aa, Homo sapiens
  CDR3 for beta chain variable domain of TCR clone 240571 (TRBV24-1, TRBJ2-2)
CATSDWSTGELFF

SEQ ID NO: 481143 - protein, 16 aa, Homo sapiens
  CDR3 for alpha chain variable domain of TCR clone 240572 (TRAV1-2, TRAJ10)
CSVRGVLTGGGNKLTC

SEQ ID NO: 481144 - protein, 15 aa, Homo sapiens
  CDR3 for beta chain variable domain of TCR clone 240572 (TRBV18, TRBJ1-1)
CASSPRQGENTEAFF

SEQ ID NO: 481145 - protein, 10 aa, Homo sapiens
  CDR3 for alpha chain variable domain of TCR clone 240573 (TRAV21, TRAJ31)
FAVDNARLMF

SEQ ID NO: 481146 - protein, 13 aa, Homo sapiens
  CDR3 for beta chain variable domain of TCR clone 240573 (TRBV4-1, TRBJ1-1)
CASSRKMNTEAFF

SEQ ID NO: 481147 - protein, 14 aa, Homo sapiens
  CDR3 for alpha chain variable domain of TCR clone 240574 (TRAV3, TRAJ27)
CAVRDDTNAGKSTF

SEQ ID NO: 481148 - protein, 12 aa, Homo sapiens
  CDR3 for beta chain variable domain of TCR clone 240574 (TRBV24-1, TRBJ2-2)
CATSDPGLTGLQ

SEQ ID NO: 481149 - protein, 13 aa, Homo sapiens
  CDR3 for alpha chain variable domain of TCR clone 240575 (TRAV17, TRAJ22)
CAGRRGSAWQLTF

SEQ ID NO: 481150 - protein, 14 aa, Homo sapiens
  CDR3 for beta chain variable domain of TCR clone 240575 (TRBV19, TRBJ1-1)
CASSITGWETEAFF

SEQ ID NO: 481151 - protein, 17 aa, Homo sapiens
  CDR3 for alpha chain variable domain of TCR clone 240576 (TRAV3, TRAJ6)
CAVRVGPRAGGSYIPTF

SEQ ID NO: 481152 - protein, 14 aa, Homo sapiens
  CDR3 for beta chain variable domain of TCR clone 240576 (TRBV6-1, TRBJ1-3)
CASVQGGGGNTIYF

SEQ ID NO: 481153 - protein, 10 aa, Homo sapiens
  CDR3 for alpha chain variable domain of TCR clone 240577 (TRAV16, TRAJ20)
CALSGASRQL

SEQ ID NO: 481154 - protein, 13 aa, Homo sapiens
  CDR3 for beta chain variable domain of TCR clone 240577 (TRBV7-3, TRBJ2-1)
CASSLDSYNEQFF

SEQ ID NO: 481155 - protein, 14 aa, Homo sapiens
  CDR3 for alpha chain variable domain of TCR clone 240578 (TRAV38-1, TRAJ29)
CAFITPSENTPFVF

SEQ ID NO: 481156 - protein, 14 aa, Homo sapiens
  CDR3 for beta chain variable domain of TCR clone 240578 (TRBV18, TRBJ2-7)
CASSPRGGAYEQYF

SEQ ID NO: 481157 - protein, 14 aa, Homo sapiens
  CDR3 for alpha chain variable domain of TCR clone 240579 (TRAV8-3, TRAJ4)
CAVGAAGGYNKLSF

SEQ ID NO: 481158 - protein, 13 aa, Homo sapiens
  CDR3 for beta chain variable domain of TCR clone 240579 (TRBV3-1, TRBJ1-1)
CASSPGVITEAFF

SEQ ID NO: 481159 - protein, 13 aa, Homo sapiens
  CDR3 for alpha chain variable domain of TCR clone 240580 (TRAV2, TRAJ40)
CAVATSGTYKYIF

SEQ ID NO: 481160 - protein, 15 aa, Homo sapiens
  CDR3 for beta chain variable domain of TCR clone 240580 (TRBV29-1, TRBJ2-1)
CSGRGRKSSYNEQFF

SEQ ID NO: 481161 - protein, 14 aa, Homo sapiens
  CDR3 for alpha chain variable domain of TCR clone 240581 (TRAV17, TRAJ45)
CATASGGGADGLTF

SEQ ID NO: 481162 - protein, 12 aa, Homo sapiens
  CDR3 for beta chain variable domain of TCR clone 240581 (TRBV11-2, TRBJ2-1)
CASSPGNNEQFF

SEQ ID NO: 481163 - protein, 21 aa, Homo sapiens
  CDR3 for alpha chain variable domain of TCR clone 240582 (TRAV1-1, TRAJ6)
CLLLLRCERLERTGESYIPTF

SEQ ID NO: 481164 - protein, 18 aa, Homo sapiens
  CDR3 for beta chain variable domain of TCR clone 240582 (TRBV6-6, TRBJ1-3)
CASSYSKWDSISGNTIYF

SEQ ID NO: 481165 - protein, 13 aa, Homo sapiens
  CDR3 for alpha chain variable domain of TCR clone 240583 (TRAV21, TRAJ36)
CAVIKTGANNLFF

SEQ ID NO: 481166 - protein, 15 aa, Homo sapiens
  CDR3 for beta chain variable domain of TCR clone 240583 (TRBV19, TRBJ1-2)
CASSVGQVLNYGYTF

SEQ ID NO: 481167 - protein, 12 aa, Homo sapiens
  CDR3 for alpha chain variable domain of TCR clone 240584 (TRAV8-6, TRAJ49)
CAVSEPGTQFYF

SEQ ID NO: 481168 - protein, 13 aa, Homo sapiens
  CDR3 for beta chain variable domain of TCR clone 240584 (TRBV3-1, TRBJ2-5)
CASSPGLQETQYF

SEQ ID NO: 481169 - protein, 14 aa, Homo sapiens
  CDR3 for alpha chain variable domain of TCR clone 240585 (TRAV35, TRAJ46)
CAGPQKSSGDKLTF

SEQ ID NO: 481170 - protein, 15 aa, Homo sapiens
  CDR3 for beta chain variable domain of TCR clone 240585 (TRBV3-1, TRBJ2-5)
CASSANLGGPETQYF

SEQ ID NO: 481171 - protein, 23 aa, Homo sapiens
  CDR3 for alpha chain variable domain of TCR clone 240586 (TRAV26-1, TRAJ38)
CIADNAGNNHIQNPDPAVYQLRD

SEQ ID NO: 481172 - protein, 18 aa, Homo sapiens
  CDR3 for beta chain variable domain of TCR clone 240586 (TRBV11-2, TRBJ2-3)
CASSLGGASRGAPNTQYF

SEQ ID NO: 481173 - protein, 14 aa, Homo sapiens
  CDR3 for alpha chain variable domain of TCR clone 240587 (TRAV12-1, TRAJ30)
CVVRGMNTDDKIIF

SEQ ID NO: 481174 - protein, 14 aa, Homo sapiens
  CDR3 for beta chain variable domain of TCR clone 240587 (TRBV7-2, TRBJ2-1)
CASSLTSGNRRQFF

SEQ ID NO: 481175 - protein, 11 aa, Homo sapiens
  CDR3 for alpha chain variable domain of TCR clone 240588 (TRAV1-1, TRAJ31)
CAVPKQCQTHV

SEQ ID NO: 481176 - protein, 17 aa, Homo sapiens
  CDR3 for beta chain variable domain of TCR clone 240588 (TRBV27, TRBJ2-6)
CASSAGTRFSGANVLTF

SEQ ID NO: 481177 - protein, 11 aa, Homo sapiens
  CDR3 for alpha chain variable domain of TCR clone 240589 (TRAV21, TRAJ48)
CAVDGNEKLTF

SEQ ID NO: 481178 - protein, 16 aa, Homo sapiens
  CDR3 for beta chain variable domain of TCR clone 240589 (TRBV12-4, TRBJ1-5)
CASSSGPRGGNQPQHF

SEQ ID NO: 481179 - protein, 18 aa, Homo sapiens
  CDR3 for alpha chain variable domain of TCR clone 240590 (TRAV26-1, TRAJ23)
CLVRVGLEVWNQGGKLIF

SEQ ID NO: 481180 - protein, 16 aa, Homo sapiens
  CDR3 for beta chain variable domain of TCR clone 240590 (TRBV12-4, TRBJ2-5)
CASSFFVRGRQETQYF

SEQ ID NO: 481181 - protein, 14 aa, Homo sapiens
  CDR3 for alpha chain variable domain of TCR clone 240591 (TRAV2, TRAJ37)
CAVDVTSNTGKLIF

SEQ ID NO: 481182 - protein, 14 aa, Homo sapiens
  CDR3 for beta chain variable domain of TCR clone 240591 (TRBV5-1, TRBJ2-5)
CASSFGGSQETQYF

SEQ ID NO: 481183 - protein, 16 aa, Homo sapiens
  CDR3 for alpha chain variable domain of TCR clone 240592 (TRAV3, TRAJ10)
CAVRDMRAGGGNKLTF

SEQ ID NO: 481184 - protein, 14 aa, Homo sapiens
  CDR3 for beta chain variable domain of TCR clone 240592 (TRBV12-4, TRBJ1-1)
CASSLDGLNTEAFF

SEQ ID NO: 481185 - protein, 13 aa, Homo sapiens
  CDR3 for alpha chain variable domain of TCR clone 240593 (TRAV12-3, TRAJ52)
CAMSRTNAGGTSY

SEQ ID NO: 481186 - protein, 17 aa, Homo sapiens
  CDR3 for beta chain variable domain of TCR clone 240593 (TRBV7-3, TRBJ2-3)
CASSLMKRMRGADTQYF

SEQ ID NO: 481187 - protein, 15 aa, Homo sapiens
  CDR3 for alpha chain variable domain of TCR clone 240594 (TRAV17, TRAJ16)
CATALGFSDGQKLLF

SEQ ID NO: 481188 - protein, 14 aa, Homo sapiens
  CDR3 for beta chain variable domain of TCR clone 240594 (TRBV20-1, TRBJ2-7)
CSARWTGGSYEQYF

SEQ ID NO: 481189 - protein, 12 aa, Homo sapiens
  CDR3 for alpha chain variable domain of TCR clone 240595 (TRAV8-6, TRAJ11)
CAVSEGYSTLTF

SEQ ID NO: 481190 - protein, 14 aa, Homo sapiens
  CDR3 for beta chain variable domain of TCR clone 240595 (TRBV7-2, TRBJ2-7)
CASSPKTSFYEQYF

SEQ ID NO: 481191 - protein, 18 aa, Homo sapiens
  CDR3 for alpha chain variable domain of TCR clone 240596 (TRAV21, TRAJ52)
CAVRPSPAGGTSYGKLTF

SEQ ID NO: 481192 - protein, 14 aa, Homo sapiens
  CDR3 for beta chain variable domain of TCR clone 240596 (TRBV7-2, TRBJ2-2)
CASSLNSNTGELFF

SEQ ID NO: 481193 - protein, 14 aa, Homo sapiens
  CDR3 for alpha chain variable domain of TCR clone 240597 (TRAV23/DV6, TRAJ13)
CAAMYSGGYQKVTF

SEQ ID NO: 481194 - protein, 16 aa, Homo sapiens
  CDR3 for beta chain variable domain of TCR clone 240597 (TRBV25-1, TRBJ1-1)
CASSGDRDRGRIEAFF

SEQ ID NO: 481195 - protein, 16 aa, Homo sapiens
  CDR3 for alpha chain variable domain of TCR clone 240598 (TRAV14/DV4, TRAJ54)
CAMREGRIQGAQKRVF

SEQ ID NO: 481196 - protein, 16 aa, Homo sapiens
  CDR3 for beta chain variable domain of TCR clone 240598 (TRBV12-5, TRBJ2-5)
CASGPRTSGNQETQYF

SEQ ID NO: 481197 - protein, 13 aa, Homo sapiens
  CDR3 for alpha chain variable domain of TCR clone 240599 (TRAV26-1, TRAJ29)
CIVRRSGNTPLGF

SEQ ID NO: 481198 - protein, 16 aa, Homo sapiens
  CDR3 for beta chain variable domain of TCR clone 240599 (TRBV11-2, TRBJ2-7)
CASSLAPTGVNYEQYF

SEQ ID NO: 481199 - protein, 11 aa, Homo sapiens
  CDR3 for alpha chain variable domain of TCR clone 240600 (TRAV2, TRAJ33)
CAVDSNYQLIW

SEQ ID NO: 481200 - protein, 16 aa, Homo sapiens
  CDR3 for beta chain variable domain of TCR clone 240600 (TRBV24-1, TRBJ2-3)
CATSDRRQDLTDTQYF

SEQ ID NO: 481201 - protein, 14 aa, Homo sapiens
  CDR3 for alpha chain variable domain of TCR clone 240601 (TRAV12-2, TRAJ45)
CALPERGGADGLTF

SEQ ID NO: 481202 - protein, 14 aa, Homo sapiens
  CDR3 for beta chain variable domain of TCR clone 240601 (TRBV18, TRBJ1-5)
CVSSPGNSNQPQHF

SEQ ID NO: 481203 - protein, 14 aa, Homo sapiens
  CDR3 for alpha chain variable domain of TCR clone 240602 (TRAV9-2, TRAJ39)
CALYIYNAGNMLTF

SEQ ID NO: 481204 - protein, 16 aa, Homo sapiens
  CDR3 for beta chain variable domain of TCR clone 240602 (TRBV12-5, TRBJ2-5)
CASGTRTSGNQETQYF

SEQ ID NO: 481205 - protein, 13 aa, Homo sapiens
  CDR3 for alpha chain variable domain of TCR clone 240603 (TRAV12-1, TRAJ22)
CVVPSGSARQLTF

SEQ ID NO: 481206 - protein, 16 aa, Homo sapiens
  CDR3 for beta chain variable domain of TCR clone 240603 (TRBV12-5, TRBJ2-5)
CASGPRTSGNQETQYF

SEQ ID NO: 481207 - protein, 13 aa, Homo sapiens
  CDR3 for alpha chain variable domain of TCR clone 240604 (TRAV1-1, TRAJ38)
CASNAGNNHKLIW

SEQ ID NO: 481208 - protein, 14 aa, Homo sapiens
  CDR3 for beta chain variable domain of TCR clone 240604 (TRBV15, TRBJ2-1)
CATSGVEDYNEQFF

SEQ ID NO: 481209 - protein, 15 aa, Homo sapiens
  CDR3 for alpha chain variable domain of TCR clone 240605 (TRAV12-3, TRAJ10)
CASYLLTGGGNKLTF

SEQ ID NO: 481210 - protein, 15 aa, Homo sapiens
  CDR3 for beta chain variable domain of TCR clone 240605 (TRBV7-2, TRBJ1-6)
CASSLGPDRGMPLHF

SEQ ID NO: 481211 - protein, 17 aa, Homo sapiens
  CDR3 for alpha chain variable domain of TCR clone 240606 (TRAV38-2/DV8, TRAJ57)
CAYRSVLTQGGSEKLVF

SEQ ID NO: 481212 - protein, 13 aa, Homo sapiens
  CDR3 for beta chain variable domain of TCR clone 240606 (TRBV12-4, TRBJ2-5)
CACRKRGKETQYF

SEQ ID NO: 481213 - protein, 12 aa, Homo sapiens
  CDR3 for alpha chain variable domain of TCR clone 240607 (TRAV16, TRAJ10)
CSRTGGGNKLTF

SEQ ID NO: 481214 - protein, 16 aa, Homo sapiens
  CDR3 for beta chain variable domain of TCR clone 240607 (TRBV19, TRBJ2-1)
CASSIQAGGSYNEQFF

SEQ ID NO: 481215 - protein, 16 aa, Homo sapiens
  CDR3 for alpha chain variable domain of TCR clone 240608 (TRAV30, TRAJ24)
CGTGIVDADSWGKFQF

SEQ ID NO: 481216 - protein, 14 aa, Homo sapiens
  CDR3 for beta chain variable domain of TCR clone 240608 (TRBV6-1, TRBJ1-3)
CASVQGGGGNTIYF

SEQ ID NO: 481217 - protein, 11 aa, Homo sapiens
  CDR3 for alpha chain variable domain of TCR clone 240609 (TRAV1-2, TRAJ31)
CAVNNNARPMF

SEQ ID NO: 481218 - protein, 14 aa, Homo sapiens
  CDR3 for beta chain variable domain of TCR clone 240609 (TRBV19, TRBJ2-1)
CASPTFVLSGEQFF

SEQ ID NO: 481219 - protein, 13 aa, Homo sapiens
  CDR3 for alpha chain variable domain of TCR clone 240610 (TRAV3, TRAJ21)
CAVREPDFNKFYF

SEQ ID NO: 481220 - protein, 16 aa, Homo sapiens
  CDR3 for beta chain variable domain of TCR clone 240610 (TRBV5-4, TRBJ2-1)
CASSLALAGAYNEPFF

SEQ ID NO: 481221 - protein, 12 aa, Homo sapiens
  CDR3 for alpha chain variable domain of TCR clone 240611 (TRAV12-3, TRAJ17)
CAMTLTGNKLTF

SEQ ID NO: 481222 - protein, 15 aa, Homo sapiens
  CDR3 for beta chain variable domain of TCR clone 240611 (TRBV7-3, TRBJ2-1)
CASSYFRGTYNEQFF

SEQ ID NO: 481223 - protein, 11 aa, Homo sapiens
  CDR3 for alpha chain variable domain of TCR clone 240612 (TRAV1-2, TRAJ20)
CAVANDYKLSF

SEQ ID NO: 481224 - protein, 13 aa, Homo sapiens
  CDR3 for beta chain variable domain of TCR clone 240612 (TRBV7-3, TRBJ1-1)
CASSQDWGAEDFF

SEQ ID NO: 481225 - protein, 15 aa, Homo sapiens
  CDR3 for alpha chain variable domain of TCR clone 240613 (TRAV8-3, TRAJ11)
CAVGLLNSGYSTLTF

SEQ ID NO: 481226 - protein, 13 aa, Homo sapiens
  CDR3 for beta chain variable domain of TCR clone 240613 (TRBV2, TRBJ1-1)
CASSVSGYTEAFF

SEQ ID NO: 481227 - protein, 11 aa, Homo sapiens
  CDR3 for alpha chain variable domain of TCR clone 240614 (TRAV2, TRAJ33)
CAVESNYQLIW

SEQ ID NO: 481228 - protein, 14 aa, Homo sapiens
  CDR3 for beta chain variable domain of TCR clone 240614 (TRBV10-3, TRBJ2-2)
CAISETLNTGELFF

SEQ ID NO: 481229 - protein, 11 aa, Homo sapiens
  CDR3 for alpha chain variable domain of TCR clone 240615 (TRAV29/DV5, TRAJ37)
CATSNTGKLIF

SEQ ID NO: 481230 - protein, 12 aa, Homo sapiens
  CDR3 for beta chain variable domain of TCR clone 240615 (TRBV11-2, TRBJ2-2)
CASSLPTGQLFF

SEQ ID NO: 481231 - protein, 14 aa, Homo sapiens
  CDR3 for alpha chain variable domain of TCR clone 240616 (TRAV1-2, TRAJ16)
CAVNRFSDGQKLLF

SEQ ID NO: 481232 - protein, 18 aa, Homo sapiens
  CDR3 for beta chain variable domain of TCR clone 240616 (TRBV20-1, TRBJ2-6)
CSAETTQTHGSGANVLTF

SEQ ID NO: 481233 - protein, 14 aa, Homo sapiens
  CDR3 for alpha chain variable domain of TCR clone 240617 (TRAV13-1, TRAJ20)
CAARPGSNDYKLSF

SEQ ID NO: 481234 - protein, 15 aa, Homo sapiens
  CDR3 for beta chain variable domain of TCR clone 240617 (TRBV4-1, TRBJ2-7)
CASSHQGQGFDEQYF

SEQ ID NO: 481235 - protein, 15 aa, Homo sapiens
  CDR3 for alpha chain variable domain of TCR clone 240618 (TRAV2, TRAJ15)
CAVEARGQAGTALIF

SEQ ID NO: 481236 - protein, 13 aa, Homo sapiens
  CDR3 for beta chain variable domain of TCR clone 240618 (TRBV10-2, TRBJ2-7)
CSSGASGGYEQYF

SEQ ID NO: 481237 - protein, 14 aa, Homo sapiens
  CDR3 for alpha chain variable domain of TCR clone 240619 (TRAV25, TRAJ22)
CAVRSSGSARQLNF

SEQ ID NO: 481238 - protein, 16 aa, Homo sapiens
  CDR3 for beta chain variable domain of TCR clone 240619 (TRBV4-2, TRBJ1-1)
CASSPSPGRAAPEAFF

SEQ ID NO: 481239 - protein, 14 aa, Homo sapiens
  CDR3 for alpha chain variable domain of TCR clone 240620 (TRAV8-3, TRAJ4)
CAVGASGGHNKLIF

SEQ ID NO: 481240 - protein, 16 aa, Homo sapiens
  CDR3 for beta chain variable domain of TCR clone 240620 (TRBV7-2, TRBJ2-6)
CDSSERRASGANVLTF

SEQ ID NO: 481241 - protein, 14 aa, Homo sapiens
  CDR3 for alpha chain variable domain of TCR clone 240621 (TRAV38-1, TRAJ40)
CALRPTSGTYKYIF

SEQ ID NO: 481242 - protein, 12 aa, Homo sapiens
  CDR3 for beta chain variable domain of TCR clone 240621 (TRBV7-9, TRBJ2-7)
CASSIKREEQYF

SEQ ID NO: 481243 - protein, 14 aa, Homo sapiens
  CDR3 for alpha chain variable domain of TCR clone 240622 (TRAV12-2, TRAJ13)
CAVKKTGGYQKVTF

SEQ ID NO: 481244 - protein, 12 aa, Homo sapiens
  CDR3 for beta chain variable domain of TCR clone 240622 (TRBV20-1, TRBJ2-3)
CSARVGTDTQYF

SEQ ID NO: 481245 - protein, 14 aa, Homo sapiens
  CDR3 for alpha chain variable domain of TCR clone 240623 (TRAV35, TRAJ13)
CAGSPSGGYQKVTF

SEQ ID NO: 481246 - protein, 17 aa, Homo sapiens
  CDR3 for beta chain variable domain of TCR clone 240623 (TRBV7-6, TRBJ2-5)
CASSPGLADPWGDTQYF

SEQ ID NO: 481247 - protein, 12 aa, Homo sapiens
  CDR3 for alpha chain variable domain of TCR clone 240624 (TRAV12-3, TRAJ17)
CAMTLTGNKLTF

SEQ ID NO: 481248 - protein, 20 aa, Homo sapiens
  CDR3 for beta chain variable domain of TCR clone 240624 (TRBV7-8, TRBJ2-1)
CASSLAHRLAGVRSYNEQFF

SEQ ID NO: 481249 - protein, 17 aa, Homo sapiens
  CDR3 for alpha chain variable domain of TCR clone 240625 (TRAV3, TRAJ42)
CAVRDRDYGGSQGNLIF

SEQ ID NO: 481250 - protein, 14 aa, Homo sapiens
  CDR3 for beta chain variable domain of TCR clone 240625 (TRBV7-9, TRBJ2-7)
CASSPKTSFYEQYF

SEQ ID NO: 481251 - protein, 15 aa, Homo sapiens
  CDR3 for alpha chain variable domain of TCR clone 240626 (TRAV8-3, TRAJ11)
CAVGLLNSGYSTLTF

SEQ ID NO: 481252 - protein, 15 aa, Homo sapiens
  CDR3 for beta chain variable domain of TCR clone 240626 (TRBV7-2, TRBJ2-3)
CASSSTGLETDTQYF

SEQ ID NO: 481253 - protein, 15 aa, Homo sapiens
  CDR3 for alpha chain variable domain of TCR clone 240627 (TRAV27, TRAJ50)
CAGRERGTSYDKVIF

SEQ ID NO: 481254 - protein, 12 aa, Homo sapiens
  CDR3 for beta chain variable domain of TCR clone 240627 (TRBV14, TRBJ2-5)
CASSHLKETQYF

SEQ ID NO: 481255 - protein, 13 aa, Homo sapiens
  CDR3 for alpha chain variable domain of TCR clone 240628 (TRAV2, TRAJ40)
CAVVTSGTYKYIF

SEQ ID NO: 481256 - protein, 14 aa, Homo sapiens
  CDR3 for beta chain variable domain of TCR clone 240628 (TRBV27, TRBJ2-1)
CASRHLGGGKEQFF

SEQ ID NO: 481257 - protein, 18 aa, Homo sapiens
  CDR3 for alpha chain variable domain of TCR clone 240629 (TRAV26-1, TRAJ23)
CIVRVGLEVWNQGGKLIF

SEQ ID NO: 481258 - protein, 16 aa, Homo sapiens
  CDR3 for beta chain variable domain of TCR clone 240629 (TRBV12-4, TRBJ2-5)
CPSSFFVRGRQETQYF

SEQ ID NO: 481259 - protein, 13 aa, Homo sapiens
  CDR3 for alpha chain variable domain of TCR clone 240630 (TRAV23/DV6, TRAJ43)
CAASMGGNNDMRF

SEQ ID NO: 481260 - protein, 16 aa, Homo sapiens
  CDR3 for beta chain variable domain of TCR clone 240630 (TRBV13, TRBJ2-2)
CASSPRTGEHTGELFF

SEQ ID NO: 481261 - protein, 14 aa, Homo sapiens
  CDR3 for alpha chain variable domain of TCR clone 240631 (TRAV8-1, TRAJ34)
CALPRGTTSSSLGL

SEQ ID NO: 481262 - protein, 15 aa, Homo sapiens
  CDR3 for beta chain variable domain of TCR clone 240631 (TRBV2, TRBJ2-1)
CATLPSGLPYNEQFF

SEQ ID NO: 481263 - protein, 16 aa, Homo sapiens
  CDR3 for alpha chain variable domain of TCR clone 240632 (TRAV3, TRAJ3)
CAVRDRAKSSASNIIF

SEQ ID NO: 481264 - protein, 15 aa, Homo sapiens
  CDR3 for beta chain variable domain of TCR clone 240632 (TRBV27, TRBJ2-1)
CASSNGGGSSNEQFF

SEQ ID NO: 481265 - protein, 11 aa, Homo sapiens
  CDR3 for alpha chain variable domain of TCR clone 240633 (TRAV14/DV4, )
CAMREKSRTLT

SEQ ID NO: 481266 - protein, 14 aa, Homo sapiens
  CDR3 for beta chain variable domain of TCR clone 240633 (TRBV2, TRBJ2-1)
CASSDRAYYNEQFF

SEQ ID NO: 481267 - protein, 15 aa, Homo sapiens
  CDR3 for alpha chain variable domain of TCR clone 240634 (TRAV2, TRAJ15)
CAVEDRGQAGTALIF

SEQ ID NO: 481268 - protein, 15 aa, Homo sapiens
  CDR3 for beta chain variable domain of TCR clone 240634 (TRBV11-3, TRBJ2-3)
CASLKDGREGDTQYF

SEQ ID NO: 481269 - protein, 13 aa, Homo sapiens
  CDR3 for alpha chain variable domain of TCR clone 240635 (TRAV21, TRAJ32)
CAGSGGATNKLIF

SEQ ID NO: 481270 - protein, 15 aa, Homo sapiens
  CDR3 for beta chain variable domain of TCR clone 240635 (TRBV23-1, TRBJ2-1)
CASSQWPQLTMSSSS

SEQ ID NO: 481271 - protein, 18 aa, Homo sapiens
  CDR3 for alpha chain variable domain of TCR clone 240636 (TRAV4, TRAJ10)
CLVGDIPLLTGGGNKLTF

SEQ ID NO: 481272 - protein, 17 aa, Homo sapiens
  CDR3 for beta chain variable domain of TCR clone 240636 (TRBV11-2, TRBJ2-1)
CASSLYPPGVEYNEQFF

SEQ ID NO: 481273 - protein, 13 aa, Homo sapiens
  CDR3 for alpha chain variable domain of TCR clone 240637 (TRAV21, TRAJ20)
CAVGVFADYKLSF

SEQ ID NO: 481274 - protein, 16 aa, Homo sapiens
  CDR3 for beta chain variable domain of TCR clone 240637 (TRBV19, TRBJ2-1)
CASSKAGPSSYNEQFF

SEQ ID NO: 481275 - protein, 12 aa, Homo sapiens
  CDR3 for alpha chain variable domain of TCR clone 240638 (TRAV12-3, TRAJ20)
CAMVRGHYKLSF

SEQ ID NO: 481276 - protein, 12 aa, Homo sapiens
  CDR3 for beta chain variable domain of TCR clone 240638 (TRBV6-1, TRBJ2-7)
CASSDYSYEQYF

SEQ ID NO: 481277 - protein, 16 aa, Homo sapiens
  CDR3 for alpha chain variable domain of TCR clone 240639 (TRAV1-2, TRAJ16)
CAVNRFSDGQSCSLQG

SEQ ID NO: 481278 - protein, 16 aa, Homo sapiens
  CDR3 for beta chain variable domain of TCR clone 240639 (TRBV18, TRBJ1-4)
CASSLQTVATNEKLFF

SEQ ID NO: 481279 - protein, 10 aa, Homo sapiens
  CDR3 for alpha chain variable domain of TCR clone 240640 (TRAV8-1, TRAJ21)
CAGKGTKFYF

SEQ ID NO: 481280 - protein, 16 aa, Homo sapiens
  CDR3 for beta chain variable domain of TCR clone 240640 (TRBV7-2, TRBJ1-5)
CASSPWGPEGNQPQHF

SEQ ID NO: 481281 - protein, 17 aa, Homo sapiens
  CDR3 for alpha chain variable domain of TCR clone 240641 (TRAV3, TRAJ6)
CAVRDGPSAGGSYIPTF

SEQ ID NO: 481282 - protein, 12 aa, Homo sapiens
  CDR3 for beta chain variable domain of TCR clone 240641 (TRBV11-2, TRBJ2-2)
CASSLPTGELFF

SEQ ID NO: 481283 - protein, 15 aa, Homo sapiens
  CDR3 for alpha chain variable domain of TCR clone 240642 (TRAV2, TRAJ9)
CAVEDRGTGGFKTIF

SEQ ID NO: 481284 - protein, 13 aa, Homo sapiens
  CDR3 for beta chain variable domain of TCR clone 240642 (TRBV11-2, TRBJ2-5)
CASSSTGEETQYF

SEQ ID NO: 481285 - protein, 11 aa, Homo sapiens
  CDR3 for alpha chain variable domain of TCR clone 240643 (TRAV3, TRAJ17)
PRGAAGNKLTV

SEQ ID NO: 481286 - protein, 16 aa, Homo sapiens
  CDR3 for beta chain variable domain of TCR clone 240643 (TRBV7-6, TRBJ2-1)
CASSAPGPSSYNEQFF

SEQ ID NO: 481287 - protein, 18 aa, Homo sapiens
  CDR3 for alpha chain variable domain of TCR clone 240644 (TRAV21, TRAJ52)
CAVRPSPAGGTSYGKLTF

SEQ ID NO: 481288 - protein, 17 aa, Homo sapiens
  CDR3 for beta chain variable domain of TCR clone 240644 (TRBV28, TRBJ1-1)
CASSLSGTGYENTEAFF

SEQ ID NO: 481289 - protein, 13 aa, Homo sapiens
  CDR3 for alpha chain variable domain of TCR clone 240645 (TRAV20, TRAJ20)
CAVQAGSGYKLSF

SEQ ID NO: 481290 - protein, 15 aa, Homo sapiens
  CDR3 for beta chain variable domain of TCR clone 240645 (TRBV20-1, TRBJ2-7)
CSAREGRDSLYEQYF

SEQ ID NO: 481291 - protein, 18 aa, Homo sapiens
  CDR3 for alpha chain variable domain of TCR clone 240646 (TRAV12-3, TRAJ52)
CAMSRTNAGGTSYGKLTF

SEQ ID NO: 481292 - protein, 13 aa, Homo sapiens
  CDR3 for beta chain variable domain of TCR clone 240646 (TRBV20-1, TRBJ1-1)
CSAPLGGGTEAFF

SEQ ID NO: 481293 - protein, 12 aa, Homo sapiens
  CDR3 for alpha chain variable domain of TCR clone 240647 (TRAV12-3, TRAJ21)
CAMFNNFNKFYF

SEQ ID NO: 481294 - protein, 14 aa, Homo sapiens
  CDR3 for beta chain variable domain of TCR clone 240647 (TRBV28, TRBJ2-1)
CASSIRGTVGEQFF

SEQ ID NO: 481295 - protein, 18 aa, Homo sapiens
  CDR3 for alpha chain variable domain of TCR clone 240648 (TRAV8-4, TRAJ52)
RAVASFNAGGTSYGKLTF

SEQ ID NO: 481296 - protein, 14 aa, Homo sapiens
  CDR3 for beta chain variable domain of TCR clone 240648 (TRBV18, TRBJ1-5)
CASSRQQRNQPQHF

SEQ ID NO: 481297 - protein, 17 aa, Homo sapiens
  CDR3 for alpha chain variable domain of TCR clone 240649 (TRAV13-1, TRAJ52)
CSASSGAGGTSYGKLTF

SEQ ID NO: 481298 - protein, 12 aa, Homo sapiens
  CDR3 for beta chain variable domain of TCR clone 240649 (TRBV7-8, TRBJ2-7)
CASSLGDREQYF

SEQ ID NO: 481299 - protein, 14 aa, Homo sapiens
  CDR3 for alpha chain variable domain of TCR clone 240650 (TRAV29/DV5, TRAJ49)
CAASLSNTGNQFYF

SEQ ID NO: 481300 - protein, 21 aa, Homo sapiens
  CDR3 for beta chain variable domain of TCR clone 240650 (TRBV9, TRBJ2-5)
CGSRGRLAGGPEDPVLRARHA

SEQ ID NO: 481301 - protein, 17 aa, Homo sapiens
  CDR3 for alpha chain variable domain of TCR clone 240651 (TRAV35, TRAJ38)
CAGQLQRNAGNNRKLIW

SEQ ID NO: 481302 - protein, 16 aa, Homo sapiens
  CDR3 for beta chain variable domain of TCR clone 240651 (TRBV5-1, TRBJ1-1)
CASSLSQGRRGTEAFF

SEQ ID NO: 481303 - protein, 11 aa, Homo sapiens
  CDR3 for alpha chain variable domain of TCR clone 240652 (TRAV3, TRAJ21)
CAVGNFNKFYF

SEQ ID NO: 481304 - protein, 14 aa, Homo sapiens
  CDR3 for beta chain variable domain of TCR clone 240652 (TRBV19, TRBJ1-3)
CASSIHGFGNTIYF

SEQ ID NO: 481305 - protein, 10 aa, Homo sapiens
  CDR3 for alpha chain variable domain of TCR clone 240653 (TRAV26-1, TRAJ40)
CIAGTYKYIF

SEQ ID NO: 481306 - protein, 15 aa, Homo sapiens
  CDR3 for beta chain variable domain of TCR clone 240653 (TRBV7-8, TRBJ2-7)
CASSLERAGSYEQYF

SEQ ID NO: 481307 - protein, 12 aa, Homo sapiens
  CDR3 for alpha chain variable domain of TCR clone 240654 (TRAV13-1, TRAJ5)
CAFDTGRRALTF

SEQ ID NO: 481308 - protein, 12 aa, Homo sapiens
  CDR3 for beta chain variable domain of TCR clone 240654 (TRBV28, TRBJ2-1)
CASSFYRHEQFF

SEQ ID NO: 481309 - protein, 15 aa, Homo sapiens
  CDR3 for alpha chain variable domain of TCR clone 240655 (TRAV35, TRAJ40)
CAGQLGTSGTYKYIF

SEQ ID NO: 481310 - protein, 14 aa, Homo sapiens
  CDR3 for beta chain variable domain of TCR clone 240655 (TRBV7-3, TRBJ2-1)
CASSLAGGKNEQFF

SEQ ID NO: 481311 - protein, 12 aa, Homo sapiens
  CDR3 for alpha chain variable domain of TCR clone 240656 (TRAV12-1, TRAJ40)
CVVYSGTYKYIF

SEQ ID NO: 481312 - protein, 12 aa, Homo sapiens
  CDR3 for beta chain variable domain of TCR clone 240656 (TRBV20-1, TRBJ2-1)
CSAQYTYNEQFF

SEQ ID NO: 481313 - protein, 13 aa, Homo sapiens
  CDR3 for alpha chain variable domain of TCR clone 240657 (TRAV29/DV5, TRAJ31)
CAASRHNNARLMF

SEQ ID NO: 481314 - protein, 13 aa, Homo sapiens
  CDR3 for beta chain variable domain of TCR clone 240657 (TRBV7-2, TRBJ2-4)
CASSREHANIQYF

SEQ ID NO: 481315 - protein, 12 aa, Homo sapiens
  CDR3 for alpha chain variable domain of TCR clone 240658 (TRAV13-1, TRAJ49)
CAASPMGYQFYF

SEQ ID NO: 481316 - protein, 13 aa, Homo sapiens
  CDR3 for beta chain variable domain of TCR clone 240658 (TRBV20-1, TRBJ2-2)
CSASAASTGELFF

SEQ ID NO: 481317 - protein, 13 aa, Homo sapiens
  CDR3 for alpha chain variable domain of TCR clone 240659 (TRAV8-6, TRAJ49)
CAVITNTGNQFYL

SEQ ID NO: 481318 - protein, 17 aa, Homo sapiens
  CDR3 for beta chain variable domain of TCR clone 240659 (TRBV11-2, TRBJ2-1)
CASSLYPPGVEYSEQFF

SEQ ID NO: 481319 - protein, 14 aa, Homo sapiens
  CDR3 for alpha chain variable domain of TCR clone 240660 (TRAV1-2, TRAJ16)
CAVNRFSDGQKLLF

SEQ ID NO: 481320 - protein, 13 aa, Homo sapiens
  CDR3 for beta chain variable domain of TCR clone 240660 (TRBV20-1, TRBJ1-1)
CSARAGGNTEAVF

SEQ ID NO: 481321 - protein, 14 aa, Homo sapiens
  CDR3 for alpha chain variable domain of TCR clone 240661 (TRAV29/DV5, TRAJ36)
CAARRKTGANNLFF

SEQ ID NO: 481322 - protein, 16 aa, Homo sapiens
  CDR3 for beta chain variable domain of TCR clone 240661 (TRBV6-1, TRBJ2-1)
CASILRQGSSYNGQFF

SEQ ID NO: 481323 - protein, 13 aa, Homo sapiens
  CDR3 for alpha chain variable domain of TCR clone 240662 (TRAV13-2, TRAJ15)
FAERPQAGTALIF

SEQ ID NO: 481324 - protein, 15 aa, Homo sapiens
  CDR3 for beta chain variable domain of TCR clone 240662 (TRBV11-2, TRBJ2-7)
CASRFPGTGGYEQYF

SEQ ID NO: 481325 - protein, 19 aa, Homo sapiens
  CDR3 for alpha chain variable domain of TCR clone 240663 (TRAV26-1, TRAJ52)
CIVRAHRNAGGTSYGKLTF

SEQ ID NO: 481326 - protein, 15 aa, Homo sapiens
  CDR3 for beta chain variable domain of TCR clone 240663 (TRBV29-1, TRBJ2-1)
CSGRDMKSSYNEQFF

SEQ ID NO: 481327 - protein, 14 aa, Homo sapiens
  CDR3 for alpha chain variable domain of TCR clone 240664 (TRAV17, TRAJ53)
CATDAGGSNYKLTF

SEQ ID NO: 481328 - protein, 16 aa, Homo sapiens
  CDR3 for beta chain variable domain of TCR clone 240664 (TRBV4-1, TRBJ1-1)
CAGSQDAGMGNTEAFF

SEQ ID NO: 481329 - protein, 13 aa, Homo sapiens
  CDR3 for alpha chain variable domain of TCR clone 240665 (TRAV21, TRAJ57)
CAVTQGGSEKLFF

SEQ ID NO: 481330 - protein, 16 aa, Homo sapiens
  CDR3 for beta chain variable domain of TCR clone 240665 (TRBV29-1, TRBJ2-7)
YSVEDAEDGTAYEQYF

SEQ ID NO: 481331 - protein, 13 aa, Homo sapiens
  CDR3 for alpha chain variable domain of TCR clone 240666 (TRAV24, TRAJ44)
CALLTGTASKLTF

SEQ ID NO: 481332 - protein, 13 aa, Homo sapiens
  CDR3 for beta chain variable domain of TCR clone 240666 (TRBV7-3, TRBJ1-1)
CASSQDWGAEAFF

SEQ ID NO: 481333 - protein, 15 aa, Homo sapiens
  CDR3 for alpha chain variable domain of TCR clone 240667 (TRAV3, TRAJ3)
CAVRDRDSSASKIIF

SEQ ID NO: 481334 - protein, 14 aa, Homo sapiens
  CDR3 for beta chain variable domain of TCR clone 240667 (TRBV7-3, TRBJ1-5)
RASSFSGCNQPQHF

SEQ ID NO: 481335 - protein, 15 aa, Homo sapiens
  CDR3 for alpha chain variable domain of TCR clone 240668 (TRAV39, TRAJ32)
CAVDMEGGATKKLIF

SEQ ID NO: 481336 - protein, 17 aa, Homo sapiens
  CDR3 for beta chain variable domain of TCR clone 240668 (TRBV7-2, TRBJ1-4)
CASSFKAGPTTNEKLFF

SEQ ID NO: 481337 - protein, 20 aa, Homo sapiens
  CDR3 for alpha chain variable domain of TCR clone 240669 (TRAV12-2, TRAJ41)
SLFIRDSQPSDSATPEALNF

SEQ ID NO: 481338 - protein, 18 aa, Homo sapiens
  CDR3 for beta chain variable domain of TCR clone 240669 (TRBV12-4, TRBJ2-2)
CASSRSGGAIPNTGELFF

SEQ ID NO: 481339 - protein, 15 aa, Homo sapiens
  CDR3 for alpha chain variable domain of TCR clone 240670 (TRAV17, TRAJ40)
CATVSSTSRTYKYIF

SEQ ID NO: 481340 - protein, 15 aa, Homo sapiens
  CDR3 for beta chain variable domain of TCR clone 240670 (TRBV5-1, TRBJ2-1)
CASSQAGYWWNEQFF

SEQ ID NO: 481341 - protein, 13 aa, Homo sapiens
  CDR3 for alpha chain variable domain of TCR clone 240671 (TRAV27, TRAJ49)
CAPRPYTGNQFYF

SEQ ID NO: 481342 - protein, 16 aa, Homo sapiens
  CDR3 for beta chain variable domain of TCR clone 240671 (TRBV12-4, TRBJ2-1)
CASSAVGQGNGDEQFF

SEQ ID NO: 481343 - protein, 15 aa, Homo sapiens
  CDR3 for alpha chain variable domain of TCR clone 240672 (TRAV26-1, TRAJ56)
CIVRVDNGANSKLTF

SEQ ID NO: 481344 - protein, 15 aa, Homo sapiens
  CDR3 for beta chain variable domain of TCR clone 240672 (TRBV20-1, TRBJ2-7)
CSARDPTEVGHEQCF

SEQ ID NO: 481345 - protein, 11 aa, Homo sapiens
  CDR3 for alpha chain variable domain of TCR clone 240673 (TRAV16, TRAJ34)
CALYNTDKRIF

SEQ ID NO: 481346 - protein, 13 aa, Homo sapiens
  CDR3 for beta chain variable domain of TCR clone 240673 (TRBV25-1, TRBJ1-1)
CASSGQVRAEAFF

SEQ ID NO: 481347 - protein, 16 aa, Homo sapiens
  CDR3 for alpha chain variable domain of TCR clone 240674 (TRAV30, TRAJ24)
CGTEIGDADSWGKFQF

SEQ ID NO: 481348 - protein, 13 aa, Homo sapiens
  CDR3 for beta chain variable domain of TCR clone 240674 (TRBV10-3, TRBJ2-7)
CASKLAVNYEQYF

SEQ ID NO: 481349 - protein, 14 aa, Homo sapiens
  CDR3 for alpha chain variable domain of TCR clone 240675 (TRAV17, TRAJ12)
CAILPMDSSYKLIF

SEQ ID NO: 481350 - protein, 15 aa, Homo sapiens
  CDR3 for beta chain variable domain of TCR clone 240675 (TRBV5-1, TRBJ1-1)
CASSLGEGEITEAFF

SEQ ID NO: 481351 - protein, 13 aa, Homo sapiens
  CDR3 for alpha chain variable domain of TCR clone 240676 (TRAV16, TRAJ34)
CALRTWNTDKLIF

SEQ ID NO: 481352 - protein, 13 aa, Homo sapiens
  CDR3 for beta chain variable domain of TCR clone 240676 (TRBV7-9, TRBJ1-2)
CASSLKHNYGYTF

SEQ ID NO: 481353 - protein, 14 aa, Homo sapiens
  CDR3 for alpha chain variable domain of TCR clone 240677 (TRAV6, TRAJ37)
CALGSQGNKGKLIF

SEQ ID NO: 481354 - protein, 15 aa, Homo sapiens
  CDR3 for beta chain variable domain of TCR clone 240677 (TRBV2, TRBJ2-1)
CASSEEREGDNEQFF

SEQ ID NO: 481355 - protein, 14 aa, Homo sapiens
  CDR3 for alpha chain variable domain of TCR clone 240678 (TRAV12-3, TRAJ10)
SHLPLTGGGNKLTF

SEQ ID NO: 481356 - protein, 13 aa, Homo sapiens
  CDR3 for beta chain variable domain of TCR clone 240678 (TRBV10-2, TRBJ2-7)
CASGASGGYEQYF

SEQ ID NO: 481357 - protein, 12 aa, Homo sapiens
  CDR3 for alpha chain variable domain of TCR clone 240679 (TRAV17, TRAJ47)
CAPPVRGNKLVF

SEQ ID NO: 481358 - protein, 13 aa, Homo sapiens
  CDR3 for beta chain variable domain of TCR clone 240679 (TRBV7-2, TRBJ2-4)
CASSLAEGGIQYF

SEQ ID NO: 481359 - protein, 22 aa, Homo sapiens
  CDR3 for alpha chain variable domain of TCR clone 240680 (TRAV16, )
CALRTQIPDIQNPDPAVYQLRN

SEQ ID NO: 481360 - protein, 16 aa, Homo sapiens
  CDR3 for beta chain variable domain of TCR clone 240680 (TRBV7-2, TRBJ1-2)
CASSSNQDRRGHGYTF

SEQ ID NO: 481361 - protein, 16 aa, Homo sapiens
  CDR3 for alpha chain variable domain of TCR clone 240681 (TRAV12-2, TRAJ18)
CAVTTDRGSALGRLYF

SEQ ID NO: 481362 - protein, 13 aa, Homo sapiens
  CDR3 for beta chain variable domain of TCR clone 240681 (TRBV19, TRBJ2-3)
CATWDKITDTQYF

SEQ ID NO: 481363 - protein, 14 aa, Homo sapiens
  CDR3 for alpha chain variable domain of TCR clone 240682 (TRAV8-2, TRAJ37)
CVVSISGNTGKLIF

SEQ ID NO: 481364 - protein, 13 aa, Homo sapiens
  CDR3 for beta chain variable domain of TCR clone 240682 (TRBV7-8, TRBJ2-7)
RRVRLAEMGEQYF

SEQ ID NO: 481365 - protein, 15 aa, Homo sapiens
  CDR3 for alpha chain variable domain of TCR clone 240683 (TRAV26-1, TRAJ22)
CIVRASFWFCKATDL

SEQ ID NO: 481366 - protein, 13 aa, Homo sapiens
  CDR3 for beta chain variable domain of TCR clone 240683 (TRBV7-9, TRBJ1-2)
CASSLKQNYGYAF

SEQ ID NO: 481367 - protein, 14 aa, Homo sapiens
  CDR3 for alpha chain variable domain of TCR clone 240684 (TRAV34, TRAJ44)
CGADGTGTASKLTF

SEQ ID NO: 481368 - protein, 12 aa, Homo sapiens
  CDR3 for beta chain variable domain of TCR clone 240684 (TRBV11-2, TRBJ2-2)
CAGSLGGGELFF

SEQ ID NO: 481369 - protein, 15 aa, Homo sapiens
  CDR3 for alpha chain variable domain of TCR clone 240685 (TRAV8-3, TRAJ27)
CAVGPSKTNAGKSTF

SEQ ID NO: 481370 - protein, 13 aa, Homo sapiens
  CDR3 for beta chain variable domain of TCR clone 240685 (TRBV25-1, TRBJ2-7)
CASSEDGDYEQYF

SEQ ID NO: 481371 - protein, 14 aa, Homo sapiens
  CDR3 for alpha chain variable domain of TCR clone 240686 (TRAV14/DV4, TRAJ54)
CAMREAPGAQKLVF

SEQ ID NO: 481372 - protein, 15 aa, Homo sapiens
  CDR3 for beta chain variable domain of TCR clone 240686 (TRBV5-1, TRBJ2-7)
CASSLSGGPARDQYF

SEQ ID NO: 481373 - protein, 13 aa, Homo sapiens
  CDR3 for alpha chain variable domain of TCR clone 240687 (TRAV21, TRAJ57)
CAVTQGGSEKLVF

SEQ ID NO: 481374 - protein, 16 aa, Homo sapiens
  CDR3 for beta chain variable domain of TCR clone 240687 (TRBV29-1, TRBJ2-5)
CSVEDAEDGTAYEQYF

SEQ ID NO: 481375 - protein, 13 aa, Homo sapiens
  CDR3 for alpha chain variable domain of TCR clone 240688 (TRAV21, TRAJ57)
CAVTQGGSEKLVF

SEQ ID NO: 481376 - protein, 16 aa, Homo sapiens
  CDR3 for beta chain variable domain of TCR clone 240688 (TRBV29-1, TRBJ2-6)
CSVEDAEDGTAYEQYF

SEQ ID NO: 481377 - protein, 12 aa, Homo sapiens
  CDR3 for alpha chain variable domain of TCR clone 240689 (TRAV12-2, TRAJ8)
CAVNTGFQKLVF

SEQ ID NO: 481378 - protein, 16 aa, Homo sapiens
  CDR3 for beta chain variable domain of TCR clone 240689 (TRBV9, TRBJ2-1)
CASSVGGGGNYNEQFF

SEQ ID NO: 481379 - protein, 13 aa, Homo sapiens
  CDR3 for alpha chain variable domain of TCR clone 240690 (TRAV21, TRAJ57)
CAVTQGGSEKLVF

SEQ ID NO: 481380 - protein, 16 aa, Homo sapiens
  CDR3 for beta chain variable domain of TCR clone 240690 (TRBV29-1, TRBJ2-1)
CSVEDAEDGTAYEQYF

SEQ ID NO: 481381 - protein, 18 aa, Homo sapiens
  CDR3 for alpha chain variable domain of TCR clone 240691 (TRAV12-3, TRAJ52)
CAMSVGGAGGTSYGNLTF

SEQ ID NO: 481382 - protein, 14 aa, Homo sapiens
  CDR3 for beta chain variable domain of TCR clone 240691 (TRBV5-5, TRBJ2-2)
CASSLLGDTGELFF

SEQ ID NO: 481383 - protein, 14 aa, Homo sapiens
  CDR3 for alpha chain variable domain of TCR clone 240692 (TRAV26-1, TRAJ45)
CIVRVVGGADGLTF

SEQ ID NO: 481384 - protein, 16 aa, Homo sapiens
  CDR3 for beta chain variable domain of TCR clone 240692 (TRBV7-9, TRBJ1-1)
CASSLTQVRSNTAAFF

SEQ ID NO: 481385 - protein, 12 aa, Homo sapiens
  CDR3 for alpha chain variable domain of TCR clone 240693 (TRAV2, TRAJ5)
CALDTGRRALTF

SEQ ID NO: 481386 - protein, 15 aa, Homo sapiens
  CDR3 for beta chain variable domain of TCR clone 240693 (TRBV10-3, TRBJ2-1)
CAISDVQYRAYEQFF

SEQ ID NO: 481387 - protein, 12 aa, Homo sapiens
  CDR3 for alpha chain variable domain of TCR clone 240694 (TRAV21, TRAJ31)
CAVSPARGRLMF

SEQ ID NO: 481388 - protein, 14 aa, Homo sapiens
  CDR3 for beta chain variable domain of TCR clone 240694 (TRBV28, TRBJ2-1)
CASSLLRISYEQFF

SEQ ID NO: 481389 - protein, 14 aa, Homo sapiens
  CDR3 for alpha chain variable domain of TCR clone 240695 (TRAV12-3, TRAJ33)
CAMSIPGSNYQLIW

SEQ ID NO: 481390 - protein, 12 aa, Homo sapiens
  CDR3 for beta chain variable domain of TCR clone 240695 (TRBV7-8, TRBJ2-7)
CASSLGDREQYF

SEQ ID NO: 481391 - protein, 13 aa, Homo sapiens
  CDR3 for alpha chain variable domain of TCR clone 240696 (TRAV8-6, TRAJ32)
CAVSDRATNKLIF

SEQ ID NO: 481392 - protein, 13 aa, Homo sapiens
  CDR3 for beta chain variable domain of TCR clone 240696 (TRBV11-2, TRBJ2-7)
CASSVDLGYEQYF

SEQ ID NO: 481393 - protein, 14 aa, Homo sapiens
  CDR3 for alpha chain variable domain of TCR clone 240697 (TRAV13-1, TRAJ3)
CAAEGYSSASKIIF

SEQ ID NO: 481394 - protein, 14 aa, Homo sapiens
  CDR3 for beta chain variable domain of TCR clone 240697 (TRBV19, TRBJ2-5)
CASSSSGIKETHYF

SEQ ID NO: 481395 - protein, 17 aa, Homo sapiens
  CDR3 for alpha chain variable domain of TCR clone 240698 (TRAV23/DV6, TRAJ57)
CAASSTLSQGGSEKLVF

SEQ ID NO: 481396 - protein, 14 aa, Homo sapiens
  CDR3 for beta chain variable domain of TCR clone 240698 (TRBV25-1, TRBJ1-1)
CASAQLGGNTEAFF

SEQ ID NO: 481397 - protein, 13 aa, Homo sapiens
  CDR3 for alpha chain variable domain of TCR clone 240699 (TRAV2, TRAJ40)
CAVVTSGTYKYIF

SEQ ID NO: 481398 - protein, 16 aa, Homo sapiens
  CDR3 for beta chain variable domain of TCR clone 240699 (TRBV7-2, TRBJ2-1)
CASSLVAGAGYNEQFF

SEQ ID NO: 481399 - protein, 15 aa, Homo sapiens
  CDR3 for alpha chain variable domain of TCR clone 240700 (TRAV3, TRAJ5)
CAVRHLDTGRRALTS

SEQ ID NO: 481400 - protein, 13 aa, Homo sapiens
  CDR3 for beta chain variable domain of TCR clone 240700 (TRBV12-4, TRBJ2-7)
CASSPTETYEQYF

SEQ ID NO: 481401 - protein, 13 aa, Homo sapiens
  CDR3 for alpha chain variable domain of TCR clone 240701 (TRAV8-3, TRAJ40)
CAVDPSGTYKYIF

SEQ ID NO: 481402 - protein, 13 aa, Homo sapiens
  CDR3 for beta chain variable domain of TCR clone 240701 (TRBV7-9, TRBJ1-2)
CASSLKQNYGYTF

SEQ ID NO: 481403 - protein, 14 aa, Homo sapiens
  CDR3 for alpha chain variable domain of TCR clone 240702 (TRAV12-1, TRAJ45)
CVVNVGGGADGLTF

SEQ ID NO: 481404 - protein, 14 aa, Homo sapiens
  CDR3 for beta chain variable domain of TCR clone 240702 (TRBV29-1, TRBJ2-3)
CSIEPGTRTDTQYF

SEQ ID NO: 481405 - protein, 14 aa, Homo sapiens
  CDR3 for alpha chain variable domain of TCR clone 240703 (TRAV17, TRAJ45)
CATASGGGADGLTF

SEQ ID NO: 481406 - protein, 15 aa, Homo sapiens
  CDR3 for beta chain variable domain of TCR clone 240703 (TRBV11-2, TRBJ2-1)
CASCRNRGLMYEQFF

SEQ ID NO: 481407 - protein, 12 aa, Homo sapiens
  CDR3 for alpha chain variable domain of TCR clone 240704 (TRAV12-1, TRAJ40)
CVVYSGTYKYIF

SEQ ID NO: 481408 - protein, 18 aa, Homo sapiens
  CDR3 for beta chain variable domain of TCR clone 240704 (TRBV11-2, TRBJ2-3)
CAGSIGGASRGAPNTQYF

SEQ ID NO: 481409 - protein, 13 aa, Homo sapiens
  CDR3 for alpha chain variable domain of TCR clone 240705 (TRAV12-1, TRAJ11)
CVVNRAGYSNLTF

SEQ ID NO: 481410 - protein, 16 aa, Homo sapiens
  CDR3 for beta chain variable domain of TCR clone 240705 (TRBV27, TRBJ2-2)
CASSLRPGGAPGELFF

SEQ ID NO: 481411 - protein, 15 aa, Homo sapiens
  CDR3 for alpha chain variable domain of TCR clone 240706 (TRAV3, TRAJ4)
CAVRAGTGGHNKLIF

SEQ ID NO: 481412 - protein, 16 aa, Homo sapiens
  CDR3 for beta chain variable domain of TCR clone 240706 (TRBV27, TRBJ2-2)
CASSSSGVSNTRELFF

SEQ ID NO: 481413 - protein, 15 aa, Homo sapiens
  CDR3 for alpha chain variable domain of TCR clone 240707 (TRAV3, TRAJ11)
CAVRDRGSGYSTLTF

SEQ ID NO: 481414 - protein, 15 aa, Homo sapiens
  CDR3 for beta chain variable domain of TCR clone 240707 (TRBV19, TRBJ1-1)
CASTSGQIENTEAFF

SEQ ID NO: 481415 - protein, 14 aa, Homo sapiens
  CDR3 for alpha chain variable domain of TCR clone 240708 (TRAV26-2, TRAJ27)
CILRDISDAGKSTV

SEQ ID NO: 481416 - protein, 15 aa, Homo sapiens
  CDR3 for beta chain variable domain of TCR clone 240708 (TRBV10-3, TRBJ2-7)
CATREQGLRSYEQYF

SEQ ID NO: 481417 - protein, 15 aa, Homo sapiens
  CDR3 for alpha chain variable domain of TCR clone 240709 (TRAV8-3, TRAJ45)
CASLYSGGGADGLTF

SEQ ID NO: 481418 - protein, 12 aa, Homo sapiens
  CDR3 for beta chain variable domain of TCR clone 240709 (TRBV12-4, TRBJ2-7)
CASSLGGYEQYF

SEQ ID NO: 481419 - protein, 17 aa, Homo sapiens
  CDR3 for alpha chain variable domain of TCR clone 240710 (TRAV23/DV6, TRAJ53)
CAASKMGSGGSNYKLTF

SEQ ID NO: 481420 - protein, 18 aa, Homo sapiens
  CDR3 for beta chain variable domain of TCR clone 240710 (TRBV11-2, TRBJ2-3)
CASSLGGASRGAPNTQYF

SEQ ID NO: 481421 - protein, 13 aa, Homo sapiens
  CDR3 for alpha chain variable domain of TCR clone 240711 (TRAV2, TRAJ40)
CAVVPSGTYKYIF

SEQ ID NO: 481422 - protein, 14 aa, Homo sapiens
  CDR3 for beta chain variable domain of TCR clone 240711 (TRBV19, TRBJ2-3)
CASSAPRGTDTQYF

SEQ ID NO: 481423 - protein, 14 aa, Homo sapiens
  CDR3 for alpha chain variable domain of TCR clone 240712 (TRAV12-1, TRAJ17)
CVVNYKAAGNKLTF

SEQ ID NO: 481424 - protein, 16 aa, Homo sapiens
  CDR3 for beta chain variable domain of TCR clone 240712 (TRBV6-1, TRBJ2-5)
CASSETLERGAETQYF

SEQ ID NO: 481425 - protein, 12 aa, Homo sapiens
  CDR3 for alpha chain variable domain of TCR clone 240713 (TRAV12-3, TRAJ17)
CAMTLTGNKLTF

SEQ ID NO: 481426 - protein, 20 aa, Homo sapiens
  CDR3 for beta chain variable domain of TCR clone 240713 (TRBV7-8, TRBJ2-2)
CASSHFFPGPTIHITGELFF

SEQ ID NO: 481427 - protein, 14 aa, Homo sapiens
  CDR3 for alpha chain variable domain of TCR clone 240714 (TRAV38-1, TRAJ45)
CASHSGGGADGLTF

SEQ ID NO: 481428 - protein, 18 aa, Homo sapiens
  CDR3 for beta chain variable domain of TCR clone 240714 (TRBV7-2, TRBJ2-3)
CASSLETSRGRKADTQYF

SEQ ID NO: 481429 - protein, 14 aa, Homo sapiens
  CDR3 for alpha chain variable domain of TCR clone 240715 (TRAV1-2, TRAJ8)
CAAREDKGFQKLVF

SEQ ID NO: 481430 - protein, 13 aa, Homo sapiens
  CDR3 for beta chain variable domain of TCR clone 240715 (TRBV19, TRBJ1-2)
CASSVPGQDGYTF

SEQ ID NO: 481431 - protein, 15 aa, Homo sapiens
  CDR3 for alpha chain variable domain of TCR clone 240716 (TRAV8-2, TRAJ15)
CVVTMGNQAGTALIF

SEQ ID NO: 481432 - protein, 15 aa, Homo sapiens
  CDR3 for beta chain variable domain of TCR clone 240716 (TRBV12-4, TRBJ1-5)
CASTRGSGFGQPQHF

SEQ ID NO: 481433 - protein, 11 aa, Homo sapiens
  CDR3 for alpha chain variable domain of TCR clone 240717 (TRAV1-2, TRAJ20)
CAVSNDYKLSF

SEQ ID NO: 481434 - protein, 15 aa, Homo sapiens
  CDR3 for beta chain variable domain of TCR clone 240717 (TRBV5-1, TRBJ2-2)
CGSSSQGGNTGELFF

SEQ ID NO: 481435 - protein, 11 aa, Homo sapiens
  CDR3 for alpha chain variable domain of TCR clone 240718 (TRAV23/DV6, TRAJ58)
CAARLLRWETS

SEQ ID NO: 481436 - protein, 14 aa, Homo sapiens
  CDR3 for beta chain variable domain of TCR clone 240718 (TRBV7-3, TRBJ2-1)
CASSLAGGTNEQFF

SEQ ID NO: 481437 - protein, 14 aa, Homo sapiens
  CDR3 for alpha chain variable domain of TCR clone 240719 (TRAV12-2, TRAJ17)
CVVLFKAAGNKLTF

SEQ ID NO: 481438 - protein, 15 aa, Homo sapiens
  CDR3 for beta chain variable domain of TCR clone 240719 (TRBV20-1, TRBJ2-7)
CSARDRVSGMDEQYF

SEQ ID NO: 481439 - protein, 13 aa, Homo sapiens
  CDR3 for alpha chain variable domain of TCR clone 240720 (TRAV13-1, TRAJ21)
CAARIYNFNKFYF

SEQ ID NO: 481440 - protein, 15 aa, Homo sapiens
  CDR3 for beta chain variable domain of TCR clone 240720 (TRBV7-8, TRBJ1-5)
CASSLAGQPNQPQHF

SEQ ID NO: 481441 - protein, 15 aa, Homo sapiens
  CDR3 for alpha chain variable domain of TCR clone 240721 (TRAV27, TRAJ33)
CSGADIMDSNYQLIW

SEQ ID NO: 481442 - protein, 13 aa, Homo sapiens
  CDR3 for beta chain variable domain of TCR clone 240721 (TRBV28, TRBJ1-2)
CASSLQGRGGYTF

SEQ ID NO: 481443 - protein, 11 aa, Homo sapiens
  CDR3 for alpha chain variable domain of TCR clone 240722 (TRAV13-1, TRAJ40)
CAVSGTYKYIF

SEQ ID NO: 481444 - protein, 15 aa, Homo sapiens
  CDR3 for beta chain variable domain of TCR clone 240722 (TRBV6-1, TRBJ2-1)
CASSELRGQYNEQYF

SEQ ID NO: 481445 - protein, 13 aa, Homo sapiens
  CDR3 for alpha chain variable domain of TCR clone 240723 (TRAV17, TRAJ21)
CATDGGNFNKFYF

SEQ ID NO: 481446 - protein, 14 aa, Homo sapiens
  CDR3 for beta chain variable domain of TCR clone 240723 (TRBV15, TRBJ2-3)
CATRSGTSTDTQYF

SEQ ID NO: 481447 - protein, 13 aa, Homo sapiens
  CDR3 for alpha chain variable domain of TCR clone 240724 (TRAV38-1, TRAJ42)
WARWGGSQGNLIF

SEQ ID NO: 481448 - protein, 14 aa, Homo sapiens
  CDR3 for beta chain variable domain of TCR clone 240724 (TRBV6-1, TRBJ1-3)
CASVQGGGGNTIYF

SEQ ID NO: 481449 - protein, 15 aa, Homo sapiens
  CDR3 for alpha chain variable domain of TCR clone 240725 (TRAV8-3, TRAJ15)
SAVGAANQAGTALIF

SEQ ID NO: 481450 - protein, 14 aa, Homo sapiens
  CDR3 for beta chain variable domain of TCR clone 240725 (TRBV20-1, TRBJ2-1)
CSPNDEASYNEQFF

SEQ ID NO: 481451 - protein, 11 aa, Homo sapiens
  CDR3 for alpha chain variable domain of TCR clone 240726 (TRAV1-1, TRAJ23)
CAVRQGGKLIF

SEQ ID NO: 481452 - protein, 15 aa, Homo sapiens
  CDR3 for beta chain variable domain of TCR clone 240726 (TRBV7-6, TRBJ2-1)
CASSLAQNSYNEQFF

SEQ ID NO: 481453 - protein, 11 aa, Homo sapiens
  CDR3 for alpha chain variable domain of TCR clone 240727 (TRAV1-2, TRAJ31)
CAVNNNARLMF

SEQ ID NO: 481454 - protein, 15 aa, Homo sapiens
  CDR3 for beta chain variable domain of TCR clone 240727 (TRBV7-9, TRBJ2-2)
CASGPLDTFPGELFF

SEQ ID NO: 481455 - protein, 14 aa, Homo sapiens
  CDR3 for alpha chain variable domain of TCR clone 240728 (TRAV35, TRAJ22)
CAGLRPGSARQLTF

SEQ ID NO: 481456 - protein, 14 aa, Homo sapiens
  CDR3 for beta chain variable domain of TCR clone 240728 (TRBV12-4, TRBJ2-5)
CQRSPTGLQETQYF

SEQ ID NO: 481457 - protein, 12 aa, Homo sapiens
  CDR3 for alpha chain variable domain of TCR clone 240729 (TRAV1-1, TRAJ15)
CAVGQAGTALIF

SEQ ID NO: 481458 - protein, 14 aa, Homo sapiens
  CDR3 for beta chain variable domain of TCR clone 240729 (TRBV7-6, TRBJ2-3)
CASSVAGGTDTQYF

SEQ ID NO: 481459 - protein, 13 aa, Homo sapiens
  CDR3 for alpha chain variable domain of TCR clone 240730 (TRAV8-3, TRAJ28)
CAVGAVGSYQLTF

SEQ ID NO: 481460 - protein, 14 aa, Homo sapiens
  CDR3 for beta chain variable domain of TCR clone 240730 (TRBV7-9, TRBJ2-1)
CASRPTGLRNEQFF

SEQ ID NO: 481461 - protein, 15 aa, Homo sapiens
  CDR3 for alpha chain variable domain of TCR clone 240731 (TRAV9-2, TRAJ39)
CALSDRNNAGNMITF

SEQ ID NO: 481462 - protein, 15 aa, Homo sapiens
  CDR3 for beta chain variable domain of TCR clone 240731 (TRBV10-3, TRBJ2-2)
CAISPGRTNTGELFF

SEQ ID NO: 481463 - protein, 14 aa, Homo sapiens
  CDR3 for alpha chain variable domain of TCR clone 240732 (TRAV20, TRAJ22)
CAVQFSGSARQLTF

SEQ ID NO: 481464 - protein, 13 aa, Homo sapiens
  CDR3 for beta chain variable domain of TCR clone 240732 (TRBV20-1, TRBJ2-5)
CSAREGGKETQYF

SEQ ID NO: 481465 - protein, 11 aa, Homo sapiens
  CDR3 for alpha chain variable domain of TCR clone 240733 (TRAV17, TRAJ9)
CGFTGGFKTIF

SEQ ID NO: 481466 - protein, 15 aa, Homo sapiens
  CDR3 for beta chain variable domain of TCR clone 240733 (TRBV19, TRBJ2-1)
CASSSPGVPLDEQFF

SEQ ID NO: 481467 - protein, 15 aa, Homo sapiens
  CDR3 for alpha chain variable domain of TCR clone 240734 (TRAV26-2, TRAJ57)
CILIDIRGGSEKLVF

SEQ ID NO: 481468 - protein, 15 aa, Homo sapiens
  CDR3 for beta chain variable domain of TCR clone 240734 (TRBV2, TRBJ2-1)
CASDIGLAGEGEQFS

SEQ ID NO: 481469 - protein, 15 aa, Homo sapiens
  CDR3 for alpha chain variable domain of TCR clone 240735 (TRAV8-3, TRAJ23)
CAVGDRYNQGGKLIF

SEQ ID NO: 481470 - protein, 22 aa, Homo sapiens
  CDR3 for beta chain variable domain of TCR clone 240735 (TRBV29-1, TRBJ2-5)
TVSNLSPEDSSIYLCSAGTQYF

SEQ ID NO: 481471 - protein, 14 aa, Homo sapiens
  CDR3 for alpha chain variable domain of TCR clone 240736 (TRAV12-2, TRAJ40)
CAAKIPSGTYKYIF

SEQ ID NO: 481472 - protein, 14 aa, Homo sapiens
  CDR3 for beta chain variable domain of TCR clone 240736 (TRBV20-1, TRBJ1-1)
CSAQTRIGGTEVFF

SEQ ID NO: 481473 - protein, 12 aa, Homo sapiens
  CDR3 for alpha chain variable domain of TCR clone 240737 (TRAV12-1, TRAJ40)
FVVSSGTYKYIF

SEQ ID NO: 481474 - protein, 14 aa, Homo sapiens
  CDR3 for beta chain variable domain of TCR clone 240737 (TRBV20-1, TRBJ2-2)
CSAPDTANTGELFF

SEQ ID NO: 481475 - protein, 12 aa, Homo sapiens
  CDR3 for alpha chain variable domain of TCR clone 240738 (TRAV3, TRAJ31)
CAVRPRGPRLMF

SEQ ID NO: 481476 - protein, 17 aa, Homo sapiens
  CDR3 for beta chain variable domain of TCR clone 240738 (TRBV7-9, TRBJ1-5)
CASSASQGSYSNQPQHF

SEQ ID NO: 481477 - protein, 10 aa, Homo sapiens
  CDR3 for alpha chain variable domain of TCR clone 240739 (TRAV1-2, TRAJ31)
CAFFDARLMF

SEQ ID NO: 481478 - protein, 14 aa, Homo sapiens
  CDR3 for beta chain variable domain of TCR clone 240739 (TRBV11-2, TRBJ1-5)
CASSSRTGNQPQHF

SEQ ID NO: 481479 - protein, 16 aa, Homo sapiens
  CDR3 for alpha chain variable domain of TCR clone 240740 (TRAV3, TRAJ37)
CAVSGKGSGNTGKLIF

SEQ ID NO: 481480 - protein, 16 aa, Homo sapiens
  CDR3 for beta chain variable domain of TCR clone 240740 (TRBV28, TRBJ1-5)
CASSFRGGYSNQPQHF

SEQ ID NO: 481481 - protein, 14 aa, Homo sapiens
  CDR3 for alpha chain variable domain of TCR clone 240741 (TRAV34, TRAJ44)
CGADGTGTASKLTF

SEQ ID NO: 481482 - protein, 14 aa, Homo sapiens
  CDR3 for beta chain variable domain of TCR clone 240741 (TRBV5-1, TRBJ1-2)
CASSLGDRGPGYTF

SEQ ID NO: 481483 - protein, 15 aa, Homo sapiens
  CDR3 for alpha chain variable domain of TCR clone 240742 (TRAV8-2, TRAJ24)
CVVSDRTDSWGKLQL

SEQ ID NO: 481484 - protein, 13 aa, Homo sapiens
  CDR3 for beta chain variable domain of TCR clone 240742 (TRBV7-9, TRBJ1-2)
CASSLKQNYGYTF

SEQ ID NO: 481485 - protein, 13 aa, Homo sapiens
  CDR3 for alpha chain variable domain of TCR clone 240743 (TRAV3, TRAJ20)
CAVRDTPRYKLSF

SEQ ID NO: 481486 - protein, 12 aa, Homo sapiens
  CDR3 for beta chain variable domain of TCR clone 240743 (TRBV5-1, TRBJ2-5)
CDSSLGLETQYF

SEQ ID NO: 481487 - protein, 12 aa, Homo sapiens
  CDR3 for alpha chain variable domain of TCR clone 240744 (TRAV12-1, TRAJ20)
CVAHFNDYTLSF

SEQ ID NO: 481488 - protein, 13 aa, Homo sapiens
  CDR3 for beta chain variable domain of TCR clone 240744 (TRBV5-7, TRBJ2-5)
CASSLRLQETQYF

SEQ ID NO: 481489 - protein, 15 aa, Homo sapiens
  CDR3 for alpha chain variable domain of TCR clone 240745 (TRAV17, TRAJ56)
CATDANTGANSKLTF

SEQ ID NO: 481490 - protein, 14 aa, Homo sapiens
  CDR3 for beta chain variable domain of TCR clone 240745 (TRBV11-2, TRBJ1-6)
CASSLRQGNSPLHF

SEQ ID NO: 481491 - protein, 12 aa, Homo sapiens
  CDR3 for alpha chain variable domain of TCR clone 240746 (TRAV2, TRAJ31)
CAVEDNNARLMF

SEQ ID NO: 481492 - protein, 14 aa, Homo sapiens
  CDR3 for beta chain variable domain of TCR clone 240746 (TRBV19, TRBJ2-5)
CASSMTGQQETQYL

SEQ ID NO: 481493 - protein, 10 aa, Homo sapiens
  CDR3 for alpha chain variable domain of TCR clone 240747 (TRAV12-3, TRAJ49)
CAMNDDQFYF

SEQ ID NO: 481494 - protein, 14 aa, Homo sapiens
  CDR3 for beta chain variable domain of TCR clone 240747 (TRBV28, TRBJ2-7)
CASKPGPDLYEQYF

SEQ ID NO: 481495 - protein, 14 aa, Homo sapiens
  CDR3 for alpha chain variable domain of TCR clone 240748 (TRAV21, TRAJ45)
CAVSSGGGADGLTF

SEQ ID NO: 481496 - protein, 15 aa, Homo sapiens
  CDR3 for beta chain variable domain of TCR clone 240748 (TRBV15, TRBJ2-3)
CATSRDPRGTDTHYF

SEQ ID NO: 481497 - protein, 14 aa, Homo sapiens
  CDR3 for alpha chain variable domain of TCR clone 240749 (TRAV12-2, TRAJ45)
FAVNKGGGADGLTF

SEQ ID NO: 481498 - protein, 14 aa, Homo sapiens
  CDR3 for beta chain variable domain of TCR clone 240749 (TRBV20-1, TRBJ1-1)
CSAMGGTATTEAFF

SEQ ID NO: 481499 - protein, 13 aa, Homo sapiens
  CDR3 for alpha chain variable domain of TCR clone 240750 (TRAV35, TRAJ13)
CAGPPRGYQKVTF

SEQ ID NO: 481500 - protein, 15 aa, Homo sapiens
  CDR3 for beta chain variable domain of TCR clone 240750 (TRBV7-2, TRBJ2-1)
CASSLASGRVNEQFF

SEQ ID NO: 481501 - protein, 15 aa, Homo sapiens
  CDR3 for alpha chain variable domain of TCR clone 240751 (TRAV26-1, TRAJ22)
CIVRVSFWFCKATDL

SEQ ID NO: 481502 - protein, 13 aa, Homo sapiens
  CDR3 for beta chain variable domain of TCR clone 240751 (TRBV7-9, TRBJ2-7)
CASSFAGAYEQYF

SEQ ID NO: 481503 - protein, 10 aa, Homo sapiens
  CDR3 for alpha chain variable domain of TCR clone 240752 (TRAV36/DV7, TRAJ48)
CAVGNEKLTF

SEQ ID NO: 481504 - protein, 17 aa, Homo sapiens
  CDR3 for beta chain variable domain of TCR clone 240752 (TRBV28, TRBJ2-5)
CASSRQGGLAGAETQYF

SEQ ID NO: 481505 - protein, 12 aa, Homo sapiens
  CDR3 for alpha chain variable domain of TCR clone 240753 (TRAV21, TRAJ11)
CAATSGYSTLTF

SEQ ID NO: 481506 - protein, 16 aa, Homo sapiens
  CDR3 for beta chain variable domain of TCR clone 240753 (TRBV10-3, TRBJ2-1)
CAISGVGDGGGGEQFF

SEQ ID NO: 481507 - protein, 16 aa, Homo sapiens
  CDR3 for alpha chain variable domain of TCR clone 240754 (TRAV26-1, TRAJ53)
CIVRVAMGGSNYKLTF

SEQ ID NO: 481508 - protein, 15 aa, Homo sapiens
  CDR3 for beta chain variable domain of TCR clone 240754 (TRBV7-9, TRBJ1-4)
CASSRTGGFNEKLFF

SEQ ID NO: 481509 - protein, 12 aa, Homo sapiens
  CDR3 for alpha chain variable domain of TCR clone 240755 (TRAV29/DV5, TRAJ49)
CAATDTGNQFYF

SEQ ID NO: 481510 - protein, 11 aa, Homo sapiens
  CDR3 for beta chain variable domain of TCR clone 240755 (TRBV12-4, TRBJ2-7)
CQSLGGYEQYF

SEQ ID NO: 481511 - protein, 12 aa, Homo sapiens
  CDR3 for alpha chain variable domain of TCR clone 240756 (TRAV3, TRAJ43)
CAVRDPNNDMRF

SEQ ID NO: 481512 - protein, 14 aa, Homo sapiens
  CDR3 for beta chain variable domain of TCR clone 240756 (TRBV7-3, TRBJ1-2)
RASSLPPEGYGYTF

SEQ ID NO: 481513 - protein, 12 aa, Homo sapiens
  CDR3 for alpha chain variable domain of TCR clone 240757 (TRAV2, TRAJ34)
CAVERNTDKLIF

SEQ ID NO: 481514 - protein, 12 aa, Homo sapiens
  CDR3 for beta chain variable domain of TCR clone 240757 (TRBV7-2, TRBJ2-5)
ASLGGGEETQYF

SEQ ID NO: 481515 - protein, 12 aa, Homo sapiens
  CDR3 for alpha chain variable domain of TCR clone 240758 (TRAV29/DV5, TRAJ43)
CAAPYNNNAIRF

SEQ ID NO: 481516 - protein, 17 aa, Homo sapiens
  CDR3 for beta chain variable domain of TCR clone 240758 (TRBV19, TRBJ2-6)
CASSTGQVFSGANVLTF

SEQ ID NO: 481517 - protein, 13 aa, Homo sapiens
  CDR3 for alpha chain variable domain of TCR clone 240759 (TRAV1-1, TRAJ13)
CAVNSGGFQKVTF

SEQ ID NO: 481518 - protein, 12 aa, Homo sapiens
  CDR3 for beta chain variable domain of TCR clone 240759 (TRBV28, TRBJ2-1)
CASSVQINEQFF

SEQ ID NO: 481519 - protein, 16 aa, Homo sapiens
  CDR3 for alpha chain variable domain of TCR clone 240760 (TRAV27, TRAJ53)
CAAPEVSGVSNYKLTF

SEQ ID NO: 481520 - protein, 15 aa, Homo sapiens
  CDR3 for beta chain variable domain of TCR clone 240760 (TRBV20-1, TRBJ1-1)
CSASRGVTGNTEAFF

SEQ ID NO: 481521 - protein, 13 aa, Homo sapiens
  CDR3 for alpha chain variable domain of TCR clone 240761 (TRAV1-2, TRAJ9)
CAVLNTGGFKTIF

SEQ ID NO: 481522 - protein, 14 aa, Homo sapiens
  CDR3 for beta chain variable domain of TCR clone 240761 (TRBV20-1, TRBJ2-3)
CSARGGTSTDTQDF

SEQ ID NO: 481523 - protein, 18 aa, Homo sapiens
  CDR3 for alpha chain variable domain of TCR clone 240762 (TRAV12-3, TRAJ52)
CAMSVGGAGGASDGKLTF

SEQ ID NO: 481524 - protein, 15 aa, Homo sapiens
  CDR3 for beta chain variable domain of TCR clone 240762 (TRBV27, TRBJ1-6)
CASSFDRGLGSPLHF

SEQ ID NO: 481525 - protein, 11 aa, Homo sapiens
  CDR3 for alpha chain variable domain of TCR clone 240763 (TRAV21, TRAJ34)
CAHYNTDKRIF

SEQ ID NO: 481526 - protein, 14 aa, Homo sapiens
  CDR3 for beta chain variable domain of TCR clone 240763 (TRBV6-1, TRBJ1-3)
CASVQGGGGNTIYF

SEQ ID NO: 481527 - protein, 16 aa, Homo sapiens
  CDR3 for alpha chain variable domain of TCR clone 240764 (TRAV26-1, TRAJ31)
CIVRPPVLNNNARLMF

SEQ ID NO: 481528 - protein, 15 aa, Homo sapiens
  CDR3 for beta chain variable domain of TCR clone 240764 (TRBV20-1, TRBJ2-7)
CSAESGTSGAYEQYF

SEQ ID NO: 481529 - protein, 15 aa, Homo sapiens
  CDR3 for alpha chain variable domain of TCR clone 240765 (TRAV8-3, TRAJ45)
CASSYSGGGADGLTF

SEQ ID NO: 481530 - protein, 12 aa, Homo sapiens
  CDR3 for beta chain variable domain of TCR clone 240765 (TRBV10-3, TRBJ2-7)
CLQTRVNYEQYF

SEQ ID NO: 481531 - protein, 14 aa, Homo sapiens
  CDR3 for alpha chain variable domain of TCR clone 240766 (TRAV26-1, TRAJ38)
CIADNAGNNRKLIW

SEQ ID NO: 481532 - protein, 13 aa, Homo sapiens
  CDR3 for beta chain variable domain of TCR clone 240766 (TRBV7-7, TRBJ2-5)
CASSRSGQETQYF

SEQ ID NO: 481533 - protein, 16 aa, Homo sapiens
  CDR3 for alpha chain variable domain of TCR clone 240767 (TRAV3, TRAJ21)
CSVRDIERGNFNKFYF

SEQ ID NO: 481534 - protein, 17 aa, Homo sapiens
  CDR3 for beta chain variable domain of TCR clone 240767 (TRBV15, TRBJ1-5)
CATSRAPPGTRNQPQHF

SEQ ID NO: 481535 - protein, 14 aa, Homo sapiens
  CDR3 for alpha chain variable domain of TCR clone 240768 (TRAV21, TRAJ45)
CAVSSGGGADGLTF

SEQ ID NO: 481536 - protein, 15 aa, Homo sapiens
  CDR3 for beta chain variable domain of TCR clone 240768 (TRBV10-2, TRBJ2-6)
CASSEQGTGANVLSF

SEQ ID NO: 481537 - protein, 14 aa, Homo sapiens
  CDR3 for alpha chain variable domain of TCR clone 240769 (TRAV9-2, TRAJ38)
CALSNAGNNRKLLW

SEQ ID NO: 481538 - protein, 15 aa, Homo sapiens
  CDR3 for beta chain variable domain of TCR clone 240769 (TRBV9, TRBJ2-1)
CASSRAGSSYNEQFF

SEQ ID NO: 481539 - protein, 13 aa, Homo sapiens
  CDR3 for alpha chain variable domain of TCR clone 240770 (TRAV13-1, TRAJ5)
CAASDTGRRALTF

SEQ ID NO: 481540 - protein, 16 aa, Homo sapiens
  CDR3 for beta chain variable domain of TCR clone 240770 (TRBV28, TRBJ2-7)
CASSPWVATGDLSQYF

SEQ ID NO: 481541 - protein, 16 aa, Homo sapiens
  CDR3 for alpha chain variable domain of TCR clone 240771 (TRAV12-2, TRAJ13)
CAVKKNGGYQKVPLEL

SEQ ID NO: 481542 - protein, 15 aa, Homo sapiens
  CDR3 for beta chain variable domain of TCR clone 240771 (TRBV27, TRBJ2-1)
CASSNGGGSSNEQFF

SEQ ID NO: 481543 - protein, 15 aa, Homo sapiens
  CDR3 for alpha chain variable domain of TCR clone 240772 (TRAV21, TRAJ45)
CAVSYAGGGADGLTF

SEQ ID NO: 481544 - protein, 13 aa, Homo sapiens
  CDR3 for beta chain variable domain of TCR clone 240772 (TRBV20-1, TRBJ2-5)
CSAATELQETQYF

SEQ ID NO: 481545 - protein, 11 aa, Homo sapiens
  CDR3 for alpha chain variable domain of TCR clone 240773 (TRAV1-2, TRAJ20)
CAVANDYKLSF

SEQ ID NO: 481546 - protein, 18 aa, Homo sapiens
  CDR3 for beta chain variable domain of TCR clone 240773 (TRBV20-1, TRBJ2-6)
RSAETTPTHGSGANILTF

SEQ ID NO: 481547 - protein, 13 aa, Homo sapiens
  CDR3 for alpha chain variable domain of TCR clone 240774 (TRAV21, TRAJ15)
CAVPNQAGTALIF

SEQ ID NO: 481548 - protein, 14 aa, Homo sapiens
  CDR3 for beta chain variable domain of TCR clone 240774 (TRBV7-2, TRBJ2-7)
CASSPKTSFYEQYF

SEQ ID NO: 481549 - protein, 14 aa, Homo sapiens
  CDR3 for alpha chain variable domain of TCR clone 240775 (TRAV12-2, TRAJ13)
SAVKKTGGYQKVTF

SEQ ID NO: 481550 - protein, 15 aa, Homo sapiens
  CDR3 for beta chain variable domain of TCR clone 240775 (TRBV20-1, TRBJ2-1)
CSARGIGGTYNEQFF

SEQ ID NO: 481551 - protein, 13 aa, Homo sapiens
  CDR3 for alpha chain variable domain of TCR clone 240776 (TRAV8-6, TRAJ8)
CAVSNTGFQQLVF

SEQ ID NO: 481552 - protein, 15 aa, Homo sapiens
  CDR3 for beta chain variable domain of TCR clone 240776 (TRBV28, TRBJ2-5)
CASSSGRTIQETQYF

SEQ ID NO: 481553 - protein, 12 aa, Homo sapiens
  CDR3 for alpha chain variable domain of TCR clone 240777 (TRAV3, TRAJ43)
CAVRDPNNDMRF

SEQ ID NO: 481554 - protein, 14 aa, Homo sapiens
  CDR3 for beta chain variable domain of TCR clone 240777 (TRBV28, TRBJ2-3)
CASSLTDLLDTQYF

SEQ ID NO: 481555 - protein, 13 aa, Homo sapiens
  CDR3 for alpha chain variable domain of TCR clone 240778 (TRAV13-1, TRAJ33)
CAASKAGNYQLIW

SEQ ID NO: 481556 - protein, 15 aa, Homo sapiens
  CDR3 for beta chain variable domain of TCR clone 240778 (TRBV2, TRBJ2-7)
EDSAMYFCASSEQYF

SEQ ID NO: 481557 - protein, 17 aa, Homo sapiens
  CDR3 for alpha chain variable domain of TCR clone 240779 (TRAV35, TRAJ38)
CAGQLQRNAGNNRKLIW

SEQ ID NO: 481558 - protein, 16 aa, Homo sapiens
  CDR3 for beta chain variable domain of TCR clone 240779 (TRBV20-1, TRBJ1-4)
CSAPGQGLLTNEKLFF

SEQ ID NO: 481559 - protein, 20 aa, Homo sapiens
  CDR3 for alpha chain variable domain of TCR clone 240780 (TRAV1-2, TRAJ10)
CLLPLCCERGTHGRGNKLTF

SEQ ID NO: 481560 - protein, 12 aa, Homo sapiens
  CDR3 for beta chain variable domain of TCR clone 240780 (TRBV7-8, TRBJ2-7)
CASSLGDREQYF

SEQ ID NO: 481561 - protein, 19 aa, Homo sapiens
  CDR3 for alpha chain variable domain of TCR clone 240781 (TRAV2, TRAJ20)
ILQVREADAAVFRDCKLSF

SEQ ID NO: 481562 - protein, 12 aa, Homo sapiens
  CDR3 for beta chain variable domain of TCR clone 240781 (TRBV11-2, TRBJ2-2)
CASSLGGGELFF

SEQ ID NO: 481563 - protein, 13 aa, Homo sapiens
  CDR3 for alpha chain variable domain of TCR clone 240782 (TRAV12-1, TRAJ49)
CVVSKSTGNQFYF

SEQ ID NO: 481564 - protein, 12 aa, Homo sapiens
  CDR3 for beta chain variable domain of TCR clone 240782 (TRBV12-4, TRBJ2-7)
CASSLGGYEQYF

SEQ ID NO: 481565 - protein, 14 aa, Homo sapiens
  CDR3 for alpha chain variable domain of TCR clone 240783 (TRAV17, TRAJ57)
CATDPQGGSEKRVF

SEQ ID NO: 481566 - protein, 15 aa, Homo sapiens
  CDR3 for beta chain variable domain of TCR clone 240783 (TRBV12-4, TRBJ1-2)
CASRLGVAGNYGYTF

SEQ ID NO: 481567 - protein, 16 aa, Homo sapiens
  CDR3 for alpha chain variable domain of TCR clone 240784 (TRAV3, TRAJ10)
CAVRDMRAGGGNKLTF

SEQ ID NO: 481568 - protein, 14 aa, Homo sapiens
  CDR3 for beta chain variable domain of TCR clone 240784 (TRBV25-1, TRBJ1-1)
CASTHLRGNTEAFF

SEQ ID NO: 481569 - protein, 14 aa, Homo sapiens
  CDR3 for alpha chain variable domain of TCR clone 240785 (TRAV9-2, TRAJ39)
CALYIYNAGNMLTF

SEQ ID NO: 481570 - protein, 13 aa, Homo sapiens
  CDR3 for beta chain variable domain of TCR clone 240785 (TRBV7-9, TRBJ1-4)
CATQIGPNEKLFF

SEQ ID NO: 481571 - protein, 16 aa, Homo sapiens
  CDR3 for alpha chain variable domain of TCR clone 240786 (TRAV13-1, TRAJ48)
CSKYRESNFGNEKLTF

SEQ ID NO: 481572 - protein, 17 aa, Homo sapiens
  CDR3 for beta chain variable domain of TCR clone 240786 (TRBV28, TRBJ2-1)
CARSSARQALTYNEQFF

SEQ ID NO: 481573 - protein, 17 aa, Homo sapiens
  CDR3 for alpha chain variable domain of TCR clone 240787 (TRAV3, TRAJ42)
CAVRDRDYGGSRGNLIF

SEQ ID NO: 481574 - protein, 14 aa, Homo sapiens
  CDR3 for beta chain variable domain of TCR clone 240787 (TRBV7-2, TRBJ2-5)
CASSPRGSSETQYF

SEQ ID NO: 481575 - protein, 11 aa, Homo sapiens
  CDR3 for alpha chain variable domain of TCR clone 240788 (TRAV13-1, TRAJ20)
CSPHGLYKLSF

SEQ ID NO: 481576 - protein, 14 aa, Homo sapiens
  CDR3 for beta chain variable domain of TCR clone 240788 (TRBV28, TRBJ2-5)
CTSTGAGGVETQYF

SEQ ID NO: 481577 - protein, 13 aa, Homo sapiens
  CDR3 for alpha chain variable domain of TCR clone 240789 (TRAV21, TRAJ20)
CAVGLRVDYKLSF

SEQ ID NO: 481578 - protein, 15 aa, Homo sapiens
  CDR3 for beta chain variable domain of TCR clone 240789 (TRBV11-3, TRBJ2-7)
CASSPGPASSYEQYF

SEQ ID NO: 481579 - protein, 15 aa, Homo sapiens
  CDR3 for alpha chain variable domain of TCR clone 240790 (TRAV1-2, TRAJ28)
CAVQYSGAGSFQLTF

SEQ ID NO: 481580 - protein, 13 aa, Homo sapiens
  CDR3 for beta chain variable domain of TCR clone 240790 (TRBV20-1, TRBJ2-7)
CSATHTSGYEQYF

SEQ ID NO: 481581 - protein, 15 aa, Homo sapiens
  CDR3 for alpha chain variable domain of TCR clone 240791 (TRAV13-1, TRAJ45)
CAASGSGGGADGLTF

SEQ ID NO: 481582 - protein, 14 aa, Homo sapiens
  CDR3 for beta chain variable domain of TCR clone 240791 (TRBV12-4, TRBJ1-2)
CASSFVGTAYCYTF

SEQ ID NO: 481583 - protein, 15 aa, Homo sapiens
  CDR3 for alpha chain variable domain of TCR clone 240792 (TRAV17, TRAJ35)
CATAFVIGFGNVLHC

SEQ ID NO: 481584 - protein, 16 aa, Homo sapiens
  CDR3 for beta chain variable domain of TCR clone 240792 (TRBV11-2, TRBJ2-7)
CASSPLAGGPRYEQYV

SEQ ID NO: 481585 - protein, 14 aa, Homo sapiens
  CDR3 for alpha chain variable domain of TCR clone 240793 (TRAV38-1, TRAJ54)
CAFMSPSGAPKLVF

SEQ ID NO: 481586 - protein, 16 aa, Homo sapiens
  CDR3 for beta chain variable domain of TCR clone 240793 (TRBV28, TRBJ2-1)
CASSLGGSGSYNEQFF

SEQ ID NO: 481587 - protein, 12 aa, Homo sapiens
  CDR3 for alpha chain variable domain of TCR clone 240794 (TRAV20, TRAJ33)
CAVRGSNYRLIW

SEQ ID NO: 481588 - protein, 13 aa, Homo sapiens
  CDR3 for beta chain variable domain of TCR clone 240794 (TRBV4-3, TRBJ1-1)
CASSPTGNTEAFF

SEQ ID NO: 481589 - protein, 12 aa, Homo sapiens
  CDR3 for alpha chain variable domain of TCR clone 240795 (TRAV29/DV5, TRAJ49)
CAATDTGNQFYF

SEQ ID NO: 481590 - protein, 13 aa, Homo sapiens
  CDR3 for beta chain variable domain of TCR clone 240795 (TRBV20-1, TRBJ1-1)
CSARVGGSTEAFF

SEQ ID NO: 481591 - protein, 15 aa, Homo sapiens
  CDR3 for alpha chain variable domain of TCR clone 240796 (TRAV8-3, TRAJ6)
CAVGPLGGRKLHTYI

SEQ ID NO: 481592 - protein, 14 aa, Homo sapiens
  CDR3 for beta chain variable domain of TCR clone 240796 (TRBV19, TRBJ2-2)
CASSTGQGAGELFF

SEQ ID NO: 481593 - protein, 13 aa, Homo sapiens
  CDR3 for alpha chain variable domain of TCR clone 240797 (TRAV8-3, TRAJ36)
CDVGATGANNLFF

SEQ ID NO: 481594 - protein, 15 aa, Homo sapiens
  CDR3 for beta chain variable domain of TCR clone 240797 (TRBV7-2, TRBJ1-2)
CASSPRAGWNYGYAF

SEQ ID NO: 481595 - protein, 14 aa, Homo sapiens
  CDR3 for alpha chain variable domain of TCR clone 240798 (TRAV17, TRAJ37)
CATDGSRNTGKLIF

SEQ ID NO: 481596 - protein, 13 aa, Homo sapiens
  CDR3 for beta chain variable domain of TCR clone 240798 (TRBV11-2, TRBJ2-1)
CASSLDLVNEQFF

SEQ ID NO: 481597 - protein, 14 aa, Homo sapiens
  CDR3 for alpha chain variable domain of TCR clone 240799 (TRAV16, TRAJ3)
CALSQYSSASKIIF

SEQ ID NO: 481598 - protein, 16 aa, Homo sapiens
  CDR3 for beta chain variable domain of TCR clone 240799 (TRBV19, TRBJ1-5)
CASSIDRGGPRQPQHF

SEQ ID NO: 481599 - protein, 15 aa, Homo sapiens
  CDR3 for alpha chain variable domain of TCR clone 240800 (TRAV8-3, TRAJ40)
CAAPSLGSGTSKYIF

SEQ ID NO: 481600 - protein, 15 aa, Homo sapiens
  CDR3 for beta chain variable domain of TCR clone 240800 (TRBV7-2, TRBJ2-1)
CASTHGTGIYNEQFF

SEQ ID NO: 481601 - protein, 13 aa, Homo sapiens
  CDR3 for alpha chain variable domain of TCR clone 240801 (TRAV13-1, TRAJ6)
CAASRGGSYIPTF

SEQ ID NO: 481602 - protein, 16 aa, Homo sapiens
  CDR3 for beta chain variable domain of TCR clone 240801 (TRBV7-3, TRBJ2-2)
CASSLKRGTLSGELFF

SEQ ID NO: 481603 - protein, 12 aa, Homo sapiens
  CDR3 for alpha chain variable domain of TCR clone 240802 (TRAV17, TRAJ20)
CATQSNDYKLSF

SEQ ID NO: 481604 - protein, 16 aa, Homo sapiens
  CDR3 for beta chain variable domain of TCR clone 240802 (TRBV7-9, TRBJ2-1)
CASSDVAGGSYNEQFF

SEQ ID NO: 481605 - protein, 12 aa, Homo sapiens
  CDR3 for alpha chain variable domain of TCR clone 240803 (TRAV35, TRAJ12)
CAGMDSSYNLIF

SEQ ID NO: 481606 - protein, 14 aa, Homo sapiens
  CDR3 for beta chain variable domain of TCR clone 240803 (TRBV28, TRBJ2-5)
CASSLYRGTETQYF

SEQ ID NO: 481607 - protein, 14 aa, Homo sapiens
  CDR3 for alpha chain variable domain of TCR clone 240804 (TRAV12-2, TRAJ17)
CAVLFKAARNKLTF

SEQ ID NO: 481608 - protein, 11 aa, Homo sapiens
  CDR3 for beta chain variable domain of TCR clone 240804 (TRBV29-1, TRBJ2-5)
CSEDRTGTQYF

SEQ ID NO: 481609 - protein, 14 aa, Homo sapiens
  CDR3 for alpha chain variable domain of TCR clone 240805 (TRAV13-1, TRAJ35)
CAASKGGFGNVLHC

SEQ ID NO: 481610 - protein, 13 aa, Homo sapiens
  CDR3 for beta chain variable domain of TCR clone 240805 (TRBV4-1, TRBJ2-2)
CASSQENTGELFF

SEQ ID NO: 481611 - protein, 11 aa, Homo sapiens
  CDR3 for alpha chain variable domain of TCR clone 240806 (TRAV3, TRAJ49)
CAPITGNQFYF

SEQ ID NO: 481612 - protein, 16 aa, Homo sapiens
  CDR3 for beta chain variable domain of TCR clone 240806 (TRBV5-1, TRBJ2-3)
CASSVLPMSSTDTQYF

SEQ ID NO: 481613 - protein, 12 aa, Homo sapiens
  CDR3 for alpha chain variable domain of TCR clone 240807 (TRAV13-1, TRAJ48)
CAANCGNEKLTF

SEQ ID NO: 481614 - protein, 12 aa, Homo sapiens
  CDR3 for beta chain variable domain of TCR clone 240807 (TRBV11-2, TRBJ2-1)
CASSPGNNEQFF

SEQ ID NO: 481615 - protein, 12 aa, Homo sapiens
  CDR3 for alpha chain variable domain of TCR clone 240808 (TRAV13-2, TRAJ23)
CAERHRGGKLIF

SEQ ID NO: 481616 - protein, 14 aa, Homo sapiens
  CDR3 for beta chain variable domain of TCR clone 240808 (TRBV6-1, TRBJ2-6)
CASQQGAGANVLTF

SEQ ID NO: 481617 - protein, 18 aa, Homo sapiens
  CDR3 for alpha chain variable domain of TCR clone 240809 (TRAV21, TRAJ52)
CAMRPSPAGGTSYGKLTF

SEQ ID NO: 481618 - protein, 17 aa, Homo sapiens
  CDR3 for beta chain variable domain of TCR clone 240809 (TRBV13, TRBJ2-3)
CASSLSRVAGGEEYAVF

SEQ ID NO: 481619 - protein, 15 aa, Homo sapiens
  CDR3 for alpha chain variable domain of TCR clone 240810 (TRAV12-1, TRAJ53)
CVVNRSGGSNYKLTF

SEQ ID NO: 481620 - protein, 14 aa, Homo sapiens
  CDR3 for beta chain variable domain of TCR clone 240810 (TRBV11-2, TRBJ2-5)
CASSRTGGIETQYF

SEQ ID NO: 481621 - protein, 13 aa, Homo sapiens
  CDR3 for alpha chain variable domain of TCR clone 240811 (TRAV1-1, TRAJ7)
CAVRDHGNDRLAF

SEQ ID NO: 481622 - protein, 20 aa, Homo sapiens
  CDR3 for beta chain variable domain of TCR clone 240811 (TRBV28, TRBJ2-3)
CASSLGVRPTSGRSTDTQYF

SEQ ID NO: 481623 - protein, 13 aa, Homo sapiens
  CDR3 for alpha chain variable domain of TCR clone 240812 (TRAV35, TRAJ43)
CAGYPYNNNDMRF

SEQ ID NO: 481624 - protein, 12 aa, Homo sapiens
  CDR3 for beta chain variable domain of TCR clone 240812 (TRBV7-9, TRBJ1-5)
CASSPQGQPQHF

SEQ ID NO: 481625 - protein, 13 aa, Homo sapiens
  CDR3 for alpha chain variable domain of TCR clone 240813 (TRAV12-1, TRAJ40)
CVVPTSGTYKYIF

SEQ ID NO: 481626 - protein, 14 aa, Homo sapiens
  CDR3 for beta chain variable domain of TCR clone 240813 (TRBV7-3, TRBJ2-1)
CASSLAGGTNEQFF

SEQ ID NO: 481627 - protein, 12 aa, Homo sapiens
  CDR3 for alpha chain variable domain of TCR clone 240814 (TRAV27, TRAJ9)
CAGESGGFKTTF

SEQ ID NO: 481628 - protein, 13 aa, Homo sapiens
  CDR3 for beta chain variable domain of TCR clone 240814 (TRBV7-9, TRBJ1-2)
CASSLKQNYGYTF

SEQ ID NO: 481629 - protein, 15 aa, Homo sapiens
  CDR3 for alpha chain variable domain of TCR clone 240815 (TRAV26-1, TRAJ29)
CIVRVEGSGNTPLVF

SEQ ID NO: 481630 - protein, 16 aa, Homo sapiens
  CDR3 for beta chain variable domain of TCR clone 240815 (TRBV11-2, TRBJ1-1)
CASSLRQGGEHSKAFF

SEQ ID NO: 481631 - protein, 15 aa, Homo sapiens
  CDR3 for alpha chain variable domain of TCR clone 240816 (TRAV2, TRAJ15)
CAVEDRNQAGTALIF

SEQ ID NO: 481632 - protein, 14 aa, Homo sapiens
  CDR3 for beta chain variable domain of TCR clone 240816 (TRBV7-2, TRBJ2-5)
CASSFTQGQETQYF

SEQ ID NO: 481633 - protein, 14 aa, Homo sapiens
  CDR3 for alpha chain variable domain of TCR clone 240817 (TRAV38-1, TRAJ45)
CASHSGGGADGLTF

SEQ ID NO: 481634 - protein, 17 aa, Homo sapiens
  CDR3 for beta chain variable domain of TCR clone 240817 (TRBV7-8, TRBJ2-6)
CASSAGTGGAGANVLTF

SEQ ID NO: 481635 - protein, 14 aa, Homo sapiens
  CDR3 for alpha chain variable domain of TCR clone 240818 (TRAV12-2, TRAJ13)
CAVKKTGGYQKVTF

SEQ ID NO: 481636 - protein, 14 aa, Homo sapiens
  CDR3 for beta chain variable domain of TCR clone 240818 (TRBV19, TRBJ2-1)
CASPTCVLSGEQFF

SEQ ID NO: 481637 - protein, 17 aa, Homo sapiens
  CDR3 for alpha chain variable domain of TCR clone 240819 (TRAV3, TRAJ6)
CAVRDGPRAGGSYIPTL

SEQ ID NO: 481638 - protein, 15 aa, Homo sapiens
  CDR3 for beta chain variable domain of TCR clone 240819 (TRBV7-9, TRBJ1-5)
CASSQGHQPNQPQHF

SEQ ID NO: 481639 - protein, 13 aa, Homo sapiens
  CDR3 for alpha chain variable domain of TCR clone 240820 (TRAV26-1, TRAJ12)
CIVRPDRSYKLIF

SEQ ID NO: 481640 - protein, 15 aa, Homo sapiens
  CDR3 for beta chain variable domain of TCR clone 240820 (TRBV7-2, TRBJ2-1)
CASTHGTGIYNEQFF

SEQ ID NO: 481641 - protein, 11 aa, Homo sapiens
  CDR3 for alpha chain variable domain of TCR clone 240821 (TRAV25, TRAJ23)
CLYNQGGKLIF

SEQ ID NO: 481642 - protein, 16 aa, Homo sapiens
  CDR3 for beta chain variable domain of TCR clone 240821 (TRBV29-1, TRBJ2-7)
CSVEVVGTSGSYEQYF

SEQ ID NO: 481643 - protein, 12 aa, Homo sapiens
  CDR3 for alpha chain variable domain of TCR clone 240822 (TRAV21, TRAJ20)
CAVRRNDYKLSF

SEQ ID NO: 481644 - protein, 14 aa, Homo sapiens
  CDR3 for beta chain variable domain of TCR clone 240822 (TRBV7-8, TRBJ2-7)
CASSPRDRVYEQYF

SEQ ID NO: 481645 - protein, 13 aa, Homo sapiens
  CDR3 for alpha chain variable domain of TCR clone 240823 (TRAV21, TRAJ15)
CAVANQAGTALIF

SEQ ID NO: 481646 - protein, 14 aa, Homo sapiens
  CDR3 for beta chain variable domain of TCR clone 240823 (TRBV27, TRBJ2-2)
CASSLGAATGELVF

SEQ ID NO: 481647 - protein, 16 aa, Homo sapiens
  CDR3 for alpha chain variable domain of TCR clone 240824 (TRAV38-1, TRAJ42)
CAFMKLGGGSQGNLIF

SEQ ID NO: 481648 - protein, 13 aa, Homo sapiens
  CDR3 for beta chain variable domain of TCR clone 240824 (TRBV4-2, TRBJ1-1)
CASSQAGNTEAFF

SEQ ID NO: 481649 - protein, 12 aa, Homo sapiens
  CDR3 for alpha chain variable domain of TCR clone 240825 (TRAV1-2, TRAJ33)
CAALDSNYQLIW

SEQ ID NO: 481650 - protein, 16 aa, Homo sapiens
  CDR3 for beta chain variable domain of TCR clone 240825 (TRBV7-7, TRBJ2-1)
CASSLASGTSYNEQFF

SEQ ID NO: 481651 - protein, 15 aa, Homo sapiens
  CDR3 for alpha chain variable domain of TCR clone 240826 (TRAV8-4, TRAJ13)
CAVSDWGGGYQNVTF

SEQ ID NO: 481652 - protein, 15 aa, Homo sapiens
  CDR3 for beta chain variable domain of TCR clone 240826 (TRBV25-1, TRBJ1-4)
CASSPGDSTNEKLFF

SEQ ID NO: 481653 - protein, 13 aa, Homo sapiens
  CDR3 for alpha chain variable domain of TCR clone 240827 (TRAV21, TRAJ27)
CAALPGNAGKPTF

SEQ ID NO: 481654 - protein, 14 aa, Homo sapiens
  CDR3 for beta chain variable domain of TCR clone 240827 (TRBV7-6, TRBJ2-3)
CASSLGTVTDTQYF

SEQ ID NO: 481655 - protein, 17 aa, Homo sapiens
  CDR3 for alpha chain variable domain of TCR clone 240828 (TRAV36/DV7, TRAJ52)
CAVAQRAGGTSYGKLTF

SEQ ID NO: 481656 - protein, 15 aa, Homo sapiens
  CDR3 for beta chain variable domain of TCR clone 240828 (TRBV6-5, TRBJ1-2)
CASSYSQAFNYVYTF

SEQ ID NO: 481657 - protein, 20 aa, Homo sapiens
  CDR3 for alpha chain variable domain of TCR clone 240829 (TRAV26-1, TRAJ42)
CCVLLHRQTYYGGSQGNLIF

SEQ ID NO: 481658 - protein, 15 aa, Homo sapiens
  CDR3 for beta chain variable domain of TCR clone 240829 (TRBV11-2, TRBJ2-6)
CASSPTVAGANVLTF

SEQ ID NO: 481659 - protein, 17 aa, Homo sapiens
  CDR3 for alpha chain variable domain of TCR clone 240830 (TRAV3, TRAJ6)
WAVRDGPRAGGSYIPTF

SEQ ID NO: 481660 - protein, 20 aa, Homo sapiens
  CDR3 for beta chain variable domain of TCR clone 240830 (TRBV28, TRBJ2-1)
CASTPIGRSPGLAGGNEQFF

SEQ ID NO: 481661 - protein, 12 aa, Homo sapiens
  CDR3 for alpha chain variable domain of TCR clone 240831 (TRAV8-3, TRAJ26)
CAGDNYGQNFVF

SEQ ID NO: 481662 - protein, 15 aa, Homo sapiens
  CDR3 for beta chain variable domain of TCR clone 240831 (TRBV5-1, TRBJ2-5)
CASSLGLAEQETQYF

SEQ ID NO: 481663 - protein, 14 aa, Homo sapiens
  CDR3 for alpha chain variable domain of TCR clone 240832 (TRAV1-2, TRAJ16)
CAVNRFSDGQKLLF

SEQ ID NO: 481664 - protein, 13 aa, Homo sapiens
  CDR3 for beta chain variable domain of TCR clone 240832 (TRBV4-2, TRBJ1-2)
CASSPLYGYGYTF

SEQ ID NO: 481665 - protein, 15 aa, Homo sapiens
  CDR3 for alpha chain variable domain of TCR clone 240833 (TRAV21, TRAJ37)
FAVRPTLSNTGKLIF

SEQ ID NO: 481666 - protein, 16 aa, Homo sapiens
  CDR3 for beta chain variable domain of TCR clone 240833 (TRBV24-1, TRBJ2-3)
CATSDRRQDLTDTQYF

SEQ ID NO: 481667 - protein, 13 aa, Homo sapiens
  CDR3 for alpha chain variable domain of TCR clone 240834 (TRAV3, TRAJ20)
CAVRDTPRYKLSF

SEQ ID NO: 481668 - protein, 14 aa, Homo sapiens
  CDR3 for beta chain variable domain of TCR clone 240834 (TRBV6-1, TRBJ1-3)
CASVQGGGGNTIYF

SEQ ID NO: 481669 - protein, 12 aa, Homo sapiens
  CDR3 for alpha chain variable domain of TCR clone 240835 (TRAV1-1, TRAJ43)
CAPRVSSTDMRF

SEQ ID NO: 481670 - protein, 15 aa, Homo sapiens
  CDR3 for beta chain variable domain of TCR clone 240835 (TRBV5-1, TRBJ2-7)
CASSLGDFTTYEQYF

SEQ ID NO: 481671 - protein, 16 aa, Homo sapiens
  CDR3 for alpha chain variable domain of TCR clone 240836 (TRAV30, TRAJ24)
CGTEIVDADSWGKFQF

SEQ ID NO: 481672 - protein, 12 aa, Homo sapiens
  CDR3 for beta chain variable domain of TCR clone 240836 (TRBV28, TRBJ2-7)
CASTWGGPEQYF

SEQ ID NO: 481673 - protein, 11 aa, Homo sapiens
  CDR3 for alpha chain variable domain of TCR clone 240837 (TRAV17, TRAJ36)
CAPTGAINLFF

SEQ ID NO: 481674 - protein, 12 aa, Homo sapiens
  CDR3 for beta chain variable domain of TCR clone 240837 (TRBV29-1, TRBJ2-3)
CSVVLGADTQYF

SEQ ID NO: 481675 - protein, 13 aa, Homo sapiens
  CDR3 for alpha chain variable domain of TCR clone 240838 (TRAV8-3, TRAJ28)
CAVGAVGSYQLTF

SEQ ID NO: 481676 - protein, 15 aa, Homo sapiens
  CDR3 for beta chain variable domain of TCR clone 240838 (TRBV7-9, TRBJ1-5)
CAGSQGHQPNQAQHF

SEQ ID NO: 481677 - protein, 12 aa, Homo sapiens
  CDR3 for alpha chain variable domain of TCR clone 240839 (TRAV2, TRAJ31)
CAVEDNNARLMF

SEQ ID NO: 481678 - protein, 15 aa, Homo sapiens
  CDR3 for beta chain variable domain of TCR clone 240839 (TRBV7-2, TRBJ2-1)
CASSFQADEYNEQFF

SEQ ID NO: 481679 - protein, 12 aa, Homo sapiens
  CDR3 for alpha chain variable domain of TCR clone 240840 (TRAV13-1, TRAJ21)
CAAKEGFNKFYF

SEQ ID NO: 481680 - protein, 14 aa, Homo sapiens
  CDR3 for beta chain variable domain of TCR clone 240840 (TRBV6-1, TRBJ1-3)
CASVQGGGGNTMYF

SEQ ID NO: 481681 - protein, 15 aa, Homo sapiens
  CDR3 for alpha chain variable domain of TCR clone 240841 (TRAV27, TRAJ38)
CAARRNAGNDRKLIW

SEQ ID NO: 481682 - protein, 15 aa, Homo sapiens
  CDR3 for beta chain variable domain of TCR clone 240841 (TRBV4-1, TRBJ1-4)
CASSDTGGTNEKLFF

SEQ ID NO: 481683 - protein, 17 aa, Homo sapiens
  CDR3 for alpha chain variable domain of TCR clone 240842 (TRAV3, TRAJ6)
CAVRDGPRAGGSYIPKF

SEQ ID NO: 481684 - protein, 14 aa, Homo sapiens
  CDR3 for beta chain variable domain of TCR clone 240842 (TRBV7-2, TRBJ2-7)
CASSPKTSFYEQFF

SEQ ID NO: 481685 - protein, 16 aa, Homo sapiens
  CDR3 for alpha chain variable domain of TCR clone 240843 (TRAV3, TRAJ23)
CAVKIGIYNQGGKLIF

SEQ ID NO: 481686 - protein, 17 aa, Homo sapiens
  CDR3 for beta chain variable domain of TCR clone 240843 (TRBV10-3, TRBJ2-6)
CAISESTAPSEANVLTF

SEQ ID NO: 481687 - protein, 18 aa, Homo sapiens
  CDR3 for alpha chain variable domain of TCR clone 240844 (TRAV12-3, TRAJ52)
CAMSVGGAGGTSYGKLTF

SEQ ID NO: 481688 - protein, 12 aa, Homo sapiens
  CDR3 for beta chain variable domain of TCR clone 240844 (TRBV12-4, TRBJ2-7)
CASSLGGYEQYF

SEQ ID NO: 481689 - protein, 13 aa, Homo sapiens
  CDR3 for alpha chain variable domain of TCR clone 240845 (TRAV8-2, TRAJ34)
CVVSDRRTDKLIF

SEQ ID NO: 481690 - protein, 15 aa, Homo sapiens
  CDR3 for beta chain variable domain of TCR clone 240845 (TRBV20-1, TRBJ2-3)
CSARVVVGSTDTQYF

SEQ ID NO: 481691 - protein, 16 aa, Homo sapiens
  CDR3 for alpha chain variable domain of TCR clone 240846 (TRAV12-3, TRAJ53)
CAMSPGSGGSNNKLTF

SEQ ID NO: 481692 - protein, 14 aa, Homo sapiens
  CDR3 for beta chain variable domain of TCR clone 240846 (TRBV11-3, TRBJ2-1)
CASSATTSGSIQFF

SEQ ID NO: 481693 - protein, 16 aa, Homo sapiens
  CDR3 for alpha chain variable domain of TCR clone 240847 (TRAV26-1, TRAJ53)
CIVRVAMGGSNYKLTF

SEQ ID NO: 481694 - protein, 14 aa, Homo sapiens
  CDR3 for beta chain variable domain of TCR clone 240847 (TRBV19, TRBJ2-5)
CASSMTGQQETQYF

SEQ ID NO: 481695 - protein, 12 aa, Homo sapiens
  CDR3 for alpha chain variable domain of TCR clone 240848 (TRAV17, TRAJ12)
CATLRSSYKLIF

SEQ ID NO: 481696 - protein, 16 aa, Homo sapiens
  CDR3 for beta chain variable domain of TCR clone 240848 (TRBV28, TRBJ2-7)
CASSLFVETVGPEQYF

SEQ ID NO: 481697 - protein, 14 aa, Homo sapiens
  CDR3 for alpha chain variable domain of TCR clone 240849 (TRAV17, TRAJ11)
CATDARSGYSTLTF

SEQ ID NO: 481698 - protein, 16 aa, Homo sapiens
  CDR3 for beta chain variable domain of TCR clone 240849 (TRBV7-9, TRBJ1-2)
CASSLGFSSGEDGYTF

SEQ ID NO: 481699 - protein, 10 aa, Homo sapiens
  CDR3 for alpha chain variable domain of TCR clone 240850 (TRAV30, TRAJ24)
CGTEIVMLTA

SEQ ID NO: 481700 - protein, 16 aa, Homo sapiens
  CDR3 for beta chain variable domain of TCR clone 240850 (TRBV12-4, TRBJ1-5)
CASSRPVGGSNQPQHF

SEQ ID NO: 481701 - protein, 13 aa, Homo sapiens
  CDR3 for alpha chain variable domain of TCR clone 240851 (TRAV21, TRAJ27)
CAARPGNTGKSTF

SEQ ID NO: 481702 - protein, 13 aa, Homo sapiens
  CDR3 for beta chain variable domain of TCR clone 240851 (TRBV7-3, TRBJ2-7)
CASSQAGGYEQYF

SEQ ID NO: 481703 - protein, 17 aa, Homo sapiens
  CDR3 for alpha chain variable domain of TCR clone 240852 (TRAV3, TRAJ6)
CAVRDGPRAGGSYIPTY

SEQ ID NO: 481704 - protein, 14 aa, Homo sapiens
  CDR3 for beta chain variable domain of TCR clone 240852 (TRBV7-2, TRBJ2-7)
CASSPKTSFYEQYF

SEQ ID NO: 481705 - protein, 11 aa, Homo sapiens
  CDR3 for alpha chain variable domain of TCR clone 240853 (TRAV39, TRAJ49)
CAVDISTQFYF

SEQ ID NO: 481706 - protein, 16 aa, Homo sapiens
  CDR3 for beta chain variable domain of TCR clone 240853 (TRBV20-1, TRBJ1-2)
CSASMGQGVANYGYTF

SEQ ID NO: 481707 - protein, 13 aa, Homo sapiens
  CDR3 for alpha chain variable domain of TCR clone 240854 (TRAV13-1, TRAJ6)
CAASKGGSYIPTF

SEQ ID NO: 481708 - protein, 14 aa, Homo sapiens
  CDR3 for beta chain variable domain of TCR clone 240854 (TRBV13, TRBJ2-5)
CASSLERVGETQYF

SEQ ID NO: 481709 - protein, 14 aa, Homo sapiens
  CDR3 for alpha chain variable domain of TCR clone 240855 (TRAV26-1, TRAJ57)
CIRAGQGGSEKLDF

SEQ ID NO: 481710 - protein, 13 aa, Homo sapiens
  CDR3 for beta chain variable domain of TCR clone 240855 (TRBV19, TRBJ2-7)
CASSLTTSYEQYF

SEQ ID NO: 481711 - protein, 10 aa, Homo sapiens
  CDR3 for alpha chain variable domain of TCR clone 240856 (TRAV8-6, TRAJ42)
CAVRGRKPRK

SEQ ID NO: 481712 - protein, 13 aa, Homo sapiens
  CDR3 for beta chain variable domain of TCR clone 240856 (TRBV7-3, TRBJ1-1)
CASSQDWGAEAFF

SEQ ID NO: 481713 - protein, 14 aa, Homo sapiens
  CDR3 for alpha chain variable domain of TCR clone 240857 (TRAV4, TRAJ6)
CLVGEAGGSYIPTF

SEQ ID NO: 481714 - protein, 13 aa, Homo sapiens
  CDR3 for beta chain variable domain of TCR clone 240857 (TRBV4-1, TRBJ2-1)
CASSQAGGDEQFF

SEQ ID NO: 481715 - protein, 12 aa, Homo sapiens
  CDR3 for alpha chain variable domain of TCR clone 240858 (TRAV21, TRAJ8)
CAVNTGFQKLVF

SEQ ID NO: 481716 - protein, 17 aa, Homo sapiens
  CDR3 for beta chain variable domain of TCR clone 240858 (TRBV28, TRBJ2-5)
CASSTPEGDALQETQYF

SEQ ID NO: 481717 - protein, 12 aa, Homo sapiens
  CDR3 for alpha chain variable domain of TCR clone 240859 (TRAV12-3, TRAJ17)
CAMTLTGNKLPF

SEQ ID NO: 481718 - protein, 17 aa, Homo sapiens
  CDR3 for beta chain variable domain of TCR clone 240859 (TRBV11-2, TRBJ2-1)
CASSLYPPGVECNEQFF

SEQ ID NO: 481719 - protein, 12 aa, Homo sapiens
  CDR3 for alpha chain variable domain of TCR clone 240860 (TRAV21, TRAJ39)
CAADNAGNMLTF

SEQ ID NO: 481720 - protein, 15 aa, Homo sapiens
  CDR3 for beta chain variable domain of TCR clone 240860 (TRBV20-1, TRBJ2-7)
CSARDRVSGMDEQYF

SEQ ID NO: 481721 - protein, 14 aa, Homo sapiens
  CDR3 for alpha chain variable domain of TCR clone 240861 (TRAV13-2, TRAJ32)
CAESLGGATNKLIF

SEQ ID NO: 481722 - protein, 15 aa, Homo sapiens
  CDR3 for beta chain variable domain of TCR clone 240861 (TRBV4-1, TRBJ1-4)
CASSDTGGTNEKLFF

SEQ ID NO: 481723 - protein, 11 aa, Homo sapiens
  CDR3 for alpha chain variable domain of TCR clone 240862 (TRAV2, TRAJ33)
CAVECNYQLIW

SEQ ID NO: 481724 - protein, 12 aa, Homo sapiens
  CDR3 for beta chain variable domain of TCR clone 240862 (TRBV11-2, TRBJ2-3)
GASRGAPNTQYF

SEQ ID NO: 481725 - protein, 12 aa, Homo sapiens
  CDR3 for alpha chain variable domain of TCR clone 240863 (TRAV2, TRAJ10)
CASTGGGNKLTF

SEQ ID NO: 481726 - protein, 14 aa, Homo sapiens
  CDR3 for beta chain variable domain of TCR clone 240863 (TRBV19, TRBJ2-5)
RASSTTGQQETQYF

SEQ ID NO: 481727 - protein, 13 aa, Homo sapiens
  CDR3 for alpha chain variable domain of TCR clone 240864 (TRAV13-1, TRAJ28)
CAANEAGSYQLTF

SEQ ID NO: 481728 - protein, 14 aa, Homo sapiens
  CDR3 for beta chain variable domain of TCR clone 240864 (TRBV10-3, TRBJ2-1)
CAIRTDRGLNEQFF

SEQ ID NO: 481729 - protein, 13 aa, Homo sapiens
  CDR3 for alpha chain variable domain of TCR clone 240865 (TRAV22, TRAJ29)
CAVGGSGNTPLVF

SEQ ID NO: 481730 - protein, 13 aa, Homo sapiens
  CDR3 for beta chain variable domain of TCR clone 240865 (TRBV4-2, TRBJ1-1)
CTSSQAGNTEAFF

SEQ ID NO: 481731 - protein, 13 aa, Homo sapiens
  CDR3 for alpha chain variable domain of TCR clone 240866 (TRAV3, TRAJ20)
CAVRSLNDYKLSF

SEQ ID NO: 481732 - protein, 13 aa, Homo sapiens
  CDR3 for beta chain variable domain of TCR clone 240866 (TRBV11-3, TRBJ2-7)
CASSLDKLYEQYF

SEQ ID NO: 481733 - protein, 14 aa, Homo sapiens
  CDR3 for alpha chain variable domain of TCR clone 240867 (TRAV1-2, TRAJ8)
CAVREDTGFQKLVF

SEQ ID NO: 481734 - protein, 15 aa, Homo sapiens
  CDR3 for beta chain variable domain of TCR clone 240867 (TRBV4-1, TRBJ2-7)
CASSQNTGRLYERYF

SEQ ID NO: 481735 - protein, 16 aa, Homo sapiens
  CDR3 for alpha chain variable domain of TCR clone 240868 (TRAV3, TRAJ37)
CAVRGKGSGNTGKLVF

SEQ ID NO: 481736 - protein, 16 aa, Homo sapiens
  CDR3 for beta chain variable domain of TCR clone 240868 (TRBV28, TRBJ1-5)
CASSFRGGYSNQPQHF

SEQ ID NO: 481737 - protein, 13 aa, Homo sapiens
  CDR3 for alpha chain variable domain of TCR clone 240869 (TRAV27, TRAJ8)
CAGGPTGFQKLVF

SEQ ID NO: 481738 - protein, 15 aa, Homo sapiens
  CDR3 for beta chain variable domain of TCR clone 240869 (TRBV7-9, TRBJ1-5)
CASSQGHQPNQPQHF

SEQ ID NO: 481739 - protein, 14 aa, Homo sapiens
  CDR3 for alpha chain variable domain of TCR clone 240870 (TRAV38-1, TRAJ40)
CALRPTSGTYKYIF

SEQ ID NO: 481740 - protein, 16 aa, Homo sapiens
  CDR3 for beta chain variable domain of TCR clone 240870 (TRBV12-4, TRBJ1-4)
CASSLKGIGHGEKLFF

SEQ ID NO: 481741 - protein, 14 aa, Homo sapiens
  CDR3 for alpha chain variable domain of TCR clone 240871 (TRAV2, TRAJ15)
CAVGTGQAGTALIF

SEQ ID NO: 481742 - protein, 18 aa, Homo sapiens
  CDR3 for beta chain variable domain of TCR clone 240871 (TRBV11-2, TRBJ2-3)
CASSLGGASRGAPNTQYF

SEQ ID NO: 481743 - protein, 18 aa, Homo sapiens
  CDR3 for alpha chain variable domain of TCR clone 240872 (TRAV21, TRAJ52)
CAVRPSPAGGTSYGKLTF

SEQ ID NO: 481744 - protein, 16 aa, Homo sapiens
  CDR3 for beta chain variable domain of TCR clone 240872 (TRBV7-3, TRBJ2-2)
CAGSLKRGTLSGELFF

SEQ ID NO: 481745 - protein, 17 aa, Homo sapiens
  CDR3 for alpha chain variable domain of TCR clone 240873 (TRAV26-2, TRAJ42)
CILRDVGYGGSQGNLIF

SEQ ID NO: 481746 - protein, 13 aa, Homo sapiens
  CDR3 for beta chain variable domain of TCR clone 240873 (TRBV20-1, TRBJ1-1)
CSARGGGNTEAFF

SEQ ID NO: 481747 - protein, 15 aa, Homo sapiens
  CDR3 for alpha chain variable domain of TCR clone 240874 (TRAV34, TRAJ38)
CGADFTPGNNRKLIW

SEQ ID NO: 481748 - protein, 16 aa, Homo sapiens
  CDR3 for beta chain variable domain of TCR clone 240874 (TRBV12-5, TRBJ2-5)
CASGPRNSGNQETQYF

SEQ ID NO: 481749 - protein, 14 aa, Homo sapiens
  CDR3 for alpha chain variable domain of TCR clone 240875 (TRAV12-2, TRAJ17)
CAVLFKAAGNKLTF

SEQ ID NO: 481750 - protein, 14 aa, Homo sapiens
  CDR3 for beta chain variable domain of TCR clone 240875 (TRBV7-8, TRBJ2-5)
CASSATGVQETQYF

SEQ ID NO: 481751 - protein, 15 aa, Homo sapiens
  CDR3 for alpha chain variable domain of TCR clone 240876 (TRAV17, TRAJ57)
CATGPSQGGSEKLVF

SEQ ID NO: 481752 - protein, 15 aa, Homo sapiens
  CDR3 for beta chain variable domain of TCR clone 240876 (TRBV7-6, TRBJ2-5)
CASSKPTGPQETQYF

SEQ ID NO: 481753 - protein, 15 aa, Homo sapiens
  CDR3 for alpha chain variable domain of TCR clone 240877 (TRAV21, TRAJ32)
CAVNSYGGASNKLIF

SEQ ID NO: 481754 - protein, 18 aa, Homo sapiens
  CDR3 for beta chain variable domain of TCR clone 240877 (TRBV7-9, TRBJ2-1)
CASSTGLAGGSSYNEQFF

SEQ ID NO: 481755 - protein, 13 aa, Homo sapiens
  CDR3 for alpha chain variable domain of TCR clone 240878 (TRAV17, TRAJ9)
CATFLTGGFKPIF

SEQ ID NO: 481756 - protein, 16 aa, Homo sapiens
  CDR3 for beta chain variable domain of TCR clone 240878 (TRBV5-7, TRBJ1-4)
CASSPSGGLKTEKLCF

SEQ ID NO: 481757 - protein, 13 aa, Homo sapiens
  CDR3 for alpha chain variable domain of TCR clone 240879 (TRAV21, TRAJ37)
CAVVAGNTGKLIF

SEQ ID NO: 481758 - protein, 13 aa, Homo sapiens
  CDR3 for beta chain variable domain of TCR clone 240879 (TRBV11-3, TRBJ1-1)
CASSWDGNTEAFF

SEQ ID NO: 481759 - protein, 14 aa, Homo sapiens
  CDR3 for alpha chain variable domain of TCR clone 240880 (TRAV12-3, TRAJ13)
RAMKNSGGYQKVTF

SEQ ID NO: 481760 - protein, 16 aa, Homo sapiens
  CDR3 for beta chain variable domain of TCR clone 240880 (TRBV5-1, TRBJ2-5)
CASSSSGLGGAETQYF

SEQ ID NO: 481761 - protein, 13 aa, Homo sapiens
  CDR3 for alpha chain variable domain of TCR clone 240881 (TRAV17, TRAJ8)
CATGPVGFQKIVF

SEQ ID NO: 481762 - protein, 15 aa, Homo sapiens
  CDR3 for beta chain variable domain of TCR clone 240881 (TRBV20-1, TRBJ2-5)
CSAGRLPSGQETQYF

SEQ ID NO: 481763 - protein, 18 aa, Homo sapiens
  CDR3 for alpha chain variable domain of TCR clone 240882 (TRAV26-2, TRAJ54)
CILRDVEVGIQGAQKLVF

SEQ ID NO: 481764 - protein, 16 aa, Homo sapiens
  CDR3 for beta chain variable domain of TCR clone 240882 (TRBV5-4, TRBJ2-3)
CASQQPGAGGADTQYF

SEQ ID NO: 481765 - protein, 16 aa, Homo sapiens
  CDR3 for alpha chain variable domain of TCR clone 240883 (TRAV4, TRAJ9)
CLVGDPNRPGGFKTIF

SEQ ID NO: 481766 - protein, 16 aa, Homo sapiens
  CDR3 for beta chain variable domain of TCR clone 240883 (TRBV28, TRBJ1-4)
CASNPPYRGRSEKLFF

SEQ ID NO: 481767 - protein, 13 aa, Homo sapiens
  CDR3 for alpha chain variable domain of TCR clone 240884 (TRAV17, TRAJ9)
CATDYTGGFKTIF

SEQ ID NO: 481768 - protein, 17 aa, Homo sapiens
  CDR3 for beta chain variable domain of TCR clone 240884 (TRBV19, TRBJ2-2)
CASSIGTGGANTGELFF

SEQ ID NO: 481769 - protein, 18 aa, Homo sapiens
  CDR3 for alpha chain variable domain of TCR clone 240885 (TRAV12-3, TRAJ52)
CAMSVGGAGGTSYGKLTF

SEQ ID NO: 481770 - protein, 13 aa, Homo sapiens
  CDR3 for beta chain variable domain of TCR clone 240885 (TRBV20-1, TRBJ2-2)
CSASAAGTGELFF

SEQ ID NO: 481771 - protein, 12 aa, Homo sapiens
  CDR3 for alpha chain variable domain of TCR clone 240886 (TRAV12-3, TRAJ17)
CAMTLTGNKLTF

SEQ ID NO: 481772 - protein, 12 aa, Homo sapiens
  CDR3 for beta chain variable domain of TCR clone 240886 (TRBV3-1, TRBJ2-5)
CASSQRGETQYF

SEQ ID NO: 481773 - protein, 18 aa, Homo sapiens
  CDR3 for alpha chain variable domain of TCR clone 240887 (TRAV1-1, TRAJ4)
CAVRVSFLVATISRFLEQ

SEQ ID NO: 481774 - protein, 16 aa, Homo sapiens
  CDR3 for beta chain variable domain of TCR clone 240887 (TRBV28, TRBJ1-4)
CASSPPYRGRSEKLFF

SEQ ID NO: 481775 - protein, 14 aa, Homo sapiens
  CDR3 for alpha chain variable domain of TCR clone 240888 (TRAV1-2, TRAJ8)
CALREDTVFQKLVF

SEQ ID NO: 481776 - protein, 15 aa, Homo sapiens
  CDR3 for beta chain variable domain of TCR clone 240888 (TRBV6-3, TRBJ2-7)
CASSSPGTVFYEQYF

SEQ ID NO: 481777 - protein, 15 aa, Homo sapiens
  CDR3 for alpha chain variable domain of TCR clone 240889 (TRAV13-2, TRAJ16)
CAENDRFSDGQKLLF

SEQ ID NO: 481778 - protein, 14 aa, Homo sapiens
  CDR3 for beta chain variable domain of TCR clone 240889 (TRBV4-2, TRBJ1-5)
CANSRGRGNQPQHF

SEQ ID NO: 481779 - protein, 12 aa, Homo sapiens
  CDR3 for alpha chain variable domain of TCR clone 240890 (TRAV38-1, TRAJ47)
CAFETYGNKLVF

SEQ ID NO: 481780 - protein, 15 aa, Homo sapiens
  CDR3 for beta chain variable domain of TCR clone 240890 (TRBV20-1, TRBJ2-7)
CSARKGLAESYEQFF

SEQ ID NO: 481781 - protein, 13 aa, Homo sapiens
  CDR3 for alpha chain variable domain of TCR clone 240891 (TRAV8-4, TRAJ10)
CAAFTGGGNKLTF

SEQ ID NO: 481782 - protein, 18 aa, Homo sapiens
  CDR3 for beta chain variable domain of TCR clone 240891 (TRBV7-9, TRBJ2-7)
CASSLTTSGSRTWYEQYF

SEQ ID NO: 481783 - protein, 14 aa, Homo sapiens
  CDR3 for alpha chain variable domain of TCR clone 240892 (TRAV23/DV6, TRAJ57)
CAASNQGGTKKLVF

SEQ ID NO: 481784 - protein, 13 aa, Homo sapiens
  CDR3 for beta chain variable domain of TCR clone 240892 (TRBV11-2, TRBJ2-7)
CASSSYPSYEQYF

SEQ ID NO: 481785 - protein, 15 aa, Homo sapiens
  CDR3 for alpha chain variable domain of TCR clone 240893 (TRAV25, TRAJ53)
CAATGGGGSNYKLTF

SEQ ID NO: 481786 - protein, 14 aa, Homo sapiens
  CDR3 for beta chain variable domain of TCR clone 240893 (TRBV4-1, TRBJ2-2)
CASSQAVNTGELFF

SEQ ID NO: 481787 - protein, 18 aa, Homo sapiens
  CDR3 for alpha chain variable domain of TCR clone 240894 (TRAV12-1, TRAJ15)
CVVSPAGQPGRNCSDLWE

SEQ ID NO: 481788 - protein, 13 aa, Homo sapiens
  CDR3 for beta chain variable domain of TCR clone 240894 (TRBV7-2, TRBJ2-4)
CASSREHANIQYF

SEQ ID NO: 481789 - protein, 12 aa, Homo sapiens
  CDR3 for alpha chain variable domain of TCR clone 240895 (TRAV12-3, TRAJ17)
CAMTLTGNKLTF

SEQ ID NO: 481790 - protein, 14 aa, Homo sapiens
  CDR3 for beta chain variable domain of TCR clone 240895 (TRBV20-1, TRBJ2-1)
CSPNDEASYNEQFF

SEQ ID NO: 481791 - protein, 14 aa, Homo sapiens
  CDR3 for alpha chain variable domain of TCR clone 240896 (TRAV21, TRAJ36)
CADQDWGKQPLLWD

SEQ ID NO: 481792 - protein, 13 aa, Homo sapiens
  CDR3 for beta chain variable domain of TCR clone 240896 (TRBV29-1, TRBJ2-3)
CSATRGGRDTQYF

SEQ ID NO: 481793 - protein, 20 aa, Homo sapiens
  CDR3 for alpha chain variable domain of TCR clone 240897 (TRAV2, )
CAVEEQIPAIQNPDPAVYQL

SEQ ID NO: 481794 - protein, 15 aa, Homo sapiens
  CDR3 for beta chain variable domain of TCR clone 240897 (TRBV7-2, TRBJ2-3)
CASSSTGLETDTQYF

SEQ ID NO: 481795 - protein, 20 aa, Homo sapiens
  CDR3 for alpha chain variable domain of TCR clone 240898 (TRAV30, TRAJ54)
SAAQSRSETQVVQGAQKLVF

SEQ ID NO: 481796 - protein, 11 aa, Homo sapiens
  CDR3 for beta chain variable domain of TCR clone 240898 (TRBV25-1, TRBJ2-4)
CQSGDQNIQYF

SEQ ID NO: 481797 - protein, 19 aa, Homo sapiens
  CDR3 for alpha chain variable domain of TCR clone 240899 (TRAV26-1, TRAJ28)
CIVRVAHAYSGAGSYQLTF

SEQ ID NO: 481798 - protein, 17 aa, Homo sapiens
  CDR3 for beta chain variable domain of TCR clone 240899 (TRBV4-1, TRBJ1-4)
CASSQEGPRGVEENLFF

SEQ ID NO: 481799 - protein, 12 aa, Homo sapiens
  CDR3 for alpha chain variable domain of TCR clone 240900 (TRAV27, TRAJ35)
CAGADFGNVLHC

SEQ ID NO: 481800 - protein, 15 aa, Homo sapiens
  CDR3 for beta chain variable domain of TCR clone 240900 (TRBV7-3, TRBJ2-1)
CASSPTGGGEVEQFF

SEQ ID NO: 481801 - protein, 11 aa, Homo sapiens
  CDR3 for alpha chain variable domain of TCR clone 240901 (TRAV29/DV5, TRAJ31)
CAAMNNARLMF

SEQ ID NO: 481802 - protein, 16 aa, Homo sapiens
  CDR3 for beta chain variable domain of TCR clone 240901 (TRBV12-4, TRBJ1-4)
CASSSNRETTNEKLFF

SEQ ID NO: 481803 - protein, 11 aa, Homo sapiens
  CDR3 for alpha chain variable domain of TCR clone 240902 (TRAV1-2, TRAJ20)
CAVANDYKLSF

SEQ ID NO: 481804 - protein, 18 aa, Homo sapiens
  CDR3 for beta chain variable domain of TCR clone 240902 (TRBV20-1, TRBJ2-6)
CSAETTPTHGSGAIVLTF

SEQ ID NO: 481805 - protein, 14 aa, Homo sapiens
  CDR3 for alpha chain variable domain of TCR clone 240903 (TRAV1-2, TRAJ16)
CAVNRFSDGQKLIF

SEQ ID NO: 481806 - protein, 14 aa, Homo sapiens
  CDR3 for beta chain variable domain of TCR clone 240903 (TRBV7-9, TRBJ2-3)
CASSLEDGTDTQYF

SEQ ID NO: 481807 - protein, 20 aa, Homo sapiens
  CDR3 for alpha chain variable domain of TCR clone 240904 (TRAV12-3, TRAJ41)
SLFIRDSQPSDSATPEALNF

SEQ ID NO: 481808 - protein, 15 aa, Homo sapiens
  CDR3 for beta chain variable domain of TCR clone 240904 (TRBV5-1, TRBJ2-5)
CASSLSQGVVATQYF

SEQ ID NO: 481809 - protein, 11 aa, Homo sapiens
  CDR3 for alpha chain variable domain of TCR clone 240905 (TRAV2, TRAJ13)
CASGGYQKVTF

SEQ ID NO: 481810 - protein, 14 aa, Homo sapiens
  CDR3 for beta chain variable domain of TCR clone 240905 (TRBV11-2, TRBJ2-5)
CASRPLAGRETQYF

SEQ ID NO: 481811 - protein, 11 aa, Homo sapiens
  CDR3 for alpha chain variable domain of TCR clone 240906 (TRAV17, TRAJ43)
CATPRSNDMRF

SEQ ID NO: 481812 - protein, 16 aa, Homo sapiens
  CDR3 for beta chain variable domain of TCR clone 240906 (TRBV11-2, TRBJ2-7)
CASSPTTGGVSYGQYF

SEQ ID NO: 481813 - protein, 17 aa, Homo sapiens
  CDR3 for alpha chain variable domain of TCR clone 240907 (TRAV8-6, TRAJ58)
CAVSSWVGETSGSMLTF

SEQ ID NO: 481814 - protein, 12 aa, Homo sapiens
  CDR3 for beta chain variable domain of TCR clone 240907 (TRBV28, TRBJ2-3)
CASSLYRDTQYF

SEQ ID NO: 481815 - protein, 15 aa, Homo sapiens
  CDR3 for alpha chain variable domain of TCR clone 240908 (TRAV17, TRAJ13)
CATDAGSGGYQKVTF

SEQ ID NO: 481816 - protein, 13 aa, Homo sapiens
  CDR3 for beta chain variable domain of TCR clone 240908 (TRBV12-4, TRBJ2-5)
CASSPGTEETQYF

SEQ ID NO: 481817 - protein, 16 aa, Homo sapiens
  CDR3 for alpha chain variable domain of TCR clone 240909 (TRAV13-1, TRAJ48)
CAASIFGNFGNEKLTF

SEQ ID NO: 481818 - protein, 16 aa, Homo sapiens
  CDR3 for beta chain variable domain of TCR clone 240909 (TRBV19, TRBJ2-7)
CASSLIAGTYFYEQYF

SEQ ID NO: 481819 - protein, 14 aa, Homo sapiens
  CDR3 for alpha chain variable domain of TCR clone 240910 (TRAV2, TRAJ9)
CAVEDRSGGFKTIF

SEQ ID NO: 481820 - protein, 11 aa, Homo sapiens
  CDR3 for beta chain variable domain of TCR clone 240910 (TRBV20-1, TRBJ2-1)
CSLSSGSEQFF

SEQ ID NO: 481821 - protein, 11 aa, Homo sapiens
  CDR3 for alpha chain variable domain of TCR clone 240911 (TRAV1-2, TRAJ11)
CAVRGYSTLTF

SEQ ID NO: 481822 - protein, 15 aa, Homo sapiens
  CDR3 for beta chain variable domain of TCR clone 240911 (TRBV3-1, TRBJ2-2)
CGSSQDWTRAGELFF

SEQ ID NO: 481823 - protein, 13 aa, Homo sapiens
  CDR3 for alpha chain variable domain of TCR clone 240912 (TRAV13-1, TRAJ5)
CAARVTGRRALTF

SEQ ID NO: 481824 - protein, 12 aa, Homo sapiens
  CDR3 for beta chain variable domain of TCR clone 240912 (TRBV3-1, TRBJ2-5)
CANSQRGETQYF

SEQ ID NO: 481825 - protein, 12 aa, Homo sapiens
  CDR3 for alpha chain variable domain of TCR clone 240913 (TRAV21, TRAJ29)
CAVTSGNTPLVF

SEQ ID NO: 481826 - protein, 15 aa, Homo sapiens
  CDR3 for beta chain variable domain of TCR clone 240913 (TRBV12-4, TRBJ1-2)
CASRLGVEGNYGYTF

SEQ ID NO: 481827 - protein, 17 aa, Homo sapiens
  CDR3 for alpha chain variable domain of TCR clone 240914 (TRAV27, TRAJ42)
CAERVIYYGGSQGNLIF

SEQ ID NO: 481828 - protein, 11 aa, Homo sapiens
  CDR3 for beta chain variable domain of TCR clone 240914 (TRBV29-1, TRBJ2-5)
CSEDRTGTQYF

SEQ ID NO: 481829 - protein, 12 aa, Homo sapiens
  CDR3 for alpha chain variable domain of TCR clone 240915 (TRAV9-2, TRAJ49)
CALSNTGNQFYF

SEQ ID NO: 481830 - protein, 12 aa, Homo sapiens
  CDR3 for beta chain variable domain of TCR clone 240915 (TRBV11-2, TRBJ2-2)
CASSLGGGELFF

SEQ ID NO: 481831 - protein, 12 aa, Homo sapiens
  CDR3 for alpha chain variable domain of TCR clone 240916 (TRAV2, TRAJ9)
CAVGAGGFKTIF

SEQ ID NO: 481832 - protein, 13 aa, Homo sapiens
  CDR3 for beta chain variable domain of TCR clone 240916 (TRBV4-1, TRBJ2-5)
CASSLTRGETQYF

SEQ ID NO: 481833 - protein, 14 aa, Homo sapiens
  CDR3 for alpha chain variable domain of TCR clone 240917 (TRAV12-2, TRAJ15)
CAPHTGQAGTALIF

SEQ ID NO: 481834 - protein, 17 aa, Homo sapiens
  CDR3 for beta chain variable domain of TCR clone 240917 (TRBV5-5, TRBJ1-2)
CASSLGSLDGQSEGYSF

SEQ ID NO: 481835 - protein, 12 aa, Homo sapiens
  CDR3 for alpha chain variable domain of TCR clone 240918 (TRAV13-2, TRAJ41)
CAKNIGRYALNF

SEQ ID NO: 481836 - protein, 12 aa, Homo sapiens
  CDR3 for beta chain variable domain of TCR clone 240918 (TRBV7-9, TRBJ1-1)
CASSLSGGVALF

SEQ ID NO: 481837 - protein, 12 aa, Homo sapiens
  CDR3 for alpha chain variable domain of TCR clone 240919 (TRAV13-2, TRAJ8)
CAPWVGFQKLVF

SEQ ID NO: 481838 - protein, 14 aa, Homo sapiens
  CDR3 for beta chain variable domain of TCR clone 240919 (TRBV18, TRBJ1-5)
CASSRQQRNQPQHF

SEQ ID NO: 481839 - protein, 14 aa, Homo sapiens
  CDR3 for alpha chain variable domain of TCR clone 240920 (TRAV8-3, TRAJ36)
CAVGPITGANNVFF

SEQ ID NO: 481840 - protein, 15 aa, Homo sapiens
  CDR3 for beta chain variable domain of TCR clone 240920 (TRBV4-1, TRBJ2-1)
CASSQDPGNYNEQFF

SEQ ID NO: 481841 - protein, 13 aa, Homo sapiens
  CDR3 for alpha chain variable domain of TCR clone 240921 (TRAV2, TRAJ15)
CAVASQAGTALIF

SEQ ID NO: 481842 - protein, 14 aa, Homo sapiens
  CDR3 for beta chain variable domain of TCR clone 240921 (TRBV6-1, TRBJ1-3)
CASVQGGGGDTIYF

SEQ ID NO: 481843 - protein, 23 aa, Homo sapiens
  CDR3 for alpha chain variable domain of TCR clone 240922 (TRAV21, TRAJ32)
CDVEIMVVLQTSSSLELALCLLF

SEQ ID NO: 481844 - protein, 13 aa, Homo sapiens
  CDR3 for beta chain variable domain of TCR clone 240922 (TRBV2, TRBJ1-6)
CASGRGGISPLHF

SEQ ID NO: 481845 - protein, 13 aa, Homo sapiens
  CDR3 for alpha chain variable domain of TCR clone 240923 (TRAV29/DV5, TRAJ31)
CAASRNNNAILMF

SEQ ID NO: 481846 - protein, 16 aa, Homo sapiens
  CDR3 for beta chain variable domain of TCR clone 240923 (TRBV20-1, TRBJ1-4)
CSAPGQGLLTNEKLFF

SEQ ID NO: 481847 - protein, 13 aa, Homo sapiens
  CDR3 for alpha chain variable domain of TCR clone 240924 (TRAV3, TRAJ20)
CAVRDTGDYKLSF

SEQ ID NO: 481848 - protein, 13 aa, Homo sapiens
  CDR3 for beta chain variable domain of TCR clone 240924 (TRBV19, TRBJ2-7)
CASSIDRAYEQYF

SEQ ID NO: 481849 - protein, 21 aa, Homo sapiens
  CDR3 for alpha chain variable domain of TCR clone 240925 (TRAV12-1, TRAJ32)
SSVIQPPTSMNYGGATNRLIF

SEQ ID NO: 481850 - protein, 15 aa, Homo sapiens
  CDR3 for beta chain variable domain of TCR clone 240925 (TRBV7-9, TRBJ2-2)
CASGPLDTFPGELFF

SEQ ID NO: 481851 - protein, 14 aa, Homo sapiens
  CDR3 for alpha chain variable domain of TCR clone 240926 (TRAV1-2, TRAJ16)
CAVNRFSDGQKLLF

SEQ ID NO: 481852 - protein, 15 aa, Homo sapiens
  CDR3 for beta chain variable domain of TCR clone 240926 (TRBV12-4, TRBJ1-2)
CASSFPRGLSYGYTF

SEQ ID NO: 481853 - protein, 14 aa, Homo sapiens
  CDR3 for alpha chain variable domain of TCR clone 240927 (TRAV12-2, TRAJ40)
CAVKIPSGTFKYIF

SEQ ID NO: 481854 - protein, 12 aa, Homo sapiens
  CDR3 for beta chain variable domain of TCR clone 240927 (TRBV11-2, TRBJ2-1)
CASSPGNNEQFF

SEQ ID NO: 481855 - protein, 16 aa, Homo sapiens
  CDR3 for alpha chain variable domain of TCR clone 240928 (TRAV12-2, TRAJ45)
CAVKRNPGGGADGLTF

SEQ ID NO: 481856 - protein, 12 aa, Homo sapiens
  CDR3 for beta chain variable domain of TCR clone 240928 (TRBV6-1, TRBJ2-5)
CASSEGRDTQYF

SEQ ID NO: 481857 - protein, 16 aa, Homo sapiens
  CDR3 for alpha chain variable domain of TCR clone 240929 (TRAV3, TRAJ37)
CAVRGKGSGNTGKLIF

SEQ ID NO: 481858 - protein, 15 aa, Homo sapiens
  CDR3 for beta chain variable domain of TCR clone 240929 (TRBV12-4, TRBJ2-2)
CASGPGQLNTGELFF

SEQ ID NO: 481859 - protein, 15 aa, Homo sapiens
  CDR3 for alpha chain variable domain of TCR clone 240930 (TRAV8-6, TRAJ6)
CAVSGESGGSYIPKF

SEQ ID NO: 481860 - protein, 14 aa, Homo sapiens
  CDR3 for beta chain variable domain of TCR clone 240930 (TRBV7-9, TRBJ2-1)
CASSSMVGFGEQFF

SEQ ID NO: 481861 - protein, 13 aa, Homo sapiens
  CDR3 for alpha chain variable domain of TCR clone 240931 (TRAV2, TRAJ40)
CAVVTSGTYRYIF

SEQ ID NO: 481862 - protein, 14 aa, Homo sapiens
  CDR3 for beta chain variable domain of TCR clone 240931 (TRBV11-2, TRBJ1-2)
CASSLGTANYGYTF

SEQ ID NO: 481863 - protein, 15 aa, Homo sapiens
  CDR3 for alpha chain variable domain of TCR clone 240932 (TRAV21, TRAJ53)
CATSNSGGSNYKLTF

SEQ ID NO: 481864 - protein, 15 aa, Homo sapiens
  CDR3 for beta chain variable domain of TCR clone 240932 (TRBV5-1, TRBJ2-1)
CASSPPRAPYNEQFF

SEQ ID NO: 481865 - protein, 15 aa, Homo sapiens
  CDR3 for alpha chain variable domain of TCR clone 240933 (TRAV4, TRAJ39)
CLVGPNNSAGNMHTF

SEQ ID NO: 481866 - protein, 16 aa, Homo sapiens
  CDR3 for beta chain variable domain of TCR clone 240933 (TRBV13, TRBJ2-2)
CASSPRTGEHTGELFF

SEQ ID NO: 481867 - protein, 17 aa, Homo sapiens
  CDR3 for alpha chain variable domain of TCR clone 240934 (TRAV12-3, TRAJ6)
CAMSARGGAGGSNIPTF

SEQ ID NO: 481868 - protein, 12 aa, Homo sapiens
  CDR3 for beta chain variable domain of TCR clone 240934 (TRBV12-4, TRBJ2-3)
CASSTLPDTQYF

SEQ ID NO: 481869 - protein, 16 aa, Homo sapiens
  CDR3 for alpha chain variable domain of TCR clone 240935 (TRAV3, TRAJ5)
GAVRNLMDMGRRALTF

SEQ ID NO: 481870 - protein, 16 aa, Homo sapiens
  CDR3 for beta chain variable domain of TCR clone 240935 (TRBV12-5, TRBJ2-5)
CASGPRTSGNQETQYF

SEQ ID NO: 481871 - protein, 18 aa, Homo sapiens
  CDR3 for alpha chain variable domain of TCR clone 240936 (TRAV26-1, TRAJ44)
CIVRVAGGGISTASKLTF

SEQ ID NO: 481872 - protein, 13 aa, Homo sapiens
  CDR3 for beta chain variable domain of TCR clone 240936 (TRBV11-2, TRBJ2-5)
CASSSTGEETQYF

SEQ ID NO: 481873 - protein, 12 aa, Homo sapiens
  CDR3 for alpha chain variable domain of TCR clone 240937 (TRAV20, TRAJ54)
CAVQEGAQKLVF

SEQ ID NO: 481874 - protein, 17 aa, Homo sapiens
  CDR3 for beta chain variable domain of TCR clone 240937 (TRBV13, TRBJ2-3)
CASSLSRVEGGRNTQYF

SEQ ID NO: 481875 - protein, 15 aa, Homo sapiens
  CDR3 for alpha chain variable domain of TCR clone 240938 (TRAV3, TRAJ3)
CAVRDRDSSASKIIF

SEQ ID NO: 481876 - protein, 18 aa, Homo sapiens
  CDR3 for beta chain variable domain of TCR clone 240938 (TRBV25-1, TRBJ1-2)
CASSGLQNGQGLIFGHTF

SEQ ID NO: 481877 - protein, 15 aa, Homo sapiens
  CDR3 for alpha chain variable domain of TCR clone 240939 (TRAV29/DV5, TRAJ18)
CAARYSGSTLGRLYF

SEQ ID NO: 481878 - protein, 13 aa, Homo sapiens
  CDR3 for beta chain variable domain of TCR clone 240939 (TRBV7-2, TRBJ2-7)
CASSSPSGSEQYF

SEQ ID NO: 481879 - protein, 16 aa, Homo sapiens
  CDR3 for alpha chain variable domain of TCR clone 240940 (TRAV35, TRAJ28)
CAGQRYSGAGSFQLTF

SEQ ID NO: 481880 - protein, 13 aa, Homo sapiens
  CDR3 for beta chain variable domain of TCR clone 240940 (TRBV19, TRBJ1-2)
CASSQGQVYGYTF

SEQ ID NO: 481881 - protein, 17 aa, Homo sapiens
  CDR3 for alpha chain variable domain of TCR clone 240941 (TRAV21, TRAJ52)
CAVGANAGGTSYGKLTF

SEQ ID NO: 481882 - protein, 14 aa, Homo sapiens
  CDR3 for beta chain variable domain of TCR clone 240941 (TRBV11-2, TRBJ2-7)
CASSLGAGAYEQYF

SEQ ID NO: 481883 - protein, 15 aa, Homo sapiens
  CDR3 for alpha chain variable domain of TCR clone 240942 (TRAV8-3, TRAJ44)
CAVGAGAGTAIKLTF

SEQ ID NO: 481884 - protein, 12 aa, Homo sapiens
  CDR3 for beta chain variable domain of TCR clone 240942 (TRBV7-8, TRBJ2-4)
CASSLGGNIQYF

SEQ ID NO: 481885 - protein, 14 aa, Homo sapiens
  CDR3 for alpha chain variable domain of TCR clone 240943 (TRAV1-2, TRAJ16)
CAVNRFSDGQKLRF

SEQ ID NO: 481886 - protein, 13 aa, Homo sapiens
  CDR3 for beta chain variable domain of TCR clone 240943 (TRBV4-1, TRBJ2-1)
CASSQAGGDEQFF

SEQ ID NO: 481887 - protein, 16 aa, Homo sapiens
  CDR3 for alpha chain variable domain of TCR clone 240944 (TRAV20, TRAJ53)
CAVQAESGGSNYKLTF

SEQ ID NO: 481888 - protein, 15 aa, Homo sapiens
  CDR3 for beta chain variable domain of TCR clone 240944 (TRBV7-3, TRBJ2-7)
CASSLTPTGYDEQYF

SEQ ID NO: 481889 - protein, 14 aa, Homo sapiens
  CDR3 for alpha chain variable domain of TCR clone 240945 (TRAV12-2, TRAJ40)
CAVKIPSGTYKYIF

SEQ ID NO: 481890 - protein, 11 aa, Homo sapiens
  CDR3 for beta chain variable domain of TCR clone 240945 (TRBV29-1, TRBJ2-5)
CSEDRTGTQYC

SEQ ID NO: 481891 - protein, 13 aa, Homo sapiens
  CDR3 for alpha chain variable domain of TCR clone 240946 (TRAV36/DV7, TRAJ54)
CAVCTQGAQKLVF

SEQ ID NO: 481892 - protein, 13 aa, Homo sapiens
  CDR3 for beta chain variable domain of TCR clone 240946 (TRBV7-6, TRBJ2-7)
CASSLDDTHEQYF

SEQ ID NO: 481893 - protein, 15 aa, Homo sapiens
  CDR3 for alpha chain variable domain of TCR clone 240947 (TRAV16, TRAJ12)
CSKWPLRDSSYKLIF

SEQ ID NO: 481894 - protein, 13 aa, Homo sapiens
  CDR3 for beta chain variable domain of TCR clone 240947 (TRBV4-2, TRBJ1-1)
CASSKAGNTEAFF

SEQ ID NO: 481895 - protein, 12 aa, Homo sapiens
  CDR3 for alpha chain variable domain of TCR clone 240948 (TRAV38-2/DV8, TRAJ48)
CARLSGNEKLTF

SEQ ID NO: 481896 - protein, 15 aa, Homo sapiens
  CDR3 for beta chain variable domain of TCR clone 240948 (TRBV6-1, TRBJ2-1)
CASSELREQYNEQFF

SEQ ID NO: 481897 - protein, 13 aa, Homo sapiens
  CDR3 for alpha chain variable domain of TCR clone 240949 (TRAV21, TRAJ57)
CAVTQGGSEKLVF

SEQ ID NO: 481898 - protein, 12 aa, Homo sapiens
  CDR3 for beta chain variable domain of TCR clone 240949 (TRBV29-1, TRBJ1-1)
CSESDGNTEAFF

SEQ ID NO: 481899 - protein, 12 aa, Homo sapiens
  CDR3 for alpha chain variable domain of TCR clone 240950 (TRAV12-3, TRAJ17)
CAMTLTGNKLTF

SEQ ID NO: 481900 - protein, 13 aa, Homo sapiens
  CDR3 for beta chain variable domain of TCR clone 240950 (TRBV4-2, TRBJ1-2)
CASSLSASGGYTF

SEQ ID NO: 481901 - protein, 10 aa, Homo sapiens
  CDR3 for alpha chain variable domain of TCR clone 240951 (TRAV8-3, TRAJ16)
CAVVPCQKLL

SEQ ID NO: 481902 - protein, 12 aa, Homo sapiens
  CDR3 for beta chain variable domain of TCR clone 240951 (TRBV3-1, TRBJ1-1)
CASSQDPTEAFF

SEQ ID NO: 481903 - protein, 15 aa, Homo sapiens
  CDR3 for alpha chain variable domain of TCR clone 240952 (TRAV20, TRAJ23)
CAVQAVGNQGGKLIF

SEQ ID NO: 481904 - protein, 16 aa, Homo sapiens
  CDR3 for beta chain variable domain of TCR clone 240952 (TRBV27, TRBJ2-7)
CASSKQGRGWAYEQYF

SEQ ID NO: 481905 - protein, 13 aa, Homo sapiens
  CDR3 for alpha chain variable domain of TCR clone 240953 (TRAV12-2, TRAJ12)
CAVNWDSSYKLIF

SEQ ID NO: 481906 - protein, 15 aa, Homo sapiens
  CDR3 for beta chain variable domain of TCR clone 240953 (TRBV3-1, TRBJ1-2)
CASSPDGVSYGSYTF

SEQ ID NO: 481907 - protein, 15 aa, Homo sapiens
  CDR3 for alpha chain variable domain of TCR clone 240954 (TRAV2, TRAJ37)
CAVEDGSSNTGKLIF

SEQ ID NO: 481908 - protein, 13 aa, Homo sapiens
  CDR3 for beta chain variable domain of TCR clone 240954 (TRBV20-1, TRBJ1-6)
RSTFREGNSPLHF

SEQ ID NO: 481909 - protein, 16 aa, Homo sapiens
  CDR3 for alpha chain variable domain of TCR clone 240955 (TRAV12-3, TRAJ53)
CAMSPGSGGSNYKLTF

SEQ ID NO: 481910 - protein, 15 aa, Homo sapiens
  CDR3 for beta chain variable domain of TCR clone 240955 (TRBV7-2, TRBJ2-2)
CASRRPGQNTGELFF

SEQ ID NO: 481911 - protein, 23 aa, Homo sapiens
  CDR3 for alpha chain variable domain of TCR clone 240956 (TRAV8-3, )
CAVVTTRIPDIQNPDPAVYQLRD

SEQ ID NO: 481912 - protein, 14 aa, Homo sapiens
  CDR3 for beta chain variable domain of TCR clone 240956 (TRBV11-2, TRBJ2-7)
CASSSSTTSYEQYF

SEQ ID NO: 481913 - protein, 19 aa, Homo sapiens
  CDR3 for alpha chain variable domain of TCR clone 240957 (TRAV1-2, TRAJ26)
CLLPLRCERPDNYGQNFVF

SEQ ID NO: 481914 - protein, 11 aa, Homo sapiens
  CDR3 for beta chain variable domain of TCR clone 240957 (TRBV29-1, TRBJ2-5)
CSEDRTGTQYF

SEQ ID NO: 481915 - protein, 13 aa, Homo sapiens
  CDR3 for alpha chain variable domain of TCR clone 240958 (TRAV27, TRAJ45)
CRSSGGGTDGLTF

SEQ ID NO: 481916 - protein, 13 aa, Homo sapiens
  CDR3 for beta chain variable domain of TCR clone 240958 (TRBV7-7, TRBJ2-5)
CASSRSSQETQYF

SEQ ID NO: 481917 - protein, 14 aa, Homo sapiens
  CDR3 for alpha chain variable domain of TCR clone 240959 (TRAV12-2, TRAJ9)
CAVNMEGGGFKTIF

SEQ ID NO: 481918 - protein, 15 aa, Homo sapiens
  CDR3 for beta chain variable domain of TCR clone 240959 (TRBV4-1, TRBJ1-4)
CASSDTGGTNEKLFF

SEQ ID NO: 481919 - protein, 14 aa, Homo sapiens
  CDR3 for alpha chain variable domain of TCR clone 240960 (TRAV4, TRAJ26)
CLVGPHNYGQNFVF

SEQ ID NO: 481920 - protein, 17 aa, Homo sapiens
  CDR3 for beta chain variable domain of TCR clone 240960 (TRBV24-1, TRBJ2-1)
CAASDVSTSGAYNEQFF

SEQ ID NO: 481921 - protein, 12 aa, Homo sapiens
  CDR3 for alpha chain variable domain of TCR clone 240961 (TRAV1-1, TRAJ39)
CAVPVVGNILTF

SEQ ID NO: 481922 - protein, 13 aa, Homo sapiens
  CDR3 for beta chain variable domain of TCR clone 240961 (TRBV28, TRBJ2-3)
CASSLPQVDTQYF

SEQ ID NO: 481923 - protein, 10 aa, Homo sapiens
  CDR3 for alpha chain variable domain of TCR clone 240962 (TRAV1-2, TRAJ31)
CVSEDARLMF

SEQ ID NO: 481924 - protein, 13 aa, Homo sapiens
  CDR3 for beta chain variable domain of TCR clone 240962 (TRBV19, TRBJ1-3)
CASRLSLGNTIYF

SEQ ID NO: 481925 - protein, 12 aa, Homo sapiens
  CDR3 for alpha chain variable domain of TCR clone 240963 (TRAV21, TRAJ12)
CAVMDSSYKLIF

SEQ ID NO: 481926 - protein, 14 aa, Homo sapiens
  CDR3 for beta chain variable domain of TCR clone 240963 (TRBV5-4, TRBJ1-1)
CASSLDSRRDEAFF

SEQ ID NO: 481927 - protein, 12 aa, Homo sapiens
  CDR3 for alpha chain variable domain of TCR clone 240964 (TRAV12-3, TRAJ40)
CAVSSGTYKYIF

SEQ ID NO: 481928 - protein, 15 aa, Homo sapiens
  CDR3 for beta chain variable domain of TCR clone 240964 (TRBV7-9, TRBJ2-7)
CASSPGGGLTYELYF

SEQ ID NO: 481929 - protein, 13 aa, Homo sapiens
  CDR3 for alpha chain variable domain of TCR clone 240965 (TRAV2, TRAJ40)
CAVVTPGTDKYIF

SEQ ID NO: 481930 - protein, 14 aa, Homo sapiens
  CDR3 for beta chain variable domain of TCR clone 240965 (TRBV19, TRBJ2-1)
CASPTFVLSGEQFF

SEQ ID NO: 481931 - protein, 17 aa, Homo sapiens
  CDR3 for alpha chain variable domain of TCR clone 240966 (TRAV12-2, TRAJ52)
CAVNPYAGGTSYGKLTF

SEQ ID NO: 481932 - protein, 16 aa, Homo sapiens
  CDR3 for beta chain variable domain of TCR clone 240966 (TRBV5-5, TRBJ2-2)
CASSGRREGATGELFF

SEQ ID NO: 481933 - protein, 11 aa, Homo sapiens
  CDR3 for alpha chain variable domain of TCR clone 240967 (TRAV13-1, TRAJ39)
CASHAGNMLTF

SEQ ID NO: 481934 - protein, 15 aa, Homo sapiens
  CDR3 for beta chain variable domain of TCR clone 240967 (TRBV5-1, TRBJ2-2)
CASSSQGGNTGELFF

SEQ ID NO: 481935 - protein, 12 aa, Homo sapiens
  CDR3 for alpha chain variable domain of TCR clone 240968 (TRAV3, TRAJ27)
CAVRDKAGKSTF

SEQ ID NO: 481936 - protein, 14 aa, Homo sapiens
  CDR3 for beta chain variable domain of TCR clone 240968 (TRBV5-1, TRBJ1-2)
CASSVNSTNYGYTF

SEQ ID NO: 481937 - protein, 22 aa, Homo sapiens
  CDR3 for alpha chain variable domain of TCR clone 240969 (TRAV8-3, TRAJ38)
CAVGASNAGNNHIQNPDPALYQ

SEQ ID NO: 481938 - protein, 15 aa, Homo sapiens
  CDR3 for beta chain variable domain of TCR clone 240969 (TRBV11-3, TRBJ1-3)
CASSLFGPSGNTIYF

SEQ ID NO: 481939 - protein, 16 aa, Homo sapiens
  CDR3 for alpha chain variable domain of TCR clone 240970 (TRAV38-1, TRAJ56)
CAFMKRQTGANSKLTF

SEQ ID NO: 481940 - protein, 14 aa, Homo sapiens
  CDR3 for beta chain variable domain of TCR clone 240970 (TRBV5-1, TRBJ2-5)
CASSLIGGEETQYF

SEQ ID NO: 481941 - protein, 16 aa, Homo sapiens
  CDR3 for alpha chain variable domain of TCR clone 240971 (TRAV16, TRAJ52)
FALSAAGGTSYGKLTF

SEQ ID NO: 481942 - protein, 17 aa, Homo sapiens
  CDR3 for beta chain variable domain of TCR clone 240971 (TRBV11-2, TRBJ2-7)
CASSLYPPGVEYNEQFF

SEQ ID NO: 481943 - protein, 14 aa, Homo sapiens
  CDR3 for alpha chain variable domain of TCR clone 240972 (TRAV8-3, TRAJ44)
CAVEDTGTASKLTF

SEQ ID NO: 481944 - protein, 15 aa, Homo sapiens
  CDR3 for beta chain variable domain of TCR clone 240972 (TRBV7-2, TRBJ1-1)
CASSSPGGEETEAVF

SEQ ID NO: 481945 - protein, 13 aa, Homo sapiens
  CDR3 for alpha chain variable domain of TCR clone 240973 (TRAV13-1, TRAJ39)
CAASTWAGNMLTF

SEQ ID NO: 481946 - protein, 15 aa, Homo sapiens
  CDR3 for beta chain variable domain of TCR clone 240973 (TRBV7-9, TRBJ1-1)
CASSLLEQGGTEAFF

SEQ ID NO: 481947 - protein, 16 aa, Homo sapiens
  CDR3 for alpha chain variable domain of TCR clone 240974 (TRAV16, TRAJ4)
CALSRMFSGGYNKLIF

SEQ ID NO: 481948 - protein, 13 aa, Homo sapiens
  CDR3 for beta chain variable domain of TCR clone 240974 (TRBV10-2, TRBJ2-3)
CASSESGDHTQYF

SEQ ID NO: 481949 - protein, 14 aa, Homo sapiens
  CDR3 for alpha chain variable domain of TCR clone 240975 (TRAV23/DV6, TRAJ6)
CPASRSGGSYIPTF

SEQ ID NO: 481950 - protein, 17 aa, Homo sapiens
  CDR3 for beta chain variable domain of TCR clone 240975 (TRBV20-1, TRBJ2-1)
CSASASGLAGSYNEQFF

SEQ ID NO: 481951 - protein, 12 aa, Homo sapiens
  CDR3 for alpha chain variable domain of TCR clone 240976 (TRAV25, TRAJ38)
CAGTGNNRKLIW

SEQ ID NO: 481952 - protein, 15 aa, Homo sapiens
  CDR3 for beta chain variable domain of TCR clone 240976 (TRBV6-5, TRBJ2-7)
CASSYSTSGNYEQYF

SEQ ID NO: 481953 - protein, 11 aa, Homo sapiens
  CDR3 for alpha chain variable domain of TCR clone 240977 (TRAV13-1, TRAJ15)
CAATPGTALTF

SEQ ID NO: 481954 - protein, 12 aa, Homo sapiens
  CDR3 for beta chain variable domain of TCR clone 240977 (TRBV7-2, TRBJ2-1)
CQSLGVYNEQFF

SEQ ID NO: 481955 - protein, 14 aa, Homo sapiens
  CDR3 for alpha chain variable domain of TCR clone 240978 (TRAV1-1, TRAJ27)
CAVIYNTNAGKSTF

SEQ ID NO: 481956 - protein, 13 aa, Homo sapiens
  CDR3 for beta chain variable domain of TCR clone 240978 (TRBV7-2, TRBJ2-1)
CASSLDSYNEQFF

SEQ ID NO: 481957 - protein, 15 aa, Homo sapiens
  CDR3 for alpha chain variable domain of TCR clone 240979 (TRAV35, TRAJ23)
CAGQRGYNQRGKLIF

SEQ ID NO: 481958 - protein, 16 aa, Homo sapiens
  CDR3 for beta chain variable domain of TCR clone 240979 (TRBV27, TRBJ2-1)
CASSSRLAGNYNEQFF

SEQ ID NO: 481959 - protein, 12 aa, Homo sapiens
  CDR3 for alpha chain variable domain of TCR clone 240980 (TRAV12-1, )
CVVNSWISRTLT

SEQ ID NO: 481960 - protein, 20 aa, Homo sapiens
  CDR3 for beta chain variable domain of TCR clone 240980 (TRBV7-8, TRBJ2-2)
CATSHLFPGPTIHITGELFF

SEQ ID NO: 481961 - protein, 16 aa, Homo sapiens
  CDR3 for alpha chain variable domain of TCR clone 240981 (TRAV38-1, TRAJ37)
CAFKGDGSSNTGTLIF

SEQ ID NO: 481962 - protein, 13 aa, Homo sapiens
  CDR3 for beta chain variable domain of TCR clone 240981 (TRBV12-4, TRBJ2-5)
CASSVFRRETQYF

SEQ ID NO: 481963 - protein, 10 aa, Homo sapiens
  CDR3 for alpha chain variable domain of TCR clone 240982 (TRAV21, TRAJ31)
CAVDNARLMF

SEQ ID NO: 481964 - protein, 13 aa, Homo sapiens
  CDR3 for beta chain variable domain of TCR clone 240982 (TRBV10-3, TRBJ2-7)
CASKLAVNYEQYF

SEQ ID NO: 481965 - protein, 13 aa, Homo sapiens
  CDR3 for alpha chain variable domain of TCR clone 240983 (TRAV12-1, TRAJ49)
CVVTPLTGNQFYF

SEQ ID NO: 481966 - protein, 13 aa, Homo sapiens
  CDR3 for beta chain variable domain of TCR clone 240983 (TRBV20-1, TRBJ1-1)
CSARGGANTEAFF

SEQ ID NO: 481967 - protein, 10 aa, Homo sapiens
  CDR3 for alpha chain variable domain of TCR clone 240984 (TRAV12-3, TRAJ50)
CAMSAMGNLL

SEQ ID NO: 481968 - protein, 14 aa, Homo sapiens
  CDR3 for beta chain variable domain of TCR clone 240984 (TRBV12-5, TRBJ2-5)
CASGSRTHQETQYF

SEQ ID NO: 481969 - protein, 17 aa, Homo sapiens
  CDR3 for alpha chain variable domain of TCR clone 240985 (TRAV3, TRAJ42)
CAVRDRDYGGSQGNRIF

SEQ ID NO: 481970 - protein, 15 aa, Homo sapiens
  CDR3 for beta chain variable domain of TCR clone 240985 (TRBV6-6, TRBJ2-7)
CVSSYSYGGSYEQYF

SEQ ID NO: 481971 - protein, 17 aa, Homo sapiens
  CDR3 for alpha chain variable domain of TCR clone 240986 (TRAV3, TRAJ6)
CAVRDGPRAGGSYITTF

SEQ ID NO: 481972 - protein, 14 aa, Homo sapiens
  CDR3 for beta chain variable domain of TCR clone 240986 (TRBV20-1, TRBJ2-7)
CSAKTGTGGYEQYF

SEQ ID NO: 481973 - protein, 12 aa, Homo sapiens
  CDR3 for alpha chain variable domain of TCR clone 240987 (TRAV4, TRAJ6)
CLAPGGSYIPTF

SEQ ID NO: 481974 - protein, 20 aa, Homo sapiens
  CDR3 for beta chain variable domain of TCR clone 240987 (TRBV7-8, TRBJ2-2)
CASSHLVPGPTIHITGELFF

SEQ ID NO: 481975 - protein, 14 aa, Homo sapiens
  CDR3 for alpha chain variable domain of TCR clone 240988 (TRAV1-2, TRAJ16)
CAVNRFSDGKKLLF

SEQ ID NO: 481976 - protein, 15 aa, Homo sapiens
  CDR3 for beta chain variable domain of TCR clone 240988 (TRBV9, TRBJ1-6)
CASSVAGTGDSDLHF

SEQ ID NO: 481977 - protein, 17 aa, Homo sapiens
  CDR3 for alpha chain variable domain of TCR clone 240989 (TRAV3, TRAJ12)
CAVRDGGRMDSSYKLIF

SEQ ID NO: 481978 - protein, 12 aa, Homo sapiens
  CDR3 for beta chain variable domain of TCR clone 240989 (TRBV12-4, TRBJ2-1)
CASSPGRNEQFF

SEQ ID NO: 481979 - protein, 16 aa, Homo sapiens
  CDR3 for alpha chain variable domain of TCR clone 240990 (TRAV26-1, TRAJ57)
CIVRVAGKGGSEKLVF

SEQ ID NO: 481980 - protein, 14 aa, Homo sapiens
  CDR3 for beta chain variable domain of TCR clone 240990 (TRBV7-9, TRBJ2-7)
CASSLGTGVYEQYF

SEQ ID NO: 481981 - protein, 15 aa, Homo sapiens
  CDR3 for alpha chain variable domain of TCR clone 240991 (TRAV12-1, TRAJ4)
CVVTPWMGGYNKMIF

SEQ ID NO: 481982 - protein, 18 aa, Homo sapiens
  CDR3 for beta chain variable domain of TCR clone 240991 (TRBV11-2, TRBJ2-3)
CASSVRTSGSKKTDTQYF

SEQ ID NO: 481983 - protein, 15 aa, Homo sapiens
  CDR3 for alpha chain variable domain of TCR clone 240992 (TRAV12-2, TRAJ38)
CAVNKEAGNNRKLIW

SEQ ID NO: 481984 - protein, 14 aa, Homo sapiens
  CDR3 for beta chain variable domain of TCR clone 240992 (TRBV15, TRBJ2-3)
CATRSGTSTDTQYF

SEQ ID NO: 481985 - protein, 17 aa, Homo sapiens
  CDR3 for alpha chain variable domain of TCR clone 240993 (TRAV13-1, TRAJ5)
CSNPSLSRDTGRRALTF

SEQ ID NO: 481986 - protein, 14 aa, Homo sapiens
  CDR3 for beta chain variable domain of TCR clone 240993 (TRBV19, TRBJ2-3)
CASSAPRGTDTQYF

SEQ ID NO: 481987 - protein, 13 aa, Homo sapiens
  CDR3 for alpha chain variable domain of TCR clone 240994 (TRAV30, TRAJ39)
CGTEKNAGNMLTF

SEQ ID NO: 481988 - protein, 14 aa, Homo sapiens
  CDR3 for beta chain variable domain of TCR clone 240994 (TRBV7-6, TRBJ2-3)
CASSLGTVTDTQYF

SEQ ID NO: 481989 - protein, 15 aa, Homo sapiens
  CDR3 for alpha chain variable domain of TCR clone 240995 (TRAV27, TRAJ38)
CAARSNAGNNRKLSW

SEQ ID NO: 481990 - protein, 14 aa, Homo sapiens
  CDR3 for beta chain variable domain of TCR clone 240995 (TRBV7-8, TRBJ2-3)
CASSLEAGTDTQYF

SEQ ID NO: 481991 - protein, 17 aa, Homo sapiens
  CDR3 for alpha chain variable domain of TCR clone 240996 (TRAV13-1, TRAJ28)
CAASPPYSGAGSYQLTF

SEQ ID NO: 481992 - protein, 15 aa, Homo sapiens
  CDR3 for beta chain variable domain of TCR clone 240996 (TRBV5-1, TRBJ2-5)
CASSFKGGDQETQYF

SEQ ID NO: 481993 - protein, 11 aa, Homo sapiens
  CDR3 for alpha chain variable domain of TCR clone 240997 (TRAV12-2, TRAJ29)
CAVTLRSPLVF

SEQ ID NO: 481994 - protein, 13 aa, Homo sapiens
  CDR3 for beta chain variable domain of TCR clone 240997 (TRBV20-1, TRBJ1-1)
CSAPPGGHTEAFF

SEQ ID NO: 481995 - protein, 16 aa, Homo sapiens
  CDR3 for alpha chain variable domain of TCR clone 240998 (TRAV17, TRAJ52)
CATSNAGGTSYGKLAF

SEQ ID NO: 481996 - protein, 13 aa, Homo sapiens
  CDR3 for beta chain variable domain of TCR clone 240998 (TRBV27, TRBJ1-6)
CASSLVLVSPLLF

SEQ ID NO: 481997 - protein, 14 aa, Homo sapiens
  CDR3 for alpha chain variable domain of TCR clone 240999 (TRAV8-3, TRAJ4)
CAVGAAGGYNKLIF

SEQ ID NO: 481998 - protein, 12 aa, Homo sapiens
  CDR3 for beta chain variable domain of TCR clone 240999 (TRBV11-2, TRBJ2-1)
CAGSPGNNEQFF

SEQ ID NO: 481999 - protein, 14 aa, Homo sapiens
  CDR3 for alpha chain variable domain of TCR clone 241000 (TRAV1-2, TRAJ16)
CAVNRFSDGQKLLF

SEQ ID NO: 482000 - protein, 16 aa, Homo sapiens
  CDR3 for beta chain variable domain of TCR clone 241000 (TRBV27, TRBJ2-2)
CASSVRGLVRTGELFF

SEQ ID NO: 482001 - protein, 16 aa, Homo sapiens
  CDR3 for alpha chain variable domain of TCR clone 241001 (TRAV12-1, TRAJ8)
CVVNGRGNTGFQKLVF

SEQ ID NO: 482002 - protein, 14 aa, Homo sapiens
  CDR3 for beta chain variable domain of TCR clone 241001 (TRBV20-1, TRBJ1-5)
CSARDDRGNQPQHF

SEQ ID NO: 482003 - protein, 20 aa, Homo sapiens
  CDR3 for alpha chain variable domain of TCR clone 241002 (TRAV1-1, TRAJ4)
CLLLLRCEGFLSGGYNKLIF

SEQ ID NO: 482004 - protein, 14 aa, Homo sapiens
  CDR3 for beta chain variable domain of TCR clone 241002 (TRBV11-2, TRBJ2-7)
CASSLGAGAYEQYF

SEQ ID NO: 482005 - protein, 14 aa, Homo sapiens
  CDR3 for alpha chain variable domain of TCR clone 241003 (TRAV26-1, TRAJ21)
CIVRVVYNFNKFYF

SEQ ID NO: 482006 - protein, 11 aa, Homo sapiens
  CDR3 for beta chain variable domain of TCR clone 241003 (TRBV5-6, TRBJ2-5)
CASSLGRTQYF

SEQ ID NO: 482007 - protein, 17 aa, Homo sapiens
  CDR3 for alpha chain variable domain of TCR clone 241004 (TRAV26-1, TRAJ37)
CIVRVITVSSNTGKLIF

SEQ ID NO: 482008 - protein, 14 aa, Homo sapiens
  CDR3 for beta chain variable domain of TCR clone 241004 (TRBV4-1, TRBJ2-7)
CASSPVAGGDEQYF

SEQ ID NO: 482009 - protein, 14 aa, Homo sapiens
  CDR3 for alpha chain variable domain of TCR clone 241005 (TRAV1-2, TRAJ8)
YAVREDTGFQKLVV

SEQ ID NO: 482010 - protein, 14 aa, Homo sapiens
  CDR3 for beta chain variable domain of TCR clone 241005 (TRBV25-1, TRBJ1-1)
CASTHLGGNTEAFF

SEQ ID NO: 482011 - protein, 13 aa, Homo sapiens
  CDR3 for alpha chain variable domain of TCR clone 241006 (TRAV6, TRAJ16)
CALDDSDGQKLLF

SEQ ID NO: 482012 - protein, 14 aa, Homo sapiens
  CDR3 for beta chain variable domain of TCR clone 241006 (TRBV12-4, TRBJ1-6)
CASNLQGKGSHLHF

SEQ ID NO: 482013 - protein, 15 aa, Homo sapiens
  CDR3 for alpha chain variable domain of TCR clone 241007 (TRAV26-2, TRAJ16)
CILSLRFSDGQELLF

SEQ ID NO: 482014 - protein, 13 aa, Homo sapiens
  CDR3 for beta chain variable domain of TCR clone 241007 (TRBV10-3, TRBJ2-7)
CAIRPTEAYEQYF

SEQ ID NO: 482015 - protein, 16 aa, Homo sapiens
  CDR3 for alpha chain variable domain of TCR clone 241008 (TRAV1-2, TRAJ10)
CAVRGVLTGGGNKLTF

SEQ ID NO: 482016 - protein, 20 aa, Homo sapiens
  CDR3 for beta chain variable domain of TCR clone 241008 (TRBV7-8, TRBJ2-2)
CDSSHLFPGPTIHITGELFF

SEQ ID NO: 482017 - protein, 14 aa, Homo sapiens
  CDR3 for alpha chain variable domain of TCR clone 241009 (TRAV4, TRAJ9)
CLVGSGTGGFKTIF

SEQ ID NO: 482018 - protein, 15 aa, Homo sapiens
  CDR3 for beta chain variable domain of TCR clone 241009 (TRBV5-1, TRBJ2-3)
CASSSTSGSTDTQYF

SEQ ID NO: 482019 - protein, 13 aa, Homo sapiens
  CDR3 for alpha chain variable domain of TCR clone 241010 (TRAV21, TRAJ36)
CAVIKTGANNLFF

SEQ ID NO: 482020 - protein, 20 aa, Homo sapiens
  CDR3 for beta chain variable domain of TCR clone 241010 (TRBV7-8, TRBJ2-2)
CASSHLFPGPTIHITGELFF

SEQ ID NO: 482021 - protein, 13 aa, Homo sapiens
  CDR3 for alpha chain variable domain of TCR clone 241011 (TRAV13-1, TRAJ43)
CAASLSNNNDMRF

SEQ ID NO: 482022 - protein, 15 aa, Homo sapiens
  CDR3 for beta chain variable domain of TCR clone 241011 (TRBV12-4, TRBJ1-1)
CASSLAVSRGAEAFF

SEQ ID NO: 482023 - protein, 13 aa, Homo sapiens
  CDR3 for alpha chain variable domain of TCR clone 241012 (TRAV12-3, TRAJ13)
CAMSSEGYQKVTF

SEQ ID NO: 482024 - protein, 17 aa, Homo sapiens
  CDR3 for beta chain variable domain of TCR clone 241012 (TRBV4-1, TRBJ1-4)
CASSQEGPRGVEEKLFF

SEQ ID NO: 482025 - protein, 19 aa, Homo sapiens
  CDR3 for alpha chain variable domain of TCR clone 241013 (TRAV3, TRAJ32)
VLLGCERRNYGGATNKLIF

SEQ ID NO: 482026 - protein, 13 aa, Homo sapiens
  CDR3 for beta chain variable domain of TCR clone 241013 (TRBV2, TRBJ1-1)
CASSEGGNTEAFF

SEQ ID NO: 482027 - protein, 14 aa, Homo sapiens
  CDR3 for alpha chain variable domain of TCR clone 241014 (TRAV13-2, TRAJ37)
CAERPYGNTGKLIF

SEQ ID NO: 482028 - protein, 17 aa, Homo sapiens
  CDR3 for beta chain variable domain of TCR clone 241014 (TRBV7-3, TRBJ2-3)
CASSLMKRMRGADTQYF

SEQ ID NO: 482029 - protein, 13 aa, Homo sapiens
  CDR3 for alpha chain variable domain of TCR clone 241015 (TRAV1-2, TRAJ30)
CAVRDPGDDKIIF

SEQ ID NO: 482030 - protein, 15 aa, Homo sapiens
  CDR3 for beta chain variable domain of TCR clone 241015 (TRBV5-1, TRBJ2-3)
CASSVTSGSTDTQYF

SEQ ID NO: 482031 - protein, 13 aa, Homo sapiens
  CDR3 for alpha chain variable domain of TCR clone 241016 (TRAV29/DV5, TRAJ28)
CADRGGWELPTHF

SEQ ID NO: 482032 - protein, 13 aa, Homo sapiens
  CDR3 for beta chain variable domain of TCR clone 241016 (TRBV20-1, TRBJ1-5)
CSASGRGNQPQHF

SEQ ID NO: 482033 - protein, 12 aa, Homo sapiens
  CDR3 for alpha chain variable domain of TCR clone 241017 (TRAV25, TRAJ11)
CAGYSGYSPLTF

SEQ ID NO: 482034 - protein, 13 aa, Homo sapiens
  CDR3 for beta chain variable domain of TCR clone 241017 (TRBV7-9, TRBJ1-2)
CASSLKQNYGYTF

SEQ ID NO: 482035 - protein, 17 aa, Homo sapiens
  CDR3 for alpha chain variable domain of TCR clone 241018 (TRAV3, TRAJ42)
CAGRDRDYGGSQGNLIF

SEQ ID NO: 482036 - protein, 14 aa, Homo sapiens
  CDR3 for beta chain variable domain of TCR clone 241018 (TRBV19, TRBJ2-5)
CASSMTGQQETQYF

SEQ ID NO: 482037 - protein, 14 aa, Homo sapiens
  CDR3 for alpha chain variable domain of TCR clone 241019 (TRAV20, TRAJ56)
CAVQFGGANSKLTF

SEQ ID NO: 482038 - protein, 14 aa, Homo sapiens
  CDR3 for beta chain variable domain of TCR clone 241019 (TRBV20-1, TRBJ1-1)
CSAQTRIGGTEAFF

SEQ ID NO: 482039 - protein, 14 aa, Homo sapiens
  CDR3 for alpha chain variable domain of TCR clone 241020 (TRAV3, TRAJ5)
CALRSDAGRRALTF

SEQ ID NO: 482040 - protein, 14 aa, Homo sapiens
  CDR3 for beta chain variable domain of TCR clone 241020 (TRBV7-2, TRBJ2-3)
CASSFVMPTDTQYF

SEQ ID NO: 482041 - protein, 11 aa, Homo sapiens
  CDR3 for alpha chain variable domain of TCR clone 241021 (TRAV3, TRAJ21)
CAVCNFNKFYF

SEQ ID NO: 482042 - protein, 15 aa, Homo sapiens
  CDR3 for beta chain variable domain of TCR clone 241021 (TRBV19, TRBJ1-2)
CVSSVGQVLNYGYTF

SEQ ID NO: 482043 - protein, 14 aa, Homo sapiens
  CDR3 for alpha chain variable domain of TCR clone 241022 (TRAV12-2, TRAJ40)
CAVKIPSGTCKYTF

SEQ ID NO: 482044 - protein, 14 aa, Homo sapiens
  CDR3 for beta chain variable domain of TCR clone 241022 (TRBV20-1, TRBJ1-1)
CSAQTRIGGTEAFF

SEQ ID NO: 482045 - protein, 15 aa, Homo sapiens
  CDR3 for alpha chain variable domain of TCR clone 241023 (TRAV12-3, TRAJ49)
CAMAVTPNTGNQSYF

SEQ ID NO: 482046 - protein, 14 aa, Homo sapiens
  CDR3 for beta chain variable domain of TCR clone 241023 (TRBV7-8, TRBJ2-3)
CASSLEAGTDTQYF

SEQ ID NO: 482047 - protein, 14 aa, Homo sapiens
  CDR3 for alpha chain variable domain of TCR clone 241024 (TRAV1-2, TRAJ16)
CAVNRFSDGQKLLF

SEQ ID NO: 482048 - protein, 16 aa, Homo sapiens
  CDR3 for beta chain variable domain of TCR clone 241024 (TRBV20-1, TRBJ1-2)
CSASRGQGVANYGYTF

SEQ ID NO: 482049 - protein, 13 aa, Homo sapiens
  CDR3 for alpha chain variable domain of TCR clone 241025 (TRAV12-3, TRAJ33)
CAMSVNSNYQLIW

SEQ ID NO: 482050 - protein, 15 aa, Homo sapiens
  CDR3 for beta chain variable domain of TCR clone 241025 (TRBV13, TRBJ2-5)
CHQLKDRGSWETQYF

SEQ ID NO: 482051 - protein, 14 aa, Homo sapiens
  CDR3 for alpha chain variable domain of TCR clone 241026 (TRAV1-2, TRAJ8)
CAVREDTGFQKLVF

SEQ ID NO: 482052 - protein, 17 aa, Homo sapiens
  CDR3 for beta chain variable domain of TCR clone 241026 (TRBV13, TRBJ2-3)
CASSRARVAGGRNTQYF

SEQ ID NO: 482053 - protein, 13 aa, Homo sapiens
  CDR3 for alpha chain variable domain of TCR clone 241027 (TRAV3, TRAJ27)
CAVRPLGAGKSTF

SEQ ID NO: 482054 - protein, 15 aa, Homo sapiens
  CDR3 for beta chain variable domain of TCR clone 241027 (TRBV19, TRBJ1-2)
CASNLGGETPYGYTF

SEQ ID NO: 482055 - protein, 14 aa, Homo sapiens
  CDR3 for alpha chain variable domain of TCR clone 241028 (TRAV1-2, TRAJ16)
CAVNRFSDGQKLFF

SEQ ID NO: 482056 - protein, 17 aa, Homo sapiens
  CDR3 for beta chain variable domain of TCR clone 241028 (TRBV28, TRBJ2-5)
CASSTPEGDALQETQYF

SEQ ID NO: 482057 - protein, 18 aa, Homo sapiens
  CDR3 for alpha chain variable domain of TCR clone 241029 (TRAV26-1, TRAJ27)
CIVRPSFNYNTNEGKSTF

SEQ ID NO: 482058 - protein, 14 aa, Homo sapiens
  CDR3 for beta chain variable domain of TCR clone 241029 (TRBV10-3, TRBJ1-6)
CAISVDGDESPLHF

SEQ ID NO: 482059 - protein, 16 aa, Homo sapiens
  CDR3 for alpha chain variable domain of TCR clone 241030 (TRAV4, TRAJ18)
CCVLLLGGSTLGRLYF

SEQ ID NO: 482060 - protein, 12 aa, Homo sapiens
  CDR3 for beta chain variable domain of TCR clone 241030 (TRBV11-2, TRBJ2-1)
CASSPGNNEQFF

SEQ ID NO: 482061 - protein, 15 aa, Homo sapiens
  CDR3 for alpha chain variable domain of TCR clone 241031 (TRAV13-2, TRAJ57)
CAEHFRQGGSEKLVF

SEQ ID NO: 482062 - protein, 13 aa, Homo sapiens
  CDR3 for beta chain variable domain of TCR clone 241031 (TRBV7-9, TRBJ1-2)
CASSLKQNYGDTF

SEQ ID NO: 482063 - protein, 12 aa, Homo sapiens
  CDR3 for alpha chain variable domain of TCR clone 241032 (TRAV8-3, TRAJ26)
CAGDNYGQNFVF

SEQ ID NO: 482064 - protein, 16 aa, Homo sapiens
  CDR3 for beta chain variable domain of TCR clone 241032 (TRBV20-1, TRBJ1-2)
CSASTGQGVANYGYTF

SEQ ID NO: 482065 - protein, 12 aa, Homo sapiens
  CDR3 for alpha chain variable domain of TCR clone 241033 (TRAV13-1, TRAJ21)
CAAKEGFNKFYF

SEQ ID NO: 482066 - protein, 18 aa, Homo sapiens
  CDR3 for beta chain variable domain of TCR clone 241033 (TRBV20-1, TRBJ2-6)
CSAETTPTHGSGANALTF

SEQ ID NO: 482067 - protein, 14 aa, Homo sapiens
  CDR3 for alpha chain variable domain of TCR clone 241034 (TRAV8-2, TRAJ44)
CVVSLTGTASKLTF

SEQ ID NO: 482068 - protein, 15 aa, Homo sapiens
  CDR3 for beta chain variable domain of TCR clone 241034 (TRBV7-2, TRBJ2-1)
CASSFSGGIYNEQLF

SEQ ID NO: 482069 - protein, 14 aa, Homo sapiens
  CDR3 for alpha chain variable domain of TCR clone 241035 (TRAV12-3, TRAJ10)
SHLPLTGGGNKLTF

SEQ ID NO: 482070 - protein, 21 aa, Homo sapiens
  CDR3 for beta chain variable domain of TCR clone 241035 (TRBV6-1, TRBJ1-1)
CASSGVGNYKGISGFDTEAFF

SEQ ID NO: 482071 - protein, 14 aa, Homo sapiens
  CDR3 for alpha chain variable domain of TCR clone 241036 (TRAV1-2, TRAJ8)
CAVREDTGFKRLVF

SEQ ID NO: 482072 - protein, 15 aa, Homo sapiens
  CDR3 for beta chain variable domain of TCR clone 241036 (TRBV6-3, TRBJ2-7)
CASSSPGTVFYEQYF

SEQ ID NO: 482073 - protein, 18 aa, Homo sapiens
  CDR3 for alpha chain variable domain of TCR clone 241037 (TRAV1-1, TRAJ3)
CAVRFHSTGYSRASKIIF

SEQ ID NO: 482074 - protein, 14 aa, Homo sapiens
  CDR3 for beta chain variable domain of TCR clone 241037 (TRBV7-7, TRBJ2-2)
CATLQDSDTGELFF

SEQ ID NO: 482075 - protein, 16 aa, Homo sapiens
  CDR3 for alpha chain variable domain of TCR clone 241038 (TRAV16, TRAJ52)
CALSAAGGTSYGKLTF

SEQ ID NO: 482076 - protein, 17 aa, Homo sapiens
  CDR3 for beta chain variable domain of TCR clone 241038 (TRBV11-2, TRBJ2-1)
CASSLYPPGVEYNGQFF

SEQ ID NO: 482077 - protein, 14 aa, Homo sapiens
  CDR3 for alpha chain variable domain of TCR clone 241039 (TRAV20, TRAJ32)
CCGRYGGATHKLIF

SEQ ID NO: 482078 - protein, 16 aa, Homo sapiens
  CDR3 for beta chain variable domain of TCR clone 241039 (TRBV19, TRBJ2-2)
CASRSPGTGATGELFF

SEQ ID NO: 482079 - protein, 15 aa, Homo sapiens
  CDR3 for alpha chain variable domain of TCR clone 241040 (TRAV12-2, TRAJ24)
CAARSSTDSWGKLQF

SEQ ID NO: 482080 - protein, 12 aa, Homo sapiens
  CDR3 for beta chain variable domain of TCR clone 241040 (TRBV11-2, TRBJ2-2)
CASSLGGGELFF

SEQ ID NO: 482081 - protein, 17 aa, Homo sapiens
  CDR3 for alpha chain variable domain of TCR clone 241041 (TRAV1-2, TRAJ27)
CAVRDKTGDTNAGKSTF

SEQ ID NO: 482082 - protein, 15 aa, Homo sapiens
  CDR3 for beta chain variable domain of TCR clone 241041 (TRBV2, TRBJ2-5)
CASSGTVAAGETQYV

SEQ ID NO: 482083 - protein, 14 aa, Homo sapiens
  CDR3 for alpha chain variable domain of TCR clone 241042 (TRAV21, TRAJ35)
CAVMPIGFGNVLHC

SEQ ID NO: 482084 - protein, 13 aa, Homo sapiens
  CDR3 for beta chain variable domain of TCR clone 241042 (TRBV12-4, TRBJ2-5)
CASRLAVQETQYF

SEQ ID NO: 482085 - protein, 14 aa, Homo sapiens
  CDR3 for alpha chain variable domain of TCR clone 241043 (TRAV16, TRAJ32)
CSKRYGGATNKLIF

SEQ ID NO: 482086 - protein, 14 aa, Homo sapiens
  CDR3 for beta chain variable domain of TCR clone 241043 (TRBV7-8, TRBJ2-3)
CASSFPDGQDTQYF

SEQ ID NO: 482087 - protein, 11 aa, Homo sapiens
  CDR3 for alpha chain variable domain of TCR clone 241044 (TRAV12-3, TRAJ43)
CAKSVSNDMRF

SEQ ID NO: 482088 - protein, 13 aa, Homo sapiens
  CDR3 for beta chain variable domain of TCR clone 241044 (TRBV20-1, TRBJ1-1)
CSAPLGGGTEAFF

SEQ ID NO: 482089 - protein, 11 aa, Homo sapiens
  CDR3 for alpha chain variable domain of TCR clone 241045 (TRAV8-6, TRAJ34)
CAVWNTDKPIF

SEQ ID NO: 482090 - protein, 16 aa, Homo sapiens
  CDR3 for beta chain variable domain of TCR clone 241045 (TRBV5-1, TRBJ2-7)
CASSYASTSSGGEQYF

SEQ ID NO: 482091 - protein, 16 aa, Homo sapiens
  CDR3 for alpha chain variable domain of TCR clone 241046 (TRAV14/DV4, TRAJ15)
CAMREGSFQAGTALIF

SEQ ID NO: 482092 - protein, 15 aa, Homo sapiens
  CDR3 for beta chain variable domain of TCR clone 241046 (TRBV5-1, TRBJ1-2)
CASSPGDRGSYGYTF

SEQ ID NO: 482093 - protein, 12 aa, Homo sapiens
  CDR3 for alpha chain variable domain of TCR clone 241047 (TRAV35, TRAJ39)
LAPNNAGNMLTF

SEQ ID NO: 482094 - protein, 16 aa, Homo sapiens
  CDR3 for beta chain variable domain of TCR clone 241047 (TRBV2, TRBJ2-3)
CASSTSVEGGNRYAVF

SEQ ID NO: 482095 - protein, 14 aa, Homo sapiens
  CDR3 for alpha chain variable domain of TCR clone 241048 (TRAV12-2, TRAJ17)
CAALFKAAGNKLTF

SEQ ID NO: 482096 - protein, 16 aa, Homo sapiens
  CDR3 for beta chain variable domain of TCR clone 241048 (TRBV20-1, TRBJ2-2)
CSASASGIPGAGELFC

SEQ ID NO: 482097 - protein, 14 aa, Homo sapiens
  CDR3 for alpha chain variable domain of TCR clone 241049 (TRAV9-2, TRAJ39)
CALYIYNAGNMLTF

SEQ ID NO: 482098 - protein, 15 aa, Homo sapiens
  CDR3 for beta chain variable domain of TCR clone 241049 (TRBV3-1, TRBJ2-7)
CASSQVRQGAYKQYF

SEQ ID NO: 482099 - protein, 15 aa, Homo sapiens
  CDR3 for alpha chain variable domain of TCR clone 241050 (TRAV29/DV5, TRAJ24)
CAASGPTDSWGNFQF

SEQ ID NO: 482100 - protein, 12 aa, Homo sapiens
  CDR3 for beta chain variable domain of TCR clone 241050 (TRBV11-2, TRBJ2-2)
CASSLPTGELFF

SEQ ID NO: 482101 - protein, 16 aa, Homo sapiens
  CDR3 for alpha chain variable domain of TCR clone 241051 (TRAV3, TRAJ10)
CAVRDMRAGGGNKLTF

SEQ ID NO: 482102 - protein, 13 aa, Homo sapiens
  CDR3 for beta chain variable domain of TCR clone 241051 (TRBV6-1, TRBJ1-1)
CASSRQGNSEAFF

SEQ ID NO: 482103 - protein, 14 aa, Homo sapiens
  CDR3 for alpha chain variable domain of TCR clone 241052 (TRAV16, TRAJ33)
CALSAMDSNYKLIW

SEQ ID NO: 482104 - protein, 15 aa, Homo sapiens
  CDR3 for beta chain variable domain of TCR clone 241052 (TRBV11-3, TRBJ2-7)
CASSPGPASSYEQYF

SEQ ID NO: 482105 - protein, 12 aa, Homo sapiens
  CDR3 for alpha chain variable domain of TCR clone 241053 (TRAV13-1, TRAJ21)
CAAKEGFNKFYF

SEQ ID NO: 482106 - protein, 15 aa, Homo sapiens
  CDR3 for beta chain variable domain of TCR clone 241053 (TRBV25-1, TRBJ1-4)
CASSPGDITNEKLFF

SEQ ID NO: 482107 - protein, 17 aa, Homo sapiens
  CDR3 for alpha chain variable domain of TCR clone 241054 (TRAV3, TRAJ6)
CAVRDGPRAGGSYIPPF

SEQ ID NO: 482108 - protein, 14 aa, Homo sapiens
  CDR3 for beta chain variable domain of TCR clone 241054 (TRBV7-2, TRBJ2-7)
CASSPKTGFYEQYF

SEQ ID NO: 482109 - protein, 16 aa, Homo sapiens
  CDR3 for alpha chain variable domain of TCR clone 241055 (TRAV3, TRAJ37)
CAVRGKGSGNTGKLIF

SEQ ID NO: 482110 - protein, 15 aa, Homo sapiens
  CDR3 for beta chain variable domain of TCR clone 241055 (TRBV28, TRBJ2-5)
CASSPPWSYQETQYF

SEQ ID NO: 482111 - protein, 13 aa, Homo sapiens
  CDR3 for alpha chain variable domain of TCR clone 241056 (TRAV17, TRAJ40)
CAGALGGTYKYIF

SEQ ID NO: 482112 - protein, 14 aa, Homo sapiens
  CDR3 for beta chain variable domain of TCR clone 241056 (TRBV7-6, TRBJ2-3)
CASSVGTVTDTQYF

SEQ ID NO: 482113 - protein, 12 aa, Homo sapiens
  CDR3 for alpha chain variable domain of TCR clone 241057 (TRAV12-3, TRAJ17)
CAMTLTGNKLTF

SEQ ID NO: 482114 - protein, 16 aa, Homo sapiens
  CDR3 for beta chain variable domain of TCR clone 241057 (TRBV7-2, TRBJ2-3)
CASSLAGAGSGDTHYF

SEQ ID NO: 482115 - protein, 12 aa, Homo sapiens
  CDR3 for alpha chain variable domain of TCR clone 241058 (TRAV13-1, TRAJ21)
CAAKEGFNKFYL

SEQ ID NO: 482116 - protein, 14 aa, Homo sapiens
  CDR3 for beta chain variable domain of TCR clone 241058 (TRBV18, TRBJ2-7)
CASSPRGGAYEQYL

SEQ ID NO: 482117 - protein, 14 aa, Homo sapiens
  CDR3 for alpha chain variable domain of TCR clone 241059 (TRAV1-2, TRAJ16)
CAVNRFPDGQKLLF

SEQ ID NO: 482118 - protein, 14 aa, Homo sapiens
  CDR3 for beta chain variable domain of TCR clone 241059 (TRBV7-6, TRBJ2-3)
CASSLGTVTDTQYF

SEQ ID NO: 482119 - protein, 15 aa, Homo sapiens
  CDR3 for alpha chain variable domain of TCR clone 241060 (TRAV20, TRAJ23)
CAVQAVRNQGGKLIF

SEQ ID NO: 482120 - protein, 16 aa, Homo sapiens
  CDR3 for beta chain variable domain of TCR clone 241060 (TRBV27, TRBJ2-7)
CASSKRGRGWAYEQYF

SEQ ID NO: 482121 - protein, 17 aa, Homo sapiens
  CDR3 for alpha chain variable domain of TCR clone 241061 (TRAV3, TRAJ12)
CAVRDGGRMDSSYKLIF

SEQ ID NO: 482122 - protein, 13 aa, Homo sapiens
  CDR3 for beta chain variable domain of TCR clone 241061 (TRBV9, TRBJ2-1)
CASSVGQGGEQFF

SEQ ID NO: 482123 - protein, 15 aa, Homo sapiens
  CDR3 for alpha chain variable domain of TCR clone 241062 (TRAV8-3, TRAJ40)
CAAPSLGSGPYRYIF

SEQ ID NO: 482124 - protein, 16 aa, Homo sapiens
  CDR3 for beta chain variable domain of TCR clone 241062 (TRBV7-3, TRBJ2-3)
CASSLSGCRPEDTQYF

SEQ ID NO: 482125 - protein, 17 aa, Homo sapiens
  CDR3 for alpha chain variable domain of TCR clone 241063 (TRAV3, TRAJ6)
CAVRDGPRAGGSYIPTF

SEQ ID NO: 482126 - protein, 14 aa, Homo sapiens
  CDR3 for beta chain variable domain of TCR clone 241063 (TRBV4-1, TRBJ1-4)
CASGQERKNEKLFF

SEQ ID NO: 482127 - protein, 15 aa, Homo sapiens
  CDR3 for alpha chain variable domain of TCR clone 241064 (TRAV8-3, TRAJ45)
CASSYSGGGADGLNF

SEQ ID NO: 482128 - protein, 16 aa, Homo sapiens
  CDR3 for beta chain variable domain of TCR clone 241064 (TRBV7-9, TRBJ2-2)
CASSGFGGANTGELFF

SEQ ID NO: 482129 - protein, 14 aa, Homo sapiens
  CDR3 for alpha chain variable domain of TCR clone 241065 (TRAV3, TRAJ34)
CAGRDINNTDKLIF

SEQ ID NO: 482130 - protein, 14 aa, Homo sapiens
  CDR3 for beta chain variable domain of TCR clone 241065 (TRBV7-2, TRBJ2-2)
CASSLGQNTGELFF

SEQ ID NO: 482131 - protein, 13 aa, Homo sapiens
  CDR3 for alpha chain variable domain of TCR clone 241066 (TRAV13-1, TRAJ9)
CAARGTGGFKTIF

SEQ ID NO: 482132 - protein, 12 aa, Homo sapiens
  CDR3 for beta chain variable domain of TCR clone 241066 (TRBV2, TRBJ2-1)
CAYGQPGNEQFF

SEQ ID NO: 482133 - protein, 11 aa, Homo sapiens
  CDR3 for alpha chain variable domain of TCR clone 241067 (TRAV27, TRAJ47)
SIVEYGNKLVF

SEQ ID NO: 482134 - protein, 17 aa, Homo sapiens
  CDR3 for beta chain variable domain of TCR clone 241067 (TRBV2, TRBJ2-1)
CQQGLAGGPRTYNEQFF

SEQ ID NO: 482135 - protein, 15 aa, Homo sapiens
  CDR3 for alpha chain variable domain of TCR clone 241068 (TRAV26-1, TRAJ22)
CIVRVSFWFCKATDL

SEQ ID NO: 482136 - protein, 15 aa, Homo sapiens
  CDR3 for beta chain variable domain of TCR clone 241068 (TRBV5-1, TRBJ2-7)
CASSLDLTSSYEQYF

SEQ ID NO: 482137 - protein, 10 aa, Homo sapiens
  CDR3 for alpha chain variable domain of TCR clone 241069 (TRAV8-4, TRAJ43)
CAVSADDMRF

SEQ ID NO: 482138 - protein, 15 aa, Homo sapiens
  CDR3 for beta chain variable domain of TCR clone 241069 (TRBV29-1, TRBJ2-1)
CSVGRHALFYNEQFF

SEQ ID NO: 482139 - protein, 12 aa, Homo sapiens
  CDR3 for alpha chain variable domain of TCR clone 241070 (TRAV35, TRAJ31)
CAAASNNARLMF

SEQ ID NO: 482140 - protein, 15 aa, Homo sapiens
  CDR3 for beta chain variable domain of TCR clone 241070 (TRBV28, TRBJ2-1)
CASSIIAGGRSEQFF

SEQ ID NO: 482141 - protein, 13 aa, Homo sapiens
  CDR3 for alpha chain variable domain of TCR clone 241071 (TRAV23/DV6, TRAJ22)
CAPYSGSARQQTF

SEQ ID NO: 482142 - protein, 15 aa, Homo sapiens
  CDR3 for beta chain variable domain of TCR clone 241071 (TRBV11-2, TRBJ1-6)
CASSLDPWAVSPLHF

SEQ ID NO: 482143 - protein, 13 aa, Homo sapiens
  CDR3 for alpha chain variable domain of TCR clone 241072 (TRAV2, TRAJ40)
CAVVTSGTYKYIF

SEQ ID NO: 482144 - protein, 15 aa, Homo sapiens
  CDR3 for beta chain variable domain of TCR clone 241072 (TRBV3-1, TRBJ2-5)
CASSQEVRLEETQYF

SEQ ID NO: 482145 - protein, 14 aa, Homo sapiens
  CDR3 for alpha chain variable domain of TCR clone 241073 (TRAV8-4, TRAJ45)
CASGGGGGADGLTF

SEQ ID NO: 482146 - protein, 20 aa, Homo sapiens
  CDR3 for beta chain variable domain of TCR clone 241073 (TRBV4-3, TRBJ2-3)
CASSPRVQMRASGRPDTQYF

SEQ ID NO: 482147 - protein, 14 aa, Homo sapiens
  CDR3 for alpha chain variable domain of TCR clone 241074 (TRAV1-2, TRAJ8)
CAAREDTGFQKLVF

SEQ ID NO: 482148 - protein, 16 aa, Homo sapiens
  CDR3 for beta chain variable domain of TCR clone 241074 (TRBV7-9, TRBJ2-1)
CASSDVAGGSYNEQFF

SEQ ID NO: 482149 - protein, 13 aa, Homo sapiens
  CDR3 for alpha chain variable domain of TCR clone 241075 (TRAV17, TRAJ26)
CATVDNYGQNFVF

SEQ ID NO: 482150 - protein, 15 aa, Homo sapiens
  CDR3 for beta chain variable domain of TCR clone 241075 (TRBV6-3, TRBJ2-7)
CASSSPGTVFYEQYF

SEQ ID NO: 482151 - protein, 14 aa, Homo sapiens
  CDR3 for alpha chain variable domain of TCR clone 241076 (TRAV35, TRAJ42)
CAGRYGGSQGNLFF

SEQ ID NO: 482152 - protein, 15 aa, Homo sapiens
  CDR3 for beta chain variable domain of TCR clone 241076 (TRBV7-9, TRBJ2-1)
CASSLGWGRANEQFF

SEQ ID NO: 482153 - protein, 13 aa, Homo sapiens
  CDR3 for alpha chain variable domain of TCR clone 241077 (TRAV12-3, TRAJ40)
CAMSDSGTYKYIF

SEQ ID NO: 482154 - protein, 22 aa, Homo sapiens
  CDR3 for beta chain variable domain of TCR clone 241077 (TRBV14, TRBJ1-5)
CASSQDGVTPYLPPISNQPQHF

SEQ ID NO: 482155 - protein, 15 aa, Homo sapiens
  CDR3 for alpha chain variable domain of TCR clone 241078 (TRAV12-2, TRAJ43)
CAFDMRFGAGTRLTV

SEQ ID NO: 482156 - protein, 14 aa, Homo sapiens
  CDR3 for beta chain variable domain of TCR clone 241078 (TRBV19, TRBJ2-1)
CASPTFVLSGEQFF

SEQ ID NO: 482157 - protein, 13 aa, Homo sapiens
  CDR3 for alpha chain variable domain of TCR clone 241079 (TRAV36/DV7, TRAJ37)
CAVFSSNKGKLIF

SEQ ID NO: 482158 - protein, 12 aa, Homo sapiens
  CDR3 for beta chain variable domain of TCR clone 241079 (TRBV11-2, TRBJ2-2)
CASSLGGGELFF

SEQ ID NO: 482159 - protein, 11 aa, Homo sapiens
  CDR3 for alpha chain variable domain of TCR clone 241080 (TRAV2, TRAJ13)
CASGGYQKVTF

SEQ ID NO: 482160 - protein, 13 aa, Homo sapiens
  CDR3 for beta chain variable domain of TCR clone 241080 (TRBV20-1, TRBJ1-1)
CSARAGGNTEAFF

SEQ ID NO: 482161 - protein, 12 aa, Homo sapiens
  CDR3 for alpha chain variable domain of TCR clone 241081 (TRAV2, TRAJ31)
CAVEDNNARLML

SEQ ID NO: 482162 - protein, 14 aa, Homo sapiens
  CDR3 for beta chain variable domain of TCR clone 241081 (TRBV28, TRBJ1-5)
CASSRTGLNQPQHF

SEQ ID NO: 482163 - protein, 12 aa, Homo sapiens
  CDR3 for alpha chain variable domain of TCR clone 241082 (TRAV30, TRAJ43)
CGTEERGNDMRC

SEQ ID NO: 482164 - protein, 13 aa, Homo sapiens
  CDR3 for beta chain variable domain of TCR clone 241082 (TRBV27, TRBJ2-7)
CASSVSQGYEQYF

SEQ ID NO: 482165 - protein, 20 aa, Homo sapiens
  CDR3 for alpha chain variable domain of TCR clone 241083 (TRAV21, TRAJ4)
AASQPGDSATLAGGYNKLIF

SEQ ID NO: 482166 - protein, 19 aa, Homo sapiens
  CDR3 for beta chain variable domain of TCR clone 241083 (TRBV18, TRBJ1-3)
CATSPLSRTGMSSGNTIYF

SEQ ID NO: 482167 - protein, 15 aa, Homo sapiens
  CDR3 for alpha chain variable domain of TCR clone 241084 (TRAV3, TRAJ5)
CAVRDLDTGRRALPF

SEQ ID NO: 482168 - protein, 13 aa, Homo sapiens
  CDR3 for beta chain variable domain of TCR clone 241084 (TRBV12-4, TRBJ2-7)
CASSPTETYEQFF

SEQ ID NO: 482169 - protein, 12 aa, Homo sapiens
  CDR3 for alpha chain variable domain of TCR clone 241085 (TRAV17, TRAJ36)
CATLTGPNNLFF

SEQ ID NO: 482170 - protein, 15 aa, Homo sapiens
  CDR3 for beta chain variable domain of TCR clone 241085 (TRBV19, TRBJ1-2)
CASSTKTDTNYGYTF

SEQ ID NO: 482171 - protein, 10 aa, Homo sapiens
  CDR3 for alpha chain variable domain of TCR clone 241086 (TRAV1-2, TRAJ20)
CALNDYKLSF

SEQ ID NO: 482172 - protein, 14 aa, Homo sapiens
  CDR3 for beta chain variable domain of TCR clone 241086 (TRBV19, TRBJ2-2)
CASSGQGIAGELFF

SEQ ID NO: 482173 - protein, 10 aa, Homo sapiens
  CDR3 for alpha chain variable domain of TCR clone 241087 (TRAV21, TRAJ43)
CAVRIGDMRF

SEQ ID NO: 482174 - protein, 14 aa, Homo sapiens
  CDR3 for beta chain variable domain of TCR clone 241087 (TRBV19, TRBJ2-5)
CASSMTGQQETQYF

SEQ ID NO: 482175 - protein, 13 aa, Homo sapiens
  CDR3 for alpha chain variable domain of TCR clone 241088 (TRAV20, TRAJ40)
CAVPFSGTYNYIF

SEQ ID NO: 482176 - protein, 13 aa, Homo sapiens
  CDR3 for beta chain variable domain of TCR clone 241088 (TRBV15, TRBJ2-5)
CATSQIGEETQYF

SEQ ID NO: 482177 - protein, 12 aa, Homo sapiens
  CDR3 for alpha chain variable domain of TCR clone 241089 (TRAV12-2, TRAJ8)
CAVNTGFQKLVF

SEQ ID NO: 482178 - protein, 13 aa, Homo sapiens
  CDR3 for beta chain variable domain of TCR clone 241089 (TRBV19, TRBJ1-5)
CASSEGSNQPQHF

SEQ ID NO: 482179 - protein, 15 aa, Homo sapiens
  CDR3 for alpha chain variable domain of TCR clone 241090 (TRAV2, TRAJ24)
CAVVRLKNSWGQLQF

SEQ ID NO: 482180 - protein, 16 aa, Homo sapiens
  CDR3 for beta chain variable domain of TCR clone 241090 (TRBV7-7, TRBJ2-3)
CASSPGTSGSTDTQYF

SEQ ID NO: 482181 - protein, 16 aa, Homo sapiens
  CDR3 for alpha chain variable domain of TCR clone 241091 (TRAV3, TRAJ37)
CAVRGKGSGNTGTLIF

SEQ ID NO: 482182 - protein, 19 aa, Homo sapiens
  CDR3 for beta chain variable domain of TCR clone 241091 (TRBV25-1, TRBJ2-2)
CAILVYRVDRGRKTGELFF

SEQ ID NO: 482183 - protein, 15 aa, Homo sapiens
  CDR3 for alpha chain variable domain of TCR clone 241092 (TRAV21, TRAJ40)
CAVRPQTSGTSKYIF

SEQ ID NO: 482184 - protein, 13 aa, Homo sapiens
  CDR3 for beta chain variable domain of TCR clone 241092 (TRBV7-2, TRBJ2-2)
CASGSVRARELFF

SEQ ID NO: 482185 - protein, 13 aa, Homo sapiens
  CDR3 for alpha chain variable domain of TCR clone 241093 (TRAV26-1, TRAJ30)
CIVRVESNDKIIF

SEQ ID NO: 482186 - protein, 17 aa, Homo sapiens
  CDR3 for beta chain variable domain of TCR clone 241093 (TRBV13, TRBJ2-3)
CASSLSRVAGGRNTKYF

SEQ ID NO: 482187 - protein, 14 aa, Homo sapiens
  CDR3 for alpha chain variable domain of TCR clone 241094 (TRAV16, TRAJ39)
CALSKNNAGNMLTF

SEQ ID NO: 482188 - protein, 17 aa, Homo sapiens
  CDR3 for beta chain variable domain of TCR clone 241094 (TRBV27, TRBJ2-6)
CASSLTGFASGANVLTF

SEQ ID NO: 482189 - protein, 13 aa, Homo sapiens
  CDR3 for alpha chain variable domain of TCR clone 241095 (TRAV2, TRAJ29)
CAVYSSGNTPLVF

SEQ ID NO: 482190 - protein, 14 aa, Homo sapiens
  CDR3 for beta chain variable domain of TCR clone 241095 (TRBV7-9, TRBJ1-1)
CASSLGRLKTEAFF

SEQ ID NO: 482191 - protein, 14 aa, Homo sapiens
  CDR3 for alpha chain variable domain of TCR clone 241096 (TRAV16, TRAJ33)
CAPSAMDSNYQLIW

SEQ ID NO: 482192 - protein, 12 aa, Homo sapiens
  CDR3 for beta chain variable domain of TCR clone 241096 (TRBV7-8, TRBJ2-4)
CASSLGGNIQYF

SEQ ID NO: 482193 - protein, 18 aa, Homo sapiens
  CDR3 for alpha chain variable domain of TCR clone 241097 (TRAV13-1, TRAJ52)
CAASKRSTGGTSYGKLTS

SEQ ID NO: 482194 - protein, 12 aa, Homo sapiens
  CDR3 for beta chain variable domain of TCR clone 241097 (TRBV11-2, TRBJ2-2)
CASSLGGGELFF

SEQ ID NO: 482195 - protein, 13 aa, Homo sapiens
  CDR3 for alpha chain variable domain of TCR clone 241098 (TRAV16, TRAJ28)
CPLTGAGSYQLTF

SEQ ID NO: 482196 - protein, 16 aa, Homo sapiens
  CDR3 for beta chain variable domain of TCR clone 241098 (TRBV28, TRBJ1-5)
CASSLTGQGWNQPQHF

SEQ ID NO: 482197 - protein, 16 aa, Homo sapiens
  CDR3 for alpha chain variable domain of TCR clone 241099 (TRAV3, TRAJ10)
CAVRDMRAGGGNKFTF

SEQ ID NO: 482198 - protein, 12 aa, Homo sapiens
  CDR3 for beta chain variable domain of TCR clone 241099 (TRBV7-9, TRBJ1-1)
CASILVRGEAFF

SEQ ID NO: 482199 - protein, 16 aa, Homo sapiens
  CDR3 for alpha chain variable domain of TCR clone 241100 (TRAV12-2, TRAJ52)
CRLANAGGTSYGKLTF

SEQ ID NO: 482200 - protein, 13 aa, Homo sapiens
  CDR3 for beta chain variable domain of TCR clone 241100 (TRBV10-3, TRBJ2-7)
CDSKLAVNYEQYF

SEQ ID NO: 482201 - protein, 13 aa, Homo sapiens
  CDR3 for alpha chain variable domain of TCR clone 241101 (TRAV8-3, TRAJ4)
WVFYSGGYNMLIF

SEQ ID NO: 482202 - protein, 16 aa, Homo sapiens
  CDR3 for beta chain variable domain of TCR clone 241101 (TRBV7-8, TRBJ2-3)
CASSTEGQRETDTQYF

SEQ ID NO: 482203 - protein, 12 aa, Homo sapiens
  CDR3 for alpha chain variable domain of TCR clone 241102 (TRAV16, TRAJ10)
CSGTGGGNKLTF

SEQ ID NO: 482204 - protein, 15 aa, Homo sapiens
  CDR3 for beta chain variable domain of TCR clone 241102 (TRBV6-3, TRBJ2-7)
CASSSPGTVFYEQYF

SEQ ID NO: 482205 - protein, 18 aa, Homo sapiens
  CDR3 for alpha chain variable domain of TCR clone 241103 (TRAV8-4, TRAJ52)
CAGTRANAGGTSYGKLTF

SEQ ID NO: 482206 - protein, 20 aa, Homo sapiens
  CDR3 for beta chain variable domain of TCR clone 241103 (TRBV19, TRBJ2-1)
CASSISRTVTSTRLNNEQLF

SEQ ID NO: 482207 - protein, 14 aa, Homo sapiens
  CDR3 for alpha chain variable domain of TCR clone 241104 (TRAV38-2/DV8, TRAJ54)
AAMYKIQGAQKLVF

SEQ ID NO: 482208 - protein, 17 aa, Homo sapiens
  CDR3 for beta chain variable domain of TCR clone 241104 (TRBV6-1, TRBJ2-3)
CASSEALRLISTDTQYF

SEQ ID NO: 482209 - protein, 14 aa, Homo sapiens
  CDR3 for alpha chain variable domain of TCR clone 241105 (TRAV12-2, TRAJ6)
CASKWGGGSYIPTF

SEQ ID NO: 482210 - protein, 13 aa, Homo sapiens
  CDR3 for beta chain variable domain of TCR clone 241105 (TRBV7-8, TRBJ1-4)
CASSFNRREKLFF

SEQ ID NO: 482211 - protein, 15 aa, Homo sapiens
  CDR3 for alpha chain variable domain of TCR clone 241106 (TRAV13-1, TRAJ5)
CAASPRGHGQESTYF

SEQ ID NO: 482212 - protein, 17 aa, Homo sapiens
  CDR3 for beta chain variable domain of TCR clone 241106 (TRBV3-1, TRBJ2-2)
CASSQFRDKVDTWELFF

SEQ ID NO: 482213 - protein, 15 aa, Homo sapiens
  CDR3 for alpha chain variable domain of TCR clone 241107 (TRAV23/DV6, TRAJ30)
CVASSQESRDDKIVF

SEQ ID NO: 482214 - protein, 17 aa, Homo sapiens
  CDR3 for beta chain variable domain of TCR clone 241107 (TRBV4-3, TRBJ2-1)
CASSQFSSGRASGEQFF

SEQ ID NO: 482215 - protein, 13 aa, Homo sapiens
  CDR3 for alpha chain variable domain of TCR clone 241108 (TRAV20, TRAJ31)
CAVQAWNNARLMF

SEQ ID NO: 482216 - protein, 11 aa, Homo sapiens
  CDR3 for beta chain variable domain of TCR clone 241108 (TRBV19, TRBJ1-1)
CASSIGSEAFF

SEQ ID NO: 482217 - protein, 13 aa, Homo sapiens
  CDR3 for alpha chain variable domain of TCR clone 241109 (TRAV38-2/DV8, TRAJ34)
CAYRTWNPDKLIF

SEQ ID NO: 482218 - protein, 19 aa, Homo sapiens
  CDR3 for beta chain variable domain of TCR clone 241109 (TRBV7-7, TRBJ2-7)
CASSPQDRDLPGGTYEQYF

SEQ ID NO: 482219 - protein, 15 aa, Homo sapiens
  CDR3 for alpha chain variable domain of TCR clone 241110 (TRAV10, TRAJ44)
CVVSGATDTASKLTF

SEQ ID NO: 482220 - protein, 13 aa, Homo sapiens
  CDR3 for beta chain variable domain of TCR clone 241110 (TRBV19, TRBJ1-2)
CASSVPGQDGYTF

SEQ ID NO: 482221 - protein, 14 aa, Homo sapiens
  CDR3 for alpha chain variable domain of TCR clone 241111 (TRAV17, TRAJ15)
CATMGIQAGTALIF

SEQ ID NO: 482222 - protein, 14 aa, Homo sapiens
  CDR3 for beta chain variable domain of TCR clone 241111 (TRBV7-2, TRBJ1-1)
CASSFLTGTTEAFF

SEQ ID NO: 482223 - protein, 18 aa, Homo sapiens
  CDR3 for alpha chain variable domain of TCR clone 241112 (TRAV13-1, TRAJ52)
CAAKNPNAGGTSYGKLTF

SEQ ID NO: 482224 - protein, 12 aa, Homo sapiens
  CDR3 for beta chain variable domain of TCR clone 241112 (TRBV7-9, TRBJ2-7)
CASSIKREEQYF

SEQ ID NO: 482225 - protein, 14 aa, Homo sapiens
  CDR3 for alpha chain variable domain of TCR clone 241113 (TRAV17, TRAJ54)
CATDANQGAQKLVF

SEQ ID NO: 482226 - protein, 12 aa, Homo sapiens
  CDR3 for beta chain variable domain of TCR clone 241113 (TRBV6-3, TRBJ2-1)
CASSGSYDEQFF

SEQ ID NO: 482227 - protein, 10 aa, Homo sapiens
  CDR3 for alpha chain variable domain of TCR clone 241114 (TRAV12-1, TRAJ20)
CVVNPRKLSF

SEQ ID NO: 482228 - protein, 15 aa, Homo sapiens
  CDR3 for beta chain variable domain of TCR clone 241114 (TRBV5-1, TRBJ2-1)
CTSSPPRAPYNEQFF

SEQ ID NO: 482229 - protein, 13 aa, Homo sapiens
  CDR3 for alpha chain variable domain of TCR clone 241115 (TRAV21, TRAJ27)
CAARPGNAGKPTF

SEQ ID NO: 482230 - protein, 13 aa, Homo sapiens
  CDR3 for beta chain variable domain of TCR clone 241115 (TRBV15, TRBJ2-5)
CATSQIGEETQYF

SEQ ID NO: 482231 - protein, 17 aa, Homo sapiens
  CDR3 for alpha chain variable domain of TCR clone 241116 (TRAV4, TRAJ18)
CLVGERSVGSTLGRLCF

SEQ ID NO: 482232 - protein, 16 aa, Homo sapiens
  CDR3 for beta chain variable domain of TCR clone 241116 (TRBV15, TRBJ1-4)
CATSRDSPPGREKLFF

SEQ ID NO: 482233 - protein, 14 aa, Homo sapiens
  CDR3 for alpha chain variable domain of TCR clone 241117 (TRAV17, TRAJ16)
CATADFSDGQKLLF

SEQ ID NO: 482234 - protein, 14 aa, Homo sapiens
  CDR3 for beta chain variable domain of TCR clone 241117 (TRBV7-3, TRBJ1-1)
CASSLKGGNTEAFF

SEQ ID NO: 482235 - protein, 12 aa, Homo sapiens
  CDR3 for alpha chain variable domain of TCR clone 241118 (TRAV12-3, TRAJ29)
CAAREGNTPLVF

SEQ ID NO: 482236 - protein, 14 aa, Homo sapiens
  CDR3 for beta chain variable domain of TCR clone 241118 (TRBV7-8, TRBJ2-3)
CASSLEAGTDTQYF

SEQ ID NO: 482237 - protein, 12 aa, Homo sapiens
  CDR3 for alpha chain variable domain of TCR clone 241119 (TRAV26-1, TRAJ43)
CIVRGNNNDMRF

SEQ ID NO: 482238 - protein, 16 aa, Homo sapiens
  CDR3 for beta chain variable domain of TCR clone 241119 (TRBV18, TRBJ2-1)
CASSPPSGGGNNEQFF

SEQ ID NO: 482239 - protein, 16 aa, Homo sapiens
  CDR3 for alpha chain variable domain of TCR clone 241120 (TRAV30, TRAJ24)
CGTELVDADSWGKFQF

SEQ ID NO: 482240 - protein, 15 aa, Homo sapiens
  CDR3 for beta chain variable domain of TCR clone 241120 (TRBV7-9, TRBJ1-4)
CASSARTGGNEELFF

SEQ ID NO: 482241 - protein, 13 aa, Homo sapiens
  CDR3 for alpha chain variable domain of TCR clone 241121 (TRAV35, TRAJ42)
CAGFPGSQGNLIF

SEQ ID NO: 482242 - protein, 18 aa, Homo sapiens
  CDR3 for beta chain variable domain of TCR clone 241121 (TRBV4-1, TRBJ2-3)
CASSHQLAGGRSTDTQYF

SEQ ID NO: 482243 - protein, 10 aa, Homo sapiens
  CDR3 for alpha chain variable domain of TCR clone 241122 (TRAV1-2, TRAJ20)
CALNYYKLSF

SEQ ID NO: 482244 - protein, 16 aa, Homo sapiens
  CDR3 for beta chain variable domain of TCR clone 241122 (TRBV20-1, TRBJ1-1)
CSARALTQGMNTEAFF

SEQ ID NO: 482245 - protein, 15 aa, Homo sapiens
  CDR3 for alpha chain variable domain of TCR clone 241123 (TRAV12-3, TRAJ42)
CAMSGLGGSQGNLIF

SEQ ID NO: 482246 - protein, 13 aa, Homo sapiens
  CDR3 for beta chain variable domain of TCR clone 241123 (TRBV19, TRBJ2-5)
CASSGRAGETQYF

SEQ ID NO: 482247 - protein, 12 aa, Homo sapiens
  CDR3 for alpha chain variable domain of TCR clone 241124 (TRAV35, TRAJ43)
CAGAYNNNEMRF

SEQ ID NO: 482248 - protein, 14 aa, Homo sapiens
  CDR3 for beta chain variable domain of TCR clone 241124 (TRBV2, TRBJ2-2)
CASSWQGATGELFF

SEQ ID NO: 482249 - protein, 17 aa, Homo sapiens
  CDR3 for alpha chain variable domain of TCR clone 241125 (TRAV26-1, TRAJ36)
CIIRPPGDQTGANNLFF

SEQ ID NO: 482250 - protein, 15 aa, Homo sapiens
  CDR3 for beta chain variable domain of TCR clone 241125 (TRBV10-3, TRBJ2-6)
CATPAAASGANVLTF

SEQ ID NO: 482251 - protein, 13 aa, Homo sapiens
  CDR3 for alpha chain variable domain of TCR clone 241126 (TRAV6, TRAJ20)
CALAVSNDYKLSF

SEQ ID NO: 482252 - protein, 13 aa, Homo sapiens
  CDR3 for beta chain variable domain of TCR clone 241126 (TRBV2, TRBJ1-1)
CASSEGGNTEAFF

SEQ ID NO: 482253 - protein, 16 aa, Homo sapiens
  CDR3 for alpha chain variable domain of TCR clone 241127 (TRAV3, TRAJ10)
CAVRDMRAGGGNKPTF

SEQ ID NO: 482254 - protein, 14 aa, Homo sapiens
  CDR3 for beta chain variable domain of TCR clone 241127 (TRBV7-2, TRBJ1-1)
CASSFLTGTTEAFF

SEQ ID NO: 482255 - protein, 12 aa, Homo sapiens
  CDR3 for alpha chain variable domain of TCR clone 241128 (TRAV21, TRAJ31)
CAVWGNNARLMF

SEQ ID NO: 482256 - protein, 14 aa, Homo sapiens
  CDR3 for beta chain variable domain of TCR clone 241128 (TRBV7-9, TRBJ2-2)
CASSLVQDTGELFF

SEQ ID NO: 482257 - protein, 11 aa, Homo sapiens
  CDR3 for alpha chain variable domain of TCR clone 241129 (TRAV12-2, TRAJ43)
CASPIGNDMRF

SEQ ID NO: 482258 - protein, 12 aa, Homo sapiens
  CDR3 for beta chain variable domain of TCR clone 241129 (TRBV20-1, TRBJ2-7)
CSAGRKMGEQYF

SEQ ID NO: 482259 - protein, 15 aa, Homo sapiens
  CDR3 for alpha chain variable domain of TCR clone 241130 (TRAV1-1, TRAJ5)
CAVRHMDTGRRAITF

SEQ ID NO: 482260 - protein, 17 aa, Homo sapiens
  CDR3 for beta chain variable domain of TCR clone 241130 (TRBV28, TRBJ2-7)
CASSPGLAGGDSSEQYF

SEQ ID NO: 482261 - protein, 13 aa, Homo sapiens
  CDR3 for alpha chain variable domain of TCR clone 241131 (TRAV12-2, TRAJ37)
CAGGSGNTVKLIF

SEQ ID NO: 482262 - protein, 15 aa, Homo sapiens
  CDR3 for beta chain variable domain of TCR clone 241131 (TRBV6-5, TRBJ2-1)
CASSYDAGAGNEQFF

SEQ ID NO: 482263 - protein, 15 aa, Homo sapiens
  CDR3 for alpha chain variable domain of TCR clone 241132 (TRAV21, TRAJ57)
CAVIITQGGSEKLVF

SEQ ID NO: 482264 - protein, 14 aa, Homo sapiens
  CDR3 for beta chain variable domain of TCR clone 241132 (TRBV5-1, TRBJ2-2)
CASSLMWIPGELFF

SEQ ID NO: 482265 - protein, 16 aa, Homo sapiens
  CDR3 for alpha chain variable domain of TCR clone 241133 (TRAV13-1, TRAJ48)
CAASIFGNFGNEKLTF

SEQ ID NO: 482266 - protein, 17 aa, Homo sapiens
  CDR3 for beta chain variable domain of TCR clone 241133 (TRBV28, TRBJ2-5)
CASSTPEGDALQETQYF

SEQ ID NO: 482267 - protein, 15 aa, Homo sapiens
  CDR3 for alpha chain variable domain of TCR clone 241134 (TRAV12-1, TRAJ9)
CVVSFGATGGFKTIF

SEQ ID NO: 482268 - protein, 19 aa, Homo sapiens
  CDR3 for beta chain variable domain of TCR clone 241134 (TRBV25-1, TRBJ2-2)
CAILVYRVDRGRKTGELFF

SEQ ID NO: 482269 - protein, 11 aa, Homo sapiens
  CDR3 for alpha chain variable domain of TCR clone 241135 (TRAV27, TRAJ47)
SIVEYGNKLVF

SEQ ID NO: 482270 - protein, 18 aa, Homo sapiens
  CDR3 for beta chain variable domain of TCR clone 241135 (TRBV2, TRBJ2-1)
CASRGLAGGSRTYNEQFF

SEQ ID NO: 482271 - protein, 16 aa, Homo sapiens
  CDR3 for alpha chain variable domain of TCR clone 241136 (TRAV1-2, TRAJ6)
CAVRDQGTGGSYIPTF

SEQ ID NO: 482272 - protein, 13 aa, Homo sapiens
  CDR3 for beta chain variable domain of TCR clone 241136 (TRBV10-2, TRBJ2-7)
CASGASGGYEQYF

SEQ ID NO: 482273 - protein, 19 aa, Homo sapiens
  CDR3 for alpha chain variable domain of TCR clone 241137 (TRAV29/DV5, TRAJ49)
CSVLLCSKLTVDTGNQFYC

SEQ ID NO: 482274 - protein, 15 aa, Homo sapiens
  CDR3 for beta chain variable domain of TCR clone 241137 (TRBV4-3, TRBJ2-2)
CASSQGGTPTGELFF

SEQ ID NO: 482275 - protein, 15 aa, Homo sapiens
  CDR3 for alpha chain variable domain of TCR clone 241138 (TRAV2, TRAJ11)
CAVGGRNSGYSTLTL

SEQ ID NO: 482276 - protein, 14 aa, Homo sapiens
  CDR3 for beta chain variable domain of TCR clone 241138 (TRBV20-1, TRBJ2-1)
CSAQIGGSANEQFF

SEQ ID NO: 482277 - protein, 14 aa, Homo sapiens
  CDR3 for alpha chain variable domain of TCR clone 241139 (TRAV1-2, TRAJ8)
CAVGEDTGFQKLVF

SEQ ID NO: 482278 - protein, 16 aa, Homo sapiens
  CDR3 for beta chain variable domain of TCR clone 241139 (TRBV7-3, TRBJ2-2)
CASSLKRGTLSGELFF

SEQ ID NO: 482279 - protein, 14 aa, Homo sapiens
  CDR3 for alpha chain variable domain of TCR clone 241140 (TRAV2, TRAJ9)
CAVEDRSGGFKTIF

SEQ ID NO: 482280 - protein, 13 aa, Homo sapiens
  CDR3 for beta chain variable domain of TCR clone 241140 (TRBV11-2, TRBJ1-6)
CASSLAGTSPLHF

SEQ ID NO: 482281 - protein, 11 aa, Homo sapiens
  CDR3 for alpha chain variable domain of TCR clone 241141 (TRAV26-1, TRAJ27)
CIDPNAGKSTF

SEQ ID NO: 482282 - protein, 18 aa, Homo sapiens
  CDR3 for beta chain variable domain of TCR clone 241141 (TRBV7-9, TRBJ2-6)
CSSSFPGAGISGANVLTF

SEQ ID NO: 482283 - protein, 12 aa, Homo sapiens
  CDR3 for alpha chain variable domain of TCR clone 241142 (TRAV12-2, TRAJ47)
CAVAEYGNKLVF

SEQ ID NO: 482284 - protein, 14 aa, Homo sapiens
  CDR3 for beta chain variable domain of TCR clone 241142 (TRBV20-1, TRBJ1-1)
CSARGGTANTEAFF

SEQ ID NO: 482285 - protein, 18 aa, Homo sapiens
  CDR3 for alpha chain variable domain of TCR clone 241143 (TRAV13-1, TRAJ52)
CAAKNPNAGGTSYGKLTF

SEQ ID NO: 482286 - protein, 16 aa, Homo sapiens
  CDR3 for beta chain variable domain of TCR clone 241143 (TRBV2, TRBJ2-3)
CASSTSVEGVTDTQCF

SEQ ID NO: 482287 - protein, 15 aa, Homo sapiens
  CDR3 for alpha chain variable domain of TCR clone 241144 (TRAV26-1, TRAJ22)
CIVRVSFWFCKGNDL

SEQ ID NO: 482288 - protein, 13 aa, Homo sapiens
  CDR3 for beta chain variable domain of TCR clone 241144 (TRBV7-9, TRBJ1-2)
CASSLKQNYGYTF

SEQ ID NO: 482289 - protein, 13 aa, Homo sapiens
  CDR3 for alpha chain variable domain of TCR clone 241145 (TRAV12-2, TRAJ39)
CAVYNNAGNMLTF

SEQ ID NO: 482290 - protein, 13 aa, Homo sapiens
  CDR3 for beta chain variable domain of TCR clone 241145 (TRBV2, TRBJ1-5)
CATAGPGNQPQHF

SEQ ID NO: 482291 - protein, 14 aa, Homo sapiens
  CDR3 for alpha chain variable domain of TCR clone 241146 (TRAV25, TRAJ12)
CAGCDMDSSYKLIF

SEQ ID NO: 482292 - protein, 14 aa, Homo sapiens
  CDR3 for beta chain variable domain of TCR clone 241146 (TRBV15, TRBJ2-5)
CATSIGGLGETQYF

SEQ ID NO: 482293 - protein, 17 aa, Homo sapiens
  CDR3 for alpha chain variable domain of TCR clone 241147 (TRAV3, TRAJ6)
CAVRDGPSAGGSYIPTF

SEQ ID NO: 482294 - protein, 14 aa, Homo sapiens
  CDR3 for beta chain variable domain of TCR clone 241147 (TRBV6-1, TRBJ1-3)
CASVQGGGGNTIYF

SEQ ID NO: 482295 - protein, 11 aa, Homo sapiens
  CDR3 for alpha chain variable domain of TCR clone 241148 (TRAV8-6, TRAJ42)
SGGGSQGNLIF

SEQ ID NO: 482296 - protein, 13 aa, Homo sapiens
  CDR3 for beta chain variable domain of TCR clone 241148 (TRBV7-3, TRBJ1-1)
CASSQDWGAEAFF

SEQ ID NO: 482297 - protein, 22 aa, Homo sapiens
  CDR3 for alpha chain variable domain of TCR clone 241149 (TRAV26-1, TRAJ30)
CIVRVRTEMTRASLEEGHDFIF

SEQ ID NO: 482298 - protein, 18 aa, Homo sapiens
  CDR3 for beta chain variable domain of TCR clone 241149 (TRBV4-1, TRBJ1-5)
CASSQDPRGQGLNQPQHF

SEQ ID NO: 482299 - protein, 16 aa, Homo sapiens
  CDR3 for alpha chain variable domain of TCR clone 241150 (TRAV3, TRAJ21)
CAVRDIERGNFNKFYF

SEQ ID NO: 482300 - protein, 13 aa, Homo sapiens
  CDR3 for beta chain variable domain of TCR clone 241150 (TRBV12-4, TRBJ1-2)
CASSLDSNYGYTF

SEQ ID NO: 482301 - protein, 14 aa, Homo sapiens
  CDR3 for alpha chain variable domain of TCR clone 241151 (TRAV3, TRAJ21)
CAIGRGSTNFTLDL

SEQ ID NO: 482302 - protein, 14 aa, Homo sapiens
  CDR3 for beta chain variable domain of TCR clone 241151 (TRBV7-9, TRBJ2-4)
CASSLAMGGNIQYF

SEQ ID NO: 482303 - protein, 18 aa, Homo sapiens
  CDR3 for alpha chain variable domain of TCR clone 241152 (TRAV21, TRAJ52)
CAVRPSPAGGTSYGKLTF

SEQ ID NO: 482304 - protein, 12 aa, Homo sapiens
  CDR3 for beta chain variable domain of TCR clone 241152 (TRBV18, TRBJ2-3)
CASSPYTDTQYF

SEQ ID NO: 482305 - protein, 14 aa, Homo sapiens
  CDR3 for alpha chain variable domain of TCR clone 241153 (TRAV27, TRAJ45)
CAGAQEEVLTDSTL

SEQ ID NO: 482306 - protein, 17 aa, Homo sapiens
  CDR3 for beta chain variable domain of TCR clone 241153 (TRBV10-3, TRBJ2-4)
CTSVPSVNKGSKNIQYF

SEQ ID NO: 482307 - protein, 14 aa, Homo sapiens
  CDR3 for alpha chain variable domain of TCR clone 241154 (TRAV29/DV5, TRAJ36)
CAARRKTGANNHFF

SEQ ID NO: 482308 - protein, 15 aa, Homo sapiens
  CDR3 for beta chain variable domain of TCR clone 241154 (TRBV19, TRBJ1-6)
CASSTQGAVGSPLHF

SEQ ID NO: 482309 - protein, 12 aa, Homo sapiens
  CDR3 for alpha chain variable domain of TCR clone 241155 (TRAV3, TRAJ20)
CAVRDHDYKLSF

SEQ ID NO: 482310 - protein, 15 aa, Homo sapiens
  CDR3 for beta chain variable domain of TCR clone 241155 (TRBV9, TRBJ1-6)
CASSVAGTGDSPRHF

SEQ ID NO: 482311 - protein, 14 aa, Homo sapiens
  CDR3 for alpha chain variable domain of TCR clone 241156 (TRAV12-2, TRAJ40)
CAVKIPSGTYKYIF

SEQ ID NO: 482312 - protein, 15 aa, Homo sapiens
  CDR3 for beta chain variable domain of TCR clone 241156 (TRBV7-9, TRBJ1-4)
CASSRTGSFNEKLFF

SEQ ID NO: 482313 - protein, 15 aa, Homo sapiens
  CDR3 for alpha chain variable domain of TCR clone 241157 (TRAV8-4, TRAJ37)
CAVSKVSGNTGKLIF

SEQ ID NO: 482314 - protein, 15 aa, Homo sapiens
  CDR3 for beta chain variable domain of TCR clone 241157 (TRBV18, TRBJ2-7)
CASSPTFMDSYEQYF

SEQ ID NO: 482315 - protein, 19 aa, Homo sapiens
  CDR3 for alpha chain variable domain of TCR clone 241158 (TRAV1-2, TRAJ26)
CLLPLCCERPDNYGQNFVF

SEQ ID NO: 482316 - protein, 14 aa, Homo sapiens
  CDR3 for beta chain variable domain of TCR clone 241158 (TRBV27, TRBJ2-1)
CASRPMGQGGEQFF

SEQ ID NO: 482317 - protein, 16 aa, Homo sapiens
  CDR3 for alpha chain variable domain of TCR clone 241159 (TRAV12-1, TRAJ28)
CVVIAYSGAGSYQLTF

SEQ ID NO: 482318 - protein, 15 aa, Homo sapiens
  CDR3 for beta chain variable domain of TCR clone 241159 (TRBV14, TRBJ1-1)
CASSQEGMGFTEAFY

SEQ ID NO: 482319 - protein, 15 aa, Homo sapiens
  CDR3 for alpha chain variable domain of TCR clone 241160 (TRAV27, TRAJ38)
CAARRNAGNNRQLIW

SEQ ID NO: 482320 - protein, 14 aa, Homo sapiens
  CDR3 for beta chain variable domain of TCR clone 241160 (TRBV7-8, TRBJ2-3)
CASSLEAGTDTQYL

SEQ ID NO: 482321 - protein, 14 aa, Homo sapiens
  CDR3 for alpha chain variable domain of TCR clone 241161 (TRAV36/DV7, TRAJ44)
CCGANTGTASKLTF

SEQ ID NO: 482322 - protein, 11 aa, Homo sapiens
  CDR3 for beta chain variable domain of TCR clone 241161 (TRBV7-9, TRBJ2-5)
CASSLGETQYF

SEQ ID NO: 482323 - protein, 14 aa, Homo sapiens
  CDR3 for alpha chain variable domain of TCR clone 241162 (TRAV3, TRAJ34)
CAVRAPGNTDKLIF

SEQ ID NO: 482324 - protein, 11 aa, Homo sapiens
  CDR3 for beta chain variable domain of TCR clone 241162 (TRBV29-1, TRBJ2-5)
CSEDRTGNQYF

SEQ ID NO: 482325 - protein, 15 aa, Homo sapiens
  CDR3 for alpha chain variable domain of TCR clone 241163 (TRAV8-3, TRAJ37)
CAVGAPSSNTGKLIF

SEQ ID NO: 482326 - protein, 15 aa, Homo sapiens
  CDR3 for beta chain variable domain of TCR clone 241163 (TRBV11-2, TRBJ1-2)
CASRQMRGLIYGYTF

SEQ ID NO: 482327 - protein, 18 aa, Homo sapiens
  CDR3 for alpha chain variable domain of TCR clone 241164 (TRAV13-1, TRAJ52)
CAAKNPNAGGTSYGKLTF

SEQ ID NO: 482328 - protein, 16 aa, Homo sapiens
  CDR3 for beta chain variable domain of TCR clone 241164 (TRBV18, TRBJ1-1)
CASSPGVGGRGGEAFF

SEQ ID NO: 482329 - protein, 11 aa, Homo sapiens
  CDR3 for alpha chain variable domain of TCR clone 241165 (TRAV21, TRAJ39)
PLVNAGNMLTF

SEQ ID NO: 482330 - protein, 16 aa, Homo sapiens
  CDR3 for beta chain variable domain of TCR clone 241165 (TRBV7-8, TRBJ2-6)
CQQRRDRGAGANVLTF

SEQ ID NO: 482331 - protein, 16 aa, Homo sapiens
  CDR3 for alpha chain variable domain of TCR clone 241166 (TRAV30, TRAJ24)
CGTEIVDADSWGKFQF

SEQ ID NO: 482332 - protein, 17 aa, Homo sapiens
  CDR3 for beta chain variable domain of TCR clone 241166 (TRBV7-2, TRBJ2-2)
CASSPSWRGGGTGELFF

SEQ ID NO: 482333 - protein, 13 aa, Homo sapiens
  CDR3 for alpha chain variable domain of TCR clone 241167 (TRAV16, TRAJ11)
CALSGPSYSTLTF

SEQ ID NO: 482334 - protein, 16 aa, Homo sapiens
  CDR3 for beta chain variable domain of TCR clone 241167 (TRBV13, TRBJ2-2)
CASSPRTGEHTGELFF

SEQ ID NO: 482335 - protein, 15 aa, Homo sapiens
  CDR3 for alpha chain variable domain of TCR clone 241168 (TRAV12-3, TRAJ6)
CAMSATSGGSYIPTF

SEQ ID NO: 482336 - protein, 11 aa, Homo sapiens
  CDR3 for beta chain variable domain of TCR clone 241168 (TRBV20-1, TRBJ1-5)
CSTQGDQPQHF

SEQ ID NO: 482337 - protein, 10 aa, Homo sapiens
  CDR3 for alpha chain variable domain of TCR clone 241169 (TRAV8-4, TRAJ12)
WRDSSYKLIF

SEQ ID NO: 482338 - protein, 12 aa, Homo sapiens
  CDR3 for beta chain variable domain of TCR clone 241169 (TRBV7-2, TRBJ1-5)
CASSLWSQPQHF

SEQ ID NO: 482339 - protein, 14 aa, Homo sapiens
  CDR3 for alpha chain variable domain of TCR clone 241170 (TRAV17, TRAJ12)
CATDEKDSSYKLIF

SEQ ID NO: 482340 - protein, 16 aa, Homo sapiens
  CDR3 for beta chain variable domain of TCR clone 241170 (TRBV11-2, TRBJ2-1)
WASSPRLAGVYNEQFF

SEQ ID NO: 482341 - protein, 15 aa, Homo sapiens
  CDR3 for alpha chain variable domain of TCR clone 241171 (TRAV27, TRAJ53)
CRAINSGVSNYKLTF

SEQ ID NO: 482342 - protein, 14 aa, Homo sapiens
  CDR3 for beta chain variable domain of TCR clone 241171 (TRBV7-3, TRBJ2-1)
CASSLAGGTNEQFF

SEQ ID NO: 482343 - protein, 13 aa, Homo sapiens
  CDR3 for alpha chain variable domain of TCR clone 241172 (TRAV23/DV6, TRAJ36)
CAASQTGANKLFF

SEQ ID NO: 482344 - protein, 16 aa, Homo sapiens
  CDR3 for beta chain variable domain of TCR clone 241172 (TRBV5-4, TRBJ1-5)
CISVPAAWGGDQPQHF

SEQ ID NO: 482345 - protein, 16 aa, Homo sapiens
  CDR3 for alpha chain variable domain of TCR clone 241173 (TRAV13-2, TRAJ53)
CAENANSGGSNYKLTF

SEQ ID NO: 482346 - protein, 19 aa, Homo sapiens
  CDR3 for beta chain variable domain of TCR clone 241173 (TRBV28, TRBJ2-7)
CASSYSGTSRLGWVYEQFF

SEQ ID NO: 482347 - protein, 15 aa, Homo sapiens
  CDR3 for alpha chain variable domain of TCR clone 241174 (TRAV21, TRAJ45)
CAVSYSGGGADGLTF

SEQ ID NO: 482348 - protein, 13 aa, Homo sapiens
  CDR3 for beta chain variable domain of TCR clone 241174 (TRBV20-1, TRBJ2-5)
CSDATELQETQYF

SEQ ID NO: 482349 - protein, 15 aa, Homo sapiens
  CDR3 for alpha chain variable domain of TCR clone 241175 (TRAV23/DV6, TRAJ44)
CAATIRYGTASKLTF

SEQ ID NO: 482350 - protein, 13 aa, Homo sapiens
  CDR3 for beta chain variable domain of TCR clone 241175 (TRBV19, TRBJ1-2)
CASSVPGQDGYTF

SEQ ID NO: 482351 - protein, 13 aa, Homo sapiens
  CDR3 for alpha chain variable domain of TCR clone 241176 (TRAV13-2, TRAJ13)
CAERPGGYQKVTF

SEQ ID NO: 482352 - protein, 13 aa, Homo sapiens
  CDR3 for beta chain variable domain of TCR clone 241176 (TRBV27, TRBJ2-7)
CASSFGDSHEQYF

SEQ ID NO: 482353 - protein, 12 aa, Homo sapiens
  CDR3 for alpha chain variable domain of TCR clone 241177 (TRAV1-1, TRAJ43)
CAPRVSSNDMRF

SEQ ID NO: 482354 - protein, 12 aa, Homo sapiens
  CDR3 for beta chain variable domain of TCR clone 241177 (TRBV29-1, TRBJ2-3)
CSVTGGADTQYF

SEQ ID NO: 482355 - protein, 12 aa, Homo sapiens
  CDR3 for alpha chain variable domain of TCR clone 241178 (TRAV36/DV7, TRAJ54)
CAVVRGAQKLVF

SEQ ID NO: 482356 - protein, 14 aa, Homo sapiens
  CDR3 for beta chain variable domain of TCR clone 241178 (TRBV20-1, TRBJ2-1)
CSAQIGGSANEQFF

SEQ ID NO: 482357 - protein, 16 aa, Homo sapiens
  CDR3 for alpha chain variable domain of TCR clone 241179 (TRAV23/DV6, TRAJ13)
CAASFSFSGGYQKVTF

SEQ ID NO: 482358 - protein, 14 aa, Homo sapiens
  CDR3 for beta chain variable domain of TCR clone 241179 (TRBV12-5, TRBJ2-5)
CASGSRTHQETQYF

SEQ ID NO: 482359 - protein, 12 aa, Homo sapiens
  CDR3 for alpha chain variable domain of TCR clone 241180 (TRAV12-3, TRAJ17)
CAMTLTGNKLTF

SEQ ID NO: 482360 - protein, 12 aa, Homo sapiens
  CDR3 for beta chain variable domain of TCR clone 241180 (TRBV24-1, TRBJ1-2)
CATSDDGGRYTF

SEQ ID NO: 482361 - protein, 14 aa, Homo sapiens
  CDR3 for alpha chain variable domain of TCR clone 241181 (TRAV1-2, TRAJ16)
CAVNRFSDGQKLLF

SEQ ID NO: 482362 - protein, 14 aa, Homo sapiens
  CDR3 for beta chain variable domain of TCR clone 241181 (TRBV13, TRBJ2-7)
CASSLSRISYGQYF

SEQ ID NO: 482363 - protein, 18 aa, Homo sapiens
  CDR3 for alpha chain variable domain of TCR clone 241182 (TRAV26-1, TRAJ44)
CIVRVAGGGISTASKLTF

SEQ ID NO: 482364 - protein, 13 aa, Homo sapiens
  CDR3 for beta chain variable domain of TCR clone 241182 (TRBV7-3, TRBJ1-1)
CASSQDWGAEAFF

SEQ ID NO: 482365 - protein, 13 aa, Homo sapiens
  CDR3 for alpha chain variable domain of TCR clone 241183 (TRAV20, TRAJ49)
CSVRARTGNQFYF

SEQ ID NO: 482366 - protein, 14 aa, Homo sapiens
  CDR3 for beta chain variable domain of TCR clone 241183 (TRBV5-1, TRBJ1-1)
CASSLQGASTEAFF

SEQ ID NO: 482367 - protein, 12 aa, Homo sapiens
  CDR3 for alpha chain variable domain of TCR clone 241184 (TRAV8-3, TRAJ26)
CAGDNYGQNFVF

SEQ ID NO: 482368 - protein, 15 aa, Homo sapiens
  CDR3 for beta chain variable domain of TCR clone 241184 (TRBV9, TRBJ2-1)
CASSLAGISYNEQFF

SEQ ID NO: 482369 - protein, 16 aa, Homo sapiens
  CDR3 for alpha chain variable domain of TCR clone 241185 (TRAV23/DV6, TRAJ9)
CAASIGGNTVGFKTIF

SEQ ID NO: 482370 - protein, 14 aa, Homo sapiens
  CDR3 for beta chain variable domain of TCR clone 241185 (TRBV4-1, TRBJ2-2)
CDSSQAVNTGELFF

SEQ ID NO: 482371 - protein, 14 aa, Homo sapiens
  CDR3 for alpha chain variable domain of TCR clone 241186 (TRAV1-2, TRAJ8)
CAVREDTGFQQLVF

SEQ ID NO: 482372 - protein, 15 aa, Homo sapiens
  CDR3 for beta chain variable domain of TCR clone 241186 (TRBV5-5, TRBJ1-5)
CASSSTSGSNQPQHF

SEQ ID NO: 482373 - protein, 13 aa, Homo sapiens
  CDR3 for alpha chain variable domain of TCR clone 241187 (TRAV13-1, TRAJ5)
CAARVTGRRALTF

SEQ ID NO: 482374 - protein, 17 aa, Homo sapiens
  CDR3 for beta chain variable domain of TCR clone 241187 (TRBV13, TRBJ2-3)
CASSLSRVAGGRNTQYF

SEQ ID NO: 482375 - protein, 15 aa, Homo sapiens
  CDR3 for alpha chain variable domain of TCR clone 241188 (TRAV17, TRAJ57)
CATGPSQGGSEKLVI

SEQ ID NO: 482376 - protein, 14 aa, Homo sapiens
  CDR3 for beta chain variable domain of TCR clone 241188 (TRBV12-5, TRBJ2-5)
CASGSRTHQETQYF

SEQ ID NO: 482377 - protein, 15 aa, Homo sapiens
  CDR3 for alpha chain variable domain of TCR clone 241189 (TRAV1-2, TRAJ30)
CAVRPHGNRDDKIIF

SEQ ID NO: 482378 - protein, 12 aa, Homo sapiens
  CDR3 for beta chain variable domain of TCR clone 241189 (TRBV11-2, TRBJ2-1)
CASSPGNNEQFF

SEQ ID NO: 482379 - protein, 18 aa, Homo sapiens
  CDR3 for alpha chain variable domain of TCR clone 241190 (TRAV9-2, TRAJ52)
CALSRHNAGGTSYGKLIF

SEQ ID NO: 482380 - protein, 13 aa, Homo sapiens
  CDR3 for beta chain variable domain of TCR clone 241190 (TRBV7-9, TRBJ1-2)
CASSLKQNYGYTF

SEQ ID NO: 482381 - protein, 13 aa, Homo sapiens
  CDR3 for alpha chain variable domain of TCR clone 241191 (TRAV26-1, TRAJ48)
CIVRVVGDEKLTF

SEQ ID NO: 482382 - protein, 17 aa, Homo sapiens
  CDR3 for beta chain variable domain of TCR clone 241191 (TRBV25-1, TRBJ2-7)
CASSDARVVFSSYEQYF

SEQ ID NO: 482383 - protein, 13 aa, Homo sapiens
  CDR3 for alpha chain variable domain of TCR clone 241192 (TRAV2, TRAJ40)
CAVVTSGTYKYIF

SEQ ID NO: 482384 - protein, 15 aa, Homo sapiens
  CDR3 for beta chain variable domain of TCR clone 241192 (TRBV20-1, TRBJ2-7)
RSARDRVSGMDEQYF

SEQ ID NO: 482385 - protein, 14 aa, Homo sapiens
  CDR3 for alpha chain variable domain of TCR clone 241193 (TRAV1-1, TRAJ23)
CAVSIYNKGGKLIF

SEQ ID NO: 482386 - protein, 13 aa, Homo sapiens
  CDR3 for beta chain variable domain of TCR clone 241193 (TRBV7-9, TRBJ1-2)
CASSLKQNYGYTF

SEQ ID NO: 482387 - protein, 16 aa, Homo sapiens
  CDR3 for alpha chain variable domain of TCR clone 241194 (TRAV12-3, TRAJ28)
CAMRANSGAGSYQLTF

SEQ ID NO: 482388 - protein, 12 aa, Homo sapiens
  CDR3 for beta chain variable domain of TCR clone 241194 (TRBV11-2, TRBJ2-2)
CASSLGGGELFF

SEQ ID NO: 482389 - protein, 17 aa, Homo sapiens
  CDR3 for alpha chain variable domain of TCR clone 241195 (TRAV23/DV6, TRAJ58)
CAARLLRGETSGSRWTF

SEQ ID NO: 482390 - protein, 16 aa, Homo sapiens
  CDR3 for beta chain variable domain of TCR clone 241195 (TRBV4-2, TRBJ2-7)
CASSQDRGTSSYEQYF

SEQ ID NO: 482391 - protein, 14 aa, Homo sapiens
  CDR3 for alpha chain variable domain of TCR clone 241196 (TRAV1-2, TRAJ8)
CAVKEDTGFQKLVF

SEQ ID NO: 482392 - protein, 15 aa, Homo sapiens
  CDR3 for beta chain variable domain of TCR clone 241196 (TRBV20-1, TRBJ1-1)
CSASRGVTGNTEAFF

SEQ ID NO: 482393 - protein, 14 aa, Homo sapiens
  CDR3 for alpha chain variable domain of TCR clone 241197 (TRAV1-2, TRAJ16)
CAVNRFSDGQKLLL

SEQ ID NO: 482394 - protein, 14 aa, Homo sapiens
  CDR3 for beta chain variable domain of TCR clone 241197 (TRBV19, TRBJ2-1)
CASPTFVLSGEQFF

SEQ ID NO: 482395 - protein, 15 aa, Homo sapiens
  CDR3 for alpha chain variable domain of TCR clone 241198 (TRAV3, TRAJ5)
CAVRDLDTGRRALTF

SEQ ID NO: 482396 - protein, 15 aa, Homo sapiens
  CDR3 for beta chain variable domain of TCR clone 241198 (TRBV28, TRBJ2-5)
CASSPPWSYKETQYF

SEQ ID NO: 482397 - protein, 14 aa, Homo sapiens
  CDR3 for alpha chain variable domain of TCR clone 241199 (TRAV16, TRAJ33)
CALSAMDSNYQVIW

SEQ ID NO: 482398 - protein, 15 aa, Homo sapiens
  CDR3 for beta chain variable domain of TCR clone 241199 (TRBV28, TRBJ2-7)
CASSLEAYPIYEQYF

SEQ ID NO: 482399 - protein, 15 aa, Homo sapiens
  CDR3 for alpha chain variable domain of TCR clone 241200 (TRAV3, TRAJ22)
CAVRDRGGSVRQLTF

SEQ ID NO: 482400 - protein, 13 aa, Homo sapiens
  CDR3 for beta chain variable domain of TCR clone 241200 (TRBV2, TRBJ1-5)
CATAGPGNQHQHF

SEQ ID NO: 482401 - protein, 14 aa, Homo sapiens
  CDR3 for alpha chain variable domain of TCR clone 241201 (TRAV34, TRAJ44)
CGADGTGTASKLTF

SEQ ID NO: 482402 - protein, 15 aa, Homo sapiens
  CDR3 for beta chain variable domain of TCR clone 241201 (TRBV5-1, TRBJ2-1)
CASSPPRAPYNEEFF

SEQ ID NO: 482403 - protein, 13 aa, Homo sapiens
  CDR3 for alpha chain variable domain of TCR clone 241202 (TRAV2, TRAJ40)
CAVFTSGTYKYIF

SEQ ID NO: 482404 - protein, 14 aa, Homo sapiens
  CDR3 for beta chain variable domain of TCR clone 241202 (TRBV19, TRBJ2-1)
CASPTFVVSGEQFF

SEQ ID NO: 482405 - protein, 18 aa, Homo sapiens
  CDR3 for alpha chain variable domain of TCR clone 241203 (TRAV26-1, TRAJ23)
CIVRVGLEVWNQGGKLIF

SEQ ID NO: 482406 - protein, 15 aa, Homo sapiens
  CDR3 for beta chain variable domain of TCR clone 241203 (TRBV19, TRBJ2-5)
CASSRLAGVEETQYF

SEQ ID NO: 482407 - protein, 15 aa, Homo sapiens
  CDR3 for alpha chain variable domain of TCR clone 241204 (TRAV12-2, TRAJ53)
CAVNGGGGSNYKLTF

SEQ ID NO: 482408 - protein, 14 aa, Homo sapiens
  CDR3 for beta chain variable domain of TCR clone 241204 (TRBV11-2, TRBJ2-7)
CASSLGNSLYEQYF

SEQ ID NO: 482409 - protein, 11 aa, Homo sapiens
  CDR3 for alpha chain variable domain of TCR clone 241205 (TRAV1-2, TRAJ20)
CAVANDYKLSF

SEQ ID NO: 482410 - protein, 16 aa, Homo sapiens
  CDR3 for beta chain variable domain of TCR clone 241205 (TRBV4-3, TRBJ1-6)
CASSQDPRVYNSPLHF

SEQ ID NO: 482411 - protein, 14 aa, Homo sapiens
  CDR3 for alpha chain variable domain of TCR clone 241206 (TRAV16, TRAJ37)
CALDISGNTGKLIF

SEQ ID NO: 482412 - protein, 14 aa, Homo sapiens
  CDR3 for beta chain variable domain of TCR clone 241206 (TRBV7-6, TRBJ2-2)
CASSLVQDTGELFL

SEQ ID NO: 482413 - protein, 18 aa, Homo sapiens
  CDR3 for alpha chain variable domain of TCR clone 241207 (TRAV12-3, TRAJ52)
CAMSRTNAGGTSYGKLTF

SEQ ID NO: 482414 - protein, 13 aa, Homo sapiens
  CDR3 for beta chain variable domain of TCR clone 241207 (TRBV7-9, TRBJ2-3)
CASSPGSTDTQYF

SEQ ID NO: 482415 - protein, 17 aa, Homo sapiens
  CDR3 for alpha chain variable domain of TCR clone 241208 (TRAV3, TRAJ6)
CAVRDGPRAGGSYIPTF

SEQ ID NO: 482416 - protein, 15 aa, Homo sapiens
  CDR3 for beta chain variable domain of TCR clone 241208 (TRBV15, TRBJ1-5)
CATSRDPVSNQPQHF

SEQ ID NO: 482417 - protein, 15 aa, Homo sapiens
  CDR3 for alpha chain variable domain of TCR clone 241209 (TRAV16, TRAJ23)
CALSGPYNQGGKLIF

SEQ ID NO: 482418 - protein, 16 aa, Homo sapiens
  CDR3 for beta chain variable domain of TCR clone 241209 (TRBV20-1, TRBJ1-4)
CSAPGQGLLTNEKLFF

SEQ ID NO: 482419 - protein, 15 aa, Homo sapiens
  CDR3 for alpha chain variable domain of TCR clone 241210 (TRAV1-2, TRAJ26)
CAVRDLITMVRILSL

SEQ ID NO: 482420 - protein, 16 aa, Homo sapiens
  CDR3 for beta chain variable domain of TCR clone 241210 (TRBV7-3, TRBJ2-2)
CASSLKRGTLSGELFF

SEQ ID NO: 482421 - protein, 11 aa, Homo sapiens
  CDR3 for alpha chain variable domain of TCR clone 241211 (TRAV2, TRAJ23)
CAVETREKLIF

SEQ ID NO: 482422 - protein, 14 aa, Homo sapiens
  CDR3 for beta chain variable domain of TCR clone 241211 (TRBV2, TRBJ2-3)
CASSEGQNTDTQYF

SEQ ID NO: 482423 - protein, 13 aa, Homo sapiens
  CDR3 for alpha chain variable domain of TCR clone 241212 (TRAV8-1, TRAJ39)
CAVANTAGNMLTF

SEQ ID NO: 482424 - protein, 15 aa, Homo sapiens
  CDR3 for beta chain variable domain of TCR clone 241212 (TRBV7-2, TRBJ2-1)
CASSLNRGAYNEQFF

SEQ ID NO: 482425 - protein, 14 aa, Homo sapiens
  CDR3 for alpha chain variable domain of TCR clone 241213 (TRAV29/DV5, TRAJ32)
CAAAYGGATNKPIF

SEQ ID NO: 482426 - protein, 15 aa, Homo sapiens
  CDR3 for beta chain variable domain of TCR clone 241213 (TRBV27, TRBJ2-7)
CASSTAGTGSYEQYF

SEQ ID NO: 482427 - protein, 13 aa, Homo sapiens
  CDR3 for alpha chain variable domain of TCR clone 241214 (TRAV1-1, TRAJ9)
CAAKNTGGFKTIF

SEQ ID NO: 482428 - protein, 12 aa, Homo sapiens
  CDR3 for beta chain variable domain of TCR clone 241214 (TRBV5-4, TRBJ2-5)
CASSSTRETQYF

SEQ ID NO: 482429 - protein, 15 aa, Homo sapiens
  CDR3 for alpha chain variable domain of TCR clone 241215 (TRAV23/DV6, TRAJ18)
CATRDRGSTLGRLYF

SEQ ID NO: 482430 - protein, 13 aa, Homo sapiens
  CDR3 for beta chain variable domain of TCR clone 241215 (TRBV7-2, TRBJ2-7)
CASSSPSGSEQYF

SEQ ID NO: 482431 - protein, 15 aa, Homo sapiens
  CDR3 for alpha chain variable domain of TCR clone 241216 (TRAV8-3, TRAJ44)
CAVGGGASTASKLTF

SEQ ID NO: 482432 - protein, 12 aa, Homo sapiens
  CDR3 for beta chain variable domain of TCR clone 241216 (TRBV7-8, TRBJ2-4)
CASSLGGNIQYF

SEQ ID NO: 482433 - protein, 16 aa, Homo sapiens
  CDR3 for alpha chain variable domain of TCR clone 241217 (TRAV30, TRAJ24)
CGTEIVDADSWGKFQF

SEQ ID NO: 482434 - protein, 16 aa, Homo sapiens
  CDR3 for beta chain variable domain of TCR clone 241217 (TRBV2, TRBJ1-3)
CASSGVAGRSGNTMYF

SEQ ID NO: 482435 - protein, 15 aa, Homo sapiens
  CDR3 for alpha chain variable domain of TCR clone 241218 (TRAV3, TRAJ22)
CAVRDRGGSARQLTF

SEQ ID NO: 482436 - protein, 12 aa, Homo sapiens
  CDR3 for beta chain variable domain of TCR clone 241218 (TRBV29-1, TRBJ2-3)
CSVTGGADTQYL

SEQ ID NO: 482437 - protein, 11 aa, Homo sapiens
  CDR3 for alpha chain variable domain of TCR clone 241219 (TRAV2, TRAJ40)
CAVEDPGNLQI

SEQ ID NO: 482438 - protein, 18 aa, Homo sapiens
  CDR3 for beta chain variable domain of TCR clone 241219 (TRBV12-4, TRBJ2-2)
CASSRSGGAIPNTGELFF

SEQ ID NO: 482439 - protein, 13 aa, Homo sapiens
  CDR3 for alpha chain variable domain of TCR clone 241220 (TRAV20, TRAJ54)
CAVQAGGVQKLVF

SEQ ID NO: 482440 - protein, 14 aa, Homo sapiens
  CDR3 for beta chain variable domain of TCR clone 241220 (TRBV4-1, TRBJ2-2)
CASSQAVNTGELFF

SEQ ID NO: 482441 - protein, 13 aa, Homo sapiens
  CDR3 for alpha chain variable domain of TCR clone 241221 (TRAV1-1, TRAJ31)
CASYLNNNARLIV

SEQ ID NO: 482442 - protein, 13 aa, Homo sapiens
  CDR3 for beta chain variable domain of TCR clone 241221 (TRBV15, TRBJ1-6)
CATSGGLNSPLHF

SEQ ID NO: 482443 - protein, 12 aa, Homo sapiens
  CDR3 for alpha chain variable domain of TCR clone 241222 (TRAV12-3, TRAJ17)
CAMTLTGNKLTF

SEQ ID NO: 482444 - protein, 18 aa, Homo sapiens
  CDR3 for beta chain variable domain of TCR clone 241222 (TRBV24-1, TRBJ2-3)
CATSDLPRLAGGADTQYF

SEQ ID NO: 482445 - protein, 16 aa, Homo sapiens
  CDR3 for alpha chain variable domain of TCR clone 241223 (TRAV8-4, TRAJ9)
CAVTFNTGGFKNYLWS

SEQ ID NO: 482446 - protein, 15 aa, Homo sapiens
  CDR3 for beta chain variable domain of TCR clone 241223 (TRBV7-9, TRBJ2-2)
CASSPEKGAGGELFF

SEQ ID NO: 482447 - protein, 12 aa, Homo sapiens
  CDR3 for alpha chain variable domain of TCR clone 241224 (TRAV17, TRAJ12)
CATLRSSYKLIF

SEQ ID NO: 482448 - protein, 16 aa, Homo sapiens
  CDR3 for beta chain variable domain of TCR clone 241224 (TRBV28, TRBJ2-7)
CASSLFFEKGGPEQYF

SEQ ID NO: 482449 - protein, 17 aa, Homo sapiens
  CDR3 for alpha chain variable domain of TCR clone 241225 (TRAV3, TRAJ28)
CAVREAYSGAGSYKLTF

SEQ ID NO: 482450 - protein, 17 aa, Homo sapiens
  CDR3 for beta chain variable domain of TCR clone 241225 (TRBV20-1, TRBJ2-1)
CSASSSGLAGSYNEQFF

SEQ ID NO: 482451 - protein, 16 aa, Homo sapiens
  CDR3 for alpha chain variable domain of TCR clone 241226 (TRAV20, TRAJ26)
CAVQHRRDNYGQNFVF

SEQ ID NO: 482452 - protein, 15 aa, Homo sapiens
  CDR3 for beta chain variable domain of TCR clone 241226 (TRBV7-3, TRBJ2-2)
CASSETGQGTGELFF

SEQ ID NO: 482453 - protein, 12 aa, Homo sapiens
  CDR3 for alpha chain variable domain of TCR clone 241227 (TRAV1-2, TRAJ37)
CAFPGNTGTLIF

SEQ ID NO: 482454 - protein, 17 aa, Homo sapiens
  CDR3 for beta chain variable domain of TCR clone 241227 (TRBV4-2, TRBJ1-1)
CASSQVATGGMNTEAFF

SEQ ID NO: 482455 - protein, 15 aa, Homo sapiens
  CDR3 for alpha chain variable domain of TCR clone 241228 (TRAV21, TRAJ53)
CATLNSGGSNYKLTF

SEQ ID NO: 482456 - protein, 16 aa, Homo sapiens
  CDR3 for beta chain variable domain of TCR clone 241228 (TRBV12-4, TRBJ1-5)
CASSRPFGGSNQPQHF

SEQ ID NO: 482457 - protein, 14 aa, Homo sapiens
  CDR3 for alpha chain variable domain of TCR clone 241229 (TRAV17, TRAJ22)
CATSPSGSARQLTF

SEQ ID NO: 482458 - protein, 13 aa, Homo sapiens
  CDR3 for beta chain variable domain of TCR clone 241229 (TRBV12-4, TRBJ1-2)
CASSVRQGKGYTF

SEQ ID NO: 482459 - protein, 13 aa, Homo sapiens
  CDR3 for alpha chain variable domain of TCR clone 241230 (TRAV12-3, TRAJ33)
CAMSWNSNYKLIW

SEQ ID NO: 482460 - protein, 13 aa, Homo sapiens
  CDR3 for beta chain variable domain of TCR clone 241230 (TRBV7-2, TRBJ2-2)
CASSLAVTGELFF

SEQ ID NO: 482461 - protein, 11 aa, Homo sapiens
  CDR3 for alpha chain variable domain of TCR clone 241231 (TRAV2, TRAJ21)
CAVFNFNKFYF

SEQ ID NO: 482462 - protein, 11 aa, Homo sapiens
  CDR3 for beta chain variable domain of TCR clone 241231 (TRBV7-8, TRBJ2-7)
CASSLSLEQYF

SEQ ID NO: 482463 - protein, 16 aa, Homo sapiens
  CDR3 for alpha chain variable domain of TCR clone 241232 (TRAV30, TRAJ24)
CGTEIVDADSWGRFQF

SEQ ID NO: 482464 - protein, 18 aa, Homo sapiens
  CDR3 for beta chain variable domain of TCR clone 241232 (TRBV12-4, TRBJ2-2)
CASSLVAGTRGRTGELFF

SEQ ID NO: 482465 - protein, 13 aa, Homo sapiens
  CDR3 for alpha chain variable domain of TCR clone 241233 (TRAV16, TRAJ20)
CALGPSNDYKLSF

SEQ ID NO: 482466 - protein, 15 aa, Homo sapiens
  CDR3 for beta chain variable domain of TCR clone 241233 (TRBV5-1, TRBJ2-2)
CASSRVGSDTGELFF

SEQ ID NO: 482467 - protein, 18 aa, Homo sapiens
  CDR3 for alpha chain variable domain of TCR clone 241234 (TRAV1-1, TRAJ42)
CAVSPSAFYGGSQGNLIF

SEQ ID NO: 482468 - protein, 14 aa, Homo sapiens
  CDR3 for beta chain variable domain of TCR clone 241234 (TRBV7-2, TRBJ2-2)
CASRGQGAAGELFF

SEQ ID NO: 482469 - protein, 13 aa, Homo sapiens
  CDR3 for alpha chain variable domain of TCR clone 241235 (TRAV36/DV7, TRAJ37)
CAVFPSNTGKLIF

SEQ ID NO: 482470 - protein, 12 aa, Homo sapiens
  CDR3 for beta chain variable domain of TCR clone 241235 (TRBV11-2, TRBJ2-2)
CASSLGGGELFF

SEQ ID NO: 482471 - protein, 15 aa, Homo sapiens
  CDR3 for alpha chain variable domain of TCR clone 241236 (TRAV2, TRAJ9)
CAVDDRGTGGVKTIF

SEQ ID NO: 482472 - protein, 16 aa, Homo sapiens
  CDR3 for beta chain variable domain of TCR clone 241236 (TRBV24-1, TRBJ2-3)
CATSDPGTGATDTQYF

SEQ ID NO: 482473 - protein, 14 aa, Homo sapiens
  CDR3 for alpha chain variable domain of TCR clone 241237 (TRAV12-2, TRAJ17)
CAVLIKAAGNKLTF

SEQ ID NO: 482474 - protein, 11 aa, Homo sapiens
  CDR3 for beta chain variable domain of TCR clone 241237 (TRBV29-1, TRBJ2-5)
CSEDRTGTQYF

SEQ ID NO: 482475 - protein, 13 aa, Homo sapiens
  CDR3 for alpha chain variable domain of TCR clone 241238 (TRAV8-1, TRAJ30)
CAVIMNRDDKIIF

SEQ ID NO: 482476 - protein, 19 aa, Homo sapiens
  CDR3 for beta chain variable domain of TCR clone 241238 (TRBV2, TRBJ2-2)
CASSQPGLAGGGNTGELFF

SEQ ID NO: 482477 - protein, 15 aa, Homo sapiens
  CDR3 for alpha chain variable domain of TCR clone 241239 (TRAV27, TRAJ38)
CAARRNAGNNRKLIW

SEQ ID NO: 482478 - protein, 15 aa, Homo sapiens
  CDR3 for beta chain variable domain of TCR clone 241239 (TRBV11-1, TRBJ2-7)
CASSLSYGASYEQYF

SEQ ID NO: 482479 - protein, 15 aa, Homo sapiens
  CDR3 for alpha chain variable domain of TCR clone 241240 (TRAV12-3, TRAJ5)
CAMSGLGTGRRALTF

SEQ ID NO: 482480 - protein, 17 aa, Homo sapiens
  CDR3 for beta chain variable domain of TCR clone 241240 (TRBV7-8, TRBJ2-6)
CASSAGTGGAGANVLTF

SEQ ID NO: 482481 - protein, 14 aa, Homo sapiens
  CDR3 for alpha chain variable domain of TCR clone 241241 (TRAV12-3, TRAJ56)
CARSVTGANSKLTF

SEQ ID NO: 482482 - protein, 17 aa, Homo sapiens
  CDR3 for beta chain variable domain of TCR clone 241241 (TRBV20-1, TRBJ2-3)
CSASLLGRGGSADTQYF

SEQ ID NO: 482483 - protein, 12 aa, Homo sapiens
  CDR3 for alpha chain variable domain of TCR clone 241242 (TRAV2, TRAJ10)
CASTGGGNKLTF

SEQ ID NO: 482484 - protein, 13 aa, Homo sapiens
  CDR3 for beta chain variable domain of TCR clone 241242 (TRBV7-7, TRBJ2-5)
CASSRSGQETQYF

SEQ ID NO: 482485 - protein, 14 aa, Homo sapiens
  CDR3 for alpha chain variable domain of TCR clone 241243 (TRAV12-3, TRAJ10)
SHLPLTGGGNKLTF

SEQ ID NO: 482486 - protein, 15 aa, Homo sapiens
  CDR3 for beta chain variable domain of TCR clone 241243 (TRBV27, TRBJ1-5)
CASSQGTGFDQPQHF

SEQ ID NO: 482487 - protein, 14 aa, Homo sapiens
  CDR3 for alpha chain variable domain of TCR clone 241244 (TRAV27, TRAJ22)
CAGVVPGSARQLPF

SEQ ID NO: 482488 - protein, 16 aa, Homo sapiens
  CDR3 for beta chain variable domain of TCR clone 241244 (TRBV9, TRBJ2-7)
CASSVGLGGGTYEQYF

SEQ ID NO: 482489 - protein, 15 aa, Homo sapiens
  CDR3 for alpha chain variable domain of TCR clone 241245 (TRAV26-2, TRAJ57)
CILRDKRGGSEKLVF

SEQ ID NO: 482490 - protein, 15 aa, Homo sapiens
  CDR3 for beta chain variable domain of TCR clone 241245 (TRBV2, TRBJ2-1)
CASDIGLAGEGEQFF

SEQ ID NO: 482491 - protein, 17 aa, Homo sapiens
  CDR3 for alpha chain variable domain of TCR clone 241246 (TRAV29/DV5, TRAJ45)
CAASLMYSGGGADGLTF

SEQ ID NO: 482492 - protein, 14 aa, Homo sapiens
  CDR3 for beta chain variable domain of TCR clone 241246 (TRBV19, TRBJ2-2)
CASSTLHRSGELFF

SEQ ID NO: 482493 - protein, 17 aa, Homo sapiens
  CDR3 for alpha chain variable domain of TCR clone 241247 (TRAV26-1, TRAJ10)
CIVSFRGLTGGGNKLTF

SEQ ID NO: 482494 - protein, 13 aa, Homo sapiens
  CDR3 for beta chain variable domain of TCR clone 241247 (TRBV20-1, TRBJ2-3)
CSASRQAADSQYF

SEQ ID NO: 482495 - protein, 18 aa, Homo sapiens
  CDR3 for alpha chain variable domain of TCR clone 241248 (TRAV21, TRAJ52)
CAVRPSPAGGTSYGKLTF

SEQ ID NO: 482496 - protein, 14 aa, Homo sapiens
  CDR3 for beta chain variable domain of TCR clone 241248 (TRBV4-1, TRBJ2-2)
CASSQAVKTGELFF

SEQ ID NO: 482497 - protein, 17 aa, Homo sapiens
  CDR3 for alpha chain variable domain of TCR clone 241249 (TRAV4, TRAJ29)
CCVLLPRGCKGNTPLVF

SEQ ID NO: 482498 - protein, 16 aa, Homo sapiens
  CDR3 for beta chain variable domain of TCR clone 241249 (TRBV24-1, TRBJ2-1)
CATSDALAGGNNEQFF

SEQ ID NO: 482499 - protein, 14 aa, Homo sapiens
  CDR3 for alpha chain variable domain of TCR clone 241250 (TRAV1-2, TRAJ16)
CAVNRFSDGQKLLF

SEQ ID NO: 482500 - protein, 12 aa, Homo sapiens
  CDR3 for beta chain variable domain of TCR clone 241250 (TRBV12-4, TRBJ2-7)
CASSLGGHEQYF

SEQ ID NO: 482501 - protein, 13 aa, Homo sapiens
  CDR3 for alpha chain variable domain of TCR clone 241251 (TRAV30, TRAJ24)
CGTVTDSWGKLQF

SEQ ID NO: 482502 - protein, 13 aa, Homo sapiens
  CDR3 for beta chain variable domain of TCR clone 241251 (TRBV18, TRBJ2-5)
CASSLQGQETQYF

SEQ ID NO: 482503 - protein, 15 aa, Homo sapiens
  CDR3 for alpha chain variable domain of TCR clone 241252 (TRAV8-6, TRAJ37)
CAVIFSSGNTGKLIS

SEQ ID NO: 482504 - protein, 15 aa, Homo sapiens
  CDR3 for beta chain variable domain of TCR clone 241252 (TRBV25-1, TRBJ2-4)
CASSETESAKNIQYF

SEQ ID NO: 482505 - protein, 13 aa, Homo sapiens
  CDR3 for alpha chain variable domain of TCR clone 241253 (TRAV12-3, TRAJ13)
CAMASGGYQKVTF

SEQ ID NO: 482506 - protein, 13 aa, Homo sapiens
  CDR3 for beta chain variable domain of TCR clone 241253 (TRBV7-9, TRBJ1-2)
CASSLKQNYGYTF

SEQ ID NO: 482507 - protein, 12 aa, Homo sapiens
  CDR3 for alpha chain variable domain of TCR clone 241254 (TRAV8-3, TRAJ26)
CAGDNYGQNFVF

SEQ ID NO: 482508 - protein, 14 aa, Homo sapiens
  CDR3 for beta chain variable domain of TCR clone 241254 (TRBV7-2, TRBJ2-7)
CASSLYPGRYEQYF

SEQ ID NO: 482509 - protein, 14 aa, Homo sapiens
  CDR3 for alpha chain variable domain of TCR clone 241255 (TRAV9-2, TRAJ39)
CALYIYNAGNMLTF

SEQ ID NO: 482510 - protein, 17 aa, Homo sapiens
  CDR3 for beta chain variable domain of TCR clone 241255 (TRBV11-2, TRBJ2-3)
CASSLEGAGALTDTQYF

SEQ ID NO: 482511 - protein, 15 aa, Homo sapiens
  CDR3 for alpha chain variable domain of TCR clone 241256 (TRAV12-2, TRAJ5)
CAVNPMDTGRRALTF

SEQ ID NO: 482512 - protein, 15 aa, Homo sapiens
  CDR3 for beta chain variable domain of TCR clone 241256 (TRBV9, TRBJ1-6)
CASSVAGTGDSPLHF

SEQ ID NO: 482513 - protein, 12 aa, Homo sapiens
  CDR3 for alpha chain variable domain of TCR clone 241257 (TRAV21, TRAJ33)
CAKMDSNYQLIW

SEQ ID NO: 482514 - protein, 15 aa, Homo sapiens
  CDR3 for beta chain variable domain of TCR clone 241257 (TRBV14, TRBJ2-5)
CASSQGEAVQETQYF

SEQ ID NO: 482515 - protein, 13 aa, Homo sapiens
  CDR3 for alpha chain variable domain of TCR clone 241258 (TRAV21, TRAJ57)
CAVTQGVSAKLVF

SEQ ID NO: 482516 - protein, 16 aa, Homo sapiens
  CDR3 for beta chain variable domain of TCR clone 241258 (TRBV29-1, TRBJ2-7)
CSVEDAEDGTAYEQYF

SEQ ID NO: 482517 - protein, 15 aa, Homo sapiens
  CDR3 for alpha chain variable domain of TCR clone 241259 (TRAV3, TRAJ5)
CAVRDFDTGRRALTF

SEQ ID NO: 482518 - protein, 14 aa, Homo sapiens
  CDR3 for beta chain variable domain of TCR clone 241259 (TRBV25-1, TRBJ1-1)
CASTHLGGNTEAFF

SEQ ID NO: 482519 - protein, 14 aa, Homo sapiens
  CDR3 for alpha chain variable domain of TCR clone 241260 (TRAV12-2, TRAJ13)
CAVKKTGGYLKVTF

SEQ ID NO: 482520 - protein, 12 aa, Homo sapiens
  CDR3 for beta chain variable domain of TCR clone 241260 (TRBV11-2, TRBJ2-2)
CASSLGGGELFF

SEQ ID NO: 482521 - protein, 17 aa, Homo sapiens
  CDR3 for alpha chain variable domain of TCR clone 241261 (TRAV1-1, TRAJ11)
CAGYSTLTFGKGIMLLV

SEQ ID NO: 482522 - protein, 15 aa, Homo sapiens
  CDR3 for beta chain variable domain of TCR clone 241261 (TRBV6-5, TRBJ2-1)
CASRGDFDSYNEQFF

SEQ ID NO: 482523 - protein, 12 aa, Homo sapiens
  CDR3 for alpha chain variable domain of TCR clone 241262 (TRAV12-3, TRAJ17)
CAMTLTGNKLTF

SEQ ID NO: 482524 - protein, 12 aa, Homo sapiens
  CDR3 for beta chain variable domain of TCR clone 241262 (TRBV3-1, TRBJ2-2)
CASSLFPGELFF

SEQ ID NO: 482525 - protein, 13 aa, Homo sapiens
  CDR3 for alpha chain variable domain of TCR clone 241263 (TRAV20, TRAJ20)
CAVRWVRDYKLSF

SEQ ID NO: 482526 - protein, 15 aa, Homo sapiens
  CDR3 for beta chain variable domain of TCR clone 241263 (TRBV5-1, TRBJ2-7)
CASSLNEGPAREQYF

SEQ ID NO: 482527 - protein, 15 aa, Homo sapiens
  CDR3 for alpha chain variable domain of TCR clone 241264 (TRAV12-1, TRAJ41)
CVVNGASTSGYALNF

SEQ ID NO: 482528 - protein, 15 aa, Homo sapiens
  CDR3 for beta chain variable domain of TCR clone 241264 (TRBV7-2, TRBJ1-5)
CASSSTGVDNQPQHF

SEQ ID NO: 482529 - protein, 13 aa, Homo sapiens
  CDR3 for alpha chain variable domain of TCR clone 241265 (TRAV21, TRAJ27)
CAARPGNAGKSTF

SEQ ID NO: 482530 - protein, 18 aa, Homo sapiens
  CDR3 for beta chain variable domain of TCR clone 241265 (TRBV7-6, TRBJ2-1)
CHVSLCQQLGGGADEQFF

SEQ ID NO: 482531 - protein, 11 aa, Homo sapiens
  CDR3 for alpha chain variable domain of TCR clone 241266 (TRAV30, TRAJ23)
CGTEIAGKFIF

SEQ ID NO: 482532 - protein, 16 aa, Homo sapiens
  CDR3 for beta chain variable domain of TCR clone 241266 (TRBV7-2, TRBJ2-7)
CASTSQAASGGYEQYF

SEQ ID NO: 482533 - protein, 13 aa, Homo sapiens
  CDR3 for alpha chain variable domain of TCR clone 241267 (TRAV27, TRAJ49)
CAPRPYAVNQFYF

SEQ ID NO: 482534 - protein, 18 aa, Homo sapiens
  CDR3 for beta chain variable domain of TCR clone 241267 (TRBV7-3, TRBJ2-5)
CASSLGGAAQGRWETQYF

SEQ ID NO: 482535 - protein, 13 aa, Homo sapiens
  CDR3 for alpha chain variable domain of TCR clone 241268 (TRAV13-1, TRAJ5)
CAAEHTGRRALTF

SEQ ID NO: 482536 - protein, 15 aa, Homo sapiens
  CDR3 for beta chain variable domain of TCR clone 241268 (TRBV6-1, TRBJ2-1)
CASSELRGQYNEHFF

SEQ ID NO: 482537 - protein, 15 aa, Homo sapiens
  CDR3 for alpha chain variable domain of TCR clone 241269 (TRAV8-3, TRAJ45)
CASSYSGGGADGLTF

SEQ ID NO: 482538 - protein, 17 aa, Homo sapiens
  CDR3 for beta chain variable domain of TCR clone 241269 (TRBV7-8, TRBJ1-2)
CASSLRPLQGHLYGYIF

SEQ ID NO: 482539 - protein, 15 aa, Homo sapiens
  CDR3 for alpha chain variable domain of TCR clone 241270 (TRAV12-3, TRAJ42)
CAMITSVGSQGNLIF

SEQ ID NO: 482540 - protein, 13 aa, Homo sapiens
  CDR3 for beta chain variable domain of TCR clone 241270 (TRBV4-2, TRBJ1-1)
CASSQAGNTEAFF

SEQ ID NO: 482541 - protein, 10 aa, Homo sapiens
  CDR3 for alpha chain variable domain of TCR clone 241271 (TRAV3, TRAJ30)
CAVREIEIIF

SEQ ID NO: 482542 - protein, 14 aa, Homo sapiens
  CDR3 for beta chain variable domain of TCR clone 241271 (TRBV15, TRBJ2-3)
CATRSGTGTDTQYF

SEQ ID NO: 482543 - protein, 12 aa, Homo sapiens
  CDR3 for alpha chain variable domain of TCR clone 241272 (TRAV12-3, TRAJ3)
CAIDSSASKIIF

SEQ ID NO: 482544 - protein, 14 aa, Homo sapiens
  CDR3 for beta chain variable domain of TCR clone 241272 (TRBV9, TRBJ2-7)
CASSVGVGSYEQYF

SEQ ID NO: 482545 - protein, 18 aa, Homo sapiens
  CDR3 for alpha chain variable domain of TCR clone 241273 (TRAV12-3, TRAJ52)
CAMSVGGAGGTSYGKLTF

SEQ ID NO: 482546 - protein, 13 aa, Homo sapiens
  CDR3 for beta chain variable domain of TCR clone 241273 (TRBV15, TRBJ1-6)
CATSGGLNSPLHF

SEQ ID NO: 482547 - protein, 13 aa, Homo sapiens
  CDR3 for alpha chain variable domain of TCR clone 241274 (TRAV12-1, TRAJ29)
CVVNGPGNTPLVF

SEQ ID NO: 482548 - protein, 16 aa, Homo sapiens
  CDR3 for beta chain variable domain of TCR clone 241274 (TRBV13, TRBJ2-2)
CASSPRTGEHTGELFF

SEQ ID NO: 482549 - protein, 12 aa, Homo sapiens
  CDR3 for alpha chain variable domain of TCR clone 241275 (TRAV8-3, TRAJ20)
CAVDFNDYKLSF

SEQ ID NO: 482550 - protein, 15 aa, Homo sapiens
  CDR3 for beta chain variable domain of TCR clone 241275 (TRBV10-3, TRBJ2-1)
CAIRNGTSGHNEQFF

SEQ ID NO: 482551 - protein, 13 aa, Homo sapiens
  CDR3 for alpha chain variable domain of TCR clone 241276 (TRAV2, TRAJ21)
CAMEELNFNKFYF

SEQ ID NO: 482552 - protein, 15 aa, Homo sapiens
  CDR3 for beta chain variable domain of TCR clone 241276 (TRBV28, TRBJ2-5)
CASSPGQGSIETQYF

SEQ ID NO: 482553 - protein, 17 aa, Homo sapiens
  CDR3 for alpha chain variable domain of TCR clone 241277 (TRAV3, TRAJ6)
CAVRDGHRAGGSYIPTY

SEQ ID NO: 482554 - protein, 14 aa, Homo sapiens
  CDR3 for beta chain variable domain of TCR clone 241277 (TRBV7-2, TRBJ2-7)
CASSPKTSFYEQYF

SEQ ID NO: 482555 - protein, 16 aa, Homo sapiens
  CDR3 for alpha chain variable domain of TCR clone 241278 (TRAV30, TRAJ24)
CGTEIVDADSWGQFQF

SEQ ID NO: 482556 - protein, 14 aa, Homo sapiens
  CDR3 for beta chain variable domain of TCR clone 241278 (TRBV12-5, TRBJ2-5)
CASGSRTHHETQYF

SEQ ID NO: 482557 - protein, 15 aa, Homo sapiens
  CDR3 for alpha chain variable domain of TCR clone 241279 (TRAV22, TRAJ45)
CAAKYSGGGADGLTF

SEQ ID NO: 482558 - protein, 13 aa, Homo sapiens
  CDR3 for beta chain variable domain of TCR clone 241279 (TRBV7-9, TRBJ2-1)
CASSLVWAGEQFF

SEQ ID NO: 482559 - protein, 18 aa, Homo sapiens
  CDR3 for alpha chain variable domain of TCR clone 241280 (TRAV29/DV5, TRAJ52)
RAAGFRGAGGTSYGKLTF

SEQ ID NO: 482560 - protein, 19 aa, Homo sapiens
  CDR3 for beta chain variable domain of TCR clone 241280 (TRBV25-1, TRBJ2-2)
CAILVYRVDRGRKTGELFF

SEQ ID NO: 482561 - protein, 14 aa, Homo sapiens
  CDR3 for alpha chain variable domain of TCR clone 241281 (TRAV12-2, TRAJ5)
CAVNRSTGRRALTF

SEQ ID NO: 482562 - protein, 16 aa, Homo sapiens
  CDR3 for beta chain variable domain of TCR clone 241281 (TRBV4-1, TRBJ1-2)
CASSQDAGQVLYGYTF

SEQ ID NO: 482563 - protein, 11 aa, Homo sapiens
  CDR3 for alpha chain variable domain of TCR clone 241282 (TRAV21, TRAJ23)
CAPQRRGKLIF

SEQ ID NO: 482564 - protein, 18 aa, Homo sapiens
  CDR3 for beta chain variable domain of TCR clone 241282 (TRBV12-4, TRBJ2-2)
CASSLVAGTRGRTGELFF

SEQ ID NO: 482565 - protein, 15 aa, Homo sapiens
  CDR3 for alpha chain variable domain of TCR clone 241283 (TRAV3, TRAJ45)
CAVRTPWGGADGLTF

SEQ ID NO: 482566 - protein, 15 aa, Homo sapiens
  CDR3 for beta chain variable domain of TCR clone 241283 (TRBV7-2, TRBJ2-2)
CASRRPGQNTGELFF

SEQ ID NO: 482567 - protein, 12 aa, Homo sapiens
  CDR3 for alpha chain variable domain of TCR clone 241284 (TRAV8-3, TRAJ34)
WASGYNPDKLIF

SEQ ID NO: 482568 - protein, 13 aa, Homo sapiens
  CDR3 for beta chain variable domain of TCR clone 241284 (TRBV6-4, TRBJ2-3)
CASSVSWADTQYF

SEQ ID NO: 482569 - protein, 13 aa, Homo sapiens
  CDR3 for alpha chain variable domain of TCR clone 241285 (TRAV1-2, TRAJ9)
CAALNTRGFKTIF

SEQ ID NO: 482570 - protein, 13 aa, Homo sapiens
  CDR3 for beta chain variable domain of TCR clone 241285 (TRBV19, TRBJ1-2)
CASSVPGQDGYTS

SEQ ID NO: 482571 - protein, 11 aa, Homo sapiens
  CDR3 for alpha chain variable domain of TCR clone 241286 (TRAV21, TRAJ48)
CAVDGNEKLTF

SEQ ID NO: 482572 - protein, 12 aa, Homo sapiens
  CDR3 for beta chain variable domain of TCR clone 241286 (TRBV5-7, TRBJ1-2)
CASSDRIHGYTF

SEQ ID NO: 482573 - protein, 14 aa, Homo sapiens
  CDR3 for alpha chain variable domain of TCR clone 241287 (TRAV1-2, TRAJ16)
CAVSRFSDGQKLLF

SEQ ID NO: 482574 - protein, 14 aa, Homo sapiens
  CDR3 for beta chain variable domain of TCR clone 241287 (TRBV7-9, TRBJ2-2)
CASSTVLGRWELFF

SEQ ID NO: 482575 - protein, 11 aa, Homo sapiens
  CDR3 for alpha chain variable domain of TCR clone 241288 (TRAV35, TRAJ30)
CAGPGDDKIIF

SEQ ID NO: 482576 - protein, 12 aa, Homo sapiens
  CDR3 for beta chain variable domain of TCR clone 241288 (TRBV7-3, TRBJ2-1)
CASSFINNEQFF

SEQ ID NO: 482577 - protein, 15 aa, Homo sapiens
  CDR3 for alpha chain variable domain of TCR clone 241289 (TRAV35, TRAJ40)
CAGQLGTSGTYKYIF

SEQ ID NO: 482578 - protein, 17 aa, Homo sapiens
  CDR3 for beta chain variable domain of TCR clone 241289 (TRBV13, TRBJ2-3)
CASSLSRVAGGEEYAVF

SEQ ID NO: 482579 - protein, 18 aa, Homo sapiens
  CDR3 for alpha chain variable domain of TCR clone 241290 (TRAV26-1, TRAJ5)
CIVRVVPPRDTGRRALTF

SEQ ID NO: 482580 - protein, 15 aa, Homo sapiens
  CDR3 for beta chain variable domain of TCR clone 241290 (TRBV7-9, TRBJ2-7)
CASSLPMGRANEQYF

SEQ ID NO: 482581 - protein, 15 aa, Homo sapiens
  CDR3 for alpha chain variable domain of TCR clone 241291 (TRAV8-3, TRAJ23)
CAVGDRYNQGGKRIF

SEQ ID NO: 482582 - protein, 22 aa, Homo sapiens
  CDR3 for beta chain variable domain of TCR clone 241291 (TRBV29-1, TRBJ2-5)
TVSNMSPEDSSIYLCSAGIQYF

SEQ ID NO: 482583 - protein, 10 aa, Homo sapiens
  CDR3 for alpha chain variable domain of TCR clone 241292 (TRAV1-2, TRAJ31)
CAFFYARLMF

SEQ ID NO: 482584 - protein, 13 aa, Homo sapiens
  CDR3 for beta chain variable domain of TCR clone 241292 (TRBV7-9, TRBJ1-2)
CASSLKQNYGYTF

SEQ ID NO: 482585 - protein, 16 aa, Homo sapiens
  CDR3 for alpha chain variable domain of TCR clone 241293 (TRAV41, TRAJ45)
CAVPLYSGGGADGPTF

SEQ ID NO: 482586 - protein, 14 aa, Homo sapiens
  CDR3 for beta chain variable domain of TCR clone 241293 (TRBV2, TRBJ2-2)
CASRARGNTGELFF

SEQ ID NO: 482587 - protein, 12 aa, Homo sapiens
  CDR3 for alpha chain variable domain of TCR clone 241294 (TRAV6, TRAJ20)
CALDRGDYKLSF

SEQ ID NO: 482588 - protein, 15 aa, Homo sapiens
  CDR3 for beta chain variable domain of TCR clone 241294 (TRBV11-3, TRBJ2-2)
CASSLGGRPTGELFF

SEQ ID NO: 482589 - protein, 15 aa, Homo sapiens
  CDR3 for alpha chain variable domain of TCR clone 241295 (TRAV8-3, TRAJ45)
CASSYSGGGADGLTF

SEQ ID NO: 482590 - protein, 14 aa, Homo sapiens
  CDR3 for beta chain variable domain of TCR clone 241295 (TRBV11-3, TRBJ2-3)
CASSLDPATDTQYF

SEQ ID NO: 482591 - protein, 14 aa, Homo sapiens
  CDR3 for alpha chain variable domain of TCR clone 241296 (TRAV17, TRAJ31)
CATVLRNNNARLMF

SEQ ID NO: 482592 - protein, 15 aa, Homo sapiens
  CDR3 for beta chain variable domain of TCR clone 241296 (TRBV6-5, TRBJ2-1)
CASSYDAGAGNEQFF

SEQ ID NO: 482593 - protein, 14 aa, Homo sapiens
  CDR3 for alpha chain variable domain of TCR clone 241297 (TRAV12-1, TRAJ17)
CVVNYKAAGNKLTF

SEQ ID NO: 482594 - protein, 15 aa, Homo sapiens
  CDR3 for beta chain variable domain of TCR clone 241297 (TRBV7-9, TRBJ2-1)
CASSLGWGRANEQFF

SEQ ID NO: 482595 - protein, 14 aa, Homo sapiens
  CDR3 for alpha chain variable domain of TCR clone 241298 (TRAV12-2, TRAJ13)
CAVNKTGGYQKVTF

SEQ ID NO: 482596 - protein, 13 aa, Homo sapiens
  CDR3 for beta chain variable domain of TCR clone 241298 (TRBV20-1, TRBJ1-1)
CSARGGGNTEAFF

SEQ ID NO: 482597 - protein, 13 aa, Homo sapiens
  CDR3 for alpha chain variable domain of TCR clone 241299 (TRAV25, TRAJ54)
CAGTIQGAKKLVF

SEQ ID NO: 482598 - protein, 15 aa, Homo sapiens
  CDR3 for beta chain variable domain of TCR clone 241299 (TRBV19, TRBJ1-5)
CASSILTGENQPQHF

SEQ ID NO: 482599 - protein, 18 aa, Homo sapiens
  CDR3 for alpha chain variable domain of TCR clone 241300 (TRAV21, TRAJ13)
CAVPRSFWGLPESYLWNC

SEQ ID NO: 482600 - protein, 14 aa, Homo sapiens
  CDR3 for beta chain variable domain of TCR clone 241300 (TRBV20-1, TRBJ2-7)
CSAKDRKGAYEQYF

SEQ ID NO: 482601 - protein, 11 aa, Homo sapiens
  CDR3 for alpha chain variable domain of TCR clone 241301 (TRAV35, TRAJ30)
CAGERNDKIIF

SEQ ID NO: 482602 - protein, 14 aa, Homo sapiens
  CDR3 for beta chain variable domain of TCR clone 241301 (TRBV15, TRBJ2-5)
CAPSGDRGQETQYF

SEQ ID NO: 482603 - protein, 16 aa, Homo sapiens
  CDR3 for alpha chain variable domain of TCR clone 241302 (TRAV8-4, TRAJ18)
CAVTANGGSALGRLYL

SEQ ID NO: 482604 - protein, 14 aa, Homo sapiens
  CDR3 for beta chain variable domain of TCR clone 241302 (TRBV12-4, TRBJ1-2)
CASSSAGHIYGYTF

SEQ ID NO: 482605 - protein, 14 aa, Homo sapiens
  CDR3 for alpha chain variable domain of TCR clone 241303 (TRAV26-1, TRAJ38)
CIADNAGNNRKLIW

SEQ ID NO: 482606 - protein, 16 aa, Homo sapiens
  CDR3 for beta chain variable domain of TCR clone 241303 (TRBV20-1, TRBJ2-7)
CSASTSVRLSSYEQYF

SEQ ID NO: 482607 - protein, 11 aa, Homo sapiens
  CDR3 for alpha chain variable domain of TCR clone 241304 (TRAV2, TRAJ13)
CASGGYQKVTF

SEQ ID NO: 482608 - protein, 16 aa, Homo sapiens
  CDR3 for beta chain variable domain of TCR clone 241304 (TRBV7-9, TRBJ2-7)
CASSSPSANTVNEQYF

SEQ ID NO: 482609 - protein, 13 aa, Homo sapiens
  CDR3 for alpha chain variable domain of TCR clone 241305 (TRAV21, TRAJ20)
CAVGLRIDYKLSF

SEQ ID NO: 482610 - protein, 14 aa, Homo sapiens
  CDR3 for beta chain variable domain of TCR clone 241305 (TRBV7-2, TRBJ2-7)
CASSPKTSFYEQYF

SEQ ID NO: 482611 - protein, 13 aa, Homo sapiens
  CDR3 for alpha chain variable domain of TCR clone 241306 (TRAV27, TRAJ41)
CAGEGNSGDALNF

SEQ ID NO: 482612 - protein, 16 aa, Homo sapiens
  CDR3 for beta chain variable domain of TCR clone 241306 (TRBV29-1, TRBJ2-7)
CSVEVVGTSGSYEQYF

SEQ ID NO: 482613 - protein, 16 aa, Homo sapiens
  CDR3 for alpha chain variable domain of TCR clone 241307 (TRAV16, TRAJ42)
CARKMNYGGSQGNLIF

SEQ ID NO: 482614 - protein, 15 aa, Homo sapiens
  CDR3 for beta chain variable domain of TCR clone 241307 (TRBV20-1, TRBJ2-7)
CSAREGRDNLYEQSF

SEQ ID NO: 482615 - protein, 16 aa, Homo sapiens
  CDR3 for alpha chain variable domain of TCR clone 241308 (TRAV3, TRAJ37)
CAVRVRGSGNTGKLIF

SEQ ID NO: 482616 - protein, 11 aa, Homo sapiens
  CDR3 for beta chain variable domain of TCR clone 241308 (TRBV11-2, TRBJ2-2)
SASSLPGELFF

SEQ ID NO: 482617 - protein, 16 aa, Homo sapiens
  CDR3 for alpha chain variable domain of TCR clone 241309 (TRAV36/DV7, TRAJ30)
CAVETYGLDRDDKIIF

SEQ ID NO: 482618 - protein, 12 aa, Homo sapiens
  CDR3 for beta chain variable domain of TCR clone 241309 (TRBV20-1, TRBJ2-1)
CSAYRGAGEQFF

SEQ ID NO: 482619 - protein, 12 aa, Homo sapiens
  CDR3 for alpha chain variable domain of TCR clone 241310 (TRAV29/DV5, TRAJ34)
CAARHNTDKLIF

SEQ ID NO: 482620 - protein, 15 aa, Homo sapiens
  CDR3 for beta chain variable domain of TCR clone 241310 (TRBV19, TRBJ2-7)
CASTPAGSGEALRYF

SEQ ID NO: 482621 - protein, 16 aa, Homo sapiens
  CDR3 for alpha chain variable domain of TCR clone 241311 (TRAV3, TRAJ37)
CAVRPHGSGNTGKLIF

SEQ ID NO: 482622 - protein, 16 aa, Homo sapiens
  CDR3 for beta chain variable domain of TCR clone 241311 (TRBV9, TRBJ1-2)
FASSVEEKVSPYGYTF

SEQ ID NO: 482623 - protein, 17 aa, Homo sapiens
  CDR3 for alpha chain variable domain of TCR clone 241312 (TRAV3, TRAJ6)
CAVRDGPRVGGSYLPTF

SEQ ID NO: 482624 - protein, 12 aa, Homo sapiens
  CDR3 for beta chain variable domain of TCR clone 241312 (TRBV11-2, TRBJ2-2)
CASSLGGGELFF

SEQ ID NO: 482625 - protein, 13 aa, Homo sapiens
  CDR3 for alpha chain variable domain of TCR clone 241313 (TRAV17, TRAJ5)
CALRGTGRRALTF

SEQ ID NO: 482626 - protein, 13 aa, Homo sapiens
  CDR3 for beta chain variable domain of TCR clone 241313 (TRBV4-2, TRBJ1-1)
CASSKAGNTEAFF

SEQ ID NO: 482627 - protein, 16 aa, Homo sapiens
  CDR3 for alpha chain variable domain of TCR clone 241314 (TRAV30, TRAJ24)
CGTEIVDADSGGKFQF

SEQ ID NO: 482628 - protein, 15 aa, Homo sapiens
  CDR3 for beta chain variable domain of TCR clone 241314 (TRBV7-2, TRBJ2-3)
CASSLRGGSTDTQYF

SEQ ID NO: 482629 - protein, 21 aa, Homo sapiens
  CDR3 for alpha chain variable domain of TCR clone 241315 (TRAV26-1, TRAJ17)
CCVLLHRQSSGSKAAGNKLTF

SEQ ID NO: 482630 - protein, 14 aa, Homo sapiens
  CDR3 for beta chain variable domain of TCR clone 241315 (TRBV28, TRBJ1-2)
CASRIQGAKYGYTF

SEQ ID NO: 482631 - protein, 20 aa, Homo sapiens
  CDR3 for alpha chain variable domain of TCR clone 241316 (TRAV8-3, TRAJ44)
LSTSVLWVRLYTGTASKLTF

SEQ ID NO: 482632 - protein, 16 aa, Homo sapiens
  CDR3 for beta chain variable domain of TCR clone 241316 (TRBV6-4, TRBJ1-2)
CASSGAVGDPNYGYTF

SEQ ID NO: 482633 - protein, 15 aa, Homo sapiens
  CDR3 for alpha chain variable domain of TCR clone 241317 (TRAV25, TRAJ10)
CAGLGLTGGGNKRTF

SEQ ID NO: 482634 - protein, 14 aa, Homo sapiens
  CDR3 for beta chain variable domain of TCR clone 241317 (TRBV7-2, TRBJ2-1)
CASSLEGGYNEQFF

SEQ ID NO: 482635 - protein, 15 aa, Homo sapiens
  CDR3 for alpha chain variable domain of TCR clone 241318 (TRAV12-1, TRAJ45)
CVVLSGGGGADGLTF

SEQ ID NO: 482636 - protein, 13 aa, Homo sapiens
  CDR3 for beta chain variable domain of TCR clone 241318 (TRBV4-1, TRBJ2-7)
CASSQGQAYEQYF

SEQ ID NO: 482637 - protein, 14 aa, Homo sapiens
  CDR3 for alpha chain variable domain of TCR clone 241319 (TRAV35, TRAJ13)
CAGSPSRGYQKVTF

SEQ ID NO: 482638 - protein, 13 aa, Homo sapiens
  CDR3 for beta chain variable domain of TCR clone 241319 (TRBV29-1, TRBJ1-1)
CSVGDSWNTEAFF

SEQ ID NO: 482639 - protein, 14 aa, Homo sapiens
  CDR3 for alpha chain variable domain of TCR clone 241320 (TRAV12-3, TRAJ9)
CAMSSNTGGFKTIF

SEQ ID NO: 482640 - protein, 12 aa, Homo sapiens
  CDR3 for beta chain variable domain of TCR clone 241320 (TRBV19, TRBJ1-5)
CASSIAQQPQHF

SEQ ID NO: 482641 - protein, 11 aa, Homo sapiens
  CDR3 for alpha chain variable domain of TCR clone 241321 (TRAV35, TRAJ12)
RRMDSSYKLIF

SEQ ID NO: 482642 - protein, 14 aa, Homo sapiens
  CDR3 for beta chain variable domain of TCR clone 241321 (TRBV7-8, TRBJ2-3)
CASSLEAGTDTQYF

SEQ ID NO: 482643 - protein, 12 aa, Homo sapiens
  CDR3 for alpha chain variable domain of TCR clone 241322 (TRAV13-1, TRAJ21)
CAAKEGFNKFYF

SEQ ID NO: 482644 - protein, 13 aa, Homo sapiens
  CDR3 for beta chain variable domain of TCR clone 241322 (TRBV5-4, TRBJ2-1)
CASSFLAGDEQFF

SEQ ID NO: 482645 - protein, 14 aa, Homo sapiens
  CDR3 for alpha chain variable domain of TCR clone 241323 (TRAV12-3, TRAJ10)
SHLPLTGGGNKLTF

SEQ ID NO: 482646 - protein, 17 aa, Homo sapiens
  CDR3 for beta chain variable domain of TCR clone 241323 (TRBV28, TRBJ2-5)
CASSTPEGDALQEIQYF

SEQ ID NO: 482647 - protein, 17 aa, Homo sapiens
  CDR3 for alpha chain variable domain of TCR clone 241324 (TRAV26-1, TRAJ47)
CIVPSLLYMEYGNKLVF

SEQ ID NO: 482648 - protein, 14 aa, Homo sapiens
  CDR3 for beta chain variable domain of TCR clone 241324 (TRBV7-3, TRBJ1-5)
RARSFSGCNQPQHF

SEQ ID NO: 482649 - protein, 15 aa, Homo sapiens
  CDR3 for alpha chain variable domain of TCR clone 241325 (TRAV12-2, TRAJ43)
CAFDMRFGAGTRLTV

SEQ ID NO: 482650 - protein, 16 aa, Homo sapiens
  CDR3 for beta chain variable domain of TCR clone 241325 (TRBV19, TRBJ2-2)
CASRSPGTGATGELFF

SEQ ID NO: 482651 - protein, 12 aa, Homo sapiens
  CDR3 for alpha chain variable domain of TCR clone 241326 (TRAV8-3, TRAJ27)
CAVGAEAGKSTF

SEQ ID NO: 482652 - protein, 14 aa, Homo sapiens
  CDR3 for beta chain variable domain of TCR clone 241326 (TRBV2, TRBJ2-1)
CASKLIVGHDEQFF

SEQ ID NO: 482653 - protein, 14 aa, Homo sapiens
  CDR3 for alpha chain variable domain of TCR clone 241327 (TRAV1-2, TRAJ8)
CAVGEDTGFQKLVF

SEQ ID NO: 482654 - protein, 15 aa, Homo sapiens
  CDR3 for beta chain variable domain of TCR clone 241327 (TRBV19, TRBJ2-1)
CASSTGTSSYNEQFF

SEQ ID NO: 482655 - protein, 14 aa, Homo sapiens
  CDR3 for alpha chain variable domain of TCR clone 241328 (TRAV12-3, TRAJ9)
CAMSPNNGGFKTIF

SEQ ID NO: 482656 - protein, 15 aa, Homo sapiens
  CDR3 for beta chain variable domain of TCR clone 241328 (TRBV20-1, TRBJ2-7)
CSAREGRDSLYEQYF

SEQ ID NO: 482657 - protein, 11 aa, Homo sapiens
  CDR3 for alpha chain variable domain of TCR clone 241329 (TRAV1-2, TRAJ20)
CAVSNDYKLSF

SEQ ID NO: 482658 - protein, 15 aa, Homo sapiens
  CDR3 for beta chain variable domain of TCR clone 241329 (TRBV11-3, TRBJ2-1)
CASSSRTGGYNEQFF

SEQ ID NO: 482659 - protein, 14 aa, Homo sapiens
  CDR3 for alpha chain variable domain of TCR clone 241330 (TRAV12-3, TRAJ10)
SHLPLTGVGNKLTF

SEQ ID NO: 482660 - protein, 13 aa, Homo sapiens
  CDR3 for beta chain variable domain of TCR clone 241330 (TRBV20-1, TRBJ1-5)
CSASQQVVQPQHF

SEQ ID NO: 482661 - protein, 14 aa, Homo sapiens
  CDR3 for alpha chain variable domain of TCR clone 241331 (TRAV1-2, TRAJ8)
CAVREDTGFQKLIF

SEQ ID NO: 482662 - protein, 17 aa, Homo sapiens
  CDR3 for beta chain variable domain of TCR clone 241331 (TRBV11-2, TRBJ2-1)
CASSLYPPGVEYNEQFF

SEQ ID NO: 482663 - protein, 16 aa, Homo sapiens
  CDR3 for alpha chain variable domain of TCR clone 241332 (TRAV14/DV4, TRAJ53)
CAMREGGGGSNYKLTF

SEQ ID NO: 482664 - protein, 14 aa, Homo sapiens
  CDR3 for beta chain variable domain of TCR clone 241332 (TRBV19, TRBJ2-3)
CASSMAGITDTQYF

SEQ ID NO: 482665 - protein, 11 aa, Homo sapiens
  CDR3 for alpha chain variable domain of TCR clone 241333 (TRAV8-1, TRAJ8)
CAMKGFQKLVF

SEQ ID NO: 482666 - protein, 15 aa, Homo sapiens
  CDR3 for beta chain variable domain of TCR clone 241333 (TRBV2, TRBJ2-1)
CASEGRVSAYNEQFF

SEQ ID NO: 482667 - protein, 16 aa, Homo sapiens
  CDR3 for alpha chain variable domain of TCR clone 241334 (TRAV12-2, TRAJ28)
CAVITDSGAGSYQLTF

SEQ ID NO: 482668 - protein, 12 aa, Homo sapiens
  CDR3 for beta chain variable domain of TCR clone 241334 (TRBV5-5, TRBJ2-5)
CASSYFGETQYF

SEQ ID NO: 482669 - protein, 17 aa, Homo sapiens
  CDR3 for alpha chain variable domain of TCR clone 241335 (TRAV3, TRAJ6)
CAGRDGPRAGGSYIPTF

SEQ ID NO: 482670 - protein, 14 aa, Homo sapiens
  CDR3 for beta chain variable domain of TCR clone 241335 (TRBV19, TRBJ2-1)
CASPTFVLSGEQFF

SEQ ID NO: 482671 - protein, 14 aa, Homo sapiens
  CDR3 for alpha chain variable domain of TCR clone 241336 (TRAV12-2, TRAJ17)
CAVLFKAAGNKLTF

SEQ ID NO: 482672 - protein, 14 aa, Homo sapiens
  CDR3 for beta chain variable domain of TCR clone 241336 (TRBV7-2, TRBJ2-3)
CASSLARGTDTQYF

SEQ ID NO: 482673 - protein, 15 aa, Homo sapiens
  CDR3 for alpha chain variable domain of TCR clone 241337 (TRAV23/DV6, TRAJ18)
CAARYRGSTLGRLSF

SEQ ID NO: 482674 - protein, 15 aa, Homo sapiens
  CDR3 for beta chain variable domain of TCR clone 241337 (TRBV9, TRBJ1-6)
CASSVAGTGDSPLHF

SEQ ID NO: 482675 - protein, 13 aa, Homo sapiens
  CDR3 for alpha chain variable domain of TCR clone 241338 (TRAV21, TRAJ27)
CAALNTNAGKSTF

SEQ ID NO: 482676 - protein, 15 aa, Homo sapiens
  CDR3 for beta chain variable domain of TCR clone 241338 (TRBV20-1, TRBJ1-6)
CSARAASSYNSPLHF

SEQ ID NO: 482677 - protein, 15 aa, Homo sapiens
  CDR3 for alpha chain variable domain of TCR clone 241339 (TRAV21, TRAJ22)
CAVRLFFWFCKATDL

SEQ ID NO: 482678 - protein, 14 aa, Homo sapiens
  CDR3 for beta chain variable domain of TCR clone 241339 (TRBV19, TRBJ1-5)
CASRAPDSFLSQHF

SEQ ID NO: 482679 - protein, 14 aa, Homo sapiens
  CDR3 for alpha chain variable domain of TCR clone 241340 (TRAV17, TRAJ31)
CATVLRNNNARLMF

SEQ ID NO: 482680 - protein, 11 aa, Homo sapiens
  CDR3 for beta chain variable domain of TCR clone 241340 (TRBV29-1, TRBJ2-5)
CSEDRTGTQYF

SEQ ID NO: 482681 - protein, 17 aa, Homo sapiens
  CDR3 for alpha chain variable domain of TCR clone 241341 (TRAV13-1, TRAJ52)
CAASSGDGGTSYGKLTF

SEQ ID NO: 482682 - protein, 15 aa, Homo sapiens
  CDR3 for beta chain variable domain of TCR clone 241341 (TRBV2, TRBJ2-1)
CASSELAGSYNEQFF

SEQ ID NO: 482683 - protein, 12 aa, Homo sapiens
  CDR3 for alpha chain variable domain of TCR clone 241342 (TRAV3, TRAJ43)
CAVRDPNNVMRF

SEQ ID NO: 482684 - protein, 15 aa, Homo sapiens
  CDR3 for beta chain variable domain of TCR clone 241342 (TRBV27, TRBJ1-5)
CASSLGTGFDQPQHF

SEQ ID NO: 482685 - protein, 11 aa, Homo sapiens
  CDR3 for alpha chain variable domain of TCR clone 241343 (TRAV35, TRAJ34)
CAGRGTPKLIF

SEQ ID NO: 482686 - protein, 14 aa, Homo sapiens
  CDR3 for beta chain variable domain of TCR clone 241343 (TRBV5-1, TRBJ2-7)
CASSRGESLYEQYF

SEQ ID NO: 482687 - protein, 15 aa, Homo sapiens
  CDR3 for alpha chain variable domain of TCR clone 241344 (TRAV17, TRAJ57)
CATGPSQGGSEKLVF

SEQ ID NO: 482688 - protein, 16 aa, Homo sapiens
  CDR3 for beta chain variable domain of TCR clone 241344 (TRBV20-1, TRBJ2-2)
CSASASWIPGAGELFF

SEQ ID NO: 482689 - protein, 11 aa, Homo sapiens
  CDR3 for alpha chain variable domain of TCR clone 241345 (TRAV2, TRAJ13)
CVSGGYQKVTF

SEQ ID NO: 482690 - protein, 17 aa, Homo sapiens
  CDR3 for beta chain variable domain of TCR clone 241345 (TRBV13, TRBJ2-3)
CASSLSRVAGGRNTQYF

SEQ ID NO: 482691 - protein, 15 aa, Homo sapiens
  CDR3 for alpha chain variable domain of TCR clone 241346 (TRAV30, TRAJ57)
CGTAIPQGGSEKLVF

SEQ ID NO: 482692 - protein, 15 aa, Homo sapiens
  CDR3 for beta chain variable domain of TCR clone 241346 (TRBV11-2, TRBJ2-1)
CASSRNRGLMYEQFF

SEQ ID NO: 482693 - protein, 13 aa, Homo sapiens
  CDR3 for alpha chain variable domain of TCR clone 241347 (TRAV2, TRAJ40)
CAVVTSGTYKYIF

SEQ ID NO: 482694 - protein, 14 aa, Homo sapiens
  CDR3 for beta chain variable domain of TCR clone 241347 (TRBV19, TRBJ2-1)
GASPTFVVSGEQFF

SEQ ID NO: 482695 - protein, 11 aa, Homo sapiens
  CDR3 for alpha chain variable domain of TCR clone 241348 (TRAV12-3, TRAJ27)
CAMANAGKSTF

SEQ ID NO: 482696 - protein, 13 aa, Homo sapiens
  CDR3 for beta chain variable domain of TCR clone 241348 (TRBV20-1, TRBJ1-1)
CSARVGGNTETFF

SEQ ID NO: 482697 - protein, 14 aa, Homo sapiens
  CDR3 for alpha chain variable domain of TCR clone 241349 (TRAV34, TRAJ44)
CGADGTGTASKLTF

SEQ ID NO: 482698 - protein, 14 aa, Homo sapiens
  CDR3 for beta chain variable domain of TCR clone 241349 (TRBV5-1, TRBJ2-7)
CASRPQTGFDEQYF

SEQ ID NO: 482699 - protein, 12 aa, Homo sapiens
  CDR3 for alpha chain variable domain of TCR clone 241350 (TRAV3, TRAJ43)
CAVRDPNNDMRF

SEQ ID NO: 482700 - protein, 18 aa, Homo sapiens
  CDR3 for beta chain variable domain of TCR clone 241350 (TRBV20-1, TRBJ2-6)
CSAETTPTHGSGANVLTF

SEQ ID NO: 482701 - protein, 15 aa, Homo sapiens
  CDR3 for alpha chain variable domain of TCR clone 241351 (TRAV13-1, TRAJ44)
CAASRGGGNASKLTF

SEQ ID NO: 482702 - protein, 15 aa, Homo sapiens
  CDR3 for beta chain variable domain of TCR clone 241351 (TRBV20-1, TRBJ2-7)
CSARDRVSGMDEQYF

SEQ ID NO: 482703 - protein, 14 aa, Homo sapiens
  CDR3 for alpha chain variable domain of TCR clone 241352 (TRAV20, TRAJ42)
CAVQAGGSQGNLIF

SEQ ID NO: 482704 - protein, 14 aa, Homo sapiens
  CDR3 for beta chain variable domain of TCR clone 241352 (TRBV7-6, TRBJ2-3)
CASSLGTVTDTQYF

SEQ ID NO: 482705 - protein, 13 aa, Homo sapiens
  CDR3 for alpha chain variable domain of TCR clone 241353 (TRAV38-2/DV8, TRAJ34)
CAYRTWNTDKLIF

SEQ ID NO: 482706 - protein, 16 aa, Homo sapiens
  CDR3 for beta chain variable domain of TCR clone 241353 (TRBV28, TRBJ2-1)
CASSSRVRDSYNEQFF

SEQ ID NO: 482707 - protein, 15 aa, Homo sapiens
  CDR3 for alpha chain variable domain of TCR clone 241354 (TRAV3, TRAJ22)
CAVRDRGGSARPLTF

SEQ ID NO: 482708 - protein, 12 aa, Homo sapiens
  CDR3 for beta chain variable domain of TCR clone 241354 (TRBV7-2, TRBJ2-1)
CASSPQDIEQFL

SEQ ID NO: 482709 - protein, 15 aa, Homo sapiens
  CDR3 for alpha chain variable domain of TCR clone 241355 (TRAV2, TRAJ9)
CAVEDRGTGGFKTIF

SEQ ID NO: 482710 - protein, 15 aa, Homo sapiens
  CDR3 for beta chain variable domain of TCR clone 241355 (TRBV7-8, TRBJ1-5)
CASSLEGSGNQPQHF

SEQ ID NO: 482711 - protein, 17 aa, Homo sapiens
  CDR3 for alpha chain variable domain of TCR clone 241356 (TRAV26-1, TRAJ37)
CIVRVITVSSNTGKLIF

SEQ ID NO: 482712 - protein, 15 aa, Homo sapiens
  CDR3 for beta chain variable domain of TCR clone 241356 (TRBV7-3, TRBJ2-1)
CASSLSSGSFDEQFF

SEQ ID NO: 482713 - protein, 14 aa, Homo sapiens
  CDR3 for alpha chain variable domain of TCR clone 241357 (TRAV26-1, TRAJ38)
CIAANAGNNRKLIW

SEQ ID NO: 482714 - protein, 15 aa, Homo sapiens
  CDR3 for beta chain variable domain of TCR clone 241357 (TRBV27, TRBJ2-1)
CASSNGGGSSNEQFF

SEQ ID NO: 482715 - protein, 18 aa, Homo sapiens
  CDR3 for alpha chain variable domain of TCR clone 241358 (TRAV9-2, TRAJ52)
CALSRHNAGGTSYGKLTC

SEQ ID NO: 482716 - protein, 16 aa, Homo sapiens
  CDR3 for beta chain variable domain of TCR clone 241358 (TRBV19, TRBJ2-1)
CASSKAGPSSYNEQFF

SEQ ID NO: 482717 - protein, 15 aa, Homo sapiens
  CDR3 for alpha chain variable domain of TCR clone 241359 (TRAV13-1, TRAJ32)
RAASIYGGATNKLIF

SEQ ID NO: 482718 - protein, 17 aa, Homo sapiens
  CDR3 for beta chain variable domain of TCR clone 241359 (TRBV7-3, TRBJ2-5)
CASSLGSGRSGSETQYF

SEQ ID NO: 482719 - protein, 14 aa, Homo sapiens
  CDR3 for alpha chain variable domain of TCR clone 241360 (TRAV13-1, TRAJ35)
RAASKGGFGNVLHC

SEQ ID NO: 482720 - protein, 18 aa, Homo sapiens
  CDR3 for beta chain variable domain of TCR clone 241360 (TRBV27, TRBJ2-3)
CASSLSGTSGRGTDTQYF

SEQ ID NO: 482721 - protein, 12 aa, Homo sapiens
  CDR3 for alpha chain variable domain of TCR clone 241361 (TRAV8-3, TRAJ20)
CAVGANDYRLGF

SEQ ID NO: 482722 - protein, 16 aa, Homo sapiens
  CDR3 for beta chain variable domain of TCR clone 241361 (TRBV19, TRBJ2-2)
CASRSPGTGATGELFF

SEQ ID NO: 482723 - protein, 13 aa, Homo sapiens
  CDR3 for alpha chain variable domain of TCR clone 241362 (TRAV2, TRAJ15)
CAVASQAGTALIV

SEQ ID NO: 482724 - protein, 14 aa, Homo sapiens
  CDR3 for beta chain variable domain of TCR clone 241362 (TRBV25-1, TRBJ1-1)
CASTHLGGNTEAFF

SEQ ID NO: 482725 - protein, 13 aa, Homo sapiens
  CDR3 for alpha chain variable domain of TCR clone 241363 (TRAV3, TRAJ39)
CAAGWNAGNMLTF

SEQ ID NO: 482726 - protein, 12 aa, Homo sapiens
  CDR3 for beta chain variable domain of TCR clone 241363 (TRBV12-4, TRBJ2-7)
CASSLGGYEQYF

SEQ ID NO: 482727 - protein, 14 aa, Homo sapiens
  CDR3 for alpha chain variable domain of TCR clone 241364 (TRAV26-1, TRAJ38)
CIADNAGNNRKLIL

SEQ ID NO: 482728 - protein, 11 aa, Homo sapiens
  CDR3 for beta chain variable domain of TCR clone 241364 (TRBV29-1, TRBJ2-5)
CSEDRTGTQYF

SEQ ID NO: 482729 - protein, 13 aa, Homo sapiens
  CDR3 for alpha chain variable domain of TCR clone 241365 (TRAV8-4, TRAJ30)
CAVNRNRDDKIIF

SEQ ID NO: 482730 - protein, 17 aa, Homo sapiens
  CDR3 for beta chain variable domain of TCR clone 241365 (TRBV20-1, TRBJ2-2)
CSASGSGQGRLTGELFF

SEQ ID NO: 482731 - protein, 14 aa, Homo sapiens
  CDR3 for alpha chain variable domain of TCR clone 241366 (TRAV17, TRAJ35)
CATDRPGFGNVLHC

SEQ ID NO: 482732 - protein, 15 aa, Homo sapiens
  CDR3 for beta chain variable domain of TCR clone 241366 (TRBV7-9, TRBJ1-4)
CASSARTGGNEKLFF

SEQ ID NO: 482733 - protein, 12 aa, Homo sapiens
  CDR3 for alpha chain variable domain of TCR clone 241367 (TRAV13-1, TRAJ29)
CAARSRTHTSCL

SEQ ID NO: 482734 - protein, 17 aa, Homo sapiens
  CDR3 for beta chain variable domain of TCR clone 241367 (TRBV4-1, TRBJ2-1)
CASSHRDSGSSYNEQFF

SEQ ID NO: 482735 - protein, 14 aa, Homo sapiens
  CDR3 for alpha chain variable domain of TCR clone 241368 (TRAV26-1, TRAJ38)
CIADNAGNKRKLIW

SEQ ID NO: 482736 - protein, 16 aa, Homo sapiens
  CDR3 for beta chain variable domain of TCR clone 241368 (TRBV7-3, TRBJ2-2)
CASSLKRGTLSGELFF

SEQ ID NO: 482737 - protein, 13 aa, Homo sapiens
  CDR3 for alpha chain variable domain of TCR clone 241369 (TRAV12-2, TRAJ39)
CAVNNNAGNMLTF

SEQ ID NO: 482738 - protein, 13 aa, Homo sapiens
  CDR3 for beta chain variable domain of TCR clone 241369 (TRBV2, TRBJ1-5)
CATAGPGNQPQHL

SEQ ID NO: 482739 - protein, 13 aa, Homo sapiens
  CDR3 for alpha chain variable domain of TCR clone 241370 (TRAV13-1, TRAJ5)
CAASDTGRRALTF

SEQ ID NO: 482740 - protein, 12 aa, Homo sapiens
  CDR3 for beta chain variable domain of TCR clone 241370 (TRBV7-9, TRBJ1-4)
CASSTDREKLFF

SEQ ID NO: 482741 - protein, 12 aa, Homo sapiens
  CDR3 for alpha chain variable domain of TCR clone 241371 (TRAV8-3, TRAJ26)
CAGDNYGQNFVF

SEQ ID NO: 482742 - protein, 11 aa, Homo sapiens
  CDR3 for beta chain variable domain of TCR clone 241371 (TRBV5-6, TRBJ2-5)
CASSLERTQYF

SEQ ID NO: 482743 - protein, 13 aa, Homo sapiens
  CDR3 for alpha chain variable domain of TCR clone 241372 (TRAV3, TRAJ29)
CAVRDIIDTPLVF

SEQ ID NO: 482744 - protein, 11 aa, Homo sapiens
  CDR3 for beta chain variable domain of TCR clone 241372 (TRBV19, TRBJ2-2)
CASRYSGELFF

SEQ ID NO: 482745 - protein, 16 aa, Homo sapiens
  CDR3 for alpha chain variable domain of TCR clone 241373 (TRAV30, TRAJ24)
CGTEIVDSDSWGKFQF

SEQ ID NO: 482746 - protein, 14 aa, Homo sapiens
  CDR3 for beta chain variable domain of TCR clone 241373 (TRBV7-2, TRBJ2-7)
CASSPKTSFYEQYF

SEQ ID NO: 482747 - protein, 14 aa, Homo sapiens
  CDR3 for alpha chain variable domain of TCR clone 241374 (TRAV12-2, TRAJ40)
CAGKIPSGTYKYIF

SEQ ID NO: 482748 - protein, 17 aa, Homo sapiens
  CDR3 for beta chain variable domain of TCR clone 241374 (TRBV13, TRBJ2-3)
CASSLSRVAGGRNTQYF

SEQ ID NO: 482749 - protein, 13 aa, Homo sapiens
  CDR3 for alpha chain variable domain of TCR clone 241375 (TRAV1-2, TRAJ9)
CAALNTGGFKTIF

SEQ ID NO: 482750 - protein, 14 aa, Homo sapiens
  CDR3 for beta chain variable domain of TCR clone 241375 (TRBV13, TRBJ2-3)
CASSSGSPTDTLYF

SEQ ID NO: 482751 - protein, 15 aa, Homo sapiens
  CDR3 for alpha chain variable domain of TCR clone 241376 (TRAV2, TRAJ9)
CAVEDRGTGGFKTIF

SEQ ID NO: 482752 - protein, 13 aa, Homo sapiens
  CDR3 for beta chain variable domain of TCR clone 241376 (TRBV20-1, TRBJ1-1)
CSGRGGGNTEAFF

SEQ ID NO: 482753 - protein, 19 aa, Homo sapiens
  CDR3 for alpha chain variable domain of TCR clone 241377 (TRAV16, )
CTLSGDIQNPDPAVYQLRD

SEQ ID NO: 482754 - protein, 16 aa, Homo sapiens
  CDR3 for beta chain variable domain of TCR clone 241377 (TRBV12-5, TRBJ2-5)
CASGPRTSGNQETQYF

SEQ ID NO: 482755 - protein, 11 aa, Homo sapiens
  CDR3 for alpha chain variable domain of TCR clone 241378 (TRAV27, TRAJ45)
CAGAHEEVLTD

SEQ ID NO: 482756 - protein, 11 aa, Homo sapiens
  CDR3 for beta chain variable domain of TCR clone 241378 (TRBV19, TRBJ1-1)
CASSIGSEAFF

SEQ ID NO: 482757 - protein, 15 aa, Homo sapiens
  CDR3 for alpha chain variable domain of TCR clone 241379 (TRAV17, TRAJ57)
CATGPSQGGSEKLVF

SEQ ID NO: 482758 - protein, 15 aa, Homo sapiens
  CDR3 for beta chain variable domain of TCR clone 241379 (TRBV25-1, TRBJ1-4)
CASSPGDSSNEKLFF

SEQ ID NO: 482759 - protein, 14 aa, Homo sapiens
  CDR3 for alpha chain variable domain of TCR clone 241380 (TRAV12-1, TRAJ17)
CVVNFKAAGNKLTF

SEQ ID NO: 482760 - protein, 17 aa, Homo sapiens
  CDR3 for beta chain variable domain of TCR clone 241380 (TRBV20-1, TRBJ2-1)
CSASASGPAGSYNEQFF

SEQ ID NO: 482761 - protein, 13 aa, Homo sapiens
  CDR3 for alpha chain variable domain of TCR clone 241381 (TRAV2, TRAJ47)
CAVDREYGKKLVF

SEQ ID NO: 482762 - protein, 17 aa, Homo sapiens
  CDR3 for beta chain variable domain of TCR clone 241381 (TRBV15, TRBJ1-5)
CAASRVKGIYSNQPQHF

SEQ ID NO: 482763 - protein, 12 aa, Homo sapiens
  CDR3 for alpha chain variable domain of TCR clone 241382 (TRAV13-1, TRAJ9)
CASHTGGFITIF

SEQ ID NO: 482764 - protein, 13 aa, Homo sapiens
  CDR3 for beta chain variable domain of TCR clone 241382 (TRBV12-4, TRBJ1-2)
CASSSGSKDGYTF

SEQ ID NO: 482765 - protein, 15 aa, Homo sapiens
  CDR3 for alpha chain variable domain of TCR clone 241383 (TRAV2, TRAJ11)
CAVGGRNSGYSTLTF

SEQ ID NO: 482766 - protein, 12 aa, Homo sapiens
  CDR3 for beta chain variable domain of TCR clone 241383 (TRBV28, TRBJ2-7)
CASSFSSYEQFF

SEQ ID NO: 482767 - protein, 11 aa, Homo sapiens
  CDR3 for alpha chain variable domain of TCR clone 241384 (TRAV2, TRAJ13)
CASGGYQKVTF

SEQ ID NO: 482768 - protein, 15 aa, Homo sapiens
  CDR3 for beta chain variable domain of TCR clone 241384 (TRBV18, TRBJ1-2)
CALTRQGSVWLHLRF

SEQ ID NO: 482769 - protein, 14 aa, Homo sapiens
  CDR3 for alpha chain variable domain of TCR clone 241385 (TRAV2, TRAJ37)
CAVDFTSNTCKLIF

SEQ ID NO: 482770 - protein, 15 aa, Homo sapiens
  CDR3 for beta chain variable domain of TCR clone 241385 (TRBV20-1, TRBJ1-1)
CSASQGVTGHTEAFF

SEQ ID NO: 482771 - protein, 20 aa, Homo sapiens
  CDR3 for alpha chain variable domain of TCR clone 241386 (TRAV26-1, TRAJ42)
CCVLLHCQTYYGGSQGNLIF

SEQ ID NO: 482772 - protein, 16 aa, Homo sapiens
  CDR3 for beta chain variable domain of TCR clone 241386 (TRBV7-3, TRBJ2-2)
CASSLKRGTLSGELFF

SEQ ID NO: 482773 - protein, 19 aa, Homo sapiens
  CDR3 for alpha chain variable domain of TCR clone 241387 (TRAV1-2, TRAJ26)
CLLPLCCERPDNYGQNFVF

SEQ ID NO: 482774 - protein, 15 aa, Homo sapiens
  CDR3 for beta chain variable domain of TCR clone 241387 (TRBV10-2, TRBJ1-4)
CASTPIDRGNEKLFF

SEQ ID NO: 482775 - protein, 12 aa, Homo sapiens
  CDR3 for alpha chain variable domain of TCR clone 241388 (TRAV2, TRAJ31)
CAVEDNNARLMF

SEQ ID NO: 482776 - protein, 14 aa, Homo sapiens
  CDR3 for beta chain variable domain of TCR clone 241388 (TRBV7-8, TRBJ2-3)
CASSLEAGTDTQYF

SEQ ID NO: 482777 - protein, 16 aa, Homo sapiens
  CDR3 for alpha chain variable domain of TCR clone 241389 (TRAV30, TRAJ24)
CGTEIVDADSWGKVQF

SEQ ID NO: 482778 - protein, 11 aa, Homo sapiens
  CDR3 for beta chain variable domain of TCR clone 241389 (TRBV29-1, TRBJ2-5)
CSEDRTGTQYF

SEQ ID NO: 482779 - protein, 14 aa, Homo sapiens
  CDR3 for alpha chain variable domain of TCR clone 241390 (TRAV3, TRAJ17)
CAVRDAAAVNKLTF

SEQ ID NO: 482780 - protein, 15 aa, Homo sapiens
  CDR3 for beta chain variable domain of TCR clone 241390 (TRBV9, TRBJ1-6)
CASSVAGTGDSPLHF

SEQ ID NO: 482781 - protein, 14 aa, Homo sapiens
  CDR3 for alpha chain variable domain of TCR clone 241391 (TRAV1-2, TRAJ13)
CAVKHSGGYQKVTF

SEQ ID NO: 482782 - protein, 15 aa, Homo sapiens
  CDR3 for beta chain variable domain of TCR clone 241391 (TRBV7-3, TRBJ1-5)
CASSQGHQPNQPQHF

SEQ ID NO: 482783 - protein, 15 aa, Homo sapiens
  CDR3 for alpha chain variable domain of TCR clone 241392 (TRAV9-2, TRAJ56)
CALSDVDGANSKLTF

SEQ ID NO: 482784 - protein, 11 aa, Homo sapiens
  CDR3 for beta chain variable domain of TCR clone 241392 (TRBV11-2, TRBJ2-2)
CASSLPGELFF

SEQ ID NO: 482785 - protein, 14 aa, Homo sapiens
  CDR3 for alpha chain variable domain of TCR clone 241393 (TRAV13-2, TRAJ32)
CAENHGGATNKLIF

SEQ ID NO: 482786 - protein, 13 aa, Homo sapiens
  CDR3 for beta chain variable domain of TCR clone 241393 (TRBV4-1, TRBJ1-1)
CASSRKMNTEAFF

SEQ ID NO: 482787 - protein, 15 aa, Homo sapiens
  CDR3 for alpha chain variable domain of TCR clone 241394 (TRAV21, TRAJ53)
CATLNSGGSNYKLTF

SEQ ID NO: 482788 - protein, 15 aa, Homo sapiens
  CDR3 for beta chain variable domain of TCR clone 241394 (TRBV7-2, TRBJ2-3)
CASTPTSGETDTQYF

SEQ ID NO: 482789 - protein, 13 aa, Homo sapiens
  CDR3 for alpha chain variable domain of TCR clone 241395 (TRAV20, TRAJ37)
CAGCSSNTGKLIF

SEQ ID NO: 482790 - protein, 14 aa, Homo sapiens
  CDR3 for beta chain variable domain of TCR clone 241395 (TRBV20-1, TRBJ2-5)
CSARDGRAGETQYI

SEQ ID NO: 482791 - protein, 14 aa, Homo sapiens
  CDR3 for alpha chain variable domain of TCR clone 241396 (TRAV17, TRAJ45)
CATDGSGGADGLTF

SEQ ID NO: 482792 - protein, 12 aa, Homo sapiens
  CDR3 for beta chain variable domain of TCR clone 241396 (TRBV11-2, TRBJ2-2)
CASSLGGGELFF

SEQ ID NO: 482793 - protein, 11 aa, Homo sapiens
  CDR3 for alpha chain variable domain of TCR clone 241397 (TRAV12-3, TRAJ27)
CAMANAGKSTF

SEQ ID NO: 482794 - protein, 15 aa, Homo sapiens
  CDR3 for beta chain variable domain of TCR clone 241397 (TRBV4-1, TRBJ2-5)
CASSQWDLYQETQYF

SEQ ID NO: 482795 - protein, 17 aa, Homo sapiens
  CDR3 for alpha chain variable domain of TCR clone 241398 (TRAV3, TRAJ42)
CAVRDRDYGGSQGNLIF

SEQ ID NO: 482796 - protein, 14 aa, Homo sapiens
  CDR3 for beta chain variable domain of TCR clone 241398 (TRBV7-2, TRBJ2-7)
CVSRSQGAAYEQHF

SEQ ID NO: 482797 - protein, 14 aa, Homo sapiens
  CDR3 for alpha chain variable domain of TCR clone 241399 (TRAV26-1, TRAJ34)
CIVRVAYNTDKLIF

SEQ ID NO: 482798 - protein, 10 aa, Homo sapiens
  CDR3 for beta chain variable domain of TCR clone 241399 (TRBV20-1, TRBJ2-7)
CSARVPAAYF

SEQ ID NO: 482799 - protein, 12 aa, Homo sapiens
  CDR3 for alpha chain variable domain of TCR clone 241400 (TRAV2, TRAJ33)
CPVPDSNYQLIW

SEQ ID NO: 482800 - protein, 15 aa, Homo sapiens
  CDR3 for beta chain variable domain of TCR clone 241400 (TRBV15, TRBJ1-5)
CATSRDPVSNQPQHF

SEQ ID NO: 482801 - protein, 14 aa, Homo sapiens
  CDR3 for alpha chain variable domain of TCR clone 241401 (TRAV26-1, TRAJ22)
CIVRVYGSASQLTF

SEQ ID NO: 482802 - protein, 17 aa, Homo sapiens
  CDR3 for beta chain variable domain of TCR clone 241401 (TRBV7-3, TRBJ2-3)
CASSPGGLAGVGDTQYF

SEQ ID NO: 482803 - protein, 14 aa, Homo sapiens
  CDR3 for alpha chain variable domain of TCR clone 241402 (TRAV8-2, TRAJ11)
CVVSEKSGYITLTF

SEQ ID NO: 482804 - protein, 13 aa, Homo sapiens
  CDR3 for beta chain variable domain of TCR clone 241402 (TRBV27, TRBJ2-3)
CASSWGRTDTQYF

SEQ ID NO: 482805 - protein, 10 aa, Homo sapiens
  CDR3 for alpha chain variable domain of TCR clone 241403 (TRAV8-3, TRAJ27)
CAVGPYKTNA

SEQ ID NO: 482806 - protein, 15 aa, Homo sapiens
  CDR3 for beta chain variable domain of TCR clone 241403 (TRBV7-2, TRBJ2-1)
CASSSGLAGGNEQFF

SEQ ID NO: 482807 - protein, 11 aa, Homo sapiens
  CDR3 for alpha chain variable domain of TCR clone 241404 (TRAV13-1, TRAJ15)
CAATPGTALIF

SEQ ID NO: 482808 - protein, 17 aa, Homo sapiens
  CDR3 for beta chain variable domain of TCR clone 241404 (TRBV13, TRBJ2-3)
CACSLSRVAGGRNTQYF

SEQ ID NO: 482809 - protein, 18 aa, Homo sapiens
  CDR3 for alpha chain variable domain of TCR clone 241405 (TRAV21, TRAJ52)
CAVRPSPAGGTSYGKLTF

SEQ ID NO: 482810 - protein, 15 aa, Homo sapiens
  CDR3 for beta chain variable domain of TCR clone 241405 (TRBV20-1, TRBJ2-5)
CSARDRVSGMDEQYF

SEQ ID NO: 482811 - protein, 13 aa, Homo sapiens
  CDR3 for alpha chain variable domain of TCR clone 241406 (TRAV35, TRAJ53)
CAGQESSNYKLTF

SEQ ID NO: 482812 - protein, 11 aa, Homo sapiens
  CDR3 for beta chain variable domain of TCR clone 241406 (TRBV29-1, TRBJ2-5)
CSEDRTGNQYF

SEQ ID NO: 482813 - protein, 18 aa, Homo sapiens
  CDR3 for alpha chain variable domain of TCR clone 241407 (TRAV12-2, )
CAVEDIQNPDPAVYQLID

SEQ ID NO: 482814 - protein, 11 aa, Homo sapiens
  CDR3 for beta chain variable domain of TCR clone 241407 (TRBV25-1, TRBJ2-1)
CATTRISEQFF

SEQ ID NO: 482815 - protein, 12 aa, Homo sapiens
  CDR3 for alpha chain variable domain of TCR clone 241408 (TRAV16, TRAJ15)
CALKPGRNCSDL

SEQ ID NO: 482816 - protein, 13 aa, Homo sapiens
  CDR3 for beta chain variable domain of TCR clone 241408 (TRBV7-9, TRBJ1-2)
CASSLKQNYGYTF

SEQ ID NO: 482817 - protein, 12 aa, Homo sapiens
  CDR3 for alpha chain variable domain of TCR clone 241409 (TRAV8-3, TRAJ20)
CAVGGGDYKLSS

SEQ ID NO: 482818 - protein, 14 aa, Homo sapiens
  CDR3 for beta chain variable domain of TCR clone 241409 (TRBV5-1, TRBJ2-7)
CASSRGESLYEQYF

SEQ ID NO: 482819 - protein, 16 aa, Homo sapiens
  CDR3 for alpha chain variable domain of TCR clone 241410 (TRAV8-4, TRAJ52)
CAAANAGGTSYGKLTF

SEQ ID NO: 482820 - protein, 15 aa, Homo sapiens
  CDR3 for beta chain variable domain of TCR clone 241410 (TRBV6-3, TRBJ2-7)
CASSSPGTVFYEQYS

SEQ ID NO: 482821 - protein, 18 aa, Homo sapiens
  CDR3 for alpha chain variable domain of TCR clone 241411 (TRAV9-2, TRAJ52)
CALSRPNAGGTSYGKLTF

SEQ ID NO: 482822 - protein, 13 aa, Homo sapiens
  CDR3 for beta chain variable domain of TCR clone 241411 (TRBV7-9, TRBJ1-2)
CASSVKQNYGYTF

SEQ ID NO: 482823 - protein, 13 aa, Homo sapiens
  CDR3 for alpha chain variable domain of TCR clone 241412 (TRAV21, TRAJ27)
CAARPGNAGKSTF

SEQ ID NO: 482824 - protein, 12 aa, Homo sapiens
  CDR3 for beta chain variable domain of TCR clone 241412 (TRBV6-1, TRBJ2-7)
CASSEPLYEQYF

SEQ ID NO: 482825 - protein, 14 aa, Homo sapiens
  CDR3 for alpha chain variable domain of TCR clone 241413 (TRAV23/DV6, TRAJ13)
CAAMYSGGYQKVTF

SEQ ID NO: 482826 - protein, 13 aa, Homo sapiens
  CDR3 for beta chain variable domain of TCR clone 241413 (TRBV7-9, TRBJ2-7)
CASSPNPDLGQYF

SEQ ID NO: 482827 - protein, 10 aa, Homo sapiens
  CDR3 for alpha chain variable domain of TCR clone 241414 (TRAV36/DV7, TRAJ48)
CAVGNEKLTF

SEQ ID NO: 482828 - protein, 19 aa, Homo sapiens
  CDR3 for beta chain variable domain of TCR clone 241414 (TRBV2, TRBJ2-2)
CASSQPGLAGGGNTGELFF

SEQ ID NO: 482829 - protein, 13 aa, Homo sapiens
  CDR3 for alpha chain variable domain of TCR clone 241415 (TRAV20, TRAJ34)
CAVRSYNTDKPIF

SEQ ID NO: 482830 - protein, 11 aa, Homo sapiens
  CDR3 for beta chain variable domain of TCR clone 241415 (TRBV29-1, TRBJ2-5)
CSEDRTGTQYF

SEQ ID NO: 482831 - protein, 22 aa, Homo sapiens
  CDR3 for alpha chain variable domain of TCR clone 241416 (TRAV1-2, TRAJ10)
CAVRVGTHGRRKQTHLWDRHSA

SEQ ID NO: 482832 - protein, 15 aa, Homo sapiens
  CDR3 for beta chain variable domain of TCR clone 241416 (TRBV6-3, TRBJ2-7)
CASSSPGTVFYEQYF

SEQ ID NO: 482833 - protein, 15 aa, Homo sapiens
  CDR3 for alpha chain variable domain of TCR clone 241417 (TRAV8-4, TRAJ3)
CAVTGENLVQQCFQD

SEQ ID NO: 482834 - protein, 12 aa, Homo sapiens
  CDR3 for beta chain variable domain of TCR clone 241417 (TRBV5-1, TRBJ2-7)
CASSLDSYEQYF

SEQ ID NO: 482835 - protein, 12 aa, Homo sapiens
  CDR3 for alpha chain variable domain of TCR clone 241418 (TRAV12-2, TRAJ21)
CAVRYNFNKFYF

SEQ ID NO: 482836 - protein, 14 aa, Homo sapiens
  CDR3 for beta chain variable domain of TCR clone 241418 (TRBV28, TRBJ2-1)
CASSYSTAYNEQFF

SEQ ID NO: 482837 - protein, 14 aa, Homo sapiens
  CDR3 for alpha chain variable domain of TCR clone 241419 (TRAV17, TRAJ37)
CATDGSSNTRKLVF

SEQ ID NO: 482838 - protein, 13 aa, Homo sapiens
  CDR3 for beta chain variable domain of TCR clone 241419 (TRBV11-2, TRBJ2-1)
CASSLDLVNEQFF

SEQ ID NO: 482839 - protein, 17 aa, Homo sapiens
  CDR3 for alpha chain variable domain of TCR clone 241420 (TRAV23/DV6, TRAJ13)
CAAWPGEGVTRKLPLEL

SEQ ID NO: 482840 - protein, 17 aa, Homo sapiens
  CDR3 for beta chain variable domain of TCR clone 241420 (TRBV19, TRBJ2-7)
CASSISFYDSYPYEQYF

SEQ ID NO: 482841 - protein, 15 aa, Homo sapiens
  CDR3 for alpha chain variable domain of TCR clone 241421 (TRAV20, TRAJ53)
CAVQASGGSNYKLPF

SEQ ID NO: 482842 - protein, 12 aa, Homo sapiens
  CDR3 for beta chain variable domain of TCR clone 241421 (TRBV7-2, TRBJ2-1)
CASSPQDIEQFF

SEQ ID NO: 482843 - protein, 14 aa, Homo sapiens
  CDR3 for alpha chain variable domain of TCR clone 241422 (TRAV8-4, TRAJ47)
YAVSIMEYGNKLVF

SEQ ID NO: 482844 - protein, 16 aa, Homo sapiens
  CDR3 for beta chain variable domain of TCR clone 241422 (TRBV14, TRBJ1-2)
CASSQGPTTANYGYTF

SEQ ID NO: 482845 - protein, 14 aa, Homo sapiens
  CDR3 for alpha chain variable domain of TCR clone 241423 (TRAV14/DV4, TRAJ15)
CAMRRDQAGTALIV

SEQ ID NO: 482846 - protein, 16 aa, Homo sapiens
  CDR3 for beta chain variable domain of TCR clone 241423 (TRBV15, TRBJ2-3)
CATSSDLGIVTDTQYF

SEQ ID NO: 482847 - protein, 12 aa, Homo sapiens
  CDR3 for alpha chain variable domain of TCR clone 241424 (TRAV17, TRAJ20)
CATDSNDYKLSF

SEQ ID NO: 482848 - protein, 12 aa, Homo sapiens
  CDR3 for beta chain variable domain of TCR clone 241424 (TRBV28, TRBJ2-3)
CASSLYRDTQYF

SEQ ID NO: 482849 - protein, 14 aa, Homo sapiens
  CDR3 for alpha chain variable domain of TCR clone 241425 (TRAV12-2, TRAJ40)
CAVKIPSGTCKYIF

SEQ ID NO: 482850 - protein, 20 aa, Homo sapiens
  CDR3 for beta chain variable domain of TCR clone 241425 (TRBV28, TRBJ2-1)
CASTPIGRSPGLAGGNEQFF

SEQ ID NO: 482851 - protein, 14 aa, Homo sapiens
  CDR3 for alpha chain variable domain of TCR clone 241426 (TRAV26-2, TRAJ22)
CILSFSGSARQLTF

SEQ ID NO: 482852 - protein, 15 aa, Homo sapiens
  CDR3 for beta chain variable domain of TCR clone 241426 (TRBV7-8, TRBJ2-1)
CASSLHGGPYNEQFF

SEQ ID NO: 482853 - protein, 14 aa, Homo sapiens
  CDR3 for alpha chain variable domain of TCR clone 241427 (TRAV26-1, TRAJ38)
CIAANAGNNRKLIW

SEQ ID NO: 482854 - protein, 12 aa, Homo sapiens
  CDR3 for beta chain variable domain of TCR clone 241427 (TRBV11-2, TRBJ2-2)
CASSLGGGELFF

SEQ ID NO: 482855 - protein, 17 aa, Homo sapiens
  CDR3 for alpha chain variable domain of TCR clone 241428 (TRAV8-1, TRAJ42)
CAVKWGNYGGSQGHLIF

SEQ ID NO: 482856 - protein, 15 aa, Homo sapiens
  CDR3 for beta chain variable domain of TCR clone 241428 (TRBV9, TRBJ1-6)
CASSVAGTGDSPLHF

SEQ ID NO: 482857 - protein, 11 aa, Homo sapiens
  CDR3 for alpha chain variable domain of TCR clone 241429 (TRAV2, TRAJ13)
CASGGYQKVTF

SEQ ID NO: 482858 - protein, 15 aa, Homo sapiens
  CDR3 for beta chain variable domain of TCR clone 241429 (TRBV7-9, TRBJ2-2)
CASGPLDTFPGELFF

SEQ ID NO: 482859 - protein, 16 aa, Homo sapiens
  CDR3 for alpha chain variable domain of TCR clone 241430 (TRAV12-3, TRAJ53)
CAMSPGSGGSNYKLTF

SEQ ID NO: 482860 - protein, 20 aa, Homo sapiens
  CDR3 for beta chain variable domain of TCR clone 241430 (TRBV7-8, TRBJ2-2)
CASSHLFPGPTNHITGELFF

SEQ ID NO: 482861 - protein, 14 aa, Homo sapiens
  CDR3 for alpha chain variable domain of TCR clone 241431 (TRAV12-2, TRAJ40)
CAVRIPSGTCKYIF

SEQ ID NO: 482862 - protein, 14 aa, Homo sapiens
  CDR3 for beta chain variable domain of TCR clone 241431 (TRBV20-1, TRBJ1-1)
CSAQTRIGGTEAFF

SEQ ID NO: 482863 - protein, 14 aa, Homo sapiens
  CDR3 for alpha chain variable domain of TCR clone 241432 (TRAV26-1, TRAJ21)
CIVRPPYNFIKFYF

SEQ ID NO: 482864 - protein, 14 aa, Homo sapiens
  CDR3 for beta chain variable domain of TCR clone 241432 (TRBV11-3, TRBJ2-1)
CASSATTSGSIQFF

SEQ ID NO: 482865 - protein, 12 aa, Homo sapiens
  CDR3 for alpha chain variable domain of TCR clone 241433 (TRAV12-1, TRAJ40)
CVVNGETYKYIF

SEQ ID NO: 482866 - protein, 14 aa, Homo sapiens
  CDR3 for beta chain variable domain of TCR clone 241433 (TRBV7-9, TRBJ1-1)
CASSCTKGNTEAFF

SEQ ID NO: 482867 - protein, 15 aa, Homo sapiens
  CDR3 for alpha chain variable domain of TCR clone 241434 (TRAV3, TRAJ5)
CPVRDLDTGRRALTF

SEQ ID NO: 482868 - protein, 15 aa, Homo sapiens
  CDR3 for beta chain variable domain of TCR clone 241434 (TRBV20-1, TRBJ2-1)
CSARSPGGPGNEQFF

SEQ ID NO: 482869 - protein, 15 aa, Homo sapiens
  CDR3 for alpha chain variable domain of TCR clone 241435 (TRAV41, TRAJ45)
CAASYSGGGADGLTF

SEQ ID NO: 482870 - protein, 14 aa, Homo sapiens
  CDR3 for beta chain variable domain of TCR clone 241435 (TRBV12-5, TRBJ2-5)
CASGARTHQETQYF

SEQ ID NO: 482871 - protein, 15 aa, Homo sapiens
  CDR3 for alpha chain variable domain of TCR clone 241436 (TRAV3, TRAJ29)
CAVRPGNSGNTPLVF

SEQ ID NO: 482872 - protein, 16 aa, Homo sapiens
  CDR3 for beta chain variable domain of TCR clone 241436 (TRBV24-1, TRBJ2-2)
CATSDPGTANTGELFF

SEQ ID NO: 482873 - protein, 15 aa, Homo sapiens
  CDR3 for alpha chain variable domain of TCR clone 241437 (TRAV13-2, TRAJ37)
CREYEDPGNTGKLIF

SEQ ID NO: 482874 - protein, 13 aa, Homo sapiens
  CDR3 for beta chain variable domain of TCR clone 241437 (TRBV20-1, TRBJ2-7)
CSARAGHPYEQYF

SEQ ID NO: 482875 - protein, 13 aa, Homo sapiens
  CDR3 for alpha chain variable domain of TCR clone 241438 (TRAV12-1, TRAJ31)
CVVNMNNNARLMF

SEQ ID NO: 482876 - protein, 16 aa, Homo sapiens
  CDR3 for beta chain variable domain of TCR clone 241438 (TRBV7-3, TRBJ2-2)
CASSLKRGTLSGELFF

SEQ ID NO: 482877 - protein, 15 aa, Homo sapiens
  CDR3 for alpha chain variable domain of TCR clone 241439 (TRAV12-3, TRAJ11)
CAMSEESSGYSTLTF

SEQ ID NO: 482878 - protein, 14 aa, Homo sapiens
  CDR3 for beta chain variable domain of TCR clone 241439 (TRBV25-1, TRBJ1-1)
CASTHLGGNTEAFF

SEQ ID NO: 482879 - protein, 12 aa, Homo sapiens
  CDR3 for alpha chain variable domain of TCR clone 241440 (TRAV13-1, TRAJ21)
GAAKEGFNKFYF

SEQ ID NO: 482880 - protein, 20 aa, Homo sapiens
  CDR3 for beta chain variable domain of TCR clone 241440 (TRBV28, TRBJ2-1)
CASTPIGRSPGLAGGNEQFF

SEQ ID NO: 482881 - protein, 13 aa, Homo sapiens
  CDR3 for alpha chain variable domain of TCR clone 241441 (TRAV21, TRAJ27)
CAARPGNGGKSTF

SEQ ID NO: 482882 - protein, 14 aa, Homo sapiens
  CDR3 for beta chain variable domain of TCR clone 241441 (TRBV11-2, TRBJ2-7)
CASSLGAGAYEQYF

SEQ ID NO: 482883 - protein, 15 aa, Homo sapiens
  CDR3 for alpha chain variable domain of TCR clone 241442 (TRAV21, TRAJ53)
CATLNSGGSHYKLTF

SEQ ID NO: 482884 - protein, 15 aa, Homo sapiens
  CDR3 for beta chain variable domain of TCR clone 241442 (TRBV27, TRBJ2-1)
CASSNGGGSSNEQFF

SEQ ID NO: 482885 - protein, 13 aa, Homo sapiens
  CDR3 for alpha chain variable domain of TCR clone 241443 (TRAV36/DV7, TRAJ37)
CALFSSNTGKLIF

SEQ ID NO: 482886 - protein, 12 aa, Homo sapiens
  CDR3 for beta chain variable domain of TCR clone 241443 (TRBV11-2, TRBJ2-2)
CASSLGGGELFF

SEQ ID NO: 482887 - protein, 15 aa, Homo sapiens
  CDR3 for alpha chain variable domain of TCR clone 241444 (TRAV4, TRAJ26)
CLVGDMNNYGQNFVF

SEQ ID NO: 482888 - protein, 16 aa, Homo sapiens
  CDR3 for beta chain variable domain of TCR clone 241444 (TRBV12-5, TRBJ2-5)
YASGPRTSGNQETQYF

SEQ ID NO: 482889 - protein, 13 aa, Homo sapiens
  CDR3 for alpha chain variable domain of TCR clone 241445 (TRAV21, TRAJ27)
CAARPGNAGKSTF

SEQ ID NO: 482890 - protein, 14 aa, Homo sapiens
  CDR3 for beta chain variable domain of TCR clone 241445 (TRBV7-6, TRBJ2-3)
CASSLETVTDTQYC

SEQ ID NO: 482891 - protein, 15 aa, Homo sapiens
  CDR3 for alpha chain variable domain of TCR clone 241446 (TRAV17, TRAJ57)
CATGPSQGGSEKLVF

SEQ ID NO: 482892 - protein, 15 aa, Homo sapiens
  CDR3 for beta chain variable domain of TCR clone 241446 (TRBV12-4, TRBJ2-1)
CASSLRATGNNEQFF

SEQ ID NO: 482893 - protein, 16 aa, Homo sapiens
  CDR3 for alpha chain variable domain of TCR clone 241447 (TRAV38-1, TRAJ37)
SAFKGDGSSNTGKLIF

SEQ ID NO: 482894 - protein, 13 aa, Homo sapiens
  CDR3 for beta chain variable domain of TCR clone 241447 (TRBV12-4, TRBJ2-5)
CASSLFRRETQYF

SEQ ID NO: 482895 - protein, 13 aa, Homo sapiens
  CDR3 for alpha chain variable domain of TCR clone 241448 (TRAV3, TRAJ27)
CAVRPLGAGKSTF

SEQ ID NO: 482896 - protein, 14 aa, Homo sapiens
  CDR3 for beta chain variable domain of TCR clone 241448 (TRBV7-2, TRBJ2-7)
CASSSISGFSEQYF

SEQ ID NO: 482897 - protein, 13 aa, Homo sapiens
  CDR3 for alpha chain variable domain of TCR clone 241449 (TRAV13-2, TRAJ48)
CAEMDFGNEKLTF

SEQ ID NO: 482898 - protein, 15 aa, Homo sapiens
  CDR3 for beta chain variable domain of TCR clone 241449 (TRBV4-3, TRBJ2-3)
CASSLGTRSSDTQYF

SEQ ID NO: 482899 - protein, 12 aa, Homo sapiens
  CDR3 for alpha chain variable domain of TCR clone 241450 (TRAV12-3, TRAJ17)
CAMTLTGNKLTF

SEQ ID NO: 482900 - protein, 15 aa, Homo sapiens
  CDR3 for beta chain variable domain of TCR clone 241450 (TRBV12-4, TRBJ2-5)
CASSPPTGLQETQSF

SEQ ID NO: 482901 - protein, 18 aa, Homo sapiens
  CDR3 for alpha chain variable domain of TCR clone 241451 (TRAV1-2, TRAJ18)
CAVRDMGDRGSTLGRLFF

SEQ ID NO: 482902 - protein, 16 aa, Homo sapiens
  CDR3 for beta chain variable domain of TCR clone 241451 (TRBV29-1, TRBJ1-2)
CSVEANRNIANYGYTF

SEQ ID NO: 482903 - protein, 13 aa, Homo sapiens
  CDR3 for alpha chain variable domain of TCR clone 241452 (TRAV38-2/DV8, TRAJ34)
CDYRTWNTDKLIF

SEQ ID NO: 482904 - protein, 18 aa, Homo sapiens
  CDR3 for beta chain variable domain of TCR clone 241452 (TRBV6-6, TRBJ1-3)
CASSYSKWDSISGNTIYF

SEQ ID NO: 482905 - protein, 15 aa, Homo sapiens
  CDR3 for alpha chain variable domain of TCR clone 241453 (TRAV12-3, TRAJ6)
CAMSPASGGSYIPTF

SEQ ID NO: 482906 - protein, 15 aa, Homo sapiens
  CDR3 for beta chain variable domain of TCR clone 241453 (TRBV5-1, TRBJ2-7)
CASSLDLTSSYEQYF

SEQ ID NO: 482907 - protein, 13 aa, Homo sapiens
  CDR3 for alpha chain variable domain of TCR clone 241454 (TRAV20, TRAJ20)
CAVRWVRDYKLSL

SEQ ID NO: 482908 - protein, 14 aa, Homo sapiens
  CDR3 for beta chain variable domain of TCR clone 241454 (TRBV19, TRBJ2-2)
CASTVTANTGELFF

SEQ ID NO: 482909 - protein, 14 aa, Homo sapiens
  CDR3 for alpha chain variable domain of TCR clone 241455 (TRAV27, TRAJ22)
CAGLPSGSARQLTF

SEQ ID NO: 482910 - protein, 14 aa, Homo sapiens
  CDR3 for beta chain variable domain of TCR clone 241455 (TRBV11-2, TRBJ2-7)
CASSRSGGAGEQYF

SEQ ID NO: 482911 - protein, 17 aa, Homo sapiens
  CDR3 for alpha chain variable domain of TCR clone 241456 (TRAV4, TRAJ13)
CIVGVQVSSGGYQKVTF

SEQ ID NO: 482912 - protein, 18 aa, Homo sapiens
  CDR3 for beta chain variable domain of TCR clone 241456 (TRBV15, TRBJ2-3)
CATSRDGARSWDTDTQYF

SEQ ID NO: 482913 - protein, 14 aa, Homo sapiens
  CDR3 for alpha chain variable domain of TCR clone 241457 (TRAV1-2, TRAJ16)
CAVNRFSDGQKMLF

SEQ ID NO: 482914 - protein, 14 aa, Homo sapiens
  CDR3 for beta chain variable domain of TCR clone 241457 (TRBV7-8, TRBJ2-3)
CASSFRSSTDTQYF

SEQ ID NO: 482915 - protein, 14 aa, Homo sapiens
  CDR3 for alpha chain variable domain of TCR clone 241458 (TRAV17, TRAJ57)
CSTDPQGGSEKLVF

SEQ ID NO: 482916 - protein, 16 aa, Homo sapiens
  CDR3 for beta chain variable domain of TCR clone 241458 (TRBV13, TRBJ2-2)
CASSPRTGEHTGELFF

SEQ ID NO: 482917 - protein, 14 aa, Homo sapiens
  CDR3 for alpha chain variable domain of TCR clone 241459 (TRAV35, TRAJ33)
CAGLSQDSNYQLIW

SEQ ID NO: 482918 - protein, 12 aa, Homo sapiens
  CDR3 for beta chain variable domain of TCR clone 241459 (TRBV12-5, TRBJ2-5)
CASGQGVETQYF

SEQ ID NO: 482919 - protein, 12 aa, Homo sapiens
  CDR3 for alpha chain variable domain of TCR clone 241460 (TRAV8-3, TRAJ4)
WVGSGGYHKLIF

SEQ ID NO: 482920 - protein, 16 aa, Homo sapiens
  CDR3 for beta chain variable domain of TCR clone 241460 (TRBV4-1, TRBJ1-5)
CASSQGGHTTNQPQHF

SEQ ID NO: 482921 - protein, 18 aa, Homo sapiens
  CDR3 for alpha chain variable domain of TCR clone 241461 (TRAV20, TRAJ4)
CAVQPYYMFSCGYNKLIF

SEQ ID NO: 482922 - protein, 13 aa, Homo sapiens
  CDR3 for beta chain variable domain of TCR clone 241461 (TRBV19, TRBJ2-3)
CATWDKITDTQYF

SEQ ID NO: 482923 - protein, 14 aa, Homo sapiens
  CDR3 for alpha chain variable domain of TCR clone 241462 (TRAV12-1, TRAJ46)
CVVTAKSSGDKLTF

SEQ ID NO: 482924 - protein, 17 aa, Homo sapiens
  CDR3 for beta chain variable domain of TCR clone 241462 (TRBV4-1, TRBJ2-3)
CASSQAPAGGPLDTQYF

SEQ ID NO: 482925 - protein, 12 aa, Homo sapiens
  CDR3 for alpha chain variable domain of TCR clone 241463 (TRAV35, TRAJ12)
CAGIDSSYKLIF

SEQ ID NO: 482926 - protein, 14 aa, Homo sapiens
  CDR3 for beta chain variable domain of TCR clone 241463 (TRBV28, TRBJ2-5)
CASSLYRGTETQYF

SEQ ID NO: 482927 - protein, 15 aa, Homo sapiens
  CDR3 for alpha chain variable domain of TCR clone 241464 (TRAV3, TRAJ13)
CAVRDIGGGYPKVTF

SEQ ID NO: 482928 - protein, 12 aa, Homo sapiens
  CDR3 for beta chain variable domain of TCR clone 241464 (TRBV7-3, TRBJ2-1)
CASSFQSGPQFF

SEQ ID NO: 482929 - protein, 14 aa, Homo sapiens
  CDR3 for alpha chain variable domain of TCR clone 241465 (TRAV12-3, TRAJ10)
SHLPLTGGGNKLTF

SEQ ID NO: 482930 - protein, 15 aa, Homo sapiens
  CDR3 for beta chain variable domain of TCR clone 241465 (TRBV7-9, TRBJ1-4)
CASSLTGGFNEKLFF

SEQ ID NO: 482931 - protein, 14 aa, Homo sapiens
  CDR3 for alpha chain variable domain of TCR clone 241466 (TRAV3, TRAJ7)
CAVREEEREQRTRF

SEQ ID NO: 482932 - protein, 14 aa, Homo sapiens
  CDR3 for beta chain variable domain of TCR clone 241466 (TRBV7-7, TRBJ2-2)
CASSTRASGGELFF

SEQ ID NO: 482933 - protein, 15 aa, Homo sapiens
  CDR3 for alpha chain variable domain of TCR clone 241467 (TRAV3, TRAJ45)
CAVRTPWGGADGLTF

SEQ ID NO: 482934 - protein, 15 aa, Homo sapiens
  CDR3 for beta chain variable domain of TCR clone 241467 (TRBV7-2, TRBJ2-5)
CASSGILAGAETQYF

SEQ ID NO: 482935 - protein, 11 aa, Homo sapiens
  CDR3 for alpha chain variable domain of TCR clone 241468 (TRAV12-3, TRAJ34)
CVVNKGRELIF

SEQ ID NO: 482936 - protein, 15 aa, Homo sapiens
  CDR3 for beta chain variable domain of TCR clone 241468 (TRBV7-2, TRBJ1-2)
CASSLVSGGDYGDTF

SEQ ID NO: 482937 - protein, 17 aa, Homo sapiens
  CDR3 for alpha chain variable domain of TCR clone 241469 (TRAV3, TRAJ42)
CAVRDRDYGGSQGNLIF

SEQ ID NO: 482938 - protein, 15 aa, Homo sapiens
  CDR3 for beta chain variable domain of TCR clone 241469 (TRBV6-6, TRBJ2-7)
CASSYSYGGSYEQSF

SEQ ID NO: 482939 - protein, 14 aa, Homo sapiens
  CDR3 for alpha chain variable domain of TCR clone 241470 (TRAV2, TRAJ9)
CAVEDRSGGFKTIF

SEQ ID NO: 482940 - protein, 12 aa, Homo sapiens
  CDR3 for beta chain variable domain of TCR clone 241470 (TRBV29-1, TRBJ2-3)
CSVTGGADTQYF

SEQ ID NO: 482941 - protein, 11 aa, Homo sapiens
  CDR3 for alpha chain variable domain of TCR clone 241471 (TRAV3, TRAJ17)
CAEAAGIKLTF

SEQ ID NO: 482942 - protein, 15 aa, Homo sapiens
  CDR3 for beta chain variable domain of TCR clone 241471 (TRBV12-4, TRBJ2-7)
CASSLGSGGPYEQYF

SEQ ID NO: 482943 - protein, 16 aa, Homo sapiens
  CDR3 for alpha chain variable domain of TCR clone 241472 (TRAV8-1, TRAJ39)
CAVNAPSYNAGNMLTF

SEQ ID NO: 482944 - protein, 15 aa, Homo sapiens
  CDR3 for beta chain variable domain of TCR clone 241472 (TRBV4-1, TRBJ2-3)
CASRSTRAGADTQYF

SEQ ID NO: 482945 - protein, 14 aa, Homo sapiens
  CDR3 for alpha chain variable domain of TCR clone 241473 (TRAV25, TRAJ6)
SAGRESGGSYIPTF

SEQ ID NO: 482946 - protein, 14 aa, Homo sapiens
  CDR3 for beta chain variable domain of TCR clone 241473 (TRBV10-2, TRBJ1-5)
CASSPTGRNQPQHF

SEQ ID NO: 482947 - protein, 18 aa, Homo sapiens
  CDR3 for alpha chain variable domain of TCR clone 241474 (TRAV12-3, TRAJ52)
CSMSRTNAGGTSYGKLTF

SEQ ID NO: 482948 - protein, 17 aa, Homo sapiens
  CDR3 for beta chain variable domain of TCR clone 241474 (TRBV13, TRBJ2-3)
CASSLSRVAGGRNTQYF

SEQ ID NO: 482949 - protein, 12 aa, Homo sapiens
  CDR3 for alpha chain variable domain of TCR clone 241475 (TRAV3, TRAJ20)
CAVRDPDYKLSF

SEQ ID NO: 482950 - protein, 14 aa, Homo sapiens
  CDR3 for beta chain variable domain of TCR clone 241475 (TRBV5-1, TRBJ2-7)
CASSRGESLYEQYF

SEQ ID NO: 482951 - protein, 17 aa, Homo sapiens
  CDR3 for alpha chain variable domain of TCR clone 241476 (TRAV1-1, TRAJ32)
CAVRVDELWWCYKQAHL

SEQ ID NO: 482952 - protein, 16 aa, Homo sapiens
  CDR3 for beta chain variable domain of TCR clone 241476 (TRBV12-5, TRBJ2-5)
CASGPRTSGNQGTQYF

SEQ ID NO: 482953 - protein, 11 aa, Homo sapiens
  CDR3 for alpha chain variable domain of TCR clone 241477 (TRAV12-2, TRAJ33)
CAVGSNYQLIW

SEQ ID NO: 482954 - protein, 16 aa, Homo sapiens
  CDR3 for beta chain variable domain of TCR clone 241477 (TRBV27, TRBJ2-7)
CARSSERRDSAYEQYF

SEQ ID NO: 482955 - protein, 10 aa, Homo sapiens
  CDR3 for alpha chain variable domain of TCR clone 241478 (TRAV13-1, TRAJ52)
CAAKNPILVV

SEQ ID NO: 482956 - protein, 15 aa, Homo sapiens
  CDR3 for beta chain variable domain of TCR clone 241478 (TRBV6-1, TRBJ2-3)
CASSERGGITDTQYF

SEQ ID NO: 482957 - protein, 14 aa, Homo sapiens
  CDR3 for alpha chain variable domain of TCR clone 241479 (TRAV12-3, TRAJ29)
CAMSPYSGNTPLVF

SEQ ID NO: 482958 - protein, 14 aa, Homo sapiens
  CDR3 for beta chain variable domain of TCR clone 241479 (TRBV4-1, TRBJ2-2)
CASSQAVNTGELFF

SEQ ID NO: 482959 - protein, 14 aa, Homo sapiens
  CDR3 for alpha chain variable domain of TCR clone 241480 (TRAV1-2, TRAJ8)
CAVREDTGFKKLVF

SEQ ID NO: 482960 - protein, 16 aa, Homo sapiens
  CDR3 for beta chain variable domain of TCR clone 241480 (TRBV19, TRBJ2-1)
CASSKAGPSSYNEQFF

SEQ ID NO: 482961 - protein, 16 aa, Homo sapiens
  CDR3 for alpha chain variable domain of TCR clone 241481 (TRAV4, TRAJ5)
CLVGPDHGHGQESTYF

SEQ ID NO: 482962 - protein, 15 aa, Homo sapiens
  CDR3 for beta chain variable domain of TCR clone 241481 (TRBV27, TRBJ2-5)
CASSLIPSGGETQFF

SEQ ID NO: 482963 - protein, 16 aa, Homo sapiens
  CDR3 for alpha chain variable domain of TCR clone 241482 (TRAV12-2, TRAJ52)
SRLANAGGTSYGKLTF

SEQ ID NO: 482964 - protein, 13 aa, Homo sapiens
  CDR3 for beta chain variable domain of TCR clone 241482 (TRBV10-3, TRBJ2-7)
CASKLAVNYEQYF

SEQ ID NO: 482965 - protein, 13 aa, Homo sapiens
  CDR3 for alpha chain variable domain of TCR clone 241483 (TRAV27, TRAJ42)
CAGARGSQGNLIF

SEQ ID NO: 482966 - protein, 13 aa, Homo sapiens
  CDR3 for beta chain variable domain of TCR clone 241483 (TRBV4-2, TRBJ1-1)
CASSQAGNTEAFF

SEQ ID NO: 482967 - protein, 11 aa, Homo sapiens
  CDR3 for alpha chain variable domain of TCR clone 241484 (TRAV3, TRAJ21)
CAVGNFNKFYF

SEQ ID NO: 482968 - protein, 12 aa, Homo sapiens
  CDR3 for beta chain variable domain of TCR clone 241484 (TRBV5-1, TRBJ2-7)
CASSLDETGRYF

SEQ ID NO: 482969 - protein, 16 aa, Homo sapiens
  CDR3 for alpha chain variable domain of TCR clone 241485 (TRAV27, TRAJ13)
CAGAKSDSGGYQKVTF

SEQ ID NO: 482970 - protein, 15 aa, Homo sapiens
  CDR3 for beta chain variable domain of TCR clone 241485 (TRBV29-1, TRBJ2-1)
CSVGRHALFYNEQFI

SEQ ID NO: 482971 - protein, 15 aa, Homo sapiens
  CDR3 for alpha chain variable domain of TCR clone 241486 (TRAV27, TRAJ33)
CAGAAIMDSNYQLIC

SEQ ID NO: 482972 - protein, 13 aa, Homo sapiens
  CDR3 for beta chain variable domain of TCR clone 241486 (TRBV28, TRBJ1-2)
CASSLQGRGGYTF

SEQ ID NO: 482973 - protein, 15 aa, Homo sapiens
  CDR3 for alpha chain variable domain of TCR clone 241487 (TRAV12-1, TRAJ36)
WVVNEHQTGANNLFF

SEQ ID NO: 482974 - protein, 14 aa, Homo sapiens
  CDR3 for beta chain variable domain of TCR clone 241487 (TRBV10-3, TRBJ2-5)
CAIRTSGGQETQYF

SEQ ID NO: 482975 - protein, 16 aa, Homo sapiens
  CDR3 for alpha chain variable domain of TCR clone 241488 (TRAV30, TRAJ24)
CGTELVDADSWGNFQF

SEQ ID NO: 482976 - protein, 14 aa, Homo sapiens
  CDR3 for beta chain variable domain of TCR clone 241488 (TRBV12-5, TRBJ2-5)
CASGSRTHQETQYF

SEQ ID NO: 482977 - protein, 16 aa, Homo sapiens
  CDR3 for alpha chain variable domain of TCR clone 241489 (TRAV25, TRAJ53)
CAGPKGSGGSNYKLTF

SEQ ID NO: 482978 - protein, 13 aa, Homo sapiens
  CDR3 for beta chain variable domain of TCR clone 241489 (TRBV7-3, TRBJ1-1)
CASSQDWGAEAFF

SEQ ID NO: 482979 - protein, 14 aa, Homo sapiens
  CDR3 for alpha chain variable domain of TCR clone 241490 (TRAV8-3, TRAJ4)
CAVGAAGGYNKLIF

SEQ ID NO: 482980 - protein, 15 aa, Homo sapiens
  CDR3 for beta chain variable domain of TCR clone 241490 (TRBV11-3, TRBJ2-7)
CASSSGTVPTYEQYF

SEQ ID NO: 482981 - protein, 10 aa, Homo sapiens
  CDR3 for alpha chain variable domain of TCR clone 241491 (TRAV13-1, TRAJ30)
CAARDDKIIF

SEQ ID NO: 482982 - protein, 16 aa, Homo sapiens
  CDR3 for beta chain variable domain of TCR clone 241491 (TRBV24-1, TRBJ2-3)
CATSDPGTGATDTQYF

SEQ ID NO: 482983 - protein, 13 aa, Homo sapiens
  CDR3 for alpha chain variable domain of TCR clone 241492 (TRAV16, TRAJ28)
CALTGAGSYQLTF

SEQ ID NO: 482984 - protein, 16 aa, Homo sapiens
  CDR3 for beta chain variable domain of TCR clone 241492 (TRBV28, TRBJ1-5)
CASGLTGQGWNQPQHF

SEQ ID NO: 482985 - protein, 16 aa, Homo sapiens
  CDR3 for alpha chain variable domain of TCR clone 241493 (TRAV3, TRAJ10)
CAVRDMRAGGGNKLTF

SEQ ID NO: 482986 - protein, 17 aa, Homo sapiens
  CDR3 for beta chain variable domain of TCR clone 241493 (TRBV20-1, TRBJ2-2)
CSASGSGQGGLTGGLFF

SEQ ID NO: 482987 - protein, 14 aa, Homo sapiens
  CDR3 for alpha chain variable domain of TCR clone 241494 (TRAV8-3, TRAJ9)
GAVVDNTGGFKTIF

SEQ ID NO: 482988 - protein, 14 aa, Homo sapiens
  CDR3 for beta chain variable domain of TCR clone 241494 (TRBV7-3, TRBJ2-2)
CASSSGGYTGELFF

SEQ ID NO: 482989 - protein, 11 aa, Homo sapiens
  CDR3 for alpha chain variable domain of TCR clone 241495 (TRAV23/DV6, TRAJ48)
CAPRWGETLTF

SEQ ID NO: 482990 - protein, 13 aa, Homo sapiens
  CDR3 for beta chain variable domain of TCR clone 241495 (TRBV12-4, TRBJ2-5)
CASSPGTEETQYL

SEQ ID NO: 482991 - protein, 13 aa, Homo sapiens
  CDR3 for alpha chain variable domain of TCR clone 241496 (TRAV6, TRAJ45)
SPFSGGGADGLTF

SEQ ID NO: 482992 - protein, 14 aa, Homo sapiens
  CDR3 for beta chain variable domain of TCR clone 241496 (TRBV7-2, TRBJ1-1)
CASSFLTGTTEAFF

SEQ ID NO: 482993 - protein, 16 aa, Homo sapiens
  CDR3 for alpha chain variable domain of TCR clone 241497 (TRAV30, TRAJ24)
CGTEIVDDDSWGKCQF

SEQ ID NO: 482994 - protein, 14 aa, Homo sapiens
  CDR3 for beta chain variable domain of TCR clone 241497 (TRBV12-5, TRBJ2-5)
CASGSRTHQETQYF

SEQ ID NO: 482995 - protein, 13 aa, Homo sapiens
  CDR3 for alpha chain variable domain of TCR clone 241498 (TRAV2, TRAJ5)
CAVPDTGRRALTF

SEQ ID NO: 482996 - protein, 15 aa, Homo sapiens
  CDR3 for beta chain variable domain of TCR clone 241498 (TRBV7-2, TRBJ2-2)
CASSTRRGYTGELFF

SEQ ID NO: 482997 - protein, 13 aa, Homo sapiens
  CDR3 for alpha chain variable domain of TCR clone 241499 (TRAV13-1, TRAJ53)
QAASGGSNYKLTF

SEQ ID NO: 482998 - protein, 15 aa, Homo sapiens
  CDR3 for beta chain variable domain of TCR clone 241499 (TRBV5-1, TRBJ2-1)
GASSPPRAPYNEQFF

SEQ ID NO: 482999 - protein, 12 aa, Homo sapiens
  CDR3 for alpha chain variable domain of TCR clone 241500 (TRAV27, TRAJ35)
CAGADVGNVLHC

SEQ ID NO: 483000 - protein, 16 aa, Homo sapiens
  CDR3 for beta chain variable domain of TCR clone 241500 (TRBV6-1, TRBJ2-1)
CASILRQGSSYNAQFF

SEQ ID NO: 483001 - protein, 12 aa, Homo sapiens
  CDR3 for alpha chain variable domain of TCR clone 241501 (TRAV12-3, TRAJ17)
CAMTLTGNKLTF

SEQ ID NO: 483002 - protein, 15 aa, Homo sapiens
  CDR3 for beta chain variable domain of TCR clone 241501 (TRBV5-1, TRBJ2-1)
CASTGSGRTYNEQFF

SEQ ID NO: 483003 - protein, 12 aa, Homo sapiens
  CDR3 for alpha chain variable domain of TCR clone 241502 (TRAV2, TRAJ31)
CAVEEGNARLMV

SEQ ID NO: 483004 - protein, 18 aa, Homo sapiens
  CDR3 for beta chain variable domain of TCR clone 241502 (TRBV7-9, TRBJ2-3)
CASSLDLAGLATPDTQYF

SEQ ID NO: 483005 - protein, 13 aa, Homo sapiens
  CDR3 for alpha chain variable domain of TCR clone 241503 (TRAV3, TRAJ3)
CAVADSSASKIIF

SEQ ID NO: 483006 - protein, 14 aa, Homo sapiens
  CDR3 for beta chain variable domain of TCR clone 241503 (TRBV5-1, TRBJ2-7)
CASSRGESLYEQYF

SEQ ID NO: 483007 - protein, 15 aa, Homo sapiens
  CDR3 for alpha chain variable domain of TCR clone 241504 (TRAV12-1, TRAJ9)
CVVSCGDTGGFKTIF

SEQ ID NO: 483008 - protein, 12 aa, Homo sapiens
  CDR3 for beta chain variable domain of TCR clone 241504 (TRBV11-3, TRBJ1-1)
CASSHRQGEAFF

SEQ ID NO: 483009 - protein, 10 aa, Homo sapiens
  CDR3 for alpha chain variable domain of TCR clone 241505 (TRAV8-3, TRAJ43)
CAVALADMRS

SEQ ID NO: 483010 - protein, 14 aa, Homo sapiens
  CDR3 for beta chain variable domain of TCR clone 241505 (TRBV4-2, TRBJ2-1)
CASGLDRAYNEQFF

SEQ ID NO: 483011 - protein, 12 aa, Homo sapiens
  CDR3 for alpha chain variable domain of TCR clone 241506 (TRAV3, TRAJ34)
CAVLGNTDKLIF

SEQ ID NO: 483012 - protein, 13 aa, Homo sapiens
  CDR3 for beta chain variable domain of TCR clone 241506 (TRBV19, TRBJ2-1)
CASSIGTGKEQFF

SEQ ID NO: 483013 - protein, 16 aa, Homo sapiens
  CDR3 for alpha chain variable domain of TCR clone 241507 (TRAV35, TRAJ28)
CAGYLYSVAGSYQLTF

SEQ ID NO: 483014 - protein, 16 aa, Homo sapiens
  CDR3 for beta chain variable domain of TCR clone 241507 (TRBV5-1, TRBJ2-1)
CASSHGLAGPQNEQFF

SEQ ID NO: 483015 - protein, 14 aa, Homo sapiens
  CDR3 for alpha chain variable domain of TCR clone 241508 (TRAV1-1, TRAJ27)
CAVIYNTNAGKSTF

SEQ ID NO: 483016 - protein, 18 aa, Homo sapiens
  CDR3 for beta chain variable domain of TCR clone 241508 (TRBV7-9, TRBJ2-2)
CASSFRDLNAGNTGELFF

SEQ ID NO: 483017 - protein, 11 aa, Homo sapiens
  CDR3 for alpha chain variable domain of TCR clone 241509 (TRAV1-2, TRAJ20)
CAVANDYKLSF

SEQ ID NO: 483018 - protein, 15 aa, Homo sapiens
  CDR3 for beta chain variable domain of TCR clone 241509 (TRBV7-2, TRBJ2-1)
CASSFRADEYNEQFF

SEQ ID NO: 483019 - protein, 14 aa, Homo sapiens
  CDR3 for alpha chain variable domain of TCR clone 241510 (TRAV8-4, TRAJ13)
CAVTLSGRYQKVTF

SEQ ID NO: 483020 - protein, 14 aa, Homo sapiens
  CDR3 for beta chain variable domain of TCR clone 241510 (TRBV7-2, TRBJ2-7)
CASRSQGAAYEQYF

SEQ ID NO: 483021 - protein, 11 aa, Homo sapiens
  CDR3 for alpha chain variable domain of TCR clone 241511 (TRAV1-2, TRAJ20)
CAVANDYKLSF

SEQ ID NO: 483022 - protein, 13 aa, Homo sapiens
  CDR3 for beta chain variable domain of TCR clone 241511 (TRBV7-2, TRBJ2-2)
CASSLAVTGELFF

SEQ ID NO: 483023 - protein, 16 aa, Homo sapiens
  CDR3 for alpha chain variable domain of TCR clone 241512 (TRAV38-1, TRAJ32)
CAFMKGGGGATNKLIF

SEQ ID NO: 483024 - protein, 13 aa, Homo sapiens
  CDR3 for beta chain variable domain of TCR clone 241512 (TRBV24-1, TRBJ2-1)
CATSAGPYNEQFF

SEQ ID NO: 483025 - protein, 15 aa, Homo sapiens
  CDR3 for alpha chain variable domain of TCR clone 241513 (TRAV21, TRAJ52)
CAVRGGGTSYGKLTF

SEQ ID NO: 483026 - protein, 17 aa, Homo sapiens
  CDR3 for beta chain variable domain of TCR clone 241513 (TRBV7-8, TRBJ2-1)
CASSLRLAGGPLDEQFF

SEQ ID NO: 483027 - protein, 17 aa, Homo sapiens
  CDR3 for alpha chain variable domain of TCR clone 241514 (TRAV26-1, TRAJ48)
CCVLFIVRVVGDEKLTF

SEQ ID NO: 483028 - protein, 16 aa, Homo sapiens
  CDR3 for beta chain variable domain of TCR clone 241514 (TRBV12-5, TRBJ2-5)
CASGPRTSGNQETQYF

SEQ ID NO: 483029 - protein, 14 aa, Homo sapiens
  CDR3 for alpha chain variable domain of TCR clone 241515 (TRAV21, TRAJ35)
CAVMPIGFGNVLHC

SEQ ID NO: 483030 - protein, 12 aa, Homo sapiens
  CDR3 for beta chain variable domain of TCR clone 241515 (TRBV7-9, TRBJ2-7)
CASSIKREEQYY

SEQ ID NO: 483031 - protein, 17 aa, Homo sapiens
  CDR3 for alpha chain variable domain of TCR clone 241516 (TRAV3, TRAJ6)
CAVRDGPRAGGSYKPTF

SEQ ID NO: 483032 - protein, 21 aa, Homo sapiens
  CDR3 for beta chain variable domain of TCR clone 241516 (TRBV7-2, TRBJ2-7)
RRTRPCISVPAALRLVYEQYF

SEQ ID NO: 483033 - protein, 14 aa, Homo sapiens
  CDR3 for alpha chain variable domain of TCR clone 241517 (TRAV3, TRAJ33)
CAVRDMDSNYQLIW

SEQ ID NO: 483034 - protein, 15 aa, Homo sapiens
  CDR3 for beta chain variable domain of TCR clone 241517 (TRBV20-1, TRBJ2-1)
CSARGIGGTYNEQFF

SEQ ID NO: 483035 - protein, 15 aa, Homo sapiens
  CDR3 for alpha chain variable domain of TCR clone 241518 (TRAV12-3, TRAJ22)
CAMRTISGSARQLTL

SEQ ID NO: 483036 - protein, 16 aa, Homo sapiens
  CDR3 for beta chain variable domain of TCR clone 241518 (TRBV20-1, TRBJ2-2)
CSARRPGTGNTGELFF

SEQ ID NO: 483037 - protein, 16 aa, Homo sapiens
  CDR3 for alpha chain variable domain of TCR clone 241519 (TRAV30, TRAJ24)
RGTEIVDADSWGKFQF

SEQ ID NO: 483038 - protein, 14 aa, Homo sapiens
  CDR3 for beta chain variable domain of TCR clone 241519 (TRBV12-5, TRBJ2-5)
CASGSRTHKETQYF

SEQ ID NO: 483039 - protein, 13 aa, Homo sapiens
  CDR3 for alpha chain variable domain of TCR clone 241520 (TRAV26-2, TRAJ43)
CILRAVNSNDMRF

SEQ ID NO: 483040 - protein, 15 aa, Homo sapiens
  CDR3 for beta chain variable domain of TCR clone 241520 (TRBV7-2, TRBJ2-1)
CASTHGTGIYNEQFF

SEQ ID NO: 483041 - protein, 16 aa, Homo sapiens
  CDR3 for alpha chain variable domain of TCR clone 241521 (TRAV3, TRAJ10)
CAVRDMRAGGGNKLTF

SEQ ID NO: 483042 - protein, 16 aa, Homo sapiens
  CDR3 for beta chain variable domain of TCR clone 241521 (TRBV19, TRBJ2-1)
CAISKAGPSSYNEQFF

SEQ ID NO: 483043 - protein, 13 aa, Homo sapiens
  CDR3 for alpha chain variable domain of TCR clone 241522 (TRAV12-2, TRAJ42)
CAVKRGSQGHLIF

SEQ ID NO: 483044 - protein, 13 aa, Homo sapiens
  CDR3 for beta chain variable domain of TCR clone 241522 (TRBV7-9, TRBJ2-3)
CASSPGSTDTQYF

SEQ ID NO: 483045 - protein, 11 aa, Homo sapiens
  CDR3 for alpha chain variable domain of TCR clone 241523 (TRAV12-2, TRAJ23)
CDRGRGGKLIF

SEQ ID NO: 483046 - protein, 13 aa, Homo sapiens
  CDR3 for beta chain variable domain of TCR clone 241523 (TRBV2, TRBJ1-1)
CARNPTGGFHAFF

SEQ ID NO: 483047 - protein, 14 aa, Homo sapiens
  CDR3 for alpha chain variable domain of TCR clone 241524 (TRAV12-2, TRAJ17)
CAVNIKAAGNKLTF

SEQ ID NO: 483048 - protein, 14 aa, Homo sapiens
  CDR3 for beta chain variable domain of TCR clone 241524 (TRBV12-4, TRBJ1-3)
CASTLTGAGNTICF

SEQ ID NO: 483049 - protein, 14 aa, Homo sapiens
  CDR3 for alpha chain variable domain of TCR clone 241525 (TRAV1-2, TRAJ16)
CAVNRFSDGQKLLF

SEQ ID NO: 483050 - protein, 14 aa, Homo sapiens
  CDR3 for beta chain variable domain of TCR clone 241525 (TRBV20-1, TRBJ2-1)
CSDRGGSSYNEQFF

SEQ ID NO: 483051 - protein, 14 aa, Homo sapiens
  CDR3 for alpha chain variable domain of TCR clone 241526 (TRAV16, TRAJ15)
CALSFNQAGTALIF

SEQ ID NO: 483052 - protein, 16 aa, Homo sapiens
  CDR3 for beta chain variable domain of TCR clone 241526 (TRBV9, TRBJ2-7)
YASSAGPDRSPYEQYF

SEQ ID NO: 483053 - protein, 14 aa, Homo sapiens
  CDR3 for alpha chain variable domain of TCR clone 241527 (TRAV12-2, TRAJ13)
CAVKKTGGYQKGTF

SEQ ID NO: 483054 - protein, 17 aa, Homo sapiens
  CDR3 for beta chain variable domain of TCR clone 241527 (TRBV24-1, TRBJ2-1)
CATSDVSTSGTYNEQFF

SEQ ID NO: 483055 - protein, 21 aa, Homo sapiens
  CDR3 for alpha chain variable domain of TCR clone 241528 (TRAV26-1, TRAJ11)
CCVLLHRQSRPSNSGYSTLTF

SEQ ID NO: 483056 - protein, 15 aa, Homo sapiens
  CDR3 for beta chain variable domain of TCR clone 241528 (TRBV27, TRBJ2-5)
CASSLIPSGGETQYF

SEQ ID NO: 483057 - protein, 12 aa, Homo sapiens
  CDR3 for alpha chain variable domain of TCR clone 241529 (TRAV12-3, TRAJ49)
CAMSGTGNQFYF

SEQ ID NO: 483058 - protein, 14 aa, Homo sapiens
  CDR3 for beta chain variable domain of TCR clone 241529 (TRBV2, TRBJ1-6)
CASRRLSSNSPLHF

SEQ ID NO: 483059 - protein, 15 aa, Homo sapiens
  CDR3 for alpha chain variable domain of TCR clone 241530 (TRAV35, TRAJ23)
CAGPQGNNQGGKLIF

SEQ ID NO: 483060 - protein, 14 aa, Homo sapiens
  CDR3 for beta chain variable domain of TCR clone 241530 (TRBV7-9, TRBJ1-1)
CASTPLQSYTEAFF

SEQ ID NO: 483061 - protein, 13 aa, Homo sapiens
  CDR3 for alpha chain variable domain of TCR clone 241531 (TRAV13-1, TRAJ6)
CAASSGGSYIPTF

SEQ ID NO: 483062 - protein, 15 aa, Homo sapiens
  CDR3 for beta chain variable domain of TCR clone 241531 (TRBV12-4, TRBJ2-5)
CGSSPPTGLQETQYF

SEQ ID NO: 483063 - protein, 16 aa, Homo sapiens
  CDR3 for alpha chain variable domain of TCR clone 241532 (TRAV14/DV4, TRAJ20)
CAMREGRSRDDYKLSF

SEQ ID NO: 483064 - protein, 13 aa, Homo sapiens
  CDR3 for beta chain variable domain of TCR clone 241532 (TRBV6-1, TRBJ1-1)
CASSRQGNTEAFF

SEQ ID NO: 483065 - protein, 15 aa, Homo sapiens
  CDR3 for alpha chain variable domain of TCR clone 241533 (TRAV12-1, TRAJ44)
CVLDEYTGTASKLTF

SEQ ID NO: 483066 - protein, 14 aa, Homo sapiens
  CDR3 for beta chain variable domain of TCR clone 241533 (TRBV5-1, TRBJ1-2)
CASSLEPVNYGYTF

SEQ ID NO: 483067 - protein, 12 aa, Homo sapiens
  CDR3 for alpha chain variable domain of TCR clone 241534 (TRAV21, TRAJ27)
CAPPGNAGKSTF

SEQ ID NO: 483068 - protein, 13 aa, Homo sapiens
  CDR3 for beta chain variable domain of TCR clone 241534 (TRBV2, TRBJ1-1)
CARNPTGGFHDFF

SEQ ID NO: 483069 - protein, 12 aa, Homo sapiens
  CDR3 for alpha chain variable domain of TCR clone 241535 (TRAV8-3, TRAJ43)
CAVGAGNNDMRF

SEQ ID NO: 483070 - protein, 14 aa, Homo sapiens
  CDR3 for beta chain variable domain of TCR clone 241535 (TRBV4-2, TRBJ1-5)
SASSRDRGNQPQHF

SEQ ID NO: 483071 - protein, 11 aa, Homo sapiens
  CDR3 for alpha chain variable domain of TCR clone 241536 (TRAV2, TRAJ23)
CAVETRGKLIF

SEQ ID NO: 483072 - protein, 14 aa, Homo sapiens
  CDR3 for beta chain variable domain of TCR clone 241536 (TRBV2, TRBJ2-3)
CASSKGQNTDTQYF

SEQ ID NO: 483073 - protein, 13 aa, Homo sapiens
  CDR3 for alpha chain variable domain of TCR clone 241537 (TRAV8-3, TRAJ28)
CAVGAVGSYQITF

SEQ ID NO: 483074 - protein, 16 aa, Homo sapiens
  CDR3 for beta chain variable domain of TCR clone 241537 (TRBV19, TRBJ2-1)
CASSKAGPSSYNEQFF

SEQ ID NO: 483075 - protein, 11 aa, Homo sapiens
  CDR3 for alpha chain variable domain of TCR clone 241538 (TRAV12-2, TRAJ3)
CAVKRASKIIF

SEQ ID NO: 483076 - protein, 15 aa, Homo sapiens
  CDR3 for beta chain variable domain of TCR clone 241538 (TRBV2, TRBJ2-3)
CASSDFEKATDTQYF

SEQ ID NO: 483077 - protein, 13 aa, Homo sapiens
  CDR3 for alpha chain variable domain of TCR clone 241539 (TRAV12-3, TRAJ13)
CAMSSGGYQKVTF

SEQ ID NO: 483078 - protein, 18 aa, Homo sapiens
  CDR3 for beta chain variable domain of TCR clone 241539 (TRBV11-2, TRBJ2-6)
CASSLNPFLGTGANVLTF

SEQ ID NO: 483079 - protein, 14 aa, Homo sapiens
  CDR3 for alpha chain variable domain of TCR clone 241540 (TRAV17, TRAJ35)
CATDRPGFGNVLHC

SEQ ID NO: 483080 - protein, 19 aa, Homo sapiens
  CDR3 for beta chain variable domain of TCR clone 241540 (TRBV11-3, TRBJ2-2)
CDSSARPGAKTTNTGELFF

SEQ ID NO: 483081 - protein, 15 aa, Homo sapiens
  CDR3 for alpha chain variable domain of TCR clone 241541 (TRAV1-1, TRAJ22)
CAVRVSSGSARQLTF

SEQ ID NO: 483082 - protein, 15 aa, Homo sapiens
  CDR3 for beta chain variable domain of TCR clone 241541 (TRBV20-1, TRBJ2-7)
CSARDRVSGLDEQYF

SEQ ID NO: 483083 - protein, 15 aa, Homo sapiens
  CDR3 for alpha chain variable domain of TCR clone 241542 (TRAV3, TRAJ20)
CAVRDIKLSDYMLSF

SEQ ID NO: 483084 - protein, 18 aa, Homo sapiens
  CDR3 for beta chain variable domain of TCR clone 241542 (TRBV20-1, TRBJ2-5)
CSQTGDSGRLGGKETQYF

SEQ ID NO: 483085 - protein, 12 aa, Homo sapiens
  CDR3 for alpha chain variable domain of TCR clone 241543 (TRAV1-1, TRAJ8)
CAGGTGFQKLVF

SEQ ID NO: 483086 - protein, 15 aa, Homo sapiens
  CDR3 for beta chain variable domain of TCR clone 241543 (TRBV7-2, TRBJ2-3)
CASSSEQGGTDTQYF

SEQ ID NO: 483087 - protein, 16 aa, Homo sapiens
  CDR3 for alpha chain variable domain of TCR clone 241544 (TRAV21, TRAJ45)
CAVEAPRGDQEEVLTY

SEQ ID NO: 483088 - protein, 10 aa, Homo sapiens
  CDR3 for beta chain variable domain of TCR clone 241544 (TRBV4-1, TRBJ2-7)
SRGDRHEQYF

SEQ ID NO: 483089 - protein, 10 aa, Homo sapiens
  CDR3 for alpha chain variable domain of TCR clone 241545 (TRAV12-3, TRAJ49)
CAMNDDQFYF

SEQ ID NO: 483090 - protein, 13 aa, Homo sapiens
  CDR3 for beta chain variable domain of TCR clone 241545 (TRBV7-2, TRBJ1-4)
CASSLAGLEKLFF

SEQ ID NO: 483091 - protein, 13 aa, Homo sapiens
  CDR3 for alpha chain variable domain of TCR clone 241546 (TRAV17, TRAJ31)
CATDENNNARLMF

SEQ ID NO: 483092 - protein, 14 aa, Homo sapiens
  CDR3 for beta chain variable domain of TCR clone 241546 (TRBV12-5, TRBJ2-5)
CASGSRTHQETQYF

SEQ ID NO: 483093 - protein, 16 aa, Homo sapiens
  CDR3 for alpha chain variable domain of TCR clone 241547 (TRAV30, TRAJ24)
CGTEIVDADSWGEFQF

SEQ ID NO: 483094 - protein, 15 aa, Homo sapiens
  CDR3 for beta chain variable domain of TCR clone 241547 (TRBV7-9, TRBJ1-4)
CASSARTGGNEKLFF

SEQ ID NO: 483095 - protein, 15 aa, Homo sapiens
  CDR3 for alpha chain variable domain of TCR clone 241548 (TRAV17, TRAJ54)
CATEKLGQGAQKLVF

SEQ ID NO: 483096 - protein, 13 aa, Homo sapiens
  CDR3 for beta chain variable domain of TCR clone 241548 (TRBV7-9, TRBJ1-2)
CASSLKQNYGYTF

SEQ ID NO: 483097 - protein, 14 aa, Homo sapiens
  CDR3 for alpha chain variable domain of TCR clone 241549 (TRAV17, TRAJ4)
CATAPLGGYNKLNF

SEQ ID NO: 483098 - protein, 13 aa, Homo sapiens
  CDR3 for beta chain variable domain of TCR clone 241549 (TRBV12-4, TRBJ1-3)
CASSLASGNTIYF

SEQ ID NO: 483099 - protein, 16 aa, Homo sapiens
  CDR3 for alpha chain variable domain of TCR clone 241550 (TRAV1-2, TRAJ10)
CAVRGVLTGGGNKLTF

SEQ ID NO: 483100 - protein, 12 aa, Homo sapiens
  CDR3 for beta chain variable domain of TCR clone 241550 (TRBV11-2, TRBJ2-1)
CASSPGDNEQFF

SEQ ID NO: 483101 - protein, 19 aa, Homo sapiens
  CDR3 for alpha chain variable domain of TCR clone 241551 (TRAV8-4, TRAJ3)
CAVTGENLVQQCFPDNLWI

SEQ ID NO: 483102 - protein, 15 aa, Homo sapiens
  CDR3 for beta chain variable domain of TCR clone 241551 (TRBV6-5, TRBJ2-1)
CASSYDAGAGNEQFF

SEQ ID NO: 483103 - protein, 15 aa, Homo sapiens
  CDR3 for alpha chain variable domain of TCR clone 241552 (TRAV12-1, TRAJ44)
CVVDTPPGTASKLTF

SEQ ID NO: 483104 - protein, 13 aa, Homo sapiens
  CDR3 for beta chain variable domain of TCR clone 241552 (TRBV27, TRBJ2-1)
CASSSGSYNEQFF

SEQ ID NO: 483105 - protein, 14 aa, Homo sapiens
  CDR3 for alpha chain variable domain of TCR clone 241553 (TRAV29/DV5, TRAJ36)
CAARRKTGANNLFF

SEQ ID NO: 483106 - protein, 13 aa, Homo sapiens
  CDR3 for beta chain variable domain of TCR clone 241553 (TRBV20-1, TRBJ2-7)
CSATHTSGYEQYF

SEQ ID NO: 483107 - protein, 10 aa, Homo sapiens
  CDR3 for alpha chain variable domain of TCR clone 241554 (TRAV21, TRAJ31)
CAVDNARLMF

SEQ ID NO: 483108 - protein, 13 aa, Homo sapiens
  CDR3 for beta chain variable domain of TCR clone 241554 (TRBV4-1, TRBJ1-1)
CASSRKMNTDAFF

SEQ ID NO: 483109 - protein, 12 aa, Homo sapiens
  CDR3 for alpha chain variable domain of TCR clone 241555 (TRAV12-1, TRAJ40)
CVVYSGTYKYIF

SEQ ID NO: 483110 - protein, 13 aa, Homo sapiens
  CDR3 for beta chain variable domain of TCR clone 241555 (TRBV20-1, TRBJ1-1)
CSARGGGNTEAFF

SEQ ID NO: 483111 - protein, 14 aa, Homo sapiens
  CDR3 for alpha chain variable domain of TCR clone 241556 (TRAV38-1, TRAJ40)
CALRPTSGTYKYIF

SEQ ID NO: 483112 - protein, 13 aa, Homo sapiens
  CDR3 for beta chain variable domain of TCR clone 241556 (TRBV20-1, TRBJ2-7)
CSARWGYNYEQYF

SEQ ID NO: 483113 - protein, 13 aa, Homo sapiens
  CDR3 for alpha chain variable domain of TCR clone 241557 (TRAV17, TRAJ34)
CATDLYNNDKPIF

SEQ ID NO: 483114 - protein, 15 aa, Homo sapiens
  CDR3 for beta chain variable domain of TCR clone 241557 (TRBV20-1, TRBJ2-3)
CSATGTSGFTDTQYF

SEQ ID NO: 483115 - protein, 14 aa, Homo sapiens
  CDR3 for alpha chain variable domain of TCR clone 241558 (TRAV12-1, TRAJ26)
CVVKGSNYGQNFVF

SEQ ID NO: 483116 - protein, 12 aa, Homo sapiens
  CDR3 for beta chain variable domain of TCR clone 241558 (TRBV2, TRBJ2-1)
CAKREGYNEQFF

SEQ ID NO: 483117 - protein, 13 aa, Homo sapiens
  CDR3 for alpha chain variable domain of TCR clone 241559 (TRAV8-6, TRAJ33)
CAVSEGSNYQLIW

SEQ ID NO: 483118 - protein, 14 aa, Homo sapiens
  CDR3 for beta chain variable domain of TCR clone 241559 (TRBV7-2, TRBJ2-7)
CASSPKTSFYEQYF

SEQ ID NO: 483119 - protein, 13 aa, Homo sapiens
  CDR3 for alpha chain variable domain of TCR clone 241560 (TRAV12-3, TRAJ33)
CAMSVNSNYQLIW

SEQ ID NO: 483120 - protein, 16 aa, Homo sapiens
  CDR3 for beta chain variable domain of TCR clone 241560 (TRBV12-4, TRBJ2-5)
CASSWRPSGDLETQYF

SEQ ID NO: 483121 - protein, 14 aa, Homo sapiens
  CDR3 for alpha chain variable domain of TCR clone 241561 (TRAV13-2, TRAJ23)
CAENIGPVGGKLIL

SEQ ID NO: 483122 - protein, 17 aa, Homo sapiens
  CDR3 for beta chain variable domain of TCR clone 241561 (TRBV5-1, TRBJ1-1)
CASSFMTGGKRDTEAFF

SEQ ID NO: 483123 - protein, 15 aa, Homo sapiens
  CDR3 for alpha chain variable domain of TCR clone 241562 (TRAV3, TRAJ22)
CAVRDRGGSARQLTF

SEQ ID NO: 483124 - protein, 14 aa, Homo sapiens
  CDR3 for beta chain variable domain of TCR clone 241562 (TRBV20-1, TRBJ1-1)
CSAQTRVGGTEAFF

SEQ ID NO: 483125 - protein, 13 aa, Homo sapiens
  CDR3 for alpha chain variable domain of TCR clone 241563 (TRAV12-2, TRAJ10)
CAVPTGGGNKLTF

SEQ ID NO: 483126 - protein, 13 aa, Homo sapiens
  CDR3 for beta chain variable domain of TCR clone 241563 (TRBV12-5, TRBJ2-3)
CASGDRQSDTQYF

SEQ ID NO: 483127 - protein, 13 aa, Homo sapiens
  CDR3 for alpha chain variable domain of TCR clone 241564 (TRAV16, TRAJ31)
CALSAHNNARLMF

SEQ ID NO: 483128 - protein, 17 aa, Homo sapiens
  CDR3 for beta chain variable domain of TCR clone 241564 (TRBV12-4, TRBJ2-1)
CASSPGLVGGRINEQFF

SEQ ID NO: 483129 - protein, 14 aa, Homo sapiens
  CDR3 for alpha chain variable domain of TCR clone 241565 (TRAV12-3, TRAJ10)
SHLPLTGGGNKLTF

SEQ ID NO: 483130 - protein, 14 aa, Homo sapiens
  CDR3 for beta chain variable domain of TCR clone 241565 (TRBV28, TRBJ2-2)
CASSMQGYTGELFF

SEQ ID NO: 483131 - protein, 16 aa, Homo sapiens
  CDR3 for alpha chain variable domain of TCR clone 241566 (TRAV30, TRAJ26)
CGTESVGDNYGQNFVF

SEQ ID NO: 483132 - protein, 19 aa, Homo sapiens
  CDR3 for beta chain variable domain of TCR clone 241566 (TRBV19, TRBJ2-5)
CASSIGQVTDFFLGETQYF

SEQ ID NO: 483133 - protein, 13 aa, Homo sapiens
  CDR3 for alpha chain variable domain of TCR clone 241567 (TRAV20, TRAJ48)
CAVHLFGNEKLTF

SEQ ID NO: 483134 - protein, 13 aa, Homo sapiens
  CDR3 for beta chain variable domain of TCR clone 241567 (TRBV7-3, TRBJ1-1)
CASSQDWGAEAFF

SEQ ID NO: 483135 - protein, 13 aa, Homo sapiens
  CDR3 for alpha chain variable domain of TCR clone 241568 (TRAV12-1, TRAJ22)
CVVYSGSAGQLTF

SEQ ID NO: 483136 - protein, 10 aa, Homo sapiens
  CDR3 for beta chain variable domain of TCR clone 241568 (TRBV6-3, TRBJ2-2)
CASRDGELFF

SEQ ID NO: 483137 - protein, 16 aa, Homo sapiens
  CDR3 for alpha chain variable domain of TCR clone 241569 (TRAV14/DV4, TRAJ12)
CAMREVLMDSSYKLIF

SEQ ID NO: 483138 - protein, 14 aa, Homo sapiens
  CDR3 for beta chain variable domain of TCR clone 241569 (TRBV7-2, TRBJ2-5)
CASSFTQGKETQYF

SEQ ID NO: 483139 - protein, 14 aa, Homo sapiens
  CDR3 for alpha chain variable domain of TCR clone 241570 (TRAV2, TRAJ9)
CAVEDRSGGFKTIF

SEQ ID NO: 483140 - protein, 13 aa, Homo sapiens
  CDR3 for beta chain variable domain of TCR clone 241570 (TRBV7-9, TRBJ2-5)
CASLPSGRETQYF

SEQ ID NO: 483141 - protein, 15 aa, Homo sapiens
  CDR3 for alpha chain variable domain of TCR clone 241571 (TRAV12-2, TRAJ56)
CAVNPFTGANSKLTF

SEQ ID NO: 483142 - protein, 13 aa, Homo sapiens
  CDR3 for beta chain variable domain of TCR clone 241571 (TRBV20-1, TRBJ1-2)
SSARDRVYGGYTF

SEQ ID NO: 483143 - protein, 15 aa, Homo sapiens
  CDR3 for alpha chain variable domain of TCR clone 241572 (TRAV3, TRAJ5)
CAVRDLDTGRRALTF

SEQ ID NO: 483144 - protein, 17 aa, Homo sapiens
  CDR3 for beta chain variable domain of TCR clone 241572 (TRBV24-1, TRBJ2-1)
CATSDVSTSGTYNEQFF

SEQ ID NO: 483145 - protein, 18 aa, Homo sapiens
  CDR3 for alpha chain variable domain of TCR clone 241573 (TRAV21, TRAJ52)
CAVRPPPTGGTSYGKLTF

SEQ ID NO: 483146 - protein, 15 aa, Homo sapiens
  CDR3 for beta chain variable domain of TCR clone 241573 (TRBV27, TRBJ2-1)
CASSNGGGSSNEQFF

SEQ ID NO: 483147 - protein, 14 aa, Homo sapiens
  CDR3 for alpha chain variable domain of TCR clone 241574 (TRAV26-1, TRAJ39)
CVVRGSRAGNMLTF

SEQ ID NO: 483148 - protein, 14 aa, Homo sapiens
  CDR3 for beta chain variable domain of TCR clone 241574 (TRBV25-1, TRBJ1-1)
CASTHLGGNTEAFF

SEQ ID NO: 483149 - protein, 12 aa, Homo sapiens
  CDR3 for alpha chain variable domain of TCR clone 241575 (TRAV27, TRAJ36)
CAGMTGAYNLFF

SEQ ID NO: 483150 - protein, 14 aa, Homo sapiens
  CDR3 for beta chain variable domain of TCR clone 241575 (TRBV12-4, TRBJ2-3)
CASSLVPSTDTQYF

SEQ ID NO: 483151 - protein, 14 aa, Homo sapiens
  CDR3 for alpha chain variable domain of TCR clone 241576 (TRAV2, TRAJ34)
CAVPLSYNTDKLIF

SEQ ID NO: 483152 - protein, 15 aa, Homo sapiens
  CDR3 for beta chain variable domain of TCR clone 241576 (TRBV9, TRBJ1-6)
CASSVAGTGDSPLHF

SEQ ID NO: 483153 - protein, 20 aa, Homo sapiens
  CDR3 for alpha chain variable domain of TCR clone 241577 (TRAV2, TRAJ26)
CAGSPGRLWSEFCLWSRNQF

SEQ ID NO: 483154 - protein, 17 aa, Homo sapiens
  CDR3 for beta chain variable domain of TCR clone 241577 (TRBV11-2, TRBJ2-1)
CASSLYPPGVEYNEQFF

SEQ ID NO: 483155 - protein, 14 aa, Homo sapiens
  CDR3 for alpha chain variable domain of TCR clone 241578 (TRAV17, TRAJ22)
CATSPSGSARQLTF

SEQ ID NO: 483156 - protein, 13 aa, Homo sapiens
  CDR3 for beta chain variable domain of TCR clone 241578 (TRBV10-3, TRBJ1-2)
CAISERDSYGYTF

SEQ ID NO: 483157 - protein, 12 aa, Homo sapiens
  CDR3 for alpha chain variable domain of TCR clone 241579 (TRAV13-2, TRAJ8)
CAPWLGFQKLVF

SEQ ID NO: 483158 - protein, 17 aa, Homo sapiens
  CDR3 for beta chain variable domain of TCR clone 241579 (TRBV27, TRBJ2-3)
CASSFFPPNTSTDTQYF

SEQ ID NO: 483159 - protein, 14 aa, Homo sapiens
  CDR3 for alpha chain variable domain of TCR clone 241580 (TRAV2, TRAJ9)
CAVEDRSGGFNTIF

SEQ ID NO: 483160 - protein, 11 aa, Homo sapiens
  CDR3 for beta chain variable domain of TCR clone 241580 (TRBV7-9, TRBJ2-5)
CASSLGETHYF

SEQ ID NO: 483161 - protein, 12 aa, Homo sapiens
  CDR3 for alpha chain variable domain of TCR clone 241581 (TRAV12-1, TRAJ32)
CVVKGATNKLIF

SEQ ID NO: 483162 - protein, 15 aa, Homo sapiens
  CDR3 for beta chain variable domain of TCR clone 241581 (TRBV20-1, TRBJ2-3)
CSASGTSGYTDTEYF

SEQ ID NO: 483163 - protein, 13 aa, Homo sapiens
  CDR3 for alpha chain variable domain of TCR clone 241582 (TRAV12-2, TRAJ40)
CAVKRTGTYKYIF

SEQ ID NO: 483164 - protein, 16 aa, Homo sapiens
  CDR3 for beta chain variable domain of TCR clone 241582 (TRBV12-5, TRBJ2-5)
CASGPRTSGNQETQYF

SEQ ID NO: 483165 - protein, 12 aa, Homo sapiens
  CDR3 for alpha chain variable domain of TCR clone 241583 (TRAV29/DV5, TRAJ49)
CAATDTGNQFYF

SEQ ID NO: 483166 - protein, 19 aa, Homo sapiens
  CDR3 for beta chain variable domain of TCR clone 241583 (TRBV25-1, TRBJ2-2)
CAILDYRVDRGRKTGELFF

SEQ ID NO: 483167 - protein, 13 aa, Homo sapiens
  CDR3 for alpha chain variable domain of TCR clone 241584 (TRAV1-2, TRAJ9)
CAAVNTGGFKTIF

SEQ ID NO: 483168 - protein, 14 aa, Homo sapiens
  CDR3 for beta chain variable domain of TCR clone 241584 (TRBV4-1, TRBJ2-2)
CASSQAVNTGELFF

SEQ ID NO: 483169 - protein, 17 aa, Homo sapiens
  CDR3 for alpha chain variable domain of TCR clone 241585 (TRAV26-2, TRAJ32)
ERCGCVGYGGATNKLIF

SEQ ID NO: 483170 - protein, 13 aa, Homo sapiens
  CDR3 for beta chain variable domain of TCR clone 241585 (TRBV12-5, TRBJ2-3)
CASGDRQSDTQYF

SEQ ID NO: 483171 - protein, 14 aa, Homo sapiens
  CDR3 for alpha chain variable domain of TCR clone 241586 (TRAV3, TRAJ7)
CAVREEEREQQTRF

SEQ ID NO: 483172 - protein, 12 aa, Homo sapiens
  CDR3 for beta chain variable domain of TCR clone 241586 (TRBV7-8, TRBJ2-7)
CAISLGDREQYF

SEQ ID NO: 483173 - protein, 12 aa, Homo sapiens
  CDR3 for alpha chain variable domain of TCR clone 241587 (TRAV8-3, TRAJ20)
CAVGANDYKLSF

SEQ ID NO: 483174 - protein, 16 aa, Homo sapiens
  CDR3 for beta chain variable domain of TCR clone 241587 (TRBV19, TRBJ2-2)
CASRSPGTGPTGGLFF

SEQ ID NO: 483175 - protein, 14 aa, Homo sapiens
  CDR3 for alpha chain variable domain of TCR clone 241588 (TRAV35, TRAJ40)
CAGSTTSGTYKYIF

SEQ ID NO: 483176 - protein, 13 aa, Homo sapiens
  CDR3 for beta chain variable domain of TCR clone 241588 (TRBV4-1, TRBJ2-2)
CASSQENTGELFF

SEQ ID NO: 483177 - protein, 14 aa, Homo sapiens
  CDR3 for alpha chain variable domain of TCR clone 241589 (TRAV1-2, TRAJ16)
CAVNLFSDGQKLLF

SEQ ID NO: 483178 - protein, 16 aa, Homo sapiens
  CDR3 for beta chain variable domain of TCR clone 241589 (TRBV9, TRBJ2-1)
CASSVGGGGNYNEQFF

SEQ ID NO: 483179 - protein, 13 aa, Homo sapiens
  CDR3 for alpha chain variable domain of TCR clone 241590 (TRAV1-2, TRAJ9)
CAALNTGGFKTIF

SEQ ID NO: 483180 - protein, 12 aa, Homo sapiens
  CDR3 for beta chain variable domain of TCR clone 241590 (TRBV7-9, TRBJ2-7)
CASSLEGYEQYL

SEQ ID NO: 483181 - protein, 13 aa, Homo sapiens
  CDR3 for alpha chain variable domain of TCR clone 241591 (TRAV26-1, TRAJ33)
CIVRVEGNYQLIL

SEQ ID NO: 483182 - protein, 16 aa, Homo sapiens
  CDR3 for beta chain variable domain of TCR clone 241591 (TRBV15, TRBJ2-7)
CATSRDRGLRRGEQYF

SEQ ID NO: 483183 - protein, 15 aa, Homo sapiens
  CDR3 for alpha chain variable domain of TCR clone 241592 (TRAV8-3, TRAJ45)
CASSYSGGGADGLTF

SEQ ID NO: 483184 - protein, 13 aa, Homo sapiens
  CDR3 for beta chain variable domain of TCR clone 241592 (TRBV7-9, TRBJ2-7)
CASSFAGAYDQYF

SEQ ID NO: 483185 - protein, 16 aa, Homo sapiens
  CDR3 for alpha chain variable domain of TCR clone 241593 (TRAV23/DV6, TRAJ48)
CAASGVVNFGNEKLNF

SEQ ID NO: 483186 - protein, 15 aa, Homo sapiens
  CDR3 for beta chain variable domain of TCR clone 241593 (TRBV20-1, TRBJ2-5)
CSAGLAGVSQETQYF

SEQ ID NO: 483187 - protein, 11 aa, Homo sapiens
  CDR3 for alpha chain variable domain of TCR clone 241594 (TRAV2, TRAJ21)
CAVFNFNKFYF

SEQ ID NO: 483188 - protein, 15 aa, Homo sapiens
  CDR3 for beta chain variable domain of TCR clone 241594 (TRBV19, TRBJ2-2)
CQPISRDRATGELFF

SEQ ID NO: 483189 - protein, 15 aa, Homo sapiens
  CDR3 for alpha chain variable domain of TCR clone 241595 (TRAV3, TRAJ40)
CAVRDVTSGTYKYIF

SEQ ID NO: 483190 - protein, 13 aa, Homo sapiens
  CDR3 for beta chain variable domain of TCR clone 241595 (TRBV7-9, TRBJ1-2)
CASSLKQNYGDTF

SEQ ID NO: 483191 - protein, 12 aa, Homo sapiens
  CDR3 for alpha chain variable domain of TCR clone 241596 (TRAV12-1, TRAJ40)
CVVYPGTYKYIF

SEQ ID NO: 483192 - protein, 18 aa, Homo sapiens
  CDR3 for beta chain variable domain of TCR clone 241596 (TRBV11-2, TRBJ2-3)
CASRLGGASRGAPNTQYF

SEQ ID NO: 483193 - protein, 14 aa, Homo sapiens
  CDR3 for alpha chain variable domain of TCR clone 241597 (TRAV8-4, TRAJ9)
CAGSDRTGGFKTIF

SEQ ID NO: 483194 - protein, 13 aa, Homo sapiens
  CDR3 for beta chain variable domain of TCR clone 241597 (TRBV11-2, TRBJ2-7)
CASSLGDSYEQYF

SEQ ID NO: 483195 - protein, 14 aa, Homo sapiens
  CDR3 for alpha chain variable domain of TCR clone 241598 (TRAV1-2, TRAJ16)
CDVNRFSDGQKLLL

SEQ ID NO: 483196 - protein, 11 aa, Homo sapiens
  CDR3 for beta chain variable domain of TCR clone 241598 (TRBV7-8, TRBJ2-7)
CASSLSLEQYF

SEQ ID NO: 483197 - protein, 15 aa, Homo sapiens
  CDR3 for alpha chain variable domain of TCR clone 241599 (TRAV3, TRAJ36)
CAVRASQTGANNLIF

SEQ ID NO: 483198 - protein, 15 aa, Homo sapiens
  CDR3 for beta chain variable domain of TCR clone 241599 (TRBV3-1, TRBJ2-1)
CASSQDYTPRGEQFF

SEQ ID NO: 483199 - protein, 12 aa, Homo sapiens
  CDR3 for alpha chain variable domain of TCR clone 241600 (TRAV6, TRAJ34)
CALHRGTDKLIF

SEQ ID NO: 483200 - protein, 13 aa, Homo sapiens
  CDR3 for beta chain variable domain of TCR clone 241600 (TRBV7-9, TRBJ1-2)
CASSLKQNYGYTF

SEQ ID NO: 483201 - protein, 16 aa, Homo sapiens
  CDR3 for alpha chain variable domain of TCR clone 241601 (TRAV30, TRAJ24)
CGTEIVDADSWGKFQL

SEQ ID NO: 483202 - protein, 14 aa, Homo sapiens
  CDR3 for beta chain variable domain of TCR clone 241601 (TRBV11-2, TRBJ2-7)
CASSLGAGAYEQYF

SEQ ID NO: 483203 - protein, 13 aa, Homo sapiens
  CDR3 for alpha chain variable domain of TCR clone 241602 (TRAV12-2, TRAJ34)
CAVRGYNTDKLIF

SEQ ID NO: 483204 - protein, 15 aa, Homo sapiens
  CDR3 for beta chain variable domain of TCR clone 241602 (TRBV28, TRBJ2-1)
CADRTGAGVIARQFF

SEQ ID NO: 483205 - protein, 12 aa, Homo sapiens
  CDR3 for alpha chain variable domain of TCR clone 241603 (TRAV12-3, TRAJ17)
CAMTLTGNKLTF

SEQ ID NO: 483206 - protein, 15 aa, Homo sapiens
  CDR3 for beta chain variable domain of TCR clone 241603 (TRBV11-3, TRBJ2-2)
CASSYFSTGTGELFF

SEQ ID NO: 483207 - protein, 13 aa, Homo sapiens
  CDR3 for alpha chain variable domain of TCR clone 241604 (TRAV21, TRAJ34)
CAVSEGDTDKLIF

SEQ ID NO: 483208 - protein, 17 aa, Homo sapiens
  CDR3 for beta chain variable domain of TCR clone 241604 (TRBV20-1, TRBJ1-5)
CSARDPSAQGFDQPQHF

SEQ ID NO: 483209 - protein, 15 aa, Homo sapiens
  CDR3 for alpha chain variable domain of TCR clone 241605 (TRAV12-1, TRAJ44)
CVVDTHQGTASKLTF

SEQ ID NO: 483210 - protein, 13 aa, Homo sapiens
  CDR3 for beta chain variable domain of TCR clone 241605 (TRBV27, TRBJ2-1)
CASSSGSYNEQFF

SEQ ID NO: 483211 - protein, 13 aa, Homo sapiens
  CDR3 for alpha chain variable domain of TCR clone 241606 (TRAV8-3, TRAJ36)
CAVGATGANNLFF

SEQ ID NO: 483212 - protein, 13 aa, Homo sapiens
  CDR3 for beta chain variable domain of TCR clone 241606 (TRBV12-4, TRBJ1-2)
CASRLRQGKGCTF

SEQ ID NO: 483213 - protein, 12 aa, Homo sapiens
  CDR3 for alpha chain variable domain of TCR clone 241607 (TRAV21, TRAJ11)
CAATSGYSTLTF

SEQ ID NO: 483214 - protein, 14 aa, Homo sapiens
  CDR3 for beta chain variable domain of TCR clone 241607 (TRBV28, TRBJ1-5)
CASSGQALYQPQHF

SEQ ID NO: 483215 - protein, 14 aa, Homo sapiens
  CDR3 for alpha chain variable domain of TCR clone 241608 (TRAV2, TRAJ29)
CAVESYSGNTPLVF

SEQ ID NO: 483216 - protein, 15 aa, Homo sapiens
  CDR3 for beta chain variable domain of TCR clone 241608 (TRBV7-9, TRBJ1-5)
CASSQGHQPNQPQHF

SEQ ID NO: 483217 - protein, 14 aa, Homo sapiens
  CDR3 for alpha chain variable domain of TCR clone 241609 (TRAV27, TRAJ37)
CAGERSSNTGTLIF

SEQ ID NO: 483218 - protein, 15 aa, Homo sapiens
  CDR3 for beta chain variable domain of TCR clone 241609 (TRBV11-3, TRBJ1-6)
CASSLDWGANSPLHF

SEQ ID NO: 483219 - protein, 14 aa, Homo sapiens
  CDR3 for alpha chain variable domain of TCR clone 241610 (TRAV9-2, TRAJ39)
CALYIYNAGNMPTF

SEQ ID NO: 483220 - protein, 13 aa, Homo sapiens
  CDR3 for beta chain variable domain of TCR clone 241610 (TRBV12-4, TRBJ1-2)
CASSLDSNYGYTF

SEQ ID NO: 483221 - protein, 11 aa, Homo sapiens
  CDR3 for alpha chain variable domain of TCR clone 241611 (TRAV1-1, TRAJ9)
CAVAGGFKTIF

SEQ ID NO: 483222 - protein, 15 aa, Homo sapiens
  CDR3 for beta chain variable domain of TCR clone 241611 (TRBV5-8, TRBJ2-2)
CASSLDRGATGELFF

SEQ ID NO: 483223 - protein, 14 aa, Homo sapiens
  CDR3 for alpha chain variable domain of TCR clone 241612 (TRAV3, TRAJ9)
CAVRLNTGGFKTIF

SEQ ID NO: 483224 - protein, 15 aa, Homo sapiens
  CDR3 for beta chain variable domain of TCR clone 241612 (TRBV19, TRBJ2-1)
CASSLTGGANNERFF

SEQ ID NO: 483225 - protein, 20 aa, Homo sapiens
  CDR3 for alpha chain variable domain of TCR clone 241613 (TRAV2, TRAJ13)
CSSSRCGRQMLLPLDQKVTF

SEQ ID NO: 483226 - protein, 12 aa, Homo sapiens
  CDR3 for beta chain variable domain of TCR clone 241613 (TRBV11-2, TRBJ2-1)
CASSPGNNEQFF

SEQ ID NO: 483227 - protein, 14 aa, Homo sapiens
  CDR3 for alpha chain variable domain of TCR clone 241614 (TRAV12-1, TRAJ26)
CVGKGSNYGQNFVF

SEQ ID NO: 483228 - protein, 17 aa, Homo sapiens
  CDR3 for beta chain variable domain of TCR clone 241614 (TRBV11-2, TRBJ2-6)
CASSQRDIFSGANVLTF

SEQ ID NO: 483229 - protein, 15 aa, Homo sapiens
  CDR3 for alpha chain variable domain of TCR clone 241615 (TRAV3, TRAJ22)
CAVRDRGGSARQLTF

SEQ ID NO: 483230 - protein, 14 aa, Homo sapiens
  CDR3 for beta chain variable domain of TCR clone 241615 (TRBV7-8, TRBJ2-3)
CASSFPDGQDTQYF

SEQ ID NO: 483231 - protein, 13 aa, Homo sapiens
  CDR3 for alpha chain variable domain of TCR clone 241616 (TRAV8-4, TRAJ9)
CAVSEAGGFKTIF

SEQ ID NO: 483232 - protein, 14 aa, Homo sapiens
  CDR3 for beta chain variable domain of TCR clone 241616 (TRBV18, TRBJ2-3)
CASSGLADTDTQYF

SEQ ID NO: 483233 - protein, 15 aa, Homo sapiens
  CDR3 for alpha chain variable domain of TCR clone 241617 (TRAV21, TRAJ48)
CAVPISNFGNEKLTF

SEQ ID NO: 483234 - protein, 16 aa, Homo sapiens
  CDR3 for beta chain variable domain of TCR clone 241617 (TRBV5-7, TRBJ2-7)
CASSLAPSVLTYEQYF

SEQ ID NO: 483235 - protein, 11 aa, Homo sapiens
  CDR3 for alpha chain variable domain of TCR clone 241618 (TRAV13-1, TRAJ39)
CASHAGNMLTF

SEQ ID NO: 483236 - protein, 15 aa, Homo sapiens
  CDR3 for beta chain variable domain of TCR clone 241618 (TRBV7-2, TRBJ2-1)
CASSSGLAGGNEQFF

SEQ ID NO: 483237 - protein, 14 aa, Homo sapiens
  CDR3 for alpha chain variable domain of TCR clone 241619 (TRAV21, TRAJ28)
CAVGSGAGSYQLTF

SEQ ID NO: 483238 - protein, 14 aa, Homo sapiens
  CDR3 for beta chain variable domain of TCR clone 241619 (TRBV18, TRBJ1-4)
CASSPGPNGEKPFF

SEQ ID NO: 483239 - protein, 16 aa, Homo sapiens
  CDR3 for alpha chain variable domain of TCR clone 241620 (TRAV26-1, TRAJ32)
CIVRTNYGGATNKLIF

SEQ ID NO: 483240 - protein, 14 aa, Homo sapiens
  CDR3 for beta chain variable domain of TCR clone 241620 (TRBV27, TRBJ1-1)
CATSLLSGLSEAFF

SEQ ID NO: 483241 - protein, 16 aa, Homo sapiens
  CDR3 for alpha chain variable domain of TCR clone 241621 (TRAV12-1, TRAJ4)
CLVNPGISGGYTKLIF

SEQ ID NO: 483242 - protein, 14 aa, Homo sapiens
  CDR3 for beta chain variable domain of TCR clone 241621 (TRBV5-7, TRBJ2-3)
CASRTSGGTDTQYF

SEQ ID NO: 483243 - protein, 13 aa, Homo sapiens
  CDR3 for alpha chain variable domain of TCR clone 241622 (TRAV8-3, TRAJ43)
CAVVPYNNNDMRF

SEQ ID NO: 483244 - protein, 13 aa, Homo sapiens
  CDR3 for beta chain variable domain of TCR clone 241622 (TRBV11-2, TRBJ2-5)
CASSSTGEETQYF

SEQ ID NO: 483245 - protein, 11 aa, Homo sapiens
  CDR3 for alpha chain variable domain of TCR clone 241623 (TRAV13-1, TRAJ39)
CASHAGNMLTF

SEQ ID NO: 483246 - protein, 15 aa, Homo sapiens
  CDR3 for beta chain variable domain of TCR clone 241623 (TRBV7-2, TRBJ2-2)
CASRRPGQNTGELFF

SEQ ID NO: 483247 - protein, 15 aa, Homo sapiens
  CDR3 for alpha chain variable domain of TCR clone 241624 (TRAV12-1, TRAJ9)
CVVSFGDTGGFKTIF

SEQ ID NO: 483248 - protein, 13 aa, Homo sapiens
  CDR3 for beta chain variable domain of TCR clone 241624 (TRBV7-9, TRBJ2-3)
CASSPGSTDTQYF

SEQ ID NO: 483249 - protein, 14 aa, Homo sapiens
  CDR3 for alpha chain variable domain of TCR clone 241625 (TRAV38-1, TRAJ40)
CPLRPTSGTYKYIF

SEQ ID NO: 483250 - protein, 14 aa, Homo sapiens
  CDR3 for beta chain variable domain of TCR clone 241625 (TRBV5-4, TRBJ1-1)
CASSLDSRRDEAFF

SEQ ID NO: 483251 - protein, 14 aa, Homo sapiens
  CDR3 for alpha chain variable domain of TCR clone 241626 (TRAV2, TRAJ37)
CAVDFTSNTGKLIF

SEQ ID NO: 483252 - protein, 14 aa, Homo sapiens
  CDR3 for beta chain variable domain of TCR clone 241626 (TRBV2, TRBJ2-5)
CASSEVLAQETQYF

SEQ ID NO: 483253 - protein, 12 aa, Homo sapiens
  CDR3 for alpha chain variable domain of TCR clone 241627 (TRAV13-1, TRAJ26)
CAASSRYLWSEF

SEQ ID NO: 483254 - protein, 13 aa, Homo sapiens
  CDR3 for beta chain variable domain of TCR clone 241627 (TRBV7-9, TRBJ2-7)
CASSAGLQYEQYF

SEQ ID NO: 483255 - protein, 14 aa, Homo sapiens
  CDR3 for alpha chain variable domain of TCR clone 241628 (TRAV13-1, TRAJ12)
CAASYMESSYKLIF

SEQ ID NO: 483256 - protein, 13 aa, Homo sapiens
  CDR3 for beta chain variable domain of TCR clone 241628 (TRBV2, TRBJ2-5)
CASSDGIQETQYF

SEQ ID NO: 483257 - protein, 22 aa, Homo sapiens
  CDR3 for alpha chain variable domain of TCR clone 241629 (TRAV27, )
CAARRNASNHHIQNPDPAVYQL

SEQ ID NO: 483258 - protein, 13 aa, Homo sapiens
  CDR3 for beta chain variable domain of TCR clone 241629 (TRBV12-5, TRBJ2-3)
CASGDRQSDTQYF

SEQ ID NO: 483259 - protein, 16 aa, Homo sapiens
  CDR3 for alpha chain variable domain of TCR clone 241630 (TRAV26-1, TRAJ28)
CIVRGYSGAGSYQLTF

SEQ ID NO: 483260 - protein, 17 aa, Homo sapiens
  CDR3 for beta chain variable domain of TCR clone 241630 (TRBV24-1, TRBJ2-2)
CATSDFGGAPYTGELFF

SEQ ID NO: 483261 - protein, 15 aa, Homo sapiens
  CDR3 for alpha chain variable domain of TCR clone 241631 (TRAV3, TRAJ22)
CAVRDRGGSARQLPF

SEQ ID NO: 483262 - protein, 18 aa, Homo sapiens
  CDR3 for beta chain variable domain of TCR clone 241631 (TRBV12-4, TRBJ2-2)
CASSLVAGTRGRTGELFL

SEQ ID NO: 483263 - protein, 13 aa, Homo sapiens
  CDR3 for alpha chain variable domain of TCR clone 241632 (TRAV1-1, TRAJ6)
CAVRLGGSYIPTF

SEQ ID NO: 483264 - protein, 14 aa, Homo sapiens
  CDR3 for beta chain variable domain of TCR clone 241632 (TRBV7-2, TRBJ2-5)
CASSLAPDQETQYL

SEQ ID NO: 483265 - protein, 16 aa, Homo sapiens
  CDR3 for alpha chain variable domain of TCR clone 241633 (TRAV3, TRAJ37)
CAVRPHRSGNTGKLVF

SEQ ID NO: 483266 - protein, 16 aa, Homo sapiens
  CDR3 for beta chain variable domain of TCR clone 241633 (TRBV9, TRBJ1-2)
CASSVEEKVSPYGYTF

SEQ ID NO: 483267 - protein, 14 aa, Homo sapiens
  CDR3 for alpha chain variable domain of TCR clone 241634 (TRAV13-1, TRAJ5)
CAASPGSRSRALTF

SEQ ID NO: 483268 - protein, 17 aa, Homo sapiens
  CDR3 for beta chain variable domain of TCR clone 241634 (TRBV20-1, TRBJ2-1)
CSASSSGLAGSYNEQFF

SEQ ID NO: 483269 - protein, 13 aa, Homo sapiens
  CDR3 for alpha chain variable domain of TCR clone 241635 (TRAV21, TRAJ56)
CAGWVGANSKLTF

SEQ ID NO: 483270 - protein, 19 aa, Homo sapiens
  CDR3 for beta chain variable domain of TCR clone 241635 (TRBV19, TRBJ2-5)
CASSIGQVTDFFLGETQYF

SEQ ID NO: 483271 - protein, 12 aa, Homo sapiens
  CDR3 for alpha chain variable domain of TCR clone 241636 (TRAV8-3, TRAJ41)
CAVGALGYALNF

SEQ ID NO: 483272 - protein, 16 aa, Homo sapiens
  CDR3 for beta chain variable domain of TCR clone 241636 (TRBV7-6, TRBJ2-3)
CASSDSRVEGTDTQYF

SEQ ID NO: 483273 - protein, 13 aa, Homo sapiens
  CDR3 for alpha chain variable domain of TCR clone 241637 (TRAV22, TRAJ44)
CALNPGTASKLTF

SEQ ID NO: 483274 - protein, 16 aa, Homo sapiens
  CDR3 for beta chain variable domain of TCR clone 241637 (TRBV7-9, TRBJ1-2)
CASSLGFSSGEDGYSF

SEQ ID NO: 483275 - protein, 12 aa, Homo sapiens
  CDR3 for alpha chain variable domain of TCR clone 241638 (TRAV12-1, TRAJ40)
CVVYSGTYKYIF

SEQ ID NO: 483276 - protein, 18 aa, Homo sapiens
  CDR3 for beta chain variable domain of TCR clone 241638 (TRBV11-2, TRBJ2-3)
CSSSLGGASRGDPNTQYF

SEQ ID NO: 483277 - protein, 13 aa, Homo sapiens
  CDR3 for alpha chain variable domain of TCR clone 241639 (TRAV12-3, TRAJ40)
CAMSARGTYKYIF

SEQ ID NO: 483278 - protein, 17 aa, Homo sapiens
  CDR3 for beta chain variable domain of TCR clone 241639 (TRBV7-8, TRBJ2-6)
CASSAGTGGAGANVLTF

SEQ ID NO: 483279 - protein, 15 aa, Homo sapiens
  CDR3 for alpha chain variable domain of TCR clone 241640 (TRAV17, TRAJ57)
CATGPSQGGSEKLVC

SEQ ID NO: 483280 - protein, 18 aa, Homo sapiens
  CDR3 for beta chain variable domain of TCR clone 241640 (TRBV7-9, TRBJ2-7)
CASSLTTSGSRTWYEQYF

SEQ ID NO: 483281 - protein, 11 aa, Homo sapiens
  CDR3 for alpha chain variable domain of TCR clone 241641 (TRAV12-2, TRAJ49)
CALQGGNQFYF

SEQ ID NO: 483282 - protein, 14 aa, Homo sapiens
  CDR3 for beta chain variable domain of TCR clone 241641 (TRBV7-2, TRBJ2-7)
CASSPETSFYEQYF

SEQ ID NO: 483283 - protein, 11 aa, Homo sapiens
  CDR3 for alpha chain variable domain of TCR clone 241642 (TRAV29/DV5, TRAJ49)
CAAVPCNQFYF

SEQ ID NO: 483284 - protein, 17 aa, Homo sapiens
  CDR3 for beta chain variable domain of TCR clone 241642 (TRBV4-2, TRBJ1-1)
CASTQFGGGSGSTEAFF

SEQ ID NO: 483285 - protein, 12 aa, Homo sapiens
  CDR3 for alpha chain variable domain of TCR clone 241643 (TRAV14/DV4, TRAJ9)
CAMNPGGFKTIF

SEQ ID NO: 483286 - protein, 15 aa, Homo sapiens
  CDR3 for beta chain variable domain of TCR clone 241643 (TRBV28, TRBJ2-5)
CQQFSPAGGWETQYF

SEQ ID NO: 483287 - protein, 12 aa, Homo sapiens
  CDR3 for alpha chain variable domain of TCR clone 241644 (TRAV8-3, TRAJ27)
CAVGAEAGKSTF

SEQ ID NO: 483288 - protein, 14 aa, Homo sapiens
  CDR3 for beta chain variable domain of TCR clone 241644 (TRBV2, TRBJ2-1)
CASRLIVGHDEQSF

SEQ ID NO: 483289 - protein, 13 aa, Homo sapiens
  CDR3 for alpha chain variable domain of TCR clone 241645 (TRAV26-1, TRAJ48)
CIVRVVGDEKLTF

SEQ ID NO: 483290 - protein, 16 aa, Homo sapiens
  CDR3 for beta chain variable domain of TCR clone 241645 (TRBV12-5, TRBJ2-5)
CASGPRTRGNQETQYF

SEQ ID NO: 483291 - protein, 16 aa, Homo sapiens
  CDR3 for alpha chain variable domain of TCR clone 241646 (TRAV16, TRAJ52)
CALSAAGGTSYGKLTF

SEQ ID NO: 483292 - protein, 19 aa, Homo sapiens
  CDR3 for beta chain variable domain of TCR clone 241646 (TRBV6-3, TRBJ1-2)
CASSYSKGRTGPPNYGYTF

SEQ ID NO: 483293 - protein, 15 aa, Homo sapiens
  CDR3 for alpha chain variable domain of TCR clone 241647 (TRAV17, TRAJ57)
CATGPSQGGSEKLVF

SEQ ID NO: 483294 - protein, 11 aa, Homo sapiens
  CDR3 for beta chain variable domain of TCR clone 241647 (TRBV2, TRBJ1-5)
CASSELHKSGF

SEQ ID NO: 483295 - protein, 14 aa, Homo sapiens
  CDR3 for alpha chain variable domain of TCR clone 241648 (TRAV2, TRAJ33)
CAVEDQGSNYQLIG

SEQ ID NO: 483296 - protein, 15 aa, Homo sapiens
  CDR3 for beta chain variable domain of TCR clone 241648 (TRBV9, TRBJ2-3)
CASSEQGAGRDTQYF

SEQ ID NO: 483297 - protein, 12 aa, Homo sapiens
  CDR3 for alpha chain variable domain of TCR clone 241649 (TRAV36/DV7, TRAJ26)
CAVENYGQNFVF

SEQ ID NO: 483298 - protein, 16 aa, Homo sapiens
  CDR3 for beta chain variable domain of TCR clone 241649 (TRBV7-3, TRBJ2-2)
CASSLTGTGTTGELFF

SEQ ID NO: 483299 - protein, 16 aa, Homo sapiens
  CDR3 for alpha chain variable domain of TCR clone 241650 (TRAV26-1, TRAJ33)
CIVPFWGEDSNYQLIW

SEQ ID NO: 483300 - protein, 15 aa, Homo sapiens
  CDR3 for beta chain variable domain of TCR clone 241650 (TRBV5-1, TRBJ2-7)
CASSFFGQGGDAQYF

SEQ ID NO: 483301 - protein, 12 aa, Homo sapiens
  CDR3 for alpha chain variable domain of TCR clone 241651 (TRAV38-1, TRAJ47)
CAFETYGNKLVF

SEQ ID NO: 483302 - protein, 15 aa, Homo sapiens
  CDR3 for beta chain variable domain of TCR clone 241651 (TRBV20-1, TRBJ2-7)
CSAIKGLAESYEQYF

SEQ ID NO: 483303 - protein, 12 aa, Homo sapiens
  CDR3 for alpha chain variable domain of TCR clone 241652 (TRAV13-1, TRAJ40)
CAAGKGTYKYVF

SEQ ID NO: 483304 - protein, 13 aa, Homo sapiens
  CDR3 for beta chain variable domain of TCR clone 241652 (TRBV7-9, TRBJ1-2)
CASSLKQNYGYTF

SEQ ID NO: 483305 - protein, 13 aa, Homo sapiens
  CDR3 for alpha chain variable domain of TCR clone 241653 (TRAV4, TRAJ16)
CLVGSSDGQKLLF

SEQ ID NO: 483306 - protein, 15 aa, Homo sapiens
  CDR3 for beta chain variable domain of TCR clone 241653 (TRBV11-3, TRBJ2-1)
CASSSGGTVADAQFF

SEQ ID NO: 483307 - protein, 15 aa, Homo sapiens
  CDR3 for alpha chain variable domain of TCR clone 241654 (TRAV26-1, TRAJ23)
CIFGVAGYQGGKLIF

SEQ ID NO: 483308 - protein, 18 aa, Homo sapiens
  CDR3 for beta chain variable domain of TCR clone 241654 (TRBV28, TRBJ2-1)
CASSSTSGRANSYNEQFF

SEQ ID NO: 483309 - protein, 14 aa, Homo sapiens
  CDR3 for alpha chain variable domain of TCR clone 241655 (TRAV3, TRAJ34)
CAVRAPGNTDKLLF

SEQ ID NO: 483310 - protein, 14 aa, Homo sapiens
  CDR3 for beta chain variable domain of TCR clone 241655 (TRBV5-4, TRBJ1-1)
CASSLDSRRDEAFF

SEQ ID NO: 483311 - protein, 18 aa, Homo sapiens
  CDR3 for alpha chain variable domain of TCR clone 241656 (TRAV21, TRAJ52)
CAVRPSPAGGTSYGKLTF

SEQ ID NO: 483312 - protein, 16 aa, Homo sapiens
  CDR3 for beta chain variable domain of TCR clone 241656 (TRBV24-1, TRBJ2-3)
CATSDPGTGATDTQYF

SEQ ID NO: 483313 - protein, 12 aa, Homo sapiens
  CDR3 for alpha chain variable domain of TCR clone 241657 (TRAV23/DV6, )
CAATALIPDIQN

SEQ ID NO: 483314 - protein, 16 aa, Homo sapiens
  CDR3 for beta chain variable domain of TCR clone 241657 (TRBV10-3, TRBJ2-7)
CAISPRGQEQTYEQYF

SEQ ID NO: 483315 - protein, 15 aa, Homo sapiens
  CDR3 for alpha chain variable domain of TCR clone 241658 (TRAV14/DV4, TRAJ26)
CAMREGQNYGQNFVF

SEQ ID NO: 483316 - protein, 16 aa, Homo sapiens
  CDR3 for beta chain variable domain of TCR clone 241658 (TRBV10-3, TRBJ2-1)
CAISGVGDGGGGEQFF

SEQ ID NO: 483317 - protein, 12 aa, Homo sapiens
  CDR3 for alpha chain variable domain of TCR clone 241659 (TRAV12-2, TRAJ30)
CAGTNRDDKIIF

SEQ ID NO: 483318 - protein, 14 aa, Homo sapiens
  CDR3 for beta chain variable domain of TCR clone 241659 (TRBV7-2, TRBJ2-7)
CASSPKTSFYEQYF

SEQ ID NO: 483319 - protein, 17 aa, Homo sapiens
  CDR3 for alpha chain variable domain of TCR clone 241660 (TRAV26-1, TRAJ53)
CIVRVDDSGGSNNKLTL

SEQ ID NO: 483320 - protein, 15 aa, Homo sapiens
  CDR3 for beta chain variable domain of TCR clone 241660 (TRBV20-1, TRBJ2-7)
CSARVPAAYFYEQYF

SEQ ID NO: 483321 - protein, 14 aa, Homo sapiens
  CDR3 for alpha chain variable domain of TCR clone 241661 (TRAV17, TRAJ12)
CAILQMDSSYKLIF

SEQ ID NO: 483322 - protein, 15 aa, Homo sapiens
  CDR3 for beta chain variable domain of TCR clone 241661 (TRBV5-1, TRBJ1-1)
CASSLGEGENTEAFF

SEQ ID NO: 483323 - protein, 18 aa, Homo sapiens
  CDR3 for alpha chain variable domain of TCR clone 241662 (TRAV21, TRAJ52)
CAVRPSLAGGTSSGKLTF

SEQ ID NO: 483324 - protein, 17 aa, Homo sapiens
  CDR3 for beta chain variable domain of TCR clone 241662 (TRBV13, TRBJ2-3)
CASSLSRVAGGRNTQYF

SEQ ID NO: 483325 - protein, 13 aa, Homo sapiens
  CDR3 for alpha chain variable domain of TCR clone 241663 (TRAV27, TRAJ41)
CAGEGNSGYALHF

SEQ ID NO: 483326 - protein, 13 aa, Homo sapiens
  CDR3 for beta chain variable domain of TCR clone 241663 (TRBV27, TRBJ2-7)
CASSFVSSYEQYF

SEQ ID NO: 483327 - protein, 17 aa, Homo sapiens
  CDR3 for alpha chain variable domain of TCR clone 241664 (TRAV13-1, TRAJ31)
CAPRDRLMFGDGTQLVL

SEQ ID NO: 483328 - protein, 13 aa, Homo sapiens
  CDR3 for beta chain variable domain of TCR clone 241664 (TRBV4-1, TRBJ2-1)
CASSQAGGDEQFF

SEQ ID NO: 483329 - protein, 18 aa, Homo sapiens
  CDR3 for alpha chain variable domain of TCR clone 241665 (TRAV21, TRAJ52)
CAVRPSPAGGTSYGKLTF

SEQ ID NO: 483330 - protein, 13 aa, Homo sapiens
  CDR3 for beta chain variable domain of TCR clone 241665 (TRBV18, TRBJ2-5)
CASSLQGQETQYF

SEQ ID NO: 483331 - protein, 14 aa, Homo sapiens
  CDR3 for alpha chain variable domain of TCR clone 241666 (TRAV1-2, TRAJ16)
CAVNRFSDGQKLLS

SEQ ID NO: 483332 - protein, 17 aa, Homo sapiens
  CDR3 for beta chain variable domain of TCR clone 241666 (TRBV20-1, TRBJ2-1)
CSASSSGLAGSYNEQFF

SEQ ID NO: 483333 - protein, 14 aa, Homo sapiens
  CDR3 for alpha chain variable domain of TCR clone 241667 (TRAV12-2, TRAJ44)
CSVNKAGTASKLTF

SEQ ID NO: 483334 - protein, 12 aa, Homo sapiens
  CDR3 for beta chain variable domain of TCR clone 241667 (TRBV19, TRBJ1-4)
CASKDWPGGLFF

SEQ ID NO: 483335 - protein, 14 aa, Homo sapiens
  CDR3 for alpha chain variable domain of TCR clone 241668 (TRAV12-3, TRAJ10)
SHLPLTRGGNKLTF

SEQ ID NO: 483336 - protein, 12 aa, Homo sapiens
  CDR3 for beta chain variable domain of TCR clone 241668 (TRBV12-4, TRBJ2-3)
CASSSTTDTQYF

SEQ ID NO: 483337 - protein, 15 aa, Homo sapiens
  CDR3 for alpha chain variable domain of TCR clone 241669 (TRAV21, TRAJ53)
CAVRQSGGSNYKLTF

SEQ ID NO: 483338 - protein, 13 aa, Homo sapiens
  CDR3 for beta chain variable domain of TCR clone 241669 (TRBV9, TRBJ2-1)
CASSPSGGNGQFF

SEQ ID NO: 483339 - protein, 12 aa, Homo sapiens
  CDR3 for alpha chain variable domain of TCR clone 241670 (TRAV21, TRAJ37)
CAARGNTGKLIF

SEQ ID NO: 483340 - protein, 13 aa, Homo sapiens
  CDR3 for beta chain variable domain of TCR clone 241670 (TRBV19, TRBJ1-2)
CASSVPGQDGYTF

SEQ ID NO: 483341 - protein, 11 aa, Homo sapiens
  CDR3 for alpha chain variable domain of TCR clone 241671 (TRAV12-3, TRAJ27)
CSMANAGKSTF

SEQ ID NO: 483342 - protein, 15 aa, Homo sapiens
  CDR3 for beta chain variable domain of TCR clone 241671 (TRBV6-3, TRBJ2-7)
CASSSPGTVFYEQYF

SEQ ID NO: 483343 - protein, 14 aa, Homo sapiens
  CDR3 for alpha chain variable domain of TCR clone 241672 (TRAV12-3, TRAJ42)
CAMNYGGSQGNLIS

SEQ ID NO: 483344 - protein, 15 aa, Homo sapiens
  CDR3 for beta chain variable domain of TCR clone 241672 (TRBV5-7, TRBJ1-5)
CASSYGILWDQPQHF

SEQ ID NO: 483345 - protein, 15 aa, Homo sapiens
  CDR3 for alpha chain variable domain of TCR clone 241673 (TRAV8-3, TRAJ15)
CAVGSPKQAGTALIF

SEQ ID NO: 483346 - protein, 14 aa, Homo sapiens
  CDR3 for beta chain variable domain of TCR clone 241673 (TRBV20-1, TRBJ2-1)
CSPNDEASYNEQFF

SEQ ID NO: 483347 - protein, 17 aa, Homo sapiens
  CDR3 for alpha chain variable domain of TCR clone 241674 (TRAV8-4, TRAJ45)
CAVSEGGAGGGADGLTF

SEQ ID NO: 483348 - protein, 13 aa, Homo sapiens
  CDR3 for beta chain variable domain of TCR clone 241674 (TRBV20-1, TRBJ1-1)
CSASKRGLTEAFF

SEQ ID NO: 483349 - protein, 13 aa, Homo sapiens
  CDR3 for alpha chain variable domain of TCR clone 241675 (TRAV12-2, TRAJ37)
CAGGSGNTGKLIF

SEQ ID NO: 483350 - protein, 13 aa, Homo sapiens
  CDR3 for beta chain variable domain of TCR clone 241675 (TRBV2, TRBJ1-1)
CARNPTGGFHAFF

SEQ ID NO: 483351 - protein, 14 aa, Homo sapiens
  CDR3 for alpha chain variable domain of TCR clone 241676 (TRAV12-1, TRAJ41)
CVVLHSNSGYALNF

SEQ ID NO: 483352 - protein, 14 aa, Homo sapiens
  CDR3 for beta chain variable domain of TCR clone 241676 (TRBV5-8, TRBJ1-1)
CASSPRTGFSEAFF

SEQ ID NO: 483353 - protein, 12 aa, Homo sapiens
  CDR3 for alpha chain variable domain of TCR clone 241677 (TRAV12-3, TRAJ17)
CAMTLTGNKLTF

SEQ ID NO: 483354 - protein, 14 aa, Homo sapiens
  CDR3 for beta chain variable domain of TCR clone 241677 (TRBV28, TRBJ2-5)
CASTGAGGVETQYF

SEQ ID NO: 483355 - protein, 16 aa, Homo sapiens
  CDR3 for alpha chain variable domain of TCR clone 241678 (TRAV3, TRAJ21)
CAVRDIERGNFNKFYF

SEQ ID NO: 483356 - protein, 13 aa, Homo sapiens
  CDR3 for beta chain variable domain of TCR clone 241678 (TRBV10-2, TRBJ2-5)
CASSVGPQETQYF

SEQ ID NO: 483357 - protein, 16 aa, Homo sapiens
  CDR3 for alpha chain variable domain of TCR clone 241679 (TRAV12-3, TRAJ53)
CAMSVGSGGSNYKLTF

SEQ ID NO: 483358 - protein, 14 aa, Homo sapiens
  CDR3 for beta chain variable domain of TCR clone 241679 (TRBV7-6, TRBJ2-3)
CASSLGTVTDTQYF

SEQ ID NO: 483359 - protein, 12 aa, Homo sapiens
  CDR3 for alpha chain variable domain of TCR clone 241680 (TRAV12-1, TRAJ40)
CVVYSGTYKYIF

SEQ ID NO: 483360 - protein, 15 aa, Homo sapiens
  CDR3 for beta chain variable domain of TCR clone 241680 (TRBV6-5, TRBJ2-3)
CASSLNGDYTDTQYF

SEQ ID NO: 483361 - protein, 14 aa, Homo sapiens
  CDR3 for alpha chain variable domain of TCR clone 241681 (TRAV1-2, TRAJ8)
CAVREDTGFQKLAF

SEQ ID NO: 483362 - protein, 18 aa, Homo sapiens
  CDR3 for beta chain variable domain of TCR clone 241681 (TRBV11-2, TRBJ2-3)
CASSLGGASRGAPNTQYF

SEQ ID NO: 483363 - protein, 16 aa, Homo sapiens
  CDR3 for alpha chain variable domain of TCR clone 241682 (TRAV26-1, TRAJ45)
CIVEKYSGGDADGLTF

SEQ ID NO: 483364 - protein, 15 aa, Homo sapiens
  CDR3 for beta chain variable domain of TCR clone 241682 (TRBV15, TRBJ2-7)
CHQQRPIQQAYEQYF

SEQ ID NO: 483365 - protein, 12 aa, Homo sapiens
  CDR3 for alpha chain variable domain of TCR clone 241683 (TRAV27, TRAJ20)
CAGASNDYKLSF

SEQ ID NO: 483366 - protein, 14 aa, Homo sapiens
  CDR3 for beta chain variable domain of TCR clone 241683 (TRBV6-1, TRBJ1-3)
CASVQGGGGNTIYF

SEQ ID NO: 483367 - protein, 15 aa, Homo sapiens
  CDR3 for alpha chain variable domain of TCR clone 241684 (TRAV3, TRAJ22)
CAVRVRGGSARQLTF

SEQ ID NO: 483368 - protein, 16 aa, Homo sapiens
  CDR3 for beta chain variable domain of TCR clone 241684 (TRBV5-4, TRBJ2-3)
CASQQPGAGGADTQYF

SEQ ID NO: 483369 - protein, 14 aa, Homo sapiens
  CDR3 for alpha chain variable domain of TCR clone 241685 (TRAV12-2, TRAJ40)
CAVKIPSGTHKYIF

SEQ ID NO: 483370 - protein, 17 aa, Homo sapiens
  CDR3 for beta chain variable domain of TCR clone 241685 (TRBV13, TRBJ2-3)
CASSLSRVAGVRNTQYF

SEQ ID NO: 483371 - protein, 17 aa, Homo sapiens
  CDR3 for alpha chain variable domain of TCR clone 241686 (TRAV3, TRAJ4)
CAGRDIMFSGGYNKLIF

SEQ ID NO: 483372 - protein, 13 aa, Homo sapiens
  CDR3 for beta chain variable domain of TCR clone 241686 (TRBV28, TRBJ2-1)
CASSLIGRDEQFF

SEQ ID NO: 483373 - protein, 13 aa, Homo sapiens
  CDR3 for alpha chain variable domain of TCR clone 241687 (TRAV12-3, TRAJ7)
CAMTPYGNNRLAF

SEQ ID NO: 483374 - protein, 13 aa, Homo sapiens
  CDR3 for beta chain variable domain of TCR clone 241687 (TRBV6-1, TRBJ1-1)
CASSRQGNTEAFF

SEQ ID NO: 483375 - protein, 16 aa, Homo sapiens
  CDR3 for alpha chain variable domain of TCR clone 241688 (TRAV17, TRAJ52)
CATSNAGGTSYGKLTF

SEQ ID NO: 483376 - protein, 15 aa, Homo sapiens
  CDR3 for beta chain variable domain of TCR clone 241688 (TRBV5-7, TRBJ2-7)
CASSLPGQVFYEQYF

SEQ ID NO: 483377 - protein, 14 aa, Homo sapiens
  CDR3 for alpha chain variable domain of TCR clone 241689 (TRAV38-1, TRAJ45)
CASYSGGGADGLTF

SEQ ID NO: 483378 - protein, 14 aa, Homo sapiens
  CDR3 for beta chain variable domain of TCR clone 241689 (TRBV25-1, TRBJ1-1)
CTSTHLGGNTEAFF

SEQ ID NO: 483379 - protein, 15 aa, Homo sapiens
  CDR3 for alpha chain variable domain of TCR clone 241690 (TRAV3, TRAJ22)
CAVRDRGGAARQLTF

SEQ ID NO: 483380 - protein, 15 aa, Homo sapiens
  CDR3 for beta chain variable domain of TCR clone 241690 (TRBV7-3, TRBJ2-2)
CASSETGQGTGELFF

SEQ ID NO: 483381 - protein, 14 aa, Homo sapiens
  CDR3 for alpha chain variable domain of TCR clone 241691 (TRAV12-3, TRAJ29)
CAMSPHSGNTPLVF

SEQ ID NO: 483382 - protein, 17 aa, Homo sapiens
  CDR3 for beta chain variable domain of TCR clone 241691 (TRBV7-8, TRBJ2-6)
CASSAGTGGAGANVLTF

SEQ ID NO: 483383 - protein, 13 aa, Homo sapiens
  CDR3 for alpha chain variable domain of TCR clone 241692 (TRAV27, TRAJ41)
CAGEGNSGYALNF

SEQ ID NO: 483384 - protein, 13 aa, Homo sapiens
  CDR3 for beta chain variable domain of TCR clone 241692 (TRBV27, TRBJ2-7)
CPSSFVSSYEQYF

SEQ ID NO: 483385 - protein, 13 aa, Homo sapiens
  CDR3 for alpha chain variable domain of TCR clone 241693 (TRAV27, TRAJ45)
CMSSGGGADGLTF

SEQ ID NO: 483386 - protein, 17 aa, Homo sapiens
  CDR3 for beta chain variable domain of TCR clone 241693 (TRBV11-2, TRBJ2-1)
CASSVYPPGVEYNEQFF

SEQ ID NO: 483387 - protein, 14 aa, Homo sapiens
  CDR3 for alpha chain variable domain of TCR clone 241694 (TRAV29/DV5, TRAJ44)
CAAFLVGTASKLTF

SEQ ID NO: 483388 - protein, 14 aa, Homo sapiens
  CDR3 for beta chain variable domain of TCR clone 241694 (TRBV7-3, TRBJ2-1)
CASSLAGGTNEQFF

SEQ ID NO: 483389 - protein, 14 aa, Homo sapiens
  CDR3 for alpha chain variable domain of TCR clone 241695 (TRAV12-3, TRAJ9)
CAMSPNTGGFKSIF

SEQ ID NO: 483390 - protein, 12 aa, Homo sapiens
  CDR3 for beta chain variable domain of TCR clone 241695 (TRBV19, TRBJ1-5)
CASSIAQQPQHF

SEQ ID NO: 483391 - protein, 15 aa, Homo sapiens
  CDR3 for alpha chain variable domain of TCR clone 241696 (TRAV23/DV6, TRAJ13)
CAAWPGGGGYQKVTF

SEQ ID NO: 483392 - protein, 13 aa, Homo sapiens
  CDR3 for beta chain variable domain of TCR clone 241696 (TRBV19, TRBJ2-3)
CATWDKITDTQYF

SEQ ID NO: 483393 - protein, 17 aa, Homo sapiens
  CDR3 for alpha chain variable domain of TCR clone 241697 (TRAV3, TRAJ6)
CAVRDGPKAGGSDIPTF

SEQ ID NO: 483394 - protein, 14 aa, Homo sapiens
  CDR3 for beta chain variable domain of TCR clone 241697 (TRBV7-2, TRBJ2-7)
CASSPKTSFYEQYF

SEQ ID NO: 483395 - protein, 14 aa, Homo sapiens
  CDR3 for alpha chain variable domain of TCR clone 241698 (TRAV17, TRAJ6)
CATDERRGSYIPTL

SEQ ID NO: 483396 - protein, 13 aa, Homo sapiens
  CDR3 for beta chain variable domain of TCR clone 241698 (TRBV27, TRBJ2-1)
CASSLGRIWGQFF

SEQ ID NO: 483397 - protein, 16 aa, Homo sapiens
  CDR3 for alpha chain variable domain of TCR clone 241699 (TRAV12-3, TRAJ58)
CAMTDTEETSGPRLTF

SEQ ID NO: 483398 - protein, 15 aa, Homo sapiens
  CDR3 for beta chain variable domain of TCR clone 241699 (TRBV4-2, TRBJ1-6)
CASSYHRDSDSPLHF

SEQ ID NO: 483399 - protein, 20 aa, Homo sapiens
  CDR3 for alpha chain variable domain of TCR clone 241700 (TRAV26-1, TRAJ38)
CIADNAGNNHIQNPDPAVYQ

SEQ ID NO: 483400 - protein, 14 aa, Homo sapiens
  CDR3 for beta chain variable domain of TCR clone 241700 (TRBV7-2, TRBJ2-7)
CASRSQGAAYEQYF

SEQ ID NO: 483401 - protein, 16 aa, Homo sapiens
  CDR3 for alpha chain variable domain of TCR clone 241701 (TRAV3, TRAJ37)
CAVRGKGSGNTGKLIF

SEQ ID NO: 483402 - protein, 13 aa, Homo sapiens
  CDR3 for beta chain variable domain of TCR clone 241701 (TRBV7-2, TRBJ2-2)
CASGSVRAGELFF

SEQ ID NO: 483403 - protein, 16 aa, Homo sapiens
  CDR3 for alpha chain variable domain of TCR clone 241702 (TRAV35, TRAJ52)
CVGQGSGGTSYGKLTF

SEQ ID NO: 483404 - protein, 17 aa, Homo sapiens
  CDR3 for beta chain variable domain of TCR clone 241702 (TRBV13, TRBJ2-3)
CASSLSRVAGGRNTQYF

SEQ ID NO: 483405 - protein, 13 aa, Homo sapiens
  CDR3 for alpha chain variable domain of TCR clone 241703 (TRAV13-1, TRAJ49)
CAAMLYTGKQFYF

SEQ ID NO: 483406 - protein, 15 aa, Homo sapiens
  CDR3 for beta chain variable domain of TCR clone 241703 (TRBV12-4, TRBJ1-5)
CASTRGSGFGQPQHF

SEQ ID NO: 483407 - protein, 18 aa, Homo sapiens
  CDR3 for alpha chain variable domain of TCR clone 241704 (TRAV38-2/DV8, TRAJ42)
CAYRSADLTGGSQGNLIC

SEQ ID NO: 483408 - protein, 12 aa, Homo sapiens
  CDR3 for beta chain variable domain of TCR clone 241704 (TRBV11-2, TRBJ2-2)
CASSLGGGELFF

SEQ ID NO: 483409 - protein, 17 aa, Homo sapiens
  CDR3 for alpha chain variable domain of TCR clone 241705 (TRAV4, TRAJ18)
CLVGERSVGSTLGRLYF

SEQ ID NO: 483410 - protein, 16 aa, Homo sapiens
  CDR3 for beta chain variable domain of TCR clone 241705 (TRBV19, TRBJ2-1)
CASSKAGPRSYNEQFF

SEQ ID NO: 483411 - protein, 14 aa, Homo sapiens
  CDR3 for alpha chain variable domain of TCR clone 241706 (TRAV12-2, TRAJ5)
CVVNRSTGRRALTF

SEQ ID NO: 483412 - protein, 12 aa, Homo sapiens
  CDR3 for beta chain variable domain of TCR clone 241706 (TRBV19, TRBJ1-5)
CASSIAQQPQHF

SEQ ID NO: 483413 - protein, 13 aa, Homo sapiens
  CDR3 for alpha chain variable domain of TCR clone 241707 (TRAV27, TRAJ45)
CRSSGGGADGLTF

SEQ ID NO: 483414 - protein, 17 aa, Homo sapiens
  CDR3 for beta chain variable domain of TCR clone 241707 (TRBV11-2, TRBJ2-1)
CASSLYPPGVEYNEQVF

SEQ ID NO: 483415 - protein, 15 aa, Homo sapiens
  CDR3 for alpha chain variable domain of TCR clone 241708 (TRAV1-1, TRAJ23)
CAVREGDNQGGKRIF

SEQ ID NO: 483416 - protein, 13 aa, Homo sapiens
  CDR3 for beta chain variable domain of TCR clone 241708 (TRBV10-3, TRBJ2-7)
CAISEKGGYEQYF

SEQ ID NO: 483417 - protein, 12 aa, Homo sapiens
  CDR3 for alpha chain variable domain of TCR clone 241709 (TRAV29/DV5, TRAJ27)
CAASTNAGKSTF

SEQ ID NO: 483418 - protein, 13 aa, Homo sapiens
  CDR3 for beta chain variable domain of TCR clone 241709 (TRBV6-5, TRBJ2-7)
CASSYSGQYEHYF

SEQ ID NO: 483419 - protein, 17 aa, Homo sapiens
  CDR3 for alpha chain variable domain of TCR clone 241710 (TRAV3, TRAJ42)
CAVRYRDYGGSQGNLIV

SEQ ID NO: 483420 - protein, 15 aa, Homo sapiens
  CDR3 for beta chain variable domain of TCR clone 241710 (TRBV6-6, TRBJ2-7)
CASSYSYGGSYEQYF

SEQ ID NO: 483421 - protein, 13 aa, Homo sapiens
  CDR3 for alpha chain variable domain of TCR clone 241711 (TRAV12-2, TRAJ20)
CAANRLDDYKLSF

SEQ ID NO: 483422 - protein, 12 aa, Homo sapiens
  CDR3 for beta chain variable domain of TCR clone 241711 (TRBV28, TRBJ2-3)
CASSLYRDTQYF

SEQ ID NO: 483423 - protein, 12 aa, Homo sapiens
  CDR3 for alpha chain variable domain of TCR clone 241712 (TRAV16, TRAJ9)
CTLRAGGFKTIF

SEQ ID NO: 483424 - protein, 13 aa, Homo sapiens
  CDR3 for beta chain variable domain of TCR clone 241712 (TRBV4-3, TRBJ1-1)
CASSQVEGSMAFF

SEQ ID NO: 483425 - protein, 14 aa, Homo sapiens
  CDR3 for alpha chain variable domain of TCR clone 241713 (TRAV8-6, TRAJ9)
CSVSSYTGGFKTIF

SEQ ID NO: 483426 - protein, 15 aa, Homo sapiens
  CDR3 for beta chain variable domain of TCR clone 241713 (TRBV2, TRBJ1-2)
CASSESRTVNYGYTF

SEQ ID NO: 483427 - protein, 15 aa, Homo sapiens
  CDR3 for alpha chain variable domain of TCR clone 241714 (TRAV25, TRAJ53)
CPTSNSGGSNYKLTF

SEQ ID NO: 483428 - protein, 15 aa, Homo sapiens
  CDR3 for beta chain variable domain of TCR clone 241714 (TRBV11-1, TRBJ2-7)
CASSRGRFKTYEQYF

SEQ ID NO: 483429 - protein, 17 aa, Homo sapiens
  CDR3 for alpha chain variable domain of TCR clone 241715 (TRAV12-1, TRAJ42)
CVVMRMNNGGSQGNLIF

SEQ ID NO: 483430 - protein, 13 aa, Homo sapiens
  CDR3 for beta chain variable domain of TCR clone 241715 (TRBV7-2, TRBJ1-1)
CASSLARPAEAFF

SEQ ID NO: 483431 - protein, 17 aa, Homo sapiens
  CDR3 for alpha chain variable domain of TCR clone 241716 (TRAV3, TRAJ42)
CAVRDRDYGGSQGYLIF

SEQ ID NO: 483432 - protein, 12 aa, Homo sapiens
  CDR3 for beta chain variable domain of TCR clone 241716 (TRBV11-2, TRBJ2-1)
CASSPGNNEQFF

SEQ ID NO: 483433 - protein, 15 aa, Homo sapiens
  CDR3 for alpha chain variable domain of TCR clone 241717 (TRAV2, TRAJ15)
CAVEDRNQAGTALSF

SEQ ID NO: 483434 - protein, 13 aa, Homo sapiens
  CDR3 for beta chain variable domain of TCR clone 241717 (TRBV10-2, TRBJ2-1)
CASGASGDAKQFF

SEQ ID NO: 483435 - protein, 13 aa, Homo sapiens
  CDR3 for alpha chain variable domain of TCR clone 241718 (TRAV20, TRAJ31)
CAVQAWNNARLMF

SEQ ID NO: 483436 - protein, 16 aa, Homo sapiens
  CDR3 for beta chain variable domain of TCR clone 241718 (TRBV6-6, TRBJ2-1)
CASSWGGQSPYNEQFF

SEQ ID NO: 483437 - protein, 17 aa, Homo sapiens
  CDR3 for alpha chain variable domain of TCR clone 241719 (TRAV19, TRAJ32)
CALSERPYGGATHKLIF

SEQ ID NO: 483438 - protein, 15 aa, Homo sapiens
  CDR3 for beta chain variable domain of TCR clone 241719 (TRBV28, TRBJ1-3)
CASSMGWASGNTIYF

SEQ ID NO: 483439 - protein, 14 aa, Homo sapiens
  CDR3 for alpha chain variable domain of TCR clone 241720 (TRAV17, TRAJ57)
CATDPQGGSEKLVF

SEQ ID NO: 483440 - protein, 15 aa, Homo sapiens
  CDR3 for beta chain variable domain of TCR clone 241720 (TRBV7-3, TRBJ1-1)
CASSPRADRNTEAFF

SEQ ID NO: 483441 - protein, 12 aa, Homo sapiens
  CDR3 for alpha chain variable domain of TCR clone 241721 (TRAV12-3, TRAJ17)
CAMTLTGNKRTF

SEQ ID NO: 483442 - protein, 15 aa, Homo sapiens
  CDR3 for beta chain variable domain of TCR clone 241721 (TRBV20-1, TRBJ2-7)
CSARDRVSGMDGQYF

SEQ ID NO: 483443 - protein, 12 aa, Homo sapiens
  CDR3 for alpha chain variable domain of TCR clone 241722 (TRAV12-3, TRAJ17)
CVMTLTGNKLTF

SEQ ID NO: 483444 - protein, 14 aa, Homo sapiens
  CDR3 for beta chain variable domain of TCR clone 241722 (TRBV19, TRBJ2-1)
CARGARSFQWEQFF

SEQ ID NO: 483445 - protein, 13 aa, Homo sapiens
  CDR3 for alpha chain variable domain of TCR clone 241723 (TRAV13-1, TRAJ37)
CAARSGNTVKLIF

SEQ ID NO: 483446 - protein, 14 aa, Homo sapiens
  CDR3 for beta chain variable domain of TCR clone 241723 (TRBV12-4, TRBJ2-3)
CASSLGQGTDTQYF

SEQ ID NO: 483447 - protein, 11 aa, Homo sapiens
  CDR3 for alpha chain variable domain of TCR clone 241724 (TRAV12-3, TRAJ43)
CAMSVSNDMRF

SEQ ID NO: 483448 - protein, 15 aa, Homo sapiens
  CDR3 for beta chain variable domain of TCR clone 241724 (TRBV4-1, TRBJ2-7)
CASSQQGQGFDEQYF

SEQ ID NO: 483449 - protein, 15 aa, Homo sapiens
  CDR3 for alpha chain variable domain of TCR clone 241725 (TRAV21, TRAJ40)
CAVRPQTSGTYKYVF

SEQ ID NO: 483450 - protein, 13 aa, Homo sapiens
  CDR3 for beta chain variable domain of TCR clone 241725 (TRBV4-2, TRBJ2-1)
CASSPGTYNEQFF

SEQ ID NO: 483451 - protein, 15 aa, Homo sapiens
  CDR3 for alpha chain variable domain of TCR clone 241726 (TRAV12-2, TRAJ43)
CAFDMRFGAGTRLTV

SEQ ID NO: 483452 - protein, 18 aa, Homo sapiens
  CDR3 for beta chain variable domain of TCR clone 241726 (TRBV20-1, TRBJ2-3)
CSDSGLAGGPWTTDTQYF

SEQ ID NO: 483453 - protein, 14 aa, Homo sapiens
  CDR3 for alpha chain variable domain of TCR clone 241727 (TRAV38-1, TRAJ35)
CAFLTIGFGNVLHF

SEQ ID NO: 483454 - protein, 19 aa, Homo sapiens
  CDR3 for beta chain variable domain of TCR clone 241727 (TRBV28, TRBJ1-1)
CTSVPSGDLRTESNTEAFF

SEQ ID NO: 483455 - protein, 15 aa, Homo sapiens
  CDR3 for alpha chain variable domain of TCR clone 241728 (TRAV14/DV4, TRAJ12)
CAMREGWDSSYKLIF

SEQ ID NO: 483456 - protein, 16 aa, Homo sapiens
  CDR3 for beta chain variable domain of TCR clone 241728 (TRBV2, TRBJ2-5)
CASSETQGVGEETQYL

SEQ ID NO: 483457 - protein, 10 aa, Homo sapiens
  CDR3 for alpha chain variable domain of TCR clone 241729 (TRAV13-2, TRAJ20)
CARRDYKLSF

SEQ ID NO: 483458 - protein, 16 aa, Homo sapiens
  CDR3 for beta chain variable domain of TCR clone 241729 (TRBV12-5, TRBJ2-5)
CASGPRTSGNQETQYF

SEQ ID NO: 483459 - protein, 15 aa, Homo sapiens
  CDR3 for alpha chain variable domain of TCR clone 241730 (TRAV2, TRAJ9)
CAVAALNTGGFKTIF

SEQ ID NO: 483460 - protein, 15 aa, Homo sapiens
  CDR3 for beta chain variable domain of TCR clone 241730 (TRBV7-3, TRBJ2-2)
CASSETGQGTGELFF

SEQ ID NO: 483461 - protein, 14 aa, Homo sapiens
  CDR3 for alpha chain variable domain of TCR clone 241731 (TRAV1-2, TRAJ8)
CAVREDTGFQKLGF

SEQ ID NO: 483462 - protein, 17 aa, Homo sapiens
  CDR3 for beta chain variable domain of TCR clone 241731 (TRBV7-9, TRBJ2-1)
CASSLVASYPSYNEQFF

SEQ ID NO: 483463 - protein, 11 aa, Homo sapiens
  CDR3 for alpha chain variable domain of TCR clone 241732 (TRAV17, TRAJ43)
CSTPRSNDMCF

SEQ ID NO: 483464 - protein, 15 aa, Homo sapiens
  CDR3 for beta chain variable domain of TCR clone 241732 (TRBV11-2, TRBJ2-1)
CASSLGTSGLNEQFF

SEQ ID NO: 483465 - protein, 13 aa, Homo sapiens
  CDR3 for alpha chain variable domain of TCR clone 241733 (TRAV2, TRAJ40)
CAVVISGTYKYIF

SEQ ID NO: 483466 - protein, 14 aa, Homo sapiens
  CDR3 for beta chain variable domain of TCR clone 241733 (TRBV19, TRBJ2-1)
CASPTFVLSGEQIF

SEQ ID NO: 483467 - protein, 15 aa, Homo sapiens
  CDR3 for alpha chain variable domain of TCR clone 241734 (TRAV16, TRAJ16)
CALQGVGSDGQKLLF

SEQ ID NO: 483468 - protein, 14 aa, Homo sapiens
  CDR3 for beta chain variable domain of TCR clone 241734 (TRBV12-4, TRBJ1-4)
CASSRQGANEKLFF

SEQ ID NO: 483469 - protein, 12 aa, Homo sapiens
  CDR3 for alpha chain variable domain of TCR clone 241735 (TRAV12-3, TRAJ17)
CAMTLTGNKLTF

SEQ ID NO: 483470 - protein, 15 aa, Homo sapiens
  CDR3 for beta chain variable domain of TCR clone 241735 (TRBV7-2, TRBJ1-2)
CASSPSAGWNYGYTF

SEQ ID NO: 483471 - protein, 15 aa, Homo sapiens
  CDR3 for alpha chain variable domain of TCR clone 241736 (TRAV12-3, TRAJ49)
CAMAVTPNTGNQFYF

SEQ ID NO: 483472 - protein, 12 aa, Homo sapiens
  CDR3 for beta chain variable domain of TCR clone 241736 (TRBV7-9, TRBJ2-7)
CASSIKREEQYF

SEQ ID NO: 483473 - protein, 11 aa, Homo sapiens
  CDR3 for alpha chain variable domain of TCR clone 241737 (TRAV12-3, TRAJ43)
CAMSVSNDMRF

SEQ ID NO: 483474 - protein, 12 aa, Homo sapiens
  CDR3 for beta chain variable domain of TCR clone 241737 (TRBV5-4, TRBJ2-5)
CASSSTRETQYF

SEQ ID NO: 483475 - protein, 13 aa, Homo sapiens
  CDR3 for alpha chain variable domain of TCR clone 241738 (TRAV20, TRAJ24)
CSVQGLHWGKLQF

SEQ ID NO: 483476 - protein, 13 aa, Homo sapiens
  CDR3 for beta chain variable domain of TCR clone 241738 (TRBV10-3, TRBJ2-7)
CASKLAVNYEQYF

SEQ ID NO: 483477 - protein, 14 aa, Homo sapiens
  CDR3 for alpha chain variable domain of TCR clone 241739 (TRAV8-2, TRAJ11)
CVVSEKSGYSTLTF

SEQ ID NO: 483478 - protein, 16 aa, Homo sapiens
  CDR3 for beta chain variable domain of TCR clone 241739 (TRBV28, TRBJ2-1)
CASSSPEYPLDNEQFF

SEQ ID NO: 483479 - protein, 14 aa, Homo sapiens
  CDR3 for alpha chain variable domain of TCR clone 241740 (TRAV38-2/DV8, TRAJ45)
CLLDSGGGADGLTF

SEQ ID NO: 483480 - protein, 16 aa, Homo sapiens
  CDR3 for beta chain variable domain of TCR clone 241740 (TRBV19, TRBJ1-1)
CASSPTRFWPGTEAFF

SEQ ID NO: 483481 - protein, 18 aa, Homo sapiens
  CDR3 for alpha chain variable domain of TCR clone 241741 (TRAV21, TRAJ52)
CAVRPSPAGGTSYGKLTF

SEQ ID NO: 483482 - protein, 13 aa, Homo sapiens
  CDR3 for beta chain variable domain of TCR clone 241741 (TRBV29-1, TRBJ2-2)
CSVYREDTGELFF

SEQ ID NO: 483483 - protein, 11 aa, Homo sapiens
  CDR3 for alpha chain variable domain of TCR clone 241742 (TRAV1-2, TRAJ20)
CAVANDYKLSF

SEQ ID NO: 483484 - protein, 18 aa, Homo sapiens
  CDR3 for beta chain variable domain of TCR clone 241742 (TRBV20-1, TRBJ2-6)
CSAETTPTHGSGANVQTF

SEQ ID NO: 483485 - protein, 14 aa, Homo sapiens
  CDR3 for alpha chain variable domain of TCR clone 241743 (TRAV38-1, TRAJ45)
CAYYSGGGADGLTL

SEQ ID NO: 483486 - protein, 18 aa, Homo sapiens
  CDR3 for beta chain variable domain of TCR clone 241743 (TRBV28, TRBJ2-1)
CTPTGRSPGLAGGNEQFF

SEQ ID NO: 483487 - protein, 14 aa, Homo sapiens
  CDR3 for alpha chain variable domain of TCR clone 241744 (TRAV1-2, TRAJ16)
CAVNRFSDGQTLLF

SEQ ID NO: 483488 - protein, 14 aa, Homo sapiens
  CDR3 for beta chain variable domain of TCR clone 241744 (TRBV25-1, TRBJ1-1)
CASTHLGGNTEAFF

SEQ ID NO: 483489 - protein, 13 aa, Homo sapiens
  CDR3 for alpha chain variable domain of TCR clone 241745 (TRAV12-3, TRAJ33)
CSMSVNSNYQLIW

SEQ ID NO: 483490 - protein, 15 aa, Homo sapiens
  CDR3 for beta chain variable domain of TCR clone 241745 (TRBV9, TRBJ1-6)
CASSVAGTGDSPLHF

SEQ ID NO: 483491 - protein, 16 aa, Homo sapiens
  CDR3 for alpha chain variable domain of TCR clone 241746 (TRAV26-1, TRAJ23)
CIVRVERYNQGGKLIS

SEQ ID NO: 483492 - protein, 15 aa, Homo sapiens
  CDR3 for beta chain variable domain of TCR clone 241746 (TRBV18, TRBJ2-7)
CASSPRGGKGYEQYF

SEQ ID NO: 483493 - protein, 12 aa, Homo sapiens
  CDR3 for alpha chain variable domain of TCR clone 241747 (TRAV2, TRAJ9)
CAVGAGGFKTIF

SEQ ID NO: 483494 - protein, 15 aa, Homo sapiens
  CDR3 for beta chain variable domain of TCR clone 241747 (TRBV9, TRBJ1-6)
CASSVAGTGDSPLHF

SEQ ID NO: 483495 - protein, 18 aa, Homo sapiens
  CDR3 for alpha chain variable domain of TCR clone 241748 (TRAV21, TRAJ52)
CAVRPSPAGGTSYGKLTF

SEQ ID NO: 483496 - protein, 10 aa, Homo sapiens
  CDR3 for beta chain variable domain of TCR clone 241748 (TRBV25-1, TRBJ2-1)
QGRGVYEQFF

SEQ ID NO: 483497 - protein, 13 aa, Homo sapiens
  CDR3 for alpha chain variable domain of TCR clone 241749 (TRAV21, TRAJ27)
CAARPGNAGKSTF

SEQ ID NO: 483498 - protein, 15 aa, Homo sapiens
  CDR3 for beta chain variable domain of TCR clone 241749 (TRBV2, TRBJ2-3)
CASSDAGGPPGTQYF

SEQ ID NO: 483499 - protein, 12 aa, Homo sapiens
  CDR3 for alpha chain variable domain of TCR clone 241750 (TRAV35, TRAJ30)
CAGQLADDKIIF

SEQ ID NO: 483500 - protein, 17 aa, Homo sapiens
  CDR3 for beta chain variable domain of TCR clone 241750 (TRBV4-2, TRBJ2-5)
CASSPGRWRSFQETEYF

SEQ ID NO: 483501 - protein, 14 aa, Homo sapiens
  CDR3 for alpha chain variable domain of TCR clone 241751 (TRAV17, TRAJ4)
CATAPLGGYNKLIF

SEQ ID NO: 483502 - protein, 13 aa, Homo sapiens
  CDR3 for beta chain variable domain of TCR clone 241751 (TRBV12-4, TRBJ1-3)
CACSLASGNTMYF

SEQ ID NO: 483503 - protein, 12 aa, Homo sapiens
  CDR3 for alpha chain variable domain of TCR clone 241752 (TRAV12-3, TRAJ17)
CAMTLTGNKLTF

SEQ ID NO: 483504 - protein, 16 aa, Homo sapiens
  CDR3 for beta chain variable domain of TCR clone 241752 (TRBV7-2, TRBJ2-3)
CASSLAGAGSGDTQHF

SEQ ID NO: 483505 - protein, 13 aa, Homo sapiens
  CDR3 for alpha chain variable domain of TCR clone 241753 (TRAV20, TRAJ29)
CAVQAVGNTPLVF

SEQ ID NO: 483506 - protein, 15 aa, Homo sapiens
  CDR3 for beta chain variable domain of TCR clone 241753 (TRBV10-2, TRBJ2-5)
CASRGSGGPEETQYF

SEQ ID NO: 483507 - protein, 13 aa, Homo sapiens
  CDR3 for alpha chain variable domain of TCR clone 241754 (TRAV12-3, TRAJ48)
CAMSLVGNEKLTF

SEQ ID NO: 483508 - protein, 15 aa, Homo sapiens
  CDR3 for beta chain variable domain of TCR clone 241754 (TRBV10-3, TRBJ2-2)
CAISEGDRAAGELFF

SEQ ID NO: 483509 - protein, 13 aa, Homo sapiens
  CDR3 for alpha chain variable domain of TCR clone 241755 (TRAV12-2, TRAJ49)
CAVKPNTGNQFYF

SEQ ID NO: 483510 - protein, 15 aa, Homo sapiens
  CDR3 for beta chain variable domain of TCR clone 241755 (TRBV10-3, TRBJ2-3)
CAISLTSGGTDTQYF

SEQ ID NO: 483511 - protein, 17 aa, Homo sapiens
  CDR3 for alpha chain variable domain of TCR clone 241756 (TRAV13-1, TRAJ3)
CAASEGTAVLPRKSLDQ

SEQ ID NO: 483512 - protein, 13 aa, Homo sapiens
  CDR3 for beta chain variable domain of TCR clone 241756 (TRBV20-1, TRBJ1-1)
CSARGGGNTEAFF

SEQ ID NO: 483513 - protein, 14 aa, Homo sapiens
  CDR3 for alpha chain variable domain of TCR clone 241757 (TRAV8-1, TRAJ5)
CAVRTDTGRRALTF

SEQ ID NO: 483514 - protein, 16 aa, Homo sapiens
  CDR3 for beta chain variable domain of TCR clone 241757 (TRBV7-9, TRBJ2-3)
CASSFSVAGGTDTQYF

SEQ ID NO: 483515 - protein, 14 aa, Homo sapiens
  CDR3 for alpha chain variable domain of TCR clone 241758 (TRAV26-1, TRAJ38)
CIADNAVNNRKLIW

SEQ ID NO: 483516 - protein, 13 aa, Homo sapiens
  CDR3 for beta chain variable domain of TCR clone 241758 (TRBV20-1, TRBJ1-1)
CSARGGENTEAFF

SEQ ID NO: 483517 - protein, 16 aa, Homo sapiens
  CDR3 for alpha chain variable domain of TCR clone 241759 (TRAV30, TRAJ24)
CGTEIVDADSWGKCQF

SEQ ID NO: 483518 - protein, 17 aa, Homo sapiens
  CDR3 for beta chain variable domain of TCR clone 241759 (TRBV20-1, TRBJ2-2)
CSASGSGQGGLTGELFF

SEQ ID NO: 483519 - protein, 12 aa, Homo sapiens
  CDR3 for alpha chain variable domain of TCR clone 241760 (TRAV29/DV5, TRAJ49)
CAATDTGNQFYF

SEQ ID NO: 483520 - protein, 19 aa, Homo sapiens
  CDR3 for beta chain variable domain of TCR clone 241760 (TRBV25-1, TRBJ2-2)
CAILVDRVDRGRKTGELFF

SEQ ID NO: 483521 - protein, 12 aa, Homo sapiens
  CDR3 for alpha chain variable domain of TCR clone 241761 (TRAV12-3, TRAJ17)
CAMTLTGKQLTF

SEQ ID NO: 483522 - protein, 12 aa, Homo sapiens
  CDR3 for beta chain variable domain of TCR clone 241761 (TRBV14, TRBJ2-5)
CASSQLKETQYF

SEQ ID NO: 483523 - protein, 13 aa, Homo sapiens
  CDR3 for alpha chain variable domain of TCR clone 241762 (TRAV12-2, TRAJ50)
CAVIVTSYDKVIF

SEQ ID NO: 483524 - protein, 12 aa, Homo sapiens
  CDR3 for beta chain variable domain of TCR clone 241762 (TRBV7-9, TRBJ1-5)
CASSSDQAPQHF

SEQ ID NO: 483525 - protein, 16 aa, Homo sapiens
  CDR3 for alpha chain variable domain of TCR clone 241763 (TRAV17, TRAJ28)
CATASASGAGSYQLTF

SEQ ID NO: 483526 - protein, 14 aa, Homo sapiens
  CDR3 for beta chain variable domain of TCR clone 241763 (TRBV19, TRBJ2-1)
CASEVTGARNEQFF

SEQ ID NO: 483527 - protein, 14 aa, Homo sapiens
  CDR3 for alpha chain variable domain of TCR clone 241764 (TRAV21, TRAJ35)
CPVMPIGFGNVLHC

SEQ ID NO: 483528 - protein, 12 aa, Homo sapiens
  CDR3 for beta chain variable domain of TCR clone 241764 (TRBV7-9, TRBJ2-7)
CASSIKREEQYF

SEQ ID NO: 483529 - protein, 15 aa, Homo sapiens
  CDR3 for alpha chain variable domain of TCR clone 241765 (TRAV23/DV6, TRAJ33)
CAAPNSGGGNYQLIW

SEQ ID NO: 483530 - protein, 14 aa, Homo sapiens
  CDR3 for beta chain variable domain of TCR clone 241765 (TRBV7-2, TRBJ2-5)
CASSPRGSSETQYF

SEQ ID NO: 483531 - protein, 15 aa, Homo sapiens
  CDR3 for alpha chain variable domain of TCR clone 241766 (TRAV8-3, TRAJ6)
WAVGPLGGGSYIPTF

SEQ ID NO: 483532 - protein, 14 aa, Homo sapiens
  CDR3 for beta chain variable domain of TCR clone 241766 (TRBV19, TRBJ2-2)
CASSTGQGAGELFF

SEQ ID NO: 483533 - protein, 13 aa, Homo sapiens
  CDR3 for alpha chain variable domain of TCR clone 241767 (TRAV27, TRAJ27)
CAGGITNAGKSTS

SEQ ID NO: 483534 - protein, 13 aa, Homo sapiens
  CDR3 for beta chain variable domain of TCR clone 241767 (TRBV20-1, TRBJ1-2)
CSASLGVGYGYTF

SEQ ID NO: 483535 - protein, 17 aa, Homo sapiens
  CDR3 for alpha chain variable domain of TCR clone 241768 (TRAV16, TRAJ42)
CALSPKLYGGSQGNLIF

SEQ ID NO: 483536 - protein, 15 aa, Homo sapiens
  CDR3 for beta chain variable domain of TCR clone 241768 (TRBV29-1, TRBJ2-7)
CSVEFFDRGSYEQYF

SEQ ID NO: 483537 - protein, 14 aa, Homo sapiens
  CDR3 for alpha chain variable domain of TCR clone 241769 (TRAV29/DV5, TRAJ57)
CAARSQGGSEKLVF

SEQ ID NO: 483538 - protein, 13 aa, Homo sapiens
  CDR3 for beta chain variable domain of TCR clone 241769 (TRBV7-9, TRBJ1-2)
CASSLKQNYGYTF

SEQ ID NO: 483539 - protein, 15 aa, Homo sapiens
  CDR3 for alpha chain variable domain of TCR clone 241770 (TRAV26-1, TRAJ29)
CIVRVEGAGNTPLVF

SEQ ID NO: 483540 - protein, 15 aa, Homo sapiens
  CDR3 for beta chain variable domain of TCR clone 241770 (TRBV7-9, TRBJ1-5)
CASSQGHQSNQPQHF

SEQ ID NO: 483541 - protein, 15 aa, Homo sapiens
  CDR3 for alpha chain variable domain of TCR clone 241771 (TRAV13-1, TRAJ44)
CAASLNTGTASKLTF

SEQ ID NO: 483542 - protein, 16 aa, Homo sapiens
  CDR3 for beta chain variable domain of TCR clone 241771 (TRBV12-4, TRBJ1-5)
CASSRPVGGSNQPQHF

SEQ ID NO: 483543 - protein, 14 aa, Homo sapiens
  CDR3 for alpha chain variable domain of TCR clone 241772 (TRAV8-3, TRAJ15)
CAVGRHQAGTALIF

SEQ ID NO: 483544 - protein, 16 aa, Homo sapiens
  CDR3 for beta chain variable domain of TCR clone 241772 (TRBV19, TRBJ2-2)
CASRSPGTGATGELFF

SEQ ID NO: 483545 - protein, 11 aa, Homo sapiens
  CDR3 for alpha chain variable domain of TCR clone 241773 (TRAV17, TRAJ43)
CATPRSTDMRF

SEQ ID NO: 483546 - protein, 14 aa, Homo sapiens
  CDR3 for beta chain variable domain of TCR clone 241773 (TRBV7-2, TRBJ2-7)
CASSPKTSFYEQYF

SEQ ID NO: 483547 - protein, 12 aa, Homo sapiens
  CDR3 for alpha chain variable domain of TCR clone 241774 (TRAV8-3, TRAJ41)
CAVALSGYALNF

SEQ ID NO: 483548 - protein, 13 aa, Homo sapiens
  CDR3 for beta chain variable domain of TCR clone 241774 (TRBV13, TRBJ2-5)
CASREQGGKTQYF

SEQ ID NO: 483549 - protein, 15 aa, Homo sapiens
  CDR3 for alpha chain variable domain of TCR clone 241775 (TRAV2, TRAJ9)
CAVDDRGTGGFKTIF

SEQ ID NO: 483550 - protein, 14 aa, Homo sapiens
  CDR3 for beta chain variable domain of TCR clone 241775 (TRBV12-5, TRBJ2-5)
CASGSRTHQETQYF

SEQ ID NO: 483551 - protein, 15 aa, Homo sapiens
  CDR3 for alpha chain variable domain of TCR clone 241776 (TRAV26-1, TRAJ44)
CIVRANTGTASKLTF

SEQ ID NO: 483552 - protein, 13 aa, Homo sapiens
  CDR3 for beta chain variable domain of TCR clone 241776 (TRBV12-5, TRBJ2-3)
CASGDQQSDTQYF

SEQ ID NO: 483553 - protein, 15 aa, Homo sapiens
  CDR3 for alpha chain variable domain of TCR clone 241777 (TRAV8-3, TRAJ45)
CASSYSGGGADGLTF

SEQ ID NO: 483554 - protein, 15 aa, Homo sapiens
  CDR3 for beta chain variable domain of TCR clone 241777 (TRBV29-1, TRBJ2-1)
CSGRDRKSSYNEQFF

SEQ ID NO: 483555 - protein, 13 aa, Homo sapiens
  CDR3 for alpha chain variable domain of TCR clone 241778 (TRAV21, TRAJ27)
CAARPGNAGKSTF

SEQ ID NO: 483556 - protein, 15 aa, Homo sapiens
  CDR3 for beta chain variable domain of TCR clone 241778 (TRBV2, TRBJ1-3)
CASSISPRSGNTIYF

SEQ ID NO: 483557 - protein, 10 aa, Homo sapiens
  CDR3 for alpha chain variable domain of TCR clone 241779 (TRAV35, TRAJ41)
DANSGYALNF

SEQ ID NO: 483558 - protein, 17 aa, Homo sapiens
  CDR3 for beta chain variable domain of TCR clone 241779 (TRBV13, TRBJ2-3)
CASSLSRVAGGRNTQYF

SEQ ID NO: 483559 - protein, 13 aa, Homo sapiens
  CDR3 for alpha chain variable domain of TCR clone 241780 (TRAV12-3, TRAJ30)
CAMSAKWDDKIIF

SEQ ID NO: 483560 - protein, 12 aa, Homo sapiens
  CDR3 for beta chain variable domain of TCR clone 241780 (TRBV2, TRBJ2-1)
CAYGPPGNEQFF

SEQ ID NO: 483561 - protein, 13 aa, Homo sapiens
  CDR3 for alpha chain variable domain of TCR clone 241781 (TRAV21, TRAJ57)
CAVTQGGSETLVF

SEQ ID NO: 483562 - protein, 11 aa, Homo sapiens
  CDR3 for beta chain variable domain of TCR clone 241781 (TRBV11-2, TRBJ2-2)
CASSLPGELFF

SEQ ID NO: 483563 - protein, 14 aa, Homo sapiens
  CDR3 for alpha chain variable domain of TCR clone 241782 (TRAV8-4, TRAJ13)
CAVTLSGGYQKVTF

SEQ ID NO: 483564 - protein, 14 aa, Homo sapiens
  CDR3 for beta chain variable domain of TCR clone 241782 (TRBV7-2, TRBJ1-2)
CTSSQTGSTYGYTL

SEQ ID NO: 483565 - protein, 14 aa, Homo sapiens
  CDR3 for alpha chain variable domain of TCR clone 241783 (TRAV2, TRAJ9)
CAVEDRRGGFKTIF

SEQ ID NO: 483566 - protein, 14 aa, Homo sapiens
  CDR3 for beta chain variable domain of TCR clone 241783 (TRBV5-4, TRBJ1-1)
CASSLDSRRDEAFF

SEQ ID NO: 483567 - protein, 14 aa, Homo sapiens
  CDR3 for alpha chain variable domain of TCR clone 241784 (TRAV12-1, TRAJ42)
CVVIYGGSQGNLIF

SEQ ID NO: 483568 - protein, 13 aa, Homo sapiens
  CDR3 for beta chain variable domain of TCR clone 241784 (TRBV18, TRBJ2-5)
CASSPRGKETQYF

SEQ ID NO: 483569 - protein, 15 aa, Homo sapiens
  CDR3 for alpha chain variable domain of TCR clone 241785 (TRAV3, TRAJ23)
CAVRDRGNQGGKLIF

SEQ ID NO: 483570 - protein, 16 aa, Homo sapiens
  CDR3 for beta chain variable domain of TCR clone 241785 (TRBV7-3, TRBJ2-2)
CASSLKRGTLSGELFF

SEQ ID NO: 483571 - protein, 14 aa, Homo sapiens
  CDR3 for alpha chain variable domain of TCR clone 241786 (TRAV1-2, TRAJ8)
CAVREDTGVQKLVF

SEQ ID NO: 483572 - protein, 16 aa, Homo sapiens
  CDR3 for beta chain variable domain of TCR clone 241786 (TRBV7-9, TRBJ2-1)
CASSDVAGGSYNEQFF

SEQ ID NO: 483573 - protein, 14 aa, Homo sapiens
  CDR3 for alpha chain variable domain of TCR clone 241787 (TRAV2, TRAJ9)
CAVEDQSGGFKTIF

SEQ ID NO: 483574 - protein, 17 aa, Homo sapiens
  CDR3 for beta chain variable domain of TCR clone 241787 (TRBV24-1, TRBJ2-1)
CATSDVSTSGTYNEQFF

SEQ ID NO: 483575 - protein, 14 aa, Homo sapiens
  CDR3 for alpha chain variable domain of TCR clone 241788 (TRAV1-2, TRAJ8)
CAVREDTGFQKLVF

SEQ ID NO: 483576 - protein, 15 aa, Homo sapiens
  CDR3 for beta chain variable domain of TCR clone 241788 (TRBV28, TRBJ1-2)
CASSSHSIANYGYTF

SEQ ID NO: 483577 - protein, 15 aa, Homo sapiens
  CDR3 for alpha chain variable domain of TCR clone 241789 (TRAV8-2, TRAJ17)
CVVSSIKAAGNKLTF

SEQ ID NO: 483578 - protein, 16 aa, Homo sapiens
  CDR3 for beta chain variable domain of TCR clone 241789 (TRBV11-2, TRBJ1-2)
CASSLDTGGADYGYTF

SEQ ID NO: 483579 - protein, 16 aa, Homo sapiens
  CDR3 for alpha chain variable domain of TCR clone 241790 (TRAV3, TRAJ10)
CAVRDMRAGGGNKLTF

SEQ ID NO: 483580 - protein, 15 aa, Homo sapiens
  CDR3 for beta chain variable domain of TCR clone 241790 (TRBV20-1, TRBJ1-4)
QCSGTWLINYEKLFF

SEQ ID NO: 483581 - protein, 13 aa, Homo sapiens
  CDR3 for alpha chain variable domain of TCR clone 241791 (TRAV17, TRAJ15)
CATDAGAGPALIL

SEQ ID NO: 483582 - protein, 15 aa, Homo sapiens
  CDR3 for beta chain variable domain of TCR clone 241791 (TRBV20-1, TRBJ2-7)
CSARDRVSGMDEQYF

SEQ ID NO: 483583 - protein, 15 aa, Homo sapiens
  CDR3 for alpha chain variable domain of TCR clone 241792 (TRAV29/DV5, TRAJ24)
CAASGATDSWGKFQF

SEQ ID NO: 483584 - protein, 14 aa, Homo sapiens
  CDR3 for beta chain variable domain of TCR clone 241792 (TRBV12-5, TRBJ2-5)
CASGARTHQETQYF

SEQ ID NO: 483585 - protein, 12 aa, Homo sapiens
  CDR3 for alpha chain variable domain of TCR clone 241793 (TRAV21, TRAJ39)
CAADNAGNMLTF

SEQ ID NO: 483586 - protein, 14 aa, Homo sapiens
  CDR3 for beta chain variable domain of TCR clone 241793 (TRBV2, TRBJ1-1)
CASRDTIRNTEAFF

SEQ ID NO: 483587 - protein, 11 aa, Homo sapiens
  CDR3 for alpha chain variable domain of TCR clone 241794 (TRAV12-2, TRAJ33)
CAVTSNYQLIW

SEQ ID NO: 483588 - protein, 15 aa, Homo sapiens
  CDR3 for beta chain variable domain of TCR clone 241794 (TRBV20-1, TRBJ2-7)
CSAESGTSGAYEQYF

SEQ ID NO: 483589 - protein, 12 aa, Homo sapiens
  CDR3 for alpha chain variable domain of TCR clone 241795 (TRAV12-2, TRAJ21)
CAVRYNFNKFYF

SEQ ID NO: 483590 - protein, 14 aa, Homo sapiens
  CDR3 for beta chain variable domain of TCR clone 241795 (TRBV28, TRBJ2-1)
CASSYYTAYNKQFF

SEQ ID NO: 483591 - protein, 12 aa, Homo sapiens
  CDR3 for alpha chain variable domain of TCR clone 241796 (TRAV13-1, TRAJ53)
CAAGGSNYKLTF

SEQ ID NO: 483592 - protein, 16 aa, Homo sapiens
  CDR3 for beta chain variable domain of TCR clone 241796 (TRBV19, TRBJ2-5)
CASSIDGTGLEETQYF

SEQ ID NO: 483593 - protein, 17 aa, Homo sapiens
  CDR3 for alpha chain variable domain of TCR clone 241797 (TRAV3, TRAJ38)
CAVRDCLNAGNNRKLIW

SEQ ID NO: 483594 - protein, 14 aa, Homo sapiens
  CDR3 for beta chain variable domain of TCR clone 241797 (TRBV7-2, TRBJ2-1)
CASSRGGARNEQFF

SEQ ID NO: 483595 - protein, 12 aa, Homo sapiens
  CDR3 for alpha chain variable domain of TCR clone 241798 (TRAV12-3, TRAJ17)
CAMTLTVNKLTF

SEQ ID NO: 483596 - protein, 15 aa, Homo sapiens
  CDR3 for beta chain variable domain of TCR clone 241798 (TRBV20-1, TRBJ2-7)
CSARDRVFGMDEQYF

SEQ ID NO: 483597 - protein, 16 aa, Homo sapiens
  CDR3 for alpha chain variable domain of TCR clone 241799 (TRAV30, TRAJ24)
CGTEIVDADSWGKFQF

SEQ ID NO: 483598 - protein, 17 aa, Homo sapiens
  CDR3 for beta chain variable domain of TCR clone 241799 (TRBV20-1, TRBJ2-1)
CSAPPRIAGTRYNEQFF

SEQ ID NO: 483599 - protein, 14 aa, Homo sapiens
  CDR3 for alpha chain variable domain of TCR clone 241800 (TRAV13-2, TRAJ10)
CAETLPGGGNKLTF

SEQ ID NO: 483600 - protein, 14 aa, Homo sapiens
  CDR3 for beta chain variable domain of TCR clone 241800 (TRBV7-3, TRBJ1-1)
CASSLKGGNTEAFF

SEQ ID NO: 483601 - protein, 17 aa, Homo sapiens
  CDR3 for alpha chain variable domain of TCR clone 241801 (TRAV3, TRAJ6)
CAVRDGPRAGGSYIPTF

SEQ ID NO: 483602 - protein, 14 aa, Homo sapiens
  CDR3 for beta chain variable domain of TCR clone 241801 (TRBV13, TRBJ2-3)
CASSSGSPTDTQYF

SEQ ID NO: 483603 - protein, 15 aa, Homo sapiens
  CDR3 for alpha chain variable domain of TCR clone 241802 (TRAV12-1, TRAJ15)
CVVTRANQAGTALIF

SEQ ID NO: 483604 - protein, 14 aa, Homo sapiens
  CDR3 for beta chain variable domain of TCR clone 241802 (TRBV5-1, TRBJ1-1)
CVSSVVSINTEAFF

SEQ ID NO: 483605 - protein, 12 aa, Homo sapiens
  CDR3 for alpha chain variable domain of TCR clone 241803 (TRAV9-2, TRAJ27)
CAPSTNAGKSTF

SEQ ID NO: 483606 - protein, 14 aa, Homo sapiens
  CDR3 for beta chain variable domain of TCR clone 241803 (TRBV7-3, TRBJ1-1)
CASSLKGGNTEAFF

SEQ ID NO: 483607 - protein, 10 aa, Homo sapiens
  CDR3 for alpha chain variable domain of TCR clone 241804 (TRAV25, TRAJ53)
CAGSNYKLTF

SEQ ID NO: 483608 - protein, 18 aa, Homo sapiens
  CDR3 for beta chain variable domain of TCR clone 241804 (TRBV12-4, TRBJ2-2)
CASSLVAGTRGRTGELFF

SEQ ID NO: 483609 - protein, 13 aa, Homo sapiens
  CDR3 for alpha chain variable domain of TCR clone 241805 (TRAV20, TRAJ42)
CCAGGGSQGNLIF

SEQ ID NO: 483610 - protein, 15 aa, Homo sapiens
  CDR3 for beta chain variable domain of TCR clone 241805 (TRBV7-3, TRBJ2-1)
CASSPTGGGEVEQFF

SEQ ID NO: 483611 - protein, 12 aa, Homo sapiens
  CDR3 for alpha chain variable domain of TCR clone 241806 (TRAV12-3, TRAJ21)
CAMLNNFNKFYF

SEQ ID NO: 483612 - protein, 16 aa, Homo sapiens
  CDR3 for beta chain variable domain of TCR clone 241806 (TRBV7-9, TRBJ1-2)
CASSLAPLRAAYGYTF

SEQ ID NO: 483613 - protein, 14 aa, Homo sapiens
  CDR3 for alpha chain variable domain of TCR clone 241807 (TRAV38-2/DV8, TRAJ42)
CAYPEGGSQGNLLF

SEQ ID NO: 483614 - protein, 15 aa, Homo sapiens
  CDR3 for beta chain variable domain of TCR clone 241807 (TRBV19, TRBJ2-1)
CASSTGTSSYNEQFF

SEQ ID NO: 483615 - protein, 13 aa, Homo sapiens
  CDR3 for alpha chain variable domain of TCR clone 241808 (TRAV17, TRAJ7)
CATDNYGNSRLAF

SEQ ID NO: 483616 - protein, 16 aa, Homo sapiens
  CDR3 for beta chain variable domain of TCR clone 241808 (TRBV4-1, TRBJ2-5)
CASSQAIAASSATQYF

SEQ ID NO: 483617 - protein, 17 aa, Homo sapiens
  CDR3 for alpha chain variable domain of TCR clone 241809 (TRAV3, TRAJ42)
CAVRDRDYGGSKGNPIF

SEQ ID NO: 483618 - protein, 15 aa, Homo sapiens
  CDR3 for beta chain variable domain of TCR clone 241809 (TRBV6-6, TRBJ2-7)
CASSYSYGGSYEQYF

SEQ ID NO: 483619 - protein, 14 aa, Homo sapiens
  CDR3 for alpha chain variable domain of TCR clone 241810 (TRAV12-1, TRAJ30)
CVVNIGGRDDKIIF

SEQ ID NO: 483620 - protein, 13 aa, Homo sapiens
  CDR3 for beta chain variable domain of TCR clone 241810 (TRBV12-4, TRBJ2-7)
CASSPTETYEQYF

SEQ ID NO: 483621 - protein, 13 aa, Homo sapiens
  CDR3 for alpha chain variable domain of TCR clone 241811 (TRAV30, TRAJ24)
CGTVTDSWGKWQF

SEQ ID NO: 483622 - protein, 15 aa, Homo sapiens
  CDR3 for beta chain variable domain of TCR clone 241811 (TRBV25-1, TRBJ1-4)
CASSPGDSTNEKLFV

SEQ ID NO: 483623 - protein, 12 aa, Homo sapiens
  CDR3 for alpha chain variable domain of TCR clone 241812 (TRAV12-1, TRAJ39)
CGEDNAGNMLTF

SEQ ID NO: 483624 - protein, 14 aa, Homo sapiens
  CDR3 for beta chain variable domain of TCR clone 241812 (TRBV7-2, TRBJ2-7)
CASRSQGAAYEQYF

SEQ ID NO: 483625 - protein, 13 aa, Homo sapiens
  CDR3 for alpha chain variable domain of TCR clone 241813 (TRAV20, TRAJ37)
CAGCSSNTGKLIF

SEQ ID NO: 483626 - protein, 16 aa, Homo sapiens
  CDR3 for beta chain variable domain of TCR clone 241813 (TRBV12-4, TRBJ2-1)
CASSVGGSLSYNEQFF

SEQ ID NO: 483627 - protein, 14 aa, Homo sapiens
  CDR3 for alpha chain variable domain of TCR clone 241814 (TRAV12-3, TRAJ10)
SHLPLTGGGNKLTF

SEQ ID NO: 483628 - protein, 12 aa, Homo sapiens
  CDR3 for beta chain variable domain of TCR clone 241814 (TRBV7-9, TRBJ2-7)
CASSIEREEQYF

SEQ ID NO: 483629 - protein, 11 aa, Homo sapiens
  CDR3 for alpha chain variable domain of TCR clone 241815 (TRAV12-3, TRAJ27)
CAMANAGKSTS

SEQ ID NO: 483630 - protein, 15 aa, Homo sapiens
  CDR3 for beta chain variable domain of TCR clone 241815 (TRBV27, TRBJ2-5)
CASSLYPRGGEAQYF

SEQ ID NO: 483631 - protein, 16 aa, Homo sapiens
  CDR3 for alpha chain variable domain of TCR clone 241816 (TRAV13-2, TRAJ32)
CAENTNYGGATNKLIF

SEQ ID NO: 483632 - protein, 14 aa, Homo sapiens
  CDR3 for beta chain variable domain of TCR clone 241816 (TRBV15, TRBJ2-5)
CATSSTGYQETQYF

SEQ ID NO: 483633 - protein, 16 aa, Homo sapiens
  CDR3 for alpha chain variable domain of TCR clone 241817 (TRAV3, TRAJ37)
CAVRPHGSGNTGKLIF

SEQ ID NO: 483634 - protein, 14 aa, Homo sapiens
  CDR3 for beta chain variable domain of TCR clone 241817 (TRBV2, TRBJ2-1)
FASSDRAYYNEQFF

SEQ ID NO: 483635 - protein, 14 aa, Homo sapiens
  CDR3 for alpha chain variable domain of TCR clone 241818 (TRAV12-2, TRAJ13)
CAVKKTGGYQKVTF

SEQ ID NO: 483636 - protein, 13 aa, Homo sapiens
  CDR3 for beta chain variable domain of TCR clone 241818 (TRBV10-3, TRBJ2-7)
CASKLAVNYEQYF

SEQ ID NO: 483637 - protein, 15 aa, Homo sapiens
  CDR3 for alpha chain variable domain of TCR clone 241819 (TRAV3, TRAJ3)
CAVRDRDSSASKIIF

SEQ ID NO: 483638 - protein, 15 aa, Homo sapiens
  CDR3 for beta chain variable domain of TCR clone 241819 (TRBV29-1, TRBJ2-7)
CGVEFFDRGSYEQYF

SEQ ID NO: 483639 - protein, 13 aa, Homo sapiens
  CDR3 for alpha chain variable domain of TCR clone 241820 (TRAV30, TRAJ6)
RGTEAGGSYIPTF

SEQ ID NO: 483640 - protein, 16 aa, Homo sapiens
  CDR3 for beta chain variable domain of TCR clone 241820 (TRBV4-3, TRBJ2-3)
CASSRGLAGEGDTQYF

SEQ ID NO: 483641 - protein, 15 aa, Homo sapiens
  CDR3 for alpha chain variable domain of TCR clone 241821 (TRAV3, TRAJ5)
CAVRDLDTGRRALTF

SEQ ID NO: 483642 - protein, 14 aa, Homo sapiens
  CDR3 for beta chain variable domain of TCR clone 241821 (TRBV7-2, TRBJ2-3)
CQQLSGAFIDTQYF

SEQ ID NO: 483643 - protein, 13 aa, Homo sapiens
  CDR3 for alpha chain variable domain of TCR clone 241822 (TRAV8-6, TRAJ41)
CAVRENSGYALNF

SEQ ID NO: 483644 - protein, 14 aa, Homo sapiens
  CDR3 for beta chain variable domain of TCR clone 241822 (TRBV7-3, TRBJ2-2)
CASSSGGYTGELFF

SEQ ID NO: 483645 - protein, 13 aa, Homo sapiens
  CDR3 for alpha chain variable domain of TCR clone 241823 (TRAV12-1, TRAJ33)
CGDAPDSNYQLIW

SEQ ID NO: 483646 - protein, 13 aa, Homo sapiens
  CDR3 for beta chain variable domain of TCR clone 241823 (TRBV20-1, TRBJ1-6)
RSAPLGVGSPLHF

SEQ ID NO: 483647 - protein, 13 aa, Homo sapiens
  CDR3 for alpha chain variable domain of TCR clone 241824 (TRAV27, TRAJ45)
CRSSGGGADGLTF

SEQ ID NO: 483648 - protein, 13 aa, Homo sapiens
  CDR3 for beta chain variable domain of TCR clone 241824 (TRBV7-7, TRBJ2-5)
CASSRSRQETQYF

SEQ ID NO: 483649 - protein, 11 aa, Homo sapiens
  CDR3 for alpha chain variable domain of TCR clone 241825 (TRAV12-1, TRAJ30)
CVVNGQDKIIV

SEQ ID NO: 483650 - protein, 12 aa, Homo sapiens
  CDR3 for beta chain variable domain of TCR clone 241825 (TRBV27, TRBJ2-2)
CASKLLTGELFF

SEQ ID NO: 483651 - protein, 14 aa, Homo sapiens
  CDR3 for alpha chain variable domain of TCR clone 241826 (TRAV13-1, TRAJ35)
CAASKGGFGNVLHR

SEQ ID NO: 483652 - protein, 13 aa, Homo sapiens
  CDR3 for beta chain variable domain of TCR clone 241826 (TRBV7-3, TRBJ1-1)
CASSQDWVAEASF

SEQ ID NO: 483653 - protein, 15 aa, Homo sapiens
  CDR3 for alpha chain variable domain of TCR clone 241827 (TRAV35, TRAJ42)
GAGQGYGGSQGNLIF

SEQ ID NO: 483654 - protein, 13 aa, Homo sapiens
  CDR3 for beta chain variable domain of TCR clone 241827 (TRBV7-2, TRBJ1-1)
CASSLVQGAEAFF

SEQ ID NO: 483655 - protein, 14 aa, Homo sapiens
  CDR3 for alpha chain variable domain of TCR clone 241828 (TRAV12-3, TRAJ12)
CAMSEVDISYKLIF

SEQ ID NO: 483656 - protein, 12 aa, Homo sapiens
  CDR3 for beta chain variable domain of TCR clone 241828 (TRBV18, TRBJ1-4)
CASSPSREKLFF

SEQ ID NO: 483657 - protein, 14 aa, Homo sapiens
  CDR3 for alpha chain variable domain of TCR clone 241829 (TRAV12-2, TRAJ13)
CAVKKTGGDQKVTF

SEQ ID NO: 483658 - protein, 15 aa, Homo sapiens
  CDR3 for beta chain variable domain of TCR clone 241829 (TRBV11-2, TRBJ2-2)
CASSSDRVNAGELFF

SEQ ID NO: 483659 - protein, 13 aa, Homo sapiens
  CDR3 for alpha chain variable domain of TCR clone 241830 (TRAV8-3, TRAJ48)
CAVGRFGNEKLTF

SEQ ID NO: 483660 - protein, 16 aa, Homo sapiens
  CDR3 for beta chain variable domain of TCR clone 241830 (TRBV20-1, TRBJ2-5)
CRARDFASGIQETQYF

SEQ ID NO: 483661 - protein, 11 aa, Homo sapiens
  CDR3 for alpha chain variable domain of TCR clone 241831 (TRAV12-3, TRAJ27)
CAMANAGKSTF

SEQ ID NO: 483662 - protein, 14 aa, Homo sapiens
  CDR3 for beta chain variable domain of TCR clone 241831 (TRBV4-1, TRBJ2-2)
RASSQAVNTGELFF

SEQ ID NO: 483663 - protein, 16 aa, Homo sapiens
  CDR3 for alpha chain variable domain of TCR clone 241832 (TRAV12-2, TRAJ18)
CAVTTDRGSTLGRLYF

SEQ ID NO: 483664 - protein, 17 aa, Homo sapiens
  CDR3 for beta chain variable domain of TCR clone 241832 (TRBV7-7, TRBJ1-1)
CASIGDRPNLGVTEAFF

SEQ ID NO: 483665 - protein, 14 aa, Homo sapiens
  CDR3 for alpha chain variable domain of TCR clone 241833 (TRAV13-1, TRAJ16)
CAAAYFFRWPEAAL

SEQ ID NO: 483666 - protein, 15 aa, Homo sapiens
  CDR3 for beta chain variable domain of TCR clone 241833 (TRBV4-2, TRBJ1-1)
CASSQEDLPRTEAFF

SEQ ID NO: 483667 - protein, 12 aa, Homo sapiens
  CDR3 for alpha chain variable domain of TCR clone 241834 (TRAV12-3, TRAJ17)
CAMTLTGNKLTF

SEQ ID NO: 483668 - protein, 11 aa, Homo sapiens
  CDR3 for beta chain variable domain of TCR clone 241834 (TRBV19, TRBJ2-7)
CASGNSYEQCF

SEQ ID NO: 483669 - protein, 16 aa, Homo sapiens
  CDR3 for alpha chain variable domain of TCR clone 241835 (TRAV22, TRAJ45)
GAVERGKRGGADGLTF

SEQ ID NO: 483670 - protein, 15 aa, Homo sapiens
  CDR3 for beta chain variable domain of TCR clone 241835 (TRBV27, TRBJ2-7)
CASSLGSSVSHEQYF

SEQ ID NO: 483671 - protein, 15 aa, Homo sapiens
  CDR3 for alpha chain variable domain of TCR clone 241836 (TRAV14/DV4, TRAJ22)
CNERGPPGSARQPTF

SEQ ID NO: 483672 - protein, 16 aa, Homo sapiens
  CDR3 for beta chain variable domain of TCR clone 241836 (TRBV19, TRBJ1-6)
CASSVAPVAGNSPLHF

SEQ ID NO: 483673 - protein, 14 aa, Homo sapiens
  CDR3 for alpha chain variable domain of TCR clone 241837 (TRAV2, TRAJ26)
CAGPPGDYGQNFVF

SEQ ID NO: 483674 - protein, 13 aa, Homo sapiens
  CDR3 for beta chain variable domain of TCR clone 241837 (TRBV7-9, TRBJ1-2)
CASSLKQNYGYTF

SEQ ID NO: 483675 - protein, 12 aa, Homo sapiens
  CDR3 for alpha chain variable domain of TCR clone 241838 (TRAV17, TRAJ36)
CATLTVANNLFF

SEQ ID NO: 483676 - protein, 15 aa, Homo sapiens
  CDR3 for beta chain variable domain of TCR clone 241838 (TRBV19, TRBJ1-2)
CASSTKTDTNYGYTF

SEQ ID NO: 483677 - protein, 14 aa, Homo sapiens
  CDR3 for alpha chain variable domain of TCR clone 241839 (TRAV12-2, TRAJ49)
CAVNPRTPITSSIL

SEQ ID NO: 483678 - protein, 19 aa, Homo sapiens
  CDR3 for beta chain variable domain of TCR clone 241839 (TRBV12-5, TRBJ2-2)
FASGLGQGTMFADTGELFF

SEQ ID NO: 483679 - protein, 15 aa, Homo sapiens
  CDR3 for alpha chain variable domain of TCR clone 241840 (TRAV27, TRAJ38)
CAARRNAGNNRKLIW

SEQ ID NO: 483680 - protein, 13 aa, Homo sapiens
  CDR3 for beta chain variable domain of TCR clone 241840 (TRBV20-1, TRBJ1-1)
CSARAGGNPEAFF

SEQ ID NO: 483681 - protein, 15 aa, Homo sapiens
  CDR3 for alpha chain variable domain of TCR clone 241841 (TRAV3, TRAJ47)
CAVRDIGEYGNKLVF

SEQ ID NO: 483682 - protein, 14 aa, Homo sapiens
  CDR3 for beta chain variable domain of TCR clone 241841 (TRBV13, TRBJ2-5)
CASSLERVGETQYC

SEQ ID NO: 483683 - protein, 10 aa, Homo sapiens
  CDR3 for alpha chain variable domain of TCR clone 241842 (TRAV20, TRAJ22)
CAAPARQLTF

SEQ ID NO: 483684 - protein, 14 aa, Homo sapiens
  CDR3 for beta chain variable domain of TCR clone 241842 (TRBV19, TRBJ2-1)
CASSMGSGAMEQFF

SEQ ID NO: 483685 - protein, 12 aa, Homo sapiens
  CDR3 for alpha chain variable domain of TCR clone 241843 (TRAV13-2, TRAJ48)
CRDGLGNEKLTF

SEQ ID NO: 483686 - protein, 14 aa, Homo sapiens
  CDR3 for beta chain variable domain of TCR clone 241843 (TRBV27, TRBJ2-5)
CQQFIPAGGETQYF

SEQ ID NO: 483687 - protein, 14 aa, Homo sapiens
  CDR3 for alpha chain variable domain of TCR clone 241844 (TRAV12-2, TRAJ17)
CAVLLKAAGNKLTF

SEQ ID NO: 483688 - protein, 14 aa, Homo sapiens
  CDR3 for beta chain variable domain of TCR clone 241844 (TRBV7-8, TRBJ2-5)
CASSATGGQETQYF

SEQ ID NO: 483689 - protein, 14 aa, Homo sapiens
  CDR3 for alpha chain variable domain of TCR clone 241845 (TRAV12-2, TRAJ40)
CAVKIPSGPYKYIF

SEQ ID NO: 483690 - protein, 15 aa, Homo sapiens
  CDR3 for beta chain variable domain of TCR clone 241845 (TRBV7-3, TRBJ2-1)
CASSPTGGGEVEQFF

SEQ ID NO: 483691 - protein, 12 aa, Homo sapiens
  CDR3 for alpha chain variable domain of TCR clone 241846 (TRAV2, TRAJ37)
CAVTMNTGKLIF

SEQ ID NO: 483692 - protein, 15 aa, Homo sapiens
  CDR3 for beta chain variable domain of TCR clone 241846 (TRBV5-1, TRBJ2-5)
CARSFGGPPQEAQYF

SEQ ID NO: 483693 - protein, 14 aa, Homo sapiens
  CDR3 for alpha chain variable domain of TCR clone 241847 (TRAV12-1, TRAJ9)
CVVNRRTGGFKTIF

SEQ ID NO: 483694 - protein, 14 aa, Homo sapiens
  CDR3 for beta chain variable domain of TCR clone 241847 (TRBV4-2, TRBJ1-5)
CASSRDRGNQPQHF

SEQ ID NO: 483695 - protein, 17 aa, Homo sapiens
  CDR3 for alpha chain variable domain of TCR clone 241848 (TRAV3, TRAJ6)
CAVRDGPRAGGNYIPTF

SEQ ID NO: 483696 - protein, 14 aa, Homo sapiens
  CDR3 for beta chain variable domain of TCR clone 241848 (TRBV11-2, TRBJ2-5)
CASRPLAGRETQYF

SEQ ID NO: 483697 - protein, 15 aa, Homo sapiens
  CDR3 for alpha chain variable domain of TCR clone 241849 (TRAV26-1, TRAJ29)
CIVRVEGSGNTPLVF

SEQ ID NO: 483698 - protein, 14 aa, Homo sapiens
  CDR3 for beta chain variable domain of TCR clone 241849 (TRBV4-1, TRBJ2-5)
CASSRSGSGETQYF

SEQ ID NO: 483699 - protein, 14 aa, Homo sapiens
  CDR3 for alpha chain variable domain of TCR clone 241850 (TRAV8-4, TRAJ13)
CAVTLSGGYLTVTF

SEQ ID NO: 483700 - protein, 14 aa, Homo sapiens
  CDR3 for beta chain variable domain of TCR clone 241850 (TRBV7-2, TRBJ1-2)
CASSQTGSTYGYTF

SEQ ID NO: 483701 - protein, 13 aa, Homo sapiens
  CDR3 for alpha chain variable domain of TCR clone 241851 (TRAV20, TRAJ40)
RAVPFSGTYKYIF

SEQ ID NO: 483702 - protein, 13 aa, Homo sapiens
  CDR3 for beta chain variable domain of TCR clone 241851 (TRBV15, TRBJ2-5)
CATSQIGEETQYF

SEQ ID NO: 483703 - protein, 18 aa, Homo sapiens
  CDR3 for alpha chain variable domain of TCR clone 241852 (TRAV21, TRAJ52)
CAVRPSPAGGTSYGKLTF

SEQ ID NO: 483704 - protein, 17 aa, Homo sapiens
  CDR3 for beta chain variable domain of TCR clone 241852 (TRBV4-1, TRBJ2-1)
CASSQVRGGGLYNEQFF

SEQ ID NO: 483705 - protein, 13 aa, Homo sapiens
  CDR3 for alpha chain variable domain of TCR clone 241853 (TRAV12-2, TRAJ47)
CAVFMEYGNKLVF

SEQ ID NO: 483706 - protein, 14 aa, Homo sapiens
  CDR3 for beta chain variable domain of TCR clone 241853 (TRBV4-1, TRBJ1-5)
CASRQGPTNQPQHF

SEQ ID NO: 483707 - protein, 20 aa, Homo sapiens
  CDR3 for alpha chain variable domain of TCR clone 241854 (TRAV26-1, TRAJ38)
CIADNAGNNHIQNPDPAVYQ

SEQ ID NO: 483708 - protein, 13 aa, Homo sapiens
  CDR3 for beta chain variable domain of TCR clone 241854 (TRBV20-1, TRBJ1-1)
CSARGGGNTEAFL

SEQ ID NO: 483709 - protein, 13 aa, Homo sapiens
  CDR3 for alpha chain variable domain of TCR clone 241855 (TRAV20, TRAJ31)
CAVQAIGGARIMF

SEQ ID NO: 483710 - protein, 14 aa, Homo sapiens
  CDR3 for beta chain variable domain of TCR clone 241855 (TRBV2, TRBJ1-5)
CASSGTVSNQPQHF

SEQ ID NO: 483711 - protein, 13 aa, Homo sapiens
  CDR3 for alpha chain variable domain of TCR clone 241856 (TRAV2, TRAJ40)
CAVVTSGTYKYIF

SEQ ID NO: 483712 - protein, 13 aa, Homo sapiens
  CDR3 for beta chain variable domain of TCR clone 241856 (TRBV11-3, TRBJ2-7)
CASSLDKLYEQYF

SEQ ID NO: 483713 - protein, 12 aa, Homo sapiens
  CDR3 for alpha chain variable domain of TCR clone 241857 (TRAV16, TRAJ10)
CSRTGGGNKLTF

SEQ ID NO: 483714 - protein, 14 aa, Homo sapiens
  CDR3 for beta chain variable domain of TCR clone 241857 (TRBV28, TRBJ1-2)
CASRIQGANYGYTF

SEQ ID NO: 483715 - protein, 15 aa, Homo sapiens
  CDR3 for alpha chain variable domain of TCR clone 241858 (TRAV25, TRAJ53)
CPTNNSGGSNYKLTF

SEQ ID NO: 483716 - protein, 14 aa, Homo sapiens
  CDR3 for beta chain variable domain of TCR clone 241858 (TRBV11-2, TRBJ2-3)
CASSRLARTDTQYF

SEQ ID NO: 483717 - protein, 16 aa, Homo sapiens
  CDR3 for alpha chain variable domain of TCR clone 241859 (TRAV17, TRAJ22)
CATGPISSGAARQLTF

SEQ ID NO: 483718 - protein, 13 aa, Homo sapiens
  CDR3 for beta chain variable domain of TCR clone 241859 (TRBV11-2, TRBJ2-1)
CASSLGLAGGRFF

SEQ ID NO: 483719 - protein, 12 aa, Homo sapiens
  CDR3 for alpha chain variable domain of TCR clone 241860 (TRAV13-2, TRAJ8)
CAHWLGFQKLVF

SEQ ID NO: 483720 - protein, 16 aa, Homo sapiens
  CDR3 for beta chain variable domain of TCR clone 241860 (TRBV5-1, TRBJ2-7)
CASSLEGLAWLYEQYF

SEQ ID NO: 483721 - protein, 18 aa, Homo sapiens
  CDR3 for alpha chain variable domain of TCR clone 241861 (TRAV26-1, TRAJ52)
CIVRGEGAGGTSYGKLTF

SEQ ID NO: 483722 - protein, 16 aa, Homo sapiens
  CDR3 for beta chain variable domain of TCR clone 241861 (TRBV7-2, TRBJ2-3)
CASSLVGDASTDTQYF

SEQ ID NO: 483723 - protein, 13 aa, Homo sapiens
  CDR3 for alpha chain variable domain of TCR clone 241862 (TRAV17, TRAJ29)
CATDAFRKHTSCL

SEQ ID NO: 483724 - protein, 13 aa, Homo sapiens
  CDR3 for beta chain variable domain of TCR clone 241862 (TRBV5-7, TRBJ2-6)
RASTSSGANVLTF

SEQ ID NO: 483725 - protein, 13 aa, Homo sapiens
  CDR3 for alpha chain variable domain of TCR clone 241863 (TRAV13-1, TRAJ39)
CAASIVMQATFSP

SEQ ID NO: 483726 - protein, 14 aa, Homo sapiens
  CDR3 for beta chain variable domain of TCR clone 241863 (TRBV4-1, TRBJ2-2)
CASSQAVNTGELFF

SEQ ID NO: 483727 - protein, 13 aa, Homo sapiens
  CDR3 for alpha chain variable domain of TCR clone 241864 (TRAV1-1, TRAJ21)
CAVAGIQLQQILL

SEQ ID NO: 483728 - protein, 15 aa, Homo sapiens
  CDR3 for beta chain variable domain of TCR clone 241864 (TRBV4-1, TRBJ2-5)
CASSQWDLYQETQYF

SEQ ID NO: 483729 - protein, 15 aa, Homo sapiens
  CDR3 for alpha chain variable domain of TCR clone 241865 (TRAV20, TRAJ4)
CAVEGSSGGSNKLIF

SEQ ID NO: 483730 - protein, 14 aa, Homo sapiens
  CDR3 for beta chain variable domain of TCR clone 241865 (TRBV7-8, TRBJ2-7)
CASTLGGALGEQYF

SEQ ID NO: 483731 - protein, 14 aa, Homo sapiens
  CDR3 for alpha chain variable domain of TCR clone 241866 (TRAV35, TRAJ54)
CAGYLIQGAQKLVF

SEQ ID NO: 483732 - protein, 14 aa, Homo sapiens
  CDR3 for beta chain variable domain of TCR clone 241866 (TRBV7-2, TRBJ2-5)
CASRVGWAEETQYF

SEQ ID NO: 483733 - protein, 11 aa, Homo sapiens
  CDR3 for alpha chain variable domain of TCR clone 241867 (TRAV2, TRAJ13)
CASGGYQKVTF

SEQ ID NO: 483734 - protein, 13 aa, Homo sapiens
  CDR3 for beta chain variable domain of TCR clone 241867 (TRBV20-1, TRBJ1-1)
CSARVRGNTEAFF

SEQ ID NO: 483735 - protein, 16 aa, Homo sapiens
  CDR3 for alpha chain variable domain of TCR clone 241868 (TRAV30, TRAJ24)
RGTEIVDADSWGKFQF

SEQ ID NO: 483736 - protein, 14 aa, Homo sapiens
  CDR3 for beta chain variable domain of TCR clone 241868 (TRBV12-5, TRBJ2-5)
CASGSRTHQKTQYF

SEQ ID NO: 483737 - protein, 18 aa, Homo sapiens
  CDR3 for alpha chain variable domain of TCR clone 241869 (TRAV12-3, TRAJ52)
CAMSVGGAGGTSYGMLTF

SEQ ID NO: 483738 - protein, 15 aa, Homo sapiens
  CDR3 for beta chain variable domain of TCR clone 241869 (TRBV27, TRBJ1-6)
CASSFDRGLGSPLHF

SEQ ID NO: 483739 - protein, 16 aa, Homo sapiens
  CDR3 for alpha chain variable domain of TCR clone 241870 (TRAV13-2, TRAJ28)
CAEKSYSGAGSYQLTF

SEQ ID NO: 483740 - protein, 16 aa, Homo sapiens
  CDR3 for beta chain variable domain of TCR clone 241870 (TRBV19, TRBJ2-1)
CASSKAGPSSYNEQFV

SEQ ID NO: 483741 - protein, 16 aa, Homo sapiens
  CDR3 for alpha chain variable domain of TCR clone 241871 (TRAV30, TRAJ24)
CGTEIVDADSWGKFQF

SEQ ID NO: 483742 - protein, 14 aa, Homo sapiens
  CDR3 for beta chain variable domain of TCR clone 241871 (TRBV28, TRBJ2-3)
CASSFVQGTDTQYF

SEQ ID NO: 483743 - protein, 11 aa, Homo sapiens
  CDR3 for alpha chain variable domain of TCR clone 241872 (TRAV12-2, TRAJ39)
CAVNNMLAFGG

SEQ ID NO: 483744 - protein, 16 aa, Homo sapiens
  CDR3 for beta chain variable domain of TCR clone 241872 (TRBV9, TRBJ2-7)
CASSAGPDRSPYEQYF

SEQ ID NO: 483745 - protein, 15 aa, Homo sapiens
  CDR3 for alpha chain variable domain of TCR clone 241873 (TRAV8-6, TRAJ11)
CAVSDRRSGYSTLTF

SEQ ID NO: 483746 - protein, 14 aa, Homo sapiens
  CDR3 for beta chain variable domain of TCR clone 241873 (TRBV20-1, TRBJ2-1)
CSAQIGGSANEQFF

SEQ ID NO: 483747 - protein, 12 aa, Homo sapiens
  CDR3 for alpha chain variable domain of TCR clone 241874 (TRAV12-2, TRAJ4)
GWPEGGYNKLIF

SEQ ID NO: 483748 - protein, 16 aa, Homo sapiens
  CDR3 for beta chain variable domain of TCR clone 241874 (TRBV6-1, TRBJ2-5)
SASSETLDRGAETQYF

SEQ ID NO: 483749 - protein, 14 aa, Homo sapiens
  CDR3 for alpha chain variable domain of TCR clone 241875 (TRAV12-2, TRAJ17)
CAVLFKAAGNKLTF

SEQ ID NO: 483750 - protein, 13 aa, Homo sapiens
  CDR3 for beta chain variable domain of TCR clone 241875 (TRBV29-1, TRBJ1-1)
CSVESGFGTEAFF

SEQ ID NO: 483751 - protein, 10 aa, Homo sapiens
  CDR3 for alpha chain variable domain of TCR clone 241876 (TRAV12-1, TRAJ20)
CVVNPRKLSF

SEQ ID NO: 483752 - protein, 18 aa, Homo sapiens
  CDR3 for beta chain variable domain of TCR clone 241876 (TRBV11-2, TRBJ2-3)
CASSLGGASRGAPNTQYV

SEQ ID NO: 483753 - protein, 14 aa, Homo sapiens
  CDR3 for alpha chain variable domain of TCR clone 241877 (TRAV1-2, TRAJ16)
CAVNRFSDGQKLLF

SEQ ID NO: 483754 - protein, 14 aa, Homo sapiens
  CDR3 for beta chain variable domain of TCR clone 241877 (TRBV4-2, TRBJ2-1)
CASGLNRAYNEQFF

SEQ ID NO: 483755 - protein, 17 aa, Homo sapiens
  CDR3 for alpha chain variable domain of TCR clone 241878 (TRAV26-1, TRAJ37)
CIVRVITVSSNTGKLIF

SEQ ID NO: 483756 - protein, 14 aa, Homo sapiens
  CDR3 for beta chain variable domain of TCR clone 241878 (TRBV27, TRBJ2-1)
CAGSIAETYNEQFF

SEQ ID NO: 483757 - protein, 16 aa, Homo sapiens
  CDR3 for alpha chain variable domain of TCR clone 241879 (TRAV3, TRAJ37)
CAVRPHGSGNTGKLIF

SEQ ID NO: 483758 - protein, 14 aa, Homo sapiens
  CDR3 for beta chain variable domain of TCR clone 241879 (TRBV20-1, TRBJ2-1)
CSARGGSSYNEQFS

SEQ ID NO: 483759 - protein, 17 aa, Homo sapiens
  CDR3 for alpha chain variable domain of TCR clone 241880 (TRAV26-1, TRAJ58)
CIVRVGAEETSGARLTF

SEQ ID NO: 483760 - protein, 18 aa, Homo sapiens
  CDR3 for beta chain variable domain of TCR clone 241880 (TRBV7-9, TRBJ2-7)
CASSLTTSGSRTWYEQYF

SEQ ID NO: 483761 - protein, 12 aa, Homo sapiens
  CDR3 for alpha chain variable domain of TCR clone 241881 (TRAV12-3, TRAJ17)
CAMTLTGNKLTF

SEQ ID NO: 483762 - protein, 15 aa, Homo sapiens
  CDR3 for beta chain variable domain of TCR clone 241881 (TRBV6-5, TRBJ2-1)
CASRGDFDSYNEQFF

SEQ ID NO: 483763 - protein, 15 aa, Homo sapiens
  CDR3 for alpha chain variable domain of TCR clone 241882 (TRAV4, TRAJ39)
CLVGPNNNAGNMLTF

SEQ ID NO: 483764 - protein, 11 aa, Homo sapiens
  CDR3 for beta chain variable domain of TCR clone 241882 (TRBV12-4, TRBJ2-3)
CASTATDTQYF

SEQ ID NO: 483765 - protein, 11 aa, Homo sapiens
  CDR3 for alpha chain variable domain of TCR clone 241883 (TRAV1-1, TRAJ23)
CAVRQGGKLIF

SEQ ID NO: 483766 - protein, 19 aa, Homo sapiens
  CDR3 for beta chain variable domain of TCR clone 241883 (TRBV28, TRBJ2-7)
CASSYSGTSRLGWVYEQYF

SEQ ID NO: 483767 - protein, 13 aa, Homo sapiens
  CDR3 for alpha chain variable domain of TCR clone 241884 (TRAV3, TRAJ20)
CAVRDTPRYKLSF

SEQ ID NO: 483768 - protein, 17 aa, Homo sapiens
  CDR3 for beta chain variable domain of TCR clone 241884 (TRBV19, TRBJ2-6)
CASSTGQVFSGANVLTF

SEQ ID NO: 483769 - protein, 14 aa, Homo sapiens
  CDR3 for alpha chain variable domain of TCR clone 241885 (TRAV12-2, TRAJ44)
CAVNIAGTASKLTF

SEQ ID NO: 483770 - protein, 13 aa, Homo sapiens
  CDR3 for beta chain variable domain of TCR clone 241885 (TRBV7-7, TRBJ2-3)
CASSLSRADTQYF

SEQ ID NO: 483771 - protein, 13 aa, Homo sapiens
  CDR3 for alpha chain variable domain of TCR clone 241886 (TRAV27, TRAJ56)
CAGKPGANSKLTF

SEQ ID NO: 483772 - protein, 13 aa, Homo sapiens
  CDR3 for beta chain variable domain of TCR clone 241886 (TRBV7-6, TRBJ1-2)
CASSLVADYGYTF

SEQ ID NO: 483773 - protein, 16 aa, Homo sapiens
  CDR3 for alpha chain variable domain of TCR clone 241887 (TRAV14/DV4, TRAJ21)
CAMREGPEKHFNKFYF

SEQ ID NO: 483774 - protein, 12 aa, Homo sapiens
  CDR3 for beta chain variable domain of TCR clone 241887 (TRBV29-1, TRBJ2-2)
CSVDKYTGELFF

SEQ ID NO: 483775 - protein, 16 aa, Homo sapiens
  CDR3 for alpha chain variable domain of TCR clone 241888 (TRAV35, TRAJ28)
CAGQKYSGAGSYQLTF

SEQ ID NO: 483776 - protein, 16 aa, Homo sapiens
  CDR3 for beta chain variable domain of TCR clone 241888 (TRBV19, TRBJ1-1)
CASRVDVTGAAWGAFF

SEQ ID NO: 483777 - protein, 14 aa, Homo sapiens
  CDR3 for alpha chain variable domain of TCR clone 241889 (TRAV26-2, TRAJ32)
CILFRGGATNKLIF

SEQ ID NO: 483778 - protein, 11 aa, Homo sapiens
  CDR3 for beta chain variable domain of TCR clone 241889 (TRBV11-2, TRBJ2-2)
CASSLPGELFF

SEQ ID NO: 483779 - protein, 13 aa, Homo sapiens
  CDR3 for alpha chain variable domain of TCR clone 241890 (TRAV27, TRAJ3)
ASLRGSSASKIIF

SEQ ID NO: 483780 - protein, 15 aa, Homo sapiens
  CDR3 for beta chain variable domain of TCR clone 241890 (TRBV6-3, TRBJ2-7)
CASSSPGTVFYEQYV

SEQ ID NO: 483781 - protein, 16 aa, Homo sapiens
  CDR3 for alpha chain variable domain of TCR clone 241891 (TRAV30, TRAJ24)
CCTEIVDADSWGKFQF

SEQ ID NO: 483782 - protein, 17 aa, Homo sapiens
  CDR3 for beta chain variable domain of TCR clone 241891 (TRBV20-1, TRBJ2-2)
CSASGSGQGGLTGELFF

SEQ ID NO: 483783 - protein, 16 aa, Homo sapiens
  CDR3 for alpha chain variable domain of TCR clone 241892 (TRAV20, TRAJ22)
CAVQASSSGSARQLTF

SEQ ID NO: 483784 - protein, 15 aa, Homo sapiens
  CDR3 for beta chain variable domain of TCR clone 241892 (TRBV4-1, TRBJ2-5)
CASSQWDLYQETQYF

SEQ ID NO: 483785 - protein, 11 aa, Homo sapiens
  CDR3 for alpha chain variable domain of TCR clone 241893 (TRAV3, TRAJ21)
CAVGNFNKFYF

SEQ ID NO: 483786 - protein, 12 aa, Homo sapiens
  CDR3 for beta chain variable domain of TCR clone 241893 (TRBV9, TRBJ2-1)
CQQRRAGVEQFF

SEQ ID NO: 483787 - protein, 13 aa, Homo sapiens
  CDR3 for alpha chain variable domain of TCR clone 241894 (TRAV3, TRAJ27)
CAVRPLGAGKSTF

SEQ ID NO: 483788 - protein, 13 aa, Homo sapiens
  CDR3 for beta chain variable domain of TCR clone 241894 (TRBV4-3, TRBJ2-1)
CASSQEGWDEQFF

SEQ ID NO: 483789 - protein, 14 aa, Homo sapiens
  CDR3 for alpha chain variable domain of TCR clone 241895 (TRAV8-3, TRAJ4)
CAVGAAGGYNKLIS

SEQ ID NO: 483790 - protein, 15 aa, Homo sapiens
  CDR3 for beta chain variable domain of TCR clone 241895 (TRBV6-5, TRBJ2-1)
CASSYDAGAGNEQFF

SEQ ID NO: 483791 - protein, 16 aa, Homo sapiens
  CDR3 for alpha chain variable domain of TCR clone 241896 (TRAV8-4, TRAJ5)
CAVSPLTDTGRRALTF

SEQ ID NO: 483792 - protein, 15 aa, Homo sapiens
  CDR3 for beta chain variable domain of TCR clone 241896 (TRBV20-1, TRBJ1-1)
CSASRVVTGNTEAFF

SEQ ID NO: 483793 - protein, 12 aa, Homo sapiens
  CDR3 for alpha chain variable domain of TCR clone 241897 (TRAV12-3, TRAJ17)
CAMTLTGNKLTF

SEQ ID NO: 483794 - protein, 15 aa, Homo sapiens
  CDR3 for beta chain variable domain of TCR clone 241897 (TRBV19, TRBJ2-3)
CASKPGTTSTDTQYF

SEQ ID NO: 483795 - protein, 15 aa, Homo sapiens
  CDR3 for alpha chain variable domain of TCR clone 241898 (TRAV27, TRAJ38)
CAARRNAGNNRKLIG

SEQ ID NO: 483796 - protein, 14 aa, Homo sapiens
  CDR3 for beta chain variable domain of TCR clone 241898 (TRBV11-2, TRBJ1-5)
CASSLDRGRQPQHF

SEQ ID NO: 483797 - protein, 13 aa, Homo sapiens
  CDR3 for alpha chain variable domain of TCR clone 241899 (TRAV8-6, TRAJ16)
CAVSRWEGQKLLF

SEQ ID NO: 483798 - protein, 15 aa, Homo sapiens
  CDR3 for beta chain variable domain of TCR clone 241899 (TRBV12-4, TRBJ2-1)
CASSLSTGVSNEQFF

SEQ ID NO: 483799 - protein, 14 aa, Homo sapiens
  CDR3 for alpha chain variable domain of TCR clone 241900 (TRAV8-3, TRAJ4)
CPASVSGGYNKLIF

SEQ ID NO: 483800 - protein, 12 aa, Homo sapiens
  CDR3 for beta chain variable domain of TCR clone 241900 (TRBV7-8, TRBJ2-7)
CASSLAGYEQYF

SEQ ID NO: 483801 - protein, 11 aa, Homo sapiens
  CDR3 for alpha chain variable domain of TCR clone 241901 (TRAV12-3, TRAJ27)
CAMANAGKSTF

SEQ ID NO: 483802 - protein, 14 aa, Homo sapiens
  CDR3 for beta chain variable domain of TCR clone 241901 (TRBV18, TRBJ2-3)
CASSGLADTDTQYF

SEQ ID NO: 483803 - protein, 13 aa, Homo sapiens
  CDR3 for alpha chain variable domain of TCR clone 241902 (TRAV8-2, TRAJ26)
CVVSLGYGQNFVF

SEQ ID NO: 483804 - protein, 17 aa, Homo sapiens
  CDR3 for beta chain variable domain of TCR clone 241902 (TRBV3-1, TRBJ2-2)
CASSQFRDKVDTGELFF

SEQ ID NO: 483805 - protein, 14 aa, Homo sapiens
  CDR3 for alpha chain variable domain of TCR clone 241903 (TRAV16, TRAJ29)
CALTRNSGNTPFVF

SEQ ID NO: 483806 - protein, 12 aa, Homo sapiens
  CDR3 for beta chain variable domain of TCR clone 241903 (TRBV2, TRBJ2-1)
CAKREGYNEQFF

SEQ ID NO: 483807 - protein, 13 aa, Homo sapiens
  CDR3 for alpha chain variable domain of TCR clone 241904 (TRAV12-3, TRAJ7)
CAMSATGNNRLAF

SEQ ID NO: 483808 - protein, 14 aa, Homo sapiens
  CDR3 for beta chain variable domain of TCR clone 241904 (TRBV13, TRBJ2-5)
CASSLGPRGETQYF

SEQ ID NO: 483809 - protein, 13 aa, Homo sapiens
  CDR3 for alpha chain variable domain of TCR clone 241905 (TRAV29/DV5, TRAJ31)
CAASRNNNARLMF

SEQ ID NO: 483810 - protein, 12 aa, Homo sapiens
  CDR3 for beta chain variable domain of TCR clone 241905 (TRBV14, TRBJ2-5)
CASSQLRETQYF

SEQ ID NO: 483811 - protein, 19 aa, Homo sapiens
  CDR3 for alpha chain variable domain of TCR clone 241906 (TRAV1-2, TRAJ26)
CLLPLCCERPDNYGQNFVF

SEQ ID NO: 483812 - protein, 17 aa, Homo sapiens
  CDR3 for beta chain variable domain of TCR clone 241906 (TRBV28, TRBJ2-5)
CDSSRQGGLAGAETQYF

SEQ ID NO: 483813 - protein, 14 aa, Homo sapiens
  CDR3 for alpha chain variable domain of TCR clone 241907 (TRAV8-3, TRAJ17)
CAVGAQTAGNKLTF

SEQ ID NO: 483814 - protein, 11 aa, Homo sapiens
  CDR3 for beta chain variable domain of TCR clone 241907 (TRBV29-1, TRBJ1-4)
CSVSSGEKLFV

SEQ ID NO: 483815 - protein, 17 aa, Homo sapiens
  CDR3 for alpha chain variable domain of TCR clone 241908 (TRAV23/DV6, TRAJ28)
CAALLAYSGPGSYQLTF

SEQ ID NO: 483816 - protein, 13 aa, Homo sapiens
  CDR3 for beta chain variable domain of TCR clone 241908 (TRBV4-2, TRBJ2-3)
CASSQGNTDTQYF

SEQ ID NO: 483817 - protein, 15 aa, Homo sapiens
  CDR3 for alpha chain variable domain of TCR clone 241909 (TRAV36/DV7, TRAJ54)
CAVEKPVQGAQKLVF

SEQ ID NO: 483818 - protein, 14 aa, Homo sapiens
  CDR3 for beta chain variable domain of TCR clone 241909 (TRBV6-1, TRBJ1-3)
CASVQGGGGNTIYF

SEQ ID NO: 483819 - protein, 15 aa, Homo sapiens
  CDR3 for alpha chain variable domain of TCR clone 241910 (TRAV8-3, TRAJ7)
CAVGSISYGNNRLAF

SEQ ID NO: 483820 - protein, 14 aa, Homo sapiens
  CDR3 for beta chain variable domain of TCR clone 241910 (TRBV5-7, TRBJ2-7)
CASSGGLSSYEQYF

SEQ ID NO: 483821 - protein, 12 aa, Homo sapiens
  CDR3 for alpha chain variable domain of TCR clone 241911 (TRAV12-3, TRAJ20)
CAMVRGDYKLSF

SEQ ID NO: 483822 - protein, 15 aa, Homo sapiens
  CDR3 for beta chain variable domain of TCR clone 241911 (TRBV28, TRBJ2-4)
CAAGSGTLLMGIQYF

SEQ ID NO: 483823 - protein, 14 aa, Homo sapiens
  CDR3 for alpha chain variable domain of TCR clone 241912 (TRAV23/DV6, TRAJ40)
FAASLTSGTYKYTF

SEQ ID NO: 483824 - protein, 14 aa, Homo sapiens
  CDR3 for beta chain variable domain of TCR clone 241912 (TRBV5-1, TRBJ2-3)
CASSRGQGGGTQYF

SEQ ID NO: 483825 - protein, 16 aa, Homo sapiens
  CDR3 for alpha chain variable domain of TCR clone 241913 (TRAV30, TRAJ24)
CGTEIVDADSWGKFQF

SEQ ID NO: 483826 - protein, 12 aa, Homo sapiens
  CDR3 for beta chain variable domain of TCR clone 241913 (TRBV7-2, TRBJ2-5)
CASSLIGETQYF

SEQ ID NO: 483827 - protein, 13 aa, Homo sapiens
  CDR3 for alpha chain variable domain of TCR clone 241914 (TRAV13-2, TRAJ13)
CAERPGGYQKVTF

SEQ ID NO: 483828 - protein, 15 aa, Homo sapiens
  CDR3 for beta chain variable domain of TCR clone 241914 (TRBV11-3, TRBJ2-7)
CASSPGPASYYEQYF

SEQ ID NO: 483829 - protein, 13 aa, Homo sapiens
  CDR3 for alpha chain variable domain of TCR clone 241915 (TRAV12-3, TRAJ43)
CAMIRPNNNDMRF

SEQ ID NO: 483830 - protein, 13 aa, Homo sapiens
  CDR3 for beta chain variable domain of TCR clone 241915 (TRBV11-3, TRBJ1-1)
CASSLGGNTEAFF

SEQ ID NO: 483831 - protein, 16 aa, Homo sapiens
  CDR3 for alpha chain variable domain of TCR clone 241916 (TRAV38-1, TRAJ32)
CAFMKGGGGATNKLIF

SEQ ID NO: 483832 - protein, 12 aa, Homo sapiens
  CDR3 for beta chain variable domain of TCR clone 241916 (TRBV19, TRBJ2-1)
CASSMQDTEQFF

SEQ ID NO: 483833 - protein, 10 aa, Homo sapiens
  CDR3 for alpha chain variable domain of TCR clone 241917 (TRAV13-1, TRAJ27)
WAPLARQINL

SEQ ID NO: 483834 - protein, 13 aa, Homo sapiens
  CDR3 for beta chain variable domain of TCR clone 241917 (TRBV28, TRBJ1-1)
CASSKQGWTEAFF

SEQ ID NO: 483835 - protein, 15 aa, Homo sapiens
  CDR3 for alpha chain variable domain of TCR clone 241918 (TRAV20, TRAJ50)
CAVRQMKPSYDKVIF

SEQ ID NO: 483836 - protein, 17 aa, Homo sapiens
  CDR3 for beta chain variable domain of TCR clone 241918 (TRBV28, TRBJ2-7)
CASSPLHRASGVYEQYF

SEQ ID NO: 483837 - protein, 16 aa, Homo sapiens
  CDR3 for alpha chain variable domain of TCR clone 241919 (TRAV26-2, TRAJ45)
CTTASPIGGGADGLTF

SEQ ID NO: 483838 - protein, 22 aa, Homo sapiens
  CDR3 for beta chain variable domain of TCR clone 241919 (TRBV28, TRBJ2-1)
CTSASTPIGRSPGLAGGNEQFF

SEQ ID NO: 483839 - protein, 11 aa, Homo sapiens
  CDR3 for alpha chain variable domain of TCR clone 241920 (TRAV17, TRAJ9)
CGFTGGFKTIF

SEQ ID NO: 483840 - protein, 15 aa, Homo sapiens
  CDR3 for beta chain variable domain of TCR clone 241920 (TRBV5-1, TRBJ2-1)
CASSPPRAPYNEQFF

SEQ ID NO: 483841 - protein, 15 aa, Homo sapiens
  CDR3 for alpha chain variable domain of TCR clone 241921 (TRAV17, TRAJ57)
CATGPSQGGPEKLVF

SEQ ID NO: 483842 - protein, 16 aa, Homo sapiens
  CDR3 for beta chain variable domain of TCR clone 241921 (TRBV12-4, TRBJ1-5)
CASSRPVGGSNQTQHF

SEQ ID NO: 483843 - protein, 15 aa, Homo sapiens
  CDR3 for alpha chain variable domain of TCR clone 241922 (TRAV12-2, TRAJ53)
CAVNGGGGSNYKLTF

SEQ ID NO: 483844 - protein, 12 aa, Homo sapiens
  CDR3 for beta chain variable domain of TCR clone 241922 (TRBV7-6, TRBJ2-5)
CASSLSQETQYC

SEQ ID NO: 483845 - protein, 14 aa, Homo sapiens
  CDR3 for alpha chain variable domain of TCR clone 241923 (TRAV12-2, TRAJ33)
CAVKRARSNYQLIW

SEQ ID NO: 483846 - protein, 13 aa, Homo sapiens
  CDR3 for beta chain variable domain of TCR clone 241923 (TRBV7-9, TRBJ1-2)
CASSLKQNYGYTF

SEQ ID NO: 483847 - protein, 14 aa, Homo sapiens
  CDR3 for alpha chain variable domain of TCR clone 241924 (TRAV1-2, TRAJ16)
CAVNRFSDVQKLLF

SEQ ID NO: 483848 - protein, 15 aa, Homo sapiens
  CDR3 for beta chain variable domain of TCR clone 241924 (TRBV9, TRBJ1-6)
CASSVAGTGDSPLHL

SEQ ID NO: 483849 - protein, 14 aa, Homo sapiens
  CDR3 for alpha chain variable domain of TCR clone 241925 (TRAV2, TRAJ11)
CAVVPNSGYSTLTF

SEQ ID NO: 483850 - protein, 15 aa, Homo sapiens
  CDR3 for beta chain variable domain of TCR clone 241925 (TRBV4-1, TRBJ1-3)
CASSQALRVGNTIYL

SEQ ID NO: 483851 - protein, 13 aa, Homo sapiens
  CDR3 for alpha chain variable domain of TCR clone 241926 (TRAV10, TRAJ45)
CVGSGGGADGLTF

SEQ ID NO: 483852 - protein, 15 aa, Homo sapiens
  CDR3 for beta chain variable domain of TCR clone 241926 (TRBV5-1, TRBJ2-7)
CASSVYPDGGYEQYS

SEQ ID NO: 483853 - protein, 17 aa, Homo sapiens
  CDR3 for alpha chain variable domain of TCR clone 241927 (TRAV3, TRAJ6)
CAARDGPRAGGSYIPTF

SEQ ID NO: 483854 - protein, 15 aa, Homo sapiens
  CDR3 for beta chain variable domain of TCR clone 241927 (TRBV2, TRBJ2-7)
CASSEGLARSYEQYF

SEQ ID NO: 483855 - protein, 13 aa, Homo sapiens
  CDR3 for alpha chain variable domain of TCR clone 241928 (TRAV21, TRAJ6)
CAGGSGGSYIPTF

SEQ ID NO: 483856 - protein, 15 aa, Homo sapiens
  CDR3 for beta chain variable domain of TCR clone 241928 (TRBV7-9, TRBJ1-6)
CASSSPGRGNSPLHF

SEQ ID NO: 483857 - protein, 14 aa, Homo sapiens
  CDR3 for alpha chain variable domain of TCR clone 241929 (TRAV29/DV5, TRAJ20)
CSATIRSNDYKLSF

SEQ ID NO: 483858 - protein, 19 aa, Homo sapiens
  CDR3 for beta chain variable domain of TCR clone 241929 (TRBV25-1, TRBJ2-2)
CAILVYRVDRGRKTGELFF

SEQ ID NO: 483859 - protein, 14 aa, Homo sapiens
  CDR3 for alpha chain variable domain of TCR clone 241930 (TRAV12-3, TRAJ10)
SHLPLTGGGNKLTF

SEQ ID NO: 483860 - protein, 14 aa, Homo sapiens
  CDR3 for beta chain variable domain of TCR clone 241930 (TRBV19, TRBJ2-1)
CANPTFVSSGEQFF

SEQ ID NO: 483861 - protein, 15 aa, Homo sapiens
  CDR3 for alpha chain variable domain of TCR clone 241931 (TRAV13-1, TRAJ8)
CAASIPNTGFQKLVF

SEQ ID NO: 483862 - protein, 15 aa, Homo sapiens
  CDR3 for beta chain variable domain of TCR clone 241931 (TRBV20-1, TRBJ2-7)
CSARDRVSGMDEQYF

SEQ ID NO: 483863 - protein, 15 aa, Homo sapiens
  CDR3 for alpha chain variable domain of TCR clone 241932 (TRAV8-3, TRAJ45)
CASWYSGGGADGLTF

SEQ ID NO: 483864 - protein, 13 aa, Homo sapiens
  CDR3 for beta chain variable domain of TCR clone 241932 (TRBV7-9, TRBJ2-7)
CASSFAGAYEQYF

SEQ ID NO: 483865 - protein, 15 aa, Homo sapiens
  CDR3 for alpha chain variable domain of TCR clone 241933 (TRAV25, TRAJ53)
CPTSNSGGSNYKLTF

SEQ ID NO: 483866 - protein, 14 aa, Homo sapiens
  CDR3 for beta chain variable domain of TCR clone 241933 (TRBV11-2, TRBJ2-3)
CASSRLARTATQYF

SEQ ID NO: 483867 - protein, 14 aa, Homo sapiens
  CDR3 for alpha chain variable domain of TCR clone 241934 (TRAV1-2, TRAJ16)
CAVNRFSDGQKLLF

SEQ ID NO: 483868 - protein, 16 aa, Homo sapiens
  CDR3 for beta chain variable domain of TCR clone 241934 (TRBV20-1, TRBJ1-4)
RSAPGQGLLTNEKLFF

SEQ ID NO: 483869 - protein, 17 aa, Homo sapiens
  CDR3 for alpha chain variable domain of TCR clone 241935 (TRAV12-1, TRAJ42)
CVVMRMNYGGSQGNHIF

SEQ ID NO: 483870 - protein, 13 aa, Homo sapiens
  CDR3 for beta chain variable domain of TCR clone 241935 (TRBV7-2, TRBJ1-1)
CASSLARPAEAFF

SEQ ID NO: 483871 - protein, 11 aa, Homo sapiens
  CDR3 for alpha chain variable domain of TCR clone 241936 (TRAV21, TRAJ34)
CAVTNTDKLIF

SEQ ID NO: 483872 - protein, 12 aa, Homo sapiens
  CDR3 for beta chain variable domain of TCR clone 241936 (TRBV7-9, TRBJ1-1)
CASSLVRGEAVF

SEQ ID NO: 483873 - protein, 12 aa, Homo sapiens
  CDR3 for alpha chain variable domain of TCR clone 241937 (TRAV13-1, TRAJ21)
CAAKEGFNKFYF

SEQ ID NO: 483874 - protein, 20 aa, Homo sapiens
  CDR3 for beta chain variable domain of TCR clone 241937 (TRBV28, TRBJ2-1)
CASTPIGRSPGLGGGNEQFF

SEQ ID NO: 483875 - protein, 11 aa, Homo sapiens
  CDR3 for alpha chain variable domain of TCR clone 241938 (TRAV21, TRAJ23)
CAPHRRGKLIF

SEQ ID NO: 483876 - protein, 14 aa, Homo sapiens
  CDR3 for beta chain variable domain of TCR clone 241938 (TRBV12-4, TRBJ1-1)
CASTWTGHDTEAFF

SEQ ID NO: 483877 - protein, 14 aa, Homo sapiens
  CDR3 for alpha chain variable domain of TCR clone 241939 (TRAV12-3, TRAJ29)
CAMSPYSGNTPLVF

SEQ ID NO: 483878 - protein, 13 aa, Homo sapiens
  CDR3 for beta chain variable domain of TCR clone 241939 (TRBV11-2, TRBJ2-5)
CASSRGPSETQYF

SEQ ID NO: 483879 - protein, 13 aa, Homo sapiens
  CDR3 for alpha chain variable domain of TCR clone 241940 (TRAV8-3, TRAJ28)
CAVGSVGSYQLAF

SEQ ID NO: 483880 - protein, 15 aa, Homo sapiens
  CDR3 for beta chain variable domain of TCR clone 241940 (TRBV7-9, TRBJ1-5)
CASSQGHQPNQPQHF

SEQ ID NO: 483881 - protein, 18 aa, Homo sapiens
  CDR3 for alpha chain variable domain of TCR clone 241941 (TRAV21, TRAJ52)
CAVRPCPAGGTSYGKLTF

SEQ ID NO: 483882 - protein, 17 aa, Homo sapiens
  CDR3 for beta chain variable domain of TCR clone 241941 (TRBV13, TRBJ2-3)
CASSLPRVAGGRNTQYF

SEQ ID NO: 483883 - protein, 15 aa, Homo sapiens
  CDR3 for alpha chain variable domain of TCR clone 241942 (TRAV35, TRAJ40)
CAGQLGTSGTYKYIF

SEQ ID NO: 483884 - protein, 14 aa, Homo sapiens
  CDR3 for beta chain variable domain of TCR clone 241942 (TRBV7-8, TRBJ2-3)
CASSLEAGTDTQYF

SEQ ID NO: 483885 - protein, 15 aa, Homo sapiens
  CDR3 for alpha chain variable domain of TCR clone 241943 (TRAV26-1, TRAJ20)
CIVRVAGSNDYKLSF

SEQ ID NO: 483886 - protein, 17 aa, Homo sapiens
  CDR3 for beta chain variable domain of TCR clone 241943 (TRBV11-2, TRBJ2-1)
CASSVYPPGVEYNEQFF

SEQ ID NO: 483887 - protein, 15 aa, Homo sapiens
  CDR3 for alpha chain variable domain of TCR clone 241944 (TRAV3, TRAJ9)
CAVRDSNTGGFKTIF

SEQ ID NO: 483888 - protein, 16 aa, Homo sapiens
  CDR3 for beta chain variable domain of TCR clone 241944 (TRBV15, TRBJ2-5)
CATSPTTGQGMEAQYF

SEQ ID NO: 483889 - protein, 20 aa, Homo sapiens
  CDR3 for alpha chain variable domain of TCR clone 241945 (TRAV12-1, TRAJ42)
SSMIQPPTSVKGGSQGNLIF

SEQ ID NO: 483890 - protein, 18 aa, Homo sapiens
  CDR3 for beta chain variable domain of TCR clone 241945 (TRBV11-2, TRBJ2-3)
CASSLGGASRGAPNTQYF

SEQ ID NO: 483891 - protein, 18 aa, Homo sapiens
  CDR3 for alpha chain variable domain of TCR clone 241946 (TRAV26-1, TRAJ56)
CIVRVASRVTGANSKLTF

SEQ ID NO: 483892 - protein, 14 aa, Homo sapiens
  CDR3 for beta chain variable domain of TCR clone 241946 (TRBV7-2, TRBJ2-7)
CASSPKTSFYEQYF

SEQ ID NO: 483893 - protein, 11 aa, Homo sapiens
  CDR3 for alpha chain variable domain of TCR clone 241947 (TRAV4, TRAJ31)
CLVGDNARLMF

SEQ ID NO: 483894 - protein, 16 aa, Homo sapiens
  CDR3 for beta chain variable domain of TCR clone 241947 (TRBV7-2, TRBJ2-5)
CASSSPWLSGQEAQYF

SEQ ID NO: 483895 - protein, 15 aa, Homo sapiens
  CDR3 for alpha chain variable domain of TCR clone 241948 (TRAV27, TRAJ38)
CAARRNAGNNRKLLW

SEQ ID NO: 483896 - protein, 15 aa, Homo sapiens
  CDR3 for beta chain variable domain of TCR clone 241948 (TRBV27, TRBJ2-1)
CASSNGGGSSNEQFF

SEQ ID NO: 483897 - protein, 13 aa, Homo sapiens
  CDR3 for alpha chain variable domain of TCR clone 241949 (TRAV2, TRAJ9)
CAVESTGGFKTIF

SEQ ID NO: 483898 - protein, 14 aa, Homo sapiens
  CDR3 for beta chain variable domain of TCR clone 241949 (TRBV10-3, TRBJ2-1)
CHHLRRGTDNEQFF

SEQ ID NO: 483899 - protein, 14 aa, Homo sapiens
  CDR3 for alpha chain variable domain of TCR clone 241950 (TRAV1-2, TRAJ16)
CAVNRFSDGQKLLF

SEQ ID NO: 483900 - protein, 11 aa, Homo sapiens
  CDR3 for beta chain variable domain of TCR clone 241950 (TRBV29-1, TRBJ2-5)
CIEDRTGTQYF

SEQ ID NO: 483901 - protein, 15 aa, Homo sapiens
  CDR3 for alpha chain variable domain of TCR clone 241951 (TRAV26-1, TRAJ40)
CIVRVTTSGTYKYIF

SEQ ID NO: 483902 - protein, 14 aa, Homo sapiens
  CDR3 for beta chain variable domain of TCR clone 241951 (TRBV7-8, TRBJ2-3)
CASSLEAGTDTQYF

SEQ ID NO: 483903 - protein, 14 aa, Homo sapiens
  CDR3 for alpha chain variable domain of TCR clone 241952 (TRAV25, TRAJ22)
CAVRSSGSARQLTF

SEQ ID NO: 483904 - protein, 16 aa, Homo sapiens
  CDR3 for beta chain variable domain of TCR clone 241952 (TRBV4-2, TRBJ1-1)
CASSPSPGRAATEAFF

SEQ ID NO: 483905 - protein, 17 aa, Homo sapiens
  CDR3 for alpha chain variable domain of TCR clone 241953 (TRAV38-1, TRAJ28)
CAFMKPTSGAGSYQLTF

SEQ ID NO: 483906 - protein, 15 aa, Homo sapiens
  CDR3 for beta chain variable domain of TCR clone 241953 (TRBV5-1, TRBJ2-4)
FASSLGGGGSYIQYF

SEQ ID NO: 483907 - protein, 12 aa, Homo sapiens
  CDR3 for alpha chain variable domain of TCR clone 241954 (TRAV13-2, TRAJ8)
CAPWLGFQKLVF

SEQ ID NO: 483908 - protein, 11 aa, Homo sapiens
  CDR3 for beta chain variable domain of TCR clone 241954 (TRBV10-3, TRBJ2-7)
CAISEGLEQYF

SEQ ID NO: 483909 - protein, 16 aa, Homo sapiens
  CDR3 for alpha chain variable domain of TCR clone 241955 (TRAV12-2, TRAJ45)
CAVKRNPGGGADGLTF

SEQ ID NO: 483910 - protein, 12 aa, Homo sapiens
  CDR3 for beta chain variable domain of TCR clone 241955 (TRBV6-1, TRBJ2-5)
CASSEGWETQYF

SEQ ID NO: 483911 - protein, 14 aa, Homo sapiens
  CDR3 for alpha chain variable domain of TCR clone 241956 (TRAV12-2, TRAJ40)
CAVKIPSGTYKYIF

SEQ ID NO: 483912 - protein, 19 aa, Homo sapiens
  CDR3 for beta chain variable domain of TCR clone 241956 (TRBV6-1, TRBJ1-3)
CASVQGGGWKHHVFWRGKL

SEQ ID NO: 483913 - protein, 13 aa, Homo sapiens
  CDR3 for alpha chain variable domain of TCR clone 241957 (TRAV30, TRAJ6)
CGFIEGGSYIPTF

SEQ ID NO: 483914 - protein, 16 aa, Homo sapiens
  CDR3 for beta chain variable domain of TCR clone 241957 (TRBV7-6, TRBJ2-3)
CASSARTSRGTDTQYF

SEQ ID NO: 483915 - protein, 14 aa, Homo sapiens
  CDR3 for alpha chain variable domain of TCR clone 241958 (TRAV9-2, TRAJ44)
CALSEPGTASKLTF

SEQ ID NO: 483916 - protein, 13 aa, Homo sapiens
  CDR3 for beta chain variable domain of TCR clone 241958 (TRBV7-3, TRBJ1-1)
CASSQDWGAEAFF

SEQ ID NO: 483917 - protein, 14 aa, Homo sapiens
  CDR3 for alpha chain variable domain of TCR clone 241959 (TRAV12-2, TRAJ13)
CAVKKTGGYQKVTF

SEQ ID NO: 483918 - protein, 17 aa, Homo sapiens
  CDR3 for beta chain variable domain of TCR clone 241959 (TRBV7-8, TRBJ2-6)
CASSAGTGGAGANDLTF

SEQ ID NO: 483919 - protein, 12 aa, Homo sapiens
  CDR3 for alpha chain variable domain of TCR clone 241960 (TRAV13-1, TRAJ21)
CAAKEGFNKFYF

SEQ ID NO: 483920 - protein, 16 aa, Homo sapiens
  CDR3 for beta chain variable domain of TCR clone 241960 (TRBV15, TRBJ2-1)
CATSRERLAGAYEQFF

SEQ ID NO: 483921 - protein, 13 aa, Homo sapiens
  CDR3 for alpha chain variable domain of TCR clone 241961 (TRAV21, TRAJ57)
CAVTQGGSEKLVF

SEQ ID NO: 483922 - protein, 17 aa, Homo sapiens
  CDR3 for beta chain variable domain of TCR clone 241961 (TRBV28, TRBJ2-5)
CASSTPEGDALQETQYF

SEQ ID NO: 483923 - protein, 11 aa, Homo sapiens
  CDR3 for alpha chain variable domain of TCR clone 241962 (TRAV12-2, TRAJ23)
CAVDQGGKLIF

SEQ ID NO: 483924 - protein, 15 aa, Homo sapiens
  CDR3 for beta chain variable domain of TCR clone 241962 (TRBV7-9, TRBJ1-6)
CASSSPGRGNSPLHF

SEQ ID NO: 483925 - protein, 15 aa, Homo sapiens
  CDR3 for alpha chain variable domain of TCR clone 241963 (TRAV12-2, TRAJ43)
CAFDMRFGAGTRLTV

SEQ ID NO: 483926 - protein, 15 aa, Homo sapiens
  CDR3 for beta chain variable domain of TCR clone 241963 (TRBV20-1, TRBJ2-7)
CSARDRVSGMDEQNF

SEQ ID NO: 483927 - protein, 12 aa, Homo sapiens
  CDR3 for alpha chain variable domain of TCR clone 241964 (TRAV3, TRAJ43)
CAVRDPNNDMRF

SEQ ID NO: 483928 - protein, 13 aa, Homo sapiens
  CDR3 for beta chain variable domain of TCR clone 241964 (TRBV19, TRBJ1-2)
CASSVPGHDGYTF

SEQ ID NO: 483929 - protein, 11 aa, Homo sapiens
  CDR3 for alpha chain variable domain of TCR clone 241965 (TRAV12-1, TRAJ43)
CVEYDNNDMRF

SEQ ID NO: 483930 - protein, 15 aa, Homo sapiens
  CDR3 for beta chain variable domain of TCR clone 241965 (TRBV5-1, TRBJ2-5)
CASSFKGGDQETQYF

SEQ ID NO: 483931 - protein, 15 aa, Homo sapiens
  CDR3 for alpha chain variable domain of TCR clone 241966 (TRAV3, TRAJ4)
CAQNMFSGGYNKLIF

SEQ ID NO: 483932 - protein, 12 aa, Homo sapiens
  CDR3 for beta chain variable domain of TCR clone 241966 (TRBV4-1, TRBJ2-3)
CASSQGTDTQYF

SEQ ID NO: 483933 - protein, 13 aa, Homo sapiens
  CDR3 for alpha chain variable domain of TCR clone 241967 (TRAV13-1, TRAJ40)
CAAISPGTYKYIF

SEQ ID NO: 483934 - protein, 13 aa, Homo sapiens
  CDR3 for beta chain variable domain of TCR clone 241967 (TRBV24-1, TRBJ2-2)
CATSDWSTGELFF

SEQ ID NO: 483935 - protein, 12 aa, Homo sapiens
  CDR3 for alpha chain variable domain of TCR clone 241968 (TRAV1-1, TRAJ24)
CAVRGSWGKFPF

SEQ ID NO: 483936 - protein, 15 aa, Homo sapiens
  CDR3 for beta chain variable domain of TCR clone 241968 (TRBV6-3, TRBJ2-7)
CASSSPGTVFYEQYF

SEQ ID NO: 483937 - protein, 12 aa, Homo sapiens
  CDR3 for alpha chain variable domain of TCR clone 241969 (TRAV8-3, TRAJ41)
CAVALSGYALNF

SEQ ID NO: 483938 - protein, 16 aa, Homo sapiens
  CDR3 for beta chain variable domain of TCR clone 241969 (TRBV27, TRBJ2-7)
CASSYERRDSAYEQYF

SEQ ID NO: 483939 - protein, 16 aa, Homo sapiens
  CDR3 for alpha chain variable domain of TCR clone 241970 (TRAV1-2, TRAJ10)
CAVRGVLTGGGNKLTF

SEQ ID NO: 483940 - protein, 14 aa, Homo sapiens
  CDR3 for beta chain variable domain of TCR clone 241970 (TRBV7-9, TRBJ1-6)
CASRPGTVNSPLHF

SEQ ID NO: 483941 - protein, 11 aa, Homo sapiens
  CDR3 for alpha chain variable domain of TCR clone 241971 (TRAV12-1, TRAJ30)
CVVNGQDKIIF

SEQ ID NO: 483942 - protein, 15 aa, Homo sapiens
  CDR3 for beta chain variable domain of TCR clone 241971 (TRBV6-6, TRBJ1-5)
CASSSIQGTNQPQHF

SEQ ID NO: 483943 - protein, 21 aa, Homo sapiens
  CDR3 for alpha chain variable domain of TCR clone 241972 (TRAV8-4, TRAJ30)
CAVSVNRDERSSLEKGHDFIF

SEQ ID NO: 483944 - protein, 13 aa, Homo sapiens
  CDR3 for beta chain variable domain of TCR clone 241972 (TRBV3-1, TRBJ2-2)
CASLARGSGELFF

SEQ ID NO: 483945 - protein, 11 aa, Homo sapiens
  CDR3 for alpha chain variable domain of TCR clone 241973 (TRAV3, TRAJ33)
CAVRDMGRTIS

SEQ ID NO: 483946 - protein, 17 aa, Homo sapiens
  CDR3 for beta chain variable domain of TCR clone 241973 (TRBV19, TRBJ2-1)
CASSIWSAQPTHNEQFF

SEQ ID NO: 483947 - protein, 12 aa, Homo sapiens
  CDR3 for alpha chain variable domain of TCR clone 241974 (TRAV5, TRAJ3)
CAEDGSASKIIF

SEQ ID NO: 483948 - protein, 17 aa, Homo sapiens
  CDR3 for beta chain variable domain of TCR clone 241974 (TRBV5-1, TRBJ2-3)
FASSMGRTGPATDTQYF

SEQ ID NO: 483949 - protein, 15 aa, Homo sapiens
  CDR3 for alpha chain variable domain of TCR clone 241975 (TRAV21, TRAJ53)
CATLNSGGSNYKLKF

SEQ ID NO: 483950 - protein, 16 aa, Homo sapiens
  CDR3 for beta chain variable domain of TCR clone 241975 (TRBV12-5, TRBJ2-5)
CASGPRTSGNQETQYF

SEQ ID NO: 483951 - protein, 14 aa, Homo sapiens
  CDR3 for alpha chain variable domain of TCR clone 241976 (TRAV13-1, TRAJ35)
CSASKGGFGNVLHC

SEQ ID NO: 483952 - protein, 13 aa, Homo sapiens
  CDR3 for beta chain variable domain of TCR clone 241976 (TRBV7-3, TRBJ1-1)
CASSQDWGADAFF

SEQ ID NO: 483953 - protein, 14 aa, Homo sapiens
  CDR3 for alpha chain variable domain of TCR clone 241977 (TRAV26-1, TRAJ39)
CTVRGSRAGNMLTF

SEQ ID NO: 483954 - protein, 15 aa, Homo sapiens
  CDR3 for beta chain variable domain of TCR clone 241977 (TRBV7-9, TRBJ1-5)
CASSQGHQPNQPQHV

SEQ ID NO: 483955 - protein, 16 aa, Homo sapiens
  CDR3 for alpha chain variable domain of TCR clone 241978 (TRAV3, TRAJ6)
CCERRPQAGGSYIPTF

SEQ ID NO: 483956 - protein, 14 aa, Homo sapiens
  CDR3 for beta chain variable domain of TCR clone 241978 (TRBV7-2, TRBJ2-7)
CASSPKTSFYEQYF

SEQ ID NO: 483957 - protein, 12 aa, Homo sapiens
  CDR3 for alpha chain variable domain of TCR clone 241979 (TRAV13-1, TRAJ21)
CAAKEGFNKFYF

SEQ ID NO: 483958 - protein, 12 aa, Homo sapiens
  CDR3 for beta chain variable domain of TCR clone 241979 (TRBV6-6, TRBJ2-3)
CASSSRGDTQYF

SEQ ID NO: 483959 - protein, 12 aa, Homo sapiens
  CDR3 for alpha chain variable domain of TCR clone 241980 (TRAV13-1, TRAJ48)
CAANFGNEKLTF

SEQ ID NO: 483960 - protein, 13 aa, Homo sapiens
  CDR3 for beta chain variable domain of TCR clone 241980 (TRBV7-3, TRBJ1-1)
CASSQDSGAEAFF

SEQ ID NO: 483961 - protein, 11 aa, Homo sapiens
  CDR3 for alpha chain variable domain of TCR clone 241981 (TRAV2, TRAJ33)
CAVDSNYQLIW

SEQ ID NO: 483962 - protein, 19 aa, Homo sapiens
  CDR3 for beta chain variable domain of TCR clone 241981 (TRBV7-2, TRBJ2-3)
CASSFLSRNWGGGTDTQYF

SEQ ID NO: 483963 - protein, 14 aa, Homo sapiens
  CDR3 for alpha chain variable domain of TCR clone 241982 (TRAV2, TRAJ9)
CAVEDRSGGFKTIV

SEQ ID NO: 483964 - protein, 13 aa, Homo sapiens
  CDR3 for beta chain variable domain of TCR clone 241982 (TRBV12-4, TRBJ1-5)
CASSPDRAQPQHF

SEQ ID NO: 483965 - protein, 13 aa, Homo sapiens
  CDR3 for alpha chain variable domain of TCR clone 241983 (TRAV13-1, TRAJ23)
CAASTILGGKLIF

SEQ ID NO: 483966 - protein, 14 aa, Homo sapiens
  CDR3 for beta chain variable domain of TCR clone 241983 (TRBV19, TRBJ2-7)
CSTSGLAGVYEQYF

SEQ ID NO: 483967 - protein, 12 aa, Homo sapiens
  CDR3 for alpha chain variable domain of TCR clone 241984 (TRAV1-2, TRAJ24)
CAVGGSWGKFQF

SEQ ID NO: 483968 - protein, 14 aa, Homo sapiens
  CDR3 for beta chain variable domain of TCR clone 241984 (TRBV19, TRBJ2-1)
CASPTFVLSGEQFF

SEQ ID NO: 483969 - protein, 16 aa, Homo sapiens
  CDR3 for alpha chain variable domain of TCR clone 241985 (TRAV30, TRAJ24)
CGTEMVDADSWGKFQF

SEQ ID NO: 483970 - protein, 19 aa, Homo sapiens
  CDR3 for beta chain variable domain of TCR clone 241985 (TRBV25-1, TRBJ2-2)
CAILVYRVDRRRKTGELFF

SEQ ID NO: 483971 - protein, 14 aa, Homo sapiens
  CDR3 for alpha chain variable domain of TCR clone 241986 (TRAV23/DV6, TRAJ27)
CAASRDTNAGKSTF

SEQ ID NO: 483972 - protein, 13 aa, Homo sapiens
  CDR3 for beta chain variable domain of TCR clone 241986 (TRBV20-1, TRBJ1-5)
CSAGGRGNQPQHF

SEQ ID NO: 483973 - protein, 14 aa, Homo sapiens
  CDR3 for alpha chain variable domain of TCR clone 241987 (TRAV1-2, TRAJ16)
CAVNRFSDGQKLLF

SEQ ID NO: 483974 - protein, 13 aa, Homo sapiens
  CDR3 for beta chain variable domain of TCR clone 241987 (TRBV12-4, TRBJ2-5)
CASSLGGSRTEYF

SEQ ID NO: 483975 - protein, 13 aa, Homo sapiens
  CDR3 for alpha chain variable domain of TCR clone 241988 (TRAV21, TRAJ57)
CAVTQGGSEKLVF

SEQ ID NO: 483976 - protein, 16 aa, Homo sapiens
  CDR3 for beta chain variable domain of TCR clone 241988 (TRBV29-1, TRBJ2-7)
CSIEDAEDGTAYEQYF

SEQ ID NO: 483977 - protein, 14 aa, Homo sapiens
  CDR3 for alpha chain variable domain of TCR clone 241989 (TRAV12-2, TRAJ13)
CAVKKTGGYKKVTF

SEQ ID NO: 483978 - protein, 15 aa, Homo sapiens
  CDR3 for beta chain variable domain of TCR clone 241989 (TRBV27, TRBJ2-1)
CASSNGGGSSNEQFL

SEQ ID NO: 483979 - protein, 12 aa, Homo sapiens
  CDR3 for alpha chain variable domain of TCR clone 241990 (TRAV36/DV7, TRAJ48)
CAGNFGNEKLTF

SEQ ID NO: 483980 - protein, 14 aa, Homo sapiens
  CDR3 for beta chain variable domain of TCR clone 241990 (TRBV11-2, TRBJ2-5)
CASSRTGGIETQYF

SEQ ID NO: 483981 - protein, 15 aa, Homo sapiens
  CDR3 for alpha chain variable domain of TCR clone 241991 (TRAV12-3, TRAJ6)
CAMSATTGGRYIPTS

SEQ ID NO: 483982 - protein, 16 aa, Homo sapiens
  CDR3 for beta chain variable domain of TCR clone 241991 (TRBV20-1, TRBJ1-2)
CSASMGQGVANYGYTF

SEQ ID NO: 483983 - protein, 18 aa, Homo sapiens
  CDR3 for alpha chain variable domain of TCR clone 241992 (TRAV26-1, TRAJ22)
CVVRVSFWFCKATDLLIW

SEQ ID NO: 483984 - protein, 13 aa, Homo sapiens
  CDR3 for beta chain variable domain of TCR clone 241992 (TRBV7-9, TRBJ1-2)
CASSLKQNYGYTF

SEQ ID NO: 483985 - protein, 15 aa, Homo sapiens
  CDR3 for alpha chain variable domain of TCR clone 241993 (TRAV3, TRAJ13)
CAVRVYSGGYQKVTF

SEQ ID NO: 483986 - protein, 15 aa, Homo sapiens
  CDR3 for beta chain variable domain of TCR clone 241993 (TRBV7-2, TRBJ2-3)
CSSSLVVRGPDTQYF

SEQ ID NO: 483987 - protein, 11 aa, Homo sapiens
  CDR3 for alpha chain variable domain of TCR clone 241994 (TRAV16, TRAJ31)
CALFNNARLMF

SEQ ID NO: 483988 - protein, 16 aa, Homo sapiens
  CDR3 for beta chain variable domain of TCR clone 241994 (TRBV12-4, TRBJ1-5)
CASSRPVGGSNQPQHF

SEQ ID NO: 483989 - protein, 13 aa, Homo sapiens
  CDR3 for alpha chain variable domain of TCR clone 241995 (TRAV13-1, TRAJ21)
CAASIYNFNKFYF

SEQ ID NO: 483990 - protein, 13 aa, Homo sapiens
  CDR3 for beta chain variable domain of TCR clone 241995 (TRBV27, TRBJ1-4)
CASSLMGDEKLYF

SEQ ID NO: 483991 - protein, 14 aa, Homo sapiens
  CDR3 for alpha chain variable domain of TCR clone 241996 (TRAV34, TRAJ44)
CGADGTGTASKLTF

SEQ ID NO: 483992 - protein, 16 aa, Homo sapiens
  CDR3 for beta chain variable domain of TCR clone 241996 (TRBV2, TRBJ2-5)
CASSDTQGVGEETQYF

SEQ ID NO: 483993 - protein, 18 aa, Homo sapiens
  CDR3 for alpha chain variable domain of TCR clone 241997 (TRAV13-1, TRAJ52)
CAADFPNTGGTSYGKLTF

SEQ ID NO: 483994 - protein, 14 aa, Homo sapiens
  CDR3 for beta chain variable domain of TCR clone 241997 (TRBV11-2, TRBJ2-3)
CASSLYAGRDTQYF

SEQ ID NO: 483995 - protein, 14 aa, Homo sapiens
  CDR3 for alpha chain variable domain of TCR clone 241998 (TRAV1-2, TRAJ16)
CAVNRFSDGQKLLF

SEQ ID NO: 483996 - protein, 14 aa, Homo sapiens
  CDR3 for beta chain variable domain of TCR clone 241998 (TRBV5-1, TRBJ1-5)
CASSLGQGAQTQHF

SEQ ID NO: 483997 - protein, 14 aa, Homo sapiens
  CDR3 for alpha chain variable domain of TCR clone 241999 (TRAV1-2, TRAJ16)
CAVSRFSDGQKLLF

SEQ ID NO: 483998 - protein, 16 aa, Homo sapiens
  CDR3 for beta chain variable domain of TCR clone 241999 (TRBV7-2, TRBJ2-7)
CASSLDLSGGAYEQYF

SEQ ID NO: 483999 - protein, 15 aa, Homo sapiens
  CDR3 for alpha chain variable domain of TCR clone 242000 (TRAV12-1, TRAJ44)
CVADVPTGTASKLTF

SEQ ID NO: 484000 - protein, 13 aa, Homo sapiens
  CDR3 for beta chain variable domain of TCR clone 242000 (TRBV6-5, TRBJ2-5)
CASSPQGGETRYF

SEQ ID NO: 484001 - protein, 16 aa, Homo sapiens
  CDR3 for alpha chain variable domain of TCR clone 242001 (TRAV16, TRAJ42)
CARKMNYGGSEGNLIF

SEQ ID NO: 484002 - protein, 13 aa, Homo sapiens
  CDR3 for beta chain variable domain of TCR clone 242001 (TRBV20-1, TRBJ2-7)
CSASPPSSYEQYF

SEQ ID NO: 484003 - protein, 16 aa, Homo sapiens
  CDR3 for alpha chain variable domain of TCR clone 242002 (TRAV12-1, TRAJ42)
CVVTPYYGGSQGNLIF

SEQ ID NO: 484004 - protein, 13 aa, Homo sapiens
  CDR3 for beta chain variable domain of TCR clone 242002 (TRBV10-3, TRBJ1-2)
CAISERDSYGYTF

SEQ ID NO: 484005 - protein, 12 aa, Homo sapiens
  CDR3 for alpha chain variable domain of TCR clone 242003 (TRAV13-1, TRAJ53)
AASGGSNYKLTF

SEQ ID NO: 484006 - protein, 15 aa, Homo sapiens
  CDR3 for beta chain variable domain of TCR clone 242003 (TRBV5-1, TRBJ2-1)
CASSPPRDPYNEQFF

SEQ ID NO: 484007 - protein, 18 aa, Homo sapiens
  CDR3 for alpha chain variable domain of TCR clone 242004 (TRAV26-1, TRAJ23)
CIVRVGLEVWNQGGMLIF

SEQ ID NO: 484008 - protein, 16 aa, Homo sapiens
  CDR3 for beta chain variable domain of TCR clone 242004 (TRBV12-4, TRBJ2-5)
CASSFFVRGRQETQYF

SEQ ID NO: 484009 - protein, 16 aa, Homo sapiens
  CDR3 for alpha chain variable domain of TCR clone 242005 (TRAV30, TRAJ24)
CGTEIVDADSWGKFQF

SEQ ID NO: 484010 - protein, 16 aa, Homo sapiens
  CDR3 for beta chain variable domain of TCR clone 242005 (TRBV7-9, TRBJ2-1)
CAGSDVAGGSYNEQFF

SEQ ID NO: 484011 - protein, 15 aa, Homo sapiens
  CDR3 for alpha chain variable domain of TCR clone 242006 (TRAV17, TRAJ57)
CATGPSQGGSERLVF

SEQ ID NO: 484012 - protein, 14 aa, Homo sapiens
  CDR3 for beta chain variable domain of TCR clone 242006 (TRBV12-5, TRBJ2-5)
CASGSQTHQETQYF

SEQ ID NO: 484013 - protein, 15 aa, Homo sapiens
  CDR3 for alpha chain variable domain of TCR clone 242007 (TRAV13-1, TRAJ32)
CAASNGWWCYKQAPL

SEQ ID NO: 484014 - protein, 15 aa, Homo sapiens
  CDR3 for beta chain variable domain of TCR clone 242007 (TRBV20-1, TRBJ1-2)
CSAIRTGAFNYGYTF

SEQ ID NO: 484015 - protein, 12 aa, Homo sapiens
  CDR3 for alpha chain variable domain of TCR clone 242008 (TRAV3, TRAJ20)
CAVRDPDYKLSF

SEQ ID NO: 484016 - protein, 13 aa, Homo sapiens
  CDR3 for beta chain variable domain of TCR clone 242008 (TRBV9, TRBJ2-1)
CAGSVGQGGEQFF

SEQ ID NO: 484017 - protein, 16 aa, Homo sapiens
  CDR3 for alpha chain variable domain of TCR clone 242009 (TRAV14/DV4, TRAJ48)
CAMREGGNFGNEKLTF

SEQ ID NO: 484018 - protein, 15 aa, Homo sapiens
  CDR3 for beta chain variable domain of TCR clone 242009 (TRBV19, TRBJ2-1)
CASSSPGVPLDEQFF

SEQ ID NO: 484019 - protein, 15 aa, Homo sapiens
  CDR3 for alpha chain variable domain of TCR clone 242010 (TRAV2, TRAJ9)
CAVEDRGTGGFKTIF

SEQ ID NO: 484020 - protein, 13 aa, Homo sapiens
  CDR3 for beta chain variable domain of TCR clone 242010 (TRBV12-4, TRBJ2-2)
CASSITGSGELFF

SEQ ID NO: 484021 - protein, 14 aa, Homo sapiens
  CDR3 for alpha chain variable domain of TCR clone 242011 (TRAV13-2, TRAJ41)
CAERPDWAGYALNF

SEQ ID NO: 484022 - protein, 20 aa, Homo sapiens
  CDR3 for beta chain variable domain of TCR clone 242011 (TRBV11-2, TRBJ1-6)
CASSLVFATGGSVHPSTLGT

SEQ ID NO: 484023 - protein, 14 aa, Homo sapiens
  CDR3 for alpha chain variable domain of TCR clone 242012 (TRAV1-1, TRAJ27)
CAVIYNTNAGKSTF

SEQ ID NO: 484024 - protein, 13 aa, Homo sapiens
  CDR3 for beta chain variable domain of TCR clone 242012 (TRBV10-2, TRBJ2-5)
CASGRLARETQYF

SEQ ID NO: 484025 - protein, 10 aa, Homo sapiens
  CDR3 for alpha chain variable domain of TCR clone 242013 (TRAV13-1, TRAJ5)
CAASRRALTF

SEQ ID NO: 484026 - protein, 15 aa, Homo sapiens
  CDR3 for beta chain variable domain of TCR clone 242013 (TRBV4-3, TRBJ2-3)
CASSQGGLAGTYAVF

SEQ ID NO: 484027 - protein, 16 aa, Homo sapiens
  CDR3 for alpha chain variable domain of TCR clone 242014 (TRAV30, TRAJ24)
CGTEIVDADSWGKFQF

SEQ ID NO: 484028 - protein, 19 aa, Homo sapiens
  CDR3 for beta chain variable domain of TCR clone 242014 (TRBV25-1, TRBJ2-2)
GAILVYRVDRGRKTGELFF

SEQ ID NO: 484029 - protein, 13 aa, Homo sapiens
  CDR3 for alpha chain variable domain of TCR clone 242015 (TRAV13-1, TRAJ6)
FAASKGGSYIPTF

SEQ ID NO: 484030 - protein, 13 aa, Homo sapiens
  CDR3 for beta chain variable domain of TCR clone 242015 (TRBV7-9, TRBJ2-5)
CASLPSGRETQYF

SEQ ID NO: 484031 - protein, 16 aa, Homo sapiens
  CDR3 for alpha chain variable domain of TCR clone 242016 (TRAV4, TRAJ22)
CLVGDLYSGSARQLTF

SEQ ID NO: 484032 - protein, 16 aa, Homo sapiens
  CDR3 for beta chain variable domain of TCR clone 242016 (TRBV7-9, TRBJ2-1)
CANSDVAGGSYNEQFF

SEQ ID NO: 484033 - protein, 13 aa, Homo sapiens
  CDR3 for alpha chain variable domain of TCR clone 242017 (TRAV21, TRAJ20)
CAVGLRVAYKLSF

SEQ ID NO: 484034 - protein, 13 aa, Homo sapiens
  CDR3 for beta chain variable domain of TCR clone 242017 (TRBV6-1, TRBJ1-1)
CASSRQGNTDAFF

SEQ ID NO: 484035 - protein, 16 aa, Homo sapiens
  CDR3 for alpha chain variable domain of TCR clone 242018 (TRAV26-2, TRAJ45)
CTTASPIGGGADGLTF

SEQ ID NO: 484036 - protein, 16 aa, Homo sapiens
  CDR3 for beta chain variable domain of TCR clone 242018 (TRBV19, TRBJ1-1)
CASRFGGPVTGTEAFF

SEQ ID NO: 484037 - protein, 12 aa, Homo sapiens
  CDR3 for alpha chain variable domain of TCR clone 242019 (TRAV12-1, TRAJ40)
CVVYSGTYKYTF

SEQ ID NO: 484038 - protein, 17 aa, Homo sapiens
  CDR3 for beta chain variable domain of TCR clone 242019 (TRBV11-3, TRBJ1-5)
CASSPLTGLRGNQPQHF

SEQ ID NO: 484039 - protein, 12 aa, Homo sapiens
  CDR3 for alpha chain variable domain of TCR clone 242020 (TRAV27, TRAJ11)
CAGASGYSTLTF

SEQ ID NO: 484040 - protein, 16 aa, Homo sapiens
  CDR3 for beta chain variable domain of TCR clone 242020 (TRBV11-2, TRBJ2-7)
CASSTVTAPKTYEQYF

SEQ ID NO: 484041 - protein, 16 aa, Homo sapiens
  CDR3 for alpha chain variable domain of TCR clone 242021 (TRAV38-1, TRAJ56)
CAFMKRQTGANSKLTF

SEQ ID NO: 484042 - protein, 14 aa, Homo sapiens
  CDR3 for beta chain variable domain of TCR clone 242021 (TRBV2, TRBJ2-2)
CASSLFGGNGELFF

SEQ ID NO: 484043 - protein, 13 aa, Homo sapiens
  CDR3 for alpha chain variable domain of TCR clone 242022 (TRAV13-1, TRAJ39)
CAASIVMQATCST

SEQ ID NO: 484044 - protein, 16 aa, Homo sapiens
  CDR3 for beta chain variable domain of TCR clone 242022 (TRBV20-1, TRBJ1-4)
CSAPGQGLLTNEKLFF

SEQ ID NO: 484045 - protein, 14 aa, Homo sapiens
  CDR3 for alpha chain variable domain of TCR clone 242023 (TRAV3, TRAJ34)
CAVRDITNTDKLIF

SEQ ID NO: 484046 - protein, 14 aa, Homo sapiens
  CDR3 for beta chain variable domain of TCR clone 242023 (TRBV7-2, TRBJ2-2)
CASSLGQNTGELFF

SEQ ID NO: 484047 - protein, 14 aa, Homo sapiens
  CDR3 for alpha chain variable domain of TCR clone 242024 (TRAV3, TRAJ9)
CAVRLNTGGFKTIF

SEQ ID NO: 484048 - protein, 13 aa, Homo sapiens
  CDR3 for beta chain variable domain of TCR clone 242024 (TRBV27, TRBJ2-7)
CASSLTTGYEQYF

SEQ ID NO: 484049 - protein, 14 aa, Homo sapiens
  CDR3 for alpha chain variable domain of TCR clone 242025 (TRAV16, TRAJ37)
CALDISGNTGKLIF

SEQ ID NO: 484050 - protein, 18 aa, Homo sapiens
  CDR3 for beta chain variable domain of TCR clone 242025 (TRBV11-2, TRBJ2-3)
CASSLGGASRGAPNTQYF

SEQ ID NO: 484051 - protein, 11 aa, Homo sapiens
  CDR3 for alpha chain variable domain of TCR clone 242026 (TRAV21, TRAJ34)
CAHYNTDKLIF

SEQ ID NO: 484052 - protein, 19 aa, Homo sapiens
  CDR3 for beta chain variable domain of TCR clone 242026 (TRBV19, TRBJ2-2)
CASTRPGLAGGRVTGELFF

SEQ ID NO: 484053 - protein, 15 aa, Homo sapiens
  CDR3 for alpha chain variable domain of TCR clone 242027 (TRAV25, TRAJ52)
CAGRPGGTSYGKLTF

SEQ ID NO: 484054 - protein, 16 aa, Homo sapiens
  CDR3 for beta chain variable domain of TCR clone 242027 (TRBV7-8, TRBJ2-4)
CASSAERTLAKNIQYF

SEQ ID NO: 484055 - protein, 17 aa, Homo sapiens
  CDR3 for alpha chain variable domain of TCR clone 242028 (TRAV3, TRAJ6)
CAVRDGPRAGGSSKPTF

SEQ ID NO: 484056 - protein, 14 aa, Homo sapiens
  CDR3 for beta chain variable domain of TCR clone 242028 (TRBV7-2, TRBJ2-7)
CASSPKTSFYEQYF

SEQ ID NO: 484057 - protein, 13 aa, Homo sapiens
  CDR3 for alpha chain variable domain of TCR clone 242029 (TRAV40, TRAJ41)
CLLGAQSGHALNF

SEQ ID NO: 484058 - protein, 15 aa, Homo sapiens
  CDR3 for beta chain variable domain of TCR clone 242029 (TRBV4-2, TRBJ1-1)
CASSQLQGASAEAFF

SEQ ID NO: 484059 - protein, 11 aa, Homo sapiens
  CDR3 for alpha chain variable domain of TCR clone 242030 (TRAV1-1, TRAJ23)
CAVRQGGKLIF

SEQ ID NO: 484060 - protein, 20 aa, Homo sapiens
  CDR3 for beta chain variable domain of TCR clone 242030 (TRBV7-8, TRBJ2-2)
CASSHLFPGPTIHITAELFF

SEQ ID NO: 484061 - protein, 17 aa, Homo sapiens
  CDR3 for alpha chain variable domain of TCR clone 242031 (TRAV36/DV7, TRAJ52)
CAVAQRAGGTSYGKLTF

SEQ ID NO: 484062 - protein, 14 aa, Homo sapiens
  CDR3 for beta chain variable domain of TCR clone 242031 (TRBV4-2, TRBJ1-2)
CASSPGGSNYGYTF

SEQ ID NO: 484063 - protein, 23 aa, Homo sapiens
  CDR3 for alpha chain variable domain of TCR clone 242032 (TRAV26-1, TRAJ38)
CIVRPLNAGNNHIQNPDPAVYQL

SEQ ID NO: 484064 - protein, 13 aa, Homo sapiens
  CDR3 for beta chain variable domain of TCR clone 242032 (TRBV18, TRBJ1-1)
CASSPNGDTEAYF

SEQ ID NO: 484065 - protein, 14 aa, Homo sapiens
  CDR3 for alpha chain variable domain of TCR clone 242033 (TRAV12-2, TRAJ40)
CAVKIPSGTYKYIF

SEQ ID NO: 484066 - protein, 20 aa, Homo sapiens
  CDR3 for beta chain variable domain of TCR clone 242033 (TRBV28, TRBJ2-1)
GASTPIGRSPGLAGGNEHFF

SEQ ID NO: 484067 - protein, 16 aa, Homo sapiens
  CDR3 for alpha chain variable domain of TCR clone 242034 (TRAV3, TRAJ40)
CAVRDRIASGTYKNIF

SEQ ID NO: 484068 - protein, 16 aa, Homo sapiens
  CDR3 for beta chain variable domain of TCR clone 242034 (TRBV6-1, TRBJ1-2)
CASSEANSIINYGYTF

SEQ ID NO: 484069 - protein, 15 aa, Homo sapiens
  CDR3 for alpha chain variable domain of TCR clone 242035 (TRAV3, TRAJ17)
CAVSPKEAAGNKLTF

SEQ ID NO: 484070 - protein, 11 aa, Homo sapiens
  CDR3 for beta chain variable domain of TCR clone 242035 (TRBV7-9, TRBJ1-6)
CSSLMTSPLHF

SEQ ID NO: 484071 - protein, 15 aa, Homo sapiens
  CDR3 for alpha chain variable domain of TCR clone 242036 (TRAV26-1, TRAJ40)
CIVRAVPSGTYKYIF

SEQ ID NO: 484072 - protein, 14 aa, Homo sapiens
  CDR3 for beta chain variable domain of TCR clone 242036 (TRBV19, TRBJ2-1)
CASKDPGLAMSSSS

SEQ ID NO: 484073 - protein, 18 aa, Homo sapiens
  CDR3 for alpha chain variable domain of TCR clone 242037 (TRAV13-1, TRAJ52)
CAAKNHNAGGTSYGKLTF

SEQ ID NO: 484074 - protein, 17 aa, Homo sapiens
  CDR3 for beta chain variable domain of TCR clone 242037 (TRBV11-2, TRBJ2-1)
CASSLYPPGVEYNEQFF

SEQ ID NO: 484075 - protein, 12 aa, Homo sapiens
  CDR3 for alpha chain variable domain of TCR clone 242038 (TRAV8-3, TRAJ26)
CAGDNYGHNFVF

SEQ ID NO: 484076 - protein, 15 aa, Homo sapiens
  CDR3 for beta chain variable domain of TCR clone 242038 (TRBV25-1, TRBJ1-4)
CASSKRIATNEKLFF

SEQ ID NO: 484077 - protein, 17 aa, Homo sapiens
  CDR3 for alpha chain variable domain of TCR clone 242039 (TRAV13-1, TRAJ52)
CAASSSAGGTSYGKLTF

SEQ ID NO: 484078 - protein, 15 aa, Homo sapiens
  CDR3 for beta chain variable domain of TCR clone 242039 (TRBV28, TRBJ2-4)
CAAGSGTRLMGMQYF

SEQ ID NO: 484079 - protein, 16 aa, Homo sapiens
  CDR3 for alpha chain variable domain of TCR clone 242040 (TRAV26-1, TRAJ44)
IASSESRTGTASKLTF

SEQ ID NO: 484080 - protein, 13 aa, Homo sapiens
  CDR3 for beta chain variable domain of TCR clone 242040 (TRBV7-2, TRBJ1-5)
CASSFARNQPQHV

SEQ ID NO: 484081 - protein, 15 aa, Homo sapiens
  CDR3 for alpha chain variable domain of TCR clone 242041 (TRAV17, TRAJ45)
CATAYSGVGADGLTF

SEQ ID NO: 484082 - protein, 15 aa, Homo sapiens
  CDR3 for beta chain variable domain of TCR clone 242041 (TRBV28, TRBJ2-1)
CASSIIAGGRSEQFF

SEQ ID NO: 484083 - protein, 14 aa, Homo sapiens
  CDR3 for alpha chain variable domain of TCR clone 242042 (TRAV1-2, TRAJ8)
CAVSEDTGFQKLVF

SEQ ID NO: 484084 - protein, 15 aa, Homo sapiens
  CDR3 for beta chain variable domain of TCR clone 242042 (TRBV6-3, TRBJ2-7)
CASSSPGAVFYEQYF

SEQ ID NO: 484085 - protein, 13 aa, Homo sapiens
  CDR3 for alpha chain variable domain of TCR clone 242043 (TRAV36/DV7, TRAJ37)
CAVFSSNTGKLIF

SEQ ID NO: 484086 - protein, 18 aa, Homo sapiens
  CDR3 for beta chain variable domain of TCR clone 242043 (TRBV11-2, TRBJ2-3)
CASSLGEASRGAPNTQYF

SEQ ID NO: 484087 - protein, 15 aa, Homo sapiens
  CDR3 for alpha chain variable domain of TCR clone 242044 (TRAV1-2, TRAJ28)
CAVQYSGAGSYQLTF

SEQ ID NO: 484088 - protein, 14 aa, Homo sapiens
  CDR3 for beta chain variable domain of TCR clone 242044 (TRBV7-9, TRBJ2-1)
CASSPRDSLYEQFF

SEQ ID NO: 484089 - protein, 11 aa, Homo sapiens
  CDR3 for alpha chain variable domain of TCR clone 242045 (TRAV2, TRAJ13)
CASGGYQKVTF

SEQ ID NO: 484090 - protein, 11 aa, Homo sapiens
  CDR3 for beta chain variable domain of TCR clone 242045 (TRBV6-1, TRBJ2-1)
CASISSNEQFL

SEQ ID NO: 484091 - protein, 14 aa, Homo sapiens
  CDR3 for alpha chain variable domain of TCR clone 242046 (TRAV1-2, TRAJ16)
CAVNRFSDGQKLRF

SEQ ID NO: 484092 - protein, 16 aa, Homo sapiens
  CDR3 for beta chain variable domain of TCR clone 242046 (TRBV11-2, TRBJ1-2)
CASSLDTGGADYGYTF

SEQ ID NO: 484093 - protein, 13 aa, Homo sapiens
  CDR3 for alpha chain variable domain of TCR clone 242047 (TRAV21, TRAJ15)
CAVANQAGTALIF

SEQ ID NO: 484094 - protein, 14 aa, Homo sapiens
  CDR3 for beta chain variable domain of TCR clone 242047 (TRBV13, TRBJ2-2)
CASSLGAATGELFF

SEQ ID NO: 484095 - protein, 13 aa, Homo sapiens
  CDR3 for alpha chain variable domain of TCR clone 242048 (TRAV41, TRAJ58)
CAVEETSGSRLTF

SEQ ID NO: 484096 - protein, 15 aa, Homo sapiens
  CDR3 for beta chain variable domain of TCR clone 242048 (TRBV12-4, TRBJ2-5)
CASSPPTGLQETQYF

SEQ ID NO: 484097 - protein, 18 aa, Homo sapiens
  CDR3 for alpha chain variable domain of TCR clone 242049 (TRAV13-1, TRAJ52)
CAAKNPNAGGTSYGKLTF

SEQ ID NO: 484098 - protein, 15 aa, Homo sapiens
  CDR3 for beta chain variable domain of TCR clone 242049 (TRBV19, TRBJ1-5)
CASSIVWADNQPQHF

SEQ ID NO: 484099 - protein, 18 aa, Homo sapiens
  CDR3 for alpha chain variable domain of TCR clone 242050 (TRAV21, TRAJ52)
CAVRPSPAGGTSCGKLTF

SEQ ID NO: 484100 - protein, 17 aa, Homo sapiens
  CDR3 for beta chain variable domain of TCR clone 242050 (TRBV13, TRBJ2-3)
CASSLSRVAWGRNTQYF

SEQ ID NO: 484101 - protein, 14 aa, Homo sapiens
  CDR3 for alpha chain variable domain of TCR clone 242051 (TRAV8-4, TRAJ9)
CAVRINTGGFKTIF

SEQ ID NO: 484102 - protein, 16 aa, Homo sapiens
  CDR3 for beta chain variable domain of TCR clone 242051 (TRBV6-1, TRBJ2-5)
CASSETLDRGAETQYF

SEQ ID NO: 484103 - protein, 14 aa, Homo sapiens
  CDR3 for alpha chain variable domain of TCR clone 242052 (TRAV12-2, TRAJ4)
CAEDLSGGYNKLIF

SEQ ID NO: 484104 - protein, 13 aa, Homo sapiens
  CDR3 for beta chain variable domain of TCR clone 242052 (TRBV7-9, TRBJ1-2)
CARSLKQNYGYTF

SEQ ID NO: 484105 - protein, 13 aa, Homo sapiens
  CDR3 for alpha chain variable domain of TCR clone 242053 (TRAV38-1, TRAJ43)
CAFMKHNSGRHAL

SEQ ID NO: 484106 - protein, 11 aa, Homo sapiens
  CDR3 for beta chain variable domain of TCR clone 242053 (TRBV7-9, TRBJ2-3)
CASSYTDTQYF

SEQ ID NO: 484107 - protein, 12 aa, Homo sapiens
  CDR3 for alpha chain variable domain of TCR clone 242054 (TRAV38-2/DV8, TRAJ57)
CAWKGGSEQLVF

SEQ ID NO: 484108 - protein, 13 aa, Homo sapiens
  CDR3 for beta chain variable domain of TCR clone 242054 (TRBV5-1, TRBJ1-5)
CASSLAQDQPQHF

SEQ ID NO: 484109 - protein, 13 aa, Homo sapiens
  CDR3 for alpha chain variable domain of TCR clone 242055 (TRAV29/DV5, TRAJ31)
CAASRNNNAGLMV

SEQ ID NO: 484110 - protein, 12 aa, Homo sapiens
  CDR3 for beta chain variable domain of TCR clone 242055 (TRBV14, TRBJ2-5)
CASSQLKETQYF

SEQ ID NO: 484111 - protein, 16 aa, Homo sapiens
  CDR3 for alpha chain variable domain of TCR clone 242056 (TRAV12-1, TRAJ28)
CVVIAYSGAGSYQITF

SEQ ID NO: 484112 - protein, 15 aa, Homo sapiens
  CDR3 for beta chain variable domain of TCR clone 242056 (TRBV14, TRBJ1-1)
CASSQEGMGFTEAFF

SEQ ID NO: 484113 - protein, 15 aa, Homo sapiens
  CDR3 for alpha chain variable domain of TCR clone 242057 (TRAV3, TRAJ4)
CAVRDGTGGYKKLIF

SEQ ID NO: 484114 - protein, 16 aa, Homo sapiens
  CDR3 for beta chain variable domain of TCR clone 242057 (TRBV27, TRBJ2-2)
CASSPSGVSNTGELFF

SEQ ID NO: 484115 - protein, 14 aa, Homo sapiens
  CDR3 for alpha chain variable domain of TCR clone 242058 (TRAV6, TRAJ37)
CALGTQGNTGKLIF

SEQ ID NO: 484116 - protein, 15 aa, Homo sapiens
  CDR3 for beta chain variable domain of TCR clone 242058 (TRBV2, TRBJ2-1)
CASSEEREGDNEQFF

SEQ ID NO: 484117 - protein, 13 aa, Homo sapiens
  CDR3 for alpha chain variable domain of TCR clone 242059 (TRAV30, TRAJ49)
CGTESQPVTSSTL

SEQ ID NO: 484118 - protein, 13 aa, Homo sapiens
  CDR3 for beta chain variable domain of TCR clone 242059 (TRBV7-2, TRBJ2-2)
CASSLAVTGELFF

SEQ ID NO: 484119 - protein, 14 aa, Homo sapiens
  CDR3 for alpha chain variable domain of TCR clone 242060 (TRAV12-3, TRAJ10)
SHLPLTGGGNKLTF

SEQ ID NO: 484120 - protein, 12 aa, Homo sapiens
  CDR3 for beta chain variable domain of TCR clone 242060 (TRBV14, TRBJ2-7)
CASSSLKGEQYF

SEQ ID NO: 484121 - protein, 15 aa, Homo sapiens
  CDR3 for alpha chain variable domain of TCR clone 242061 (TRAV21, TRAJ24)
WAARSSTDSWGNLQF

SEQ ID NO: 484122 - protein, 13 aa, Homo sapiens
  CDR3 for beta chain variable domain of TCR clone 242061 (TRBV11-2, TRBJ2-5)
CASSSTGEETQYF

SEQ ID NO: 484123 - protein, 12 aa, Homo sapiens
  CDR3 for alpha chain variable domain of TCR clone 242062 (TRAV13-1, TRAJ53)
AASGGSNYKLTI

SEQ ID NO: 484124 - protein, 15 aa, Homo sapiens
  CDR3 for beta chain variable domain of TCR clone 242062 (TRBV5-1, TRBJ2-1)
CASSPPRAPYNEQFF

SEQ ID NO: 484125 - protein, 13 aa, Homo sapiens
  CDR3 for alpha chain variable domain of TCR clone 242063 (TRAV26-1, TRAJ34)
CIVRPWITDKLTF

SEQ ID NO: 484126 - protein, 14 aa, Homo sapiens
  CDR3 for beta chain variable domain of TCR clone 242063 (TRBV7-2, TRBJ2-7)
CASRSRGAAYEQYF

SEQ ID NO: 484127 - protein, 13 aa, Homo sapiens
  CDR3 for alpha chain variable domain of TCR clone 242064 (TRAV22, TRAJ48)
CAVERFGNEKLTF

SEQ ID NO: 484128 - protein, 15 aa, Homo sapiens
  CDR3 for beta chain variable domain of TCR clone 242064 (TRBV7-6, TRBJ2-1)
CASSSLAGEGNEQFF

SEQ ID NO: 484129 - protein, 13 aa, Homo sapiens
  CDR3 for alpha chain variable domain of TCR clone 242065 (TRAV13-2, TRAJ48)
CAEMDFGNEKLTF

SEQ ID NO: 484130 - protein, 16 aa, Homo sapiens
  CDR3 for beta chain variable domain of TCR clone 242065 (TRBV4-1, TRBJ2-7)
CASSQNDRDNSYEQYF

SEQ ID NO: 484131 - protein, 14 aa, Homo sapiens
  CDR3 for alpha chain variable domain of TCR clone 242066 (TRAV26-1, TRAJ45)
CIEVTGGGADGLTF

SEQ ID NO: 484132 - protein, 13 aa, Homo sapiens
  CDR3 for beta chain variable domain of TCR clone 242066 (TRBV7-6, TRBJ1-2)
CASSLVADYGCTF

SEQ ID NO: 484133 - protein, 13 aa, Homo sapiens
  CDR3 for alpha chain variable domain of TCR clone 242067 (TRAV12-3, TRAJ54)
CALVPEGAQKLVF

SEQ ID NO: 484134 - protein, 15 aa, Homo sapiens
  CDR3 for beta chain variable domain of TCR clone 242067 (TRBV4-1, TRBJ2-2)
CASSQDSRGTGELFF

SEQ ID NO: 484135 - protein, 14 aa, Homo sapiens
  CDR3 for alpha chain variable domain of TCR clone 242068 (TRAV13-1, TRAJ44)
CAAKATRTASKLTF

SEQ ID NO: 484136 - protein, 17 aa, Homo sapiens
  CDR3 for beta chain variable domain of TCR clone 242068 (TRBV7-3, TRBJ2-3)
RASSLMKRMRGADTQYF

SEQ ID NO: 484137 - protein, 14 aa, Homo sapiens
  CDR3 for alpha chain variable domain of TCR clone 242069 (TRAV2, TRAJ37)
CAVDFTSDTGKLIF

SEQ ID NO: 484138 - protein, 10 aa, Homo sapiens
  CDR3 for beta chain variable domain of TCR clone 242069 (TRBV20-1, TRBJ1-1)
GVTGNTEAFF

SEQ ID NO: 484139 - protein, 14 aa, Homo sapiens
  CDR3 for alpha chain variable domain of TCR clone 242070 (TRAV17, TRAJ35)
CATDRPGFGNVLHC

SEQ ID NO: 484140 - protein, 19 aa, Homo sapiens
  CDR3 for beta chain variable domain of TCR clone 242070 (TRBV11-3, TRBJ2-2)
CASSTRPGAKATNTGELFF

SEQ ID NO: 484141 - protein, 16 aa, Homo sapiens
  CDR3 for alpha chain variable domain of TCR clone 242071 (TRAV30, TRAJ24)
CGTEIVDADSWGKFQF

SEQ ID NO: 484142 - protein, 14 aa, Homo sapiens
  CDR3 for beta chain variable domain of TCR clone 242071 (TRBV28, TRBJ1-1)
CASSLWWSLAEAFF

SEQ ID NO: 484143 - protein, 16 aa, Homo sapiens
  CDR3 for alpha chain variable domain of TCR clone 242072 (TRAV3, TRAJ5)
CAVRNLMDTARRALTF

SEQ ID NO: 484144 - protein, 16 aa, Homo sapiens
  CDR3 for beta chain variable domain of TCR clone 242072 (TRBV4-2, TRBJ2-7)
CASSQEGLAISYEQCF

SEQ ID NO: 484145 - protein, 14 aa, Homo sapiens
  CDR3 for alpha chain variable domain of TCR clone 242073 (TRAV1-2, TRAJ8)
CAVREDTGFQKLVF

SEQ ID NO: 484146 - protein, 16 aa, Homo sapiens
  CDR3 for beta chain variable domain of TCR clone 242073 (TRBV12-4, TRBJ2-5)
CASSLSTSGGKETQYF

SEQ ID NO: 484147 - protein, 10 aa, Homo sapiens
  CDR3 for alpha chain variable domain of TCR clone 242074 (TRAV1-2, TRAJ31)
CVSEDARLMF

SEQ ID NO: 484148 - protein, 14 aa, Homo sapiens
  CDR3 for beta chain variable domain of TCR clone 242074 (TRBV19, TRBJ2-1)
CASPTFVASGEQFF

SEQ ID NO: 484149 - protein, 15 aa, Homo sapiens
  CDR3 for alpha chain variable domain of TCR clone 242075 (TRAV8-3, TRAJ45)
CASSYSGGGADGLTF

SEQ ID NO: 484150 - protein, 12 aa, Homo sapiens
  CDR3 for beta chain variable domain of TCR clone 242075 (TRBV14, TRBJ2-5)
CASSQLKEAQYF

SEQ ID NO: 484151 - protein, 18 aa, Homo sapiens
  CDR3 for alpha chain variable domain of TCR clone 242076 (TRAV21, TRAJ52)
CAVRPSPAGGTSSGKLTF

SEQ ID NO: 484152 - protein, 13 aa, Homo sapiens
  CDR3 for beta chain variable domain of TCR clone 242076 (TRBV29-1, TRBJ2-1)
CSVEGGRVNEQFF

SEQ ID NO: 484153 - protein, 11 aa, Homo sapiens
  CDR3 for alpha chain variable domain of TCR clone 242077 (TRAV3, TRAJ21)
CAVGNFDKFYF

SEQ ID NO: 484154 - protein, 11 aa, Homo sapiens
  CDR3 for beta chain variable domain of TCR clone 242077 (TRBV20-1, TRBJ2-7)
CSGRQGHEQYF

SEQ ID NO: 484155 - protein, 12 aa, Homo sapiens
  CDR3 for alpha chain variable domain of TCR clone 242078 (TRAV2, TRAJ26)
CAGSPGRLWSEF

SEQ ID NO: 484156 - protein, 13 aa, Homo sapiens
  CDR3 for beta chain variable domain of TCR clone 242078 (TRBV7-9, TRBJ1-2)
CSSSLKQNYGYTF

SEQ ID NO: 484157 - protein, 17 aa, Homo sapiens
  CDR3 for alpha chain variable domain of TCR clone 242079 (TRAV13-1, TRAJ28)
CAASPPYSGAGSYQLTF

SEQ ID NO: 484158 - protein, 12 aa, Homo sapiens
  CDR3 for beta chain variable domain of TCR clone 242079 (TRBV11-2, TRBJ2-2)
CVSSLPTGELFF

SEQ ID NO: 484159 - protein, 11 aa, Homo sapiens
  CDR3 for alpha chain variable domain of TCR clone 242080 (TRAV1-2, TRAJ20)
CAVANDYKLSL

SEQ ID NO: 484160 - protein, 17 aa, Homo sapiens
  CDR3 for beta chain variable domain of TCR clone 242080 (TRBV13, TRBJ2-3)
CASSLSRVAGGRNTQYF

SEQ ID NO: 484161 - protein, 15 aa, Homo sapiens
  CDR3 for alpha chain variable domain of TCR clone 242081 (TRAV14/DV4, TRAJ12)
CAMREERDSSYKLIF

SEQ ID NO: 484162 - protein, 16 aa, Homo sapiens
  CDR3 for beta chain variable domain of TCR clone 242081 (TRBV11-2, TRBJ1-2)
CASSLDTRGADYGYTF

SEQ ID NO: 484163 - protein, 15 aa, Homo sapiens
  CDR3 for alpha chain variable domain of TCR clone 242082 (TRAV13-2, TRAJ5)
CAENPHWTGRRALTF

SEQ ID NO: 484164 - protein, 16 aa, Homo sapiens
  CDR3 for beta chain variable domain of TCR clone 242082 (TRBV7-9, TRBJ1-3)
CASSQTSGPRMGTIYF

SEQ ID NO: 484165 - protein, 17 aa, Homo sapiens
  CDR3 for alpha chain variable domain of TCR clone 242083 (TRAV38-2/DV8, TRAJ45)
CANRSRYSGGGADGLTF

SEQ ID NO: 484166 - protein, 15 aa, Homo sapiens
  CDR3 for beta chain variable domain of TCR clone 242083 (TRBV19, TRBJ2-1)
CASIKGRGPYNEQFF

SEQ ID NO: 484167 - protein, 14 aa, Homo sapiens
  CDR3 for alpha chain variable domain of TCR clone 242084 (TRAV12-2, TRAJ17)
CAVLFKAAGNKLTF

SEQ ID NO: 484168 - protein, 14 aa, Homo sapiens
  CDR3 for beta chain variable domain of TCR clone 242084 (TRBV29-1, TRBJ2-1)
GSVGAVAGGNEQFF

SEQ ID NO: 484169 - protein, 15 aa, Homo sapiens
  CDR3 for alpha chain variable domain of TCR clone 242085 (TRAV35, TRAJ33)
CAGPPPRYSNYQLIW

SEQ ID NO: 484170 - protein, 13 aa, Homo sapiens
  CDR3 for beta chain variable domain of TCR clone 242085 (TRBV7-9, TRBJ1-2)
CASSLKQNYGYTF

SEQ ID NO: 484171 - protein, 12 aa, Homo sapiens
  CDR3 for alpha chain variable domain of TCR clone 242086 (TRAV23/DV6, TRAJ49)
CAASSTGNQFSF

SEQ ID NO: 484172 - protein, 15 aa, Homo sapiens
  CDR3 for beta chain variable domain of TCR clone 242086 (TRBV10-3, TRBJ2-3)
CAIDTSGRRTDTQYF

SEQ ID NO: 484173 - protein, 15 aa, Homo sapiens
  CDR3 for alpha chain variable domain of TCR clone 242087 (TRAV29/DV5, TRAJ42)
CAAKTDGGSQGNLIV

SEQ ID NO: 484174 - protein, 16 aa, Homo sapiens
  CDR3 for beta chain variable domain of TCR clone 242087 (TRBV12-4, TRBJ1-5)
CASSSGYGASNQPQHF

SEQ ID NO: 484175 - protein, 15 aa, Homo sapiens
  CDR3 for alpha chain variable domain of TCR clone 242088 (TRAV14/DV4, TRAJ10)
CAMRELTGGGNKLPF

SEQ ID NO: 484176 - protein, 18 aa, Homo sapiens
  CDR3 for beta chain variable domain of TCR clone 242088 (TRBV7-9, TRBJ2-7)
CASSLTTSGSRTWYEQYF

SEQ ID NO: 484177 - protein, 15 aa, Homo sapiens
  CDR3 for alpha chain variable domain of TCR clone 242089 (TRAV8-3, TRAJ11)
CAVGLLNSGYSPLTF

SEQ ID NO: 484178 - protein, 16 aa, Homo sapiens
  CDR3 for beta chain variable domain of TCR clone 242089 (TRBV28, TRBJ2-1)
CASSLWGRTSGTLQFF

SEQ ID NO: 484179 - protein, 13 aa, Homo sapiens
  CDR3 for alpha chain variable domain of TCR clone 242090 (TRAV12-3, TRAJ33)
CAMSVNSNYQLIW

SEQ ID NO: 484180 - protein, 16 aa, Homo sapiens
  CDR3 for beta chain variable domain of TCR clone 242090 (TRBV7-8, TRBJ2-4)
CASSAERTLAKNIQYF

SEQ ID NO: 484181 - protein, 15 aa, Homo sapiens
  CDR3 for alpha chain variable domain of TCR clone 242091 (TRAV17, TRAJ35)
CATAFVIGFGNVLNG

SEQ ID NO: 484182 - protein, 15 aa, Homo sapiens
  CDR3 for beta chain variable domain of TCR clone 242091 (TRBV7-9, TRBJ2-7)
CASSLALAEAYEQYF

SEQ ID NO: 484183 - protein, 13 aa, Homo sapiens
  CDR3 for alpha chain variable domain of TCR clone 242092 (TRAV3, TRAJ21)
CAVREPDFNKFYF

SEQ ID NO: 484184 - protein, 16 aa, Homo sapiens
  CDR3 for beta chain variable domain of TCR clone 242092 (TRBV27, TRBJ2-2)
CASSLSGFWVTGELFF

SEQ ID NO: 484185 - protein, 14 aa, Homo sapiens
  CDR3 for alpha chain variable domain of TCR clone 242093 (TRAV35, TRAJ13)
CAGRSPGGYQKVTF

SEQ ID NO: 484186 - protein, 14 aa, Homo sapiens
  CDR3 for beta chain variable domain of TCR clone 242093 (TRBV19, TRBJ2-3)
CASSRLGTTDTQYF

SEQ ID NO: 484187 - protein, 15 aa, Homo sapiens
  CDR3 for alpha chain variable domain of TCR clone 242094 (TRAV4, TRAJ39)
CLAGPNNNAGNMLTF

SEQ ID NO: 484188 - protein, 12 aa, Homo sapiens
  CDR3 for beta chain variable domain of TCR clone 242094 (TRBV11-2, TRBJ2-2)
CASSLGGGELFL

SEQ ID NO: 484189 - protein, 12 aa, Homo sapiens
  CDR3 for alpha chain variable domain of TCR clone 242095 (TRAV12-1, TRAJ40)
CVVNGETYKYVF

SEQ ID NO: 484190 - protein, 22 aa, Homo sapiens
  CDR3 for beta chain variable domain of TCR clone 242095 (TRBV6-1, TRBJ1-3)
CASVQGGGWKHHIFWRGKLAHC

SEQ ID NO: 484191 - protein, 14 aa, Homo sapiens
  CDR3 for alpha chain variable domain of TCR clone 242096 (TRAV30, TRAJ33)
CGTVAPRSNYQLIW

SEQ ID NO: 484192 - protein, 15 aa, Homo sapiens
  CDR3 for beta chain variable domain of TCR clone 242096 (TRBV6-3, TRBJ2-7)
CASSSPGTVFYEQYF

SEQ ID NO: 484193 - protein, 15 aa, Homo sapiens
  CDR3 for alpha chain variable domain of TCR clone 242097 (TRAV12-3, TRAJ42)
CAMITSVGSQGNLIF

SEQ ID NO: 484194 - protein, 15 aa, Homo sapiens
  CDR3 for beta chain variable domain of TCR clone 242097 (TRBV20-1, TRBJ2-7)
CSARDRVSGMDEQYF

SEQ ID NO: 484195 - protein, 15 aa, Homo sapiens
  CDR3 for alpha chain variable domain of TCR clone 242098 (TRAV14/DV4, TRAJ9)
CAMREGNTGGFKPIF

SEQ ID NO: 484196 - protein, 16 aa, Homo sapiens
  CDR3 for beta chain variable domain of TCR clone 242098 (TRBV13, TRBJ2-5)
CASSRGAGIRQETQYF

SEQ ID NO: 484197 - protein, 15 aa, Homo sapiens
  CDR3 for alpha chain variable domain of TCR clone 242099 (TRAV26-1, TRAJ22)
CIVRVSFWFCKATDL

SEQ ID NO: 484198 - protein, 12 aa, Homo sapiens
  CDR3 for beta chain variable domain of TCR clone 242099 (TRBV7-9, TRBJ1-2)
CQQLKQNYGYTF

SEQ ID NO: 484199 - protein, 14 aa, Homo sapiens
  CDR3 for alpha chain variable domain of TCR clone 242100 (TRAV3, TRAJ21)
CAVRDPYNFNKFYF

SEQ ID NO: 484200 - protein, 16 aa, Homo sapiens
  CDR3 for beta chain variable domain of TCR clone 242100 (TRBV20-1, TRBJ1-4)
CSAQGQGLLTNEKLFF

SEQ ID NO: 484201 - protein, 12 aa, Homo sapiens
  CDR3 for alpha chain variable domain of TCR clone 242101 (TRAV8-3, TRAJ26)
CAGDNYGQNFVL

SEQ ID NO: 484202 - protein, 16 aa, Homo sapiens
  CDR3 for beta chain variable domain of TCR clone 242101 (TRBV20-1, TRBJ1-4)
CSAPGQGLLANEKLFF

SEQ ID NO: 484203 - protein, 16 aa, Homo sapiens
  CDR3 for alpha chain variable domain of TCR clone 242102 (TRAV8-6, TRAJ58)
CGVSDHTETSGSRLTF

SEQ ID NO: 484204 - protein, 15 aa, Homo sapiens
  CDR3 for beta chain variable domain of TCR clone 242102 (TRBV27, TRBJ2-1)
CASSNGGGSSNEQFF

SEQ ID NO: 484205 - protein, 17 aa, Homo sapiens
  CDR3 for alpha chain variable domain of TCR clone 242103 (TRAV38-1, TRAJ48)
CAFMRPRSNFGNEKLTF

SEQ ID NO: 484206 - protein, 12 aa, Homo sapiens
  CDR3 for beta chain variable domain of TCR clone 242103 (TRBV12-4, TRBJ2-7)
CASSGGFYEQYF

SEQ ID NO: 484207 - protein, 18 aa, Homo sapiens
  CDR3 for alpha chain variable domain of TCR clone 242104 (TRAV21, TRAJ52)
CAVRPSPAGGTSYGKLTF

SEQ ID NO: 484208 - protein, 14 aa, Homo sapiens
  CDR3 for beta chain variable domain of TCR clone 242104 (TRBV12-4, TRBJ1-1)
CASSFSQMNTEAFF

SEQ ID NO: 484209 - protein, 14 aa, Homo sapiens
  CDR3 for alpha chain variable domain of TCR clone 242105 (TRAV12-3, TRAJ57)
CARALEGGSEKLVF

SEQ ID NO: 484210 - protein, 15 aa, Homo sapiens
  CDR3 for beta chain variable domain of TCR clone 242105 (TRBV28, TRBJ2-4)
CAAGSGTLLMGIQYF

SEQ ID NO: 484211 - protein, 12 aa, Homo sapiens
  CDR3 for alpha chain variable domain of TCR clone 242106 (TRAV8-3, TRAJ26)
CAGDNYGQNSVF

SEQ ID NO: 484212 - protein, 13 aa, Homo sapiens
  CDR3 for beta chain variable domain of TCR clone 242106 (TRBV20-1, TRBJ1-1)
CSAPLGGGTEAFF

SEQ ID NO: 484213 - protein, 15 aa, Homo sapiens
  CDR3 for alpha chain variable domain of TCR clone 242107 (TRAV26-1, TRAJ29)
CIVRFEGSGNKPLVF

SEQ ID NO: 484214 - protein, 15 aa, Homo sapiens
  CDR3 for beta chain variable domain of TCR clone 242107 (TRBV7-9, TRBJ1-5)
CASSQGHQPNQPQHF

SEQ ID NO: 484215 - protein, 14 aa, Homo sapiens
  CDR3 for alpha chain variable domain of TCR clone 242108 (TRAV12-3, TRAJ22)
CAMSLFGSARQLTL

SEQ ID NO: 484216 - protein, 11 aa, Homo sapiens
  CDR3 for beta chain variable domain of TCR clone 242108 (TRBV12-4, TRBJ2-2)
CASSSAGELFF

SEQ ID NO: 484217 - protein, 14 aa, Homo sapiens
  CDR3 for alpha chain variable domain of TCR clone 242109 (TRAV26-1, TRAJ45)
CIEVTGGGADGLTF

SEQ ID NO: 484218 - protein, 12 aa, Homo sapiens
  CDR3 for beta chain variable domain of TCR clone 242109 (TRBV5-1, TRBJ2-5)
CASSLGLETQYF

SEQ ID NO: 484219 - protein, 16 aa, Homo sapiens
  CDR3 for alpha chain variable domain of TCR clone 242110 (TRAV14/DV4, TRAJ53)
CAMREGGGGSNYKLTL

SEQ ID NO: 484220 - protein, 14 aa, Homo sapiens
  CDR3 for beta chain variable domain of TCR clone 242110 (TRBV20-1, TRBJ2-7)
CSAKTGTGGYEQYF

SEQ ID NO: 484221 - protein, 14 aa, Homo sapiens
  CDR3 for alpha chain variable domain of TCR clone 242111 (TRAV12-2, TRAJ40)
CAVKIPSGTYKYIF

SEQ ID NO: 484222 - protein, 14 aa, Homo sapiens
  CDR3 for beta chain variable domain of TCR clone 242111 (TRBV20-1, TRBJ1-1)
CSAQTRIGRTEALF

SEQ ID NO: 484223 - protein, 12 aa, Homo sapiens
  CDR3 for alpha chain variable domain of TCR clone 242112 (TRAV12-3, TRAJ4)
CAMTGAGTRLAV

SEQ ID NO: 484224 - protein, 14 aa, Homo sapiens
  CDR3 for beta chain variable domain of TCR clone 242112 (TRBV10-3, TRBJ1-1)
CAISDTDRGVQAFF

SEQ ID NO: 484225 - protein, 14 aa, Homo sapiens
  CDR3 for alpha chain variable domain of TCR clone 242113 (TRAV12-2, TRAJ5)
CAVNRPTGRRALTF

SEQ ID NO: 484226 - protein, 15 aa, Homo sapiens
  CDR3 for beta chain variable domain of TCR clone 242113 (TRBV20-1, TRBJ2-7)
CSARDRVSGMDEQYF

SEQ ID NO: 484227 - protein, 15 aa, Homo sapiens
  CDR3 for alpha chain variable domain of TCR clone 242114 (TRAV12-1, TRAJ44)
CVVFVNTGTASKLPF

SEQ ID NO: 484228 - protein, 16 aa, Homo sapiens
  CDR3 for beta chain variable domain of TCR clone 242114 (TRBV20-1, TRBJ2-5)
CSPGGTSGGYMETQYF

SEQ ID NO: 484229 - protein, 14 aa, Homo sapiens
  CDR3 for alpha chain variable domain of TCR clone 242115 (TRAV13-2, TRAJ45)
CADMPGGGADGLTF

SEQ ID NO: 484230 - protein, 11 aa, Homo sapiens
  CDR3 for beta chain variable domain of TCR clone 242115 (TRBV7-3, TRBJ2-5)
CASSLSETQYF

SEQ ID NO: 484231 - protein, 14 aa, Homo sapiens
  CDR3 for alpha chain variable domain of TCR clone 242116 (TRAV12-1, TRAJ45)
CVVNIGGGAYGLTF

SEQ ID NO: 484232 - protein, 15 aa, Homo sapiens
  CDR3 for beta chain variable domain of TCR clone 242116 (TRBV7-2, TRBJ2-7)
CASSLKGALTYEQYF

SEQ ID NO: 484233 - protein, 14 aa, Homo sapiens
  CDR3 for alpha chain variable domain of TCR clone 242117 (TRAV12-1, TRAJ12)
CVVTRMDSSYKLIF

SEQ ID NO: 484234 - protein, 14 aa, Homo sapiens
  CDR3 for beta chain variable domain of TCR clone 242117 (TRBV10-3, TRBJ2-7)
CAISELPLVYEQYF

SEQ ID NO: 484235 - protein, 12 aa, Homo sapiens
  CDR3 for alpha chain variable domain of TCR clone 242118 (TRAV8-3, TRAJ20)
CAVRANDYKLSF

SEQ ID NO: 484236 - protein, 16 aa, Homo sapiens
  CDR3 for beta chain variable domain of TCR clone 242118 (TRBV19, TRBJ2-2)
CASRSPGTGATGELFF

SEQ ID NO: 484237 - protein, 14 aa, Homo sapiens
  CDR3 for alpha chain variable domain of TCR clone 242119 (TRAV2, TRAJ37)
YAVDLTSNTGQLIF

SEQ ID NO: 484238 - protein, 15 aa, Homo sapiens
  CDR3 for beta chain variable domain of TCR clone 242119 (TRBV20-1, TRBJ1-1)
CSASRGVTGNTEAFF

SEQ ID NO: 484239 - protein, 14 aa, Homo sapiens
  CDR3 for alpha chain variable domain of TCR clone 242120 (TRAV1-2, TRAJ16)
CAVNRFSDGQKLLF

SEQ ID NO: 484240 - protein, 17 aa, Homo sapiens
  CDR3 for beta chain variable domain of TCR clone 242120 (TRBV13, TRBJ2-3)
CPSSLSRVAGGRNTQYF

SEQ ID NO: 484241 - protein, 13 aa, Homo sapiens
  CDR3 for alpha chain variable domain of TCR clone 242121 (TRAV13-1, TRAJ21)
CAASIYNCNKFYF

SEQ ID NO: 484242 - protein, 15 aa, Homo sapiens
  CDR3 for beta chain variable domain of TCR clone 242121 (TRBV9, TRBJ2-1)
CASSLAGSSYNEQFF

SEQ ID NO: 484243 - protein, 15 aa, Homo sapiens
  CDR3 for alpha chain variable domain of TCR clone 242122 (TRAV25, TRAJ52)
CAGRPGGTSYGKLTF

SEQ ID NO: 484244 - protein, 14 aa, Homo sapiens
  CDR3 for beta chain variable domain of TCR clone 242122 (TRBV7-8, TRBJ1-1)
CASSLKGGNTEAFF

SEQ ID NO: 484245 - protein, 14 aa, Homo sapiens
  CDR3 for alpha chain variable domain of TCR clone 242123 (TRAV26-1, TRAJ38)
FIADNAGNNRKLIW

SEQ ID NO: 484246 - protein, 15 aa, Homo sapiens
  CDR3 for beta chain variable domain of TCR clone 242123 (TRBV4-1, TRBJ1-1)
CASSQEWGHYTEAFF

SEQ ID NO: 484247 - protein, 13 aa, Homo sapiens
  CDR3 for alpha chain variable domain of TCR clone 242124 (TRAV8-3, TRAJ28)
CAVGAVESYQLTF

SEQ ID NO: 484248 - protein, 17 aa, Homo sapiens
  CDR3 for beta chain variable domain of TCR clone 242124 (TRBV11-2, TRBJ2-1)
CASSLYPPGVEYNEQFF

SEQ ID NO: 484249 - protein, 16 aa, Homo sapiens
  CDR3 for alpha chain variable domain of TCR clone 242125 (TRAV30, TRAJ24)
CGTEIVDADSWGKFQF

SEQ ID NO: 484250 - protein, 16 aa, Homo sapiens
  CDR3 for beta chain variable domain of TCR clone 242125 (TRBV7-6, TRBJ2-3)
CASSPLAGGSTDTQYF

SEQ ID NO: 484251 - protein, 13 aa, Homo sapiens
  CDR3 for alpha chain variable domain of TCR clone 242126 (TRAV27, TRAJ3)
ASLRGSSASKIIF

SEQ ID NO: 484252 - protein, 16 aa, Homo sapiens
  CDR3 for beta chain variable domain of TCR clone 242126 (TRBV28, TRBJ1-3)
CASSMGPLETPYILER

SEQ ID NO: 484253 - protein, 13 aa, Homo sapiens
  CDR3 for alpha chain variable domain of TCR clone 242127 (TRAV13-1, TRAJ20)
CAARVSNDYKLSF

SEQ ID NO: 484254 - protein, 14 aa, Homo sapiens
  CDR3 for beta chain variable domain of TCR clone 242127 (TRBV7-6, TRBJ2-3)
CASSLGTVTDTQYF

SEQ ID NO: 484255 - protein, 18 aa, Homo sapiens
  CDR3 for alpha chain variable domain of TCR clone 242128 (TRAV21, TRAJ52)
CAVRPSPAGGTSYGTLTF

SEQ ID NO: 484256 - protein, 19 aa, Homo sapiens
  CDR3 for beta chain variable domain of TCR clone 242128 (TRBV7-2, TRBJ2-3)
CASSFLSRKWGGGTDTQYF

SEQ ID NO: 484257 - protein, 14 aa, Homo sapiens
  CDR3 for alpha chain variable domain of TCR clone 242129 (TRAV20, TRAJ20)
CAVRRGYNDHKLSF

SEQ ID NO: 484258 - protein, 13 aa, Homo sapiens
  CDR3 for beta chain variable domain of TCR clone 242129 (TRBV19, TRBJ2-5)
CASSETAPETQYF

SEQ ID NO: 484259 - protein, 12 aa, Homo sapiens
  CDR3 for alpha chain variable domain of TCR clone 242130 (TRAV12-1, TRAJ40)
CGVYSGTYKYIF

SEQ ID NO: 484260 - protein, 18 aa, Homo sapiens
  CDR3 for beta chain variable domain of TCR clone 242130 (TRBV11-2, TRBJ2-3)
CASSVGGASRGAPNTQYF

SEQ ID NO: 484261 - protein, 13 aa, Homo sapiens
  CDR3 for alpha chain variable domain of TCR clone 242131 (TRAV22, TRAJ26)
CAVEHNYGQNFVF

SEQ ID NO: 484262 - protein, 11 aa, Homo sapiens
  CDR3 for beta chain variable domain of TCR clone 242131 (TRBV19, TRBJ2-2)
CASRYSGELFF

SEQ ID NO: 484263 - protein, 12 aa, Homo sapiens
  CDR3 for alpha chain variable domain of TCR clone 242132 (TRAV27, TRAJ33)
CAGDGSNYQLIW

SEQ ID NO: 484264 - protein, 15 aa, Homo sapiens
  CDR3 for beta chain variable domain of TCR clone 242132 (TRBV7-9, TRBJ1-4)
CASSARTGGNEKLFF

SEQ ID NO: 484265 - protein, 11 aa, Homo sapiens
  CDR3 for alpha chain variable domain of TCR clone 242133 (TRAV13-1, TRAJ43)
CAAHNNNDMRF

SEQ ID NO: 484266 - protein, 13 aa, Homo sapiens
  CDR3 for beta chain variable domain of TCR clone 242133 (TRBV12-4, TRBJ1-1)
CASSPGTGFEAFF

SEQ ID NO: 484267 - protein, 14 aa, Homo sapiens
  CDR3 for alpha chain variable domain of TCR clone 242134 (TRAV8-3, TRAJ4)
CAVGAAGGYNKLIF

SEQ ID NO: 484268 - protein, 18 aa, Homo sapiens
  CDR3 for beta chain variable domain of TCR clone 242134 (TRBV7-3, TRBJ2-5)
CASSFRGGGDPVLRARHA

SEQ ID NO: 484269 - protein, 15 aa, Homo sapiens
  CDR3 for alpha chain variable domain of TCR clone 242135 (TRAV12-1, TRAJ4)
CVVNPFPGGYNKLIF

SEQ ID NO: 484270 - protein, 13 aa, Homo sapiens
  CDR3 for beta chain variable domain of TCR clone 242135 (TRBV20-1, TRBJ1-2)
CSARGTADYGYTF

SEQ ID NO: 484271 - protein, 13 aa, Homo sapiens
  CDR3 for alpha chain variable domain of TCR clone 242136 (TRAV26-1, TRAJ38)
CIADNAGNNRKLF

SEQ ID NO: 484272 - protein, 13 aa, Homo sapiens
  CDR3 for beta chain variable domain of TCR clone 242136 (TRBV20-1, TRBJ1-1)
CSARCGGNTEAFF

SEQ ID NO: 484273 - protein, 16 aa, Homo sapiens
  CDR3 for alpha chain variable domain of TCR clone 242137 (TRAV21, TRAJ52)
CAVTNAGGTSYGQLTF

SEQ ID NO: 484274 - protein, 11 aa, Homo sapiens
  CDR3 for beta chain variable domain of TCR clone 242137 (TRBV2, TRBJ1-1)
CASREGTEAFF

SEQ ID NO: 484275 - protein, 16 aa, Homo sapiens
  CDR3 for alpha chain variable domain of TCR clone 242138 (TRAV4, TRAJ5)
CLVGPDHGHGQESTYF

SEQ ID NO: 484276 - protein, 16 aa, Homo sapiens
  CDR3 for beta chain variable domain of TCR clone 242138 (TRBV11-2, TRBJ2-7)
CASSLAPTGVNYEQYF

SEQ ID NO: 484277 - protein, 17 aa, Homo sapiens
  CDR3 for alpha chain variable domain of TCR clone 242139 (TRAV3, TRAJ42)
CAVRDRDYGGSQGNLIF

SEQ ID NO: 484278 - protein, 15 aa, Homo sapiens
  CDR3 for beta chain variable domain of TCR clone 242139 (TRBV6-6, TRBJ2-7)
CASSYSYGGSYEQYI

SEQ ID NO: 484279 - protein, 15 aa, Homo sapiens
  CDR3 for alpha chain variable domain of TCR clone 242140 (TRAV21, TRAJ13)
CAVRPTSGGYQKVTF

SEQ ID NO: 484280 - protein, 11 aa, Homo sapiens
  CDR3 for beta chain variable domain of TCR clone 242140 (TRBV7-9, TRBJ2-2)
CASSGFGGANT

SEQ ID NO: 484281 - protein, 12 aa, Homo sapiens
  CDR3 for alpha chain variable domain of TCR clone 242141 (TRAV27, TRAJ22)
CAGDGAGVEIWF

SEQ ID NO: 484282 - protein, 14 aa, Homo sapiens
  CDR3 for beta chain variable domain of TCR clone 242141 (TRBV12-4, TRBJ1-2)
CASSFVGTAYGYTF

SEQ ID NO: 484283 - protein, 12 aa, Homo sapiens
  CDR3 for alpha chain variable domain of TCR clone 242142 (TRAV36/DV7, TRAJ31)
CAVANNNARLMF

SEQ ID NO: 484284 - protein, 15 aa, Homo sapiens
  CDR3 for beta chain variable domain of TCR clone 242142 (TRBV6-1, TRBJ2-4)
CASSEAVWTINIQYF

SEQ ID NO: 484285 - protein, 17 aa, Homo sapiens
  CDR3 for alpha chain variable domain of TCR clone 242143 (TRAV38-1, TRAJ28)
CAFMKPTSGAGSYQLTC

SEQ ID NO: 484286 - protein, 15 aa, Homo sapiens
  CDR3 for beta chain variable domain of TCR clone 242143 (TRBV5-1, TRBJ2-4)
CASSLGGGGSYIQYF

SEQ ID NO: 484287 - protein, 23 aa, Homo sapiens
  CDR3 for alpha chain variable domain of TCR clone 242144 (TRAV8-4, TRAJ38)
CARLNAGNNHIQNPDPAVYQLRA

SEQ ID NO: 484288 - protein, 14 aa, Homo sapiens
  CDR3 for beta chain variable domain of TCR clone 242144 (TRBV7-8, TRBJ2-3)
CASSLEAGTDTQYF

SEQ ID NO: 484289 - protein, 18 aa, Homo sapiens
  CDR3 for alpha chain variable domain of TCR clone 242145 (TRAV12-3, TRAJ52)
CAMSALNAGGTSYGKLTF

SEQ ID NO: 484290 - protein, 13 aa, Homo sapiens
  CDR3 for beta chain variable domain of TCR clone 242145 (TRBV27, TRBJ1-1)
CASSLAIGAEAFF

SEQ ID NO: 484291 - protein, 17 aa, Homo sapiens
  CDR3 for alpha chain variable domain of TCR clone 242146 (TRAV3, TRAJ42)
CAVRDRDYGGSEGNLIF

SEQ ID NO: 484292 - protein, 15 aa, Homo sapiens
  CDR3 for beta chain variable domain of TCR clone 242146 (TRBV6-6, TRBJ2-7)
CASSYSYGGSYEQYF

SEQ ID NO: 484293 - protein, 13 aa, Homo sapiens
  CDR3 for alpha chain variable domain of TCR clone 242147 (TRAV2, TRAJ40)
CAVVTSGTYKYIF

SEQ ID NO: 484294 - protein, 14 aa, Homo sapiens
  CDR3 for beta chain variable domain of TCR clone 242147 (TRBV19, TRBJ2-1)
CAGPTVVLSGEQFF

SEQ ID NO: 484295 - protein, 14 aa, Homo sapiens
  CDR3 for alpha chain variable domain of TCR clone 242148 (TRAV1-2, TRAJ16)
CAVNRVSDGQKLLF

SEQ ID NO: 484296 - protein, 19 aa, Homo sapiens
  CDR3 for beta chain variable domain of TCR clone 242148 (TRBV25-1, TRBJ2-2)
CAILVYRVDRGRKTGELFF

SEQ ID NO: 484297 - protein, 13 aa, Homo sapiens
  CDR3 for alpha chain variable domain of TCR clone 242149 (TRAV8-3, TRAJ28)
CAVGAVGSYQLTF

SEQ ID NO: 484298 - protein, 15 aa, Homo sapiens
  CDR3 for beta chain variable domain of TCR clone 242149 (TRBV7-9, TRBJ1-5)
CASSRGHQPKQPQHF

SEQ ID NO: 484299 - protein, 11 aa, Homo sapiens
  CDR3 for alpha chain variable domain of TCR clone 242150 (TRAV12-3, TRAJ17)
CAMAYRQQANF

SEQ ID NO: 484300 - protein, 15 aa, Homo sapiens
  CDR3 for beta chain variable domain of TCR clone 242150 (TRBV20-1, TRBJ2-7)
CSARDRVSGMDEQYF

SEQ ID NO: 484301 - protein, 13 aa, Homo sapiens
  CDR3 for alpha chain variable domain of TCR clone 242151 (TRAV17, TRAJ40)
CATDSSGTYKYIF

SEQ ID NO: 484302 - protein, 16 aa, Homo sapiens
  CDR3 for beta chain variable domain of TCR clone 242151 (TRBV3-1, TRBJ2-5)
CASSPGQFNGFGTQYF

SEQ ID NO: 484303 - protein, 11 aa, Homo sapiens
  CDR3 for alpha chain variable domain of TCR clone 242152 (TRAV12-3, TRAJ43)
CAMSVSNDMRF

SEQ ID NO: 484304 - protein, 12 aa, Homo sapiens
  CDR3 for beta chain variable domain of TCR clone 242152 (TRBV7-9, TRBJ2-7)
CASSIEREEQYF

SEQ ID NO: 484305 - protein, 13 aa, Homo sapiens
  CDR3 for alpha chain variable domain of TCR clone 242153 (TRAV12-3, TRAJ41)
CAIAPNSGYALNF

SEQ ID NO: 484306 - protein, 14 aa, Homo sapiens
  CDR3 for beta chain variable domain of TCR clone 242153 (TRBV7-2, TRBJ1-3)
CASSLGTAGNTMHF

SEQ ID NO: 484307 - protein, 14 aa, Homo sapiens
  CDR3 for alpha chain variable domain of TCR clone 242154 (TRAV25, TRAJ35)
CARRMEGLGNVLHW

SEQ ID NO: 484308 - protein, 13 aa, Homo sapiens
  CDR3 for beta chain variable domain of TCR clone 242154 (TRBV7-2, TRBJ1-4)
CASSLAGLEKLFF

SEQ ID NO: 484309 - protein, 15 aa, Homo sapiens
  CDR3 for alpha chain variable domain of TCR clone 242155 (TRAV3, TRAJ22)
CAVRDRGGSARQLTF

SEQ ID NO: 484310 - protein, 13 aa, Homo sapiens
  CDR3 for beta chain variable domain of TCR clone 242155 (TRBV18, TRBJ2-3)
CASSTGRTDTQYF

SEQ ID NO: 484311 - protein, 11 aa, Homo sapiens
  CDR3 for alpha chain variable domain of TCR clone 242156 (TRAV1-2, TRAJ11)
CAVRGYSTLTF

SEQ ID NO: 484312 - protein, 16 aa, Homo sapiens
  CDR3 for beta chain variable domain of TCR clone 242156 (TRBV20-1, TRBJ1-2)
CSASMGQGVANYGYTF

SEQ ID NO: 484313 - protein, 15 aa, Homo sapiens
  CDR3 for alpha chain variable domain of TCR clone 242157 (TRAV38-1, TRAJ37)
CAFIFGSGNTGKLIF

SEQ ID NO: 484314 - protein, 13 aa, Homo sapiens
  CDR3 for beta chain variable domain of TCR clone 242157 (TRBV2, TRBJ1-1)
CASSVLMNTEAFF

SEQ ID NO: 484315 - protein, 14 aa, Homo sapiens
  CDR3 for alpha chain variable domain of TCR clone 242158 (TRAV12-2, TRAJ48)
CAVNAFFGNEKLTF

SEQ ID NO: 484316 - protein, 13 aa, Homo sapiens
  CDR3 for beta chain variable domain of TCR clone 242158 (TRBV28, TRBJ2-7)
CAEAQQGLDEQYF

SEQ ID NO: 484317 - protein, 13 aa, Homo sapiens
  CDR3 for alpha chain variable domain of TCR clone 242159 (TRAV21, TRAJ33)
CAVAGDSNYQLIW

SEQ ID NO: 484318 - protein, 12 aa, Homo sapiens
  CDR3 for beta chain variable domain of TCR clone 242159 (TRBV11-2, TRBJ2-2)
CASSLGGGELFF

SEQ ID NO: 484319 - protein, 12 aa, Homo sapiens
  CDR3 for alpha chain variable domain of TCR clone 242160 (TRAV38-1, TRAJ44)
CAFFSTASKLTF

SEQ ID NO: 484320 - protein, 14 aa, Homo sapiens
  CDR3 for beta chain variable domain of TCR clone 242160 (TRBV19, TRBJ2-1)
CASSIRQPRNEQFF

SEQ ID NO: 484321 - protein, 15 aa, Homo sapiens
  CDR3 for alpha chain variable domain of TCR clone 242161 (TRAV17, TRAJ6)
CATDLPSGGSYITTF

SEQ ID NO: 484322 - protein, 16 aa, Homo sapiens
  CDR3 for beta chain variable domain of TCR clone 242161 (TRBV4-1, TRBJ2-7)
FASSQDPTGYSYEQYF

SEQ ID NO: 484323 - protein, 16 aa, Homo sapiens
  CDR3 for alpha chain variable domain of TCR clone 242162 (TRAV3, TRAJ22)
CAVRDMGSGSARQLTF

SEQ ID NO: 484324 - protein, 15 aa, Homo sapiens
  CDR3 for beta chain variable domain of TCR clone 242162 (TRBV6-3, TRBJ2-7)
CASSSPGTVFYEQYF

SEQ ID NO: 484325 - protein, 14 aa, Homo sapiens
  CDR3 for alpha chain variable domain of TCR clone 242163 (TRAV8-4, TRAJ5)
CAVSTDTGRRALTF

SEQ ID NO: 484326 - protein, 15 aa, Homo sapiens
  CDR3 for beta chain variable domain of TCR clone 242163 (TRBV7-9, TRBJ1-5)
CASSLAQGPNQPQHF

SEQ ID NO: 484327 - protein, 15 aa, Homo sapiens
  CDR3 for alpha chain variable domain of TCR clone 242164 (TRAV27, TRAJ38)
CAARRNAGNNGKLSW

SEQ ID NO: 484328 - protein, 13 aa, Homo sapiens
  CDR3 for beta chain variable domain of TCR clone 242164 (TRBV12-5, TRBJ2-3)
CASGDRQSDTQYF

SEQ ID NO: 484329 - protein, 10 aa, Homo sapiens
  CDR3 for alpha chain variable domain of TCR clone 242165 (TRAV26-1, TRAJ22)
CIVSLNFFWF

SEQ ID NO: 484330 - protein, 15 aa, Homo sapiens
  CDR3 for beta chain variable domain of TCR clone 242165 (TRBV19, TRBJ1-1)
CASTSGQIQNTEAFF

SEQ ID NO: 484331 - protein, 12 aa, Homo sapiens
  CDR3 for alpha chain variable domain of TCR clone 242166 (TRAV13-2, TRAJ23)
CAERHRGGKLIF

SEQ ID NO: 484332 - protein, 12 aa, Homo sapiens
  CDR3 for beta chain variable domain of TCR clone 242166 (TRBV29-1, TRBJ2-3)
CSVTGRADTQYF

SEQ ID NO: 484333 - protein, 11 aa, Homo sapiens
  CDR3 for alpha chain variable domain of TCR clone 242167 (TRAV12-3, TRAJ27)
SAMANAGKSTF

SEQ ID NO: 484334 - protein, 13 aa, Homo sapiens
  CDR3 for beta chain variable domain of TCR clone 242167 (TRBV20-1, TRBJ1-1)
CSARMGGNTEAFF

SEQ ID NO: 484335 - protein, 12 aa, Homo sapiens
  CDR3 for alpha chain variable domain of TCR clone 242168 (TRAV3, TRAJ26)
CAVRDYGRHFVF

SEQ ID NO: 484336 - protein, 16 aa, Homo sapiens
  CDR3 for beta chain variable domain of TCR clone 242168 (TRBV11-2, TRBJ1-2)
CASSPSGREANYGYTF

SEQ ID NO: 484337 - protein, 11 aa, Homo sapiens
  CDR3 for alpha chain variable domain of TCR clone 242169 (TRAV36/DV7, TRAJ43)
CAVERVNDMRF

SEQ ID NO: 484338 - protein, 12 aa, Homo sapiens
  CDR3 for beta chain variable domain of TCR clone 242169 (TRBV7-8, TRBJ2-7)
CASSLGDREQYF

SEQ ID NO: 484339 - protein, 14 aa, Homo sapiens
  CDR3 for alpha chain variable domain of TCR clone 242170 (TRAV12-2, TRAJ40)
CAVKIPSGTHKYIF

SEQ ID NO: 484340 - protein, 17 aa, Homo sapiens
  CDR3 for beta chain variable domain of TCR clone 242170 (TRBV13, TRBJ2-3)
CASSLSWVAGGRNTQYF

SEQ ID NO: 484341 - protein, 14 aa, Homo sapiens
  CDR3 for alpha chain variable domain of TCR clone 242171 (TRAV2, TRAJ22)
CCPSRGGSARQLTF

SEQ ID NO: 484342 - protein, 11 aa, Homo sapiens
  CDR3 for beta chain variable domain of TCR clone 242171 (TRBV27, TRBJ2-3)
CASSLGDTQYF

SEQ ID NO: 484343 - protein, 13 aa, Homo sapiens
  CDR3 for alpha chain variable domain of TCR clone 242172 (TRAV21, TRAJ56)
CAVRTGANSKLTF

SEQ ID NO: 484344 - protein, 15 aa, Homo sapiens
  CDR3 for beta chain variable domain of TCR clone 242172 (TRBV7-9, TRBJ1-1)
CASSHRVTVNTEAFF

SEQ ID NO: 484345 - protein, 14 aa, Homo sapiens
  CDR3 for alpha chain variable domain of TCR clone 242173 (TRAV8-1, TRAJ34)
CAVNPSYNTDKLIF

SEQ ID NO: 484346 - protein, 14 aa, Homo sapiens
  CDR3 for beta chain variable domain of TCR clone 242173 (TRBV19, TRBJ2-1)
CASPTFVLSGEQFF

SEQ ID NO: 484347 - protein, 15 aa, Homo sapiens
  CDR3 for alpha chain variable domain of TCR clone 242174 (TRAV17, TRAJ56)
CATEPFTGDNSKLTF

SEQ ID NO: 484348 - protein, 14 aa, Homo sapiens
  CDR3 for beta chain variable domain of TCR clone 242174 (TRBV19, TRBJ2-1)
CASPTFVLSGEQFF

SEQ ID NO: 484349 - protein, 15 aa, Homo sapiens
  CDR3 for alpha chain variable domain of TCR clone 242175 (TRAV16, TRAJ10)
CALRELTGVGNKLTF

SEQ ID NO: 484350 - protein, 14 aa, Homo sapiens
  CDR3 for beta chain variable domain of TCR clone 242175 (TRBV5-5, TRBJ2-7)
CASSLGQGTYEQYF

SEQ ID NO: 484351 - protein, 17 aa, Homo sapiens
  CDR3 for alpha chain variable domain of TCR clone 242176 (TRAV16, TRAJ58)
CITALSNGETSGSRLTF

SEQ ID NO: 484352 - protein, 17 aa, Homo sapiens
  CDR3 for beta chain variable domain of TCR clone 242176 (TRBV18, TRBJ2-1)
CASSKGLSGGADNEQFF

SEQ ID NO: 484353 - protein, 18 aa, Homo sapiens
  CDR3 for alpha chain variable domain of TCR clone 242177 (TRAV8-3, TRAJ6)
CAVGAEHQEEATYLHLEA

SEQ ID NO: 484354 - protein, 14 aa, Homo sapiens
  CDR3 for beta chain variable domain of TCR clone 242177 (TRBV6-6, TRBJ2-7)
CASSDSGAGYEQYF

SEQ ID NO: 484355 - protein, 15 aa, Homo sapiens
  CDR3 for alpha chain variable domain of TCR clone 242178 (TRAV8-2, TRAJ37)
CCEPSGSSNTGKLIF

SEQ ID NO: 484356 - protein, 13 aa, Homo sapiens
  CDR3 for beta chain variable domain of TCR clone 242178 (TRBV27, TRBJ2-7)
CASSLRQRYEQYF

SEQ ID NO: 484357 - protein, 12 aa, Homo sapiens
  CDR3 for alpha chain variable domain of TCR clone 242179 (TRAV3, TRAJ43)
CAVRDTNNDMRS

SEQ ID NO: 484358 - protein, 17 aa, Homo sapiens
  CDR3 for beta chain variable domain of TCR clone 242179 (TRBV7-8, TRBJ2-6)
CASSAGTGGAGANVLTF

SEQ ID NO: 484359 - protein, 14 aa, Homo sapiens
  CDR3 for alpha chain variable domain of TCR clone 242180 (TRAV1-2, TRAJ8)
CSVREDTGFQKIVF

SEQ ID NO: 484360 - protein, 14 aa, Homo sapiens
  CDR3 for beta chain variable domain of TCR clone 242180 (TRBV12-4, TRBJ1-1)
CASSFDRVNTEAFF

SEQ ID NO: 484361 - protein, 13 aa, Homo sapiens
  CDR3 for alpha chain variable domain of TCR clone 242181 (TRAV27, TRAJ41)
CAGEGNSGYALNF

SEQ ID NO: 484362 - protein, 14 aa, Homo sapiens
  CDR3 for beta chain variable domain of TCR clone 242181 (TRBV7-2, TRBJ1-1)
SASSFLTGTTEASF

SEQ ID NO: 484363 - protein, 15 aa, Homo sapiens
  CDR3 for alpha chain variable domain of TCR clone 242182 (TRAV3, TRAJ22)
CAVRDRGGSARQLTF

SEQ ID NO: 484364 - protein, 15 aa, Homo sapiens
  CDR3 for beta chain variable domain of TCR clone 242182 (TRBV20-1, TRBJ1-1)
CSASRGVTGNTEAFL

SEQ ID NO: 484365 - protein, 13 aa, Homo sapiens
  CDR3 for alpha chain variable domain of TCR clone 242183 (TRAV2, TRAJ15)
CAVASQAGTALIF

SEQ ID NO: 484366 - protein, 13 aa, Homo sapiens
  CDR3 for beta chain variable domain of TCR clone 242183 (TRBV12-4, TRBJ1-2)
CTSVPEVSYGYTF

SEQ ID NO: 484367 - protein, 14 aa, Homo sapiens
  CDR3 for alpha chain variable domain of TCR clone 242184 (TRAV12-1, TRAJ4)
CVVNRSGGYNKLIF

SEQ ID NO: 484368 - protein, 15 aa, Homo sapiens
  CDR3 for beta chain variable domain of TCR clone 242184 (TRBV27, TRBJ2-1)
CASSNGGGSSNEQFF

SEQ ID NO: 484369 - protein, 17 aa, Homo sapiens
  CDR3 for alpha chain variable domain of TCR clone 242185 (TRAV2, TRAJ42)
CAVEDQNYGGSQGNLIF

SEQ ID NO: 484370 - protein, 12 aa, Homo sapiens
  CDR3 for beta chain variable domain of TCR clone 242185 (TRBV20-1, TRBJ2-3)
CSADGAGDTQYF

SEQ ID NO: 484371 - protein, 13 aa, Homo sapiens
  CDR3 for alpha chain variable domain of TCR clone 242186 (TRAV12-3, TRAJ9)
CAMRNTGGFKTIF

SEQ ID NO: 484372 - protein, 14 aa, Homo sapiens
  CDR3 for beta chain variable domain of TCR clone 242186 (TRBV7-6, TRBJ2-4)
CASSPAPGSFLWYF

SEQ ID NO: 484373 - protein, 14 aa, Homo sapiens
  CDR3 for alpha chain variable domain of TCR clone 242187 (TRAV1-2, TRAJ16)
CAVNRFSDGQKLLF

SEQ ID NO: 484374 - protein, 14 aa, Homo sapiens
  CDR3 for beta chain variable domain of TCR clone 242187 (TRBV7-2, TRBJ2-7)
CASSPKTRFYEQYF

SEQ ID NO: 484375 - protein, 13 aa, Homo sapiens
  CDR3 for alpha chain variable domain of TCR clone 242188 (TRAV1-2, TRAJ9)
CAALNTGGFKTIF

SEQ ID NO: 484376 - protein, 15 aa, Homo sapiens
  CDR3 for beta chain variable domain of TCR clone 242188 (TRBV24-1, TRBJ2-1)
CATSGAGGFYNEQFF

SEQ ID NO: 484377 - protein, 18 aa, Homo sapiens
  CDR3 for alpha chain variable domain of TCR clone 242189 (TRAV13-1, TRAJ52)
CAASKRSAGGTSYGKLPF

SEQ ID NO: 484378 - protein, 12 aa, Homo sapiens
  CDR3 for beta chain variable domain of TCR clone 242189 (TRBV11-2, TRBJ2-2)
CASSLGGGELFF

SEQ ID NO: 484379 - protein, 13 aa, Homo sapiens
  CDR3 for alpha chain variable domain of TCR clone 242190 (TRAV27, TRAJ9)
CAGRDTGGFKTIF

SEQ ID NO: 484380 - protein, 13 aa, Homo sapiens
  CDR3 for beta chain variable domain of TCR clone 242190 (TRBV7-3, TRBJ1-1)
CASSQDWGAEAFF

SEQ ID NO: 484381 - protein, 14 aa, Homo sapiens
  CDR3 for alpha chain variable domain of TCR clone 242191 (TRAV12-3, TRAJ10)
SHLPLTGGGNKLTF

SEQ ID NO: 484382 - protein, 15 aa, Homo sapiens
  CDR3 for beta chain variable domain of TCR clone 242191 (TRBV28, TRBJ2-1)
CASSGLAEVDNEQFF

SEQ ID NO: 484383 - protein, 14 aa, Homo sapiens
  CDR3 for alpha chain variable domain of TCR clone 242192 (TRAV13-1, TRAJ44)
CAAKATGTASKLTF

SEQ ID NO: 484384 - protein, 14 aa, Homo sapiens
  CDR3 for beta chain variable domain of TCR clone 242192 (TRBV25-1, TRBJ1-1)
GASTHLGGNTEAFF

SEQ ID NO: 484385 - protein, 13 aa, Homo sapiens
  CDR3 for alpha chain variable domain of TCR clone 242193 (TRAV12-1, TRAJ39)
RVVPQRAGNMLTF

SEQ ID NO: 484386 - protein, 15 aa, Homo sapiens
  CDR3 for beta chain variable domain of TCR clone 242193 (TRBV6-1, TRBJ2-3)
CASSERGGITDTQYF

SEQ ID NO: 484387 - protein, 13 aa, Homo sapiens
  CDR3 for alpha chain variable domain of TCR clone 242194 (TRAV20, TRAJ48)
CAVHLFGNEKLTF

SEQ ID NO: 484388 - protein, 15 aa, Homo sapiens
  CDR3 for beta chain variable domain of TCR clone 242194 (TRBV6-5, TRBJ2-6)
CASSQWGAGANVLTF

SEQ ID NO: 484389 - protein, 13 aa, Homo sapiens
  CDR3 for alpha chain variable domain of TCR clone 242195 (TRAV20, TRAJ21)
CAVEGYNFNKFYF

SEQ ID NO: 484390 - protein, 15 aa, Homo sapiens
  CDR3 for beta chain variable domain of TCR clone 242195 (TRBV11-3, TRBJ2-3)
CASLKHGREGDTQYF

SEQ ID NO: 484391 - protein, 12 aa, Homo sapiens
  CDR3 for alpha chain variable domain of TCR clone 242196 (TRAV12-1, TRAJ11)
VVNRAGYSTLTF

SEQ ID NO: 484392 - protein, 16 aa, Homo sapiens
  CDR3 for beta chain variable domain of TCR clone 242196 (TRBV27, TRBJ2-2)
CASSLRPGGAPGELFF

SEQ ID NO: 484393 - protein, 12 aa, Homo sapiens
  CDR3 for alpha chain variable domain of TCR clone 242197 (TRAV12-1, TRAJ20)
CVVNPDDYKLSF

SEQ ID NO: 484394 - protein, 15 aa, Homo sapiens
  CDR3 for beta chain variable domain of TCR clone 242197 (TRBV11-3, TRBJ2-2)
CASSLVGTGAGEPFF

SEQ ID NO: 484395 - protein, 12 aa, Homo sapiens
  CDR3 for alpha chain variable domain of TCR clone 242198 (TRAV13-2, TRAJ23)
CAERHRGGKLIF

SEQ ID NO: 484396 - protein, 14 aa, Homo sapiens
  CDR3 for beta chain variable domain of TCR clone 242198 (TRBV20-1, TRBJ2-4)
CSAGGRVGENIQYF

SEQ ID NO: 484397 - protein, 17 aa, Homo sapiens
  CDR3 for alpha chain variable domain of TCR clone 242199 (TRAV3, TRAJ42)
CAVRGRDYGGSQGNLIF

SEQ ID NO: 484398 - protein, 18 aa, Homo sapiens
  CDR3 for beta chain variable domain of TCR clone 242199 (TRBV20-1, TRBJ2-3)
CSASGLAGGPGTTDTQYF

SEQ ID NO: 484399 - protein, 14 aa, Homo sapiens
  CDR3 for alpha chain variable domain of TCR clone 242200 (TRAV1-1, TRAJ23)
CAVSIYNQGGKLIF

SEQ ID NO: 484400 - protein, 11 aa, Homo sapiens
  CDR3 for beta chain variable domain of TCR clone 242200 (TRBV6-3, TRBJ2-3)
CATGQADTQYF

SEQ ID NO: 484401 - protein, 15 aa, Homo sapiens
  CDR3 for alpha chain variable domain of TCR clone 242201 (TRAV12-1, TRAJ44)
CVVDNPQGTASKLTF

SEQ ID NO: 484402 - protein, 13 aa, Homo sapiens
  CDR3 for beta chain variable domain of TCR clone 242201 (TRBV27, TRBJ2-1)
CASSSGSYNEQFF

SEQ ID NO: 484403 - protein, 14 aa, Homo sapiens
  CDR3 for alpha chain variable domain of TCR clone 242202 (TRAV12-3, TRAJ10)
SHLPLTGGGNKLTF

SEQ ID NO: 484404 - protein, 15 aa, Homo sapiens
  CDR3 for beta chain variable domain of TCR clone 242202 (TRBV20-1, TRBJ2-7)
CGARDRVSGMDEQYF

SEQ ID NO: 484405 - protein, 16 aa, Homo sapiens
  CDR3 for alpha chain variable domain of TCR clone 242203 (TRAV4, TRAJ22)
CLVGDIYSGSARQLTF

SEQ ID NO: 484406 - protein, 16 aa, Homo sapiens
  CDR3 for beta chain variable domain of TCR clone 242203 (TRBV18, TRBJ2-1)
CASSPRLAGGGDEQFF

SEQ ID NO: 484407 - protein, 16 aa, Homo sapiens
  CDR3 for alpha chain variable domain of TCR clone 242204 (TRAV3, TRAJ37)
CAVRGKGSGNTGKLIF

SEQ ID NO: 484408 - protein, 15 aa, Homo sapiens
  CDR3 for beta chain variable domain of TCR clone 242204 (TRBV7-9, TRBJ1-6)
CASSSPGRGNSTLDF

SEQ ID NO: 484409 - protein, 14 aa, Homo sapiens
  CDR3 for alpha chain variable domain of TCR clone 242205 (TRAV23/DV6, TRAJ6)
CAASRSGGSYTPTF

SEQ ID NO: 484410 - protein, 17 aa, Homo sapiens
  CDR3 for beta chain variable domain of TCR clone 242205 (TRBV20-1, TRBJ2-1)
CSASASGLAGSYNEQFF

SEQ ID NO: 484411 - protein, 12 aa, Homo sapiens
  CDR3 for alpha chain variable domain of TCR clone 242206 (TRAV2, TRAJ37)
CAVTMNTGKLIF

SEQ ID NO: 484412 - protein, 13 aa, Homo sapiens
  CDR3 for beta chain variable domain of TCR clone 242206 (TRBV20-1, TRBJ2-5)
CSAREAFQETQYF

SEQ ID NO: 484413 - protein, 16 aa, Homo sapiens
  CDR3 for alpha chain variable domain of TCR clone 242207 (TRAV3, TRAJ18)
CAVRDGRGSTLGRLYF

SEQ ID NO: 484414 - protein, 15 aa, Homo sapiens
  CDR3 for beta chain variable domain of TCR clone 242207 (TRBV7-9, TRBJ1-6)
CASSSPGRGNSPLNF

SEQ ID NO: 484415 - protein, 10 aa, Homo sapiens
  CDR3 for alpha chain variable domain of TCR clone 242208 (TRAV3, TRAJ30)
CAVREIEIIF

SEQ ID NO: 484416 - protein, 16 aa, Homo sapiens
  CDR3 for beta chain variable domain of TCR clone 242208 (TRBV4-2, TRBJ1-1)
CASSPSPGRAAPEAFF

SEQ ID NO: 484417 - protein, 16 aa, Homo sapiens
  CDR3 for alpha chain variable domain of TCR clone 242209 (TRAV3, TRAJ10)
CAARDMRAGGGNKLTF

SEQ ID NO: 484418 - protein, 16 aa, Homo sapiens
  CDR3 for beta chain variable domain of TCR clone 242209 (TRBV7-9, TRBJ1-2)
CASSLGFSSGEDGYTF

SEQ ID NO: 484419 - protein, 12 aa, Homo sapiens
  CDR3 for alpha chain variable domain of TCR clone 242210 (TRAV8-3, TRAJ26)
CAGDNYGQNFVF

SEQ ID NO: 484420 - protein, 18 aa, Homo sapiens
  CDR3 for beta chain variable domain of TCR clone 242210 (TRBV12-4, TRBJ2-2)
CASSLVAGTRGRTGELFF

SEQ ID NO: 484421 - protein, 15 aa, Homo sapiens
  CDR3 for alpha chain variable domain of TCR clone 242211 (TRAV2, TRAJ37)
CAVGDGSSNAGKLIF

SEQ ID NO: 484422 - protein, 13 aa, Homo sapiens
  CDR3 for beta chain variable domain of TCR clone 242211 (TRBV20-1, TRBJ2-7)
CSAQTGLSYEQYF

SEQ ID NO: 484423 - protein, 14 aa, Homo sapiens
  CDR3 for alpha chain variable domain of TCR clone 242212 (TRAV8-4, TRAJ16)
CAVSPVGRWPEAAL

SEQ ID NO: 484424 - protein, 13 aa, Homo sapiens
  CDR3 for beta chain variable domain of TCR clone 242212 (TRBV7-2, TRBJ2-7)
CASSSPSGSEQYF

SEQ ID NO: 484425 - protein, 14 aa, Homo sapiens
  CDR3 for alpha chain variable domain of TCR clone 242213 (TRAV2, TRAJ9)
CAVEDRSGGFKTIF

SEQ ID NO: 484426 - protein, 17 aa, Homo sapiens
  CDR3 for beta chain variable domain of TCR clone 242213 (TRBV20-1, TRBJ2-7)
CSATRAGGVSGVEEQYF

SEQ ID NO: 484427 - protein, 13 aa, Homo sapiens
  CDR3 for alpha chain variable domain of TCR clone 242214 (TRAV1-2, TRAJ9)
CAALHTGGFNTIF

SEQ ID NO: 484428 - protein, 13 aa, Homo sapiens
  CDR3 for beta chain variable domain of TCR clone 242214 (TRBV19, TRBJ1-2)
CASSVPGQDGYAF

SEQ ID NO: 484429 - protein, 12 aa, Homo sapiens
  CDR3 for alpha chain variable domain of TCR clone 242215 (TRAV21, TRAJ11)
CAATSGYSTLTF

SEQ ID NO: 484430 - protein, 14 aa, Homo sapiens
  CDR3 for beta chain variable domain of TCR clone 242215 (TRBV20-1, TRBJ2-7)
SAVPELAGVGEQYF

SEQ ID NO: 484431 - protein, 12 aa, Homo sapiens
  CDR3 for alpha chain variable domain of TCR clone 242216 (TRAV17, TRAJ30)
CATDARDDKIIF

SEQ ID NO: 484432 - protein, 15 aa, Homo sapiens
  CDR3 for beta chain variable domain of TCR clone 242216 (TRBV4-1, TRBJ2-1)
CASSQGGELYNEQVF

SEQ ID NO: 484433 - protein, 11 aa, Homo sapiens
  CDR3 for alpha chain variable domain of TCR clone 242217 (TRAV21, TRAJ34)
CAHYNTDKLIF

SEQ ID NO: 484434 - protein, 13 aa, Homo sapiens
  CDR3 for beta chain variable domain of TCR clone 242217 (TRBV7-6, TRBJ1-2)
CASNLVADYGYTF

SEQ ID NO: 484435 - protein, 18 aa, Homo sapiens
  CDR3 for alpha chain variable domain of TCR clone 242218 (TRAV29/DV5, TRAJ52)
CAAGFRGAGGTSYGKPPF

SEQ ID NO: 484436 - protein, 16 aa, Homo sapiens
  CDR3 for beta chain variable domain of TCR clone 242218 (TRBV7-3, TRBJ2-2)
CASSLKRGTLSGELFF

SEQ ID NO: 484437 - protein, 14 aa, Homo sapiens
  CDR3 for alpha chain variable domain of TCR clone 242219 (TRAV27, TRAJ52)
CAGAGGTSYGKLTF

SEQ ID NO: 484438 - protein, 15 aa, Homo sapiens
  CDR3 for beta chain variable domain of TCR clone 242219 (TRBV11-3, TRBJ2-3)
CASLKDGREGDTQYF

SEQ ID NO: 484439 - protein, 14 aa, Homo sapiens
  CDR3 for alpha chain variable domain of TCR clone 242220 (TRAV12-3, TRAJ10)
SHLPLTGGGNKLTF

SEQ ID NO: 484440 - protein, 15 aa, Homo sapiens
  CDR3 for beta chain variable domain of TCR clone 242220 (TRBV11-2, TRBJ1-3)
CASSLDGTVGKTIYF

SEQ ID NO: 484441 - protein, 14 aa, Homo sapiens
  CDR3 for alpha chain variable domain of TCR clone 242221 (TRAV8-1, TRAJ39)
CAVNASDAGNMLTF

SEQ ID NO: 484442 - protein, 13 aa, Homo sapiens
  CDR3 for beta chain variable domain of TCR clone 242221 (TRBV12-4, TRBJ2-5)
CASSPGTEETQYF

SEQ ID NO: 484443 - protein, 15 aa, Homo sapiens
  CDR3 for alpha chain variable domain of TCR clone 242222 (TRAV3, TRAJ22)
CAVRDRGGSARPLTF

SEQ ID NO: 484444 - protein, 12 aa, Homo sapiens
  CDR3 for beta chain variable domain of TCR clone 242222 (TRBV11-3, TRBJ1-4)
CASSSGSPGLFF

SEQ ID NO: 484445 - protein, 13 aa, Homo sapiens
  CDR3 for alpha chain variable domain of TCR clone 242223 (TRAV12-2, TRAJ42)
CAVKRGSRGNLIF

SEQ ID NO: 484446 - protein, 12 aa, Homo sapiens
  CDR3 for beta chain variable domain of TCR clone 242223 (TRBV5-7, TRBJ1-2)
CSSSLVQNGYTF

SEQ ID NO: 484447 - protein, 15 aa, Homo sapiens
  CDR3 for alpha chain variable domain of TCR clone 242224 (TRAV16, TRAJ17)
CALSGNKAAGNKLTF

SEQ ID NO: 484448 - protein, 16 aa, Homo sapiens
  CDR3 for beta chain variable domain of TCR clone 242224 (TRBV7-6, TRBJ1-6)
CASSALPAGEYSPLHF

SEQ ID NO: 484449 - protein, 15 aa, Homo sapiens
  CDR3 for alpha chain variable domain of TCR clone 242225 (TRAV21, TRAJ32)
CAVNSYGGATNKLIF

SEQ ID NO: 484450 - protein, 13 aa, Homo sapiens
  CDR3 for beta chain variable domain of TCR clone 242225 (TRBV19, TRBJ1-2)
CASSVPGQDGYTF

SEQ ID NO: 484451 - protein, 13 aa, Homo sapiens
  CDR3 for alpha chain variable domain of TCR clone 242226 (TRAV21, TRAJ34)
CAVSEWDTDKLIF

SEQ ID NO: 484452 - protein, 17 aa, Homo sapiens
  CDR3 for beta chain variable domain of TCR clone 242226 (TRBV20-1, TRBJ1-5)
CSARDPSAQGFNQPQHF

SEQ ID NO: 484453 - protein, 16 aa, Homo sapiens
  CDR3 for alpha chain variable domain of TCR clone 242227 (TRAV1-2, TRAJ16)
CAVNRFQMARSCSLQG

SEQ ID NO: 484454 - protein, 15 aa, Homo sapiens
  CDR3 for beta chain variable domain of TCR clone 242227 (TRBV20-1, TRBJ2-7)
CSARDRVSGMDEQYF

SEQ ID NO: 484455 - protein, 14 aa, Homo sapiens
  CDR3 for alpha chain variable domain of TCR clone 242228 (TRAV23/DV6, TRAJ40)
CAARLTSGTYKYIF

SEQ ID NO: 484456 - protein, 14 aa, Homo sapiens
  CDR3 for beta chain variable domain of TCR clone 242228 (TRBV5-1, TRBJ2-3)
CASSRGQGGGTQYF

SEQ ID NO: 484457 - protein, 14 aa, Homo sapiens
  CDR3 for alpha chain variable domain of TCR clone 242229 (TRAV35, TRAJ13)
CAGRSPGGYPKVTF

SEQ ID NO: 484458 - protein, 14 aa, Homo sapiens
  CDR3 for beta chain variable domain of TCR clone 242229 (TRBV19, TRBJ2-2)
CASSMVGLSGELFF

SEQ ID NO: 484459 - protein, 15 aa, Homo sapiens
  CDR3 for alpha chain variable domain of TCR clone 242230 (TRAV1-2, TRAJ10)
CAVRGFTGGGNKLTF

SEQ ID NO: 484460 - protein, 15 aa, Homo sapiens
  CDR3 for beta chain variable domain of TCR clone 242230 (TRBV2, TRBJ2-1)
CASSEEREGDNEQFF

SEQ ID NO: 484461 - protein, 14 aa, Homo sapiens
  CDR3 for alpha chain variable domain of TCR clone 242231 (TRAV16, TRAJ54)
CALSGVQGAQKLVF

SEQ ID NO: 484462 - protein, 15 aa, Homo sapiens
  CDR3 for beta chain variable domain of TCR clone 242231 (TRBV18, TRBJ2-2)
CASPTSGLHTGELFF

SEQ ID NO: 484463 - protein, 11 aa, Homo sapiens
  CDR3 for alpha chain variable domain of TCR clone 242232 (TRAV21, TRAJ34)
CAVTNTDKLIF

SEQ ID NO: 484464 - protein, 13 aa, Homo sapiens
  CDR3 for beta chain variable domain of TCR clone 242232 (TRBV7-2, TRBJ2-7)
CASSSPSGSEQYF

SEQ ID NO: 484465 - protein, 16 aa, Homo sapiens
  CDR3 for alpha chain variable domain of TCR clone 242233 (TRAV26-1, TRAJ56)
CIVRAGERGANSKLTF

SEQ ID NO: 484466 - protein, 13 aa, Homo sapiens
  CDR3 for beta chain variable domain of TCR clone 242233 (TRBV7-2, TRBJ1-1)
CASSLRANTEAFF

SEQ ID NO: 484467 - protein, 16 aa, Homo sapiens
  CDR3 for alpha chain variable domain of TCR clone 242234 (TRAV3, TRAJ37)
CAVRGKGSGNTGKLIF

SEQ ID NO: 484468 - protein, 15 aa, Homo sapiens
  CDR3 for beta chain variable domain of TCR clone 242234 (TRBV12-4, TRBJ2-5)
CASSGTGQAQETQYF

SEQ ID NO: 484469 - protein, 12 aa, Homo sapiens
  CDR3 for alpha chain variable domain of TCR clone 242235 (TRAV21, TRAJ9)
CAVRLGGFKTVF

SEQ ID NO: 484470 - protein, 16 aa, Homo sapiens
  CDR3 for beta chain variable domain of TCR clone 242235 (TRBV12-5, TRBJ2-5)
CASGPRTSGNQETQYF

SEQ ID NO: 484471 - protein, 13 aa, Homo sapiens
  CDR3 for alpha chain variable domain of TCR clone 242236 (TRAV13-2, TRAJ53)
CAENMGSNYKLTF

SEQ ID NO: 484472 - protein, 13 aa, Homo sapiens
  CDR3 for beta chain variable domain of TCR clone 242236 (TRBV4-1, TRBJ2-2)
CASSQGNTGELFL

SEQ ID NO: 484473 - protein, 13 aa, Homo sapiens
  CDR3 for alpha chain variable domain of TCR clone 242237 (TRAV8-2, TRAJ22)
CVVSEGSARQLTF

SEQ ID NO: 484474 - protein, 14 aa, Homo sapiens
  CDR3 for beta chain variable domain of TCR clone 242237 (TRBV28, TRBJ1-1)
CASSESGRGTEAFF

SEQ ID NO: 484475 - protein, 14 aa, Homo sapiens
  CDR3 for alpha chain variable domain of TCR clone 242238 (TRAV1-2, TRAJ8)
CAVREDTGFQKLVF

SEQ ID NO: 484476 - protein, 19 aa, Homo sapiens
  CDR3 for beta chain variable domain of TCR clone 242238 (TRBV19, TRBJ2-5)
CASSIGQVTDFLLGETQYF

SEQ ID NO: 484477 - protein, 15 aa, Homo sapiens
  CDR3 for alpha chain variable domain of TCR clone 242239 (TRAV8-1, TRAJ42)
CAVRSDGGSQGNLIF

SEQ ID NO: 484478 - protein, 21 aa, Homo sapiens
  CDR3 for beta chain variable domain of TCR clone 242239 (TRBV5-1, TRBJ1-6)
CASSPRGGADSTGGVRSPLHF

SEQ ID NO: 484479 - protein, 17 aa, Homo sapiens
  CDR3 for alpha chain variable domain of TCR clone 242240 (TRAV17, TRAJ52)
CATDANAGGTSYGKLTF

SEQ ID NO: 484480 - protein, 15 aa, Homo sapiens
  CDR3 for beta chain variable domain of TCR clone 242240 (TRBV5-1, TRBJ2-2)
CASSSQGGNTGELFF

SEQ ID NO: 484481 - protein, 13 aa, Homo sapiens
  CDR3 for alpha chain variable domain of TCR clone 242241 (TRAV12-2, TRAJ42)
CAVKRGSQGNLIF

SEQ ID NO: 484482 - protein, 13 aa, Homo sapiens
  CDR3 for beta chain variable domain of TCR clone 242241 (TRBV7-8, TRBJ2-7)
RRVRLTEMGEQYF

SEQ ID NO: 484483 - protein, 15 aa, Homo sapiens
  CDR3 for alpha chain variable domain of TCR clone 242242 (TRAV21, TRAJ13)
CAVPRPSGGYQKVTF

SEQ ID NO: 484484 - protein, 14 aa, Homo sapiens
  CDR3 for beta chain variable domain of TCR clone 242242 (TRBV20-1, TRBJ2-7)
CSAKDRKGAYEQYF

SEQ ID NO: 484485 - protein, 14 aa, Homo sapiens
  CDR3 for alpha chain variable domain of TCR clone 242243 (TRAV1-2, TRAJ16)
CAVNRFSGGQKLLF

SEQ ID NO: 484486 - protein, 16 aa, Homo sapiens
  CDR3 for beta chain variable domain of TCR clone 242243 (TRBV9, TRBJ2-1)
CASSVGGGGNYNEQFL

SEQ ID NO: 484487 - protein, 14 aa, Homo sapiens
  CDR3 for alpha chain variable domain of TCR clone 242244 (TRAV12-2, TRAJ44)
CAVNPAGTASKLTF

SEQ ID NO: 484488 - protein, 19 aa, Homo sapiens
  CDR3 for beta chain variable domain of TCR clone 242244 (TRBV19, TRBJ2-5)
CASSIGQVTDLFLGETQYF

SEQ ID NO: 484489 - protein, 11 aa, Homo sapiens
  CDR3 for alpha chain variable domain of TCR clone 242245 (TRAV12-1, TRAJ16)
CGDPDGQKLLF

SEQ ID NO: 484490 - protein, 11 aa, Homo sapiens
  CDR3 for beta chain variable domain of TCR clone 242245 (TRBV29-1, TRBJ2-5)
CSEDRTGTEYF

SEQ ID NO: 484491 - protein, 12 aa, Homo sapiens
  CDR3 for alpha chain variable domain of TCR clone 242246 (TRAV12-3, TRAJ17)
CAMTLTGNKLTF

SEQ ID NO: 484492 - protein, 13 aa, Homo sapiens
  CDR3 for beta chain variable domain of TCR clone 242246 (TRBV20-1, TRBJ2-7)
CSASPPSSYEQYF

SEQ ID NO: 484493 - protein, 11 aa, Homo sapiens
  CDR3 for alpha chain variable domain of TCR clone 242247 (TRAV3, TRAJ21)
CAVGNFNKFYF

SEQ ID NO: 484494 - protein, 13 aa, Homo sapiens
  CDR3 for beta chain variable domain of TCR clone 242247 (TRBV23-1, TRBJ1-4)
CASRGKFNEKLFF

SEQ ID NO: 484495 - protein, 13 aa, Homo sapiens
  CDR3 for alpha chain variable domain of TCR clone 242248 (TRAV16, TRAJ54)
CALMVQGDQKLVF

SEQ ID NO: 484496 - protein, 12 aa, Homo sapiens
  CDR3 for beta chain variable domain of TCR clone 242248 (TRBV18, TRBJ2-7)
CASSTAMGEQYF

SEQ ID NO: 484497 - protein, 16 aa, Homo sapiens
  CDR3 for alpha chain variable domain of TCR clone 242249 (TRAV26-1, TRAJ28)
CIVRPYSGAGSYQLTF

SEQ ID NO: 484498 - protein, 18 aa, Homo sapiens
  CDR3 for beta chain variable domain of TCR clone 242249 (TRBV20-1, TRBJ2-3)
CSARGWTSGRAAADTQYF

SEQ ID NO: 484499 - protein, 13 aa, Homo sapiens
  CDR3 for alpha chain variable domain of TCR clone 242250 (TRAV12-3, TRAJ46)
CAVKKSSGDKLTF

SEQ ID NO: 484500 - protein, 13 aa, Homo sapiens
  CDR3 for beta chain variable domain of TCR clone 242250 (TRBV6-1, TRBJ2-1)
CASSHDRNNVQFF

SEQ ID NO: 484501 - protein, 15 aa, Homo sapiens
  CDR3 for alpha chain variable domain of TCR clone 242251 (TRAV12-2, TRAJ20)
CAVKGGVGAGTTVTV

SEQ ID NO: 484502 - protein, 13 aa, Homo sapiens
  CDR3 for beta chain variable domain of TCR clone 242251 (TRBV12-4, TRBJ2-7)
CASSPGQLYEQYF

SEQ ID NO: 484503 - protein, 19 aa, Homo sapiens
  CDR3 for alpha chain variable domain of TCR clone 242252 (TRAV26-2, TRAJ52)
CILRTGFNAGGTSYGKLTF

SEQ ID NO: 484504 - protein, 12 aa, Homo sapiens
  CDR3 for beta chain variable domain of TCR clone 242252 (TRBV7-9, TRBJ1-6)
CASSLMTSPLHF

SEQ ID NO: 484505 - protein, 12 aa, Homo sapiens
  CDR3 for alpha chain variable domain of TCR clone 242253 (TRAV12-3, TRAJ4)
CAMTGAGTRLAV

SEQ ID NO: 484506 - protein, 20 aa, Homo sapiens
  CDR3 for beta chain variable domain of TCR clone 242253 (TRBV28, TRBJ2-1)
CASTPIGRSPGLAGGNEQFF

SEQ ID NO: 484507 - protein, 15 aa, Homo sapiens
  CDR3 for alpha chain variable domain of TCR clone 242254 (TRAV3, TRAJ36)
CAVRASQTGANNLFF

SEQ ID NO: 484508 - protein, 17 aa, Homo sapiens
  CDR3 for beta chain variable domain of TCR clone 242254 (TRBV20-1, TRBJ2-2)
CSASGSGQGGLTGELFF

SEQ ID NO: 484509 - protein, 12 aa, Homo sapiens
  CDR3 for alpha chain variable domain of TCR clone 242255 (TRAV21, TRAJ29)
CSVTSGNTHLVF

SEQ ID NO: 484510 - protein, 13 aa, Homo sapiens
  CDR3 for beta chain variable domain of TCR clone 242255 (TRBV4-2, TRBJ1-1)
CASSQAGNTEAFF

SEQ ID NO: 484511 - protein, 16 aa, Homo sapiens
  CDR3 for alpha chain variable domain of TCR clone 242256 (TRAV8-3, TRAJ42)
CAVGEGNGGSQGKLIF

SEQ ID NO: 484512 - protein, 14 aa, Homo sapiens
  CDR3 for beta chain variable domain of TCR clone 242256 (TRBV7-2, TRBJ2-1)
CASSRGGARNEQFF

SEQ ID NO: 484513 - protein, 11 aa, Homo sapiens
  CDR3 for alpha chain variable domain of TCR clone 242257 (TRAV21, TRAJ20)
CCRVNDYKLSF

SEQ ID NO: 484514 - protein, 15 aa, Homo sapiens
  CDR3 for beta chain variable domain of TCR clone 242257 (TRBV2, TRBJ2-2)
CASSRQAPNTGELFF

SEQ ID NO: 484515 - protein, 14 aa, Homo sapiens
  CDR3 for alpha chain variable domain of TCR clone 242258 (TRAV1-1, TRAJ27)
CAVIYNTNAGKSTF

SEQ ID NO: 484516 - protein, 15 aa, Homo sapiens
  CDR3 for beta chain variable domain of TCR clone 242258 (TRBV28, TRBJ2-5)
CASSSGRTIQETQYF

SEQ ID NO: 484517 - protein, 15 aa, Homo sapiens
  CDR3 for alpha chain variable domain of TCR clone 242259 (TRAV20, TRAJ53)
CAVQASGGSNYKLTF

SEQ ID NO: 484518 - protein, 12 aa, Homo sapiens
  CDR3 for beta chain variable domain of TCR clone 242259 (TRBV7-6, TRBJ2-5)
CASSLSQGTQYF

SEQ ID NO: 484519 - protein, 14 aa, Homo sapiens
  CDR3 for alpha chain variable domain of TCR clone 242260 (TRAV17, TRAJ56)
CATVPAGANSKLTF

SEQ ID NO: 484520 - protein, 15 aa, Homo sapiens
  CDR3 for beta chain variable domain of TCR clone 242260 (TRBV19, TRBJ2-7)
CASSPAGSGEALRYF

SEQ ID NO: 484521 - protein, 14 aa, Homo sapiens
  CDR3 for alpha chain variable domain of TCR clone 242261 (TRAV26-1, TRAJ45)
CIEVTGGGADGLTF

SEQ ID NO: 484522 - protein, 16 aa, Homo sapiens
  CDR3 for beta chain variable domain of TCR clone 242261 (TRBV19, TRBJ2-2)
CASRSPGTGATGELFF

SEQ ID NO: 484523 - protein, 13 aa, Homo sapiens
  CDR3 for alpha chain variable domain of TCR clone 242262 (TRAV12-1, TRAJ20)
CVVNRETDDKLSF

SEQ ID NO: 484524 - protein, 15 aa, Homo sapiens
  CDR3 for beta chain variable domain of TCR clone 242262 (TRBV14, TRBJ2-1)
CASSLGLAGGTEQFF

SEQ ID NO: 484525 - protein, 23 aa, Homo sapiens
  CDR3 for alpha chain variable domain of TCR clone 242263 (TRAV34, TRAJ42)
PAVQASTSVEQTRYGGSQGNLIF

SEQ ID NO: 484526 - protein, 13 aa, Homo sapiens
  CDR3 for beta chain variable domain of TCR clone 242263 (TRBV24-1, TRBJ2-1)
CATSAGPYNEQFF

SEQ ID NO: 484527 - protein, 15 aa, Homo sapiens
  CDR3 for alpha chain variable domain of TCR clone 242264 (TRAV25, TRAJ53)
CPTSNSGGSNYKLTF

SEQ ID NO: 484528 - protein, 15 aa, Homo sapiens
  CDR3 for beta chain variable domain of TCR clone 242264 (TRBV7-2, TRBJ2-1)
CASSSGLAGGNEQFF

SEQ ID NO: 484529 - protein, 11 aa, Homo sapiens
  CDR3 for alpha chain variable domain of TCR clone 242265 (TRAV3, TRAJ21)
RAVGNFNKFYF

SEQ ID NO: 484530 - protein, 16 aa, Homo sapiens
  CDR3 for beta chain variable domain of TCR clone 242265 (TRBV19, TRBJ2-1)
CASSKAGPSSYNEPFF

SEQ ID NO: 484531 - protein, 12 aa, Homo sapiens
  CDR3 for alpha chain variable domain of TCR clone 242266 (TRAV3, TRAJ26)
CAVRDYGQNFFF

SEQ ID NO: 484532 - protein, 16 aa, Homo sapiens
  CDR3 for beta chain variable domain of TCR clone 242266 (TRBV11-2, TRBJ1-2)
CASSPSGREANYGYTF

SEQ ID NO: 484533 - protein, 12 aa, Homo sapiens
  CDR3 for alpha chain variable domain of TCR clone 242267 (TRAV12-3, TRAJ40)
CAMSSGTYKYIF

SEQ ID NO: 484534 - protein, 15 aa, Homo sapiens
  CDR3 for beta chain variable domain of TCR clone 242267 (TRBV7-3, TRBJ2-1)
CASSLGQGPFGEQFF

SEQ ID NO: 484535 - protein, 18 aa, Homo sapiens
  CDR3 for alpha chain variable domain of TCR clone 242268 (TRAV21, TRAJ52)
CAVRPSPAGGTSYGKLTF

SEQ ID NO: 484536 - protein, 19 aa, Homo sapiens
  CDR3 for beta chain variable domain of TCR clone 242268 (TRBV19, TRBJ2-5)
CASTPFSTSGSFAQETQYF

SEQ ID NO: 484537 - protein, 13 aa, Homo sapiens
  CDR3 for alpha chain variable domain of TCR clone 242269 (TRAV1-2, TRAJ9)
CSALNTGGFKTIF

SEQ ID NO: 484538 - protein, 13 aa, Homo sapiens
  CDR3 for beta chain variable domain of TCR clone 242269 (TRBV7-9, TRBJ1-2)
CASSLKQNYGYTF

SEQ ID NO: 484539 - protein, 14 aa, Homo sapiens
  CDR3 for alpha chain variable domain of TCR clone 242270 (TRAV12-2, TRAJ40)
CAVKIPSGTYKYIF

SEQ ID NO: 484540 - protein, 14 aa, Homo sapiens
  CDR3 for beta chain variable domain of TCR clone 242270 (TRBV6-1, TRBJ1-3)
CASVQGGGGNTMYF

SEQ ID NO: 484541 - protein, 13 aa, Homo sapiens
  CDR3 for alpha chain variable domain of TCR clone 242271 (TRAV8-6, TRAJ33)
CAVSEGSNYQLIW

SEQ ID NO: 484542 - protein, 13 aa, Homo sapiens
  CDR3 for beta chain variable domain of TCR clone 242271 (TRBV12-4, TRBJ2-5)
CASSLGGSRTQYF

SEQ ID NO: 484543 - protein, 23 aa, Homo sapiens
  CDR3 for alpha chain variable domain of TCR clone 242272 (TRAV8-1, TRAJ37)
NLRKPSVQWSDTAEYSGRGKLIF

SEQ ID NO: 484544 - protein, 16 aa, Homo sapiens
  CDR3 for beta chain variable domain of TCR clone 242272 (TRBV7-3, TRBJ2-2)
CASSLKRGTLSGELFF

SEQ ID NO: 484545 - protein, 14 aa, Homo sapiens
  CDR3 for alpha chain variable domain of TCR clone 242273 (TRAV13-1, TRAJ35)
CAASKGGLGNVLHF

SEQ ID NO: 484546 - protein, 11 aa, Homo sapiens
  CDR3 for beta chain variable domain of TCR clone 242273 (TRBV12-4, TRBJ2-3)
CASTATDTQYF

SEQ ID NO: 484547 - protein, 16 aa, Homo sapiens
  CDR3 for alpha chain variable domain of TCR clone 242274 (TRAV14/DV4, TRAJ54)
CAMREGRIQGAQKLVF

SEQ ID NO: 484548 - protein, 13 aa, Homo sapiens
  CDR3 for beta chain variable domain of TCR clone 242274 (TRBV12-4, TRBJ2-7)
CASSFVRGYEQYF

SEQ ID NO: 484549 - protein, 15 aa, Homo sapiens
  CDR3 for alpha chain variable domain of TCR clone 242275 (TRAV3, TRAJ10)
CAVRDGTGGGNKLTF

SEQ ID NO: 484550 - protein, 15 aa, Homo sapiens
  CDR3 for beta chain variable domain of TCR clone 242275 (TRBV4-2, TRBJ1-4)
CASSLVQREVETLFF

SEQ ID NO: 484551 - protein, 17 aa, Homo sapiens
  CDR3 for alpha chain variable domain of TCR clone 242276 (TRAV26-1, TRAJ21)
CVAKGKFYFGSGTKLNV

SEQ ID NO: 484552 - protein, 15 aa, Homo sapiens
  CDR3 for beta chain variable domain of TCR clone 242276 (TRBV7-8, TRBJ2-1)
CASGSGLAGGNEQFF

SEQ ID NO: 484553 - protein, 15 aa, Homo sapiens
  CDR3 for alpha chain variable domain of TCR clone 242277 (TRAV26-1, TRAJ15)
CIVRAANQAGTALIF

SEQ ID NO: 484554 - protein, 15 aa, Homo sapiens
  CDR3 for beta chain variable domain of TCR clone 242277 (TRBV20-1, TRBJ1-1)
CSAGSAATANTEAFF

SEQ ID NO: 484555 - protein, 17 aa, Homo sapiens
  CDR3 for alpha chain variable domain of TCR clone 242278 (TRAV3, TRAJ38)
CAVSDCLNAGNNRKLIW

SEQ ID NO: 484556 - protein, 16 aa, Homo sapiens
  CDR3 for beta chain variable domain of TCR clone 242278 (TRBV6-1, TRBJ2-3)
CASSEVIGQGTDTQYF

SEQ ID NO: 484557 - protein, 12 aa, Homo sapiens
  CDR3 for alpha chain variable domain of TCR clone 242279 (TRAV13-2, TRAJ23)
RAERHRGGKLIF

SEQ ID NO: 484558 - protein, 19 aa, Homo sapiens
  CDR3 for beta chain variable domain of TCR clone 242279 (TRBV19, TRBJ2-5)
CASSIGQVTDLFLGETQYF

SEQ ID NO: 484559 - protein, 14 aa, Homo sapiens
  CDR3 for alpha chain variable domain of TCR clone 242280 (TRAV16, TRAJ42)
CALLAGGSKGNLIF

SEQ ID NO: 484560 - protein, 13 aa, Homo sapiens
  CDR3 for beta chain variable domain of TCR clone 242280 (TRBV7-9, TRBJ1-2)
CASSLKQNYGYTF

SEQ ID NO: 484561 - protein, 15 aa, Homo sapiens
  CDR3 for alpha chain variable domain of TCR clone 242281 (TRAV19, TRAJ9)
CALSEARTVGFKTIF

SEQ ID NO: 484562 - protein, 17 aa, Homo sapiens
  CDR3 for beta chain variable domain of TCR clone 242281 (TRBV28, TRBJ2-5)
CASSTPEGDALQETQYF

SEQ ID NO: 484563 - protein, 17 aa, Homo sapiens
  CDR3 for alpha chain variable domain of TCR clone 242282 (TRAV3, TRAJ12)
CAVRDGGRLDSSYKLIF

SEQ ID NO: 484564 - protein, 13 aa, Homo sapiens
  CDR3 for beta chain variable domain of TCR clone 242282 (TRBV4-2, TRBJ1-1)
CASSQAGNTEAVF

SEQ ID NO: 484565 - protein, 14 aa, Homo sapiens
  CDR3 for alpha chain variable domain of TCR clone 242283 (TRAV16, TRAJ33)
CALSAMDSNSQLIW

SEQ ID NO: 484566 - protein, 16 aa, Homo sapiens
  CDR3 for beta chain variable domain of TCR clone 242283 (TRBV25-1, TRBJ2-7)
CASSELTGGGIYEQYF

SEQ ID NO: 484567 - protein, 14 aa, Homo sapiens
  CDR3 for alpha chain variable domain of TCR clone 242284 (TRAV35, TRAJ42)
CAGRYGGSQGNLIF

SEQ ID NO: 484568 - protein, 23 aa, Homo sapiens
  CDR3 for beta chain variable domain of TCR clone 242284 (TRBV7-9, TRBJ2-7)
RGTRPCISVPAAKLAGGTYEQYF

SEQ ID NO: 484569 - protein, 14 aa, Homo sapiens
  CDR3 for alpha chain variable domain of TCR clone 242285 (TRAV12-3, TRAJ9)
CAMSPNTGGSKNIF

SEQ ID NO: 484570 - protein, 12 aa, Homo sapiens
  CDR3 for beta chain variable domain of TCR clone 242285 (TRBV11-2, TRBJ2-2)
CASSLGGGELFF

SEQ ID NO: 484571 - protein, 12 aa, Homo sapiens
  CDR3 for alpha chain variable domain of TCR clone 242286 (TRAV2, TRAJ33)
CAFMDSNYQLIW

SEQ ID NO: 484572 - protein, 16 aa, Homo sapiens
  CDR3 for beta chain variable domain of TCR clone 242286 (TRBV2, TRBJ2-7)
CASSEPWTGPSYEQNF

SEQ ID NO: 484573 - protein, 14 aa, Homo sapiens
  CDR3 for alpha chain variable domain of TCR clone 242287 (TRAV12-2, TRAJ13)
CAVKKTGGYQKVTF

SEQ ID NO: 484574 - protein, 15 aa, Homo sapiens
  CDR3 for beta chain variable domain of TCR clone 242287 (TRBV7-2, TRBJ2-7)
CASSLSSGRTYEQYF

SEQ ID NO: 484575 - protein, 11 aa, Homo sapiens
  CDR3 for alpha chain variable domain of TCR clone 242288 (TRAV12-3, TRAJ43)
CAMSVSNDMRF

SEQ ID NO: 484576 - protein, 12 aa, Homo sapiens
  CDR3 for beta chain variable domain of TCR clone 242288 (TRBV20-1, TRBJ1-1)
QCSTWGGTEASF

SEQ ID NO: 484577 - protein, 13 aa, Homo sapiens
  CDR3 for alpha chain variable domain of TCR clone 242289 (TRAV13-2, TRAJ13)
CAERPVGYQKVTF

SEQ ID NO: 484578 - protein, 15 aa, Homo sapiens
  CDR3 for beta chain variable domain of TCR clone 242289 (TRBV4-1, TRBJ1-4)
CASSDTGGTNEKLFF

SEQ ID NO: 484579 - protein, 15 aa, Homo sapiens
  CDR3 for alpha chain variable domain of TCR clone 242290 (TRAV3, TRAJ4)
CAVRYGTGGYNKLIF

SEQ ID NO: 484580 - protein, 13 aa, Homo sapiens
  CDR3 for beta chain variable domain of TCR clone 242290 (TRBV12-5, TRBJ1-2)
CASGVRTGNGYTF

SEQ ID NO: 484581 - protein, 12 aa, Homo sapiens
  CDR3 for alpha chain variable domain of TCR clone 242291 (TRAV13-1, TRAJ9)
CASPTGGFKTIF

SEQ ID NO: 484582 - protein, 18 aa, Homo sapiens
  CDR3 for beta chain variable domain of TCR clone 242291 (TRBV11-2, TRBJ2-3)
CASSVGGASRGAPNTQYF

SEQ ID NO: 484583 - protein, 17 aa, Homo sapiens
  CDR3 for alpha chain variable domain of TCR clone 242292 (TRAV26-1, TRAJ53)
CIVSVDDSGGSNYKLTF

SEQ ID NO: 484584 - protein, 15 aa, Homo sapiens
  CDR3 for beta chain variable domain of TCR clone 242292 (TRBV7-9, TRBJ1-4)
CASSRTGGFNEKLFF

SEQ ID NO: 484585 - protein, 14 aa, Homo sapiens
  CDR3 for alpha chain variable domain of TCR clone 242293 (TRAV8-4, TRAJ34)
CAVSDPGDTDKLIF

SEQ ID NO: 484586 - protein, 15 aa, Homo sapiens
  CDR3 for beta chain variable domain of TCR clone 242293 (TRBV6-6, TRBJ1-1)
CASSPRGDVETEASF

SEQ ID NO: 484587 - protein, 15 aa, Homo sapiens
  CDR3 for alpha chain variable domain of TCR clone 242294 (TRAV26-1, TRAJ29)
CIVRVEGSGNTPLVF

SEQ ID NO: 484588 - protein, 15 aa, Homo sapiens
  CDR3 for beta chain variable domain of TCR clone 242294 (TRBV7-9, TRBJ1-5)
CASSQGHQNNQPQHF

SEQ ID NO: 484589 - protein, 16 aa, Homo sapiens
  CDR3 for alpha chain variable domain of TCR clone 242295 (TRAV23/DV6, TRAJ9)
CAASIGGNTGGFKTIF

SEQ ID NO: 484590 - protein, 14 aa, Homo sapiens
  CDR3 for beta chain variable domain of TCR clone 242295 (TRBV6-1, TRBJ1-3)
CGSVQGGGGNTIYF

SEQ ID NO: 484591 - protein, 19 aa, Homo sapiens
  CDR3 for alpha chain variable domain of TCR clone 242296 (TRAV17, TRAJ40)
TASRASDTASYFCASKYIF

SEQ ID NO: 484592 - protein, 17 aa, Homo sapiens
  CDR3 for beta chain variable domain of TCR clone 242296 (TRBV11-2, TRBJ2-4)
CASSFLALGGAGDIQYF

SEQ ID NO: 484593 - protein, 14 aa, Homo sapiens
  CDR3 for alpha chain variable domain of TCR clone 242297 (TRAV3, TRAJ9)
CAVRLNTGGYKTIF

SEQ ID NO: 484594 - protein, 15 aa, Homo sapiens
  CDR3 for beta chain variable domain of TCR clone 242297 (TRBV7-2, TRBJ2-1)
CASSFASGRVNEQFF

SEQ ID NO: 484595 - protein, 12 aa, Homo sapiens
  CDR3 for alpha chain variable domain of TCR clone 242298 (TRAV12-3, TRAJ34)
CAMGYNTDKLIF

SEQ ID NO: 484596 - protein, 14 aa, Homo sapiens
  CDR3 for beta chain variable domain of TCR clone 242298 (TRBV5-7, TRBJ1-5)
CARSRTGGGPPQHF

SEQ ID NO: 484597 - protein, 12 aa, Homo sapiens
  CDR3 for alpha chain variable domain of TCR clone 242299 (TRAV21, TRAJ33)
CAKMYSNYQLIW

SEQ ID NO: 484598 - protein, 15 aa, Homo sapiens
  CDR3 for beta chain variable domain of TCR clone 242299 (TRBV9, TRBJ1-6)
CASSVAGTGDSPLHF

SEQ ID NO: 484599 - protein, 10 aa, Homo sapiens
  CDR3 for alpha chain variable domain of TCR clone 242300 (TRAV23/DV6, TRAJ43)
CAAAVAALKQ

SEQ ID NO: 484600 - protein, 14 aa, Homo sapiens
  CDR3 for beta chain variable domain of TCR clone 242300 (TRBV7-9, TRBJ2-5)
CASSLVGGEETQYF

SEQ ID NO: 484601 - protein, 13 aa, Homo sapiens
  CDR3 for alpha chain variable domain of TCR clone 242301 (TRAV3, TRAJ3)
CAVRDMGKQCFQD

SEQ ID NO: 484602 - protein, 13 aa, Homo sapiens
  CDR3 for beta chain variable domain of TCR clone 242301 (TRBV7-3, TRBJ1-1)
CASSQDWGAEAFF

SEQ ID NO: 484603 - protein, 15 aa, Homo sapiens
  CDR3 for alpha chain variable domain of TCR clone 242302 (TRAV2, TRAJ15)
CAVEDREQAGTALIF

SEQ ID NO: 484604 - protein, 13 aa, Homo sapiens
  CDR3 for beta chain variable domain of TCR clone 242302 (TRBV10-2, TRBJ2-7)
CASGTSGGYERYF

SEQ ID NO: 484605 - protein, 20 aa, Homo sapiens
  CDR3 for alpha chain variable domain of TCR clone 242303 (TRAV1-1, TRAJ4)
CLLPLRCEGFLSGGYNKLIF

SEQ ID NO: 484606 - protein, 13 aa, Homo sapiens
  CDR3 for beta chain variable domain of TCR clone 242303 (TRBV5-1, TRBJ1-5)
CASSLAQDQPQHF

SEQ ID NO: 484607 - protein, 14 aa, Homo sapiens
  CDR3 for alpha chain variable domain of TCR clone 242304 (TRAV12-2, TRAJ40)
CAVKIPSGTYQYIF

SEQ ID NO: 484608 - protein, 17 aa, Homo sapiens
  CDR3 for beta chain variable domain of TCR clone 242304 (TRBV13, TRBJ2-3)
CASSLSRVAGGRNTQYF

SEQ ID NO: 484609 - protein, 15 aa, Homo sapiens
  CDR3 for alpha chain variable domain of TCR clone 242305 (TRAV3, TRAJ3)
CAGRDRDSSASKIIF

SEQ ID NO: 484610 - protein, 18 aa, Homo sapiens
  CDR3 for beta chain variable domain of TCR clone 242305 (TRBV25-1, TRBJ1-2)
CASSGLQNVQGLIFGYTF

SEQ ID NO: 484611 - protein, 14 aa, Homo sapiens
  CDR3 for alpha chain variable domain of TCR clone 242306 (TRAV35, TRAJ53)
CAGNSGGSNYKLTF

SEQ ID NO: 484612 - protein, 11 aa, Homo sapiens
  CDR3 for beta chain variable domain of TCR clone 242306 (TRBV4-1, TRBJ1-4)
CAGKENEKLFF

SEQ ID NO: 484613 - protein, 16 aa, Homo sapiens
  CDR3 for alpha chain variable domain of TCR clone 242307 (TRAV16, TRAJ4)
CALSRMFSGGYNKLIF

SEQ ID NO: 484614 - protein, 12 aa, Homo sapiens
  CDR3 for beta chain variable domain of TCR clone 242307 (TRBV5-4, TRBJ2-7)
CASSLEAYEQYF

SEQ ID NO: 484615 - protein, 13 aa, Homo sapiens
  CDR3 for alpha chain variable domain of TCR clone 242308 (TRAV1-2, TRAJ9)
CAALNTGGFKTIF

SEQ ID NO: 484616 - protein, 18 aa, Homo sapiens
  CDR3 for beta chain variable domain of TCR clone 242308 (TRBV4-1, TRBJ2-3)
CASSHQLAGGRSTDTQYF

SEQ ID NO: 484617 - protein, 14 aa, Homo sapiens
  CDR3 for alpha chain variable domain of TCR clone 242309 (TRAV2, TRAJ9)
CAVEDRRGGFKTIF

SEQ ID NO: 484618 - protein, 12 aa, Homo sapiens
  CDR3 for beta chain variable domain of TCR clone 242309 (TRBV28, TRBJ1-2)
CAGATGGRGYTF

SEQ ID NO: 484619 - protein, 13 aa, Homo sapiens
  CDR3 for alpha chain variable domain of TCR clone 242310 (TRAV2, TRAJ16)
CAVERSDGQKLLS

SEQ ID NO: 484620 - protein, 15 aa, Homo sapiens
  CDR3 for beta chain variable domain of TCR clone 242310 (TRBV20-1, TRBJ2-5)
CSAIKGQGSQETQDF

SEQ ID NO: 484621 - protein, 19 aa, Homo sapiens
  CDR3 for alpha chain variable domain of TCR clone 242311 (TRAV26-1, TRAJ22)
CCVLLHRWVFSGFARQLTF

SEQ ID NO: 484622 - protein, 12 aa, Homo sapiens
  CDR3 for beta chain variable domain of TCR clone 242311 (TRBV14, TRBJ2-5)
CASSHLKETQYF

SEQ ID NO: 484623 - protein, 14 aa, Homo sapiens
  CDR3 for alpha chain variable domain of TCR clone 242312 (TRAV8-1, TRAJ15)
CAVNGQQAGTALIF

SEQ ID NO: 484624 - protein, 15 aa, Homo sapiens
  CDR3 for beta chain variable domain of TCR clone 242312 (TRBV5-1, TRBJ2-6)
CASSLEGSGANVLTF

SEQ ID NO: 484625 - protein, 15 aa, Homo sapiens
  CDR3 for alpha chain variable domain of TCR clone 242313 (TRAV2, TRAJ15)
CAVEDRGQAGTALIL

SEQ ID NO: 484626 - protein, 13 aa, Homo sapiens
  CDR3 for beta chain variable domain of TCR clone 242313 (TRBV10-2, TRBJ2-7)
CASGASGGYEKYF

SEQ ID NO: 484627 - protein, 11 aa, Homo sapiens
  CDR3 for alpha chain variable domain of TCR clone 242314 (TRAV3, TRAJ21)
CAVGNFNKFYF

SEQ ID NO: 484628 - protein, 18 aa, Homo sapiens
  CDR3 for beta chain variable domain of TCR clone 242314 (TRBV18, TRBJ2-3)
CASSYTSGAAGGTDTQYF

SEQ ID NO: 484629 - protein, 15 aa, Homo sapiens
  CDR3 for alpha chain variable domain of TCR clone 242315 (TRAV21, TRAJ24)
CAARSSTDSWGELQF

SEQ ID NO: 484630 - protein, 15 aa, Homo sapiens
  CDR3 for beta chain variable domain of TCR clone 242315 (TRBV9, TRBJ1-6)
CASSVSGTGDSPLHF

SEQ ID NO: 484631 - protein, 13 aa, Homo sapiens
  CDR3 for alpha chain variable domain of TCR clone 242316 (TRAV17, TRAJ22)
CAGRRGSARQLTF

SEQ ID NO: 484632 - protein, 12 aa, Homo sapiens
  CDR3 for beta chain variable domain of TCR clone 242316 (TRBV11-2, TRBJ2-2)
CASSLGGGELFF

SEQ ID NO: 484633 - protein, 14 aa, Homo sapiens
  CDR3 for alpha chain variable domain of TCR clone 242317 (TRAV8-4, TRAJ34)
CAVSDPGDTDKLIF

SEQ ID NO: 484634 - protein, 13 aa, Homo sapiens
  CDR3 for beta chain variable domain of TCR clone 242317 (TRBV7-9, TRBJ2-5)
CASLSPGQETQHF

SEQ ID NO: 484635 - protein, 16 aa, Homo sapiens
  CDR3 for alpha chain variable domain of TCR clone 242318 (TRAV8-1, TRAJ42)
CAVTPRYGGSQGNLIF

SEQ ID NO: 484636 - protein, 12 aa, Homo sapiens
  CDR3 for beta chain variable domain of TCR clone 242318 (TRBV6-3, TRBJ2-7)
CASSLGRRGLYF

SEQ ID NO: 484637 - protein, 12 aa, Homo sapiens
  CDR3 for alpha chain variable domain of TCR clone 242319 (TRAV1-2, TRAJ33)
CAALDSNYQLIW

SEQ ID NO: 484638 - protein, 15 aa, Homo sapiens
  CDR3 for beta chain variable domain of TCR clone 242319 (TRBV19, TRBJ1-5)
CASSGTGGINQPQHF

SEQ ID NO: 484639 - protein, 12 aa, Homo sapiens
  CDR3 for alpha chain variable domain of TCR clone 242320 (TRAV16, TRAJ10)
CSRTGGGNKLTF

SEQ ID NO: 484640 - protein, 18 aa, Homo sapiens
  CDR3 for beta chain variable domain of TCR clone 242320 (TRBV3-1, TRBJ2-1)
CASSQDLPGRPLFDEQFF

SEQ ID NO: 484641 - protein, 14 aa, Homo sapiens
  CDR3 for alpha chain variable domain of TCR clone 242321 (TRAV16, TRAJ44)
CALSTTGTASKLTF

SEQ ID NO: 484642 - protein, 14 aa, Homo sapiens
  CDR3 for beta chain variable domain of TCR clone 242321 (TRBV7-2, TRBJ2-5)
CASSFGGAQETQYF

SEQ ID NO: 484643 - protein, 14 aa, Homo sapiens
  CDR3 for alpha chain variable domain of TCR clone 242322 (TRAV12-2, TRAJ40)
CAVKIPSGTYKYIF

SEQ ID NO: 484644 - protein, 16 aa, Homo sapiens
  CDR3 for beta chain variable domain of TCR clone 242322 (TRBV20-1, TRBJ2-4)
CSARAILAGQGDIQYF

SEQ ID NO: 484645 - protein, 15 aa, Homo sapiens
  CDR3 for alpha chain variable domain of TCR clone 242323 (TRAV26-2, TRAJ57)
CILRDIRGGSKKLVF

SEQ ID NO: 484646 - protein, 15 aa, Homo sapiens
  CDR3 for beta chain variable domain of TCR clone 242323 (TRBV2, TRBJ2-1)
CASDIGQAGEGEQLF

SEQ ID NO: 484647 - protein, 12 aa, Homo sapiens
  CDR3 for alpha chain variable domain of TCR clone 242324 (TRAV12-3, TRAJ17)
CAMTITGNKLTF

SEQ ID NO: 484648 - protein, 15 aa, Homo sapiens
  CDR3 for beta chain variable domain of TCR clone 242324 (TRBV20-1, TRBJ2-7)
CSARDRVSGTDEQYF

SEQ ID NO: 484649 - protein, 13 aa, Homo sapiens
  CDR3 for alpha chain variable domain of TCR clone 242325 (TRAV1-2, TRAJ33)
CAVSEDSNYQLIW

SEQ ID NO: 484650 - protein, 16 aa, Homo sapiens
  CDR3 for beta chain variable domain of TCR clone 242325 (TRBV4-2, TRBJ2-7)
FASSQDGVERGYEQYF

SEQ ID NO: 484651 - protein, 15 aa, Homo sapiens
  CDR3 for alpha chain variable domain of TCR clone 242326 (TRAV8-2, TRAJ15)
CVVTMGNQAGTALIF

SEQ ID NO: 484652 - protein, 12 aa, Homo sapiens
  CDR3 for beta chain variable domain of TCR clone 242326 (TRBV6-1, TRBJ2-7)
CASSDYSYEQYV

SEQ ID NO: 484653 - protein, 12 aa, Homo sapiens
  CDR3 for alpha chain variable domain of TCR clone 242327 (TRAV17, TRAJ4)
CATRGGYNKLIF

SEQ ID NO: 484654 - protein, 14 aa, Homo sapiens
  CDR3 for beta chain variable domain of TCR clone 242327 (TRBV6-1, TRBJ1-3)
CASVQGGGGNTIYF

SEQ ID NO: 484655 - protein, 14 aa, Homo sapiens
  CDR3 for alpha chain variable domain of TCR clone 242328 (TRAV1-2, TRAJ8)
CAVREDTVFQKLVF

SEQ ID NO: 484656 - protein, 14 aa, Homo sapiens
  CDR3 for beta chain variable domain of TCR clone 242328 (TRBV29-1, TRBJ2-3)
CSAGAGVGADTQYF

SEQ ID NO: 484657 - protein, 15 aa, Homo sapiens
  CDR3 for alpha chain variable domain of TCR clone 242329 (TRAV35, TRAJ58)
CAGRRQETSGSRLTF

SEQ ID NO: 484658 - protein, 11 aa, Homo sapiens
  CDR3 for beta chain variable domain of TCR clone 242329 (TRBV23-1, TRBJ2-7)
SSSGTGLEQYF

SEQ ID NO: 484659 - protein, 13 aa, Homo sapiens
  CDR3 for alpha chain variable domain of TCR clone 242330 (TRAV36/DV7, TRAJ34)
CAGRPYNTDKLIF

SEQ ID NO: 484660 - protein, 15 aa, Homo sapiens
  CDR3 for beta chain variable domain of TCR clone 242330 (TRBV27, TRBJ1-6)
CAGSFDRGLGSPLHF

SEQ ID NO: 484661 - protein, 12 aa, Homo sapiens
  CDR3 for alpha chain variable domain of TCR clone 242331 (TRAV21, TRAJ49)
CAVSWTGNQFYF

SEQ ID NO: 484662 - protein, 18 aa, Homo sapiens
  CDR3 for beta chain variable domain of TCR clone 242331 (TRBV7-8, TRBJ2-1)
CASSPAEGLAGGLNDQFF

SEQ ID NO: 484663 - protein, 12 aa, Homo sapiens
  CDR3 for alpha chain variable domain of TCR clone 242332 (TRAV2, TRAJ10)
CASTGGGNQLTF

SEQ ID NO: 484664 - protein, 14 aa, Homo sapiens
  CDR3 for beta chain variable domain of TCR clone 242332 (TRBV7-2, TRBJ2-2)
CASRGQGAAGELFF

SEQ ID NO: 484665 - protein, 13 aa, Homo sapiens
  CDR3 for alpha chain variable domain of TCR clone 242333 (TRAV35, TRAJ36)
CAGPRIGANNLFF

SEQ ID NO: 484666 - protein, 14 aa, Homo sapiens
  CDR3 for beta chain variable domain of TCR clone 242333 (TRBV7-2, TRBJ1-2)
CASSQTGSTYGYTF

SEQ ID NO: 484667 - protein, 16 aa, Homo sapiens
  CDR3 for alpha chain variable domain of TCR clone 242334 (TRAV30, TRAJ24)
CGTEIVDADSWGKFQF

SEQ ID NO: 484668 - protein, 15 aa, Homo sapiens
  CDR3 for beta chain variable domain of TCR clone 242334 (TRBV20-1, TRBJ2-4)
CSARYLTGGPNIQYF

SEQ ID NO: 484669 - protein, 14 aa, Homo sapiens
  CDR3 for alpha chain variable domain of TCR clone 242335 (TRAV13-1, TRAJ40)
CAASMSSGTYKYIF

SEQ ID NO: 484670 - protein, 15 aa, Homo sapiens
  CDR3 for beta chain variable domain of TCR clone 242335 (TRBV7-3, TRBJ2-1)
CASSPTGGGEVEQFF

SEQ ID NO: 484671 - protein, 13 aa, Homo sapiens
  CDR3 for alpha chain variable domain of TCR clone 242336 (TRAV2, TRAJ16)
CAVEFGDGQKLLF

SEQ ID NO: 484672 - protein, 12 aa, Homo sapiens
  CDR3 for beta chain variable domain of TCR clone 242336 (TRBV7-8, TRBJ2-7)
CASSLGDREQYF

SEQ ID NO: 484673 - protein, 12 aa, Homo sapiens
  CDR3 for alpha chain variable domain of TCR clone 242337 (TRAV2, TRAJ33)
CAVPDSNYQLIW

SEQ ID NO: 484674 - protein, 13 aa, Homo sapiens
  CDR3 for beta chain variable domain of TCR clone 242337 (TRBV2, TRBJ2-7)
CASSVGGSGEQYF

SEQ ID NO: 484675 - protein, 14 aa, Homo sapiens
  CDR3 for alpha chain variable domain of TCR clone 242338 (TRAV16, TRAJ57)
CALPTQGGSEKLVF

SEQ ID NO: 484676 - protein, 15 aa, Homo sapiens
  CDR3 for beta chain variable domain of TCR clone 242338 (TRBV28, TRBJ1-3)
CASWGGHLSGNTIDF

SEQ ID NO: 484677 - protein, 15 aa, Homo sapiens
  CDR3 for alpha chain variable domain of TCR clone 242339 (TRAV17, TRAJ57)
CATGHSQGGSEKLVF

SEQ ID NO: 484678 - protein, 11 aa, Homo sapiens
  CDR3 for beta chain variable domain of TCR clone 242339 (TRBV11-2, TRBJ2-2)
CASSLPGELFF

SEQ ID NO: 484679 - protein, 13 aa, Homo sapiens
  CDR3 for alpha chain variable domain of TCR clone 242340 (TRAV12-1, TRAJ33)
CGDAPDSNYQLIW

SEQ ID NO: 484680 - protein, 14 aa, Homo sapiens
  CDR3 for beta chain variable domain of TCR clone 242340 (TRBV12-5, TRBJ2-5)
CASGSRTHQETQYF

SEQ ID NO: 484681 - protein, 13 aa, Homo sapiens
  CDR3 for alpha chain variable domain of TCR clone 242341 (TRAV12-3, TRAJ13)
CAIGTGGYQKVTF

SEQ ID NO: 484682 - protein, 14 aa, Homo sapiens
  CDR3 for beta chain variable domain of TCR clone 242341 (TRBV7-2, TRBJ2-5)
CASSTGGELKTQYF

SEQ ID NO: 484683 - protein, 11 aa, Homo sapiens
  CDR3 for alpha chain variable domain of TCR clone 242342 (TRAV4, TRAJ23)
CLVAPGGKLIF

SEQ ID NO: 484684 - protein, 16 aa, Homo sapiens
  CDR3 for beta chain variable domain of TCR clone 242342 (TRBV12-4, TRBJ1-5)
CASSRPVGGSNQPQHF

SEQ ID NO: 484685 - protein, 16 aa, Homo sapiens
  CDR3 for alpha chain variable domain of TCR clone 242343 (TRAV17, TRAJ52)
CATGIIGGTSYGKLTF

SEQ ID NO: 484686 - protein, 16 aa, Homo sapiens
  CDR3 for beta chain variable domain of TCR clone 242343 (TRBV3-1, TRBJ2-7)
CASSQGATGVAYEQYF

SEQ ID NO: 484687 - protein, 16 aa, Homo sapiens
  CDR3 for alpha chain variable domain of TCR clone 242344 (TRAV3, TRAJ10)
CAVRDMRAGGGNKLTF

SEQ ID NO: 484688 - protein, 19 aa, Homo sapiens
  CDR3 for beta chain variable domain of TCR clone 242344 (TRBV6-3, TRBJ1-2)
CASSCSKGRTGPPNYGYTF

SEQ ID NO: 484689 - protein, 14 aa, Homo sapiens
  CDR3 for alpha chain variable domain of TCR clone 242345 (TRAV8-4, TRAJ9)
CAVSDRTGGFKPIF

SEQ ID NO: 484690 - protein, 13 aa, Homo sapiens
  CDR3 for beta chain variable domain of TCR clone 242345 (TRBV11-2, TRBJ2-7)
CASSLGDSYEQYF

SEQ ID NO: 484691 - protein, 12 aa, Homo sapiens
  CDR3 for alpha chain variable domain of TCR clone 242346 (TRAV16, TRAJ29)
CALSLGNTPLVF

SEQ ID NO: 484692 - protein, 14 aa, Homo sapiens
  CDR3 for beta chain variable domain of TCR clone 242346 (TRBV7-2, TRBJ1-1)
CASTPLQSYTEAFF

SEQ ID NO: 484693 - protein, 15 aa, Homo sapiens
  CDR3 for alpha chain variable domain of TCR clone 242347 (TRAV25, TRAJ52)
CAGRPGGTSYGKLTF

SEQ ID NO: 484694 - protein, 16 aa, Homo sapiens
  CDR3 for beta chain variable domain of TCR clone 242347 (TRBV25-1, TRBJ1-1)
CASSGDRDRGRIEAFF

SEQ ID NO: 484695 - protein, 15 aa, Homo sapiens
  CDR3 for alpha chain variable domain of TCR clone 242348 (TRAV17, TRAJ16)
CATALRFSDGQKLRF

SEQ ID NO: 484696 - protein, 15 aa, Homo sapiens
  CDR3 for beta chain variable domain of TCR clone 242348 (TRBV13, TRBJ1-5)
CASSFGQGGVQPQHF

SEQ ID NO: 484697 - protein, 14 aa, Homo sapiens
  CDR3 for alpha chain variable domain of TCR clone 242349 (TRAV23/DV6, TRAJ27)
CAASRDTNAGKSTI

SEQ ID NO: 484698 - protein, 13 aa, Homo sapiens
  CDR3 for beta chain variable domain of TCR clone 242349 (TRBV11-2, TRBJ1-5)
CASSSGGNQPQHF

SEQ ID NO: 484699 - protein, 14 aa, Homo sapiens
  CDR3 for alpha chain variable domain of TCR clone 242350 (TRAV26-1, TRAJ38)
CIADTAGNNRKLLW

SEQ ID NO: 484700 - protein, 13 aa, Homo sapiens
  CDR3 for beta chain variable domain of TCR clone 242350 (TRBV20-1, TRBJ1-1)
CSARGGGNTEAFF

SEQ ID NO: 484701 - protein, 11 aa, Homo sapiens
  CDR3 for alpha chain variable domain of TCR clone 242351 (TRAV21, TRAJ27)
CAVRMQANQPL

SEQ ID NO: 484702 - protein, 16 aa, Homo sapiens
  CDR3 for beta chain variable domain of TCR clone 242351 (TRBV3-1, TRBJ2-7)
CDSSQGATGVAYEQYF

SEQ ID NO: 484703 - protein, 17 aa, Homo sapiens
  CDR3 for alpha chain variable domain of TCR clone 242352 (TRAV3, TRAJ12)
WAVRDGGRMDSSYKLIF

SEQ ID NO: 484704 - protein, 14 aa, Homo sapiens
  CDR3 for beta chain variable domain of TCR clone 242352 (TRBV7-9, TRBJ1-2)
CASSRQGANYGYTF

SEQ ID NO: 484705 - protein, 13 aa, Homo sapiens
  CDR3 for alpha chain variable domain of TCR clone 242353 (TRAV12-2, TRAJ12)
CAVNGDSSYKLIF

SEQ ID NO: 484706 - protein, 14 aa, Homo sapiens
  CDR3 for beta chain variable domain of TCR clone 242353 (TRBV6-6, TRBJ1-2)
CASRRQGPLYGYTF

SEQ ID NO: 484707 - protein, 11 aa, Homo sapiens
  CDR3 for alpha chain variable domain of TCR clone 242354 (TRAV26-1, TRAJ37)
CIVRVGRKLIF

SEQ ID NO: 484708 - protein, 14 aa, Homo sapiens
  CDR3 for beta chain variable domain of TCR clone 242354 (TRBV3-1, TRBJ2-7)
CASSPSSGTYEQYF

SEQ ID NO: 484709 - protein, 13 aa, Homo sapiens
  CDR3 for alpha chain variable domain of TCR clone 242355 (TRAV8-6, TRAJ49)
CAVITNTGNPFHF

SEQ ID NO: 484710 - protein, 12 aa, Homo sapiens
  CDR3 for beta chain variable domain of TCR clone 242355 (TRBV12-4, TRBJ2-7)
CASSLGGYEQYF

SEQ ID NO: 484711 - protein, 16 aa, Homo sapiens
  CDR3 for alpha chain variable domain of TCR clone 242356 (TRAV8-3, TRAJ10)
CAVGPILTGGGNKLTF

SEQ ID NO: 484712 - protein, 16 aa, Homo sapiens
  CDR3 for beta chain variable domain of TCR clone 242356 (TRBV7-2, TRBJ2-5)
CASSAKWLSGQETQYF

SEQ ID NO: 484713 - protein, 15 aa, Homo sapiens
  CDR3 for alpha chain variable domain of TCR clone 242357 (TRAV26-1, TRAJ44)
CIARVPFGTASKLTF

SEQ ID NO: 484714 - protein, 15 aa, Homo sapiens
  CDR3 for beta chain variable domain of TCR clone 242357 (TRBV20-1, TRBJ1-1)
WSASRGVTGNIEAFF

SEQ ID NO: 484715 - protein, 15 aa, Homo sapiens
  CDR3 for alpha chain variable domain of TCR clone 242358 (TRAV17, TRAJ56)
CATDANTGANSKLTF

SEQ ID NO: 484716 - protein, 15 aa, Homo sapiens
  CDR3 for beta chain variable domain of TCR clone 242358 (TRBV6-5, TRBJ2-1)
CASSYDAGAGNEQFF

SEQ ID NO: 484717 - protein, 14 aa, Homo sapiens
  CDR3 for alpha chain variable domain of TCR clone 242359 (TRAV8-6, TRAJ40)
CAVSATSGTYKYIF

SEQ ID NO: 484718 - protein, 16 aa, Homo sapiens
  CDR3 for beta chain variable domain of TCR clone 242359 (TRBV4-2, TRBJ2-7)
CASSQDGGSLRGDQYF

SEQ ID NO: 484719 - protein, 14 aa, Homo sapiens
  CDR3 for alpha chain variable domain of TCR clone 242360 (TRAV1-2, TRAJ16)
CAVNRSSDGQKLLF

SEQ ID NO: 484720 - protein, 15 aa, Homo sapiens
  CDR3 for beta chain variable domain of TCR clone 242360 (TRBV4-2, TRBJ1-1)
CASSQQGAGDTEAFL

SEQ ID NO: 484721 - protein, 14 aa, Homo sapiens
  CDR3 for alpha chain variable domain of TCR clone 242361 (TRAV21, TRAJ8)
CALQRDTGFQKLVF

SEQ ID NO: 484722 - protein, 15 aa, Homo sapiens
  CDR3 for beta chain variable domain of TCR clone 242361 (TRBV7-9, TRBJ2-2)
CASGPLDTFPGELFF

SEQ ID NO: 484723 - protein, 14 aa, Homo sapiens
  CDR3 for alpha chain variable domain of TCR clone 242362 (TRAV16, TRAJ33)
CALSAMDSNYQLSW

SEQ ID NO: 484724 - protein, 12 aa, Homo sapiens
  CDR3 for beta chain variable domain of TCR clone 242362 (TRBV28, TRBJ2-6)
CAIQAGANVLTF

SEQ ID NO: 484725 - protein, 16 aa, Homo sapiens
  CDR3 for alpha chain variable domain of TCR clone 242363 (TRAV38-2/DV8, TRAJ37)
CAYRSGLRSNTGKLIF

SEQ ID NO: 484726 - protein, 17 aa, Homo sapiens
  CDR3 for beta chain variable domain of TCR clone 242363 (TRBV11-2, TRBJ2-4)
CASSFLALGGAGDIQYF

SEQ ID NO: 484727 - protein, 15 aa, Homo sapiens
  CDR3 for alpha chain variable domain of TCR clone 242364 (TRAV12-2, TRAJ42)
CAVNSHGGSPGNLIF

SEQ ID NO: 484728 - protein, 13 aa, Homo sapiens
  CDR3 for beta chain variable domain of TCR clone 242364 (TRBV27, TRBJ1-1)
CASSVSANTEAFF

SEQ ID NO: 484729 - protein, 16 aa, Homo sapiens
  CDR3 for alpha chain variable domain of TCR clone 242365 (TRAV30, TRAJ24)
CGTEIVDAYSWGKFQC

SEQ ID NO: 484730 - protein, 14 aa, Homo sapiens
  CDR3 for beta chain variable domain of TCR clone 242365 (TRBV12-5, TRBJ2-5)
CASGSRTHQETQYF

SEQ ID NO: 484731 - protein, 18 aa, Homo sapiens
  CDR3 for alpha chain variable domain of TCR clone 242366 (TRAV29/DV5, TRAJ52)
CAAGFSGAGGTSYGKLTF

SEQ ID NO: 484732 - protein, 18 aa, Homo sapiens
  CDR3 for beta chain variable domain of TCR clone 242366 (TRBV7-3, TRBJ2-1)
CASSLTLASGRAMVSSSS

SEQ ID NO: 484733 - protein, 17 aa, Homo sapiens
  CDR3 for alpha chain variable domain of TCR clone 242367 (TRAV2, TRAJ32)
CCLLLWGGGGATNKLIF

SEQ ID NO: 484734 - protein, 13 aa, Homo sapiens
  CDR3 for beta chain variable domain of TCR clone 242367 (TRBV20-1, TRBJ1-1)
SAVLGGGNTEAFF

SEQ ID NO: 484735 - protein, 15 aa, Homo sapiens
  CDR3 for alpha chain variable domain of TCR clone 242368 (TRAV3, TRAJ7)
CAVRDKDNGNNRLAF

SEQ ID NO: 484736 - protein, 14 aa, Homo sapiens
  CDR3 for beta chain variable domain of TCR clone 242368 (TRBV7-6, TRBJ2-7)
CASSFRQGADEQYL

SEQ ID NO: 484737 - protein, 13 aa, Homo sapiens
  CDR3 for alpha chain variable domain of TCR clone 242369 (TRAV12-2, TRAJ4)
CAVRSGGYHKLIF

SEQ ID NO: 484738 - protein, 15 aa, Homo sapiens
  CDR3 for beta chain variable domain of TCR clone 242369 (TRBV10-3, TRBJ2-1)
CAISDVQDRAYEQFF

SEQ ID NO: 484739 - protein, 17 aa, Homo sapiens
  CDR3 for alpha chain variable domain of TCR clone 242370 (TRAV3, TRAJ6)
CAVRDGPRAGGSYKPTF

SEQ ID NO: 484740 - protein, 13 aa, Homo sapiens
  CDR3 for beta chain variable domain of TCR clone 242370 (TRBV5-5, TRBJ2-7)
CASSSQTRQRQYF

SEQ ID NO: 484741 - protein, 14 aa, Homo sapiens
  CDR3 for alpha chain variable domain of TCR clone 242371 (TRAV1-2, TRAJ16)
CAVNQFSDGQKLLF

SEQ ID NO: 484742 - protein, 14 aa, Homo sapiens
  CDR3 for beta chain variable domain of TCR clone 242371 (TRBV7-3, TRBJ1-1)
CASSLGTGYTEAFF

SEQ ID NO: 484743 - protein, 12 aa, Homo sapiens
  CDR3 for alpha chain variable domain of TCR clone 242372 (TRAV1-2, TRAJ42)
CVAGGSQGNLIF

SEQ ID NO: 484744 - protein, 17 aa, Homo sapiens
  CDR3 for beta chain variable domain of TCR clone 242372 (TRBV20-1, TRBJ2-2)
CSASGSGQGGLTGELFF

SEQ ID NO: 484745 - protein, 13 aa, Homo sapiens
  CDR3 for alpha chain variable domain of TCR clone 242373 (TRAV12-2, TRAJ50)
CAVIVTSYDKVIF

SEQ ID NO: 484746 - protein, 13 aa, Homo sapiens
  CDR3 for beta chain variable domain of TCR clone 242373 (TRBV27, TRBJ2-7)
CASSFSQGYEQYF

SEQ ID NO: 484747 - protein, 15 aa, Homo sapiens
  CDR3 for alpha chain variable domain of TCR clone 242374 (TRAV8-3, TRAJ45)
CASSYSGGGADGLTF

SEQ ID NO: 484748 - protein, 18 aa, Homo sapiens
  CDR3 for beta chain variable domain of TCR clone 242374 (TRBV4-1, TRBJ1-5)
CASSQAPRGQGLNQPQHF

SEQ ID NO: 484749 - protein, 15 aa, Homo sapiens
  CDR3 for alpha chain variable domain of TCR clone 242375 (TRAV26-1, TRAJ29)
CIVRDEGSGNTPLVF

SEQ ID NO: 484750 - protein, 14 aa, Homo sapiens
  CDR3 for beta chain variable domain of TCR clone 242375 (TRBV25-1, TRBJ1-1)
CASTHLGGNTEAFF

SEQ ID NO: 484751 - protein, 14 aa, Homo sapiens
  CDR3 for alpha chain variable domain of TCR clone 242376 (TRAV8-3, TRAJ34)
CAVGPPHNTDKLIF

SEQ ID NO: 484752 - protein, 13 aa, Homo sapiens
  CDR3 for beta chain variable domain of TCR clone 242376 (TRBV19, TRBJ1-2)
CASSVPGQDGYTF

SEQ ID NO: 484753 - protein, 13 aa, Homo sapiens
  CDR3 for alpha chain variable domain of TCR clone 242377 (TRAV35, TRAJ32)
CAGVGGAINKLIF

SEQ ID NO: 484754 - protein, 17 aa, Homo sapiens
  CDR3 for beta chain variable domain of TCR clone 242377 (TRBV4-3, TRBJ2-1)
CASSQFSSGRASGEQFF

SEQ ID NO: 484755 - protein, 13 aa, Homo sapiens
  CDR3 for alpha chain variable domain of TCR clone 242378 (TRAV12-1, TRAJ11)
CVVTRGGYSTLTF

SEQ ID NO: 484756 - protein, 15 aa, Homo sapiens
  CDR3 for beta chain variable domain of TCR clone 242378 (TRBV4-1, TRBJ1-1)
CASSYSGTGGTEAFF

SEQ ID NO: 484757 - protein, 16 aa, Homo sapiens
  CDR3 for alpha chain variable domain of TCR clone 242379 (TRAV26-1, TRAJ45)
CIVEKYSGGGADGLTF

SEQ ID NO: 484758 - protein, 16 aa, Homo sapiens
  CDR3 for beta chain variable domain of TCR clone 242379 (TRBV10-3, TRBJ1-6)
CAISVRRGQGNSPLHF

SEQ ID NO: 484759 - protein, 17 aa, Homo sapiens
  CDR3 for alpha chain variable domain of TCR clone 242380 (TRAV3, TRAJ38)
CAVRDCLNAGNNRKLIW

SEQ ID NO: 484760 - protein, 15 aa, Homo sapiens
  CDR3 for beta chain variable domain of TCR clone 242380 (TRBV27, TRBJ2-1)
CASSNGGGSSNEQFF

SEQ ID NO: 484761 - protein, 12 aa, Homo sapiens
  CDR3 for alpha chain variable domain of TCR clone 242381 (TRAV12-3, TRAJ20)
CAMVRGDYKLSF

SEQ ID NO: 484762 - protein, 12 aa, Homo sapiens
  CDR3 for beta chain variable domain of TCR clone 242381 (TRBV6-1, TRBJ2-7)
CARSDYSYEQYF

SEQ ID NO: 484763 - protein, 13 aa, Homo sapiens
  CDR3 for alpha chain variable domain of TCR clone 242382 (TRAV12-3, TRAJ5)
CAMIYTGRRELTF

SEQ ID NO: 484764 - protein, 12 aa, Homo sapiens
  CDR3 for beta chain variable domain of TCR clone 242382 (TRBV18, TRBJ1-4)
CASSPSREKLFF

SEQ ID NO: 484765 - protein, 13 aa, Homo sapiens
  CDR3 for alpha chain variable domain of TCR clone 242383 (TRAV2, TRAJ40)
CAVVNSGTYRYIF

SEQ ID NO: 484766 - protein, 14 aa, Homo sapiens
  CDR3 for beta chain variable domain of TCR clone 242383 (TRBV19, TRBJ2-1)
CASPTFVLSGEQFF

SEQ ID NO: 484767 - protein, 10 aa, Homo sapiens
  CDR3 for alpha chain variable domain of TCR clone 242384 (TRAV17, TRAJ40)
CAGALGGTQI

SEQ ID NO: 484768 - protein, 16 aa, Homo sapiens
  CDR3 for beta chain variable domain of TCR clone 242384 (TRBV11-2, TRBJ1-2)
CASSLDTGGADYGYTF

SEQ ID NO: 484769 - protein, 16 aa, Homo sapiens
  CDR3 for alpha chain variable domain of TCR clone 242385 (TRAV1-1, TRAJ29)
CAVRSTRTSGNTPLVF

SEQ ID NO: 484770 - protein, 16 aa, Homo sapiens
  CDR3 for beta chain variable domain of TCR clone 242385 (TRBV27, TRBJ1-1)
CASSSRGRTGYTEAFF

SEQ ID NO: 484771 - protein, 13 aa, Homo sapiens
  CDR3 for alpha chain variable domain of TCR clone 242386 (TRAV12-3, TRAJ9)
CAMSAAGGFKTIF

SEQ ID NO: 484772 - protein, 14 aa, Homo sapiens
  CDR3 for beta chain variable domain of TCR clone 242386 (TRBV7-8, TRBJ2-1)
CATERERSYNEQFF

SEQ ID NO: 484773 - protein, 14 aa, Homo sapiens
  CDR3 for alpha chain variable domain of TCR clone 242387 (TRAV1-2, TRAJ16)
CAVNRFSDGQRLLF

SEQ ID NO: 484774 - protein, 15 aa, Homo sapiens
  CDR3 for beta chain variable domain of TCR clone 242387 (TRBV24-1, TRBJ2-5)
CATSETTGAVGAQYF

SEQ ID NO: 484775 - protein, 15 aa, Homo sapiens
  CDR3 for alpha chain variable domain of TCR clone 242388 (TRAV17, TRAJ57)
CATGPSQGGAEKLVF

SEQ ID NO: 484776 - protein, 16 aa, Homo sapiens
  CDR3 for beta chain variable domain of TCR clone 242388 (TRBV12-4, TRBJ1-5)
CASSRQVGGSNQPQHF

SEQ ID NO: 484777 - protein, 16 aa, Homo sapiens
  CDR3 for alpha chain variable domain of TCR clone 242389 (TRAV17, TRAJ52)
CATGIIGGTSYGKLTF

SEQ ID NO: 484778 - protein, 14 aa, Homo sapiens
  CDR3 for beta chain variable domain of TCR clone 242389 (TRBV7-3, TRBJ2-2)
CASSSGRYAGELFF

SEQ ID NO: 484779 - protein, 12 aa, Homo sapiens
  CDR3 for alpha chain variable domain of TCR clone 242390 (TRAV12-1, TRAJ40)
CVVSSGTYKYIF

SEQ ID NO: 484780 - protein, 14 aa, Homo sapiens
  CDR3 for beta chain variable domain of TCR clone 242390 (TRBV20-1, TRBJ2-2)
CSAPDTANTGDLFF

SEQ ID NO: 484781 - protein, 16 aa, Homo sapiens
  CDR3 for alpha chain variable domain of TCR clone 242391 (TRAV30, TRAJ24)
CGTEIVDADSWGKFQF

SEQ ID NO: 484782 - protein, 15 aa, Homo sapiens
  CDR3 for beta chain variable domain of TCR clone 242391 (TRBV9, TRBJ1-6)
CTSSVAGTGDSPLHF

SEQ ID NO: 484783 - protein, 13 aa, Homo sapiens
  CDR3 for alpha chain variable domain of TCR clone 242392 (TRAV20, TRAJ53)
CCAGGGSNYKLTF

SEQ ID NO: 484784 - protein, 13 aa, Homo sapiens
  CDR3 for beta chain variable domain of TCR clone 242392 (TRBV20-1, TRBJ2-7)
CSASRSSSYEQYF

SEQ ID NO: 484785 - protein, 15 aa, Homo sapiens
  CDR3 for alpha chain variable domain of TCR clone 242393 (TRAV20, TRAJ4)
CAVEGSSGGYNKLLF

SEQ ID NO: 484786 - protein, 14 aa, Homo sapiens
  CDR3 for beta chain variable domain of TCR clone 242393 (TRBV7-8, TRBJ2-7)
CASTLGGALGEQYF

SEQ ID NO: 484787 - protein, 10 aa, Homo sapiens
  CDR3 for alpha chain variable domain of TCR clone 242394 (TRAV1-2, TRAJ31)
CVSEDARLMF

SEQ ID NO: 484788 - protein, 13 aa, Homo sapiens
  CDR3 for beta chain variable domain of TCR clone 242394 (TRBV4-1, TRBJ2-1)
CASSQAGGDEQFF

SEQ ID NO: 484789 - protein, 14 aa, Homo sapiens
  CDR3 for alpha chain variable domain of TCR clone 242395 (TRAV29/DV5, TRAJ36)
CAARRKTGANNLFF

SEQ ID NO: 484790 - protein, 13 aa, Homo sapiens
  CDR3 for beta chain variable domain of TCR clone 242395 (TRBV19, TRBJ1-1)
CASSFGRNTEAFF

SEQ ID NO: 484791 - protein, 14 aa, Homo sapiens
  CDR3 for alpha chain variable domain of TCR clone 242396 (TRAV1-2, TRAJ16)
CAVNRFSDGQKLRF

SEQ ID NO: 484792 - protein, 16 aa, Homo sapiens
  CDR3 for beta chain variable domain of TCR clone 242396 (TRBV7-3, TRBJ2-2)
CARSLKRGTLSGELFF

SEQ ID NO: 484793 - protein, 13 aa, Homo sapiens
  CDR3 for alpha chain variable domain of TCR clone 242397 (TRAV12-1, TRAJ39)
CVVNYNAGNMLTF

SEQ ID NO: 484794 - protein, 14 aa, Homo sapiens
  CDR3 for beta chain variable domain of TCR clone 242397 (TRBV27, TRBJ2-3)
CASSALGTTDTQYF

SEQ ID NO: 484795 - protein, 16 aa, Homo sapiens
  CDR3 for alpha chain variable domain of TCR clone 242398 (TRAV16, TRAJ4)
CALSRMFSGGYNKLIV

SEQ ID NO: 484796 - protein, 16 aa, Homo sapiens
  CDR3 for beta chain variable domain of TCR clone 242398 (TRBV24-1, TRBJ2-3)
CATSDPGTGATGTQYF

SEQ ID NO: 484797 - protein, 14 aa, Homo sapiens
  CDR3 for alpha chain variable domain of TCR clone 242399 (TRAV13-1, TRAJ31)
CAASSRPNNARLMF

SEQ ID NO: 484798 - protein, 14 aa, Homo sapiens
  CDR3 for beta chain variable domain of TCR clone 242399 (TRBV11-2, TRBJ2-7)
CASSLGAGAYEQYF

SEQ ID NO: 484799 - protein, 12 aa, Homo sapiens
  CDR3 for alpha chain variable domain of TCR clone 242400 (TRAV25, TRAJ48)
CAGDFGNEKLTI

SEQ ID NO: 484800 - protein, 12 aa, Homo sapiens
  CDR3 for beta chain variable domain of TCR clone 242400 (TRBV2, TRBJ2-5)
CASKEYGETQYF

SEQ ID NO: 484801 - protein, 15 aa, Homo sapiens
  CDR3 for alpha chain variable domain of TCR clone 242401 (TRAV26-1, TRAJ29)
CIVRVEGSVNTPLVF

SEQ ID NO: 484802 - protein, 15 aa, Homo sapiens
  CDR3 for beta chain variable domain of TCR clone 242401 (TRBV7-9, TRBJ1-5)
CASSQGHQHNQPQHF

SEQ ID NO: 484803 - protein, 12 aa, Homo sapiens
  CDR3 for alpha chain variable domain of TCR clone 242402 (TRAV3, TRAJ43)
CAVSDPNNDMPF

SEQ ID NO: 484804 - protein, 14 aa, Homo sapiens
  CDR3 for beta chain variable domain of TCR clone 242402 (TRBV5-1, TRBJ2-3)
CASSLFGPTDTQYF

SEQ ID NO: 484805 - protein, 13 aa, Homo sapiens
  CDR3 for alpha chain variable domain of TCR clone 242403 (TRAV21, TRAJ27)
CAARPGNTGKSTL

SEQ ID NO: 484806 - protein, 14 aa, Homo sapiens
  CDR3 for beta chain variable domain of TCR clone 242403 (TRBV7-6, TRBJ2-3)
CASSLGTVTDTQYF

SEQ ID NO: 484807 - protein, 12 aa, Homo sapiens
  CDR3 for alpha chain variable domain of TCR clone 242404 (TRAV23/DV6, TRAJ17)
CAAKAAGYKLTF

SEQ ID NO: 484808 - protein, 14 aa, Homo sapiens
  CDR3 for beta chain variable domain of TCR clone 242404 (TRBV28, TRBJ1-1)
CASSPRTRWAEAFF

SEQ ID NO: 484809 - protein, 21 aa, Homo sapiens
  CDR3 for alpha chain variable domain of TCR clone 242405 (TRAV1-1, TRAJ6)
CLLLLRCERLERTGESYIHTF

SEQ ID NO: 484810 - protein, 13 aa, Homo sapiens
  CDR3 for beta chain variable domain of TCR clone 242405 (TRBV10-2, TRBJ2-7)
CASGASGGYEQYF

SEQ ID NO: 484811 - protein, 16 aa, Homo sapiens
  CDR3 for alpha chain variable domain of TCR clone 242406 (TRAV12-3, TRAJ53)
CAMSPGSGGSNYKLTF

SEQ ID NO: 484812 - protein, 12 aa, Homo sapiens
  CDR3 for beta chain variable domain of TCR clone 242406 (TRBV7-9, TRBJ1-5)
CASSPQGQPQHF

SEQ ID NO: 484813 - protein, 16 aa, Homo sapiens
  CDR3 for alpha chain variable domain of TCR clone 242407 (TRAV12-3, TRAJ50)
CAMRDPMKTSYDKVVF

SEQ ID NO: 484814 - protein, 13 aa, Homo sapiens
  CDR3 for beta chain variable domain of TCR clone 242407 (TRBV4-1, TRBJ2-3)
CASSLDFTDTQYF

SEQ ID NO: 484815 - protein, 16 aa, Homo sapiens
  CDR3 for alpha chain variable domain of TCR clone 242408 (TRAV26-1, TRAJ38)
CIVRVELGCNNRKLIW

SEQ ID NO: 484816 - protein, 14 aa, Homo sapiens
  CDR3 for beta chain variable domain of TCR clone 242408 (TRBV5-1, TRBJ2-3)
CASSPGLAADTQYF

SEQ ID NO: 484817 - protein, 15 aa, Homo sapiens
  CDR3 for alpha chain variable domain of TCR clone 242409 (TRAV23/DV6, TRAJ45)
WAASARGGGADGLTF

SEQ ID NO: 484818 - protein, 15 aa, Homo sapiens
  CDR3 for beta chain variable domain of TCR clone 242409 (TRBV3-1, TRBJ2-5)
CASSRGQASWKTQYF

SEQ ID NO: 484819 - protein, 13 aa, Homo sapiens
  CDR3 for alpha chain variable domain of TCR clone 242410 (TRAV29/DV5, TRAJ31)
CAASRNNNARLVF

SEQ ID NO: 484820 - protein, 12 aa, Homo sapiens
  CDR3 for beta chain variable domain of TCR clone 242410 (TRBV14, TRBJ2-7)
CASSLYKDEQYF

SEQ ID NO: 484821 - protein, 19 aa, Homo sapiens
  CDR3 for alpha chain variable domain of TCR clone 242411 (TRAV26-2, TRAJ39)
CCVLLSLRGNNNAGNMLTF

SEQ ID NO: 484822 - protein, 15 aa, Homo sapiens
  CDR3 for beta chain variable domain of TCR clone 242411 (TRBV5-4, TRBJ1-1)
CASSSLGWANTEAFF

SEQ ID NO: 484823 - protein, 14 aa, Homo sapiens
  CDR3 for alpha chain variable domain of TCR clone 242412 (TRAV12-3, TRAJ10)
SHLPLTGGGNKLTF

SEQ ID NO: 484824 - protein, 10 aa, Homo sapiens
  CDR3 for beta chain variable domain of TCR clone 242412 (TRBV20-1, TRBJ2-5)
CSARFETQYF

SEQ ID NO: 484825 - protein, 14 aa, Homo sapiens
  CDR3 for alpha chain variable domain of TCR clone 242413 (TRAV1-2, TRAJ16)
CAVKDGSDGQKLLF

SEQ ID NO: 484826 - protein, 13 aa, Homo sapiens
  CDR3 for beta chain variable domain of TCR clone 242413 (TRBV7-2, TRBJ2-1)
CASSLSPDNEQFF

SEQ ID NO: 484827 - protein, 14 aa, Homo sapiens
  CDR3 for alpha chain variable domain of TCR clone 242414 (TRAV12-2, TRAJ17)
CAVLFKAAGNKLTL

SEQ ID NO: 484828 - protein, 15 aa, Homo sapiens
  CDR3 for beta chain variable domain of TCR clone 242414 (TRBV7-2, TRBJ2-1)
CASSSGLAGGNEQFF

SEQ ID NO: 484829 - protein, 13 aa, Homo sapiens
  CDR3 for alpha chain variable domain of TCR clone 242415 (TRAV17, TRAJ44)
CATVLGTASKLTF

SEQ ID NO: 484830 - protein, 15 aa, Homo sapiens
  CDR3 for beta chain variable domain of TCR clone 242415 (TRBV4-3, TRBJ2-2)
CASSQFLSGGGELFF

SEQ ID NO: 484831 - protein, 16 aa, Homo sapiens
  CDR3 for alpha chain variable domain of TCR clone 242416 (TRAV30, TRAJ24)
CGTEIVDADSWGKFQF

SEQ ID NO: 484832 - protein, 17 aa, Homo sapiens
  CDR3 for beta chain variable domain of TCR clone 242416 (TRBV7-8, TRBJ2-1)
CASSPPTGTLSYNEQFF

SEQ ID NO: 484833 - protein, 13 aa, Homo sapiens
  CDR3 for alpha chain variable domain of TCR clone 242417 (TRAV41, TRAJ49)
CAAQGNTGNQFYF

SEQ ID NO: 484834 - protein, 15 aa, Homo sapiens
  CDR3 for beta chain variable domain of TCR clone 242417 (TRBV11-2, TRBJ2-1)
CASSSPSTRYNEQFF

SEQ ID NO: 484835 - protein, 15 aa, Homo sapiens
  CDR3 for alpha chain variable domain of TCR clone 242418 (TRAV1-2, TRAJ28)
CAVQYSGAGSYKLTF

SEQ ID NO: 484836 - protein, 13 aa, Homo sapiens
  CDR3 for beta chain variable domain of TCR clone 242418 (TRBV20-1, TRBJ2-7)
CSATHTSGYKQYF

SEQ ID NO: 484837 - protein, 13 aa, Homo sapiens
  CDR3 for alpha chain variable domain of TCR clone 242419 (TRAV27, TRAJ45)
CRSSGGCADGLTF

SEQ ID NO: 484838 - protein, 15 aa, Homo sapiens
  CDR3 for beta chain variable domain of TCR clone 242419 (TRBV20-1, TRBJ2-7)
CSARDRVSGMDEQYF

SEQ ID NO: 484839 - protein, 13 aa, Homo sapiens
  CDR3 for alpha chain variable domain of TCR clone 242420 (TRAV26-2, TRAJ54)
CIPRGGGAQKLVV

SEQ ID NO: 484840 - protein, 14 aa, Homo sapiens
  CDR3 for beta chain variable domain of TCR clone 242420 (TRBV6-1, TRBJ1-3)
CASVQGGGGNTIYF

SEQ ID NO: 484841 - protein, 16 aa, Homo sapiens
  CDR3 for alpha chain variable domain of TCR clone 242421 (TRAV13-1, TRAJ15)
CAANRGPVRAGTALIF

SEQ ID NO: 484842 - protein, 13 aa, Homo sapiens
  CDR3 for beta chain variable domain of TCR clone 242421 (TRBV20-1, TRBJ2-3)
CSATSGSRDTQYF

SEQ ID NO: 484843 - protein, 13 aa, Homo sapiens
  CDR3 for alpha chain variable domain of TCR clone 242422 (TRAV21, TRAJ57)
CAVTQGGSEKLFF

SEQ ID NO: 484844 - protein, 16 aa, Homo sapiens
  CDR3 for beta chain variable domain of TCR clone 242422 (TRBV29-1, TRBJ2-7)
CSVGDAEDGTAYEQYF

SEQ ID NO: 484845 - protein, 13 aa, Homo sapiens
  CDR3 for alpha chain variable domain of TCR clone 242423 (TRAV8-3, TRAJ40)
CAVGAQYLRNLQI

SEQ ID NO: 484846 - protein, 18 aa, Homo sapiens
  CDR3 for beta chain variable domain of TCR clone 242423 (TRBV25-1, TRBJ1-2)
CASSGLQNGQGLIFGYTF

SEQ ID NO: 484847 - protein, 17 aa, Homo sapiens
  CDR3 for alpha chain variable domain of TCR clone 242424 (TRAV36/DV7, TRAJ52)
CAVAQRAGGTSDGKLTF

SEQ ID NO: 484848 - protein, 14 aa, Homo sapiens
  CDR3 for beta chain variable domain of TCR clone 242424 (TRBV25-1, TRBJ1-1)
CASTHLGGNTEAFF

SEQ ID NO: 484849 - protein, 13 aa, Homo sapiens
  CDR3 for alpha chain variable domain of TCR clone 242425 (TRAV35, TRAJ44)
CAGRSGTASKLTF

SEQ ID NO: 484850 - protein, 16 aa, Homo sapiens
  CDR3 for beta chain variable domain of TCR clone 242425 (TRBV24-1, TRBJ2-3)
CATSDPGTGATDTQYF

SEQ ID NO: 484851 - protein, 12 aa, Homo sapiens
  CDR3 for alpha chain variable domain of TCR clone 242426 (TRAV9-2, TRAJ36)
CALKKGANNLFF

SEQ ID NO: 484852 - protein, 15 aa, Homo sapiens
  CDR3 for beta chain variable domain of TCR clone 242426 (TRBV11-3, TRBJ2-3)
CASLKDGREGDTQYF

SEQ ID NO: 484853 - protein, 11 aa, Homo sapiens
  CDR3 for alpha chain variable domain of TCR clone 242427 (TRAV2, TRAJ13)
CASGGYQKVTF

SEQ ID NO: 484854 - protein, 15 aa, Homo sapiens
  CDR3 for beta chain variable domain of TCR clone 242427 (TRBV6-1, TRBJ2-2)
CASTRLRGDTGELFF

SEQ ID NO: 484855 - protein, 11 aa, Homo sapiens
  CDR3 for alpha chain variable domain of TCR clone 242428 (TRAV17, TRAJ21)
CVTGNFNKFYF

SEQ ID NO: 484856 - protein, 16 aa, Homo sapiens
  CDR3 for beta chain variable domain of TCR clone 242428 (TRBV2, TRBJ2-1)
CASSANPRDWQAEQFF

SEQ ID NO: 484857 - protein, 13 aa, Homo sapiens
  CDR3 for alpha chain variable domain of TCR clone 242429 (TRAV2, TRAJ23)
CAVMGNQGGKLIF

SEQ ID NO: 484858 - protein, 23 aa, Homo sapiens
  CDR3 for beta chain variable domain of TCR clone 242429 (TRBV11-2, TRBJ2-1)
LRTRPCISVPGVWRATSYNEQFF

SEQ ID NO: 484859 - protein, 14 aa, Homo sapiens
  CDR3 for alpha chain variable domain of TCR clone 242430 (TRAV26-1, TRAJ38)
CIADNAGNQRKLIW

SEQ ID NO: 484860 - protein, 13 aa, Homo sapiens
  CDR3 for beta chain variable domain of TCR clone 242430 (TRBV20-1, TRBJ1-1)
CSARGGGNTEAFF

SEQ ID NO: 484861 - protein, 13 aa, Homo sapiens
  CDR3 for alpha chain variable domain of TCR clone 242431 (TRAV1-2, TRAJ40)
CAVPGTYKYILEQ

SEQ ID NO: 484862 - protein, 16 aa, Homo sapiens
  CDR3 for beta chain variable domain of TCR clone 242431 (TRBV29-1, TRBJ2-7)
CSVEVVGTSGSYEQYF

SEQ ID NO: 484863 - protein, 15 aa, Homo sapiens
  CDR3 for alpha chain variable domain of TCR clone 242432 (TRAV35, TRAJ58)
CAGRRQETSGSRLTF

SEQ ID NO: 484864 - protein, 17 aa, Homo sapiens
  CDR3 for beta chain variable domain of TCR clone 242432 (TRBV20-1, TRBJ2-6)
CSATRDRGPSGANVLTF

SEQ ID NO: 484865 - protein, 14 aa, Homo sapiens
  CDR3 for alpha chain variable domain of TCR clone 242433 (TRAV17, TRAJ45)
CATASGGGADGLTF

SEQ ID NO: 484866 - protein, 15 aa, Homo sapiens
  CDR3 for beta chain variable domain of TCR clone 242433 (TRBV2, TRBJ2-7)
CASSEGLARSYEQYF

SEQ ID NO: 484867 - protein, 12 aa, Homo sapiens
  CDR3 for alpha chain variable domain of TCR clone 242434 (TRAV13-1, TRAJ22)
DLSSGSARQLTF

SEQ ID NO: 484868 - protein, 13 aa, Homo sapiens
  CDR3 for beta chain variable domain of TCR clone 242434 (TRBV7-7, TRBJ1-5)
CARSPGKNQPQHF

SEQ ID NO: 484869 - protein, 17 aa, Homo sapiens
  CDR3 for alpha chain variable domain of TCR clone 242435 (TRAV29/DV5, TRAJ45)
CAADGPFSGGGADGLTV

SEQ ID NO: 484870 - protein, 15 aa, Homo sapiens
  CDR3 for beta chain variable domain of TCR clone 242435 (TRBV7-9, TRBJ1-5)
CASSQGHQPNQPQHF

SEQ ID NO: 484871 - protein, 15 aa, Homo sapiens
  CDR3 for alpha chain variable domain of TCR clone 242436 (TRAV17, TRAJ57)
CATGPSQGGSEKLVF

SEQ ID NO: 484872 - protein, 15 aa, Homo sapiens
  CDR3 for beta chain variable domain of TCR clone 242436 (TRBV19, TRBJ1-5)
CASSILTGENQPQHF

SEQ ID NO: 484873 - protein, 12 aa, Homo sapiens
  CDR3 for alpha chain variable domain of TCR clone 242437 (TRAV21, TRAJ49)
CDVNDGGNQFYF

SEQ ID NO: 484874 - protein, 14 aa, Homo sapiens
  CDR3 for beta chain variable domain of TCR clone 242437 (TRBV12-5, TRBJ2-5)
CASGSRTHQETQYF

SEQ ID NO: 484875 - protein, 13 aa, Homo sapiens
  CDR3 for alpha chain variable domain of TCR clone 242438 (TRAV3, TRAJ30)
CAVRDRGDDKIIC

SEQ ID NO: 484876 - protein, 16 aa, Homo sapiens
  CDR3 for beta chain variable domain of TCR clone 242438 (TRBV7-3, TRBJ2-2)
CASSLKRGTLSGELFF

SEQ ID NO: 484877 - protein, 17 aa, Homo sapiens
  CDR3 for alpha chain variable domain of TCR clone 242439 (TRAV3, TRAJ6)
CAVRDGPRAGESYIPTF

SEQ ID NO: 484878 - protein, 14 aa, Homo sapiens
  CDR3 for beta chain variable domain of TCR clone 242439 (TRBV6-1, TRBJ1-3)
CASVQGGGGNTIYV

SEQ ID NO: 484879 - protein, 17 aa, Homo sapiens
  CDR3 for alpha chain variable domain of TCR clone 242440 (TRAV16, TRAJ58)
CITVLSNGETSGSRLTF

SEQ ID NO: 484880 - protein, 17 aa, Homo sapiens
  CDR3 for beta chain variable domain of TCR clone 242440 (TRBV18, TRBJ2-1)
CASSKGLSGGADNEQFY

SEQ ID NO: 484881 - protein, 14 aa, Homo sapiens
  CDR3 for alpha chain variable domain of TCR clone 242441 (TRAV12-2, TRAJ44)
CAVNPAGTASTLTF

SEQ ID NO: 484882 - protein, 15 aa, Homo sapiens
  CDR3 for beta chain variable domain of TCR clone 242441 (TRBV5-1, TRBJ2-1)
CASSPPRAPYNEQFF

SEQ ID NO: 484883 - protein, 13 aa, Homo sapiens
  CDR3 for alpha chain variable domain of TCR clone 242442 (TRAV8-3, TRAJ28)
CAVGAGGSYQLTF

SEQ ID NO: 484884 - protein, 14 aa, Homo sapiens
  CDR3 for beta chain variable domain of TCR clone 242442 (TRBV7-2, TRBJ2-7)
RASRSQGAAYEQYF

SEQ ID NO: 484885 - protein, 13 aa, Homo sapiens
  CDR3 for alpha chain variable domain of TCR clone 242443 (TRAV12-2, TRAJ42)
CVVKRGSQGNLIF

SEQ ID NO: 484886 - protein, 12 aa, Homo sapiens
  CDR3 for beta chain variable domain of TCR clone 242443 (TRBV5-7, TRBJ1-2)
CASSLVQNGYTF

SEQ ID NO: 484887 - protein, 15 aa, Homo sapiens
  CDR3 for alpha chain variable domain of TCR clone 242444 (TRAV12-1, TRAJ44)
CVVFVNTGTASKLTF

SEQ ID NO: 484888 - protein, 17 aa, Homo sapiens
  CDR3 for beta chain variable domain of TCR clone 242444 (TRBV7-3, TRBJ2-3)
CASSRGLAGEVPDTQYF

SEQ ID NO: 484889 - protein, 22 aa, Homo sapiens
  CDR3 for alpha chain variable domain of TCR clone 242445 (TRAV12-2, TRAJ10)
CAVGPHGHGRRKQTHLWDRHSA

SEQ ID NO: 484890 - protein, 15 aa, Homo sapiens
  CDR3 for beta chain variable domain of TCR clone 242445 (TRBV6-1, TRBJ2-5)
CASGLTSGGAETQYF

SEQ ID NO: 484891 - protein, 15 aa, Homo sapiens
  CDR3 for alpha chain variable domain of TCR clone 242446 (TRAV2, TRAJ22)
CAVPSRGGSARQLTF

SEQ ID NO: 484892 - protein, 13 aa, Homo sapiens
  CDR3 for beta chain variable domain of TCR clone 242446 (TRBV27, TRBJ2-1)
CASRTLGVGEQFF

SEQ ID NO: 484893 - protein, 13 aa, Homo sapiens
  CDR3 for alpha chain variable domain of TCR clone 242447 (TRAV6, TRAJ33)
CALPMDSNYQLIW

SEQ ID NO: 484894 - protein, 15 aa, Homo sapiens
  CDR3 for beta chain variable domain of TCR clone 242447 (TRBV10-3, TRBJ2-3)
CAISLTSGGTDTQYF

SEQ ID NO: 484895 - protein, 11 aa, Homo sapiens
  CDR3 for alpha chain variable domain of TCR clone 242448 (TRAV35, TRAJ22)
CAGPGVGQLTF

SEQ ID NO: 484896 - protein, 12 aa, Homo sapiens
  CDR3 for beta chain variable domain of TCR clone 242448 (TRBV11-3, TRBJ1-1)
CASSLRDSEAFF

SEQ ID NO: 484897 - protein, 13 aa, Homo sapiens
  CDR3 for alpha chain variable domain of TCR clone 242449 (TRAV8-3, TRAJ30)
CAVGGGRDDTIIF

SEQ ID NO: 484898 - protein, 14 aa, Homo sapiens
  CDR3 for beta chain variable domain of TCR clone 242449 (TRBV20-1, TRBJ1-1)
CSAPPADMNTEAFF

SEQ ID NO: 484899 - protein, 17 aa, Homo sapiens
  CDR3 for alpha chain variable domain of TCR clone 242450 (TRAV3, TRAJ6)
CAVRDGPRAGGSYIPTF

SEQ ID NO: 484900 - protein, 17 aa, Homo sapiens
  CDR3 for beta chain variable domain of TCR clone 242450 (TRBV27, TRBJ2-6)
CASSSTGFASGANVLTF

SEQ ID NO: 484901 - protein, 14 aa, Homo sapiens
  CDR3 for alpha chain variable domain of TCR clone 242451 (TRAV3, TRAJ36)
CAVRDGTGANNLFF

SEQ ID NO: 484902 - protein, 16 aa, Homo sapiens
  CDR3 for beta chain variable domain of TCR clone 242451 (TRBV7-3, TRBJ2-5)
CASIQQGGSVQETQYF

SEQ ID NO: 484903 - protein, 11 aa, Homo sapiens
  CDR3 for alpha chain variable domain of TCR clone 242452 (TRAV2, TRAJ33)
CVVDSNYQLIW

SEQ ID NO: 484904 - protein, 13 aa, Homo sapiens
  CDR3 for beta chain variable domain of TCR clone 242452 (TRBV7-2, TRBJ2-7)
CASSSPSGSEQYF

SEQ ID NO: 484905 - protein, 15 aa, Homo sapiens
  CDR3 for alpha chain variable domain of TCR clone 242453 (TRAV3, TRAJ5)
CAVRDLDTARRALTF

SEQ ID NO: 484906 - protein, 16 aa, Homo sapiens
  CDR3 for beta chain variable domain of TCR clone 242453 (TRBV20-1, TRBJ1-2)
CSASMGQGVANYGYTF

SEQ ID NO: 484907 - protein, 13 aa, Homo sapiens
  CDR3 for alpha chain variable domain of TCR clone 242454 (TRAV12-2, TRAJ20)
CAVNRFDDYKLSF

SEQ ID NO: 484908 - protein, 13 aa, Homo sapiens
  CDR3 for beta chain variable domain of TCR clone 242454 (TRBV18, TRBJ1-1)
CASSGGRNTEDFF

SEQ ID NO: 484909 - protein, 13 aa, Homo sapiens
  CDR3 for alpha chain variable domain of TCR clone 242455 (TRAV22, TRAJ26)
CALEHNYGQNFVF

SEQ ID NO: 484910 - protein, 16 aa, Homo sapiens
  CDR3 for beta chain variable domain of TCR clone 242455 (TRBV7-2, TRBJ2-6)
CASSERRASGANVLTF

SEQ ID NO: 484911 - protein, 13 aa, Homo sapiens
  CDR3 for alpha chain variable domain of TCR clone 242456 (TRAV1-1, TRAJ7)
CAVRDHGNNRLAF

SEQ ID NO: 484912 - protein, 20 aa, Homo sapiens
  CDR3 for beta chain variable domain of TCR clone 242456 (TRBV28, TRBJ2-3)
CASSLGVRPTSGRSTDTQYF

SEQ ID NO: 484913 - protein, 14 aa, Homo sapiens
  CDR3 for alpha chain variable domain of TCR clone 242457 (TRAV35, TRAJ13)
CAGSPSGGYQKVTF

SEQ ID NO: 484914 - protein, 13 aa, Homo sapiens
  CDR3 for beta chain variable domain of TCR clone 242457 (TRBV29-1, TRBJ1-1)
CSVGDSRNTAAFF

SEQ ID NO: 484915 - protein, 10 aa, Homo sapiens
  CDR3 for alpha chain variable domain of TCR clone 242458 (TRAV13-1, TRAJ7)
LIGGNNRLAF

SEQ ID NO: 484916 - protein, 15 aa, Homo sapiens
  CDR3 for beta chain variable domain of TCR clone 242458 (TRBV7-9, TRBJ1-1)
CASSLLEQGGTEAFF

SEQ ID NO: 484917 - protein, 11 aa, Homo sapiens
  CDR3 for alpha chain variable domain of TCR clone 242459 (TRAV1-2, TRAJ20)
CAVANDYKLSF

SEQ ID NO: 484918 - protein, 14 aa, Homo sapiens
  CDR3 for beta chain variable domain of TCR clone 242459 (TRBV13, TRBJ2-5)
CASSLGRGQETQYF

SEQ ID NO: 484919 - protein, 18 aa, Homo sapiens
  CDR3 for alpha chain variable domain of TCR clone 242460 (TRAV13-1, TRAJ52)
CAADFPNAGGNSYGKLTF

SEQ ID NO: 484920 - protein, 14 aa, Homo sapiens
  CDR3 for beta chain variable domain of TCR clone 242460 (TRBV11-2, TRBJ2-3)
CASSLYAGRDTQYF

SEQ ID NO: 484921 - protein, 19 aa, Homo sapiens
  CDR3 for alpha chain variable domain of TCR clone 242461 (TRAV13-1, TRAJ52)
CAASAYQNAGGTSYGKLTF

SEQ ID NO: 484922 - protein, 13 aa, Homo sapiens
  CDR3 for beta chain variable domain of TCR clone 242461 (TRBV15, TRBJ2-7)
CATSTTGHYEQYF

SEQ ID NO: 484923 - protein, 14 aa, Homo sapiens
  CDR3 for alpha chain variable domain of TCR clone 242462 (TRAV17, TRAJ57)
CATDPQGGSEKLVF

SEQ ID NO: 484924 - protein, 15 aa, Homo sapiens
  CDR3 for beta chain variable domain of TCR clone 242462 (TRBV28, TRBJ2-5)
CASSPPWSYQETQYF

SEQ ID NO: 484925 - protein, 13 aa, Homo sapiens
  CDR3 for alpha chain variable domain of TCR clone 242463 (TRAV13-1, TRAJ10)
CAAAEGGGNKLTF

SEQ ID NO: 484926 - protein, 15 aa, Homo sapiens
  CDR3 for beta chain variable domain of TCR clone 242463 (TRBV7-8, TRBJ2-2)
CASSLDQGWTGEPFF

SEQ ID NO: 484927 - protein, 16 aa, Homo sapiens
  CDR3 for alpha chain variable domain of TCR clone 242464 (TRAV3, TRAJ37)
CAVRGRGSANTGKLIF

SEQ ID NO: 484928 - protein, 13 aa, Homo sapiens
  CDR3 for beta chain variable domain of TCR clone 242464 (TRBV14, TRBJ2-7)
CASSQDRRGEQYF

SEQ ID NO: 484929 - protein, 11 aa, Homo sapiens
  CDR3 for alpha chain variable domain of TCR clone 242465 (TRAV13-2, TRAJ26)
CAEIPGQNFVF

SEQ ID NO: 484930 - protein, 16 aa, Homo sapiens
  CDR3 for beta chain variable domain of TCR clone 242465 (TRBV7-3, TRBJ2-2)
CASSLKRGTLSGELFF

SEQ ID NO: 484931 - protein, 11 aa, Homo sapiens
  CDR3 for alpha chain variable domain of TCR clone 242466 (TRAV2, TRAJ33)
CAVDSNYQLIW

SEQ ID NO: 484932 - protein, 15 aa, Homo sapiens
  CDR3 for beta chain variable domain of TCR clone 242466 (TRBV7-6, TRBJ2-1)
CASSPGQGPYNEQFF

SEQ ID NO: 484933 - protein, 16 aa, Homo sapiens
  CDR3 for alpha chain variable domain of TCR clone 242467 (TRAV3, TRAJ27)
CAVRDPQGTNAGKSTF

SEQ ID NO: 484934 - protein, 14 aa, Homo sapiens
  CDR3 for beta chain variable domain of TCR clone 242467 (TRBV18, TRBJ2-7)
CASSPRGGAYEQYF

SEQ ID NO: 484935 - protein, 12 aa, Homo sapiens
  CDR3 for alpha chain variable domain of TCR clone 242468 (TRAV21, TRAJ33)
CAKMDSNYQLTW

SEQ ID NO: 484936 - protein, 14 aa, Homo sapiens
  CDR3 for beta chain variable domain of TCR clone 242468 (TRBV2, TRBJ2-7)
CASSLTLGGYEQYF

SEQ ID NO: 484937 - protein, 13 aa, Homo sapiens
  CDR3 for alpha chain variable domain of TCR clone 242469 (TRAV8-3, TRAJ48)
CCGCNFGNEKLTF

SEQ ID NO: 484938 - protein, 12 aa, Homo sapiens
  CDR3 for beta chain variable domain of TCR clone 242469 (TRBV7-2, TRBJ2-5)
CASIQYQETQYF

SEQ ID NO: 484939 - protein, 18 aa, Homo sapiens
  CDR3 for alpha chain variable domain of TCR clone 242470 (TRAV21, TRAJ52)
CAVRPSPAGGTSYGKLTF

SEQ ID NO: 484940 - protein, 15 aa, Homo sapiens
  CDR3 for beta chain variable domain of TCR clone 242470 (TRBV4-2, TRBJ1-1)
CASSQRSSGRTEAFF

SEQ ID NO: 484941 - protein, 14 aa, Homo sapiens
  CDR3 for alpha chain variable domain of TCR clone 242471 (TRAV12-2, TRAJ13)
CAVKKTGGYQKVTF

SEQ ID NO: 484942 - protein, 14 aa, Homo sapiens
  CDR3 for beta chain variable domain of TCR clone 242471 (TRBV7-3, TRBJ2-3)
CASSPSARTDTQYF

SEQ ID NO: 484943 - protein, 12 aa, Homo sapiens
  CDR3 for alpha chain variable domain of TCR clone 242472 (TRAV12-2, TRAJ20)
CAVNRNDYKPSF

SEQ ID NO: 484944 - protein, 16 aa, Homo sapiens
  CDR3 for beta chain variable domain of TCR clone 242472 (TRBV7-3, TRBJ1-2)
CASSLGAPVPNYGYTF

SEQ ID NO: 484945 - protein, 11 aa, Homo sapiens
  CDR3 for alpha chain variable domain of TCR clone 242473 (TRAV12-1, TRAJ3)
CVVSSASKIIF

SEQ ID NO: 484946 - protein, 16 aa, Homo sapiens
  CDR3 for beta chain variable domain of TCR clone 242473 (TRBV7-2, TRBJ2-1)
CASSKAGPSSYNEQFF

SEQ ID NO: 484947 - protein, 16 aa, Homo sapiens
  CDR3 for alpha chain variable domain of TCR clone 242474 (TRAV30, TRAJ24)
CGTEIVGADSWGKFQF

SEQ ID NO: 484948 - protein, 15 aa, Homo sapiens
  CDR3 for beta chain variable domain of TCR clone 242474 (TRBV7-9, TRBJ1-4)
YASSARTGGNEKLFF

SEQ ID NO: 484949 - protein, 11 aa, Homo sapiens
  CDR3 for alpha chain variable domain of TCR clone 242475 (TRAV12-3, TRAJ17)
CNDATGNKLTF

SEQ ID NO: 484950 - protein, 18 aa, Homo sapiens
  CDR3 for beta chain variable domain of TCR clone 242475 (TRBV7-2, TRBJ2-3)
CASSLKREGSGITDTQYF

SEQ ID NO: 484951 - protein, 16 aa, Homo sapiens
  CDR3 for alpha chain variable domain of TCR clone 242476 (TRAV30, TRAJ24)
CGTEIVDADSWGKFQF

SEQ ID NO: 484952 - protein, 19 aa, Homo sapiens
  CDR3 for beta chain variable domain of TCR clone 242476 (TRBV6-1, TRBJ1-3)
CASVQGGGWKHHIFWRGKL

SEQ ID NO: 484953 - protein, 13 aa, Homo sapiens
  CDR3 for alpha chain variable domain of TCR clone 242477 (TRAV1-2, TRAJ9)
RAALNTGGFKTIF

SEQ ID NO: 484954 - protein, 16 aa, Homo sapiens
  CDR3 for beta chain variable domain of TCR clone 242477 (TRBV7-3, TRBJ2-2)
CASSLKRGTLSGELFF

SEQ ID NO: 484955 - protein, 15 aa, Homo sapiens
  CDR3 for alpha chain variable domain of TCR clone 242478 (TRAV26-1, TRAJ40)
CIVRVTTSGTYNYFF

SEQ ID NO: 484956 - protein, 12 aa, Homo sapiens
  CDR3 for beta chain variable domain of TCR clone 242478 (TRBV7-9, TRBJ1-4)
CASSTDREKLFF

SEQ ID NO: 484957 - protein, 14 aa, Homo sapiens
  CDR3 for alpha chain variable domain of TCR clone 242479 (TRAV20, TRAJ56)
CAVQFGGANSKLKF

SEQ ID NO: 484958 - protein, 14 aa, Homo sapiens
  CDR3 for beta chain variable domain of TCR clone 242479 (TRBV20-1, TRBJ2-7)
CSAKRGRGSYEQYF

SEQ ID NO: 484959 - protein, 15 aa, Homo sapiens
  CDR3 for alpha chain variable domain of TCR clone 242480 (TRAV8-3, TRAJ45)
CASSYSGGGADGPTS

SEQ ID NO: 484960 - protein, 13 aa, Homo sapiens
  CDR3 for beta chain variable domain of TCR clone 242480 (TRBV10-3, TRBJ2-7)
CASKLAVNYEQYF

SEQ ID NO: 484961 - protein, 15 aa, Homo sapiens
  CDR3 for alpha chain variable domain of TCR clone 242481 (TRAV23/DV6, TRAJ44)
CAARTLTGTASTLTF

SEQ ID NO: 484962 - protein, 17 aa, Homo sapiens
  CDR3 for beta chain variable domain of TCR clone 242481 (TRBV24-1, TRBJ2-1)
CATSDVSTSGTYNEQFF

SEQ ID NO: 484963 - protein, 16 aa, Homo sapiens
  CDR3 for alpha chain variable domain of TCR clone 242482 (TRAV8-6, TRAJ39)
CAVMPMNNNAGNMLTF

SEQ ID NO: 484964 - protein, 16 aa, Homo sapiens
  CDR3 for beta chain variable domain of TCR clone 242482 (TRBV15, TRBJ2-5)
CATSRYLDAAQETQYF

SEQ ID NO: 484965 - protein, 15 aa, Homo sapiens
  CDR3 for alpha chain variable domain of TCR clone 242483 (TRAV8-3, TRAJ40)
CGAPSLGSGTYRYIF

SEQ ID NO: 484966 - protein, 16 aa, Homo sapiens
  CDR3 for beta chain variable domain of TCR clone 242483 (TRBV7-3, TRBJ2-3)
CASSLSGYRPEDTQYF

SEQ ID NO: 484967 - protein, 18 aa, Homo sapiens
  CDR3 for alpha chain variable domain of TCR clone 242484 (TRAV17, TRAJ45)
CATSLDLYSGGGADGLTF

SEQ ID NO: 484968 - protein, 15 aa, Homo sapiens
  CDR3 for beta chain variable domain of TCR clone 242484 (TRBV11-2, TRBJ2-1)
CASSKHRGLIYEQFF

SEQ ID NO: 484969 - protein, 15 aa, Homo sapiens
  CDR3 for alpha chain variable domain of TCR clone 242485 (TRAV12-2, TRAJ53)
CAVNGGGGSNYKLTF

SEQ ID NO: 484970 - protein, 17 aa, Homo sapiens
  CDR3 for beta chain variable domain of TCR clone 242485 (TRBV5-5, TRBJ1-1)
CASSLRFRGLMNTEAFF

SEQ ID NO: 484971 - protein, 15 aa, Homo sapiens
  CDR3 for alpha chain variable domain of TCR clone 242486 (TRAV3, TRAJ13)
CAVRDIGGGYQKVTF

SEQ ID NO: 484972 - protein, 15 aa, Homo sapiens
  CDR3 for beta chain variable domain of TCR clone 242486 (TRBV4-1, TRBJ1-1)
CASSQEWGHYTEAFF

SEQ ID NO: 484973 - protein, 13 aa, Homo sapiens
  CDR3 for alpha chain variable domain of TCR clone 242487 (TRAV13-1, TRAJ39)
CSKYINAGNMLTF

SEQ ID NO: 484974 - protein, 16 aa, Homo sapiens
  CDR3 for beta chain variable domain of TCR clone 242487 (TRBV20-1, TRBJ1-4)
CSAPGQGLLTNEKLFF

SEQ ID NO: 484975 - protein, 14 aa, Homo sapiens
  CDR3 for alpha chain variable domain of TCR clone 242488 (TRAV38-2/DV8, TRAJ30)
CAYMDSLGGDKIIF

SEQ ID NO: 484976 - protein, 15 aa, Homo sapiens
  CDR3 for beta chain variable domain of TCR clone 242488 (TRBV7-9, TRBJ2-2)
CASRPADRDTGELFF

SEQ ID NO: 484977 - protein, 14 aa, Homo sapiens
  CDR3 for alpha chain variable domain of TCR clone 242489 (TRAV21, TRAJ9)
CCGGGGTGGFKTIF

SEQ ID NO: 484978 - protein, 13 aa, Homo sapiens
  CDR3 for beta chain variable domain of TCR clone 242489 (TRBV12-4, TRBJ1-2)
CASNSGLTVISTF

SEQ ID NO: 484979 - protein, 14 aa, Homo sapiens
  CDR3 for alpha chain variable domain of TCR clone 242490 (TRAV12-1, TRAJ17)
CVVNYKAAGIKLTF

SEQ ID NO: 484980 - protein, 14 aa, Homo sapiens
  CDR3 for beta chain variable domain of TCR clone 242490 (TRBV20-1, TRBJ1-1)
CSAQTRIGGTEAFF

SEQ ID NO: 484981 - protein, 13 aa, Homo sapiens
  CDR3 for alpha chain variable domain of TCR clone 242491 (TRAV20, TRAJ40)
CAVPFSGTYKYIF

SEQ ID NO: 484982 - protein, 13 aa, Homo sapiens
  CDR3 for beta chain variable domain of TCR clone 242491 (TRBV15, TRBJ2-5)
CVTSQIGEETQYF

SEQ ID NO: 484983 - protein, 14 aa, Homo sapiens
  CDR3 for alpha chain variable domain of TCR clone 242492 (TRAV12-1, TRAJ3)
CVVNPGSSASKIIF

SEQ ID NO: 484984 - protein, 15 aa, Homo sapiens
  CDR3 for beta chain variable domain of TCR clone 242492 (TRBV5-7, TRBJ1-2)
CAGSSPGQGNYGDTF

SEQ ID NO: 484985 - protein, 12 aa, Homo sapiens
  CDR3 for alpha chain variable domain of TCR clone 242493 (TRAV8-4, TRAJ43)
CAVSVNNNDIRF

SEQ ID NO: 484986 - protein, 15 aa, Homo sapiens
  CDR3 for beta chain variable domain of TCR clone 242493 (TRBV20-1, TRBJ2-7)
CSARDPVKGEGEQYF

SEQ ID NO: 484987 - protein, 14 aa, Homo sapiens
  CDR3 for alpha chain variable domain of TCR clone 242494 (TRAV12-1, TRAJ38)
CVVNDAGNNRKLIW

SEQ ID NO: 484988 - protein, 14 aa, Homo sapiens
  CDR3 for beta chain variable domain of TCR clone 242494 (TRBV20-1, TRBJ1-3)
CSASPTGAGNTMYF

SEQ ID NO: 484989 - protein, 15 aa, Homo sapiens
  CDR3 for alpha chain variable domain of TCR clone 242495 (TRAV23/DV6, TRAJ23)
CAGGEKQGRKAYLRT

SEQ ID NO: 484990 - protein, 16 aa, Homo sapiens
  CDR3 for beta chain variable domain of TCR clone 242495 (TRBV27, TRBJ2-7)
CASSKQGRGWAYEQYF

SEQ ID NO: 484991 - protein, 16 aa, Homo sapiens
  CDR3 for alpha chain variable domain of TCR clone 242496 (TRAV16, TRAJ4)
CALSRMFSGGYNKLIF

SEQ ID NO: 484992 - protein, 16 aa, Homo sapiens
  CDR3 for beta chain variable domain of TCR clone 242496 (TRBV7-9, TRBJ2-1)
CASSDVAGGSYNEQFF

SEQ ID NO: 484993 - protein, 11 aa, Homo sapiens
  CDR3 for alpha chain variable domain of TCR clone 242497 (TRAV13-1, TRAJ52)
PGGTSYGKLTF

SEQ ID NO: 484994 - protein, 11 aa, Homo sapiens
  CDR3 for beta chain variable domain of TCR clone 242497 (TRBV20-1, TRBJ1-2)
CSVQGAGGYTF

SEQ ID NO: 484995 - protein, 12 aa, Homo sapiens
  CDR3 for alpha chain variable domain of TCR clone 242498 (TRAV12-3, TRAJ17)
CAMTLTGNKLTF

SEQ ID NO: 484996 - protein, 15 aa, Homo sapiens
  CDR3 for beta chain variable domain of TCR clone 242498 (TRBV11-2, TRBJ2-1)
CASSLTSGGYNEQFF

SEQ ID NO: 484997 - protein, 16 aa, Homo sapiens
  CDR3 for alpha chain variable domain of TCR clone 242499 (TRAV30, TRAJ24)
CGTESVDADSWGKFPF

SEQ ID NO: 484998 - protein, 14 aa, Homo sapiens
  CDR3 for beta chain variable domain of TCR clone 242499 (TRBV12-5, TRBJ2-5)
CASGSRTHQETQYF

SEQ ID NO: 484999 - protein, 14 aa, Homo sapiens
  CDR3 for alpha chain variable domain of TCR clone 242500 (TRAV17, TRAJ39)
CATDPVRAGNMLTF

SEQ ID NO: 485000 - protein, 15 aa, Homo sapiens
  CDR3 for beta chain variable domain of TCR clone 242500 (TRBV13, TRBJ1-5)
CAGSFGQGGVQPQHF

SEQ ID NO: 485001 - protein, 15 aa, Homo sapiens
  CDR3 for alpha chain variable domain of TCR clone 242501 (TRAV12-2, TRAJ53)
CAVNGGGGSNYKLTF

SEQ ID NO: 485002 - protein, 16 aa, Homo sapiens
  CDR3 for beta chain variable domain of TCR clone 242501 (TRBV12-4, TRBJ1-5)
CASRQPVEGSNQPQHF

SEQ ID NO: 485003 - protein, 13 aa, Homo sapiens
  CDR3 for alpha chain variable domain of TCR clone 242502 (TRAV23/DV6, TRAJ9)
CSASTTGGFKTIF

SEQ ID NO: 485004 - protein, 14 aa, Homo sapiens
  CDR3 for beta chain variable domain of TCR clone 242502 (TRBV5-1, TRBJ2-3)
CASRVDGVSDTQYF

SEQ ID NO: 485005 - protein, 16 aa, Homo sapiens
  CDR3 for alpha chain variable domain of TCR clone 242503 (TRAV26-1, TRAJ56)
CIVRARARGANSKLTF

SEQ ID NO: 485006 - protein, 13 aa, Homo sapiens
  CDR3 for beta chain variable domain of TCR clone 242503 (TRBV7-2, TRBJ1-1)
CASSLRANTEAFF

SEQ ID NO: 485007 - protein, 12 aa, Homo sapiens
  CDR3 for alpha chain variable domain of TCR clone 242504 (TRAV12-2, TRAJ4)
GWPEGGYNKLIF

SEQ ID NO: 485008 - protein, 16 aa, Homo sapiens
  CDR3 for beta chain variable domain of TCR clone 242504 (TRBV6-1, TRBJ2-5)
CASSETLGRGAETQYF

SEQ ID NO: 485009 - protein, 15 aa, Homo sapiens
  CDR3 for alpha chain variable domain of TCR clone 242505 (TRAV25, TRAJ52)
CAGTSGGTSYGKLTF

SEQ ID NO: 485010 - protein, 16 aa, Homo sapiens
  CDR3 for beta chain variable domain of TCR clone 242505 (TRBV20-1, TRBJ1-2)
CSASMEQGVANYGYTF

SEQ ID NO: 485011 - protein, 14 aa, Homo sapiens
  CDR3 for alpha chain variable domain of TCR clone 242506 (TRAV13-1, TRAJ3)
CAASKSSSASKIIF

SEQ ID NO: 485012 - protein, 12 aa, Homo sapiens
  CDR3 for beta chain variable domain of TCR clone 242506 (TRBV5-1, TRBJ2-7)
CASSLDSYEQYF

SEQ ID NO: 485013 - protein, 14 aa, Homo sapiens
  CDR3 for alpha chain variable domain of TCR clone 242507 (TRAV13-2, TRAJ17)
CAENSKAAGNKLTF

SEQ ID NO: 485014 - protein, 15 aa, Homo sapiens
  CDR3 for beta chain variable domain of TCR clone 242507 (TRBV5-1, TRBJ2-3)
CASSVTSGSTDTQYF

SEQ ID NO: 485015 - protein, 16 aa, Homo sapiens
  CDR3 for alpha chain variable domain of TCR clone 242508 (TRAV21, TRAJ17)
CAVRPGEEAAGNKLTF

SEQ ID NO: 485016 - protein, 16 aa, Homo sapiens
  CDR3 for beta chain variable domain of TCR clone 242508 (TRBV2, TRBJ2-7)
CATSEPWTGPSYEQYF

SEQ ID NO: 485017 - protein, 14 aa, Homo sapiens
  CDR3 for alpha chain variable domain of TCR clone 242509 (TRAV12-3, TRAJ10)
SHLPLTGGGNKLTF

SEQ ID NO: 485018 - protein, 14 aa, Homo sapiens
  CDR3 for beta chain variable domain of TCR clone 242509 (TRBV2, TRBJ2-1)
CASSEALIYNEQFF

SEQ ID NO: 485019 - protein, 18 aa, Homo sapiens
  CDR3 for alpha chain variable domain of TCR clone 242510 (TRAV21, TRAJ53)
CAVKGGENSGGSNYKLTF

SEQ ID NO: 485020 - protein, 15 aa, Homo sapiens
  CDR3 for beta chain variable domain of TCR clone 242510 (TRBV7-2, TRBJ2-3)
CASSLNLRDTDTQYF

SEQ ID NO: 485021 - protein, 16 aa, Homo sapiens
  CDR3 for alpha chain variable domain of TCR clone 242511 (TRAV12-2, TRAJ45)
CAVKRYPGGGADGLTF

SEQ ID NO: 485022 - protein, 12 aa, Homo sapiens
  CDR3 for beta chain variable domain of TCR clone 242511 (TRBV6-1, TRBJ2-5)
CASSEGRETQYF

SEQ ID NO: 485023 - protein, 15 aa, Homo sapiens
  CDR3 for alpha chain variable domain of TCR clone 242512 (TRAV8-3, TRAJ45)
CASSYSGGGADGLTF

SEQ ID NO: 485024 - protein, 15 aa, Homo sapiens
  CDR3 for beta chain variable domain of TCR clone 242512 (TRBV19, TRBJ2-7)
CASSIGGGLVNEQYF

SEQ ID NO: 485025 - protein, 20 aa, Homo sapiens
  CDR3 for alpha chain variable domain of TCR clone 242513 (TRAV16, )
CALRTQIPDIQNPDPAVYQL

SEQ ID NO: 485026 - protein, 16 aa, Homo sapiens
  CDR3 for beta chain variable domain of TCR clone 242513 (TRBV7-2, TRBJ1-2)
CASSSNQDRRGHGYTF

SEQ ID NO: 485027 - protein, 14 aa, Homo sapiens
  CDR3 for alpha chain variable domain of TCR clone 242514 (TRAV23/DV6, TRAJ17)
CAARGRAAGNKLTF

SEQ ID NO: 485028 - protein, 12 aa, Homo sapiens
  CDR3 for beta chain variable domain of TCR clone 242514 (TRBV7-9, TRBJ2-3)
CASSFITDTQYV

SEQ ID NO: 485029 - protein, 15 aa, Homo sapiens
  CDR3 for alpha chain variable domain of TCR clone 242515 (TRAV8-2, TRAJ40)
CVVLGTTSGTYKYIF

SEQ ID NO: 485030 - protein, 13 aa, Homo sapiens
  CDR3 for beta chain variable domain of TCR clone 242515 (TRBV5-4, TRBJ2-5)
CASSLDSSETQYF

SEQ ID NO: 485031 - protein, 15 aa, Homo sapiens
  CDR3 for alpha chain variable domain of TCR clone 242516 (TRAV16, TRAJ48)
CALFISNFGNEKLTF

SEQ ID NO: 485032 - protein, 14 aa, Homo sapiens
  CDR3 for beta chain variable domain of TCR clone 242516 (TRBV7-2, TRBJ2-7)
CASRSQGAAYEQYF

SEQ ID NO: 485033 - protein, 18 aa, Homo sapiens
  CDR3 for alpha chain variable domain of TCR clone 242517 (TRAV26-1, TRAJ23)
CIVRVGLEVWNQGGKRIF

SEQ ID NO: 485034 - protein, 14 aa, Homo sapiens
  CDR3 for beta chain variable domain of TCR clone 242517 (TRBV7-6, TRBJ2-3)
CASSLGTVTDTQYF

SEQ ID NO: 485035 - protein, 12 aa, Homo sapiens
  CDR3 for alpha chain variable domain of TCR clone 242518 (TRAV12-3, TRAJ3)
CAIDSSASKIIF

SEQ ID NO: 485036 - protein, 17 aa, Homo sapiens
  CDR3 for beta chain variable domain of TCR clone 242518 (TRBV7-9, TRBJ2-3)
CASSLEEAGAYPDMQYF

SEQ ID NO: 485037 - protein, 13 aa, Homo sapiens
  CDR3 for alpha chain variable domain of TCR clone 242519 (TRAV12-1, TRAJ26)
CVVRRNYGQNFVF

SEQ ID NO: 485038 - protein, 14 aa, Homo sapiens
  CDR3 for beta chain variable domain of TCR clone 242519 (TRBV19, TRBJ1-1)
CASSPNRGDTEAFF

SEQ ID NO: 485039 - protein, 14 aa, Homo sapiens
  CDR3 for alpha chain variable domain of TCR clone 242520 (TRAV12-3, TRAJ57)
CARALEGGSEKLVF

SEQ ID NO: 485040 - protein, 15 aa, Homo sapiens
  CDR3 for beta chain variable domain of TCR clone 242520 (TRBV20-1, TRBJ2-7)
CSARKGLAESYEQYF

SEQ ID NO: 485041 - protein, 14 aa, Homo sapiens
  CDR3 for alpha chain variable domain of TCR clone 242521 (TRAV1-2, TRAJ8)
CAVREDTGFQKLVF

SEQ ID NO: 485042 - protein, 17 aa, Homo sapiens
  CDR3 for beta chain variable domain of TCR clone 242521 (TRBV11-2, TRBJ2-1)
CASSLYPPGAEYNEQFF

SEQ ID NO: 485043 - protein, 16 aa, Homo sapiens
  CDR3 for alpha chain variable domain of TCR clone 242522 (TRAV12-1, TRAJ43)
CVVNPHRLGAGTRLTV

SEQ ID NO: 485044 - protein, 16 aa, Homo sapiens
  CDR3 for beta chain variable domain of TCR clone 242522 (TRBV27, TRBJ2-2)
CASSSTGGGDTGELFF

SEQ ID NO: 485045 - protein, 14 aa, Homo sapiens
  CDR3 for alpha chain variable domain of TCR clone 242523 (TRAV16, TRAJ32)
CALKSGGATNKLIF

SEQ ID NO: 485046 - protein, 16 aa, Homo sapiens
  CDR3 for beta chain variable domain of TCR clone 242523 (TRBV19, TRBJ2-1)
CASSKAGPSSYNEQFF

SEQ ID NO: 485047 - protein, 16 aa, Homo sapiens
  CDR3 for alpha chain variable domain of TCR clone 242524 (TRAV17, TRAJ28)
CATALDSGAGSYQLIF

SEQ ID NO: 485048 - protein, 15 aa, Homo sapiens
  CDR3 for beta chain variable domain of TCR clone 242524 (TRBV12-4, TRBJ1-2)
CASSFEAGLGYGYTF

SEQ ID NO: 485049 - protein, 14 aa, Homo sapiens
  CDR3 for alpha chain variable domain of TCR clone 242525 (TRAV12-3, TRAJ29)
CAMILLSGNTPLVF

SEQ ID NO: 485050 - protein, 16 aa, Homo sapiens
  CDR3 for beta chain variable domain of TCR clone 242525 (TRBV13, TRBJ2-3)
CQQPLQGSGGRNTQYF

SEQ ID NO: 485051 - protein, 16 aa, Homo sapiens
  CDR3 for alpha chain variable domain of TCR clone 242526 (TRAV3, TRAJ10)
CAVRDRNAGGGNKLTF

SEQ ID NO: 485052 - protein, 16 aa, Homo sapiens
  CDR3 for beta chain variable domain of TCR clone 242526 (TRBV6-3, TRBJ1-2)
CASSYSRRASNYGYTF

SEQ ID NO: 485053 - protein, 12 aa, Homo sapiens
  CDR3 for alpha chain variable domain of TCR clone 242527 (TRAV12-3, TRAJ17)
CAMTLTGNKLPF

SEQ ID NO: 485054 - protein, 14 aa, Homo sapiens
  CDR3 for beta chain variable domain of TCR clone 242527 (TRBV4-1, TRBJ2-7)
CASSQDREHVEQYF

SEQ ID NO: 485055 - protein, 18 aa, Homo sapiens
  CDR3 for alpha chain variable domain of TCR clone 242528 (TRAV26-2, TRAJ54)
CILRDVEVGIQGAQKLVF

SEQ ID NO: 485056 - protein, 15 aa, Homo sapiens
  CDR3 for beta chain variable domain of TCR clone 242528 (TRBV11-3, TRBJ2-1)
CASSGGTSSLDEQFF

SEQ ID NO: 485057 - protein, 18 aa, Homo sapiens
  CDR3 for alpha chain variable domain of TCR clone 242529 (TRAV26-2, TRAJ54)
CILRDVEVGIQGAQKLVF

SEQ ID NO: 485058 - protein, 20 aa, Homo sapiens
  CDR3 for beta chain variable domain of TCR clone 242529 (TRBV28, TRBJ2-1)
CASTPIGRSPGLAGGNEQFF

SEQ ID NO: 485059 - protein, 14 aa, Homo sapiens
  CDR3 for alpha chain variable domain of TCR clone 242530 (TRAV2, TRAJ11)
CAVVPNSGYSTLTF

SEQ ID NO: 485060 - protein, 15 aa, Homo sapiens
  CDR3 for beta chain variable domain of TCR clone 242530 (TRBV4-1, TRBJ1-3)
CASSQGLRVGNTIYF

SEQ ID NO: 485061 - protein, 14 aa, Homo sapiens
  CDR3 for alpha chain variable domain of TCR clone 242531 (TRAV38-1, TRAJ45)
CASHSGGGADGLTF

SEQ ID NO: 485062 - protein, 13 aa, Homo sapiens
  CDR3 for beta chain variable domain of TCR clone 242531 (TRBV7-9, TRBJ2-2)
CASSSAGTGELFS

SEQ ID NO: 485063 - protein, 14 aa, Homo sapiens
  CDR3 for alpha chain variable domain of TCR clone 242532 (TRAV17, TRAJ34)
CATDSLEGTDKLIF

SEQ ID NO: 485064 - protein, 15 aa, Homo sapiens
  CDR3 for beta chain variable domain of TCR clone 242532 (TRBV28, TRBJ2-7)
CASSPGGRGFYEQYF

SEQ ID NO: 485065 - protein, 14 aa, Homo sapiens
  CDR3 for alpha chain variable domain of TCR clone 242533 (TRAV8-3, TRAJ6)
CAVGASGGSNIPTF

SEQ ID NO: 485066 - protein, 17 aa, Homo sapiens
  CDR3 for beta chain variable domain of TCR clone 242533 (TRBV18, TRBJ2-2)
CASSPSDPWQNTGELFF

SEQ ID NO: 485067 - protein, 12 aa, Homo sapiens
  CDR3 for alpha chain variable domain of TCR clone 242534 (TRAV12-1, TRAJ34)
CVVAGATEQLIL

SEQ ID NO: 485068 - protein, 12 aa, Homo sapiens
  CDR3 for beta chain variable domain of TCR clone 242534 (TRBV7-9, TRBJ1-1)
CASSLVRGEAFF

SEQ ID NO: 485069 - protein, 16 aa, Homo sapiens
  CDR3 for alpha chain variable domain of TCR clone 242535 (TRAV16, TRAJ52)
CALSAAGGTSYGKLTF

SEQ ID NO: 485070 - protein, 11 aa, Homo sapiens
  CDR3 for beta chain variable domain of TCR clone 242535 (TRBV20-1, TRBJ1-5)
CSAQGDQPQHF

SEQ ID NO: 485071 - protein, 13 aa, Homo sapiens
  CDR3 for alpha chain variable domain of TCR clone 242536 (TRAV1-2, TRAJ9)
CAALNTGGFKTIF

SEQ ID NO: 485072 - protein, 20 aa, Homo sapiens
  CDR3 for beta chain variable domain of TCR clone 242536 (TRBV28, TRBJ2-1)
CASTPIGRSPGLAEGNEQFF

SEQ ID NO: 485073 - protein, 11 aa, Homo sapiens
  CDR3 for alpha chain variable domain of TCR clone 242537 (TRAV1-2, TRAJ20)
CAVANDYKLSF

SEQ ID NO: 485074 - protein, 18 aa, Homo sapiens
  CDR3 for beta chain variable domain of TCR clone 242537 (TRBV20-1, TRBJ2-6)
CSAEATPTHGSGADVLTF

SEQ ID NO: 485075 - protein, 17 aa, Homo sapiens
  CDR3 for alpha chain variable domain of TCR clone 242538 (TRAV3, TRAJ38)
FAVRDCLNAGNNRKLIW

SEQ ID NO: 485076 - protein, 13 aa, Homo sapiens
  CDR3 for beta chain variable domain of TCR clone 242538 (TRBV23-1, TRBJ1-4)
CASRGKFNEKLFF

SEQ ID NO: 485077 - protein, 15 aa, Homo sapiens
  CDR3 for alpha chain variable domain of TCR clone 242539 (TRAV38-1, TRAJ30)
CAFMMSYGGDDMIIF

SEQ ID NO: 485078 - protein, 16 aa, Homo sapiens
  CDR3 for beta chain variable domain of TCR clone 242539 (TRBV7-9, TRBJ2-7)
CASSFGLAGPSYEQYF

SEQ ID NO: 485079 - protein, 15 aa, Homo sapiens
  CDR3 for alpha chain variable domain of TCR clone 242540 (TRAV3, TRAJ22)
CALRDRGGSARQLTF

SEQ ID NO: 485080 - protein, 16 aa, Homo sapiens
  CDR3 for beta chain variable domain of TCR clone 242540 (TRBV5-4, TRBJ2-3)
CARQQPGAGGADTQYF

SEQ ID NO: 485081 - protein, 17 aa, Homo sapiens
  CDR3 for alpha chain variable domain of TCR clone 242541 (TRAV27, TRAJ42)
CAERVIYYGGSQGNLIF

SEQ ID NO: 485082 - protein, 15 aa, Homo sapiens
  CDR3 for beta chain variable domain of TCR clone 242541 (TRBV11-3, TRBJ2-7)
CASSLLSGSSYEQYF

SEQ ID NO: 485083 - protein, 16 aa, Homo sapiens
  CDR3 for alpha chain variable domain of TCR clone 242542 (TRAV35, TRAJ28)
CAVQRYSGAGSYQLTF

SEQ ID NO: 485084 - protein, 14 aa, Homo sapiens
  CDR3 for beta chain variable domain of TCR clone 242542 (TRBV18, TRBJ2-7)
CASSPRGGAYEQYF

SEQ ID NO: 485085 - protein, 13 aa, Homo sapiens
  CDR3 for alpha chain variable domain of TCR clone 242543 (TRAV8-3, TRAJ42)
CARYGGSQGNLNF

SEQ ID NO: 485086 - protein, 14 aa, Homo sapiens
  CDR3 for beta chain variable domain of TCR clone 242543 (TRBV20-1, TRBJ2-1)
CSALDRVTYNEQFF

SEQ ID NO: 485087 - protein, 14 aa, Homo sapiens
  CDR3 for alpha chain variable domain of TCR clone 242544 (TRAV1-2, TRAJ16)
CAVRGFSDGQKLLF

SEQ ID NO: 485088 - protein, 13 aa, Homo sapiens
  CDR3 for beta chain variable domain of TCR clone 242544 (TRBV12-4, TRBJ1-1)
CASSPGTGFEAFF

SEQ ID NO: 485089 - protein, 11 aa, Homo sapiens
  CDR3 for alpha chain variable domain of TCR clone 242545 (TRAV12-1, TRAJ21)
CVVYNFNKFYF

SEQ ID NO: 485090 - protein, 14 aa, Homo sapiens
  CDR3 for beta chain variable domain of TCR clone 242545 (TRBV19, TRBJ2-7)
CASIMGQGAIEQYF

SEQ ID NO: 485091 - protein, 11 aa, Homo sapiens
  CDR3 for alpha chain variable domain of TCR clone 242546 (TRAV21, TRAJ34)
CAVTNTDKLIF

SEQ ID NO: 485092 - protein, 19 aa, Homo sapiens
  CDR3 for beta chain variable domain of TCR clone 242546 (TRBV7-2, TRBJ2-3)
CASSFLSRKWGGGTDTQYF

SEQ ID NO: 485093 - protein, 16 aa, Homo sapiens
  CDR3 for alpha chain variable domain of TCR clone 242547 (TRAV8-6, TRAJ4)
CAGSERISGGYNKLIF

SEQ ID NO: 485094 - protein, 19 aa, Homo sapiens
  CDR3 for beta chain variable domain of TCR clone 242547 (TRBV19, TRBJ1-5)
CASSISPRQTGGGNQPQHF

SEQ ID NO: 485095 - protein, 14 aa, Homo sapiens
  CDR3 for alpha chain variable domain of TCR clone 242548 (TRAV26-1, TRAJ38)
CIADNAGNNRKLIW

SEQ ID NO: 485096 - protein, 11 aa, Homo sapiens
  CDR3 for beta chain variable domain of TCR clone 242548 (TRBV19, TRBJ2-1)
CASRRRYEQFF

SEQ ID NO: 485097 - protein, 12 aa, Homo sapiens
  CDR3 for alpha chain variable domain of TCR clone 242549 (TRAV27, TRAJ35)
CAGADFGNVLHC

SEQ ID NO: 485098 - protein, 19 aa, Homo sapiens
  CDR3 for beta chain variable domain of TCR clone 242549 (TRBV25-1, TRBJ2-2)
CAILVYRVDRGRKTGELFF

SEQ ID NO: 485099 - protein, 13 aa, Homo sapiens
  CDR3 for alpha chain variable domain of TCR clone 242550 (TRAV8-4, TRAJ8)
CAVSYTGFQKLVF

SEQ ID NO: 485100 - protein, 15 aa, Homo sapiens
  CDR3 for beta chain variable domain of TCR clone 242550 (TRBV7-3, TRBJ2-2)
CQQLKAGTLSGELFF

SEQ ID NO: 485101 - protein, 12 aa, Homo sapiens
  CDR3 for alpha chain variable domain of TCR clone 242551 (TRAV22, TRAJ29)
CAPPSGNTPLVV

SEQ ID NO: 485102 - protein, 14 aa, Homo sapiens
  CDR3 for beta chain variable domain of TCR clone 242551 (TRBV11-2, TRBJ2-7)
CASSLGAGAYEQYF

SEQ ID NO: 485103 - protein, 12 aa, Homo sapiens
  CDR3 for alpha chain variable domain of TCR clone 242552 (TRAV3, TRAJ43)
CCERGRNNEMRF

SEQ ID NO: 485104 - protein, 12 aa, Homo sapiens
  CDR3 for beta chain variable domain of TCR clone 242552 (TRBV5-1, TRBJ2-7)
CASSLDSYEQYF

SEQ ID NO: 485105 - protein, 14 aa, Homo sapiens
  CDR3 for alpha chain variable domain of TCR clone 242553 (TRAV17, TRAJ22)
CATVLSGSARQLTF

SEQ ID NO: 485106 - protein, 13 aa, Homo sapiens
  CDR3 for beta chain variable domain of TCR clone 242553 (TRBV15, TRBJ1-6)
CATSGGLDSPLHF

SEQ ID NO: 485107 - protein, 16 aa, Homo sapiens
  CDR3 for alpha chain variable domain of TCR clone 242554 (TRAV8-4, TRAJ18)
CAVTANGGSTLGGRYF

SEQ ID NO: 485108 - protein, 14 aa, Homo sapiens
  CDR3 for beta chain variable domain of TCR clone 242554 (TRBV12-4, TRBJ1-2)
CASSSAGHIYGYTF

SEQ ID NO: 485109 - protein, 14 aa, Homo sapiens
  CDR3 for alpha chain variable domain of TCR clone 242555 (TRAV1-2, TRAJ8)
CAVREDTGFQKLVF

SEQ ID NO: 485110 - protein, 14 aa, Homo sapiens
  CDR3 for beta chain variable domain of TCR clone 242555 (TRBV28, TRBJ2-1)
CASSASTGYNEQFF

SEQ ID NO: 485111 - protein, 15 aa, Homo sapiens
  CDR3 for alpha chain variable domain of TCR clone 242556 (TRAV27, TRAJ38)
CAGRFDAGTTRKLIW

SEQ ID NO: 485112 - protein, 13 aa, Homo sapiens
  CDR3 for beta chain variable domain of TCR clone 242556 (TRBV20-1, TRBJ2-1)
TSGALPPGNEQFF

SEQ ID NO: 485113 - protein, 11 aa, Homo sapiens
  CDR3 for alpha chain variable domain of TCR clone 242557 (TRAV12-1, TRAJ30)
CVVNGQDKIIF

SEQ ID NO: 485114 - protein, 13 aa, Homo sapiens
  CDR3 for beta chain variable domain of TCR clone 242557 (TRBV12-5, TRBJ2-1)
CASGLGRGNEQFF

SEQ ID NO: 485115 - protein, 15 aa, Homo sapiens
  CDR3 for alpha chain variable domain of TCR clone 242558 (TRAV4, )
CLVDIQNPDPAVYQL

SEQ ID NO: 485116 - protein, 13 aa, Homo sapiens
  CDR3 for beta chain variable domain of TCR clone 242558 (TRBV6-1, TRBJ2-1)
CAGMDPTNNEQFF

SEQ ID NO: 485117 - protein, 14 aa, Homo sapiens
  CDR3 for alpha chain variable domain of TCR clone 242559 (TRAV13-2, TRAJ4)
CAEKGPKGYNKLIF

SEQ ID NO: 485118 - protein, 13 aa, Homo sapiens
  CDR3 for beta chain variable domain of TCR clone 242559 (TRBV18, TRBJ2-5)
CASSPPGKETQSF

SEQ ID NO: 485119 - protein, 14 aa, Homo sapiens
  CDR3 for alpha chain variable domain of TCR clone 242560 (TRAV12-2, TRAJ32)
CAHPESGATNKLIF

SEQ ID NO: 485120 - protein, 14 aa, Homo sapiens
  CDR3 for beta chain variable domain of TCR clone 242560 (TRBV4-2, TRBJ2-3)
CACRETRAPGMQYF

SEQ ID NO: 485121 - protein, 12 aa, Homo sapiens
  CDR3 for alpha chain variable domain of TCR clone 242561 (TRAV21, TRAJ29)
CAVTSGNTALVF

SEQ ID NO: 485122 - protein, 15 aa, Homo sapiens
  CDR3 for beta chain variable domain of TCR clone 242561 (TRBV12-4, TRBJ1-2)
CASRLGVAGNYGYTF

SEQ ID NO: 485123 - protein, 13 aa, Homo sapiens
  CDR3 for alpha chain variable domain of TCR clone 242562 (TRAV23/DV6, TRAJ22)
CAPYSGSARQLPF

SEQ ID NO: 485124 - protein, 15 aa, Homo sapiens
  CDR3 for beta chain variable domain of TCR clone 242562 (TRBV11-2, TRBJ1-6)
CASSLGPWAVSPLHF

SEQ ID NO: 485125 - protein, 14 aa, Homo sapiens
  CDR3 for alpha chain variable domain of TCR clone 242563 (TRAV1-2, TRAJ16)
CAVNRFSYGQKLLF

SEQ ID NO: 485126 - protein, 13 aa, Homo sapiens
  CDR3 for beta chain variable domain of TCR clone 242563 (TRBV15, TRBJ1-6)
CATSGGLNSPLHF

SEQ ID NO: 485127 - protein, 15 aa, Homo sapiens
  CDR3 for alpha chain variable domain of TCR clone 242564 (TRAV8-3, TRAJ44)
CAVGAGAGTASKLTV

SEQ ID NO: 485128 - protein, 12 aa, Homo sapiens
  CDR3 for beta chain variable domain of TCR clone 242564 (TRBV7-8, TRBJ2-4)
CASSLGGNIQYF

SEQ ID NO: 485129 - protein, 10 aa, Homo sapiens
  CDR3 for alpha chain variable domain of TCR clone 242565 (TRAV30, TRAJ48)
CGIGNEKLTF

SEQ ID NO: 485130 - protein, 14 aa, Homo sapiens
  CDR3 for beta chain variable domain of TCR clone 242565 (TRBV7-6, TRBJ2-3)
CASSVAGGTDPQYF

SEQ ID NO: 485131 - protein, 14 aa, Homo sapiens
  CDR3 for alpha chain variable domain of TCR clone 242566 (TRAV12-2, TRAJ13)
CAVKKTGGYQKVTF

SEQ ID NO: 485132 - protein, 16 aa, Homo sapiens
  CDR3 for beta chain variable domain of TCR clone 242566 (TRBV12-5, TRBJ2-5)
CASGPRTSGNQETPYF

SEQ ID NO: 485133 - protein, 15 aa, Homo sapiens
  CDR3 for alpha chain variable domain of TCR clone 242567 (TRAV12-2, TRAJ23)
CAVKPIYNQGGKLIF

SEQ ID NO: 485134 - protein, 15 aa, Homo sapiens
  CDR3 for beta chain variable domain of TCR clone 242567 (TRBV5-1, TRBJ1-2)
CAISLVGGQSQGYTF

SEQ ID NO: 485135 - protein, 15 aa, Homo sapiens
  CDR3 for alpha chain variable domain of TCR clone 242568 (TRAV8-3, TRAJ15)
YAVGAPNQAGTALIF

SEQ ID NO: 485136 - protein, 14 aa, Homo sapiens
  CDR3 for beta chain variable domain of TCR clone 242568 (TRBV20-1, TRBJ2-1)
CSPNDEASYNEQFF

SEQ ID NO: 485137 - protein, 15 aa, Homo sapiens
  CDR3 for alpha chain variable domain of TCR clone 242569 (TRAV3, TRAJ22)
CAVRDRGGSARQLTF

SEQ ID NO: 485138 - protein, 15 aa, Homo sapiens
  CDR3 for beta chain variable domain of TCR clone 242569 (TRBV4-2, TRBJ1-2)
CASSQRTGGRDGYTF

SEQ ID NO: 485139 - protein, 15 aa, Homo sapiens
  CDR3 for alpha chain variable domain of TCR clone 242570 (TRAV12-1, TRAJ27)
CVVNIQEPMQANQPL

SEQ ID NO: 485140 - protein, 15 aa, Homo sapiens
  CDR3 for beta chain variable domain of TCR clone 242570 (TRBV19, TRBJ1-1)
CASTSGQIQNTEAFF

SEQ ID NO: 485141 - protein, 17 aa, Homo sapiens
  CDR3 for alpha chain variable domain of TCR clone 242571 (TRAV3, TRAJ12)
CAVRDGGRMDSSYKLIF

SEQ ID NO: 485142 - protein, 15 aa, Homo sapiens
  CDR3 for beta chain variable domain of TCR clone 242571 (TRBV12-5, TRBJ2-2)
CASGRLGGNTGELFF

SEQ ID NO: 485143 - protein, 14 aa, Homo sapiens
  CDR3 for alpha chain variable domain of TCR clone 242572 (TRAV2, TRAJ37)
FAVDFTSNTGKLIF

SEQ ID NO: 485144 - protein, 15 aa, Homo sapiens
  CDR3 for beta chain variable domain of TCR clone 242572 (TRBV20-1, TRBJ1-1)
CSASQGVTGNTEAFF

SEQ ID NO: 485145 - protein, 13 aa, Homo sapiens
  CDR3 for alpha chain variable domain of TCR clone 242573 (TRAV1-2, TRAJ9)
CAALNTGGFKTIF

SEQ ID NO: 485146 - protein, 14 aa, Homo sapiens
  CDR3 for beta chain variable domain of TCR clone 242573 (TRBV7-9, TRBJ2-1)
CASRPTGLRNEQFF

SEQ ID NO: 485147 - protein, 14 aa, Homo sapiens
  CDR3 for alpha chain variable domain of TCR clone 242574 (TRAV29/DV5, TRAJ45)
CAASFRGGADGLTF

SEQ ID NO: 485148 - protein, 11 aa, Homo sapiens
  CDR3 for beta chain variable domain of TCR clone 242574 (TRBV11-2, TRBJ2-2)
CASSLPGEPFF

SEQ ID NO: 485149 - protein, 11 aa, Homo sapiens
  CDR3 for alpha chain variable domain of TCR clone 242575 (TRAV17, TRAJ36)
CAPTGANNLFF

SEQ ID NO: 485150 - protein, 12 aa, Homo sapiens
  CDR3 for beta chain variable domain of TCR clone 242575 (TRBV29-1, TRBJ2-3)
WSVTGGADTQYF

SEQ ID NO: 485151 - protein, 16 aa, Homo sapiens
  CDR3 for alpha chain variable domain of TCR clone 242576 (TRAV12-3, TRAJ53)
CAMSPGSGGSNYKLTF

SEQ ID NO: 485152 - protein, 13 aa, Homo sapiens
  CDR3 for beta chain variable domain of TCR clone 242576 (TRBV12-4, TRBJ2-5)
CASSPGTEETQYF

SEQ ID NO: 485153 - protein, 14 aa, Homo sapiens
  CDR3 for alpha chain variable domain of TCR clone 242577 (TRAV13-1, TRAJ21)
CAAKEGFNKFTLDL

SEQ ID NO: 485154 - protein, 15 aa, Homo sapiens
  CDR3 for beta chain variable domain of TCR clone 242577 (TRBV25-1, TRBJ1-4)
CASSPGDSTNEKLFF

SEQ ID NO: 485155 - protein, 15 aa, Homo sapiens
  CDR3 for alpha chain variable domain of TCR clone 242578 (TRAV10, TRAJ6)
CVVRPRTGGSYIPTC

SEQ ID NO: 485156 - protein, 15 aa, Homo sapiens
  CDR3 for beta chain variable domain of TCR clone 242578 (TRBV20-1, TRBJ2-7)
CSARDRVSGMDEQYF

SEQ ID NO: 485157 - protein, 16 aa, Homo sapiens
  CDR3 for alpha chain variable domain of TCR clone 242579 (TRAV30, TRAJ24)
CGTDTVDADSWGKFQF

SEQ ID NO: 485158 - protein, 14 aa, Homo sapiens
  CDR3 for beta chain variable domain of TCR clone 242579 (TRBV7-2, TRBJ1-2)
CASSQTGSTYGYTF

SEQ ID NO: 485159 - protein, 17 aa, Homo sapiens
  CDR3 for alpha chain variable domain of TCR clone 242580 (TRAV38-2/DV8, TRAJ28)
CAFLTLYSGAGSYQLTF

SEQ ID NO: 485160 - protein, 14 aa, Homo sapiens
  CDR3 for beta chain variable domain of TCR clone 242580 (TRBV7-2, TRBJ2-5)
CTSSLSGGGESQYF

SEQ ID NO: 485161 - protein, 14 aa, Homo sapiens
  CDR3 for alpha chain variable domain of TCR clone 242581 (TRAV12-2, TRAJ13)
CAVKKTGGYQKVTF

SEQ ID NO: 485162 - protein, 12 aa, Homo sapiens
  CDR3 for beta chain variable domain of TCR clone 242581 (TRBV7-9, TRBJ1-5)
CASSPQGQPQHF

SEQ ID NO: 485163 - protein, 13 aa, Homo sapiens
  CDR3 for alpha chain variable domain of TCR clone 242582 (TRAV29/DV5, TRAJ49)
CAASTNTGNQFYS

SEQ ID NO: 485164 - protein, 14 aa, Homo sapiens
  CDR3 for beta chain variable domain of TCR clone 242582 (TRBV7-2, TRBJ2-7)
CASSLPPGQGTQYF

SEQ ID NO: 485165 - protein, 15 aa, Homo sapiens
  CDR3 for alpha chain variable domain of TCR clone 242583 (TRAV27, TRAJ24)
CAGGTSADSWGKLQF

SEQ ID NO: 485166 - protein, 14 aa, Homo sapiens
  CDR3 for beta chain variable domain of TCR clone 242583 (TRBV9, TRBJ2-7)
CASSVAGVPYEQYF

SEQ ID NO: 485167 - protein, 14 aa, Homo sapiens
  CDR3 for alpha chain variable domain of TCR clone 242584 (TRAV1-2, TRAJ8)
CAVREDTGFQKLVF

SEQ ID NO: 485168 - protein, 12 aa, Homo sapiens
  CDR3 for beta chain variable domain of TCR clone 242584 (TRBV29-1, TRBJ2-3)
CRVTGGADTQYF

SEQ ID NO: 485169 - protein, 13 aa, Homo sapiens
  CDR3 for alpha chain variable domain of TCR clone 242585 (TRAV13-2, TRAJ22)
CLGWSSSARLLTF

SEQ ID NO: 485170 - protein, 15 aa, Homo sapiens
  CDR3 for beta chain variable domain of TCR clone 242585 (TRBV7-2, TRBJ2-3)
CASSSTGLETDTQYF

SEQ ID NO: 485171 - protein, 13 aa, Homo sapiens
  CDR3 for alpha chain variable domain of TCR clone 242586 (TRAV13-1, TRAJ9)
CAARITGGFKTIF

SEQ ID NO: 485172 - protein, 14 aa, Homo sapiens
  CDR3 for beta chain variable domain of TCR clone 242586 (TRBV6-1, TRBJ1-3)
CASVQGGGGNTIYF

SEQ ID NO: 485173 - protein, 16 aa, Homo sapiens
  CDR3 for alpha chain variable domain of TCR clone 242587 (TRAV13-1, TRAJ44)
CAAKATGTASNSPLGL

SEQ ID NO: 485174 - protein, 16 aa, Homo sapiens
  CDR3 for beta chain variable domain of TCR clone 242587 (TRBV7-9, TRBJ2-6)
CASSLKGPLRANVLTF

SEQ ID NO: 485175 - protein, 14 aa, Homo sapiens
  CDR3 for alpha chain variable domain of TCR clone 242588 (TRAV17, TRAJ12)
CAILPMDSSYKLIF

SEQ ID NO: 485176 - protein, 11 aa, Homo sapiens
  CDR3 for beta chain variable domain of TCR clone 242588 (TRBV19, TRBJ1-1)
CASSIGSEAFC

SEQ ID NO: 485177 - protein, 13 aa, Homo sapiens
  CDR3 for alpha chain variable domain of TCR clone 242589 (TRAV2, TRAJ40)
CAVVTPGTYKYIF

SEQ ID NO: 485178 - protein, 15 aa, Homo sapiens
  CDR3 for beta chain variable domain of TCR clone 242589 (TRBV27, TRBJ2-1)
CASSNGGGSSNEQFF

SEQ ID NO: 485179 - protein, 11 aa, Homo sapiens
  CDR3 for alpha chain variable domain of TCR clone 242590 (TRAV12-1, TRAJ33)
CVVNMNYQLIW

SEQ ID NO: 485180 - protein, 11 aa, Homo sapiens
  CDR3 for beta chain variable domain of TCR clone 242590 (TRBV10-1, TRBJ2-3)
CASSDADTQYF

SEQ ID NO: 485181 - protein, 12 aa, Homo sapiens
  CDR3 for alpha chain variable domain of TCR clone 242591 (TRAV8-3, TRAJ26)
CAGNNYGQNFVF

SEQ ID NO: 485182 - protein, 15 aa, Homo sapiens
  CDR3 for beta chain variable domain of TCR clone 242591 (TRBV9, TRBJ2-1)
CASSLAGSYYNEQFF

SEQ ID NO: 485183 - protein, 14 aa, Homo sapiens
  CDR3 for alpha chain variable domain of TCR clone 242592 (TRAV29/DV5, TRAJ53)
CAASIGGSNYKLTF

SEQ ID NO: 485184 - protein, 18 aa, Homo sapiens
  CDR3 for beta chain variable domain of TCR clone 242592 (TRBV11-2, TRBJ2-3)
CASSLGGASRGAPNTQYF

SEQ ID NO: 485185 - protein, 14 aa, Homo sapiens
  CDR3 for alpha chain variable domain of TCR clone 242593 (TRAV8-6, TRAJ54)
CAVSLIQGAQKLVF

SEQ ID NO: 485186 - protein, 12 aa, Homo sapiens
  CDR3 for beta chain variable domain of TCR clone 242593 (TRBV7-2, TRBJ2-5)
CASSTGPGTQYF

SEQ ID NO: 485187 - protein, 14 aa, Homo sapiens
  CDR3 for alpha chain variable domain of TCR clone 242594 (TRAV17, TRAJ31)
CATVLRNNNARLMF

SEQ ID NO: 485188 - protein, 14 aa, Homo sapiens
  CDR3 for beta chain variable domain of TCR clone 242594 (TRBV12-4, TRBJ2-5)
CASSLWQKQETRYF

SEQ ID NO: 485189 - protein, 15 aa, Homo sapiens
  CDR3 for alpha chain variable domain of TCR clone 242595 (TRAV21, TRAJ53)
CATLTSGGSNYKLTF

SEQ ID NO: 485190 - protein, 12 aa, Homo sapiens
  CDR3 for beta chain variable domain of TCR clone 242595 (TRBV14, TRBJ2-4)
CASSNLKSIQYF

SEQ ID NO: 485191 - protein, 15 aa, Homo sapiens
  CDR3 for alpha chain variable domain of TCR clone 242596 (TRAV3, TRAJ5)
CAVRDLDTGRRALTL

SEQ ID NO: 485192 - protein, 20 aa, Homo sapiens
  CDR3 for beta chain variable domain of TCR clone 242596 (TRBV7-8, TRBJ2-2)
CASSHLFPGPTIHITGELFF

SEQ ID NO: 485193 - protein, 14 aa, Homo sapiens
  CDR3 for alpha chain variable domain of TCR clone 242597 (TRAV35, TRAJ13)
CAGSPSGGYQKVTF

SEQ ID NO: 485194 - protein, 13 aa, Homo sapiens
  CDR3 for beta chain variable domain of TCR clone 242597 (TRBV7-7, TRBJ2-5)
CASSRSGQETQYF

SEQ ID NO: 485195 - protein, 14 aa, Homo sapiens
  CDR3 for alpha chain variable domain of TCR clone 242598 (TRAV1-2, TRAJ8)
CAVREDTGGQKLVF

SEQ ID NO: 485196 - protein, 17 aa, Homo sapiens
  CDR3 for beta chain variable domain of TCR clone 242598 (TRBV20-1, TRBJ2-2)
CSASGSGQGGLTGELFF

SEQ ID NO: 485197 - protein, 12 aa, Homo sapiens
  CDR3 for alpha chain variable domain of TCR clone 242599 (TRAV13-1, TRAJ49)
CAASPMGNQFDF

SEQ ID NO: 485198 - protein, 13 aa, Homo sapiens
  CDR3 for beta chain variable domain of TCR clone 242599 (TRBV20-1, TRBJ2-2)
CSASAAGTGELFF

SEQ ID NO: 485199 - protein, 11 aa, Homo sapiens
  CDR3 for alpha chain variable domain of TCR clone 242600 (TRAV23/DV6, TRAJ48)
CAPRWGEKLTF

SEQ ID NO: 485200 - protein, 13 aa, Homo sapiens
  CDR3 for beta chain variable domain of TCR clone 242600 (TRBV12-4, TRBJ2-5)
CAGSPGTEETQYF

SEQ ID NO: 485201 - protein, 15 aa, Homo sapiens
  CDR3 for alpha chain variable domain of TCR clone 242601 (TRAV10, TRAJ6)
CVGRPRTGGSYIPTF

SEQ ID NO: 485202 - protein, 15 aa, Homo sapiens
  CDR3 for beta chain variable domain of TCR clone 242601 (TRBV20-1, TRBJ2-7)
CSARDRVSGMDEQYF

SEQ ID NO: 485203 - protein, 13 aa, Homo sapiens
  CDR3 for alpha chain variable domain of TCR clone 242602 (TRAV27, TRAJ57)
CRSAQGGSEKLVF

SEQ ID NO: 485204 - protein, 11 aa, Homo sapiens
  CDR3 for beta chain variable domain of TCR clone 242602 (TRBV11-2, TRBJ1-1)
CASSINTEAYF

SEQ ID NO: 485205 - protein, 13 aa, Homo sapiens
  CDR3 for alpha chain variable domain of TCR clone 242603 (TRAV36/DV7, TRAJ53)
CALSGGSNYKLTF

SEQ ID NO: 485206 - protein, 13 aa, Homo sapiens
  CDR3 for beta chain variable domain of TCR clone 242603 (TRBV28, TRBJ2-7)
CASSIPSRYEQYF

SEQ ID NO: 485207 - protein, 12 aa, Homo sapiens
  CDR3 for alpha chain variable domain of TCR clone 242604 (TRAV12-3, TRAJ40)
CAMSSGTYKYIF

SEQ ID NO: 485208 - protein, 15 aa, Homo sapiens
  CDR3 for beta chain variable domain of TCR clone 242604 (TRBV5-1, TRBJ2-2)
CASSSQGGNTGELFF

SEQ ID NO: 485209 - protein, 14 aa, Homo sapiens
  CDR3 for alpha chain variable domain of TCR clone 242605 (TRAV26-1, TRAJ45)
CIEVTGGGADGLTF

SEQ ID NO: 485210 - protein, 14 aa, Homo sapiens
  CDR3 for beta chain variable domain of TCR clone 242605 (TRBV7-2, TRBJ2-7)
CASSPKTSFYEQYF

SEQ ID NO: 485211 - protein, 14 aa, Homo sapiens
  CDR3 for alpha chain variable domain of TCR clone 242606 (TRAV8-6, TRAJ53)
CAALVLGSNYKLTF

SEQ ID NO: 485212 - protein, 14 aa, Homo sapiens
  CDR3 for beta chain variable domain of TCR clone 242606 (TRBV12-4, TRBJ1-1)
CASSLGTGGTEAFF

SEQ ID NO: 485213 - protein, 12 aa, Homo sapiens
  CDR3 for alpha chain variable domain of TCR clone 242607 (TRAV3, TRAJ20)
CAVRDGDYKLSF

SEQ ID NO: 485214 - protein, 14 aa, Homo sapiens
  CDR3 for beta chain variable domain of TCR clone 242607 (TRBV19, TRBJ2-1)
CASPTIVLSGEQFF

SEQ ID NO: 485215 - protein, 14 aa, Homo sapiens
  CDR3 for alpha chain variable domain of TCR clone 242608 (TRAV1-2, TRAJ16)
CAVNRFSDGQKLLF

SEQ ID NO: 485216 - protein, 14 aa, Homo sapiens
  CDR3 for beta chain variable domain of TCR clone 242608 (TRBV12-5, TRBJ2-5)
CGSGSRTHQETQYF

SEQ ID NO: 485217 - protein, 14 aa, Homo sapiens
  CDR3 for alpha chain variable domain of TCR clone 242609 (TRAV29/DV5, TRAJ36)
CAARRKTGANNFFF

SEQ ID NO: 485218 - protein, 12 aa, Homo sapiens
  CDR3 for beta chain variable domain of TCR clone 242609 (TRBV12-4, TRBJ2-7)
CASSLGGYEQYF

SEQ ID NO: 485219 - protein, 15 aa, Homo sapiens
  CDR3 for alpha chain variable domain of TCR clone 242610 (TRAV20, TRAJ50)
CAVRQMKTSYDKVIF

SEQ ID NO: 485220 - protein, 15 aa, Homo sapiens
  CDR3 for beta chain variable domain of TCR clone 242610 (TRBV7-2, TRBJ2-3)
CASSLAGAFIDTQYF

SEQ ID NO: 485221 - protein, 16 aa, Homo sapiens
  CDR3 for alpha chain variable domain of TCR clone 242611 (TRAV12-3, TRAJ53)
CSMSPGSGGSNYKLTF

SEQ ID NO: 485222 - protein, 16 aa, Homo sapiens
  CDR3 for beta chain variable domain of TCR clone 242611 (TRBV4-2, TRBJ1-1)
CASSQAGFGMNTEAFF

SEQ ID NO: 485223 - protein, 13 aa, Homo sapiens
  CDR3 for alpha chain variable domain of TCR clone 242612 (TRAV12-1, TRAJ49)
CVVTRNTGNQFYF

SEQ ID NO: 485224 - protein, 15 aa, Homo sapiens
  CDR3 for beta chain variable domain of TCR clone 242612 (TRBV7-9, TRBJ2-2)
CASGPLDTFPGELFF

SEQ ID NO: 485225 - protein, 17 aa, Homo sapiens
  CDR3 for alpha chain variable domain of TCR clone 242613 (TRAV13-1, TRAJ52)
CAAGRNAGGTSYGKLKF

SEQ ID NO: 485226 - protein, 14 aa, Homo sapiens
  CDR3 for beta chain variable domain of TCR clone 242613 (TRBV7-2, TRBJ2-7)
CASSPKTSFYEQYF

SEQ ID NO: 485227 - protein, 10 aa, Homo sapiens
  CDR3 for alpha chain variable domain of TCR clone 242614 (TRAV5, TRAJ34)
CAEDTDKLIF

SEQ ID NO: 485228 - protein, 15 aa, Homo sapiens
  CDR3 for beta chain variable domain of TCR clone 242614 (TRBV19, TRBJ1-1)
CASSIRSGGRTEAFF

SEQ ID NO: 485229 - protein, 14 aa, Homo sapiens
  CDR3 for alpha chain variable domain of TCR clone 242615 (TRAV21, TRAJ35)
CAVMPIGFGNVLHC

SEQ ID NO: 485230 - protein, 14 aa, Homo sapiens
  CDR3 for beta chain variable domain of TCR clone 242615 (TRBV7-8, TRBJ2-1)
CATERERSYNEQFF

SEQ ID NO: 485231 - protein, 11 aa, Homo sapiens
  CDR3 for alpha chain variable domain of TCR clone 242616 (TRAV21, TRAJ34)
CAHYNTDKLIF

SEQ ID NO: 485232 - protein, 14 aa, Homo sapiens
  CDR3 for beta chain variable domain of TCR clone 242616 (TRBV2, TRBJ2-1)
CASSVGRSGNEQFF

SEQ ID NO: 485233 - protein, 10 aa, Homo sapiens
  CDR3 for alpha chain variable domain of TCR clone 242617 (TRAV17, TRAJ20)
CATNDYKLSF

SEQ ID NO: 485234 - protein, 13 aa, Homo sapiens
  CDR3 for beta chain variable domain of TCR clone 242617 (TRBV7-3, TRBJ2-7)
CAGSDGLADEQYF

SEQ ID NO: 485235 - protein, 12 aa, Homo sapiens
  CDR3 for alpha chain variable domain of TCR clone 242618 (TRAV3, TRAJ20)
CAVRDPDYKLSF

SEQ ID NO: 485236 - protein, 14 aa, Homo sapiens
  CDR3 for beta chain variable domain of TCR clone 242618 (TRBV4-2, TRBJ2-1)
CASGLERAYNEQFF

SEQ ID NO: 485237 - protein, 12 aa, Homo sapiens
  CDR3 for alpha chain variable domain of TCR clone 242619 (TRAV2, TRAJ9)
CAVGAGGFKTIF

SEQ ID NO: 485238 - protein, 16 aa, Homo sapiens
  CDR3 for beta chain variable domain of TCR clone 242619 (TRBV11-2, TRBJ1-2)
CASGPSGREANYGYTF

SEQ ID NO: 485239 - protein, 13 aa, Homo sapiens
  CDR3 for alpha chain variable domain of TCR clone 242620 (TRAV2, TRAJ40)
CAVVTSGTYKYIF

SEQ ID NO: 485240 - protein, 17 aa, Homo sapiens
  CDR3 for beta chain variable domain of TCR clone 242620 (TRBV28, TRBJ2-6)
CASTPGQAFSGANVLTF

SEQ ID NO: 485241 - protein, 13 aa, Homo sapiens
  CDR3 for alpha chain variable domain of TCR clone 242621 (TRAV29/DV5, TRAJ31)
CAESRNNNARLMF

SEQ ID NO: 485242 - protein, 12 aa, Homo sapiens
  CDR3 for beta chain variable domain of TCR clone 242621 (TRBV14, TRBJ2-5)
CASSQLKETQYF

SEQ ID NO: 485243 - protein, 15 aa, Homo sapiens
  CDR3 for alpha chain variable domain of TCR clone 242622 (TRAV3, TRAJ32)
CAVSSYGGATNKLIF

SEQ ID NO: 485244 - protein, 16 aa, Homo sapiens
  CDR3 for beta chain variable domain of TCR clone 242622 (TRBV5-1, TRBJ2-5)
CASSVSLAGAQETQYF

SEQ ID NO: 485245 - protein, 14 aa, Homo sapiens
  CDR3 for alpha chain variable domain of TCR clone 242623 (TRAV12-3, TRAJ10)
SHLPLTGGGNKLTF

SEQ ID NO: 485246 - protein, 12 aa, Homo sapiens
  CDR3 for beta chain variable domain of TCR clone 242623 (TRBV6-6, TRBJ2-3)
CASSSRGHTQYF

SEQ ID NO: 485247 - protein, 16 aa, Homo sapiens
  CDR3 for alpha chain variable domain of TCR clone 242624 (TRAV17, TRAJ17)
CATALQEEAAGNKLTF

SEQ ID NO: 485248 - protein, 15 aa, Homo sapiens
  CDR3 for beta chain variable domain of TCR clone 242624 (TRBV9, TRBJ1-6)
CARSVAGTGDSPLHF

SEQ ID NO: 485249 - protein, 16 aa, Homo sapiens
  CDR3 for alpha chain variable domain of TCR clone 242625 (TRAV13-1, TRAJ48)
CAASIFGNFGNEKLTF

SEQ ID NO: 485250 - protein, 12 aa, Homo sapiens
  CDR3 for beta chain variable domain of TCR clone 242625 (TRBV14, TRBJ2-4)
CASSNLESIQYF

SEQ ID NO: 485251 - protein, 14 aa, Homo sapiens
  CDR3 for alpha chain variable domain of TCR clone 242626 (TRAV14/DV4, TRAJ41)
CARGGPDSGYALNF

SEQ ID NO: 485252 - protein, 12 aa, Homo sapiens
  CDR3 for beta chain variable domain of TCR clone 242626 (TRBV7-8, TRBJ2-7)
CASSLGDREQYF

SEQ ID NO: 485253 - protein, 14 aa, Homo sapiens
  CDR3 for alpha chain variable domain of TCR clone 242627 (TRAV23/DV6, TRAJ26)
CAASLYNYGQNFVF

SEQ ID NO: 485254 - protein, 16 aa, Homo sapiens
  CDR3 for beta chain variable domain of TCR clone 242627 (TRBV5-1, TRBJ1-1)
CAGSSGGNSLNTEAFF

SEQ ID NO: 485255 - protein, 16 aa, Homo sapiens
  CDR3 for alpha chain variable domain of TCR clone 242628 (TRAV27, TRAJ52)
CAGPDAGGTSYGKLTF

SEQ ID NO: 485256 - protein, 15 aa, Homo sapiens
  CDR3 for beta chain variable domain of TCR clone 242628 (TRBV25-1, TRBJ1-4)
CASSKRIATNEKLFF

SEQ ID NO: 485257 - protein, 14 aa, Homo sapiens
  CDR3 for alpha chain variable domain of TCR clone 242629 (TRAV12-3, TRAJ9)
CAMSPNTGGFNTIF

SEQ ID NO: 485258 - protein, 11 aa, Homo sapiens
  CDR3 for beta chain variable domain of TCR clone 242629 (TRBV29-1, TRBJ2-5)
CSEDRTGTQYF

SEQ ID NO: 485259 - protein, 14 aa, Homo sapiens
  CDR3 for alpha chain variable domain of TCR clone 242630 (TRAV12-2, TRAJ40)
CAVKIPSGTYKYIF

SEQ ID NO: 485260 - protein, 15 aa, Homo sapiens
  CDR3 for beta chain variable domain of TCR clone 242630 (TRBV20-1, TRBJ1-4)
CSARREWWVNEKLFF

SEQ ID NO: 485261 - protein, 11 aa, Homo sapiens
  CDR3 for alpha chain variable domain of TCR clone 242631 (TRAV21, TRAJ34)
CAVTNTDKLIF

SEQ ID NO: 485262 - protein, 14 aa, Homo sapiens
  CDR3 for beta chain variable domain of TCR clone 242631 (TRBV12-4, TRBJ2-1)
CASSLGQGASEQFV

SEQ ID NO: 485263 - protein, 10 aa, Homo sapiens
  CDR3 for alpha chain variable domain of TCR clone 242632 (TRAV23/DV6, TRAJ43)
CAAAVAALEQ

SEQ ID NO: 485264 - protein, 16 aa, Homo sapiens
  CDR3 for beta chain variable domain of TCR clone 242632 (TRBV18, TRBJ1-2)
CASSPPERVTIYGDTF

SEQ ID NO: 485265 - protein, 14 aa, Homo sapiens
  CDR3 for alpha chain variable domain of TCR clone 242633 (TRAV3, TRAJ6)
CAVRDPWGSYIPTF

SEQ ID NO: 485266 - protein, 15 aa, Homo sapiens
  CDR3 for beta chain variable domain of TCR clone 242633 (TRBV7-9, TRBJ1-4)
CASSARTGGNEKLFF

SEQ ID NO: 485267 - protein, 14 aa, Homo sapiens
  CDR3 for alpha chain variable domain of TCR clone 242634 (TRAV12-2, TRAJ45)
CAVNIGGGADGLTF

SEQ ID NO: 485268 - protein, 14 aa, Homo sapiens
  CDR3 for beta chain variable domain of TCR clone 242634 (TRBV7-8, TRBJ2-5)
CASSATGGQETQYF

SEQ ID NO: 485269 - protein, 10 aa, Homo sapiens
  CDR3 for alpha chain variable domain of TCR clone 242635 (TRAV3, TRAJ7)
CAVRDMSPLE

SEQ ID NO: 485270 - protein, 17 aa, Homo sapiens
  CDR3 for beta chain variable domain of TCR clone 242635 (TRBV15, TRBJ1-2)
CATSGREIDVVNYGYTF

SEQ ID NO: 485271 - protein, 17 aa, Homo sapiens
  CDR3 for alpha chain variable domain of TCR clone 242636 (TRAV3, TRAJ6)
CAVRDGPRAGGSYIPTF

SEQ ID NO: 485272 - protein, 15 aa, Homo sapiens
  CDR3 for beta chain variable domain of TCR clone 242636 (TRBV12-4, TRBJ2-5)
CASSPPTGLQETRYF

SEQ ID NO: 485273 - protein, 14 aa, Homo sapiens
  CDR3 for alpha chain variable domain of TCR clone 242637 (TRAV21, TRAJ58)
CAVKRETSGSRLTF

SEQ ID NO: 485274 - protein, 14 aa, Homo sapiens
  CDR3 for beta chain variable domain of TCR clone 242637 (TRBV20-1, TRBJ2-7)
CSAWTALSSYEQYF

SEQ ID NO: 485275 - protein, 13 aa, Homo sapiens
  CDR3 for alpha chain variable domain of TCR clone 242638 (TRAV12-2, TRAJ47)
CAVFMAYGNKLVF

SEQ ID NO: 485276 - protein, 14 aa, Homo sapiens
  CDR3 for beta chain variable domain of TCR clone 242638 (TRBV4-1, TRBJ1-5)
CASSQGPTNQPQHF

SEQ ID NO: 485277 - protein, 11 aa, Homo sapiens
  CDR3 for alpha chain variable domain of TCR clone 242639 (TRAV26-1, TRAJ45)
CIVRVVEVLTD

SEQ ID NO: 485278 - protein, 16 aa, Homo sapiens
  CDR3 for beta chain variable domain of TCR clone 242639 (TRBV7-9, TRBJ1-1)
CASSLTQVRSNTEAFF

SEQ ID NO: 485279 - protein, 21 aa, Homo sapiens
  CDR3 for alpha chain variable domain of TCR clone 242640 (TRAV3, )
CAVGPTPDIQNPDPAVYQLRD

SEQ ID NO: 485280 - protein, 15 aa, Homo sapiens
  CDR3 for beta chain variable domain of TCR clone 242640 (TRBV29-1, TRBJ2-7)
CSVEFFDRGSYEQYF

SEQ ID NO: 485281 - protein, 14 aa, Homo sapiens
  CDR3 for alpha chain variable domain of TCR clone 242641 (TRAV2, TRAJ9)
CAVEDRSGGFKTIC

SEQ ID NO: 485282 - protein, 13 aa, Homo sapiens
  CDR3 for beta chain variable domain of TCR clone 242641 (TRBV7-9, TRBJ1-2)
CASSLKQNYGYTF

SEQ ID NO: 485283 - protein, 13 aa, Homo sapiens
  CDR3 for alpha chain variable domain of TCR clone 242642 (TRAV12-3, TRAJ43)
CAMIRPNNNDMRF

SEQ ID NO: 485284 - protein, 14 aa, Homo sapiens
  CDR3 for beta chain variable domain of TCR clone 242642 (TRBV19, TRBJ2-1)
CASPTFVLSGEQFF

SEQ ID NO: 485285 - protein, 15 aa, Homo sapiens
  CDR3 for alpha chain variable domain of TCR clone 242643 (TRAV29/DV5, TRAJ24)
CAAIWATDSWGKFQF

SEQ ID NO: 485286 - protein, 12 aa, Homo sapiens
  CDR3 for beta chain variable domain of TCR clone 242643 (TRBV11-2, TRBJ2-2)
CASSLPTGELFF

SEQ ID NO: 485287 - protein, 12 aa, Homo sapiens
  CDR3 for alpha chain variable domain of TCR clone 242644 (TRAV8-3, TRAJ41)
CAVALSVYALNF

SEQ ID NO: 485288 - protein, 17 aa, Homo sapiens
  CDR3 for beta chain variable domain of TCR clone 242644 (TRBV7-3, TRBJ2-2)
CASSVSGTSGGTGELFF

SEQ ID NO: 485289 - protein, 13 aa, Homo sapiens
  CDR3 for alpha chain variable domain of TCR clone 242645 (TRAV12-3, TRAJ7)
CAMTPYGNNRLAF

SEQ ID NO: 485290 - protein, 19 aa, Homo sapiens
  CDR3 for beta chain variable domain of TCR clone 242645 (TRBV7-2, TRBJ2-3)
CASSFLSRNWGGGTDTQYF

SEQ ID NO: 485291 - protein, 15 aa, Homo sapiens
  CDR3 for alpha chain variable domain of TCR clone 242646 (TRAV2, TRAJ9)
CAVAALNTGGFKTIF

SEQ ID NO: 485292 - protein, 16 aa, Homo sapiens
  CDR3 for beta chain variable domain of TCR clone 242646 (TRBV11-2, TRBJ2-1)
CASSFGGSFVYNEQFF

SEQ ID NO: 485293 - protein, 14 aa, Homo sapiens
  CDR3 for alpha chain variable domain of TCR clone 242647 (TRAV26-1, TRAJ29)
CIVRVEPRNTPLVF

SEQ ID NO: 485294 - protein, 14 aa, Homo sapiens
  CDR3 for beta chain variable domain of TCR clone 242647 (TRBV25-1, TRBJ1-1)
CASTHLGGNTEAFF

SEQ ID NO: 485295 - protein, 18 aa, Homo sapiens
  CDR3 for alpha chain variable domain of TCR clone 242648 (TRAV21, TRAJ52)
CAVRPSPAGGTSYGKLTF

SEQ ID NO: 485296 - protein, 17 aa, Homo sapiens
  CDR3 for beta chain variable domain of TCR clone 242648 (TRBV13, TRBJ2-3)
RASSLSRVAGGRNTQYC

SEQ ID NO: 485297 - protein, 10 aa, Homo sapiens
  CDR3 for alpha chain variable domain of TCR clone 242649 (TRAV12-2, TRAJ52)
RSTSYGKLTF

SEQ ID NO: 485298 - protein, 14 aa, Homo sapiens
  CDR3 for beta chain variable domain of TCR clone 242649 (TRBV12-4, TRBJ2-5)
CASSQSGGGETQYF

SEQ ID NO: 485299 - protein, 13 aa, Homo sapiens
  CDR3 for alpha chain variable domain of TCR clone 242650 (TRAV17, TRAJ40)
CATAPGGTYKYIF

SEQ ID NO: 485300 - protein, 12 aa, Homo sapiens
  CDR3 for beta chain variable domain of TCR clone 242650 (TRBV2, TRBJ1-5)
CASSENGTPQHF

SEQ ID NO: 485301 - protein, 17 aa, Homo sapiens
  CDR3 for alpha chain variable domain of TCR clone 242651 (TRAV8-6, TRAJ58)
CAVSSWVGEASGSSLTF

SEQ ID NO: 485302 - protein, 15 aa, Homo sapiens
  CDR3 for beta chain variable domain of TCR clone 242651 (TRBV6-5, TRBJ2-1)
CASSYDAGAGNEQFF

SEQ ID NO: 485303 - protein, 14 aa, Homo sapiens
  CDR3 for alpha chain variable domain of TCR clone 242652 (TRAV23/DV6, TRAJ22)
CAASVSGSARQLTF

SEQ ID NO: 485304 - protein, 15 aa, Homo sapiens
  CDR3 for beta chain variable domain of TCR clone 242652 (TRBV7-2, TRBJ2-1)
CASSSGLAGGNEQFF

SEQ ID NO: 485305 - protein, 13 aa, Homo sapiens
  CDR3 for alpha chain variable domain of TCR clone 242653 (TRAV4, TRAJ9)
CLVAEGGGFKTIF

SEQ ID NO: 485306 - protein, 17 aa, Homo sapiens
  CDR3 for beta chain variable domain of TCR clone 242653 (TRBV27, TRBJ2-1)
CASSPMKGQGSYNAQFF

SEQ ID NO: 485307 - protein, 16 aa, Homo sapiens
  CDR3 for alpha chain variable domain of TCR clone 242654 (TRAV1-2, TRAJ10)
CAVRGVLTGVGNKLTF

SEQ ID NO: 485308 - protein, 20 aa, Homo sapiens
  CDR3 for beta chain variable domain of TCR clone 242654 (TRBV7-8, TRBJ2-2)
CASSHLFPGPTIHITGQLFF

SEQ ID NO: 485309 - protein, 15 aa, Homo sapiens
  CDR3 for alpha chain variable domain of TCR clone 242655 (TRAV12-3, TRAJ27)
CAMRAYNTNAGKSTF

SEQ ID NO: 485310 - protein, 14 aa, Homo sapiens
  CDR3 for beta chain variable domain of TCR clone 242655 (TRBV7-2, TRBJ2-2)
CASRGQGAAGELFF

SEQ ID NO: 485311 - protein, 16 aa, Homo sapiens
  CDR3 for alpha chain variable domain of TCR clone 242656 (TRAV17, TRAJ28)
CATASVSGAGSYQLTF

SEQ ID NO: 485312 - protein, 14 aa, Homo sapiens
  CDR3 for beta chain variable domain of TCR clone 242656 (TRBV19, TRBJ2-1)
CASEVTGAPNEQFF

SEQ ID NO: 485313 - protein, 13 aa, Homo sapiens
  CDR3 for alpha chain variable domain of TCR clone 242657 (TRAV21, TRAJ27)
CAARPGNAAKSTF

SEQ ID NO: 485314 - protein, 15 aa, Homo sapiens
  CDR3 for beta chain variable domain of TCR clone 242657 (TRBV11-3, TRBJ2-7)
CASSPGPASSYEQYF

SEQ ID NO: 485315 - protein, 17 aa, Homo sapiens
  CDR3 for alpha chain variable domain of TCR clone 242658 (TRAV4, TRAJ22)
CCVLLPRGVGSARQLTF

SEQ ID NO: 485316 - protein, 12 aa, Homo sapiens
  CDR3 for beta chain variable domain of TCR clone 242658 (TRBV18, TRBJ2-1)
CASSSDEDEQFF

SEQ ID NO: 485317 - protein, 12 aa, Homo sapiens
  CDR3 for alpha chain variable domain of TCR clone 242659 (TRAV1-1, TRAJ39)
CAVPEVGNMLTF

SEQ ID NO: 485318 - protein, 18 aa, Homo sapiens
  CDR3 for beta chain variable domain of TCR clone 242659 (TRBV7-3, TRBJ2-3)
CASSSTGTYPGSADTQYF

SEQ ID NO: 485319 - protein, 13 aa, Homo sapiens
  CDR3 for alpha chain variable domain of TCR clone 242660 (TRAV35, TRAJ22)
CAGLSGSARQLTF

SEQ ID NO: 485320 - protein, 12 aa, Homo sapiens
  CDR3 for beta chain variable domain of TCR clone 242660 (TRBV7-2, TRBJ2-5)
CASSLGPETQYF

SEQ ID NO: 485321 - protein, 14 aa, Homo sapiens
  CDR3 for alpha chain variable domain of TCR clone 242661 (TRAV1-2, TRAJ8)
CAVREDTGFQKLVF

SEQ ID NO: 485322 - protein, 13 aa, Homo sapiens
  CDR3 for beta chain variable domain of TCR clone 242661 (TRBV15, TRBJ1-1)
CATSRIRNTEAFF

SEQ ID NO: 485323 - protein, 13 aa, Homo sapiens
  CDR3 for alpha chain variable domain of TCR clone 242662 (TRAV13-1, TRAJ10)
CAATAGGGNKLTF

SEQ ID NO: 485324 - protein, 16 aa, Homo sapiens
  CDR3 for beta chain variable domain of TCR clone 242662 (TRBV25-1, TRBJ1-1)
CASSGDRDRGRIEAFF

SEQ ID NO: 485325 - protein, 11 aa, Homo sapiens
  CDR3 for alpha chain variable domain of TCR clone 242663 (TRAV1-2, TRAJ8)
CAVNSFQKLVF

SEQ ID NO: 485326 - protein, 16 aa, Homo sapiens
  CDR3 for beta chain variable domain of TCR clone 242663 (TRBV7-3, TRBJ2-2)
CASSLKRGTLSGELFF

SEQ ID NO: 485327 - protein, 11 aa, Homo sapiens
  CDR3 for alpha chain variable domain of TCR clone 242664 (TRAV13-2, TRAJ20)
CADSNDYKLSF

SEQ ID NO: 485328 - protein, 14 aa, Homo sapiens
  CDR3 for beta chain variable domain of TCR clone 242664 (TRBV11-2, TRBJ1-5)
CASSLDRGMQPQHF

SEQ ID NO: 485329 - protein, 13 aa, Homo sapiens
  CDR3 for alpha chain variable domain of TCR clone 242665 (TRAV14/DV4, TRAJ4)
CAMKAGGYNKLVF

SEQ ID NO: 485330 - protein, 15 aa, Homo sapiens
  CDR3 for beta chain variable domain of TCR clone 242665 (TRBV11-3, TRBJ1-1)
CASSLGGPVDTEAFF

SEQ ID NO: 485331 - protein, 15 aa, Homo sapiens
  CDR3 for alpha chain variable domain of TCR clone 242666 (TRAV29/DV5, TRAJ24)
CTASGATDSWGKFQF

SEQ ID NO: 485332 - protein, 11 aa, Homo sapiens
  CDR3 for beta chain variable domain of TCR clone 242666 (TRBV29-1, TRBJ2-5)
CSEDRTGTQYF

SEQ ID NO: 485333 - protein, 13 aa, Homo sapiens
  CDR3 for alpha chain variable domain of TCR clone 242667 (TRAV8-6, TRAJ50)
CAVIKTSYDKVIF

SEQ ID NO: 485334 - protein, 15 aa, Homo sapiens
  CDR3 for beta chain variable domain of TCR clone 242667 (TRBV5-1, TRBJ2-3)
CASSLLGDGTDTQYF

SEQ ID NO: 485335 - protein, 14 aa, Homo sapiens
  CDR3 for alpha chain variable domain of TCR clone 242668 (TRAV17, TRAJ6)
CATNPAGGSYIPTF

SEQ ID NO: 485336 - protein, 14 aa, Homo sapiens
  CDR3 for beta chain variable domain of TCR clone 242668 (TRBV6-3, TRBJ1-1)
CASSYQRRDTEAFF

SEQ ID NO: 485337 - protein, 14 aa, Homo sapiens
  CDR3 for alpha chain variable domain of TCR clone 242669 (TRAV8-6, TRAJ36)
CAVSEKDGANNIFF

SEQ ID NO: 485338 - protein, 15 aa, Homo sapiens
  CDR3 for beta chain variable domain of TCR clone 242669 (TRBV7-2, TRBJ2-7)
CASSWGQGAIYEQYF

SEQ ID NO: 485339 - protein, 15 aa, Homo sapiens
  CDR3 for alpha chain variable domain of TCR clone 242670 (TRAV26-1, TRAJ44)
CIVRANTGTASKLTF

SEQ ID NO: 485340 - protein, 16 aa, Homo sapiens
  CDR3 for beta chain variable domain of TCR clone 242670 (TRBV7-7, TRBJ2-1)
CASSLASGTSYNEPFF

SEQ ID NO: 485341 - protein, 12 aa, Homo sapiens
  CDR3 for alpha chain variable domain of TCR clone 242671 (TRAV12-3, TRAJ20)
CAMVRGDYKLSF

SEQ ID NO: 485342 - protein, 16 aa, Homo sapiens
  CDR3 for beta chain variable domain of TCR clone 242671 (TRBV19, TRBJ2-3)
CASSPGAASRTDTQYF

SEQ ID NO: 485343 - protein, 15 aa, Homo sapiens
  CDR3 for alpha chain variable domain of TCR clone 242672 (TRAV26-1, TRAJ29)
CIVRVERSGNTPLVF

SEQ ID NO: 485344 - protein, 14 aa, Homo sapiens
  CDR3 for beta chain variable domain of TCR clone 242672 (TRBV18, TRBJ2-5)
CASSPGVPKETQYF

SEQ ID NO: 485345 - protein, 21 aa, Homo sapiens
  CDR3 for alpha chain variable domain of TCR clone 242673 (TRAV26-1, TRAJ17)
CCVLLHRQSSGSKAEGNKLTF

SEQ ID NO: 485346 - protein, 14 aa, Homo sapiens
  CDR3 for beta chain variable domain of TCR clone 242673 (TRBV28, TRBJ1-2)
CASRIQGANYGYTF

SEQ ID NO: 485347 - protein, 14 aa, Homo sapiens
  CDR3 for alpha chain variable domain of TCR clone 242674 (TRAV1-2, TRAJ8)
CAVREDTGFQKLVF

SEQ ID NO: 485348 - protein, 13 aa, Homo sapiens
  CDR3 for beta chain variable domain of TCR clone 242674 (TRBV7-9, TRBJ1-4)
CATQIGPNEKLFF

SEQ ID NO: 485349 - protein, 13 aa, Homo sapiens
  CDR3 for alpha chain variable domain of TCR clone 242675 (TRAV13-1, TRAJ39)
CAASIWAGNMLTV

SEQ ID NO: 485350 - protein, 15 aa, Homo sapiens
  CDR3 for beta chain variable domain of TCR clone 242675 (TRBV7-9, TRBJ1-1)
RASSLLEQGGTEAFF

SEQ ID NO: 485351 - protein, 14 aa, Homo sapiens
  CDR3 for alpha chain variable domain of TCR clone 242676 (TRAV12-2, TRAJ17)
CAGLFKAAGNKLTF

SEQ ID NO: 485352 - protein, 12 aa, Homo sapiens
  CDR3 for beta chain variable domain of TCR clone 242676 (TRBV5-8, TRBJ2-1)
CASRPGPLAQFF

SEQ ID NO: 485353 - protein, 13 aa, Homo sapiens
  CDR3 for alpha chain variable domain of TCR clone 242677 (TRAV3, TRAJ36)
CAVRDTGANNLPF

SEQ ID NO: 485354 - protein, 15 aa, Homo sapiens
  CDR3 for beta chain variable domain of TCR clone 242677 (TRBV24-1, TRBJ2-1)
CATSGSGGFYNEQFF

SEQ ID NO: 485355 - protein, 11 aa, Homo sapiens
  CDR3 for alpha chain variable domain of TCR clone 242678 (TRAV12-1, TRAJ8)
CVVTGFQKLAF

SEQ ID NO: 485356 - protein, 14 aa, Homo sapiens
  CDR3 for beta chain variable domain of TCR clone 242678 (TRBV19, TRBJ2-1)
CASGKSTQYNEQFF

SEQ ID NO: 485357 - protein, 19 aa, Homo sapiens
  CDR3 for alpha chain variable domain of TCR clone 242679 (TRAV26-1, TRAJ52)
CIVRAHRNAGGTSYGKLTS

SEQ ID NO: 485358 - protein, 15 aa, Homo sapiens
  CDR3 for beta chain variable domain of TCR clone 242679 (TRBV12-4, TRBJ2-5)
CASSPPTGLQETQYF

SEQ ID NO: 485359 - protein, 16 aa, Homo sapiens
  CDR3 for alpha chain variable domain of TCR clone 242680 (TRAV3, TRAJ10)
CAVRDMNAGGGNKLTF

SEQ ID NO: 485360 - protein, 17 aa, Homo sapiens
  CDR3 for beta chain variable domain of TCR clone 242680 (TRBV20-1, TRBJ2-1)
CSASSSGLAGSYNEQFF

SEQ ID NO: 485361 - protein, 14 aa, Homo sapiens
  CDR3 for alpha chain variable domain of TCR clone 242681 (TRAV1-2, TRAJ16)
CAVNRFSDGQRLLF

SEQ ID NO: 485362 - protein, 13 aa, Homo sapiens
  CDR3 for beta chain variable domain of TCR clone 242681 (TRBV20-1, TRBJ1-1)
CSARVGGNTAAFF

SEQ ID NO: 485363 - protein, 16 aa, Homo sapiens
  CDR3 for alpha chain variable domain of TCR clone 242682 (TRAV12-2, TRAJ50)
CAVGTATKTSYDKVTF

SEQ ID NO: 485364 - protein, 12 aa, Homo sapiens
  CDR3 for beta chain variable domain of TCR clone 242682 (TRBV12-4, TRBJ1-5)
CASSLGRQPQHF

SEQ ID NO: 485365 - protein, 15 aa, Homo sapiens
  CDR3 for alpha chain variable domain of TCR clone 242683 (TRAV23/DV6, TRAJ28)
CAALLEYSGAGSYQL

SEQ ID NO: 485366 - protein, 13 aa, Homo sapiens
  CDR3 for beta chain variable domain of TCR clone 242683 (TRBV4-2, TRBJ2-3)
CASSQGNTDTQYF

SEQ ID NO: 485367 - protein, 17 aa, Homo sapiens
  CDR3 for alpha chain variable domain of TCR clone 242684 (TRAV3, TRAJ42)
CAVRDRDYGGSQGNPIF

SEQ ID NO: 485368 - protein, 12 aa, Homo sapiens
  CDR3 for beta chain variable domain of TCR clone 242684 (TRBV28, TRBJ2-3)
CASSLYRDTQYF

SEQ ID NO: 485369 - protein, 17 aa, Homo sapiens
  CDR3 for alpha chain variable domain of TCR clone 242685 (TRAV26-2, TRAJ42)
CILRDVGYGGSQGNLIF

SEQ ID NO: 485370 - protein, 16 aa, Homo sapiens
  CDR3 for beta chain variable domain of TCR clone 242685 (TRBV12-4, TRBJ2-7)
CASSLIGGTVTYEQYF

SEQ ID NO: 485371 - protein, 14 aa, Homo sapiens
  CDR3 for alpha chain variable domain of TCR clone 242686 (TRAV12-2, TRAJ17)
CAALFKAAGNKLTF

SEQ ID NO: 485372 - protein, 17 aa, Homo sapiens
  CDR3 for beta chain variable domain of TCR clone 242686 (TRBV20-1, TRBJ2-2)
CSASGSGQGGLTGELFL

SEQ ID NO: 485373 - protein, 13 aa, Homo sapiens
  CDR3 for alpha chain variable domain of TCR clone 242687 (TRAV1-1, TRAJ13)
CAVNSGGYQKVTF

SEQ ID NO: 485374 - protein, 12 aa, Homo sapiens
  CDR3 for beta chain variable domain of TCR clone 242687 (TRBV28, TRBJ2-1)
CASSVQMNEQFF

SEQ ID NO: 485375 - protein, 13 aa, Homo sapiens
  CDR3 for alpha chain variable domain of TCR clone 242688 (TRAV27, TRAJ45)
CRSSGGGTDGLTF

SEQ ID NO: 485376 - protein, 13 aa, Homo sapiens
  CDR3 for beta chain variable domain of TCR clone 242688 (TRBV7-7, TRBJ2-5)
CASSRSGQETQYF

SEQ ID NO: 485377 - protein, 13 aa, Homo sapiens
  CDR3 for alpha chain variable domain of TCR clone 242689 (TRAV29/DV5, TRAJ31)
CAASRNKNARLMF

SEQ ID NO: 485378 - protein, 13 aa, Homo sapiens
  CDR3 for beta chain variable domain of TCR clone 242689 (TRBV7-9, TRBJ1-2)
CASSLKQNYGYTF

SEQ ID NO: 485379 - protein, 14 aa, Homo sapiens
  CDR3 for alpha chain variable domain of TCR clone 242690 (TRAV27, TRAJ22)
CAGVSVLGKRQLTF

SEQ ID NO: 485380 - protein, 12 aa, Homo sapiens
  CDR3 for beta chain variable domain of TCR clone 242690 (TRBV2, TRBJ2-1)
CAKREGFNEQFF

SEQ ID NO: 485381 - protein, 14 aa, Homo sapiens
  CDR3 for alpha chain variable domain of TCR clone 242691 (TRAV17, TRAJ11)
CATDTSRGYSTLTF

SEQ ID NO: 485382 - protein, 13 aa, Homo sapiens
  CDR3 for beta chain variable domain of TCR clone 242691 (TRBV19, TRBJ2-5)
YASRDSRRETQYF

SEQ ID NO: 485383 - protein, 14 aa, Homo sapiens
  CDR3 for alpha chain variable domain of TCR clone 242692 (TRAV8-1, TRAJ24)
CAVNAADSWGKLQF

SEQ ID NO: 485384 - protein, 13 aa, Homo sapiens
  CDR3 for beta chain variable domain of TCR clone 242692 (TRBV7-2, TRBJ2-7)
CASTSPSGSEQYF

SEQ ID NO: 485385 - protein, 10 aa, Homo sapiens
  CDR3 for alpha chain variable domain of TCR clone 242693 (TRAV8-4, TRAJ43)
CAVSADDMRF

SEQ ID NO: 485386 - protein, 14 aa, Homo sapiens
  CDR3 for beta chain variable domain of TCR clone 242693 (TRBV7-9, TRBJ2-5)
CASSPAQDQETQYF

SEQ ID NO: 485387 - protein, 17 aa, Homo sapiens
  CDR3 for alpha chain variable domain of TCR clone 242694 (TRAV3, TRAJ6)
CAVRDGPRAGGSYVPTF

SEQ ID NO: 485388 - protein, 15 aa, Homo sapiens
  CDR3 for beta chain variable domain of TCR clone 242694 (TRBV29-1, TRBJ2-5)
CSVEGLAVNQETQYF

SEQ ID NO: 485389 - protein, 14 aa, Homo sapiens
  CDR3 for alpha chain variable domain of TCR clone 242695 (TRAV2, TRAJ29)
CAVEDRVGNTPLVF

SEQ ID NO: 485390 - protein, 19 aa, Homo sapiens
  CDR3 for beta chain variable domain of TCR clone 242695 (TRBV7-2, TRBJ2-3)
CASSFLSRNWGGGTDTQYF

SEQ ID NO: 485391 - protein, 14 aa, Homo sapiens
  CDR3 for alpha chain variable domain of TCR clone 242696 (TRAV12-2, TRAJ10)
CAVNEAGGGNKLTF

SEQ ID NO: 485392 - protein, 16 aa, Homo sapiens
  CDR3 for beta chain variable domain of TCR clone 242696 (TRBV12-5, TRBJ2-5)
CASGPRTSGNQETQYF

SEQ ID NO: 485393 - protein, 13 aa, Homo sapiens
  CDR3 for alpha chain variable domain of TCR clone 242697 (TRAV8-3, TRAJ28)
CAVGAVGSYQLTF

SEQ ID NO: 485394 - protein, 14 aa, Homo sapiens
  CDR3 for beta chain variable domain of TCR clone 242697 (TRBV7-2, TRBJ2-7)
CASRSQGAAHELYF

SEQ ID NO: 485395 - protein, 11 aa, Homo sapiens
  CDR3 for alpha chain variable domain of TCR clone 242698 (TRAV13-1, TRAJ43)
CAASMRNDMRF

SEQ ID NO: 485396 - protein, 14 aa, Homo sapiens
  CDR3 for beta chain variable domain of TCR clone 242698 (TRBV6-1, TRBJ1-3)
CASVQGGGGNTIYF

SEQ ID NO: 485397 - protein, 13 aa, Homo sapiens
  CDR3 for alpha chain variable domain of TCR clone 242699 (TRAV12-3, TRAJ33)
CAMSVNSNYQLIW

SEQ ID NO: 485398 - protein, 12 aa, Homo sapiens
  CDR3 for beta chain variable domain of TCR clone 242699 (TRBV7-2, TRBJ2-1)
CASSLRQNEQFF

SEQ ID NO: 485399 - protein, 14 aa, Homo sapiens
  CDR3 for alpha chain variable domain of TCR clone 242700 (TRAV13-1, TRAJ21)
CAARKASTNFTLDL

SEQ ID NO: 485400 - protein, 18 aa, Homo sapiens
  CDR3 for beta chain variable domain of TCR clone 242700 (TRBV20-1, TRBJ2-6)
CSAETTPTHGSGANVLTF

SEQ ID NO: 485401 - protein, 14 aa, Homo sapiens
  CDR3 for alpha chain variable domain of TCR clone 242701 (TRAV1-2, TRAJ8)
CAVREDTGFQKLVF

SEQ ID NO: 485402 - protein, 11 aa, Homo sapiens
  CDR3 for beta chain variable domain of TCR clone 242701 (TRBV11-3, TRBJ2-7)
CSSSRTYEQYF

SEQ ID NO: 485403 - protein, 17 aa, Homo sapiens
  CDR3 for alpha chain variable domain of TCR clone 242702 (TRAV36/DV7, TRAJ52)
CAVAQRAGGTSYGKLTF

SEQ ID NO: 485404 - protein, 16 aa, Homo sapiens
  CDR3 for beta chain variable domain of TCR clone 242702 (TRBV28, TRBJ2-3)
CASSFFRDPRLGTQYF

SEQ ID NO: 485405 - protein, 15 aa, Homo sapiens
  CDR3 for alpha chain variable domain of TCR clone 242703 (TRAV21, TRAJ24)
CAARSSTDSWGKLQF

SEQ ID NO: 485406 - protein, 12 aa, Homo sapiens
  CDR3 for beta chain variable domain of TCR clone 242703 (TRBV7-9, TRBJ2-7)
CASSFGSYEQYF

SEQ ID NO: 485407 - protein, 13 aa, Homo sapiens
  CDR3 for alpha chain variable domain of TCR clone 242704 (TRAV17, TRAJ31)
CATDENKNARLMF

SEQ ID NO: 485408 - protein, 14 aa, Homo sapiens
  CDR3 for beta chain variable domain of TCR clone 242704 (TRBV11-2, TRBJ2-1)
CASSPSRQGGGQFF

SEQ ID NO: 485409 - protein, 14 aa, Homo sapiens
  CDR3 for alpha chain variable domain of TCR clone 242705 (TRAV2, TRAJ9)
CAVEDRSGGFKTIF

SEQ ID NO: 485410 - protein, 14 aa, Homo sapiens
  CDR3 for beta chain variable domain of TCR clone 242705 (TRBV7-9, TRBJ2-2)
CASSLGHRTGELFF

SEQ ID NO: 485411 - protein, 16 aa, Homo sapiens
  CDR3 for alpha chain variable domain of TCR clone 242706 (TRAV26-1, TRAJ6)
CIVTVPRTGGSYIPTF

SEQ ID NO: 485412 - protein, 15 aa, Homo sapiens
  CDR3 for beta chain variable domain of TCR clone 242706 (TRBV10-3, TRBJ2-7)
CAISDMTALSYEQYF

SEQ ID NO: 485413 - protein, 15 aa, Homo sapiens
  CDR3 for alpha chain variable domain of TCR clone 242707 (TRAV8-3, TRAJ27)
CAVGPSKTNAGKSTF

SEQ ID NO: 485414 - protein, 14 aa, Homo sapiens
  CDR3 for beta chain variable domain of TCR clone 242707 (TRBV7-2, TRBJ2-1)
CQQLRTSGRNEQFF

SEQ ID NO: 485415 - protein, 17 aa, Homo sapiens
  CDR3 for alpha chain variable domain of TCR clone 242708 (TRAV17, TRAJ28)
CATDPRRGGAGSDQLTF

SEQ ID NO: 485416 - protein, 14 aa, Homo sapiens
  CDR3 for beta chain variable domain of TCR clone 242708 (TRBV19, TRBJ2-7)
CASTVQGRPYEQYF

SEQ ID NO: 485417 - protein, 17 aa, Homo sapiens
  CDR3 for alpha chain variable domain of TCR clone 242709 (TRAV26-1, TRAJ58)
CIVRVGAEETSGSRLTC

SEQ ID NO: 485418 - protein, 12 aa, Homo sapiens
  CDR3 for beta chain variable domain of TCR clone 242709 (TRBV11-2, TRBJ2-5)
CASSLDTQTQYF

SEQ ID NO: 485419 - protein, 20 aa, Homo sapiens
  CDR3 for alpha chain variable domain of TCR clone 242710 (TRAV12-1, TRAJ42)
SSVIQPPTSVKGGSQGNLIF

SEQ ID NO: 485420 - protein, 13 aa, Homo sapiens
  CDR3 for beta chain variable domain of TCR clone 242710 (TRBV4-2, TRBJ1-1)
CASSQAGNTEAFF

SEQ ID NO: 485421 - protein, 14 aa, Homo sapiens
  CDR3 for alpha chain variable domain of TCR clone 242711 (TRAV12-2, TRAJ17)
CAVNIKAAGNKLTF

SEQ ID NO: 485422 - protein, 12 aa, Homo sapiens
  CDR3 for beta chain variable domain of TCR clone 242711 (TRBV7-9, TRBJ2-7)
CASSLEGYEQYF

SEQ ID NO: 485423 - protein, 14 aa, Homo sapiens
  CDR3 for alpha chain variable domain of TCR clone 242712 (TRAV1-2, TRAJ16)
CAVNRFSDGQRLLF

SEQ ID NO: 485424 - protein, 17 aa, Homo sapiens
  CDR3 for beta chain variable domain of TCR clone 242712 (TRBV11-2, TRBJ2-1)
CASSLYPPGVEYNEQFF

SEQ ID NO: 485425 - protein, 13 aa, Homo sapiens
  CDR3 for alpha chain variable domain of TCR clone 242713 (TRAV20, TRAJ37)
CAGCSSDTGKLIF

SEQ ID NO: 485426 - protein, 11 aa, Homo sapiens
  CDR3 for beta chain variable domain of TCR clone 242713 (TRBV29-1, TRBJ2-5)
CSEDRTGTQYF

SEQ ID NO: 485427 - protein, 16 aa, Homo sapiens
  CDR3 for alpha chain variable domain of TCR clone 242714 (TRAV1-1, TRAJ29)
CAVRSTRNSGNTPLVF

SEQ ID NO: 485428 - protein, 16 aa, Homo sapiens
  CDR3 for beta chain variable domain of TCR clone 242714 (TRBV27, TRBJ1-1)
CASSSKGRTGYTEAFF

SEQ ID NO: 485429 - protein, 10 aa, Homo sapiens
  CDR3 for alpha chain variable domain of TCR clone 242715 (TRAV21, TRAJ43)
CAVRIGDMRF

SEQ ID NO: 485430 - protein, 13 aa, Homo sapiens
  CDR3 for beta chain variable domain of TCR clone 242715 (TRBV20-1, TRBJ2-7)
CSASGLADYEQYF

SEQ ID NO: 485431 - protein, 17 aa, Homo sapiens
  CDR3 for alpha chain variable domain of TCR clone 242716 (TRAV3, TRAJ42)
CAVRDRDYGGSQGTLIF

SEQ ID NO: 485432 - protein, 17 aa, Homo sapiens
  CDR3 for beta chain variable domain of TCR clone 242716 (TRBV13, TRBJ2-3)
CASSLSRVAGGRNTQYF

SEQ ID NO: 485433 - protein, 15 aa, Homo sapiens
  CDR3 for alpha chain variable domain of TCR clone 242717 (TRAV17, TRAJ52)
CATEAGGTSYGKLTF

SEQ ID NO: 485434 - protein, 20 aa, Homo sapiens
  CDR3 for beta chain variable domain of TCR clone 242717 (TRBV7-8, TRBJ2-2)
CASSHLFPGPTIHITGELFF

SEQ ID NO: 485435 - protein, 14 aa, Homo sapiens
  CDR3 for alpha chain variable domain of TCR clone 242718 (TRAV3, TRAJ21)
CAVESQANFNKFYF

SEQ ID NO: 485436 - protein, 14 aa, Homo sapiens
  CDR3 for beta chain variable domain of TCR clone 242718 (TRBV7-2, TRBJ2-7)
CASRSQGAAYEQYF

SEQ ID NO: 485437 - protein, 12 aa, Homo sapiens
  CDR3 for alpha chain variable domain of TCR clone 242719 (TRAV2, TRAJ10)
CASTGGGNKLTF

SEQ ID NO: 485438 - protein, 14 aa, Homo sapiens
  CDR3 for beta chain variable domain of TCR clone 242719 (TRBV7-2, TRBJ2-2)
CASRGQGAAWELFF

SEQ ID NO: 485439 - protein, 13 aa, Homo sapiens
  CDR3 for alpha chain variable domain of TCR clone 242720 (TRAV23/DV6, TRAJ45)
CAARRGGADGLTF

SEQ ID NO: 485440 - protein, 17 aa, Homo sapiens
  CDR3 for beta chain variable domain of TCR clone 242720 (TRBV11-2, TRBJ2-1)
CASSLYPPGVEYNEQFF

SEQ ID NO: 485441 - protein, 14 aa, Homo sapiens
  CDR3 for alpha chain variable domain of TCR clone 242721 (TRAV35, TRAJ40)
CAGSTTSGTYKYIF

SEQ ID NO: 485442 - protein, 15 aa, Homo sapiens
  CDR3 for beta chain variable domain of TCR clone 242721 (TRBV20-1, TRBJ1-6)
CSAPLGLDHPSTLGM

SEQ ID NO: 485443 - protein, 14 aa, Homo sapiens
  CDR3 for alpha chain variable domain of TCR clone 242722 (TRAV12-2, TRAJ40)
LSVKIPSGTYKYIF

SEQ ID NO: 485444 - protein, 14 aa, Homo sapiens
  CDR3 for beta chain variable domain of TCR clone 242722 (TRBV20-1, TRBJ1-1)
CSAQTRIGGTEAFF

SEQ ID NO: 485445 - protein, 13 aa, Homo sapiens
  CDR3 for alpha chain variable domain of TCR clone 242723 (TRAV20, TRAJ49)
CAVQARTGNQFYF

SEQ ID NO: 485446 - protein, 15 aa, Homo sapiens
  CDR3 for beta chain variable domain of TCR clone 242723 (TRBV3-1, TRBJ2-2)
CASSQDWTRAGELFF

SEQ ID NO: 485447 - protein, 13 aa, Homo sapiens
  CDR3 for alpha chain variable domain of TCR clone 242724 (TRAV8-3, TRAJ36)
CAVGATGANNLFF

SEQ ID NO: 485448 - protein, 17 aa, Homo sapiens
  CDR3 for beta chain variable domain of TCR clone 242724 (TRBV11-2, TRBJ2-4)
CASSSVGPGGHRNSQYF

SEQ ID NO: 485449 - protein, 13 aa, Homo sapiens
  CDR3 for alpha chain variable domain of TCR clone 242725 (TRAV12-3, TRAJ54)
CAMTLQGAKKLVF

SEQ ID NO: 485450 - protein, 14 aa, Homo sapiens
  CDR3 for beta chain variable domain of TCR clone 242725 (TRBV4-1, TRBJ2-2)
CASSQAVNTGELFF

SEQ ID NO: 485451 - protein, 12 aa, Homo sapiens
  CDR3 for alpha chain variable domain of TCR clone 242726 (TRAV1-1, TRAJ39)
CAVPVVGNMLTF

SEQ ID NO: 485452 - protein, 15 aa, Homo sapiens
  CDR3 for beta chain variable domain of TCR clone 242726 (TRBV28, TRBJ2-1)
CASSIIAGGRSEQFF

SEQ ID NO: 485453 - protein, 14 aa, Homo sapiens
  CDR3 for alpha chain variable domain of TCR clone 242727 (TRAV1-2, TRAJ16)
CAVNRFSDGQKMLF

SEQ ID NO: 485454 - protein, 15 aa, Homo sapiens
  CDR3 for beta chain variable domain of TCR clone 242727 (TRBV5-1, TRBJ2-3)
CASSVTSGSTDTQYF

SEQ ID NO: 485455 - protein, 13 aa, Homo sapiens
  CDR3 for alpha chain variable domain of TCR clone 242728 (TRAV3, TRAJ21)
CAVREPDFNTFYF

SEQ ID NO: 485456 - protein, 12 aa, Homo sapiens
  CDR3 for beta chain variable domain of TCR clone 242728 (TRBV7-9, TRBJ2-7)
CASSLEGYEQYF

SEQ ID NO: 485457 - protein, 17 aa, Homo sapiens
  CDR3 for alpha chain variable domain of TCR clone 242729 (TRAV4, )
CLVDIQNPDPAVYQLRD

SEQ ID NO: 485458 - protein, 12 aa, Homo sapiens
  CDR3 for beta chain variable domain of TCR clone 242729 (TRBV11-2, TRBJ2-2)
CASSLGGGELFF

SEQ ID NO: 485459 - protein, 14 aa, Homo sapiens
  CDR3 for alpha chain variable domain of TCR clone 242730 (TRAV12-1, TRAJ38)
CGELKAGNNRKLIG

SEQ ID NO: 485460 - protein, 12 aa, Homo sapiens
  CDR3 for beta chain variable domain of TCR clone 242730 (TRBV24-1, TRBJ1-1)
CATLYLDTEAFF

SEQ ID NO: 485461 - protein, 16 aa, Homo sapiens
  CDR3 for alpha chain variable domain of TCR clone 242731 (TRAV14/DV4, TRAJ21)
CAMREGPENNFNKFYF

SEQ ID NO: 485462 - protein, 12 aa, Homo sapiens
  CDR3 for beta chain variable domain of TCR clone 242731 (TRBV29-1, TRBJ2-2)
CSVDKYTGELFF

SEQ ID NO: 485463 - protein, 14 aa, Homo sapiens
  CDR3 for alpha chain variable domain of TCR clone 242732 (TRAV26-1, TRAJ21)
CIVRPPYNFTKFYF

SEQ ID NO: 485464 - protein, 14 aa, Homo sapiens
  CDR3 for beta chain variable domain of TCR clone 242732 (TRBV11-3, TRBJ2-1)
CASSATTSGSSQFF

SEQ ID NO: 485465 - protein, 13 aa, Homo sapiens
  CDR3 for alpha chain variable domain of TCR clone 242733 (TRAV8-4, TRAJ9)
CAVGGAGGFKTIF

SEQ ID NO: 485466 - protein, 16 aa, Homo sapiens
  CDR3 for beta chain variable domain of TCR clone 242733 (TRBV5-1, TRBJ2-7)
CASSVTSGSSTYEQYF

SEQ ID NO: 485467 - protein, 13 aa, Homo sapiens
  CDR3 for alpha chain variable domain of TCR clone 242734 (TRAV21, TRAJ32)
CAVCGGATNKLIF

SEQ ID NO: 485468 - protein, 15 aa, Homo sapiens
  CDR3 for beta chain variable domain of TCR clone 242734 (TRBV23-1, TRBJ2-1)
CASSQWPQLTMSSSS

SEQ ID NO: 485469 - protein, 16 aa, Homo sapiens
  CDR3 for alpha chain variable domain of TCR clone 242735 (TRAV30, TRAJ24)
CGTEIGDADSWGKFQF

SEQ ID NO: 485470 - protein, 17 aa, Homo sapiens
  CDR3 for beta chain variable domain of TCR clone 242735 (TRBV20-1, TRBJ2-2)
CSASGSGQGGLTGELFF

SEQ ID NO: 485471 - protein, 18 aa, Homo sapiens
  CDR3 for alpha chain variable domain of TCR clone 242736 (TRAV21, TRAJ52)
CAVRPSPAGGTSYGKLTF

SEQ ID NO: 485472 - protein, 14 aa, Homo sapiens
  CDR3 for beta chain variable domain of TCR clone 242736 (TRBV20-1, TRBJ1-3)
CSASPTGAGNTMYF

SEQ ID NO: 485473 - protein, 16 aa, Homo sapiens
  CDR3 for alpha chain variable domain of TCR clone 242737 (TRAV12-3, TRAJ10)
CAMKKGITGGGNKLTF

SEQ ID NO: 485474 - protein, 12 aa, Homo sapiens
  CDR3 for beta chain variable domain of TCR clone 242737 (TRBV20-1, TRBJ2-7)
CGAITPTKEQYF

SEQ ID NO: 485475 - protein, 13 aa, Homo sapiens
  CDR3 for alpha chain variable domain of TCR clone 242738 (TRAV12-3, TRAJ40)
CAMSARGTYKYIF

SEQ ID NO: 485476 - protein, 14 aa, Homo sapiens
  CDR3 for beta chain variable domain of TCR clone 242738 (TRBV3-1, TRBJ2-3)
CASSQLAGTDTQYF

SEQ ID NO: 485477 - protein, 15 aa, Homo sapiens
  CDR3 for alpha chain variable domain of TCR clone 242739 (TRAV3, TRAJ4)
CAVRDGTGGYNKLIF

SEQ ID NO: 485478 - protein, 13 aa, Homo sapiens
  CDR3 for beta chain variable domain of TCR clone 242739 (TRBV7-3, TRBJ1-1)
CASSQDWGAEAFF

SEQ ID NO: 485479 - protein, 12 aa, Homo sapiens
  CDR3 for alpha chain variable domain of TCR clone 242740 (TRAV1-1, TRAJ39)
CAVPVVGNMRTF

SEQ ID NO: 485480 - protein, 17 aa, Homo sapiens
  CDR3 for beta chain variable domain of TCR clone 242740 (TRBV28, TRBJ2-5)
CASSTPEGDALQETQCF

SEQ ID NO: 485481 - protein, 12 aa, Homo sapiens
  CDR3 for alpha chain variable domain of TCR clone 242741 (TRAV8-3, TRAJ26)
CAGDNYCQNFVS

SEQ ID NO: 485482 - protein, 17 aa, Homo sapiens
  CDR3 for beta chain variable domain of TCR clone 242741 (TRBV10-1, TRBJ2-1)
CASSPQRAGGPFNEQFF

SEQ ID NO: 485483 - protein, 13 aa, Homo sapiens
  CDR3 for alpha chain variable domain of TCR clone 242742 (TRAV12-2, TRAJ9)
CAVKWAGGFKTIF

SEQ ID NO: 485484 - protein, 12 aa, Homo sapiens
  CDR3 for beta chain variable domain of TCR clone 242742 (TRBV7-8, TRBJ2-7)
CASSLGNREQYF

SEQ ID NO: 485485 - protein, 15 aa, Homo sapiens
  CDR3 for alpha chain variable domain of TCR clone 242743 (TRAV8-3, TRAJ45)
CASSYSGGGADGLTF

SEQ ID NO: 485486 - protein, 12 aa, Homo sapiens
  CDR3 for beta chain variable domain of TCR clone 242743 (TRBV2, TRBJ2-1)
CASRPGPREQFF

SEQ ID NO: 485487 - protein, 12 aa, Homo sapiens
  CDR3 for alpha chain variable domain of TCR clone 242744 (TRAV1-2, TRAJ29)
CAVPSGNTPLVF

SEQ ID NO: 485488 - protein, 18 aa, Homo sapiens
  CDR3 for beta chain variable domain of TCR clone 242744 (TRBV7-2, TRBJ2-3)
CASSLKREGSGITDTQYF

SEQ ID NO: 485489 - protein, 11 aa, Homo sapiens
  CDR3 for alpha chain variable domain of TCR clone 242745 (TRAV13-2, TRAJ20)
CADSNDYKLSF

SEQ ID NO: 485490 - protein, 19 aa, Homo sapiens
  CDR3 for beta chain variable domain of TCR clone 242745 (TRBV7-2, TRBJ2-3)
CAGSFLSRNWGGGTDTQYF

SEQ ID NO: 485491 - protein, 13 aa, Homo sapiens
  CDR3 for alpha chain variable domain of TCR clone 242746 (TRAV30, TRAJ18)
CGTEASTLGRLYS

SEQ ID NO: 485492 - protein, 15 aa, Homo sapiens
  CDR3 for beta chain variable domain of TCR clone 242746 (TRBV7-3, TRBJ2-1)
CASSRSGTGSSEQFF

SEQ ID NO: 485493 - protein, 15 aa, Homo sapiens
  CDR3 for alpha chain variable domain of TCR clone 242747 (TRAV13-2, TRAJ5)
CAENPHWTGWRALTF

SEQ ID NO: 485494 - protein, 16 aa, Homo sapiens
  CDR3 for beta chain variable domain of TCR clone 242747 (TRBV7-9, TRBJ1-3)
CASSQTSGLRMGTIYF

SEQ ID NO: 485495 - protein, 18 aa, Homo sapiens
  CDR3 for alpha chain variable domain of TCR clone 242748 (TRAV29/DV5, TRAJ52)
QCTSVQQADGTSYGKLTF

SEQ ID NO: 485496 - protein, 13 aa, Homo sapiens
  CDR3 for beta chain variable domain of TCR clone 242748 (TRBV7-2, TRBJ1-1)
CASNLKGAKVAFS

SEQ ID NO: 485497 - protein, 13 aa, Homo sapiens
  CDR3 for alpha chain variable domain of TCR clone 242749 (TRAV26-1, TRAJ48)
CIVRVVGDEKLTF

SEQ ID NO: 485498 - protein, 16 aa, Homo sapiens
  CDR3 for beta chain variable domain of TCR clone 242749 (TRBV7-9, TRBJ1-2)
CASSPGGGAINYGYTF

SEQ ID NO: 485499 - protein, 12 aa, Homo sapiens
  CDR3 for alpha chain variable domain of TCR clone 242750 (TRAV40, TRAJ20)
CLRGLNDYKLSC

SEQ ID NO: 485500 - protein, 14 aa, Homo sapiens
  CDR3 for beta chain variable domain of TCR clone 242750 (TRBV19, TRBJ2-1)
CASSSGRDYNEQFF

SEQ ID NO: 485501 - protein, 14 aa, Homo sapiens
  CDR3 for alpha chain variable domain of TCR clone 242751 (TRAV23/DV6, TRAJ57)
CAAALKGGSEKLVF

SEQ ID NO: 485502 - protein, 18 aa, Homo sapiens
  CDR3 for beta chain variable domain of TCR clone 242751 (TRBV12-4, TRBJ2-2)
CASSLVAGTRGRTGELFF

SEQ ID NO: 485503 - protein, 13 aa, Homo sapiens
  CDR3 for alpha chain variable domain of TCR clone 242752 (TRAV21, TRAJ15)
CAVANQAGAALIF

SEQ ID NO: 485504 - protein, 13 aa, Homo sapiens
  CDR3 for beta chain variable domain of TCR clone 242752 (TRBV11-2, TRBJ2-5)
CASSSTGEETQYF

SEQ ID NO: 485505 - protein, 12 aa, Homo sapiens
  CDR3 for alpha chain variable domain of TCR clone 242753 (TRAV20, TRAJ39)
CAVGNAGNMLTF

SEQ ID NO: 485506 - protein, 17 aa, Homo sapiens
  CDR3 for beta chain variable domain of TCR clone 242753 (TRBV7-8, TRBJ2-6)
CASSAGTGGAGANVLTF

SEQ ID NO: 485507 - protein, 15 aa, Homo sapiens
  CDR3 for alpha chain variable domain of TCR clone 242754 (TRAV2, TRAJ13)
CCLLLCFRGLQKVTF

SEQ ID NO: 485508 - protein, 14 aa, Homo sapiens
  CDR3 for beta chain variable domain of TCR clone 242754 (TRBV7-2, TRBJ2-7)
CASSPKTSFYEQYF

SEQ ID NO: 485509 - protein, 14 aa, Homo sapiens
  CDR3 for alpha chain variable domain of TCR clone 242755 (TRAV8-2, TRAJ5)
CVVIMDTGRRALTF

SEQ ID NO: 485510 - protein, 20 aa, Homo sapiens
  CDR3 for beta chain variable domain of TCR clone 242755 (TRBV7-8, TRBJ2-2)
CASSHLFPGPTIHITGELFF

SEQ ID NO: 485511 - protein, 12 aa, Homo sapiens
  CDR3 for alpha chain variable domain of TCR clone 242756 (TRAV17, TRAJ30)
CVPERRDDKLIF

SEQ ID NO: 485512 - protein, 14 aa, Homo sapiens
  CDR3 for beta chain variable domain of TCR clone 242756 (TRBV7-7, TRBJ2-2)
CASSRDRSTGELFF

SEQ ID NO: 485513 - protein, 11 aa, Homo sapiens
  CDR3 for alpha chain variable domain of TCR clone 242757 (TRAV12-3, TRAJ27)
CAMANAGKSTF

SEQ ID NO: 485514 - protein, 14 aa, Homo sapiens
  CDR3 for beta chain variable domain of TCR clone 242757 (TRBV25-1, TRBJ2-1)
CASSEFIGDSKQFF

SEQ ID NO: 485515 - protein, 14 aa, Homo sapiens
  CDR3 for alpha chain variable domain of TCR clone 242758 (TRAV12-2, TRAJ31)
CAVSKGNNNARLMF

SEQ ID NO: 485516 - protein, 15 aa, Homo sapiens
  CDR3 for beta chain variable domain of TCR clone 242758 (TRBV20-1, TRBJ2-7)
CSARDRVSGMDEQYF

SEQ ID NO: 485517 - protein, 14 aa, Homo sapiens
  CDR3 for alpha chain variable domain of TCR clone 242759 (TRAV1-2, TRAJ8)
CAVREDTGFQKLVF

SEQ ID NO: 485518 - protein, 17 aa, Homo sapiens
  CDR3 for beta chain variable domain of TCR clone 242759 (TRBV19, TRBJ2-1)
CASSIWSAQPTHNEQFF

SEQ ID NO: 485519 - protein, 14 aa, Homo sapiens
  CDR3 for alpha chain variable domain of TCR clone 242760 (TRAV2, TRAJ37)
CAVDFTSNTGKLIF

SEQ ID NO: 485520 - protein, 14 aa, Homo sapiens
  CDR3 for beta chain variable domain of TCR clone 242760 (TRBV12-4, TRBJ2-3)
CASTIAGWGDTQYF

SEQ ID NO: 485521 - protein, 13 aa, Homo sapiens
  CDR3 for alpha chain variable domain of TCR clone 242761 (TRAV12-3, TRAJ35)
CAMAIGFGNVLHC

SEQ ID NO: 485522 - protein, 15 aa, Homo sapiens
  CDR3 for beta chain variable domain of TCR clone 242761 (TRBV20-1, TRBJ2-1)
CSAKGSGTYYNEQFF

SEQ ID NO: 485523 - protein, 11 aa, Homo sapiens
  CDR3 for alpha chain variable domain of TCR clone 242762 (TRAV12-3, TRAJ43)
CAMSISNDMRF

SEQ ID NO: 485524 - protein, 20 aa, Homo sapiens
  CDR3 for beta chain variable domain of TCR clone 242762 (TRBV28, TRBJ2-1)
CARTPIGRSPGLAGGNEQFF

SEQ ID NO: 485525 - protein, 13 aa, Homo sapiens
  CDR3 for alpha chain variable domain of TCR clone 242763 (TRAV30, TRAJ29)
CGTEDSGNTPLVF

SEQ ID NO: 485526 - protein, 18 aa, Homo sapiens
  CDR3 for beta chain variable domain of TCR clone 242763 (TRBV6-6, TRBJ1-3)
CASSYSKWDSISGNTIYF

SEQ ID NO: 485527 - protein, 22 aa, Homo sapiens
  CDR3 for alpha chain variable domain of TCR clone 242764 (TRAV21, )
CAVRQDAGNNHIQNPDPAVYQL

SEQ ID NO: 485528 - protein, 16 aa, Homo sapiens
  CDR3 for beta chain variable domain of TCR clone 242764 (TRBV4-2, TRBJ1-1)
CASRPLDGGGDTEAFS

SEQ ID NO: 485529 - protein, 13 aa, Homo sapiens
  CDR3 for alpha chain variable domain of TCR clone 242765 (TRAV12-1, TRAJ37)
CVVNAGNTGKLIF

SEQ ID NO: 485530 - protein, 12 aa, Homo sapiens
  CDR3 for beta chain variable domain of TCR clone 242765 (TRBV28, TRBJ2-3)
CASSLYRDTQYF

SEQ ID NO: 485531 - protein, 14 aa, Homo sapiens
  CDR3 for alpha chain variable domain of TCR clone 242766 (TRAV13-1, TRAJ39)
CAASYNNAGNMLTF

SEQ ID NO: 485532 - protein, 17 aa, Homo sapiens
  CDR3 for beta chain variable domain of TCR clone 242766 (TRBV11-2, TRBJ2-7)
CASSLPGQRATSSTSGR

SEQ ID NO: 485533 - protein, 13 aa, Homo sapiens
  CDR3 for alpha chain variable domain of TCR clone 242767 (TRAV17, TRAJ5)
CAPMDTGRRALTF

SEQ ID NO: 485534 - protein, 12 aa, Homo sapiens
  CDR3 for beta chain variable domain of TCR clone 242767 (TRBV5-1, TRBJ2-7)
CASSLDSYEQYF

SEQ ID NO: 485535 - protein, 13 aa, Homo sapiens
  CDR3 for alpha chain variable domain of TCR clone 242768 (TRAV6, TRAJ16)
CALDDSDGQKLLF

SEQ ID NO: 485536 - protein, 12 aa, Homo sapiens
  CDR3 for beta chain variable domain of TCR clone 242768 (TRBV11-2, TRBJ2-5)
CASSLDAQTQYF

SEQ ID NO: 485537 - protein, 16 aa, Homo sapiens
  CDR3 for alpha chain variable domain of TCR clone 242769 (TRAV12-1, TRAJ21)
CVVLSGYFGSGAKLNV

SEQ ID NO: 485538 - protein, 13 aa, Homo sapiens
  CDR3 for beta chain variable domain of TCR clone 242769 (TRBV7-3, TRBJ1-1)
CASSQDWGAEAFF

SEQ ID NO: 485539 - protein, 14 aa, Homo sapiens
  CDR3 for alpha chain variable domain of TCR clone 242770 (TRAV1-2, TRAJ12)
CAVSGTYSSYKLIF

SEQ ID NO: 485540 - protein, 14 aa, Homo sapiens
  CDR3 for beta chain variable domain of TCR clone 242770 (TRBV2, TRBJ2-4)
CSSGTNLAKNIQYF

SEQ ID NO: 485541 - protein, 13 aa, Homo sapiens
  CDR3 for alpha chain variable domain of TCR clone 242771 (TRAV2, TRAJ15)
CAVASQAGTALIF

SEQ ID NO: 485542 - protein, 15 aa, Homo sapiens
  CDR3 for beta chain variable domain of TCR clone 242771 (TRBV7-9, TRBJ2-7)
CASSLALAEAYEQYF

SEQ ID NO: 485543 - protein, 14 aa, Homo sapiens
  CDR3 for alpha chain variable domain of TCR clone 242772 (TRAV4, TRAJ9)
CLVGSGTGGFKTIF

SEQ ID NO: 485544 - protein, 14 aa, Homo sapiens
  CDR3 for beta chain variable domain of TCR clone 242772 (TRBV20-1, TRBJ1-1)
CSAQTRIGGTEAFF

SEQ ID NO: 485545 - protein, 14 aa, Homo sapiens
  CDR3 for alpha chain variable domain of TCR clone 242773 (TRAV35, TRAJ22)
CAGLRPGTARQLTF

SEQ ID NO: 485546 - protein, 13 aa, Homo sapiens
  CDR3 for beta chain variable domain of TCR clone 242773 (TRBV20-1, TRBJ1-1)
CSARGGGNTEAFF

SEQ ID NO: 485547 - protein, 18 aa, Homo sapiens
  CDR3 for alpha chain variable domain of TCR clone 242774 (TRAV8-3, TRAJ4)
WVRDPTSNAPGGYNKLIF

SEQ ID NO: 485548 - protein, 13 aa, Homo sapiens
  CDR3 for beta chain variable domain of TCR clone 242774 (TRBV20-1, TRBJ1-2)
CSATGIQGSGYTF

SEQ ID NO: 485549 - protein, 14 aa, Homo sapiens
  CDR3 for alpha chain variable domain of TCR clone 242775 (TRAV1-2, TRAJ8)
CAVREDTCFQKLVF

SEQ ID NO: 485550 - protein, 15 aa, Homo sapiens
  CDR3 for beta chain variable domain of TCR clone 242775 (TRBV15, TRBJ1-1)
CATSLQGGRNTEAFF

SEQ ID NO: 485551 - protein, 14 aa, Homo sapiens
  CDR3 for alpha chain variable domain of TCR clone 242776 (TRAV35, TRAJ22)
CAGLRPGSARQLTF

SEQ ID NO: 485552 - protein, 13 aa, Homo sapiens
  CDR3 for beta chain variable domain of TCR clone 242776 (TRBV7-8, TRBJ2-7)
RRVRLTEMGEQYF

SEQ ID NO: 485553 - protein, 12 aa, Homo sapiens
  CDR3 for alpha chain variable domain of TCR clone 242777 (TRAV8-3, TRAJ20)
CAVGANDYKLSF

SEQ ID NO: 485554 - protein, 15 aa, Homo sapiens
  CDR3 for beta chain variable domain of TCR clone 242777 (TRBV18, TRBJ1-1)
CASSGRTGEVTEAFF

SEQ ID NO: 485555 - protein, 11 aa, Homo sapiens
  CDR3 for alpha chain variable domain of TCR clone 242778 (TRAV12-2, TRAJ33)
CAVGSNYQLIW

SEQ ID NO: 485556 - protein, 14 aa, Homo sapiens
  CDR3 for beta chain variable domain of TCR clone 242778 (TRBV6-1, TRBJ2-2)
CASVEHIESGGLFF

SEQ ID NO: 485557 - protein, 10 aa, Homo sapiens
  CDR3 for alpha chain variable domain of TCR clone 242779 (TRAV27, TRAJ43)
CAGANNDMRF

SEQ ID NO: 485558 - protein, 14 aa, Homo sapiens
  CDR3 for beta chain variable domain of TCR clone 242779 (TRBV25-1, TRBJ1-1)
CASTHLGGNTEAFF

SEQ ID NO: 485559 - protein, 11 aa, Homo sapiens
  CDR3 for alpha chain variable domain of TCR clone 242780 (TRAV36/DV7, TRAJ36)
CAVIARRQTTS

SEQ ID NO: 485560 - protein, 15 aa, Homo sapiens
  CDR3 for beta chain variable domain of TCR clone 242780 (TRBV5-1, TRBJ2-7)
CASSLNGGPAREQYF

SEQ ID NO: 485561 - protein, 11 aa, Homo sapiens
  CDR3 for alpha chain variable domain of TCR clone 242781 (TRAV12-3, TRAJ43)
CALSVSNDLRF

SEQ ID NO: 485562 - protein, 13 aa, Homo sapiens
  CDR3 for beta chain variable domain of TCR clone 242781 (TRBV20-1, TRBJ1-1)
CSAPLGGGTEAFF

SEQ ID NO: 485563 - protein, 16 aa, Homo sapiens
  CDR3 for alpha chain variable domain of TCR clone 242782 (TRAV30, TRAJ24)
CGTESVDADSWGKFQF

SEQ ID NO: 485564 - protein, 14 aa, Homo sapiens
  CDR3 for beta chain variable domain of TCR clone 242782 (TRBV5-4, TRBJ1-3)
CASSSRSAGNTIYF

SEQ ID NO: 485565 - protein, 13 aa, Homo sapiens
  CDR3 for alpha chain variable domain of TCR clone 242783 (TRAV17, TRAJ5)
CALRGTGRRALTF

SEQ ID NO: 485566 - protein, 14 aa, Homo sapiens
  CDR3 for beta chain variable domain of TCR clone 242783 (TRBV7-3, TRBJ2-1)
CQQPDGGGEVEQFF

SEQ ID NO: 485567 - protein, 13 aa, Homo sapiens
  CDR3 for alpha chain variable domain of TCR clone 242784 (TRAV13-1, TRAJ40)
CAARTSGTYKYIF

SEQ ID NO: 485568 - protein, 17 aa, Homo sapiens
  CDR3 for beta chain variable domain of TCR clone 242784 (TRBV4-1, TRBJ2-3)
CASSQGYLSGGTDTQYF

SEQ ID NO: 485569 - protein, 15 aa, Homo sapiens
  CDR3 for alpha chain variable domain of TCR clone 242785 (TRAV38-2/DV8, TRAJ43)
CAYRSWGAMPNDMRF

SEQ ID NO: 485570 - protein, 12 aa, Homo sapiens
  CDR3 for beta chain variable domain of TCR clone 242785 (TRBV28, TRBJ1-1)
CASNAGDTEAFF

SEQ ID NO: 485571 - protein, 15 aa, Homo sapiens
  CDR3 for alpha chain variable domain of TCR clone 242786 (TRAV13-1, TRAJ44)
CAASRGGGTARKLTF

SEQ ID NO: 485572 - protein, 14 aa, Homo sapiens
  CDR3 for beta chain variable domain of TCR clone 242786 (TRBV11-2, TRBJ1-2)
CASSSGQAGDGYTF

SEQ ID NO: 485573 - protein, 14 aa, Homo sapiens
  CDR3 for alpha chain variable domain of TCR clone 242787 (TRAV1-2, TRAJ16)
CAVNRFSVGQKLLF

SEQ ID NO: 485574 - protein, 12 aa, Homo sapiens
  CDR3 for beta chain variable domain of TCR clone 242787 (TRBV7-6, TRBJ2-7)
CASSLADSEQYF

SEQ ID NO: 485575 - protein, 13 aa, Homo sapiens
  CDR3 for alpha chain variable domain of TCR clone 242788 (TRAV9-2, TRAJ6)
CALSAGGSYIPTF

SEQ ID NO: 485576 - protein, 13 aa, Homo sapiens
  CDR3 for beta chain variable domain of TCR clone 242788 (TRBV19, TRBJ2-1)
CATSGGVYNEQFF

SEQ ID NO: 485577 - protein, 14 aa, Homo sapiens
  CDR3 for alpha chain variable domain of TCR clone 242789 (TRAV26-1, TRAJ38)
CIADNAGHNRKLIW

SEQ ID NO: 485578 - protein, 15 aa, Homo sapiens
  CDR3 for beta chain variable domain of TCR clone 242789 (TRBV20-1, TRBJ2-7)
CSARDRVSGMDEQYF

SEQ ID NO: 485579 - protein, 13 aa, Homo sapiens
  CDR3 for alpha chain variable domain of TCR clone 242790 (TRAV8-3, TRAJ28)
CAVGAVGSYQLTL

SEQ ID NO: 485580 - protein, 14 aa, Homo sapiens
  CDR3 for beta chain variable domain of TCR clone 242790 (TRBV7-2, TRBJ2-7)
CASRSQGAAGEQYF

SEQ ID NO: 485581 - protein, 13 aa, Homo sapiens
  CDR3 for alpha chain variable domain of TCR clone 242791 (TRAV12-2, TRAJ13)
CAVKKTGGYQKVT

SEQ ID NO: 485582 - protein, 17 aa, Homo sapiens
  CDR3 for beta chain variable domain of TCR clone 242791 (TRBV7-8, TRBJ2-6)
CASSAGTGGAGANVLTF

SEQ ID NO: 485583 - protein, 15 aa, Homo sapiens
  CDR3 for alpha chain variable domain of TCR clone 242792 (TRAV26-1, TRAJ29)
CIVRVEGSGNTPLVF

SEQ ID NO: 485584 - protein, 13 aa, Homo sapiens
  CDR3 for beta chain variable domain of TCR clone 242792 (TRBV7-8, TRBJ2-1)
CASTRDAVDEQFF

SEQ ID NO: 485585 - protein, 22 aa, Homo sapiens
  CDR3 for alpha chain variable domain of TCR clone 242793 (TRAV27, TRAJ38)
CAARRNAGNNHIQNPDPAVYQL

SEQ ID NO: 485586 - protein, 15 aa, Homo sapiens
  CDR3 for beta chain variable domain of TCR clone 242793 (TRBV18, TRBJ2-1)
CASSPPSASYNEQFF

SEQ ID NO: 485587 - protein, 15 aa, Homo sapiens
  CDR3 for alpha chain variable domain of TCR clone 242794 (TRAV3, TRAJ30)
CAVRDEYGRDDKIIF

SEQ ID NO: 485588 - protein, 16 aa, Homo sapiens
  CDR3 for beta chain variable domain of TCR clone 242794 (TRBV5-1, TRBJ2-5)
CASRLAIHRGRETQYF

SEQ ID NO: 485589 - protein, 18 aa, Homo sapiens
  CDR3 for alpha chain variable domain of TCR clone 242795 (TRAV12-2, )
CAVEDIQNPNPAVYQLSD

SEQ ID NO: 485590 - protein, 16 aa, Homo sapiens
  CDR3 for beta chain variable domain of TCR clone 242795 (TRBV6-1, TRBJ1-2)
CASSGAWQGRSHGDTF

SEQ ID NO: 485591 - protein, 14 aa, Homo sapiens
  CDR3 for alpha chain variable domain of TCR clone 242796 (TRAV1-2, TRAJ16)
CAVNRFSDGQKLLF

SEQ ID NO: 485592 - protein, 13 aa, Homo sapiens
  CDR3 for beta chain variable domain of TCR clone 242796 (TRBV3-1, TRBJ1-5)
CASSQDVDQPQHF

SEQ ID NO: 485593 - protein, 13 aa, Homo sapiens
  CDR3 for alpha chain variable domain of TCR clone 242797 (TRAV17, TRAJ9)
CATDYTGGFKTIF

SEQ ID NO: 485594 - protein, 15 aa, Homo sapiens
  CDR3 for beta chain variable domain of TCR clone 242797 (TRBV11-2, TRBJ1-1)
CASSSRSSLLRSLDK

SEQ ID NO: 485595 - protein, 14 aa, Homo sapiens
  CDR3 for alpha chain variable domain of TCR clone 242798 (TRAV1-2, TRAJ8)
CAVREDKGFQKLVF

SEQ ID NO: 485596 - protein, 16 aa, Homo sapiens
  CDR3 for beta chain variable domain of TCR clone 242798 (TRBV7-2, TRBJ1-2)
CASSSNQDRRGHGYTF

SEQ ID NO: 485597 - protein, 12 aa, Homo sapiens
  CDR3 for alpha chain variable domain of TCR clone 242799 (TRAV8-6, TRAJ27)
CAVSEEEGKSTF

SEQ ID NO: 485598 - protein, 11 aa, Homo sapiens
  CDR3 for beta chain variable domain of TCR clone 242799 (TRBV12-4, TRBJ2-3)
CASTATDTQYF

SEQ ID NO: 485599 - protein, 14 aa, Homo sapiens
  CDR3 for alpha chain variable domain of TCR clone 242800 (TRAV23/DV6, TRAJ37)
CAASTSSNTGKLIF

SEQ ID NO: 485600 - protein, 14 aa, Homo sapiens
  CDR3 for beta chain variable domain of TCR clone 242800 (TRBV12-4, TRBJ2-7)
CASSRQGRSYEQYF

SEQ ID NO: 485601 - protein, 13 aa, Homo sapiens
  CDR3 for alpha chain variable domain of TCR clone 242801 (TRAV35, TRAJ57)
CWSPQGGSEKLVF

SEQ ID NO: 485602 - protein, 12 aa, Homo sapiens
  CDR3 for beta chain variable domain of TCR clone 242801 (TRBV11-2, TRBJ2-1)
CASSPGNNEQFF

SEQ ID NO: 485603 - protein, 13 aa, Homo sapiens
  CDR3 for alpha chain variable domain of TCR clone 242802 (TRAV8-3, TRAJ28)
CAVGAVGSYQLTF

SEQ ID NO: 485604 - protein, 13 aa, Homo sapiens
  CDR3 for beta chain variable domain of TCR clone 242802 (TRBV7-2, TRBJ1-6)
CASSLKFDSPLLF

SEQ ID NO: 485605 - protein, 16 aa, Homo sapiens
  CDR3 for alpha chain variable domain of TCR clone 242803 (TRAV12-3, TRAJ53)
CAMSVGSGGSNYKLTF

SEQ ID NO: 485606 - protein, 17 aa, Homo sapiens
  CDR3 for beta chain variable domain of TCR clone 242803 (TRBV7-8, TRBJ2-6)
CASSAGTGGAGANVLTF

SEQ ID NO: 485607 - protein, 12 aa, Homo sapiens
  CDR3 for alpha chain variable domain of TCR clone 242804 (TRAV3, TRAJ20)
CAVRDPDYKLSF

SEQ ID NO: 485608 - protein, 14 aa, Homo sapiens
  CDR3 for beta chain variable domain of TCR clone 242804 (TRBV11-3, TRBJ2-7)
CASSSTGEGYEQYF

SEQ ID NO: 485609 - protein, 18 aa, Homo sapiens
  CDR3 for alpha chain variable domain of TCR clone 242805 (TRAV12-3, TRAJ52)
CAMSRANAGGTSYGKLTF

SEQ ID NO: 485610 - protein, 13 aa, Homo sapiens
  CDR3 for beta chain variable domain of TCR clone 242805 (TRBV19, TRBJ1-2)
CASSVPGQDGYTF

SEQ ID NO: 485611 - protein, 11 aa, Homo sapiens
  CDR3 for alpha chain variable domain of TCR clone 242806 (TRAV17, TRAJ31)
CATSNNARLMF

SEQ ID NO: 485612 - protein, 15 aa, Homo sapiens
  CDR3 for beta chain variable domain of TCR clone 242806 (TRBV7-2, TRBJ2-1)
CASSSRTSREDEQFF

SEQ ID NO: 485613 - protein, 15 aa, Homo sapiens
  CDR3 for alpha chain variable domain of TCR clone 242807 (TRAV17, TRAJ35)
CATSFVIGFGNVLHC

SEQ ID NO: 485614 - protein, 15 aa, Homo sapiens
  CDR3 for beta chain variable domain of TCR clone 242807 (TRBV7-9, TRBJ2-7)
CASSLALAEAYEQYF

SEQ ID NO: 485615 - protein, 15 aa, Homo sapiens
  CDR3 for alpha chain variable domain of TCR clone 242808 (TRAV21, TRAJ38)
CAVRQAAGNNRKLIW

SEQ ID NO: 485616 - protein, 16 aa, Homo sapiens
  CDR3 for beta chain variable domain of TCR clone 242808 (TRBV4-2, TRBJ1-1)
CASRPLDGGGDTEAFF

SEQ ID NO: 485617 - protein, 14 aa, Homo sapiens
  CDR3 for alpha chain variable domain of TCR clone 242809 (TRAV9-2, TRAJ39)
CALYIYNAGNMLTF

SEQ ID NO: 485618 - protein, 19 aa, Homo sapiens
  CDR3 for beta chain variable domain of TCR clone 242809 (TRBV18, TRBJ2-1)
CASSPPMGSGRMGYNEQFF

SEQ ID NO: 485619 - protein, 12 aa, Homo sapiens
  CDR3 for alpha chain variable domain of TCR clone 242810 (TRAV13-1, TRAJ15)
CTASQAGTALIF

SEQ ID NO: 485620 - protein, 14 aa, Homo sapiens
  CDR3 for beta chain variable domain of TCR clone 242810 (TRBV19, TRBJ2-1)
CASPTFVLSGEQFF

SEQ ID NO: 485621 - protein, 16 aa, Homo sapiens
  CDR3 for alpha chain variable domain of TCR clone 242811 (TRAV30, TRAJ24)
CGTEIVDADSWGKFQF

SEQ ID NO: 485622 - protein, 15 aa, Homo sapiens
  CDR3 for beta chain variable domain of TCR clone 242811 (TRBV27, TRBJ1-4)
CASSPRHATNEKLFF

SEQ ID NO: 485623 - protein, 16 aa, Homo sapiens
  CDR3 for alpha chain variable domain of TCR clone 242812 (TRAV19, TRAJ53)
CALIADSGGSNYKLPF

SEQ ID NO: 485624 - protein, 16 aa, Homo sapiens
  CDR3 for beta chain variable domain of TCR clone 242812 (TRBV20-1, TRBJ2-7)
CSARGSVVADIYEQYF

SEQ ID NO: 485625 - protein, 12 aa, Homo sapiens
  CDR3 for alpha chain variable domain of TCR clone 242813 (TRAV2, TRAJ31)
CAVEDNNARLMF

SEQ ID NO: 485626 - protein, 20 aa, Homo sapiens
  CDR3 for beta chain variable domain of TCR clone 242813 (TRBV19, TRBJ2-1)
CASSISRTVTSTRLNNEQFF

SEQ ID NO: 485627 - protein, 14 aa, Homo sapiens
  CDR3 for alpha chain variable domain of TCR clone 242814 (TRAV12-1, TRAJ30)
CVVNIGGRDDKIIF

SEQ ID NO: 485628 - protein, 14 aa, Homo sapiens
  CDR3 for beta chain variable domain of TCR clone 242814 (TRBV7-6, TRBJ2-3)
CASSLGTVTDTQYI

SEQ ID NO: 485629 - protein, 14 aa, Homo sapiens
  CDR3 for alpha chain variable domain of TCR clone 242815 (TRAV13-1, TRAJ9)
CAASALTGGFKTIF

SEQ ID NO: 485630 - protein, 13 aa, Homo sapiens
  CDR3 for beta chain variable domain of TCR clone 242815 (TRBV19, TRBJ2-7)
CASSPRQSYEQYF

SEQ ID NO: 485631 - protein, 13 aa, Homo sapiens
  CDR3 for alpha chain variable domain of TCR clone 242816 (TRAV8-1, TRAJ34)
CAVRPYYTDKLIF

SEQ ID NO: 485632 - protein, 15 aa, Homo sapiens
  CDR3 for beta chain variable domain of TCR clone 242816 (TRBV7-9, TRBJ1-3)
CASSLRSGSGNTIYF

SEQ ID NO: 485633 - protein, 15 aa, Homo sapiens
  CDR3 for alpha chain variable domain of TCR clone 242817 (TRAV8-3, TRAJ11)
CAVGLLNSGYSTLTF

SEQ ID NO: 485634 - protein, 15 aa, Homo sapiens
  CDR3 for beta chain variable domain of TCR clone 242817 (TRBV11-3, TRBJ2-3)
CASLKDGREGDTQYF

SEQ ID NO: 485635 - protein, 16 aa, Homo sapiens
  CDR3 for alpha chain variable domain of TCR clone 242818 (TRAV27, TRAJ34)
CAGGGLGDYNTDKLIF

SEQ ID NO: 485636 - protein, 15 aa, Homo sapiens
  CDR3 for beta chain variable domain of TCR clone 242818 (TRBV20-1, TRBJ2-7)
CSARDRVSGMDEQYF

SEQ ID NO: 485637 - protein, 20 aa, Homo sapiens
  CDR3 for alpha chain variable domain of TCR clone 242819 (TRAV12-1, TRAJ42)
SSVIQPPTSVKGGSQGNLIF

SEQ ID NO: 485638 - protein, 18 aa, Homo sapiens
  CDR3 for beta chain variable domain of TCR clone 242819 (TRBV11-2, TRBJ2-3)
CASSLGGTLRGAPNTQYF

SEQ ID NO: 485639 - protein, 16 aa, Homo sapiens
  CDR3 for alpha chain variable domain of TCR clone 242820 (TRAV8-6, TRAJ4)
CAVSPTFSGGYNKLIF

SEQ ID NO: 485640 - protein, 14 aa, Homo sapiens
  CDR3 for beta chain variable domain of TCR clone 242820 (TRBV29-1, TRBJ2-2)
CSVVTSGSPGELFF

SEQ ID NO: 485641 - protein, 17 aa, Homo sapiens
  CDR3 for alpha chain variable domain of TCR clone 242821 (TRAV35, TRAJ38)
CAGQLQRNAGNNRKLIW

SEQ ID NO: 485642 - protein, 15 aa, Homo sapiens
  CDR3 for beta chain variable domain of TCR clone 242821 (TRBV7-9, TRBJ2-1)
CASSLGLAGGTGQFF

SEQ ID NO: 485643 - protein, 14 aa, Homo sapiens
  CDR3 for alpha chain variable domain of TCR clone 242822 (TRAV1-2, TRAJ16)
CAVNRFSDVQKLLF

SEQ ID NO: 485644 - protein, 17 aa, Homo sapiens
  CDR3 for beta chain variable domain of TCR clone 242822 (TRBV10-3, TRBJ2-4)
CTSVPSVNKGSKNIQYF

SEQ ID NO: 485645 - protein, 15 aa, Homo sapiens
  CDR3 for alpha chain variable domain of TCR clone 242823 (TRAV21, TRAJ40)
CAVRPQTSGTYKYIF

SEQ ID NO: 485646 - protein, 13 aa, Homo sapiens
  CDR3 for beta chain variable domain of TCR clone 242823 (TRBV7-2, TRBJ2-2)
CAISSVRAGELFF

SEQ ID NO: 485647 - protein, 15 aa, Homo sapiens
  CDR3 for alpha chain variable domain of TCR clone 242824 (TRAV3, TRAJ3)
CAVRDRDSSASKIIF

SEQ ID NO: 485648 - protein, 18 aa, Homo sapiens
  CDR3 for beta chain variable domain of TCR clone 242824 (TRBV25-1, TRBJ1-2)
CARSGLQNGQGLIFGYTF

SEQ ID NO: 485649 - protein, 14 aa, Homo sapiens
  CDR3 for alpha chain variable domain of TCR clone 242825 (TRAV29/DV5, TRAJ36)
CAARRKTGANNLFF

SEQ ID NO: 485650 - protein, 14 aa, Homo sapiens
  CDR3 for beta chain variable domain of TCR clone 242825 (TRBV4-2, TRBJ1-2)
CASSPGGSNYGYTF

SEQ ID NO: 485651 - protein, 21 aa, Homo sapiens
  CDR3 for alpha chain variable domain of TCR clone 242826 (TRAV6, TRAJ36)
CARQTTSSLGLERDSPLFHIS

SEQ ID NO: 485652 - protein, 14 aa, Homo sapiens
  CDR3 for beta chain variable domain of TCR clone 242826 (TRBV7-9, TRBJ1-1)
CASTPLQSYTEAFF

SEQ ID NO: 485653 - protein, 18 aa, Homo sapiens
  CDR3 for alpha chain variable domain of TCR clone 242827 (TRAV13-1, TRAJ52)
FAAKNPNAGGTSYGKLTF

SEQ ID NO: 485654 - protein, 16 aa, Homo sapiens
  CDR3 for beta chain variable domain of TCR clone 242827 (TRBV6-1, TRBJ2-1)
CASILRQGSSYNEQFF

SEQ ID NO: 485655 - protein, 11 aa, Homo sapiens
  CDR3 for alpha chain variable domain of TCR clone 242828 (TRAV3, TRAJ17)
CAEAAGNKLTF

SEQ ID NO: 485656 - protein, 15 aa, Homo sapiens
  CDR3 for beta chain variable domain of TCR clone 242828 (TRBV7-9, TRBJ1-5)
CASSQGHQPNQPQHF

SEQ ID NO: 485657 - protein, 12 aa, Homo sapiens
  CDR3 for alpha chain variable domain of TCR clone 242829 (TRAV4, TRAJ26)
CLVGDYGQNFVF

SEQ ID NO: 485658 - protein, 15 aa, Homo sapiens
  CDR3 for beta chain variable domain of TCR clone 242829 (TRBV2, TRBJ2-3)
CASSDFEKATDTQYF

SEQ ID NO: 485659 - protein, 13 aa, Homo sapiens
  CDR3 for alpha chain variable domain of TCR clone 242830 (TRAV30, TRAJ6)
CGFIEGGSYIPTF

SEQ ID NO: 485660 - protein, 16 aa, Homo sapiens
  CDR3 for beta chain variable domain of TCR clone 242830 (TRBV7-6, TRBJ2-3)
CASSARTSRGTDTRYF

SEQ ID NO: 485661 - protein, 14 aa, Homo sapiens
  CDR3 for alpha chain variable domain of TCR clone 242831 (TRAV8-3, TRAJ4)
CAVGAAGGDNKLIF

SEQ ID NO: 485662 - protein, 18 aa, Homo sapiens
  CDR3 for beta chain variable domain of TCR clone 242831 (TRBV6-5, TRBJ1-1)
CASSYSAPGGTGGTEAFF

SEQ ID NO: 485663 - protein, 12 aa, Homo sapiens
  CDR3 for alpha chain variable domain of TCR clone 242832 (TRAV21, TRAJ33)
CAKMDSNYQLIW

SEQ ID NO: 485664 - protein, 15 aa, Homo sapiens
  CDR3 for beta chain variable domain of TCR clone 242832 (TRBV12-4, TRBJ2-5)
CASSPTTGLQETQYF

SEQ ID NO: 485665 - protein, 15 aa, Homo sapiens
  CDR3 for alpha chain variable domain of TCR clone 242833 (TRAV3, TRAJ11)
CAVRDRGSGYSTLTF

SEQ ID NO: 485666 - protein, 14 aa, Homo sapiens
  CDR3 for beta chain variable domain of TCR clone 242833 (TRBV12-5, TRBJ2-5)
CASGSRTHQETQYF

SEQ ID NO: 485667 - protein, 11 aa, Homo sapiens
  CDR3 for alpha chain variable domain of TCR clone 242834 (TRAV2, TRAJ13)
CASGGYQKVTF

SEQ ID NO: 485668 - protein, 15 aa, Homo sapiens
  CDR3 for beta chain variable domain of TCR clone 242834 (TRBV11-2, TRBJ1-2)
CASSLEGVQRNGYAF

SEQ ID NO: 485669 - protein, 13 aa, Homo sapiens
  CDR3 for alpha chain variable domain of TCR clone 242835 (TRAV1-2, TRAJ26)
CAVRPNYGQNFVF

SEQ ID NO: 485670 - protein, 14 aa, Homo sapiens
  CDR3 for beta chain variable domain of TCR clone 242835 (TRBV4-1, TRBJ2-5)
CASSQDLALETQCF

SEQ ID NO: 485671 - protein, 12 aa, Homo sapiens
  CDR3 for alpha chain variable domain of TCR clone 242836 (TRAV1-2, TRAJ29)
CAVRNLNTPLVF

SEQ ID NO: 485672 - protein, 12 aa, Homo sapiens
  CDR3 for beta chain variable domain of TCR clone 242836 (TRBV11-2, TRBJ2-2)
CASSLGGGELFF

SEQ ID NO: 485673 - protein, 13 aa, Homo sapiens
  CDR3 for alpha chain variable domain of TCR clone 242837 (TRAV1-2, TRAJ9)
CAALNTGGFKTIF

SEQ ID NO: 485674 - protein, 10 aa, Homo sapiens
  CDR3 for beta chain variable domain of TCR clone 242837 (TRBV19, TRBJ1-2)
CASSVPGQDG

SEQ ID NO: 485675 - protein, 10 aa, Homo sapiens
  CDR3 for alpha chain variable domain of TCR clone 242838 (TRAV30, TRAJ32)
CGTAKDMVVL

SEQ ID NO: 485676 - protein, 13 aa, Homo sapiens
  CDR3 for beta chain variable domain of TCR clone 242838 (TRBV10-3, TRBJ2-7)
CASKLAVNYEQYF

SEQ ID NO: 485677 - protein, 14 aa, Homo sapiens
  CDR3 for alpha chain variable domain of TCR clone 242839 (TRAV12-1, TRAJ4)
CVVTPSGGYNKLIF

SEQ ID NO: 485678 - protein, 14 aa, Homo sapiens
  CDR3 for beta chain variable domain of TCR clone 242839 (TRBV7-3, TRBJ2-3)
CASSSTGVADTQYF

SEQ ID NO: 485679 - protein, 14 aa, Homo sapiens
  CDR3 for alpha chain variable domain of TCR clone 242840 (TRAV2, TRAJ3)
CAVDRYSSASKIIF

SEQ ID NO: 485680 - protein, 16 aa, Homo sapiens
  CDR3 for beta chain variable domain of TCR clone 242840 (TRBV20-1, TRBJ1-5)
CSAERPGQQTNQPQHF

SEQ ID NO: 485681 - protein, 15 aa, Homo sapiens
  CDR3 for alpha chain variable domain of TCR clone 242841 (TRAV2, TRAJ9)
CAVEDRGTGGFKPIF

SEQ ID NO: 485682 - protein, 16 aa, Homo sapiens
  CDR3 for beta chain variable domain of TCR clone 242841 (TRBV24-1, TRBJ2-3)
CATSAPGTGATDTQYF

SEQ ID NO: 485683 - protein, 16 aa, Homo sapiens
  CDR3 for alpha chain variable domain of TCR clone 242842 (TRAV13-1, TRAJ22)
CAAKGGRSCSARQLTF

SEQ ID NO: 485684 - protein, 15 aa, Homo sapiens
  CDR3 for beta chain variable domain of TCR clone 242842 (TRBV9, TRBJ1-6)
CASSVAGTGDSPLHF

SEQ ID NO: 485685 - protein, 16 aa, Homo sapiens
  CDR3 for alpha chain variable domain of TCR clone 242843 (TRAV16, TRAJ52)
SALSAAGGTSYGKLTF

SEQ ID NO: 485686 - protein, 12 aa, Homo sapiens
  CDR3 for beta chain variable domain of TCR clone 242843 (TRBV12-4, TRBJ1-3)
CASSFSGNTMYF

SEQ ID NO: 485687 - protein, 14 aa, Homo sapiens
  CDR3 for alpha chain variable domain of TCR clone 242844 (TRAV12-3, TRAJ53)
CGATSGGSNYKLKF

SEQ ID NO: 485688 - protein, 14 aa, Homo sapiens
  CDR3 for beta chain variable domain of TCR clone 242844 (TRBV7-2, TRBJ2-7)
CASSPKTSFYEQYF

SEQ ID NO: 485689 - protein, 11 aa, Homo sapiens
  CDR3 for alpha chain variable domain of TCR clone 242845 (TRAV27, TRAJ52)
CAGAPAGGTSY

SEQ ID NO: 485690 - protein, 12 aa, Homo sapiens
  CDR3 for beta chain variable domain of TCR clone 242845 (TRBV27, TRBJ2-1)
CASRGFYNEQFF

SEQ ID NO: 485691 - protein, 15 aa, Homo sapiens
  CDR3 for alpha chain variable domain of TCR clone 242846 (TRAV21, TRAJ13)
CAVPRSFWGLPESYF

SEQ ID NO: 485692 - protein, 15 aa, Homo sapiens
  CDR3 for beta chain variable domain of TCR clone 242846 (TRBV7-9, TRBJ1-6)
CASSSPGRGNSPLHF

SEQ ID NO: 485693 - protein, 15 aa, Homo sapiens
  CDR3 for alpha chain variable domain of TCR clone 242847 (TRAV25, TRAJ52)
CAGTSGGTSSGKLTF

SEQ ID NO: 485694 - protein, 13 aa, Homo sapiens
  CDR3 for beta chain variable domain of TCR clone 242847 (TRBV6-5, TRBJ2-5)
CASSPQGGETQYF

SEQ ID NO: 485695 - protein, 21 aa, Homo sapiens
  CDR3 for alpha chain variable domain of TCR clone 242848 (TRAV21, TRAJ27)
CAARPGNAGKSTSGDRTTLTV

SEQ ID NO: 485696 - protein, 13 aa, Homo sapiens
  CDR3 for beta chain variable domain of TCR clone 242848 (TRBV18, TRBJ2-7)
CASQSGGGYEQYF

SEQ ID NO: 485697 - protein, 15 aa, Homo sapiens
  CDR3 for alpha chain variable domain of TCR clone 242849 (TRAV26-1, TRAJ38)
CIVRAEGGNNRKLIW

SEQ ID NO: 485698 - protein, 13 aa, Homo sapiens
  CDR3 for beta chain variable domain of TCR clone 242849 (TRBV7-7, TRBJ2-5)
CASSRSGQETQYF

SEQ ID NO: 485699 - protein, 14 aa, Homo sapiens
  CDR3 for alpha chain variable domain of TCR clone 242850 (TRAV26-1, TRAJ44)
CIVSNTGTASKLTF

SEQ ID NO: 485700 - protein, 17 aa, Homo sapiens
  CDR3 for beta chain variable domain of TCR clone 242850 (TRBV13, TRBJ2-3)
CASSLSRVAGGRNTQYF

SEQ ID NO: 485701 - protein, 14 aa, Homo sapiens
  CDR3 for alpha chain variable domain of TCR clone 242851 (TRAV12-2, TRAJ44)
CAVNPAGTASKLTF

SEQ ID NO: 485702 - protein, 13 aa, Homo sapiens
  CDR3 for beta chain variable domain of TCR clone 242851 (TRBV20-1, TRBJ1-6)
CSDPLGVGPPLHF

SEQ ID NO: 485703 - protein, 13 aa, Homo sapiens
  CDR3 for alpha chain variable domain of TCR clone 242852 (TRAV36/DV7, TRAJ41)
CAVEANSGYALNF

SEQ ID NO: 485704 - protein, 17 aa, Homo sapiens
  CDR3 for beta chain variable domain of TCR clone 242852 (TRBV20-1, TRBJ2-2)
CSASGSGQGGLTGELFF

SEQ ID NO: 485705 - protein, 15 aa, Homo sapiens
  CDR3 for alpha chain variable domain of TCR clone 242853 (TRAV26-1, TRAJ29)
CIVRVEGSGNTPLAF

SEQ ID NO: 485706 - protein, 15 aa, Homo sapiens
  CDR3 for beta chain variable domain of TCR clone 242853 (TRBV7-9, TRBJ1-5)
CASSQGHQPNEPQHF

SEQ ID NO: 485707 - protein, 14 aa, Homo sapiens
  CDR3 for alpha chain variable domain of TCR clone 242854 (TRAV1-2, TRAJ8)
CAGREDTGFQKLVF

SEQ ID NO: 485708 - protein, 15 aa, Homo sapiens
  CDR3 for beta chain variable domain of TCR clone 242854 (TRBV20-1, TRBJ1-1)
CSASRGVTGNTEAFF

SEQ ID NO: 485709 - protein, 14 aa, Homo sapiens
  CDR3 for alpha chain variable domain of TCR clone 242855 (TRAV1-1, TRAJ23)
CAVSIYNQGGKLIF

SEQ ID NO: 485710 - protein, 12 aa, Homo sapiens
  CDR3 for beta chain variable domain of TCR clone 242855 (TRBV7-9, TRBJ2-7)
CASSIKREEQYF

SEQ ID NO: 485711 - protein, 17 aa, Homo sapiens
  CDR3 for alpha chain variable domain of TCR clone 242856 (TRAV36/DV7, TRAJ52)
CAVAQRAGGTSYGKLTF

SEQ ID NO: 485712 - protein, 17 aa, Homo sapiens
  CDR3 for beta chain variable domain of TCR clone 242856 (TRBV28, TRBJ2-5)
CASSTREGDALQETQYF

SEQ ID NO: 485713 - protein, 14 aa, Homo sapiens
  CDR3 for alpha chain variable domain of TCR clone 242857 (TRAV12-2, TRAJ3)
CAVSLYSSASRIIF

SEQ ID NO: 485714 - protein, 14 aa, Homo sapiens
  CDR3 for beta chain variable domain of TCR clone 242857 (TRBV27, TRBJ2-1)
CAGSIAETYNEQFF

SEQ ID NO: 485715 - protein, 16 aa, Homo sapiens
  CDR3 for alpha chain variable domain of TCR clone 242858 (TRAV26-1, TRAJ52)
CIVSNAGGTSYGKLTF

SEQ ID NO: 485716 - protein, 16 aa, Homo sapiens
  CDR3 for beta chain variable domain of TCR clone 242858 (TRBV5-1, TRBJ2-1)
CASGLEGRGLYNEQFF

SEQ ID NO: 485717 - protein, 15 aa, Homo sapiens
  CDR3 for alpha chain variable domain of TCR clone 242859 (TRAV12-3, TRAJ11)
CAMSEENSGYSTLTS

SEQ ID NO: 485718 - protein, 14 aa, Homo sapiens
  CDR3 for beta chain variable domain of TCR clone 242859 (TRBV18, TRBJ2-1)
CASSPGVSQETQYF

SEQ ID NO: 485719 - protein, 13 aa, Homo sapiens
  CDR3 for alpha chain variable domain of TCR clone 242860 (TRAV4, TRAJ42)
CLVGGGSQGNLIS

SEQ ID NO: 485720 - protein, 16 aa, Homo sapiens
  CDR3 for beta chain variable domain of TCR clone 242860 (TRBV5-1, TRBJ2-3)
CASSLQGRVGADTQYF

SEQ ID NO: 485721 - protein, 12 aa, Homo sapiens
  CDR3 for alpha chain variable domain of TCR clone 242861 (TRAV13-2, TRAJ8)
CAPWLGFQKLVF

SEQ ID NO: 485722 - protein, 16 aa, Homo sapiens
  CDR3 for beta chain variable domain of TCR clone 242861 (TRBV7-2, TRBJ2-5)
CASSSKWLSGQETQYF

SEQ ID NO: 485723 - protein, 14 aa, Homo sapiens
  CDR3 for alpha chain variable domain of TCR clone 242862 (TRAV13-1, TRAJ35)
CAASKGGCGKVLHC

SEQ ID NO: 485724 - protein, 13 aa, Homo sapiens
  CDR3 for beta chain variable domain of TCR clone 242862 (TRBV7-3, TRBJ1-1)
CASSQDWGAEAFF

SEQ ID NO: 485725 - protein, 11 aa, Homo sapiens
  CDR3 for alpha chain variable domain of TCR clone 242863 (TRAV2, TRAJ13)
CASGGYQTVTF

SEQ ID NO: 485726 - protein, 16 aa, Homo sapiens
  CDR3 for beta chain variable domain of TCR clone 242863 (TRBV5-1, TRBJ2-7)
CASSWGTGGRAWEQYV

SEQ ID NO: 485727 - protein, 13 aa, Homo sapiens
  CDR3 for alpha chain variable domain of TCR clone 242864 (TRAV21, TRAJ27)
CAARPGNAGKSTF

SEQ ID NO: 485728 - protein, 14 aa, Homo sapiens
  CDR3 for beta chain variable domain of TCR clone 242864 (TRBV2, TRBJ1-2)
CASRKGALDYGYTF

SEQ ID NO: 485729 - protein, 13 aa, Homo sapiens
  CDR3 for alpha chain variable domain of TCR clone 242865 (TRAV30, TRAJ24)
CGTVTNSWGKLQF

SEQ ID NO: 485730 - protein, 14 aa, Homo sapiens
  CDR3 for beta chain variable domain of TCR clone 242865 (TRBV6-3, TRBJ2-2)
CASTYTPDTGELFF

SEQ ID NO: 485731 - protein, 15 aa, Homo sapiens
  CDR3 for alpha chain variable domain of TCR clone 242866 (TRAV3, TRAJ20)
CAVRDSRSNDSKLSF

SEQ ID NO: 485732 - protein, 14 aa, Homo sapiens
  CDR3 for beta chain variable domain of TCR clone 242866 (TRBV20-1, TRBJ2-7)
CSARRGNGIYEQYF

SEQ ID NO: 485733 - protein, 14 aa, Homo sapiens
  CDR3 for alpha chain variable domain of TCR clone 242867 (TRAV3, TRAJ6)
CAVRDSRKKLHTYI

SEQ ID NO: 485734 - protein, 15 aa, Homo sapiens
  CDR3 for beta chain variable domain of TCR clone 242867 (TRBV18, TRBJ2-7)
CASSPLQGRTYEQYF

SEQ ID NO: 485735 - protein, 13 aa, Homo sapiens
  CDR3 for alpha chain variable domain of TCR clone 242868 (TRAV25, TRAJ30)
CAGRVDRDDKIIF

SEQ ID NO: 485736 - protein, 17 aa, Homo sapiens
  CDR3 for beta chain variable domain of TCR clone 242868 (TRBV7-9, TRBJ2-6)
FASSFGAGYSGANVLTF

SEQ ID NO: 485737 - protein, 15 aa, Homo sapiens
  CDR3 for alpha chain variable domain of TCR clone 242869 (TRAV12-3, TRAJ27)
CAMRAYNTNAGKSTF

SEQ ID NO: 485738 - protein, 15 aa, Homo sapiens
  CDR3 for beta chain variable domain of TCR clone 242869 (TRBV7-2, TRBJ2-1)
CASSFQADEYNEQFF

SEQ ID NO: 485739 - protein, 13 aa, Homo sapiens
  CDR3 for alpha chain variable domain of TCR clone 242870 (TRAV1-2, TRAJ9)
CAALNTGGFKTIF

SEQ ID NO: 485740 - protein, 16 aa, Homo sapiens
  CDR3 for beta chain variable domain of TCR clone 242870 (TRBV13, TRBJ2-2)
CSSSPRTGEHTGELFF

SEQ ID NO: 485741 - protein, 13 aa, Homo sapiens
  CDR3 for alpha chain variable domain of TCR clone 242871 (TRAV1-2, TRAJ9)
CAALNTGGFKTIF

SEQ ID NO: 485742 - protein, 15 aa, Homo sapiens
  CDR3 for beta chain variable domain of TCR clone 242871 (TRBV9, TRBJ1-6)
CASSVAGTGNSPLHF

SEQ ID NO: 485743 - protein, 13 aa, Homo sapiens
  CDR3 for alpha chain variable domain of TCR clone 242872 (TRAV1-2, TRAJ12)
CAVSMDSSYKLIF

SEQ ID NO: 485744 - protein, 14 aa, Homo sapiens
  CDR3 for beta chain variable domain of TCR clone 242872 (TRBV19, TRBJ2-1)
CASSSGRDCNEQFF

SEQ ID NO: 485745 - protein, 14 aa, Homo sapiens
  CDR3 for alpha chain variable domain of TCR clone 242873 (TRAV1-2, TRAJ8)
CAVREDTGFQKLVF

SEQ ID NO: 485746 - protein, 14 aa, Homo sapiens
  CDR3 for beta chain variable domain of TCR clone 242873 (TRBV12-4, TRBJ2-5)
CASSAGLVSETQYF

SEQ ID NO: 485747 - protein, 13 aa, Homo sapiens
  CDR3 for alpha chain variable domain of TCR clone 242874 (TRAV13-1, TRAJ5)
CAASETGRRAFTF

SEQ ID NO: 485748 - protein, 12 aa, Homo sapiens
  CDR3 for beta chain variable domain of TCR clone 242874 (TRBV28, TRBJ2-3)
CASSLYRDTQYF

SEQ ID NO: 485749 - protein, 15 aa, Homo sapiens
  CDR3 for alpha chain variable domain of TCR clone 242875 (TRAV2, TRAJ24)
CGVVRLKNRWGKLQF

SEQ ID NO: 485750 - protein, 16 aa, Homo sapiens
  CDR3 for beta chain variable domain of TCR clone 242875 (TRBV7-7, TRBJ2-3)
CASSPGTSGSTDTQYF

SEQ ID NO: 485751 - protein, 17 aa, Homo sapiens
  CDR3 for alpha chain variable domain of TCR clone 242876 (TRAV3, TRAJ42)
CAVRDRDYGGSQGNLIF

SEQ ID NO: 485752 - protein, 16 aa, Homo sapiens
  CDR3 for beta chain variable domain of TCR clone 242876 (TRBV11-2, TRBJ2-7)
CASSPTTGGVSYEQYF

SEQ ID NO: 485753 - protein, 13 aa, Homo sapiens
  CDR3 for alpha chain variable domain of TCR clone 242877 (TRAV12-3, TRAJ13)
CAKTSGGYQKVTF

SEQ ID NO: 485754 - protein, 13 aa, Homo sapiens
  CDR3 for beta chain variable domain of TCR clone 242877 (TRBV20-1, TRBJ2-2)
CSALSGGAGELFF

SEQ ID NO: 485755 - protein, 14 aa, Homo sapiens
  CDR3 for alpha chain variable domain of TCR clone 242878 (TRAV3, TRAJ20)
CAVPPAPNDYKLSF

SEQ ID NO: 485756 - protein, 14 aa, Homo sapiens
  CDR3 for beta chain variable domain of TCR clone 242878 (TRBV19, TRBJ2-1)
CASPTFVLSGEQFF

SEQ ID NO: 485757 - protein, 15 aa, Homo sapiens
  CDR3 for alpha chain variable domain of TCR clone 242879 (TRAV23/DV6, TRAJ18)
CAARYRGSTLGRLYF

SEQ ID NO: 485758 - protein, 16 aa, Homo sapiens
  CDR3 for beta chain variable domain of TCR clone 242879 (TRBV13, TRBJ2-2)
CASSPRTGEHTGELFF

SEQ ID NO: 485759 - protein, 15 aa, Homo sapiens
  CDR3 for alpha chain variable domain of TCR clone 242880 (TRAV1-1, TRAJ22)
CAVRVSSGSARQLTF

SEQ ID NO: 485760 - protein, 16 aa, Homo sapiens
  CDR3 for beta chain variable domain of TCR clone 242880 (TRBV2, TRBJ2-1)
CASSVGGSLSYNEQFF

SEQ ID NO: 485761 - protein, 11 aa, Homo sapiens
  CDR3 for alpha chain variable domain of TCR clone 242881 (TRAV21, TRAJ11)
CAVNGYSTLTF

SEQ ID NO: 485762 - protein, 11 aa, Homo sapiens
  CDR3 for beta chain variable domain of TCR clone 242881 (TRBV11-2, TRBJ2-7)
CASSSDYAQYF

SEQ ID NO: 485763 - protein, 12 aa, Homo sapiens
  CDR3 for alpha chain variable domain of TCR clone 242882 (TRAV26-1, TRAJ13)
CIVSRGYQKVTF

SEQ ID NO: 485764 - protein, 14 aa, Homo sapiens
  CDR3 for beta chain variable domain of TCR clone 242882 (TRBV7-2, TRBJ2-7)
CASSPKTSFYGQYF

SEQ ID NO: 485765 - protein, 12 aa, Homo sapiens
  CDR3 for alpha chain variable domain of TCR clone 242883 (TRAV27, TRAJ9)
CAGESGGFKTIF

SEQ ID NO: 485766 - protein, 13 aa, Homo sapiens
  CDR3 for beta chain variable domain of TCR clone 242883 (TRBV20-1, TRBJ1-1)
CSAGTVGNTEAFF

SEQ ID NO: 485767 - protein, 11 aa, Homo sapiens
  CDR3 for alpha chain variable domain of TCR clone 242884 (TRAV2, TRAJ13)
CASGGYQKVTF

SEQ ID NO: 485768 - protein, 13 aa, Homo sapiens
  CDR3 for beta chain variable domain of TCR clone 242884 (TRBV20-1, TRBJ2-2)
CSASAAGTGELVF

SEQ ID NO: 485769 - protein, 14 aa, Homo sapiens
  CDR3 for alpha chain variable domain of TCR clone 242885 (TRAV12-2, TRAJ5)
CAVNRSTGRRALTF

SEQ ID NO: 485770 - protein, 16 aa, Homo sapiens
  CDR3 for beta chain variable domain of TCR clone 242885 (TRBV5-5, TRBJ2-2)
CASSGRREGATGELFF

SEQ ID NO: 485771 - protein, 16 aa, Homo sapiens
  CDR3 for alpha chain variable domain of TCR clone 242886 (TRAV23/DV6, TRAJ45)
CAARARTGGGADGLTF

SEQ ID NO: 485772 - protein, 16 aa, Homo sapiens
  CDR3 for beta chain variable domain of TCR clone 242886 (TRBV7-2, TRBJ1-2)
CASSSNQDRRGHGYTF

SEQ ID NO: 485773 - protein, 12 aa, Homo sapiens
  CDR3 for alpha chain variable domain of TCR clone 242887 (TRAV13-1, TRAJ49)
CAAPNTGNQFYF

SEQ ID NO: 485774 - protein, 17 aa, Homo sapiens
  CDR3 for beta chain variable domain of TCR clone 242887 (TRBV25-1, TRBJ2-7)
CAISDARVVLSSYEQYF

SEQ ID NO: 485775 - protein, 14 aa, Homo sapiens
  CDR3 for alpha chain variable domain of TCR clone 242888 (TRAV17, TRAJ34)
CATDSLEGTDKLIF

SEQ ID NO: 485776 - protein, 15 aa, Homo sapiens
  CDR3 for beta chain variable domain of TCR clone 242888 (TRBV12-4, TRBJ1-2)
CASSPITGGGYGDTF

SEQ ID NO: 485777 - protein, 15 aa, Homo sapiens
  CDR3 for alpha chain variable domain of TCR clone 242889 (TRAV39, TRAJ32)
CAVDMEGGATTKLIF

SEQ ID NO: 485778 - protein, 17 aa, Homo sapiens
  CDR3 for beta chain variable domain of TCR clone 242889 (TRBV7-2, TRBJ1-4)
CASSFKAGPTTNEKLFF

SEQ ID NO: 485779 - protein, 16 aa, Homo sapiens
  CDR3 for alpha chain variable domain of TCR clone 242890 (TRAV30, TRAJ24)
CGTEIVDADSWGKFQI

SEQ ID NO: 485780 - protein, 18 aa, Homo sapiens
  CDR3 for beta chain variable domain of TCR clone 242890 (TRBV7-9, TRBJ2-7)
CASSLTTSGSRTWYEQYF

SEQ ID NO: 485781 - protein, 14 aa, Homo sapiens
  CDR3 for alpha chain variable domain of TCR clone 242891 (TRAV12-2, TRAJ33)
CAVKRARSNYQLIW

SEQ ID NO: 485782 - protein, 14 aa, Homo sapiens
  CDR3 for beta chain variable domain of TCR clone 242891 (TRBV13, TRBJ2-7)
YASSLKGASYEQYF

SEQ ID NO: 485783 - protein, 12 aa, Homo sapiens
  CDR3 for alpha chain variable domain of TCR clone 242892 (TRAV35, TRAJ30)
CAGLNRDVKIIF

SEQ ID NO: 485784 - protein, 15 aa, Homo sapiens
  CDR3 for beta chain variable domain of TCR clone 242892 (TRBV9, TRBJ1-6)
CASSVAGTGDSPLHF

SEQ ID NO: 485785 - protein, 16 aa, Homo sapiens
  CDR3 for alpha chain variable domain of TCR clone 242893 (TRAV12-3, TRAJ53)
CAMSVGSGRSNYKLTF

SEQ ID NO: 485786 - protein, 13 aa, Homo sapiens
  CDR3 for beta chain variable domain of TCR clone 242893 (TRBV7-6, TRBJ1-2)
CASSLVADYGYTF

SEQ ID NO: 485787 - protein, 13 aa, Homo sapiens
  CDR3 for alpha chain variable domain of TCR clone 242894 (TRAV12-2, TRAJ10)
CAVPTGGGDKLTF

SEQ ID NO: 485788 - protein, 11 aa, Homo sapiens
  CDR3 for beta chain variable domain of TCR clone 242894 (TRBV12-4, TRBJ2-2)
CASSSAGELFF

SEQ ID NO: 485789 - protein, 14 aa, Homo sapiens
  CDR3 for alpha chain variable domain of TCR clone 242895 (TRAV26-1, TRAJ38)
CIADNAGNKRKLIW

SEQ ID NO: 485790 - protein, 19 aa, Homo sapiens
  CDR3 for beta chain variable domain of TCR clone 242895 (TRBV15, TRBJ1-1)
CATSRVGGADGDTEAFLDK

SEQ ID NO: 485791 - protein, 14 aa, Homo sapiens
  CDR3 for alpha chain variable domain of TCR clone 242896 (TRAV1-2, TRAJ16)
CAVNRFSDGQKLLF

SEQ ID NO: 485792 - protein, 16 aa, Homo sapiens
  CDR3 for beta chain variable domain of TCR clone 242896 (TRBV11-2, TRBJ1-2)
CASSSDTGGADYGYTF

SEQ ID NO: 485793 - protein, 15 aa, Homo sapiens
  CDR3 for alpha chain variable domain of TCR clone 242897 (TRAV3, TRAJ5)
CAVRDLDTGRRALTF

SEQ ID NO: 485794 - protein, 14 aa, Homo sapiens
  CDR3 for beta chain variable domain of TCR clone 242897 (TRBV25-1, IGHJ2)
CASSGGGQPEELFF

SEQ ID NO: 485795 - protein, 14 aa, Homo sapiens
  CDR3 for alpha chain variable domain of TCR clone 242898 (TRAV1-2, TRAJ16)
CAVNRFSDGQKLLF

SEQ ID NO: 485796 - protein, 11 aa, Homo sapiens
  CDR3 for beta chain variable domain of TCR clone 242898 (TRBV7-8, TRBJ2-7)
CASSLSLEQFF

SEQ ID NO: 485797 - protein, 12 aa, Homo sapiens
  CDR3 for alpha chain variable domain of TCR clone 242899 (TRAV13-1, TRAJ15)
CAASQAGTAMIF

SEQ ID NO: 485798 - protein, 18 aa, Homo sapiens
  CDR3 for beta chain variable domain of TCR clone 242899 (TRBV7-9, TRBJ2-3)
CASSFPINGQISTDTQYF

SEQ ID NO: 485799 - protein, 11 aa, Homo sapiens
  CDR3 for alpha chain variable domain of TCR clone 242900 (TRAV13-1, TRAJ8)
CAARGFQTLVC

SEQ ID NO: 485800 - protein, 16 aa, Homo sapiens
  CDR3 for beta chain variable domain of TCR clone 242900 (TRBV19, TRBJ1-5)
CASSTRGTRSNQPQHF

SEQ ID NO: 485801 - protein, 12 aa, Homo sapiens
  CDR3 for alpha chain variable domain of TCR clone 242901 (TRAV8-3, TRAJ27)
CAVGAVAGKSTF

SEQ ID NO: 485802 - protein, 14 aa, Homo sapiens
  CDR3 for beta chain variable domain of TCR clone 242901 (TRBV2, TRBJ2-1)
CASRLIVGHDEQFF

SEQ ID NO: 485803 - protein, 14 aa, Homo sapiens
  CDR3 for alpha chain variable domain of TCR clone 242902 (TRAV19, TRAJ22)
CALSDSGSARQLTF

SEQ ID NO: 485804 - protein, 13 aa, Homo sapiens
  CDR3 for beta chain variable domain of TCR clone 242902 (TRBV12-4, TRBJ2-7)
CASSLERVREQYF

SEQ ID NO: 485805 - protein, 16 aa, Homo sapiens
  CDR3 for alpha chain variable domain of TCR clone 242903 (TRAV16, TRAJ4)
CITVLPFSGGYNKLIF

SEQ ID NO: 485806 - protein, 15 aa, Homo sapiens
  CDR3 for beta chain variable domain of TCR clone 242903 (TRBV18, TRBJ1-5)
CASSETGGNNQPQHF

SEQ ID NO: 485807 - protein, 12 aa, Homo sapiens
  CDR3 for alpha chain variable domain of TCR clone 242904 (TRAV27, TRAJ22)
CAGDGAGVEIWF

SEQ ID NO: 485808 - protein, 15 aa, Homo sapiens
  CDR3 for beta chain variable domain of TCR clone 242904 (TRBV7-3, TRBJ2-1)
CASSPTGGGEVEQFF

SEQ ID NO: 485809 - protein, 14 aa, Homo sapiens
  CDR3 for alpha chain variable domain of TCR clone 242905 (TRAV1-2, TRAJ16)
CSVNRFSDGQKLLF

SEQ ID NO: 485810 - protein, 12 aa, Homo sapiens
  CDR3 for beta chain variable domain of TCR clone 242905 (TRBV28, TRBJ2-6)
CAIQAGANVLTF

SEQ ID NO: 485811 - protein, 13 aa, Homo sapiens
  CDR3 for alpha chain variable domain of TCR clone 242906 (TRAV9-2, TRAJ6)
CALSAGGSYIPTF

SEQ ID NO: 485812 - protein, 15 aa, Homo sapiens
  CDR3 for beta chain variable domain of TCR clone 242906 (TRBV9, TRBJ1-6)
CASSVARTGDSPLHF

SEQ ID NO: 485813 - protein, 18 aa, Homo sapiens
  CDR3 for alpha chain variable domain of TCR clone 242907 (TRAV26-2, TRAJ54)
CILRDVEVGIQGAQKLVF

SEQ ID NO: 485814 - protein, 14 aa, Homo sapiens
  CDR3 for beta chain variable domain of TCR clone 242907 (TRBV7-8, TRBJ2-3)
CASILEAGTDTQYF

SEQ ID NO: 485815 - protein, 20 aa, Homo sapiens
  CDR3 for alpha chain variable domain of TCR clone 242908 (TRAV8-3, TRAJ45)
LSTSVLWGSYSGGGADGLTF

SEQ ID NO: 485816 - protein, 17 aa, Homo sapiens
  CDR3 for beta chain variable domain of TCR clone 242908 (TRBV20-1, TRBJ2-1)
CSASSSGLAGSYNEQFF

SEQ ID NO: 485817 - protein, 16 aa, Homo sapiens
  CDR3 for alpha chain variable domain of TCR clone 242909 (TRAV30, TRAJ24)
CGTEIVDADSWGKFQF

SEQ ID NO: 485818 - protein, 20 aa, Homo sapiens
  CDR3 for beta chain variable domain of TCR clone 242909 (TRBV12-5, TRBJ2-5)
CASGPRTREIKRPSTSGQAR

SEQ ID NO: 485819 - protein, 14 aa, Homo sapiens
  CDR3 for alpha chain variable domain of TCR clone 242910 (TRAV3, TRAJ34)
CAVRDINNTDKLIF

SEQ ID NO: 485820 - protein, 13 aa, Homo sapiens
  CDR3 for beta chain variable domain of TCR clone 242910 (TRBV20-1, TRBJ1-1)
CSARGGGNTENFF

SEQ ID NO: 485821 - protein, 12 aa, Homo sapiens
  CDR3 for alpha chain variable domain of TCR clone 242911 (TRAV8-6, TRAJ36)
CAVSDWLGQTTS

SEQ ID NO: 485822 - protein, 14 aa, Homo sapiens
  CDR3 for beta chain variable domain of TCR clone 242911 (TRBV19, TRBJ2-1)
CARGARSFQWEQFF

SEQ ID NO: 485823 - protein, 12 aa, Homo sapiens
  CDR3 for alpha chain variable domain of TCR clone 242912 (TRAV17, TRAJ4)
CATDGGYNKLIF

SEQ ID NO: 485824 - protein, 14 aa, Homo sapiens
  CDR3 for beta chain variable domain of TCR clone 242912 (TRBV28, TRBJ2-5)
CASSRLAGGETQYF

SEQ ID NO: 485825 - protein, 15 aa, Homo sapiens
  CDR3 for alpha chain variable domain of TCR clone 242913 (TRAV12-2, TRAJ37)
CAVRPTLSNTGKLIF

SEQ ID NO: 485826 - protein, 16 aa, Homo sapiens
  CDR3 for beta chain variable domain of TCR clone 242913 (TRBV24-1, TRBJ2-3)
CATSDRRQDLTDTQYF

SEQ ID NO: 485827 - protein, 14 aa, Homo sapiens
  CDR3 for alpha chain variable domain of TCR clone 242914 (TRAV12-2, TRAJ13)
CAVKKTGGYQKVTF

SEQ ID NO: 485828 - protein, 15 aa, Homo sapiens
  CDR3 for beta chain variable domain of TCR clone 242914 (TRBV4-2, TRBJ1-2)
CASSGGGAGIGGYTF

SEQ ID NO: 485829 - protein, 16 aa, Homo sapiens
  CDR3 for alpha chain variable domain of TCR clone 242915 (TRAV12-3, TRAJ53)
CAMIPGSVGSNYKLTF

SEQ ID NO: 485830 - protein, 11 aa, Homo sapiens
  CDR3 for beta chain variable domain of TCR clone 242915 (TRBV29-1, TRBJ2-5)
CSEDRTGTQYF

SEQ ID NO: 485831 - protein, 14 aa, Homo sapiens
  CDR3 for alpha chain variable domain of TCR clone 242916 (TRAV1-2, TRAJ16)
CAVNRFSGGQKLLF

SEQ ID NO: 485832 - protein, 16 aa, Homo sapiens
  CDR3 for beta chain variable domain of TCR clone 242916 (TRBV20-1, TRBJ1-1)
CSARALTQGMNTEAFF

SEQ ID NO: 485833 - protein, 12 aa, Homo sapiens
  CDR3 for alpha chain variable domain of TCR clone 242917 (TRAV13-1, TRAJ27)
CAAHTNAGKSTF

SEQ ID NO: 485834 - protein, 14 aa, Homo sapiens
  CDR3 for beta chain variable domain of TCR clone 242917 (TRBV19, TRBJ2-2)
CASSGQGIAVELFF

SEQ ID NO: 485835 - protein, 15 aa, Homo sapiens
  CDR3 for alpha chain variable domain of TCR clone 242918 (TRAV38-2/DV8, TRAJ28)
CAYRTSGAGSYQLTF

SEQ ID NO: 485836 - protein, 14 aa, Homo sapiens
  CDR3 for beta chain variable domain of TCR clone 242918 (TRBV2, TRBJ2-1)
CASSEALIYNEQFF

SEQ ID NO: 485837 - protein, 16 aa, Homo sapiens
  CDR3 for alpha chain variable domain of TCR clone 242919 (TRAV27, TRAJ53)
CAAPEGSGGSNYKLTF

SEQ ID NO: 485838 - protein, 15 aa, Homo sapiens
  CDR3 for beta chain variable domain of TCR clone 242919 (TRBV29-1, TRBJ2-1)
CSVGRHALFYNEQFF

SEQ ID NO: 485839 - protein, 17 aa, Homo sapiens
  CDR3 for alpha chain variable domain of TCR clone 242920 (TRAV36/DV7, TRAJ52)
CAVAQRAGGTSYGKLIF

SEQ ID NO: 485840 - protein, 15 aa, Homo sapiens
  CDR3 for beta chain variable domain of TCR clone 242920 (TRBV6-5, TRBJ1-2)
CASSYSQAFNYGYTF

SEQ ID NO: 485841 - protein, 14 aa, Homo sapiens
  CDR3 for alpha chain variable domain of TCR clone 242921 (TRAV8-4, TRAJ54)
CAVSEVLGAQKLVV

SEQ ID NO: 485842 - protein, 13 aa, Homo sapiens
  CDR3 for beta chain variable domain of TCR clone 242921 (TRBV27, TRBJ2-7)
CASSFVSSYEQYF

SEQ ID NO: 485843 - protein, 17 aa, Homo sapiens
  CDR3 for alpha chain variable domain of TCR clone 242922 (TRAV26-1, TRAJ46)
IASSESEKKSSGDKLTF

SEQ ID NO: 485844 - protein, 16 aa, Homo sapiens
  CDR3 for beta chain variable domain of TCR clone 242922 (TRBV27, TRBJ2-2)
CASSFRGLVRTRELFF

SEQ ID NO: 485845 - protein, 13 aa, Homo sapiens
  CDR3 for alpha chain variable domain of TCR clone 242923 (TRAV13-1, TRAJ40)
CAAISPGTYKYIF

SEQ ID NO: 485846 - protein, 13 aa, Homo sapiens
  CDR3 for beta chain variable domain of TCR clone 242923 (TRBV7-9, TRBJ2-5)
CASLPSGRETQYF

SEQ ID NO: 485847 - protein, 13 aa, Homo sapiens
  CDR3 for alpha chain variable domain of TCR clone 242924 (TRAV8-3, TRAJ4)
WVFYSGGYNKLIF

SEQ ID NO: 485848 - protein, 14 aa, Homo sapiens
  CDR3 for beta chain variable domain of TCR clone 242924 (TRBV6-1, TRBJ1-3)
CASVRGGGGNTIYF

SEQ ID NO: 485849 - protein, 13 aa, Homo sapiens
  CDR3 for alpha chain variable domain of TCR clone 242925 (TRAV23/DV6, TRAJ12)
CARRVDSSYKLIF

SEQ ID NO: 485850 - protein, 12 aa, Homo sapiens
  CDR3 for beta chain variable domain of TCR clone 242925 (TRBV7-6, TRBJ2-5)
CASSLSQETQYF

SEQ ID NO: 485851 - protein, 23 aa, Homo sapiens
  CDR3 for alpha chain variable domain of TCR clone 242926 (TRAV8-6, TRAJ38)
CAVRNAGNNHIQNPDPAVHQLRD

SEQ ID NO: 485852 - protein, 15 aa, Homo sapiens
  CDR3 for beta chain variable domain of TCR clone 242926 (TRBV4-1, TRBJ2-2)
CASSEGQGITGELFF

SEQ ID NO: 485853 - protein, 18 aa, Homo sapiens
  CDR3 for alpha chain variable domain of TCR clone 242927 (TRAV8-3, TRAJ4)
WVRDQTSNDPGGYNKLIF

SEQ ID NO: 485854 - protein, 13 aa, Homo sapiens
  CDR3 for beta chain variable domain of TCR clone 242927 (TRBV20-1, TRBJ1-2)
CSATGIQGSGYTF

SEQ ID NO: 485855 - protein, 17 aa, Homo sapiens
  CDR3 for alpha chain variable domain of TCR clone 242928 (TRAV29/DV5, TRAJ42)
CAASAGNYGGSQGNLIF

SEQ ID NO: 485856 - protein, 14 aa, Homo sapiens
  CDR3 for beta chain variable domain of TCR clone 242928 (TRBV7-2, TRBJ2-7)
CASSPKTSFYEQYF

SEQ ID NO: 485857 - protein, 15 aa, Homo sapiens
  CDR3 for alpha chain variable domain of TCR clone 242929 (TRAV8-3, TRAJ45)
CASSYSGGGADGLTF

SEQ ID NO: 485858 - protein, 17 aa, Homo sapiens
  CDR3 for beta chain variable domain of TCR clone 242929 (TRBV7-8, TRBJ1-2)
CASSLRPLQGHLYGYTL

SEQ ID NO: 485859 - protein, 20 aa, Homo sapiens
  CDR3 for alpha chain variable domain of TCR clone 242930 (TRAV3, TRAJ33)
HLKKPSALVSDSSWNYQLIW

SEQ ID NO: 485860 - protein, 15 aa, Homo sapiens
  CDR3 for beta chain variable domain of TCR clone 242930 (TRBV20-1, TRBJ1-1)
CSASRGVTGNTEAFF

SEQ ID NO: 485861 - protein, 15 aa, Homo sapiens
  CDR3 for alpha chain variable domain of TCR clone 242931 (TRAV23/DV6, TRAJ18)
CAARYRGSTLGRLYF

SEQ ID NO: 485862 - protein, 14 aa, Homo sapiens
  CDR3 for beta chain variable domain of TCR clone 242931 (TRBV4-2, TRBJ2-7)
CASSQDGRKGEQYF

SEQ ID NO: 485863 - protein, 14 aa, Homo sapiens
  CDR3 for alpha chain variable domain of TCR clone 242932 (TRAV12-2, TRAJ40)
CAVKIPSGTYKYIF

SEQ ID NO: 485864 - protein, 15 aa, Homo sapiens
  CDR3 for beta chain variable domain of TCR clone 242932 (TRBV11-2, TRBJ1-1)
CASSSRSSLLLSLDK

SEQ ID NO: 485865 - protein, 10 aa, Homo sapiens
  CDR3 for alpha chain variable domain of TCR clone 242933 (TRAV5, TRAJ34)
CAEDTDKLIF

SEQ ID NO: 485866 - protein, 15 aa, Homo sapiens
  CDR3 for beta chain variable domain of TCR clone 242933 (TRBV19, TRBJ1-2)
CACSVGQVLNYGYTF

SEQ ID NO: 485867 - protein, 15 aa, Homo sapiens
  CDR3 for alpha chain variable domain of TCR clone 242934 (TRAV23/DV6, TRAJ37)
CAAGEGSSNTGKLIF

SEQ ID NO: 485868 - protein, 15 aa, Homo sapiens
  CDR3 for beta chain variable domain of TCR clone 242934 (TRBV7-2, TRBJ2-3)
CASSLNLRDTDTQYF

SEQ ID NO: 485869 - protein, 13 aa, Homo sapiens
  CDR3 for alpha chain variable domain of TCR clone 242935 (TRAV35, TRAJ57)
CAGSQRGSEKLVF

SEQ ID NO: 485870 - protein, 15 aa, Homo sapiens
  CDR3 for beta chain variable domain of TCR clone 242935 (TRBV20-1, TRBJ2-7)
CSARDRVSGMDEQYF

SEQ ID NO: 485871 - protein, 17 aa, Homo sapiens
  CDR3 for alpha chain variable domain of TCR clone 242936 (TRAV3, TRAJ6)
CAVRDGPRAGGSYIPTF

SEQ ID NO: 485872 - protein, 15 aa, Homo sapiens
  CDR3 for beta chain variable domain of TCR clone 242936 (TRBV12-4, TRBJ2-5)
CASSPPTGLQETQYV

SEQ ID NO: 485873 - protein, 16 aa, Homo sapiens
  CDR3 for alpha chain variable domain of TCR clone 242937 (TRAV12-2, TRAJ52)
CRLANAGGTSYGKLTF

SEQ ID NO: 485874 - protein, 13 aa, Homo sapiens
  CDR3 for beta chain variable domain of TCR clone 242937 (TRBV10-3, TRBJ2-7)
CASKLAVNYEQYL

SEQ ID NO: 485875 - protein, 14 aa, Homo sapiens
  CDR3 for alpha chain variable domain of TCR clone 242938 (TRAV9-2, TRAJ39)
CALYIYNAGNMLTF

SEQ ID NO: 485876 - protein, 17 aa, Homo sapiens
  CDR3 for beta chain variable domain of TCR clone 242938 (TRBV11-2, TRBJ2-1)
CASSLYPPGLEYNEQFF

SEQ ID NO: 485877 - protein, 14 aa, Homo sapiens
  CDR3 for alpha chain variable domain of TCR clone 242939 (TRAV12-3, TRAJ6)
CAMSATVGSYIPTF

SEQ ID NO: 485878 - protein, 16 aa, Homo sapiens
  CDR3 for beta chain variable domain of TCR clone 242939 (TRBV4-2, TRBJ2-1)
CASSPRAGQGANEQFF

SEQ ID NO: 485879 - protein, 13 aa, Homo sapiens
  CDR3 for alpha chain variable domain of TCR clone 242940 (TRAV12-3, TRAJ33)
CAMSVNSNYQLIW

SEQ ID NO: 485880 - protein, 18 aa, Homo sapiens
  CDR3 for beta chain variable domain of TCR clone 242940 (TRBV4-1, TRBJ1-5)
CASSQDPRGQGLNQPQHF

SEQ ID NO: 485881 - protein, 14 aa, Homo sapiens
  CDR3 for alpha chain variable domain of TCR clone 242941 (TRAV26-1, TRAJ38)
CIADNAGNNRKLIW

SEQ ID NO: 485882 - protein, 13 aa, Homo sapiens
  CDR3 for beta chain variable domain of TCR clone 242941 (TRBV11-2, TRBJ1-1)
CASSLETSTEAFF

SEQ ID NO: 485883 - protein, 14 aa, Homo sapiens
  CDR3 for alpha chain variable domain of TCR clone 242942 (TRAV27, TRAJ22)
CAGVVPGSARQLTF

SEQ ID NO: 485884 - protein, 14 aa, Homo sapiens
  CDR3 for beta chain variable domain of TCR clone 242942 (TRBV7-2, TRBJ2-5)
CASSPRGSSETQYF

SEQ ID NO: 485885 - protein, 14 aa, Homo sapiens
  CDR3 for alpha chain variable domain of TCR clone 242943 (TRAV8-1, TRAJ23)
CAVGTYNQGGKLSF

SEQ ID NO: 485886 - protein, 16 aa, Homo sapiens
  CDR3 for beta chain variable domain of TCR clone 242943 (TRBV18, TRBJ1-5)
CASSPSTGNSNQPQHS

SEQ ID NO: 485887 - protein, 14 aa, Homo sapiens
  CDR3 for alpha chain variable domain of TCR clone 242944 (TRAV12-2, TRAJ45)
CAVNIGGGADGLTF

SEQ ID NO: 485888 - protein, 12 aa, Homo sapiens
  CDR3 for beta chain variable domain of TCR clone 242944 (TRBV11-2, TRBJ2-4)
CASNSASGSEYF

SEQ ID NO: 485889 - protein, 12 aa, Homo sapiens
  CDR3 for alpha chain variable domain of TCR clone 242945 (TRAV2, TRAJ10)
CASTGGGNKLTF

SEQ ID NO: 485890 - protein, 15 aa, Homo sapiens
  CDR3 for beta chain variable domain of TCR clone 242945 (TRBV19, TRBJ2-4)
CASRGPRRGENIQYF

SEQ ID NO: 485891 - protein, 14 aa, Homo sapiens
  CDR3 for alpha chain variable domain of TCR clone 242946 (TRAV12-1, TRAJ13)
CVVIDSGGYQKVTF

SEQ ID NO: 485892 - protein, 16 aa, Homo sapiens
  CDR3 for beta chain variable domain of TCR clone 242946 (TRBV13, TRBJ2-2)
CASSPRTGEHTGELFF

SEQ ID NO: 485893 - protein, 16 aa, Homo sapiens
  CDR3 for alpha chain variable domain of TCR clone 242947 (TRAV13-2, TRAJ32)
CAENMNYGGATNKLIF

SEQ ID NO: 485894 - protein, 15 aa, Homo sapiens
  CDR3 for beta chain variable domain of TCR clone 242947 (TRBV19, TRBJ2-1)
CASSMGWNSNNEQFF

SEQ ID NO: 485895 - protein, 14 aa, Homo sapiens
  CDR3 for alpha chain variable domain of TCR clone 242948 (TRAV12-2, TRAJ13)
CAVKKTGGYQKVTF

SEQ ID NO: 485896 - protein, 15 aa, Homo sapiens
  CDR3 for beta chain variable domain of TCR clone 242948 (TRBV28, TRBJ2-1)
CASRVGLDEYNEQFF

SEQ ID NO: 485897 - protein, 15 aa, Homo sapiens
  CDR3 for alpha chain variable domain of TCR clone 242949 (TRAV26-1, TRAJ48)
CIARWSWFGNAKLTF

SEQ ID NO: 485898 - protein, 12 aa, Homo sapiens
  CDR3 for beta chain variable domain of TCR clone 242949 (TRBV19, TRBJ2-5)
CASSISEETQYF

SEQ ID NO: 485899 - protein, 14 aa, Homo sapiens
  CDR3 for alpha chain variable domain of TCR clone 242950 (TRAV12-2, TRAJ40)
CAVKIPSGTYKYIF

SEQ ID NO: 485900 - protein, 14 aa, Homo sapiens
  CDR3 for beta chain variable domain of TCR clone 242950 (TRBV20-1, TRBJ2-7)
CSAWTALSSYEQYF

SEQ ID NO: 485901 - protein, 15 aa, Homo sapiens
  CDR3 for alpha chain variable domain of TCR clone 242951 (TRAV17, TRAJ56)
CATEPFTGANSKLTF

SEQ ID NO: 485902 - protein, 16 aa, Homo sapiens
  CDR3 for beta chain variable domain of TCR clone 242951 (TRBV20-1, TRBJ1-4)
CSAPGQGLLTNEKLFF

SEQ ID NO: 485903 - protein, 14 aa, Homo sapiens
  CDR3 for alpha chain variable domain of TCR clone 242952 (TRAV1-2, TRAJ16)
FAVNRFSDGQKLLF

SEQ ID NO: 485904 - protein, 15 aa, Homo sapiens
  CDR3 for beta chain variable domain of TCR clone 242952 (TRBV20-1, TRBJ2-7)
CSARKGLAESYEQYF

SEQ ID NO: 485905 - protein, 15 aa, Homo sapiens
  CDR3 for alpha chain variable domain of TCR clone 242953 (TRAV26-1, TRAJ56)
CIVRVATGANSKLTF

SEQ ID NO: 485906 - protein, 15 aa, Homo sapiens
  CDR3 for beta chain variable domain of TCR clone 242953 (TRBV27, TRBJ2-7)
CASSPQREGQREQYY

SEQ ID NO: 485907 - protein, 12 aa, Homo sapiens
  CDR3 for alpha chain variable domain of TCR clone 242954 (TRAV16, TRAJ10)
CSRKGGGNKLTF

SEQ ID NO: 485908 - protein, 17 aa, Homo sapiens
  CDR3 for beta chain variable domain of TCR clone 242954 (TRBV29-1, TRBJ2-1)
CSVEGPQGKSSYNEQFF

SEQ ID NO: 485909 - protein, 14 aa, Homo sapiens
  CDR3 for alpha chain variable domain of TCR clone 242955 (TRAV1-2, TRAJ16)
CAVNRVSDGQKLLF

SEQ ID NO: 485910 - protein, 15 aa, Homo sapiens
  CDR3 for beta chain variable domain of TCR clone 242955 (TRBV27, TRBJ2-1)
CASSNGGGSSNEQFF

SEQ ID NO: 485911 - protein, 12 aa, Homo sapiens
  CDR3 for alpha chain variable domain of TCR clone 242956 (TRAV16, TRAJ10)
CSRTGGGNNLTF

SEQ ID NO: 485912 - protein, 16 aa, Homo sapiens
  CDR3 for beta chain variable domain of TCR clone 242956 (TRBV12-5, TRBJ2-5)
CASGPRTSGNQETQYF

SEQ ID NO: 485913 - protein, 15 aa, Homo sapiens
  CDR3 for alpha chain variable domain of TCR clone 242957 (TRAV21, TRAJ53)
CATLNSGGSNYKLTF

SEQ ID NO: 485914 - protein, 15 aa, Homo sapiens
  CDR3 for beta chain variable domain of TCR clone 242957 (TRBV20-1, TRBJ2-7)
CSARDLVSGMDEQYF

SEQ ID NO: 485915 - protein, 16 aa, Homo sapiens
  CDR3 for alpha chain variable domain of TCR clone 242958 (TRAV12-3, TRAJ53)
CAMSPGSGGSNYKLTF

SEQ ID NO: 485916 - protein, 16 aa, Homo sapiens
  CDR3 for beta chain variable domain of TCR clone 242958 (TRBV4-2, TRBJ1-1)
CASRPLDWGGDTEAFF

SEQ ID NO: 485917 - protein, 16 aa, Homo sapiens
  CDR3 for alpha chain variable domain of TCR clone 242959 (TRAV26-1, TRAJ53)
CIVRVAMGGSNYNLTF

SEQ ID NO: 485918 - protein, 18 aa, Homo sapiens
  CDR3 for beta chain variable domain of TCR clone 242959 (TRBV28, TRBJ2-7)
CASSLFLRQGAPSSTSGR

SEQ ID NO: 485919 - protein, 12 aa, Homo sapiens
  CDR3 for alpha chain variable domain of TCR clone 242960 (TRAV12-3, TRAJ17)
CAMTLTGNKLTF

SEQ ID NO: 485920 - protein, 15 aa, Homo sapiens
  CDR3 for beta chain variable domain of TCR clone 242960 (TRBV7-9, TRBJ1-6)
CASSSPGRRNSPLHF

SEQ ID NO: 485921 - protein, 14 aa, Homo sapiens
  CDR3 for alpha chain variable domain of TCR clone 242961 (TRAV16, TRAJ33)
CALSAMDSNYQLIW

SEQ ID NO: 485922 - protein, 11 aa, Homo sapiens
  CDR3 for beta chain variable domain of TCR clone 242961 (TRBV29-1, TRBJ2-5)
CSEDRTGTQYF

SEQ ID NO: 485923 - protein, 14 aa, Homo sapiens
  CDR3 for alpha chain variable domain of TCR clone 242962 (TRAV8-2, TRAJ4)
CVVSPSGGYNKLIF

SEQ ID NO: 485924 - protein, 16 aa, Homo sapiens
  CDR3 for beta chain variable domain of TCR clone 242962 (TRBV4-1, TRBJ2-3)
CASSQSTSGAEDTQYF

SEQ ID NO: 485925 - protein, 16 aa, Homo sapiens
  CDR3 for alpha chain variable domain of TCR clone 242963 (TRAV2, TRAJ4)
CAVEDRFSGGCNKLIF

SEQ ID NO: 485926 - protein, 13 aa, Homo sapiens
  CDR3 for beta chain variable domain of TCR clone 242963 (TRBV7-7, TRBJ2-5)
CASSRSGQETQYF

SEQ ID NO: 485927 - protein, 15 aa, Homo sapiens
  CDR3 for alpha chain variable domain of TCR clone 242964 (TRAV21, TRAJ53)
CATLNSGGSNYKLTF

SEQ ID NO: 485928 - protein, 16 aa, Homo sapiens
  CDR3 for beta chain variable domain of TCR clone 242964 (TRBV20-1, TRBJ1-4)
CSAPGQGVLANEKLFF

SEQ ID NO: 485929 - protein, 15 aa, Homo sapiens
  CDR3 for alpha chain variable domain of TCR clone 242965 (TRAV8-3, TRAJ21)
CAVGALPPRGSKFYF

SEQ ID NO: 485930 - protein, 18 aa, Homo sapiens
  CDR3 for beta chain variable domain of TCR clone 242965 (TRBV25-1, TRBJ1-2)
CASSGLQNGQGLIFGYTF

SEQ ID NO: 485931 - protein, 15 aa, Homo sapiens
  CDR3 for alpha chain variable domain of TCR clone 242966 (TRAV12-2, TRAJ57)
CAVSRGQGGSEKLVF

SEQ ID NO: 485932 - protein, 15 aa, Homo sapiens
  CDR3 for beta chain variable domain of TCR clone 242966 (TRBV5-1, TRBJ2-1)
CASSPPRAAYNEQFF

SEQ ID NO: 485933 - protein, 14 aa, Homo sapiens
  CDR3 for alpha chain variable domain of TCR clone 242967 (TRAV16, TRAJ8)
CALLMNTGFQKLVF

SEQ ID NO: 485934 - protein, 12 aa, Homo sapiens
  CDR3 for beta chain variable domain of TCR clone 242967 (TRBV11-2, TRBJ2-1)
CASSPGNNEQFF

SEQ ID NO: 485935 - protein, 16 aa, Homo sapiens
  CDR3 for alpha chain variable domain of TCR clone 242968 (TRAV3, TRAJ5)
CAVRNLMDTGRRALTF

SEQ ID NO: 485936 - protein, 16 aa, Homo sapiens
  CDR3 for beta chain variable domain of TCR clone 242968 (TRBV4-2, TRBJ2-7)
CASSQEGLAISYEQCF

SEQ ID NO: 485937 - protein, 14 aa, Homo sapiens
  CDR3 for alpha chain variable domain of TCR clone 242969 (TRAV12-1, TRAJ17)
WVVNYKAAGNKLTF

SEQ ID NO: 485938 - protein, 14 aa, Homo sapiens
  CDR3 for beta chain variable domain of TCR clone 242969 (TRBV5-4, TRBJ2-2)
CASRLDGGTGELFF

SEQ ID NO: 485939 - protein, 17 aa, Homo sapiens
  CDR3 for alpha chain variable domain of TCR clone 242970 (TRAV3, TRAJ42)
CAVRDRDYGGSQGNRIF

SEQ ID NO: 485940 - protein, 17 aa, Homo sapiens
  CDR3 for beta chain variable domain of TCR clone 242970 (TRBV7-9, TRBJ2-3)
CASSPTVAGDLTGTQYF

SEQ ID NO: 485941 - protein, 14 aa, Homo sapiens
  CDR3 for alpha chain variable domain of TCR clone 242971 (TRAV23/DV6, TRAJ37)
CAASTSSNTGKLIF

SEQ ID NO: 485942 - protein, 19 aa, Homo sapiens
  CDR3 for beta chain variable domain of TCR clone 242971 (TRBV7-9, TRBJ2-6)
CASSLESATVLPGANVLTF

SEQ ID NO: 485943 - protein, 13 aa, Homo sapiens
  CDR3 for alpha chain variable domain of TCR clone 242972 (TRAV12-3, TRAJ13)
CAMSSGGYQKVTF

SEQ ID NO: 485944 - protein, 19 aa, Homo sapiens
  CDR3 for beta chain variable domain of TCR clone 242972 (TRBV4-1, TRBJ1-4)
CASSKKGLGGWRKNCFLAV

SEQ ID NO: 485945 - protein, 11 aa, Homo sapiens
  CDR3 for alpha chain variable domain of TCR clone 242973 (TRAV3, TRAJ21)
CAVGNFNKFYL

SEQ ID NO: 485946 - protein, 15 aa, Homo sapiens
  CDR3 for beta chain variable domain of TCR clone 242973 (TRBV6-1, TRBJ2-2)
CASSAGQGYTGELFF

SEQ ID NO: 485947 - protein, 14 aa, Homo sapiens
  CDR3 for alpha chain variable domain of TCR clone 242974 (TRAV12-2, TRAJ13)
CAVKKTGGYQKVTF

SEQ ID NO: 485948 - protein, 16 aa, Homo sapiens
  CDR3 for beta chain variable domain of TCR clone 242974 (TRBV7-9, TRBJ1-2)
CASSLGFSAGEDGYTF

SEQ ID NO: 485949 - protein, 12 aa, Homo sapiens
  CDR3 for alpha chain variable domain of TCR clone 242975 (TRAV8-4, TRAJ9)
CAVNTGGFKTIF

SEQ ID NO: 485950 - protein, 13 aa, Homo sapiens
  CDR3 for beta chain variable domain of TCR clone 242975 (TRBV10-2, TRBJ2-7)
CASGASGGYEQYF

SEQ ID NO: 485951 - protein, 15 aa, Homo sapiens
  CDR3 for alpha chain variable domain of TCR clone 242976 (TRAV12-2, TRAJ53)
CAVNGGGGSNYKLKF

SEQ ID NO: 485952 - protein, 12 aa, Homo sapiens
  CDR3 for beta chain variable domain of TCR clone 242976 (TRBV18, TRBJ1-1)
CASSPGQLQAFF

SEQ ID NO: 485953 - protein, 11 aa, Homo sapiens
  CDR3 for alpha chain variable domain of TCR clone 242977 (TRAV21, TRAJ34)
CAHYNTDKLIF

SEQ ID NO: 485954 - protein, 11 aa, Homo sapiens
  CDR3 for beta chain variable domain of TCR clone 242977 (TRBV29-1, TRBJ2-5)
CSEDRTVTQYF

SEQ ID NO: 485955 - protein, 16 aa, Homo sapiens
  CDR3 for alpha chain variable domain of TCR clone 242978 (TRAV3, TRAJ37)
CAVRVRSSGNPGKLIF

SEQ ID NO: 485956 - protein, 11 aa, Homo sapiens
  CDR3 for beta chain variable domain of TCR clone 242978 (TRBV11-2, TRBJ2-2)
CASSLPGELFF

SEQ ID NO: 485957 - protein, 18 aa, Homo sapiens
  CDR3 for alpha chain variable domain of TCR clone 242979 (TRAV38-2/DV8, TRAJ42)
CAYRSADLTGGSQGNLIF

SEQ ID NO: 485958 - protein, 12 aa, Homo sapiens
  CDR3 for beta chain variable domain of TCR clone 242979 (TRBV11-2, TRBJ2-2)
CTSSLGGGELFF

SEQ ID NO: 485959 - protein, 13 aa, Homo sapiens
  CDR3 for alpha chain variable domain of TCR clone 242980 (TRAV1-1, TRAJ23)
CAVVANQGGKLIF

SEQ ID NO: 485960 - protein, 16 aa, Homo sapiens
  CDR3 for beta chain variable domain of TCR clone 242980 (TRBV5-5, TRBJ1-2)
CASSPTWGRGLYRHTF

SEQ ID NO: 485961 - protein, 15 aa, Homo sapiens
  CDR3 for alpha chain variable domain of TCR clone 242981 (TRAV12-1, TRAJ44)
FVVDTPQCTASKLTF

SEQ ID NO: 485962 - protein, 14 aa, Homo sapiens
  CDR3 for beta chain variable domain of TCR clone 242981 (TRBV7-9, TRBJ2-1)
CASSPRDSLYEQFF

SEQ ID NO: 485963 - protein, 14 aa, Homo sapiens
  CDR3 for alpha chain variable domain of TCR clone 242982 (TRAV12-2, TRAJ4)
CAVLIGGGYNKLIF

SEQ ID NO: 485964 - protein, 14 aa, Homo sapiens
  CDR3 for beta chain variable domain of TCR clone 242982 (TRBV20-1, TRBJ2-7)
CSAISREASYEQYF

SEQ ID NO: 485965 - protein, 15 aa, Homo sapiens
  CDR3 for alpha chain variable domain of TCR clone 242983 (TRAV13-2, TRAJ23)
CAERGFYIQGGKLIF

SEQ ID NO: 485966 - protein, 14 aa, Homo sapiens
  CDR3 for beta chain variable domain of TCR clone 242983 (TRBV4-1, TRBJ2-3)
CASSQDWSTDTQYF

SEQ ID NO: 485967 - protein, 12 aa, Homo sapiens
  CDR3 for alpha chain variable domain of TCR clone 242984 (TRAV2, TRAJ9)
CAVWAGGFNTIF

SEQ ID NO: 485968 - protein, 16 aa, Homo sapiens
  CDR3 for beta chain variable domain of TCR clone 242984 (TRBV13, TRBJ2-2)
CASSPRTGEHTGELFF

SEQ ID NO: 485969 - protein, 14 aa, Homo sapiens
  CDR3 for alpha chain variable domain of TCR clone 242985 (TRAV26-1, TRAJ44)
CIVRPTGTASKLTF

SEQ ID NO: 485970 - protein, 15 aa, Homo sapiens
  CDR3 for beta chain variable domain of TCR clone 242985 (TRBV7-9, TRBJ2-2)
CASGPLDTFPGELFF

SEQ ID NO: 485971 - protein, 14 aa, Homo sapiens
  CDR3 for alpha chain variable domain of TCR clone 242986 (TRAV1-2, TRAJ8)
CAVREDTGFQKLVF

SEQ ID NO: 485972 - protein, 13 aa, Homo sapiens
  CDR3 for beta chain variable domain of TCR clone 242986 (TRBV20-1, IGHJ2)
CSARTPYNEKLFF

SEQ ID NO: 485973 - protein, 17 aa, Homo sapiens
  CDR3 for alpha chain variable domain of TCR clone 242987 (TRAV12-2, TRAJ52)
CAVNPYAGGTSYGKLTF

SEQ ID NO: 485974 - protein, 15 aa, Homo sapiens
  CDR3 for beta chain variable domain of TCR clone 242987 (TRBV11-2, TRBJ2-1)
CASSLGTSGLNEQFF

SEQ ID NO: 485975 - protein, 16 aa, Homo sapiens
  CDR3 for alpha chain variable domain of TCR clone 242988 (TRAV8-3, TRAJ8)
RAVPRDGNTGFQKLVF

SEQ ID NO: 485976 - protein, 14 aa, Homo sapiens
  CDR3 for beta chain variable domain of TCR clone 242988 (TRBV11-2, TRBJ2-7)
CASSSTGEGYEQYF

SEQ ID NO: 485977 - protein, 14 aa, Homo sapiens
  CDR3 for alpha chain variable domain of TCR clone 242989 (TRAV1-2, TRAJ16)
FAVNRFSDGQKLLF

SEQ ID NO: 485978 - protein, 15 aa, Homo sapiens
  CDR3 for beta chain variable domain of TCR clone 242989 (TRBV5-1, TRBJ2-2)
CASSSQGGNTGELFF

SEQ ID NO: 485979 - protein, 14 aa, Homo sapiens
  CDR3 for alpha chain variable domain of TCR clone 242990 (TRAV29/DV5, TRAJ5)
CAASGDTGRRALTF

SEQ ID NO: 485980 - protein, 14 aa, Homo sapiens
  CDR3 for beta chain variable domain of TCR clone 242990 (TRBV2, TRBJ2-1)
CASSDRAYYNEQFF

SEQ ID NO: 485981 - protein, 14 aa, Homo sapiens
  CDR3 for alpha chain variable domain of TCR clone 242991 (TRAV1-2, TRAJ16)
CAVNRFSDGQKLLF

SEQ ID NO: 485982 - protein, 13 aa, Homo sapiens
  CDR3 for beta chain variable domain of TCR clone 242991 (TRBV20-1, TRBJ1-1)
CSARVGGNTEAFF

SEQ ID NO: 485983 - protein, 13 aa, Homo sapiens
  CDR3 for alpha chain variable domain of TCR clone 242992 (TRAV12-2, TRAJ20)
CAVYPSNDYKLSF

SEQ ID NO: 485984 - protein, 14 aa, Homo sapiens
  CDR3 for beta chain variable domain of TCR clone 242992 (TRBV11-2, TRBJ1-2)
CASSLGTANYGYTF

SEQ ID NO: 485985 - protein, 14 aa, Homo sapiens
  CDR3 for alpha chain variable domain of TCR clone 242993 (TRAV1-2, TRAJ16)
CAVNRFSDGQKLLF

SEQ ID NO: 485986 - protein, 12 aa, Homo sapiens
  CDR3 for beta chain variable domain of TCR clone 242993 (TRBV6-3, TRBJ2-7)
CASSEPGFEQYF

SEQ ID NO: 485987 - protein, 15 aa, Homo sapiens
  CDR3 for alpha chain variable domain of TCR clone 242994 (TRAV14/DV4, TRAJ12)
CAMREGWDSSYKLIF

SEQ ID NO: 485988 - protein, 16 aa, Homo sapiens
  CDR3 for beta chain variable domain of TCR clone 242994 (TRBV2, TRBJ2-5)
CASSETQGVGEETQYY

SEQ ID NO: 485989 - protein, 13 aa, Homo sapiens
  CDR3 for alpha chain variable domain of TCR clone 242995 (TRAV3, TRAJ21)
CAVREPDFNKFYF

SEQ ID NO: 485990 - protein, 14 aa, Homo sapiens
  CDR3 for beta chain variable domain of TCR clone 242995 (TRBV4-1, TRBJ1-1)
CASSPRVDNTEAFF

SEQ ID NO: 485991 - protein, 13 aa, Homo sapiens
  CDR3 for alpha chain variable domain of TCR clone 242996 (TRAV13-1, TRAJ42)
CAANGGSQGNLIF

SEQ ID NO: 485992 - protein, 14 aa, Homo sapiens
  CDR3 for beta chain variable domain of TCR clone 242996 (TRBV12-5, TRBJ2-5)
CASGSRTHQETQYF

SEQ ID NO: 485993 - protein, 12 aa, Homo sapiens
  CDR3 for alpha chain variable domain of TCR clone 242997 (TRAV12-3, TRAJ17)
CAMTLTGNKLTF

SEQ ID NO: 485994 - protein, 13 aa, Homo sapiens
  CDR3 for beta chain variable domain of TCR clone 242997 (TRBV7-9, TRBJ1-2)
CASSVKQNYGYTF

SEQ ID NO: 485995 - protein, 14 aa, Homo sapiens
  CDR3 for alpha chain variable domain of TCR clone 242998 (TRAV3, TRAJ33)
CAVRDMDSNYQLIW

SEQ ID NO: 485996 - protein, 17 aa, Homo sapiens
  CDR3 for beta chain variable domain of TCR clone 242998 (TRBV7-3, TRBJ1-2)
CASSFRQGNDGELWLHL

SEQ ID NO: 485997 - protein, 10 aa, Homo sapiens
  CDR3 for alpha chain variable domain of TCR clone 242999 (TRAV12-3, TRAJ49)
CAMNDDQFYF

SEQ ID NO: 485998 - protein, 17 aa, Homo sapiens
  CDR3 for beta chain variable domain of TCR clone 242999 (TRBV5-4, TRBJ2-1)
CASSSAGGRGPYNEQFF

SEQ ID NO: 485999 - protein, 11 aa, Homo sapiens
  CDR3 for alpha chain variable domain of TCR clone 243000 (TRAV13-1, TRAJ6)
CATLGSYIPTF

SEQ ID NO: 486000 - protein, 14 aa, Homo sapiens
  CDR3 for beta chain variable domain of TCR clone 243000 (TRBV19, TRBJ2-1)
CARGARSFQWEQLF

SEQ ID NO: 486001 - protein, 14 aa, Homo sapiens
  CDR3 for alpha chain variable domain of TCR clone 243001 (TRAV13-1, TRAJ44)
CAAKATGTASKLTF

SEQ ID NO: 486002 - protein, 16 aa, Homo sapiens
  CDR3 for beta chain variable domain of TCR clone 243001 (TRBV15, TRBJ1-2)
CATSRGPRTRGGGYTF

SEQ ID NO: 486003 - protein, 16 aa, Homo sapiens
  CDR3 for alpha chain variable domain of TCR clone 243002 (TRAV12-2, TRAJ43)
CAGDDMRFGAGTRLTG

SEQ ID NO: 486004 - protein, 13 aa, Homo sapiens
  CDR3 for beta chain variable domain of TCR clone 243002 (TRBV7-8, TRBJ2-7)
CASSLTGGREQYF

SEQ ID NO: 486005 - protein, 17 aa, Homo sapiens
  CDR3 for alpha chain variable domain of TCR clone 243003 (TRAV27, TRAJ42)
CAERVIYYGGSQGNLIF

SEQ ID NO: 486006 - protein, 14 aa, Homo sapiens
  CDR3 for beta chain variable domain of TCR clone 243003 (TRBV6-6, TRBJ2-3)
CTSRLQREADTQYF

SEQ ID NO: 486007 - protein, 15 aa, Homo sapiens
  CDR3 for alpha chain variable domain of TCR clone 243004 (TRAV16, TRAJ27)
CAPCGCGTNAGKSTF

SEQ ID NO: 486008 - protein, 15 aa, Homo sapiens
  CDR3 for beta chain variable domain of TCR clone 243004 (TRBV6-6, TRBJ2-3)
CASSYRRGGTDTQYF

SEQ ID NO: 486009 - protein, 11 aa, Homo sapiens
  CDR3 for alpha chain variable domain of TCR clone 243005 (TRAV12-2, TRAJ49)
CALQGGNQFNF

SEQ ID NO: 486010 - protein, 13 aa, Homo sapiens
  CDR3 for beta chain variable domain of TCR clone 243005 (TRBV4-1, TRBJ1-1)
CASSQLGTGEAFF

SEQ ID NO: 486011 - protein, 14 aa, Homo sapiens
  CDR3 for alpha chain variable domain of TCR clone 243006 (TRAV1-2, TRAJ8)
CAVREDTGFQKLVF

SEQ ID NO: 486012 - protein, 19 aa, Homo sapiens
  CDR3 for beta chain variable domain of TCR clone 243006 (TRBV7-2, TRBJ2-3)
CARSFLSRNWGGGTDTQYF

SEQ ID NO: 486013 - protein, 15 aa, Homo sapiens
  CDR3 for alpha chain variable domain of TCR clone 243007 (TRAV17, TRAJ57)
CATGPSQVGSEKLVF

SEQ ID NO: 486014 - protein, 15 aa, Homo sapiens
  CDR3 for beta chain variable domain of TCR clone 243007 (TRBV7-9, TRBJ1-6)
CASSSPGRGNSPLHF

SEQ ID NO: 486015 - protein, 16 aa, Homo sapiens
  CDR3 for alpha chain variable domain of TCR clone 243008 (TRAV12-3, TRAJ53)
CAISPGSGGSNYKLTF

SEQ ID NO: 486016 - protein, 16 aa, Homo sapiens
  CDR3 for beta chain variable domain of TCR clone 243008 (TRBV4-2, TRBJ1-1)
CASIQAGFGMNTEAFF

SEQ ID NO: 486017 - protein, 11 aa, Homo sapiens
  CDR3 for alpha chain variable domain of TCR clone 243009 (TRAV2, TRAJ13)
CASGVYQKVTF

SEQ ID NO: 486018 - protein, 15 aa, Homo sapiens
  CDR3 for beta chain variable domain of TCR clone 243009 (TRBV7-9, TRBJ1-6)
CASSSPGRGNSPLHF

SEQ ID NO: 486019 - protein, 10 aa, Homo sapiens
  CDR3 for alpha chain variable domain of TCR clone 243010 (TRAV21, TRAJ31)
CAVGNARLMF

SEQ ID NO: 486020 - protein, 13 aa, Homo sapiens
  CDR3 for beta chain variable domain of TCR clone 243010 (TRBV4-1, TRBJ1-1)
CASSRKMNTEAFF

SEQ ID NO: 486021 - protein, 13 aa, Homo sapiens
  CDR3 for alpha chain variable domain of TCR clone 243011 (TRAV20, TRAJ21)
CAVEGYNFNKFYF

SEQ ID NO: 486022 - protein, 15 aa, Homo sapiens
  CDR3 for beta chain variable domain of TCR clone 243011 (TRBV10-3, TRBJ2-3)
CAISLTSGGTDTQYF

SEQ ID NO: 486023 - protein, 14 aa, Homo sapiens
  CDR3 for alpha chain variable domain of TCR clone 243012 (TRAV14/DV4, TRAJ15)
SAMRRDQAGTALIF

SEQ ID NO: 486024 - protein, 15 aa, Homo sapiens
  CDR3 for beta chain variable domain of TCR clone 243012 (TRBV12-4, TRBJ2-5)
CASSPPTGLQETQYF

SEQ ID NO: 486025 - protein, 15 aa, Homo sapiens
  CDR3 for alpha chain variable domain of TCR clone 243013 (TRAV8-3, TRAJ45)
CASSYSGGGSDGLTF

SEQ ID NO: 486026 - protein, 15 aa, Homo sapiens
  CDR3 for beta chain variable domain of TCR clone 243013 (TRBV27, TRBJ1-4)
CASSPRHATNEKLFF

SEQ ID NO: 486027 - protein, 13 aa, Homo sapiens
  CDR3 for alpha chain variable domain of TCR clone 243014 (TRAV12-3, TRAJ13)
CAMTSGGYQKVTF

SEQ ID NO: 486028 - protein, 15 aa, Homo sapiens
  CDR3 for beta chain variable domain of TCR clone 243014 (TRBV2, TRBJ2-3)
CASSDAGGPPDTQYF

SEQ ID NO: 486029 - protein, 14 aa, Homo sapiens
  CDR3 for alpha chain variable domain of TCR clone 243015 (TRAV1-2, TRAJ8)
CAVREDTGFKKLVF

SEQ ID NO: 486030 - protein, 15 aa, Homo sapiens
  CDR3 for beta chain variable domain of TCR clone 243015 (TRBV7-9, TRBJ1-6)
CASSSPGRGNSPLHF

SEQ ID NO: 486031 - protein, 16 aa, Homo sapiens
  CDR3 for alpha chain variable domain of TCR clone 243016 (TRAV30, TRAJ24)
CGTEIVDADSWGKFQF

SEQ ID NO: 486032 - protein, 15 aa, Homo sapiens
  CDR3 for beta chain variable domain of TCR clone 243016 (TRBV28, TRBJ2-1)
CASSLDTSSYNEQFF

SEQ ID NO: 486033 - protein, 13 aa, Homo sapiens
  CDR3 for alpha chain variable domain of TCR clone 243017 (TRAV12-3, TRAJ33)
CAMSVNSNYQLIW

SEQ ID NO: 486034 - protein, 13 aa, Homo sapiens
  CDR3 for beta chain variable domain of TCR clone 243017 (TRBV4-1, TRBJ2-2)
CASSQESTGELFF

SEQ ID NO: 486035 - protein, 11 aa, Homo sapiens
  CDR3 for alpha chain variable domain of TCR clone 243018 (TRAV8-3, TRAJ49)
CAVGGGNQFYF

SEQ ID NO: 486036 - protein, 13 aa, Homo sapiens
  CDR3 for beta chain variable domain of TCR clone 243018 (TRBV19, TRBJ1-2)
CASSVPGQDGYTF

SEQ ID NO: 486037 - protein, 16 aa, Homo sapiens
  CDR3 for alpha chain variable domain of TCR clone 243019 (TRAV38-1, TRAJ56)
CALMKRQTGANSKLTF

SEQ ID NO: 486038 - protein, 16 aa, Homo sapiens
  CDR3 for beta chain variable domain of TCR clone 243019 (TRBV6-1, TRBJ2-5)
CASSETLDRGAETQYF

SEQ ID NO: 486039 - protein, 14 aa, Homo sapiens
  CDR3 for alpha chain variable domain of TCR clone 243020 (TRAV9-2, TRAJ39)
CALYIYNAGNMLTF

SEQ ID NO: 486040 - protein, 15 aa, Homo sapiens
  CDR3 for beta chain variable domain of TCR clone 243020 (TRBV20-1, TRBJ2-7)
CSAESRTSGAYEQYF

SEQ ID NO: 486041 - protein, 14 aa, Homo sapiens
  CDR3 for alpha chain variable domain of TCR clone 243021 (TRAV16, TRAJ33)
CALSAMDSNYQLIW

SEQ ID NO: 486042 - protein, 12 aa, Homo sapiens
  CDR3 for beta chain variable domain of TCR clone 243021 (TRBV5-1, TRBJ1-2)
CASSQDTYGHTF

SEQ ID NO: 486043 - protein, 14 aa, Homo sapiens
  CDR3 for alpha chain variable domain of TCR clone 243022 (TRAV12-2, TRAJ44)
CAVNPAGTASKLTF

SEQ ID NO: 486044 - protein, 13 aa, Homo sapiens
  CDR3 for beta chain variable domain of TCR clone 243022 (TRBV20-1, TRBJ1-6)
CSAPLGVESPLHF

SEQ ID NO: 486045 - protein, 16 aa, Homo sapiens
  CDR3 for alpha chain variable domain of TCR clone 243023 (TRAV3, TRAJ21)
CAVRDIERGNFDKFYF

SEQ ID NO: 486046 - protein, 15 aa, Homo sapiens
  CDR3 for beta chain variable domain of TCR clone 243023 (TRBV7-9, TRBJ1-5)
CASSQGHQPNQPQHF

SEQ ID NO: 486047 - protein, 14 aa, Homo sapiens
  CDR3 for alpha chain variable domain of TCR clone 243024 (TRAV1-2, TRAJ8)
CAVREDTGFQKLVF

SEQ ID NO: 486048 - protein, 15 aa, Homo sapiens
  CDR3 for beta chain variable domain of TCR clone 243024 (TRBV6-3, TRBJ2-7)
CASSSHGTVAYEQYF

SEQ ID NO: 486049 - protein, 15 aa, Homo sapiens
  CDR3 for alpha chain variable domain of TCR clone 243025 (TRAV13-1, TRAJ52)
SYYNAGGTSYGKLTF

SEQ ID NO: 486050 - protein, 15 aa, Homo sapiens
  CDR3 for beta chain variable domain of TCR clone 243025 (TRBV11-3, TRBJ2-3)
CASSLGRQGVNTQYF

SEQ ID NO: 486051 - protein, 12 aa, Homo sapiens
  CDR3 for alpha chain variable domain of TCR clone 243026 (TRAV12-1, TRAJ23)
CVVNWGGGKLNF

SEQ ID NO: 486052 - protein, 14 aa, Homo sapiens
  CDR3 for beta chain variable domain of TCR clone 243026 (TRBV27, TRBJ2-7)
CASSPQRGTYEQYF

SEQ ID NO: 486053 - protein, 14 aa, Homo sapiens
  CDR3 for alpha chain variable domain of TCR clone 243027 (TRAV29/DV5, TRAJ36)
CAARRKTGANNLFF

SEQ ID NO: 486054 - protein, 14 aa, Homo sapiens
  CDR3 for beta chain variable domain of TCR clone 243027 (TRBV11-2, TRBJ1-2)
CASSLGTANYGYTL

SEQ ID NO: 486055 - protein, 15 aa, Homo sapiens
  CDR3 for alpha chain variable domain of TCR clone 243028 (TRAV12-3, TRAJ6)
CAMSATTGGSYIPTF

SEQ ID NO: 486056 - protein, 17 aa, Homo sapiens
  CDR3 for beta chain variable domain of TCR clone 243028 (TRBV20-1, TRBJ2-1)
CSARSPSGGPRTMSSSS

SEQ ID NO: 486057 - protein, 15 aa, Homo sapiens
  CDR3 for alpha chain variable domain of TCR clone 243029 (TRAV21, TRAJ24)
CAARSSTVSWGKLHF

SEQ ID NO: 486058 - protein, 13 aa, Homo sapiens
  CDR3 for beta chain variable domain of TCR clone 243029 (TRBV11-2, TRBJ2-5)
CASSSTGEETQYF

SEQ ID NO: 486059 - protein, 14 aa, Homo sapiens
  CDR3 for alpha chain variable domain of TCR clone 243030 (TRAV23/DV6, )
CAADIQNPDPAVYH

SEQ ID NO: 486060 - protein, 14 aa, Homo sapiens
  CDR3 for beta chain variable domain of TCR clone 243030 (TRBV5-7, TRBJ1-6)
CASSFAGHNSPLHF

SEQ ID NO: 486061 - protein, 15 aa, Homo sapiens
  CDR3 for alpha chain variable domain of TCR clone 243031 (TRAV26-1, TRAJ29)
CIVRVEGSGNTPLVL

SEQ ID NO: 486062 - protein, 14 aa, Homo sapiens
  CDR3 for beta chain variable domain of TCR clone 243031 (TRBV18, TRBJ2-5)
CASSHGVSQETQYV

SEQ ID NO: 486063 - protein, 13 aa, Homo sapiens
  CDR3 for alpha chain variable domain of TCR clone 243032 (TRAV27, TRAJ8)
CAGGPTGFQKLVF

SEQ ID NO: 486064 - protein, 15 aa, Homo sapiens
  CDR3 for beta chain variable domain of TCR clone 243032 (TRBV6-1, TRBJ2-7)
CASSESLGDFYEQYF

SEQ ID NO: 486065 - protein, 15 aa, Homo sapiens
  CDR3 for alpha chain variable domain of TCR clone 243033 (TRAV26-1, TRAJ40)
CIVRVTTSGTYKYIF

SEQ ID NO: 486066 - protein, 15 aa, Homo sapiens
  CDR3 for beta chain variable domain of TCR clone 243033 (TRBV7-9, TRBJ1-6)
CASSSPGRGNSPLHF

SEQ ID NO: 486067 - protein, 14 aa, Homo sapiens
  CDR3 for alpha chain variable domain of TCR clone 243034 (TRAV8-2, TRAJ37)
CVVSISGNTGKLIF

SEQ ID NO: 486068 - protein, 12 aa, Homo sapiens
  CDR3 for beta chain variable domain of TCR clone 243034 (TRBV11-2, TRBJ2-2)
CASSLGGGELFF

SEQ ID NO: 486069 - protein, 13 aa, Homo sapiens
  CDR3 for alpha chain variable domain of TCR clone 243035 (TRAV39, TRAJ49)
CAVDRNTGNQFYF

SEQ ID NO: 486070 - protein, 13 aa, Homo sapiens
  CDR3 for beta chain variable domain of TCR clone 243035 (TRBV4-1, TRBJ1-1)
CASSRKMNTEAFF

SEQ ID NO: 486071 - protein, 10 aa, Homo sapiens
  CDR3 for alpha chain variable domain of TCR clone 243036 (TRAV1-2, TRAJ31)
CAFFDARLMF

SEQ ID NO: 486072 - protein, 11 aa, Homo sapiens
  CDR3 for beta chain variable domain of TCR clone 243036 (TRBV7-8, TRBJ2-7)
CASSLSLEQYF

SEQ ID NO: 486073 - protein, 16 aa, Homo sapiens
  CDR3 for alpha chain variable domain of TCR clone 243037 (TRAV23/DV6, TRAJ9)
CAASIGGNTGGFKTIL

SEQ ID NO: 486074 - protein, 14 aa, Homo sapiens
  CDR3 for beta chain variable domain of TCR clone 243037 (TRBV9, TRBJ2-7)
CASSVGVGSYEQYF

SEQ ID NO: 486075 - protein, 14 aa, Homo sapiens
  CDR3 for alpha chain variable domain of TCR clone 243038 (TRAV2, TRAJ9)
CAVEDRSGGFKTIF

SEQ ID NO: 486076 - protein, 15 aa, Homo sapiens
  CDR3 for beta chain variable domain of TCR clone 243038 (TRBV12-4, TRBJ1-5)
CASTRGSGFGQHQHF

SEQ ID NO: 486077 - protein, 14 aa, Homo sapiens
  CDR3 for alpha chain variable domain of TCR clone 243039 (TRAV1-2, TRAJ15)
CAVRDRQAGTALIF

SEQ ID NO: 486078 - protein, 14 aa, Homo sapiens
  CDR3 for beta chain variable domain of TCR clone 243039 (TRBV7-9, TRBJ2-2)
CAGSLVQDTGELFF

SEQ ID NO: 486079 - protein, 11 aa, Homo sapiens
  CDR3 for alpha chain variable domain of TCR clone 243040 (TRAV17, TRAJ39)
CATNPYNMLTF

SEQ ID NO: 486080 - protein, 13 aa, Homo sapiens
  CDR3 for beta chain variable domain of TCR clone 243040 (TRBV7-8, TRBJ2-1)
CASTRDAVDEQFC

SEQ ID NO: 486081 - protein, 12 aa, Homo sapiens
  CDR3 for alpha chain variable domain of TCR clone 243041 (TRAV23/DV6, TRAJ30)
CAASKGDDKIIF

SEQ ID NO: 486082 - protein, 14 aa, Homo sapiens
  CDR3 for beta chain variable domain of TCR clone 243041 (TRBV25-1, TRBJ1-1)
CASTHLGGNTEAFF

SEQ ID NO: 486083 - protein, 14 aa, Homo sapiens
  CDR3 for alpha chain variable domain of TCR clone 243042 (TRAV1-1, TRAJ27)
CAFSEALMQANQPL

SEQ ID NO: 486084 - protein, 17 aa, Homo sapiens
  CDR3 for beta chain variable domain of TCR clone 243042 (TRBV20-1, TRBJ2-3)
CSARDPKGVSATDTQYF

SEQ ID NO: 486085 - protein, 12 aa, Homo sapiens
  CDR3 for alpha chain variable domain of TCR clone 243043 (TRAV1-1, TRAJ8)
CAGGTGFQKLVL

SEQ ID NO: 486086 - protein, 14 aa, Homo sapiens
  CDR3 for beta chain variable domain of TCR clone 243043 (TRBV7-8, TRBJ1-1)
CASSIRQGITEAFF

SEQ ID NO: 486087 - protein, 23 aa, Homo sapiens
  CDR3 for alpha chain variable domain of TCR clone 243044 (TRAV8-3, TRAJ32)
CAVGPMVVLQTSSSLELALCLLS

SEQ ID NO: 486088 - protein, 14 aa, Homo sapiens
  CDR3 for beta chain variable domain of TCR clone 243044 (TRBV29-1, TRBJ2-2)
CSVLAETNTGELFF

SEQ ID NO: 486089 - protein, 17 aa, Homo sapiens
  CDR3 for alpha chain variable domain of TCR clone 243045 (TRAV38-2/DV8, TRAJ38)
CAYRSARGAGNNRKWIW

SEQ ID NO: 486090 - protein, 13 aa, Homo sapiens
  CDR3 for beta chain variable domain of TCR clone 243045 (TRBV6-5, TRBJ2-1)
CASRGRVGNEQFF

SEQ ID NO: 486091 - protein, 11 aa, Homo sapiens
  CDR3 for alpha chain variable domain of TCR clone 243046 (TRAV13-1, TRAJ24)
CAASGWGKLQF

SEQ ID NO: 486092 - protein, 16 aa, Homo sapiens
  CDR3 for beta chain variable domain of TCR clone 243046 (TRBV6-1, TRBJ2-5)
CASSETLDRGAETQYF

SEQ ID NO: 486093 - protein, 16 aa, Homo sapiens
  CDR3 for alpha chain variable domain of TCR clone 243047 (TRAV3, TRAJ37)
CAVRGKGSGNTGKLIF

SEQ ID NO: 486094 - protein, 13 aa, Homo sapiens
  CDR3 for beta chain variable domain of TCR clone 243047 (TRBV7-3, TRBJ1-1)
CASSHDWGAEAFF

SEQ ID NO: 486095 - protein, 18 aa, Homo sapiens
  CDR3 for alpha chain variable domain of TCR clone 243048 (TRAV1-2, TRAJ18)
CAVRDMGDRGSTLGRLYF

SEQ ID NO: 486096 - protein, 16 aa, Homo sapiens
  CDR3 for beta chain variable domain of TCR clone 243048 (TRBV29-1, TRBJ1-2)
CSVEANRDIASYGYTF

SEQ ID NO: 486097 - protein, 12 aa, Homo sapiens
  CDR3 for alpha chain variable domain of TCR clone 243049 (TRAV20, TRAJ54)
CAVQEGAQKLVF

SEQ ID NO: 486098 - protein, 17 aa, Homo sapiens
  CDR3 for beta chain variable domain of TCR clone 243049 (TRBV13, TRBJ2-3)
WASSLSRVAGGGNTQYF

SEQ ID NO: 486099 - protein, 13 aa, Homo sapiens
  CDR3 for alpha chain variable domain of TCR clone 243050 (TRAV27, TRAJ42)
CAGARVSQGNLIF

SEQ ID NO: 486100 - protein, 15 aa, Homo sapiens
  CDR3 for beta chain variable domain of TCR clone 243050 (TRBV10-3, TRBJ2-2)
CAIRTDREDTGELFF

SEQ ID NO: 486101 - protein, 12 aa, Homo sapiens
  CDR3 for alpha chain variable domain of TCR clone 243051 (TRAV25, TRAJ11)
CAGASGYSTLTF

SEQ ID NO: 486102 - protein, 14 aa, Homo sapiens
  CDR3 for beta chain variable domain of TCR clone 243051 (TRBV5-5, TRBJ1-5)
CASSGQGVDQPQHF

SEQ ID NO: 486103 - protein, 16 aa, Homo sapiens
  CDR3 for alpha chain variable domain of TCR clone 243052 (TRAV30, TRAJ24)
CGTEIVDADSWEKFQF

SEQ ID NO: 486104 - protein, 15 aa, Homo sapiens
  CDR3 for beta chain variable domain of TCR clone 243052 (TRBV6-5, TRBJ2-1)
CASSYDAGAGNEQFF

SEQ ID NO: 486105 - protein, 16 aa, Homo sapiens
  CDR3 for alpha chain variable domain of TCR clone 243053 (TRAV1-2, TRAJ10)
CAVRGVPTGGGNKLTF

SEQ ID NO: 486106 - protein, 17 aa, Homo sapiens
  CDR3 for beta chain variable domain of TCR clone 243053 (TRBV15, TRBJ1-5)
CATSRAPPGTRNQPQHF

SEQ ID NO: 486107 - protein, 14 aa, Homo sapiens
  CDR3 for alpha chain variable domain of TCR clone 243054 (TRAV29/DV5, TRAJ36)
CAARRKTGAHNLFF

SEQ ID NO: 486108 - protein, 12 aa, Homo sapiens
  CDR3 for beta chain variable domain of TCR clone 243054 (TRBV12-5, TRBJ2-5)
CASGQGVETQYF

SEQ ID NO: 486109 - protein, 12 aa, Homo sapiens
  CDR3 for alpha chain variable domain of TCR clone 243055 (TRAV12-3, TRAJ17)
CAMTLTGNKLTF

SEQ ID NO: 486110 - protein, 15 aa, Homo sapiens
  CDR3 for beta chain variable domain of TCR clone 243055 (TRBV10-2, TRBJ2-6)
CASSEKGTGANVLTF

SEQ ID NO: 486111 - protein, 14 aa, Homo sapiens
  CDR3 for alpha chain variable domain of TCR clone 243056 (TRAV38-1, TRAJ40)
CALRPTSGTSKYIF

SEQ ID NO: 486112 - protein, 14 aa, Homo sapiens
  CDR3 for beta chain variable domain of TCR clone 243056 (TRBV25-1, TRBJ1-1)
CASTHLGGNTEDFF

SEQ ID NO: 486113 - protein, 12 aa, Homo sapiens
  CDR3 for alpha chain variable domain of TCR clone 243057 (TRAV21, TRAJ39)
CAADNAGNMLTF

SEQ ID NO: 486114 - protein, 15 aa, Homo sapiens
  CDR3 for beta chain variable domain of TCR clone 243057 (TRBV15, TRBJ2-1)
CATSRADRGHNEQFF

SEQ ID NO: 486115 - protein, 13 aa, Homo sapiens
  CDR3 for alpha chain variable domain of TCR clone 243058 (TRAV12-1, TRAJ16)
CVVNGPDGQKLLF

SEQ ID NO: 486116 - protein, 15 aa, Homo sapiens
  CDR3 for beta chain variable domain of TCR clone 243058 (TRBV20-1, TRBJ2-7)
CSAESGTSGAYEQYF

SEQ ID NO: 486117 - protein, 11 aa, Homo sapiens
  CDR3 for alpha chain variable domain of TCR clone 243059 (TRAV1-2, TRAJ8)
CAVSSFQKLVF

SEQ ID NO: 486118 - protein, 16 aa, Homo sapiens
  CDR3 for beta chain variable domain of TCR clone 243059 (TRBV7-3, TRBJ2-2)
CASSLKRGSLSGELFF

SEQ ID NO: 486119 - protein, 14 aa, Homo sapiens
  CDR3 for alpha chain variable domain of TCR clone 243060 (TRAV23/DV6, TRAJ37)
CAASTSSNTGKLIF

SEQ ID NO: 486120 - protein, 16 aa, Homo sapiens
  CDR3 for beta chain variable domain of TCR clone 243060 (TRBV20-1, TRBJ1-4)
CSAPGQGLLTNEKLFF

SEQ ID NO: 486121 - protein, 14 aa, Homo sapiens
  CDR3 for alpha chain variable domain of TCR clone 243061 (TRAV26-2, TRAJ27)
CILRDISDAGKSTF

SEQ ID NO: 486122 - protein, 14 aa, Homo sapiens
  CDR3 for beta chain variable domain of TCR clone 243061 (TRBV12-5, TRBJ2-5)
CASGSRTHQETQYF

SEQ ID NO: 486123 - protein, 15 aa, Homo sapiens
  CDR3 for alpha chain variable domain of TCR clone 243062 (TRAV13-1, TRAJ32)
CAASNGWWCYKRAHL

SEQ ID NO: 486124 - protein, 17 aa, Homo sapiens
  CDR3 for beta chain variable domain of TCR clone 243062 (TRBV15, TRBJ1-2)
CATSGREIDVVNYGYTF

SEQ ID NO: 486125 - protein, 15 aa, Homo sapiens
  CDR3 for alpha chain variable domain of TCR clone 243063 (TRAV14/DV4, TRAJ49)
CAMREGRDTGNQFYF

SEQ ID NO: 486126 - protein, 17 aa, Homo sapiens
  CDR3 for beta chain variable domain of TCR clone 243063 (TRBV12-4, TRBJ1-5)
CASSLRGDRGPKQPQHF

SEQ ID NO: 486127 - protein, 14 aa, Homo sapiens
  CDR3 for alpha chain variable domain of TCR clone 243064 (TRAV30, TRAJ26)
CGTEIVSYGQNFVF

SEQ ID NO: 486128 - protein, 13 aa, Homo sapiens
  CDR3 for beta chain variable domain of TCR clone 243064 (TRBV19, TRBJ1-3)
CASRLSLGNTLFF

SEQ ID NO: 486129 - protein, 17 aa, Homo sapiens
  CDR3 for alpha chain variable domain of TCR clone 243065 (TRAV23/DV6, TRAJ57)
CAASSTLSQCGSEKLVF

SEQ ID NO: 486130 - protein, 13 aa, Homo sapiens
  CDR3 for beta chain variable domain of TCR clone 243065 (TRBV5-1, TRBJ1-2)
CASSFQGNYGYTF

SEQ ID NO: 486131 - protein, 14 aa, Homo sapiens
  CDR3 for alpha chain variable domain of TCR clone 243066 (TRAV8-3, TRAJ4)
CAVGAAGGYNKLIF

SEQ ID NO: 486132 - protein, 16 aa, Homo sapiens
  CDR3 for beta chain variable domain of TCR clone 243066 (TRBV28, TRBJ2-7)
CASSFPDRRLTYEQYF

SEQ ID NO: 486133 - protein, 14 aa, Homo sapiens
  CDR3 for alpha chain variable domain of TCR clone 243067 (TRAV1-2, TRAJ16)
CAVNRFSDGQKLLF

SEQ ID NO: 486134 - protein, 15 aa, Homo sapiens
  CDR3 for beta chain variable domain of TCR clone 243067 (TRBV7-9, TRBJ1-6)
CASSSPGRGNAPLHF

SEQ ID NO: 486135 - protein, 12 aa, Homo sapiens
  CDR3 for alpha chain variable domain of TCR clone 243068 (TRAV13-1, TRAJ48)
CAANFGNEKLTF

SEQ ID NO: 486136 - protein, 18 aa, Homo sapiens
  CDR3 for beta chain variable domain of TCR clone 243068 (TRBV11-2, TRBJ2-7)
CASSWRAVQTGQSYEQYF

SEQ ID NO: 486137 - protein, 12 aa, Homo sapiens
  CDR3 for alpha chain variable domain of TCR clone 243069 (TRAV12-3, TRAJ5)
CAMDTGRRALTF

SEQ ID NO: 486138 - protein, 14 aa, Homo sapiens
  CDR3 for beta chain variable domain of TCR clone 243069 (TRBV28, TRBJ1-1)
CASSSEQGYTEAFF

SEQ ID NO: 486139 - protein, 14 aa, Homo sapiens
  CDR3 for alpha chain variable domain of TCR clone 243070 (TRAV12-2, TRAJ17)
CAVLFKAAGNKLTF

SEQ ID NO: 486140 - protein, 13 aa, Homo sapiens
  CDR3 for beta chain variable domain of TCR clone 243070 (TRBV19, TRBJ1-2)
CASGQGQVYGYTF

SEQ ID NO: 486141 - protein, 12 aa, Homo sapiens
  CDR3 for alpha chain variable domain of TCR clone 243071 (TRAV23/DV6, TRAJ20)
CAADSRDYKLSF

SEQ ID NO: 486142 - protein, 16 aa, Homo sapiens
  CDR3 for beta chain variable domain of TCR clone 243071 (TRBV28, TRBJ2-7)
CASSPWVATGDLSQYF

SEQ ID NO: 486143 - protein, 14 aa, Homo sapiens
  CDR3 for alpha chain variable domain of TCR clone 243072 (TRAV12-1, TRAJ17)
CVVNYNAAGNKLTF

SEQ ID NO: 486144 - protein, 15 aa, Homo sapiens
  CDR3 for beta chain variable domain of TCR clone 243072 (TRBV20-1, TRBJ2-7)
CSARDRVSGMDEQYF

SEQ ID NO: 486145 - protein, 15 aa, Homo sapiens
  CDR3 for alpha chain variable domain of TCR clone 243073 (TRAV3, TRAJ3)
CAVRDMGSSASKIIF

SEQ ID NO: 486146 - protein, 14 aa, Homo sapiens
  CDR3 for beta chain variable domain of TCR clone 243073 (TRBV19, TRBJ2-1)
CASPTFVLSGEQFF

SEQ ID NO: 486147 - protein, 12 aa, Homo sapiens
  CDR3 for alpha chain variable domain of TCR clone 243074 (TRAV16, TRAJ10)
CSRTGGGNKLTF

SEQ ID NO: 486148 - protein, 14 aa, Homo sapiens
  CDR3 for beta chain variable domain of TCR clone 243074 (TRBV7-8, TRBJ2-3)
CASSFPDGQDTQYF

SEQ ID NO: 486149 - protein, 15 aa, Homo sapiens
  CDR3 for alpha chain variable domain of TCR clone 243075 (TRAV4, TRAJ10)
CLVGDVSGGGNKLTF

SEQ ID NO: 486150 - protein, 15 aa, Homo sapiens
  CDR3 for beta chain variable domain of TCR clone 243075 (TRBV27, TRBJ2-3)
CASSSLAGVIDTQYF

SEQ ID NO: 486151 - protein, 19 aa, Homo sapiens
  CDR3 for alpha chain variable domain of TCR clone 243076 (TRAV26-1, TRAJ22)
CCVLLHRWIFSGSARQLTF

SEQ ID NO: 486152 - protein, 19 aa, Homo sapiens
  CDR3 for beta chain variable domain of TCR clone 243076 (TRBV19, TRBJ2-5)
CASSIGQVTDFFLGETQYF

SEQ ID NO: 486153 - protein, 11 aa, Homo sapiens
  CDR3 for alpha chain variable domain of TCR clone 243077 (TRAV2, TRAJ13)
CASGGYQKVTF

SEQ ID NO: 486154 - protein, 13 aa, Homo sapiens
  CDR3 for beta chain variable domain of TCR clone 243077 (TRBV4-1, TRBJ2-5)
CASSLEVQETQYF

SEQ ID NO: 486155 - protein, 11 aa, Homo sapiens
  CDR3 for alpha chain variable domain of TCR clone 243078 (TRAV12-1, TRAJ30)
CVVNGQDKIIF

SEQ ID NO: 486156 - protein, 16 aa, Homo sapiens
  CDR3 for beta chain variable domain of TCR clone 243078 (TRBV24-1, TRBJ2-3)
CATSDAISGITDMQYF

SEQ ID NO: 486157 - protein, 13 aa, Homo sapiens
  CDR3 for alpha chain variable domain of TCR clone 243079 (TRAV22, TRAJ26)
CAVEHNYGQNFVV

SEQ ID NO: 486158 - protein, 16 aa, Homo sapiens
  CDR3 for beta chain variable domain of TCR clone 243079 (TRBV7-2, TRBJ2-6)
CASSERRASGANVLTF

SEQ ID NO: 486159 - protein, 14 aa, Homo sapiens
  CDR3 for alpha chain variable domain of TCR clone 243080 (TRAV1-2, TRAJ8)
CSVREDTGFQKLVF

SEQ ID NO: 486160 - protein, 16 aa, Homo sapiens
  CDR3 for beta chain variable domain of TCR clone 243080 (TRBV12-5, TRBJ2-5)
CASGPRTSGNQETQYF

SEQ ID NO: 486161 - protein, 16 aa, Homo sapiens
  CDR3 for alpha chain variable domain of TCR clone 243081 (TRAV3, TRAJ4)
CAVRAFFSGGYNKLIF

SEQ ID NO: 486162 - protein, 16 aa, Homo sapiens
  CDR3 for beta chain variable domain of TCR clone 243081 (TRBV19, TRBJ2-1)
CASSKAGPSSYNEQFF

SEQ ID NO: 486163 - protein, 14 aa, Homo sapiens
  CDR3 for alpha chain variable domain of TCR clone 243082 (TRAV14/DV4, TRAJ34)
CAVSDPGDTDKLIF

SEQ ID NO: 486164 - protein, 17 aa, Homo sapiens
  CDR3 for beta chain variable domain of TCR clone 243082 (TRBV11-2, TRBJ2-1)
CASSLYPPGVEYNEQFF

SEQ ID NO: 486165 - protein, 16 aa, Homo sapiens
  CDR3 for alpha chain variable domain of TCR clone 243083 (TRAV3, TRAJ32)
CAVRDIGGGATNKLIF

SEQ ID NO: 486166 - protein, 15 aa, Homo sapiens
  CDR3 for beta chain variable domain of TCR clone 243083 (TRBV11-3, TRBJ2-3)
CASLKNGREGDTQYF

SEQ ID NO: 486167 - protein, 13 aa, Homo sapiens
  CDR3 for alpha chain variable domain of TCR clone 243084 (TRAV27, TRAJ49)
CAPRPYTCNQFYF

SEQ ID NO: 486168 - protein, 16 aa, Homo sapiens
  CDR3 for beta chain variable domain of TCR clone 243084 (TRBV4-1, TRBJ1-2)
CASSQDAGQVLYGYTF

SEQ ID NO: 486169 - protein, 15 aa, Homo sapiens
  CDR3 for alpha chain variable domain of TCR clone 243085 (TRAV13-1, TRAJ52)
CAATSPRTSYGKLTF

SEQ ID NO: 486170 - protein, 17 aa, Homo sapiens
  CDR3 for beta chain variable domain of TCR clone 243085 (TRBV11-2, TRBJ2-1)
CASSLYPPGVEYNEQFF

SEQ ID NO: 486171 - protein, 12 aa, Homo sapiens
  CDR3 for alpha chain variable domain of TCR clone 243086 (TRAV26-1, TRAJ13)
CIVSRGYQKVTF

SEQ ID NO: 486172 - protein, 14 aa, Homo sapiens
  CDR3 for beta chain variable domain of TCR clone 243086 (TRBV28, TRBJ2-7)
CASRVAGVGYEQYF

SEQ ID NO: 486173 - protein, 14 aa, Homo sapiens
  CDR3 for alpha chain variable domain of TCR clone 243087 (TRAV26-1, TRAJ34)
CIVRVAYNTDKLIF

SEQ ID NO: 486174 - protein, 12 aa, Homo sapiens
  CDR3 for beta chain variable domain of TCR clone 243087 (TRBV19, TRBJ1-4)
CASKDWPGGLFF

SEQ ID NO: 486175 - protein, 15 aa, Homo sapiens
  CDR3 for alpha chain variable domain of TCR clone 243088 (TRAV1-2, TRAJ30)
CAVRPHGTRDDKIIF

SEQ ID NO: 486176 - protein, 13 aa, Homo sapiens
  CDR3 for beta chain variable domain of TCR clone 243088 (TRBV4-1, TRBJ2-7)
CASSQGQAYEQYF

SEQ ID NO: 486177 - protein, 11 aa, Homo sapiens
  CDR3 for alpha chain variable domain of TCR clone 243089 (TRAV1-1, TRAJ23)
CAVRQGGKLIF

SEQ ID NO: 486178 - protein, 13 aa, Homo sapiens
  CDR3 for beta chain variable domain of TCR clone 243089 (TRBV15, TRBJ2-7)
CATSTTGHYEQYF

SEQ ID NO: 486179 - protein, 15 aa, Homo sapiens
  CDR3 for alpha chain variable domain of TCR clone 243090 (TRAV17, TRAJ56)
CATEPFTGANSKLKF

SEQ ID NO: 486180 - protein, 15 aa, Homo sapiens
  CDR3 for beta chain variable domain of TCR clone 243090 (TRBV11-3, TRBJ2-3)
CASLKDGREGDTQYF

SEQ ID NO: 486181 - protein, 16 aa, Homo sapiens
  CDR3 for alpha chain variable domain of TCR clone 243091 (TRAV12-2, TRAJ28)
CAVITDSGAGSYQLTF

SEQ ID NO: 486182 - protein, 13 aa, Homo sapiens
  CDR3 for beta chain variable domain of TCR clone 243091 (TRBV18, TRBJ2-7)
CASSPGQDCEQYF

SEQ ID NO: 486183 - protein, 16 aa, Homo sapiens
  CDR3 for alpha chain variable domain of TCR clone 243092 (TRAV27, TRAJ34)
CAGGGLGDYNTDKLIF

SEQ ID NO: 486184 - protein, 15 aa, Homo sapiens
  CDR3 for beta chain variable domain of TCR clone 243092 (TRBV9, TRBJ1-4)
CASSVGGSTNETLFF

SEQ ID NO: 486185 - protein, 14 aa, Homo sapiens
  CDR3 for alpha chain variable domain of TCR clone 243093 (TRAV9-2, TRAJ39)
CALYIYNAGNMLTF

SEQ ID NO: 486186 - protein, 12 aa, Homo sapiens
  CDR3 for beta chain variable domain of TCR clone 243093 (TRBV7-9, TRBJ1-4)
CASSTDREKLFF

SEQ ID NO: 486187 - protein, 14 aa, Homo sapiens
  CDR3 for alpha chain variable domain of TCR clone 243094 (TRAV26-1, TRAJ48)
CIVRGPFGNEKLTF

SEQ ID NO: 486188 - protein, 16 aa, Homo sapiens
  CDR3 for beta chain variable domain of TCR clone 243094 (TRBV18, TRBJ2-1)
CASSPYLSIRGDEQFF

SEQ ID NO: 486189 - protein, 15 aa, Homo sapiens
  CDR3 for alpha chain variable domain of TCR clone 243095 (TRAV26-1, TRAJ21)
CIVRVPNYNFNKFSF

SEQ ID NO: 486190 - protein, 16 aa, Homo sapiens
  CDR3 for beta chain variable domain of TCR clone 243095 (TRBV7-9, TRBJ2-3)
CASSLQGNPGTDTQYF

SEQ ID NO: 486191 - protein, 13 aa, Homo sapiens
  CDR3 for alpha chain variable domain of TCR clone 243096 (TRAV12-2, TRAJ30)
CAVNLNRDDKIIF

SEQ ID NO: 486192 - protein, 15 aa, Homo sapiens
  CDR3 for beta chain variable domain of TCR clone 243096 (TRBV7-2, TRBJ1-2)
CASSLVSGGDYGYTF

SEQ ID NO: 486193 - protein, 12 aa, Homo sapiens
  CDR3 for alpha chain variable domain of TCR clone 243097 (TRAV8-3, TRAJ20)
CAVDFNDYKPSF

SEQ ID NO: 486194 - protein, 12 aa, Homo sapiens
  CDR3 for beta chain variable domain of TCR clone 243097 (TRBV12-4, TRBJ1-3)
CASSFSGNTIYF

SEQ ID NO: 486195 - protein, 10 aa, Homo sapiens
  CDR3 for alpha chain variable domain of TCR clone 243098 (TRAV23/DV6, TRAJ31)
CARGGARLMF

SEQ ID NO: 486196 - protein, 18 aa, Homo sapiens
  CDR3 for beta chain variable domain of TCR clone 243098 (TRBV11-2, TRBJ2-3)
CASSLGGASRGAPNTQYF

SEQ ID NO: 486197 - protein, 18 aa, Homo sapiens
  CDR3 for alpha chain variable domain of TCR clone 243099 (TRAV21, TRAJ52)
CAVRPSPAGGTSYGKLTF

SEQ ID NO: 486198 - protein, 16 aa, Homo sapiens
  CDR3 for beta chain variable domain of TCR clone 243099 (TRBV7-3, TRBJ2-5)
CASSLMGGASQETQYF

SEQ ID NO: 486199 - protein, 15 aa, Homo sapiens
  CDR3 for alpha chain variable domain of TCR clone 243100 (TRAV26-1, TRAJ29)
CIVRVEGSGNTPLVL

SEQ ID NO: 486200 - protein, 14 aa, Homo sapiens
  CDR3 for beta chain variable domain of TCR clone 243100 (TRBV18, TRBJ2-5)
CASSPGVSQENQYF

SEQ ID NO: 486201 - protein, 11 aa, Homo sapiens
  CDR3 for alpha chain variable domain of TCR clone 243101 (TRAV3, TRAJ21)
CAVGNFNKFYF

SEQ ID NO: 486202 - protein, 13 aa, Homo sapiens
  CDR3 for beta chain variable domain of TCR clone 243101 (TRBV7-3, TRBJ1-1)
CASSQDWGAEAFF

SEQ ID NO: 486203 - protein, 11 aa, Homo sapiens
  CDR3 for alpha chain variable domain of TCR clone 243102 (TRAV2, TRAJ13)
CASGGYQKVTF

SEQ ID NO: 486204 - protein, 15 aa, Homo sapiens
  CDR3 for beta chain variable domain of TCR clone 243102 (TRBV4-3, TRBJ2-7)
CASSQGDWGDYEQYF

SEQ ID NO: 486205 - protein, 14 aa, Homo sapiens
  CDR3 for alpha chain variable domain of TCR clone 243103 (TRAV1-2, TRAJ16)
CAVNRFSDGQKLLF

SEQ ID NO: 486206 - protein, 13 aa, Homo sapiens
  CDR3 for beta chain variable domain of TCR clone 243103 (TRBV29-1, TRBJ1-1)
CSVGDSRNTEALF

SEQ ID NO: 486207 - protein, 15 aa, Homo sapiens
  CDR3 for alpha chain variable domain of TCR clone 243104 (TRAV27, TRAJ50)
CAGRAMGTSYDKVIF

SEQ ID NO: 486208 - protein, 16 aa, Homo sapiens
  CDR3 for beta chain variable domain of TCR clone 243104 (TRBV10-3, TRBJ1-5)
CAISDQVGAPNQPQHF

SEQ ID NO: 486209 - protein, 13 aa, Homo sapiens
  CDR3 for alpha chain variable domain of TCR clone 243105 (TRAV8-3, TRAJ43)
CAVVPYNNNDMRF

SEQ ID NO: 486210 - protein, 16 aa, Homo sapiens
  CDR3 for beta chain variable domain of TCR clone 243105 (TRBV7-2, TRBJ2-5)
CASSQFPTGGEETQYF

SEQ ID NO: 486211 - protein, 13 aa, Homo sapiens
  CDR3 for alpha chain variable domain of TCR clone 243106 (TRAV27, TRAJ8)
CAGGPTGFQTLVF

SEQ ID NO: 486212 - protein, 18 aa, Homo sapiens
  CDR3 for beta chain variable domain of TCR clone 243106 (TRBV11-2, TRBJ2-3)
CASSLGGASRGAPNTQYF

SEQ ID NO: 486213 - protein, 15 aa, Homo sapiens
  CDR3 for alpha chain variable domain of TCR clone 243107 (TRAV23/DV6, TRAJ13)
CAAWPGGGGYQKVTF

SEQ ID NO: 486214 - protein, 15 aa, Homo sapiens
  CDR3 for beta chain variable domain of TCR clone 243107 (TRBV19, TRBJ1-1)
CASTSGQIQNTEAFF

SEQ ID NO: 486215 - protein, 11 aa, Homo sapiens
  CDR3 for alpha chain variable domain of TCR clone 243108 (TRAV13-2, TRAJ20)
CADSNEYKLSF

SEQ ID NO: 486216 - protein, 15 aa, Homo sapiens
  CDR3 for beta chain variable domain of TCR clone 243108 (TRBV4-1, TRBJ1-4)
CASSDTGGTNEKLFF

SEQ ID NO: 486217 - protein, 10 aa, Homo sapiens
  CDR3 for alpha chain variable domain of TCR clone 243109 (TRAV25, TRAJ20)
CAVNDYKLSF

SEQ ID NO: 486218 - protein, 18 aa, Homo sapiens
  CDR3 for beta chain variable domain of TCR clone 243109 (TRBV20-1, TRBJ2-6)
CSAETTSTHGSGANVLTF

SEQ ID NO: 486219 - protein, 12 aa, Homo sapiens
  CDR3 for alpha chain variable domain of TCR clone 243110 (TRAV17, TRAJ53)
CATAGSNYKLTF

SEQ ID NO: 486220 - protein, 19 aa, Homo sapiens
  CDR3 for beta chain variable domain of TCR clone 243110 (TRBV5-1, TRBJ2-3)
CASSLWTSGGITTPDTQYF

SEQ ID NO: 486221 - protein, 18 aa, Homo sapiens
  CDR3 for alpha chain variable domain of TCR clone 243111 (TRAV21, TRAJ52)
CAVRPSPAGGISYGKLTF

SEQ ID NO: 486222 - protein, 16 aa, Homo sapiens
  CDR3 for beta chain variable domain of TCR clone 243111 (TRBV19, TRBJ2-1)
CASSKAGPSSYNEQFF

SEQ ID NO: 486223 - protein, 12 aa, Homo sapiens
  CDR3 for alpha chain variable domain of TCR clone 243112 (TRAV20, TRAJ39)
CAVGNAGNMLTF

SEQ ID NO: 486224 - protein, 16 aa, Homo sapiens
  CDR3 for beta chain variable domain of TCR clone 243112 (TRBV15, TRBJ1-2)
CATSRGPRTAGGGYTF

SEQ ID NO: 486225 - protein, 15 aa, Homo sapiens
  CDR3 for alpha chain variable domain of TCR clone 243113 (TRAV1-1, TRAJ5)
CAVRHMDTGRRALTF

SEQ ID NO: 486226 - protein, 16 aa, Homo sapiens
  CDR3 for beta chain variable domain of TCR clone 243113 (TRBV11-2, TRBJ2-1)
CASSLERDGVDNEQFF

SEQ ID NO: 486227 - protein, 13 aa, Homo sapiens
  CDR3 for alpha chain variable domain of TCR clone 243114 (TRAV20, TRAJ37)
CAGCSSNTGKLIF

SEQ ID NO: 486228 - protein, 16 aa, Homo sapiens
  CDR3 for beta chain variable domain of TCR clone 243114 (TRBV13, TRBJ2-2)
CASSPRTGEHTGELFF

SEQ ID NO: 486229 - protein, 14 aa, Homo sapiens
  CDR3 for alpha chain variable domain of TCR clone 243115 (TRAV12-2, TRAJ13)
CAVKKTGGYQTVTF

SEQ ID NO: 486230 - protein, 13 aa, Homo sapiens
  CDR3 for beta chain variable domain of TCR clone 243115 (TRBV7-9, TRBJ1-2)
CASSLKQNYGYTF

SEQ ID NO: 486231 - protein, 16 aa, Homo sapiens
  CDR3 for alpha chain variable domain of TCR clone 243116 (TRAV30, TRAJ24)
CGTEIVDADSWGQFQF

SEQ ID NO: 486232 - protein, 15 aa, Homo sapiens
  CDR3 for beta chain variable domain of TCR clone 243116 (TRBV20-1, TRBJ2-4)
CSARDLTGGPNIQYF

SEQ ID NO: 486233 - protein, 16 aa, Homo sapiens
  CDR3 for alpha chain variable domain of TCR clone 243117 (TRAV26-1, TRAJ37)
CIVRGDGSGNTGKLIF

SEQ ID NO: 486234 - protein, 13 aa, Homo sapiens
  CDR3 for beta chain variable domain of TCR clone 243117 (TRBV27, TRBJ2-7)
CASSLTTGYEQYF

SEQ ID NO: 486235 - protein, 15 aa, Homo sapiens
  CDR3 for alpha chain variable domain of TCR clone 243118 (TRAV38-1, TRAJ37)
CSFIFGSGNTGKLIF

SEQ ID NO: 486236 - protein, 16 aa, Homo sapiens
  CDR3 for beta chain variable domain of TCR clone 243118 (TRBV6-1, TRBJ2-3)
CASSEVIGQGTDTQYF

SEQ ID NO: 486237 - protein, 13 aa, Homo sapiens
  CDR3 for alpha chain variable domain of TCR clone 243119 (TRAV8-3, TRAJ43)
CAVGPDNNNDIRF

SEQ ID NO: 486238 - protein, 14 aa, Homo sapiens
  CDR3 for beta chain variable domain of TCR clone 243119 (TRBV7-2, TRBJ2-7)
CASSPKRSFYEQYF

SEQ ID NO: 486239 - protein, 17 aa, Homo sapiens
  CDR3 for alpha chain variable domain of TCR clone 243120 (TRAV3, TRAJ6)
CAVRDGPRAGGSYIPTF

SEQ ID NO: 486240 - protein, 16 aa, Homo sapiens
  CDR3 for beta chain variable domain of TCR clone 243120 (TRBV5-1, TRBJ1-3)
CASSPWAPSSGNTIYF

SEQ ID NO: 486241 - protein, 15 aa, Homo sapiens
  CDR3 for alpha chain variable domain of TCR clone 243121 (TRAV8-3, TRAJ15)
CAVGAPNQAGTALIF

SEQ ID NO: 486242 - protein, 15 aa, Homo sapiens
  CDR3 for beta chain variable domain of TCR clone 243121 (TRBV20-1, TRBJ2-1)
HLSPNDEASYNEQFF

SEQ ID NO: 486243 - protein, 15 aa, Homo sapiens
  CDR3 for alpha chain variable domain of TCR clone 243122 (TRAV8-2, TRAJ40)
CVVLGTISGTYKYIF

SEQ ID NO: 486244 - protein, 16 aa, Homo sapiens
  CDR3 for beta chain variable domain of TCR clone 243122 (TRBV7-3, TRBJ2-1)
CASSLEGYRSYNEQFF

SEQ ID NO: 486245 - protein, 14 aa, Homo sapiens
  CDR3 for alpha chain variable domain of TCR clone 243123 (TRAV12-1, TRAJ17)
CVVNCKAAGNKLTF

SEQ ID NO: 486246 - protein, 14 aa, Homo sapiens
  CDR3 for beta chain variable domain of TCR clone 243123 (TRBV28, TRBJ2-1)
CASSPATGYNEQFF

SEQ ID NO: 486247 - protein, 13 aa, Homo sapiens
  CDR3 for alpha chain variable domain of TCR clone 243124 (TRAV8-3, TRAJ6)
CAARRGGSYIPTF

SEQ ID NO: 486248 - protein, 22 aa, Homo sapiens
  CDR3 for beta chain variable domain of TCR clone 243124 (TRBV23-1, TRBJ2-7)
CASSRRLDSGQGYVGGGYEQYF

SEQ ID NO: 486249 - protein, 14 aa, Homo sapiens
  CDR3 for alpha chain variable domain of TCR clone 243125 (TRAV3, TRAJ27)
CAVRDDTNAGKSTF

SEQ ID NO: 486250 - protein, 14 aa, Homo sapiens
  CDR3 for beta chain variable domain of TCR clone 243125 (TRBV7-7, TRBJ2-2)
CASSMGQNTGELFF

SEQ ID NO: 486251 - protein, 12 aa, Homo sapiens
  CDR3 for alpha chain variable domain of TCR clone 243126 (TRAV21, TRAJ33)
CAKMDSNYQLIW

SEQ ID NO: 486252 - protein, 11 aa, Homo sapiens
  CDR3 for beta chain variable domain of TCR clone 243126 (TRBV3-1, TRBJ2-7)
CASSQVREQYF

SEQ ID NO: 486253 - protein, 14 aa, Homo sapiens
  CDR3 for alpha chain variable domain of TCR clone 243127 (TRAV1-2, TRAJ8)
CAVREDTGFQKLVF

SEQ ID NO: 486254 - protein, 13 aa, Homo sapiens
  CDR3 for beta chain variable domain of TCR clone 243127 (TRBV12-4, TRBJ1-2)
CAGSSGLTVISTF

SEQ ID NO: 486255 - protein, 14 aa, Homo sapiens
  CDR3 for alpha chain variable domain of TCR clone 243128 (TRAV13-1, TRAJ35)
CAASKGGFGNGLHC

SEQ ID NO: 486256 - protein, 13 aa, Homo sapiens
  CDR3 for beta chain variable domain of TCR clone 243128 (TRBV7-3, TRBJ1-1)
CASSQDWGAEALF

SEQ ID NO: 486257 - protein, 14 aa, Homo sapiens
  CDR3 for alpha chain variable domain of TCR clone 243129 (TRAV12-2, TRAJ13)
CAVKQTGGNQKVTF

SEQ ID NO: 486258 - protein, 15 aa, Homo sapiens
  CDR3 for beta chain variable domain of TCR clone 243129 (TRBV27, TRBJ2-1)
CASSNGGGSSNEQFF

SEQ ID NO: 486259 - protein, 13 aa, Homo sapiens
  CDR3 for alpha chain variable domain of TCR clone 243130 (TRAV12-3, TRAJ33)
FAMSVNRNYQLIW

SEQ ID NO: 486260 - protein, 13 aa, Homo sapiens
  CDR3 for beta chain variable domain of TCR clone 243130 (TRBV7-2, TRBJ2-2)
CASSLAVTGELFF

SEQ ID NO: 486261 - protein, 14 aa, Homo sapiens
  CDR3 for alpha chain variable domain of TCR clone 243131 (TRAV1-2, TRAJ8)
CAVREDPGFQKLVF

SEQ ID NO: 486262 - protein, 12 aa, Homo sapiens
  CDR3 for beta chain variable domain of TCR clone 243131 (TRBV29-1, TRBJ2-3)
CSVTGGADTQYF

SEQ ID NO: 486263 - protein, 13 aa, Homo sapiens
  CDR3 for alpha chain variable domain of TCR clone 243132 (TRAV26-2, TRAJ43)
CILRAVNNNDMRF

SEQ ID NO: 486264 - protein, 15 aa, Homo sapiens
  CDR3 for beta chain variable domain of TCR clone 243132 (TRBV20-1, TRBJ1-1)
CSASRGVTGNTEAFF

SEQ ID NO: 486265 - protein, 18 aa, Homo sapiens
  CDR3 for alpha chain variable domain of TCR clone 243133 (TRAV26-2, TRAJ45)
CILRLWGYSGGGADGLTF

SEQ ID NO: 486266 - protein, 17 aa, Homo sapiens
  CDR3 for beta chain variable domain of TCR clone 243133 (TRBV7-6, TRBJ2-5)
CASSPGLADPWGETQYF

SEQ ID NO: 486267 - protein, 15 aa, Homo sapiens
  CDR3 for alpha chain variable domain of TCR clone 243134 (TRAV41, TRAJ45)
CAASYSGGGADGLNF

SEQ ID NO: 486268 - protein, 14 aa, Homo sapiens
  CDR3 for beta chain variable domain of TCR clone 243134 (TRBV12-5, TRBJ2-5)
CASGSRTHQETQYF

SEQ ID NO: 486269 - protein, 14 aa, Homo sapiens
  CDR3 for alpha chain variable domain of TCR clone 243135 (TRAV12-2, TRAJ13)
CAVKKTGGYQKVTF

SEQ ID NO: 486270 - protein, 14 aa, Homo sapiens
  CDR3 for beta chain variable domain of TCR clone 243135 (TRBV5-1, TRBJ2-7)
CASSRGEALYEQYF

SEQ ID NO: 486271 - protein, 11 aa, Homo sapiens
  CDR3 for alpha chain variable domain of TCR clone 243136 (TRAV3, TRAJ21)
CALGNFNKFYF

SEQ ID NO: 486272 - protein, 17 aa, Homo sapiens
  CDR3 for beta chain variable domain of TCR clone 243136 (TRBV24-1, TRBJ2-1)
CATSDVSTSGTYNEQFF

SEQ ID NO: 486273 - protein, 11 aa, Homo sapiens
  CDR3 for alpha chain variable domain of TCR clone 243137 (TRAV35, TRAJ30)
CAGPGDDKIIF

SEQ ID NO: 486274 - protein, 15 aa, Homo sapiens
  CDR3 for beta chain variable domain of TCR clone 243137 (TRBV7-2, TRBJ1-2)
CASSLVSGGDYGYTF

SEQ ID NO: 486275 - protein, 15 aa, Homo sapiens
  CDR3 for alpha chain variable domain of TCR clone 243138 (TRAV25, TRAJ52)
CAGTSGGTSYGKLTF

SEQ ID NO: 486276 - protein, 15 aa, Homo sapiens
  CDR3 for beta chain variable domain of TCR clone 243138 (TRBV7-3, TRBJ2-2)
CASSETGQGTGELFF

SEQ ID NO: 486277 - protein, 13 aa, Homo sapiens
  CDR3 for alpha chain variable domain of TCR clone 243139 (TRAV20, TRAJ37)
CAGCSSNTGKLIF

SEQ ID NO: 486278 - protein, 14 aa, Homo sapiens
  CDR3 for beta chain variable domain of TCR clone 243139 (TRBV20-1, TRBJ2-5)
CSARDGRAGETQYC

SEQ ID NO: 486279 - protein, 13 aa, Homo sapiens
  CDR3 for alpha chain variable domain of TCR clone 243140 (TRAV8-3, TRAJ37)
CAVGSGNAGKLIF

SEQ ID NO: 486280 - protein, 11 aa, Homo sapiens
  CDR3 for beta chain variable domain of TCR clone 243140 (TRBV29-1, TRBJ1-1)
CSLQQNTEAFF

SEQ ID NO: 486281 - protein, 12 aa, Homo sapiens
  CDR3 for alpha chain variable domain of TCR clone 243141 (TRAV3, TRAJ13)
CAVSGGYQKVTF

SEQ ID NO: 486282 - protein, 14 aa, Homo sapiens
  CDR3 for beta chain variable domain of TCR clone 243141 (TRBV7-2, TRBJ1-1)
CASSFLTGTTEAFF

SEQ ID NO: 486283 - protein, 13 aa, Homo sapiens
  CDR3 for alpha chain variable domain of TCR clone 243142 (TRAV1-2, TRAJ9)
CAVLNTGCFKTIF

SEQ ID NO: 486284 - protein, 15 aa, Homo sapiens
  CDR3 for beta chain variable domain of TCR clone 243142 (TRBV7-3, TRBJ2-1)
CASSPTGGGEVEQFF

SEQ ID NO: 486285 - protein, 15 aa, Homo sapiens
  CDR3 for alpha chain variable domain of TCR clone 243143 (TRAV13-1, TRAJ10)
CAATILTGGGNKLTF

SEQ ID NO: 486286 - protein, 15 aa, Homo sapiens
  CDR3 for beta chain variable domain of TCR clone 243143 (TRBV6-1, TRBJ2-7)
CASSESMGDFYEQYF

SEQ ID NO: 486287 - protein, 13 aa, Homo sapiens
  CDR3 for alpha chain variable domain of TCR clone 243144 (TRAV3, TRAJ17)
CAVPRAAGNKLTF

SEQ ID NO: 486288 - protein, 16 aa, Homo sapiens
  CDR3 for beta chain variable domain of TCR clone 243144 (TRBV13, TRBJ2-2)
CASSPRTGEHTGELFF

SEQ ID NO: 486289 - protein, 16 aa, Homo sapiens
  CDR3 for alpha chain variable domain of TCR clone 243145 (TRAV3, TRAJ10)
CAVRDMRAGGGNKLTF

SEQ ID NO: 486290 - protein, 16 aa, Homo sapiens
  CDR3 for beta chain variable domain of TCR clone 243145 (TRBV19, TRBJ2-6)
CASSMSGLSGANVLTF

SEQ ID NO: 486291 - protein, 16 aa, Homo sapiens
  CDR3 for alpha chain variable domain of TCR clone 243146 (TRAV30, TRAJ24)
CRTEIVDADSWGKFQF

SEQ ID NO: 486292 - protein, 12 aa, Homo sapiens
  CDR3 for beta chain variable domain of TCR clone 243146 (TRBV11-2, TRBJ2-1)
CASSPGNNEQFF

SEQ ID NO: 486293 - protein, 14 aa, Homo sapiens
  CDR3 for alpha chain variable domain of TCR clone 243147 (TRAV1-2, TRAJ16)
CAVNRFSDGQTLLF

SEQ ID NO: 486294 - protein, 16 aa, Homo sapiens
  CDR3 for beta chain variable domain of TCR clone 243147 (TRBV19, TRBJ2-1)
CAISKAGPSSYNEQFF

SEQ ID NO: 486295 - protein, 16 aa, Homo sapiens
  CDR3 for alpha chain variable domain of TCR clone 243148 (TRAV30, TRAJ24)
CGTEIVDADSWGKFQF

SEQ ID NO: 486296 - protein, 15 aa, Homo sapiens
  CDR3 for beta chain variable domain of TCR clone 243148 (TRBV2, TRBJ2-1)
CATLPSGLPYNEQFF

SEQ ID NO: 486297 - protein, 12 aa, Homo sapiens
  CDR3 for alpha chain variable domain of TCR clone 243149 (TRAV13-2, TRAJ8)
CAPWLGFQKLVF

SEQ ID NO: 486298 - protein, 15 aa, Homo sapiens
  CDR3 for beta chain variable domain of TCR clone 243149 (TRBV28, TRBJ2-5)
CASSSGRTIQETQYF

SEQ ID NO: 486299 - protein, 14 aa, Homo sapiens
  CDR3 for alpha chain variable domain of TCR clone 243150 (TRAV12-2, TRAJ12)
CVVTRMDSSYKLIF

SEQ ID NO: 486300 - protein, 14 aa, Homo sapiens
  CDR3 for beta chain variable domain of TCR clone 243150 (TRBV4-1, TRBJ2-7)
CASSPVAGGDEQYF

SEQ ID NO: 486301 - protein, 17 aa, Homo sapiens
  CDR3 for alpha chain variable domain of TCR clone 243151 (TRAV38-1, TRAJ45)
CAFMRSHSGGGADGLTF

SEQ ID NO: 486302 - protein, 14 aa, Homo sapiens
  CDR3 for beta chain variable domain of TCR clone 243151 (TRBV7-2, TRBJ2-7)
CASSPKTSFYEQYF

SEQ ID NO: 486303 - protein, 12 aa, Homo sapiens
  CDR3 for alpha chain variable domain of TCR clone 243152 (TRAV12-3, TRAJ5)
CAMDKGRRALTF

SEQ ID NO: 486304 - protein, 13 aa, Homo sapiens
  CDR3 for beta chain variable domain of TCR clone 243152 (TRBV7-7, TRBJ2-2)
CASSLTSAGELFF

SEQ ID NO: 486305 - protein, 12 aa, Homo sapiens
  CDR3 for alpha chain variable domain of TCR clone 243153 (TRAV12-3, TRAJ17)
CAMTLTGNKQTF

SEQ ID NO: 486306 - protein, 14 aa, Homo sapiens
  CDR3 for beta chain variable domain of TCR clone 243153 (TRBV7-2, TRBJ2-7)
CASSPKTSFYEQYF

SEQ ID NO: 486307 - protein, 15 aa, Homo sapiens
  CDR3 for alpha chain variable domain of TCR clone 243154 (TRAV12-2, TRAJ33)
CAVNIPMDSNYQLIW

SEQ ID NO: 486308 - protein, 15 aa, Homo sapiens
  CDR3 for beta chain variable domain of TCR clone 243154 (TRBV19, TRBJ2-3)
CAAGDTNAPNDTQYF

SEQ ID NO: 486309 - protein, 15 aa, Homo sapiens
  CDR3 for alpha chain variable domain of TCR clone 243155 (TRAV8-3, TRAJ40)
CAAPSLGPGIYKYIF

SEQ ID NO: 486310 - protein, 16 aa, Homo sapiens
  CDR3 for beta chain variable domain of TCR clone 243155 (TRBV7-3, TRBJ2-3)
CASSLSGYRPEDTQYF

SEQ ID NO: 486311 - protein, 17 aa, Homo sapiens
  CDR3 for alpha chain variable domain of TCR clone 243156 (TRAV26-1, TRAJ53)
CIVRVDDSGGRIYKLTF

SEQ ID NO: 486312 - protein, 15 aa, Homo sapiens
  CDR3 for beta chain variable domain of TCR clone 243156 (TRBV20-1, TRBJ2-7)
CSARVPAAYFYEQYF

SEQ ID NO: 486313 - protein, 14 aa, Homo sapiens
  CDR3 for alpha chain variable domain of TCR clone 243157 (TRAV3, TRAJ9)
CAVRPNTGGFKTIF

SEQ ID NO: 486314 - protein, 16 aa, Homo sapiens
  CDR3 for beta chain variable domain of TCR clone 243157 (TRBV7-9, TRBJ1-2)
CASSLGFSSGEDGYTF

SEQ ID NO: 486315 - protein, 15 aa, Homo sapiens
  CDR3 for alpha chain variable domain of TCR clone 243158 (TRAV26-1, TRAJ37)
CIVRVATGNRGKLIF

SEQ ID NO: 486316 - protein, 11 aa, Homo sapiens
  CDR3 for beta chain variable domain of TCR clone 243158 (TRBV12-4, TRBJ2-3)
CASTATDTQYF

SEQ ID NO: 486317 - protein, 15 aa, Homo sapiens
  CDR3 for alpha chain variable domain of TCR clone 243159 (TRAV3, TRAJ47)
CAVRDIGEYGNKLVC

SEQ ID NO: 486318 - protein, 14 aa, Homo sapiens
  CDR3 for beta chain variable domain of TCR clone 243159 (TRBV13, TRBJ2-5)
CASSLERVGGTQYF

SEQ ID NO: 486319 - protein, 21 aa, Homo sapiens
  CDR3 for alpha chain variable domain of TCR clone 243160 (TRAV8-4, TRAJ47)
HLTKPSAHMSDAAERGNKLVF

SEQ ID NO: 486320 - protein, 16 aa, Homo sapiens
  CDR3 for beta chain variable domain of TCR clone 243160 (TRBV28, TRBJ2-2)
CASSLEGGSNTGELFF

SEQ ID NO: 486321 - protein, 15 aa, Homo sapiens
  CDR3 for alpha chain variable domain of TCR clone 243161 (TRAV35, TRAJ40)
CAGQLWGSGTYKYIF

SEQ ID NO: 486322 - protein, 12 aa, Homo sapiens
  CDR3 for beta chain variable domain of TCR clone 243161 (TRBV7-8, TRBJ2-7)
CASSLAGYEQYF

SEQ ID NO: 486323 - protein, 13 aa, Homo sapiens
  CDR3 for alpha chain variable domain of TCR clone 243162 (TRAV38-2/DV8, TRAJ34)
CAYRHYNTDKLIF

SEQ ID NO: 486324 - protein, 16 aa, Homo sapiens
  CDR3 for beta chain variable domain of TCR clone 243162 (TRBV9, TRBJ2-2)
CASSAMGKGNTGELFF

SEQ ID NO: 486325 - protein, 16 aa, Homo sapiens
  CDR3 for alpha chain variable domain of TCR clone 243163 (TRAV1-2, TRAJ10)
CAVRGVLTGRGNKLTF

SEQ ID NO: 486326 - protein, 15 aa, Homo sapiens
  CDR3 for beta chain variable domain of TCR clone 243163 (TRBV29-1, TRBJ2-1)
CSVGRHALFYNEQFF

SEQ ID NO: 486327 - protein, 16 aa, Homo sapiens
  CDR3 for alpha chain variable domain of TCR clone 243164 (TRAV12-3, TRAJ53)
CAMSPGSGGSNYKLTF

SEQ ID NO: 486328 - protein, 16 aa, Homo sapiens
  CDR3 for beta chain variable domain of TCR clone 243164 (TRBV7-9, TRBJ1-2)
CASSLCFSSGEDGYTF

SEQ ID NO: 486329 - protein, 15 aa, Homo sapiens
  CDR3 for alpha chain variable domain of TCR clone 243165 (TRAV4, TRAJ18)
CVLLIGGSTLGRLYF

SEQ ID NO: 486330 - protein, 13 aa, Homo sapiens
  CDR3 for beta chain variable domain of TCR clone 243165 (TRBV20-1, TRBJ1-1)
CSAPLGGGTEAFF

SEQ ID NO: 486331 - protein, 14 aa, Homo sapiens
  CDR3 for alpha chain variable domain of TCR clone 243166 (TRAV38-1, TRAJ27)
CAFIHNTNAGKSTL

SEQ ID NO: 486332 - protein, 12 aa, Homo sapiens
  CDR3 for beta chain variable domain of TCR clone 243166 (TRBV7-8, TRBJ2-7)
CASSLGDREQYF

SEQ ID NO: 486333 - protein, 14 aa, Homo sapiens
  CDR3 for alpha chain variable domain of TCR clone 243167 (TRAV12-2, TRAJ17)
CAALFKAAGNKLTF

SEQ ID NO: 486334 - protein, 16 aa, Homo sapiens
  CDR3 for beta chain variable domain of TCR clone 243167 (TRBV19, TRBJ2-1)
CASSKAGPSSYNEQFF

SEQ ID NO: 486335 - protein, 14 aa, Homo sapiens
  CDR3 for alpha chain variable domain of TCR clone 243168 (TRAV8-3, TRAJ4)
CAVGASGGYNKLSF

SEQ ID NO: 486336 - protein, 16 aa, Homo sapiens
  CDR3 for beta chain variable domain of TCR clone 243168 (TRBV4-3, TRBJ2-2)
CASSHLQGSGTGELFF

SEQ ID NO: 486337 - protein, 12 aa, Homo sapiens
  CDR3 for alpha chain variable domain of TCR clone 243169 (TRAV1-1, TRAJ39)
CAVPVVGNMLTF

SEQ ID NO: 486338 - protein, 17 aa, Homo sapiens
  CDR3 for beta chain variable domain of TCR clone 243169 (TRBV2, TRBJ2-1)
CASILLGGSSSYNEQFF

SEQ ID NO: 486339 - protein, 16 aa, Homo sapiens
  CDR3 for alpha chain variable domain of TCR clone 243170 (TRAV8-3, TRAJ44)
CAVGPLNTGTASKLTF

SEQ ID NO: 486340 - protein, 18 aa, Homo sapiens
  CDR3 for beta chain variable domain of TCR clone 243170 (TRBV3-1, TRBJ2-1)
CASSRDLPGRPLFDEQFF

SEQ ID NO: 486341 - protein, 14 aa, Homo sapiens
  CDR3 for alpha chain variable domain of TCR clone 243171 (TRAV17, TRAJ57)
CATDPQGGTEKLVF

SEQ ID NO: 486342 - protein, 18 aa, Homo sapiens
  CDR3 for beta chain variable domain of TCR clone 243171 (TRBV20-1, TRBJ2-3)
CSASGPAGGPGTTDTQYF

SEQ ID NO: 486343 - protein, 12 aa, Homo sapiens
  CDR3 for alpha chain variable domain of TCR clone 243172 (TRAV26-1, TRAJ36)
CIVRVRADNLFF

SEQ ID NO: 486344 - protein, 16 aa, Homo sapiens
  CDR3 for beta chain variable domain of TCR clone 243172 (TRBV6-6, TRBJ2-3)
CASSYSHAGSTDTQYF

SEQ ID NO: 486345 - protein, 12 aa, Homo sapiens
  CDR3 for alpha chain variable domain of TCR clone 243173 (TRAV12-3, TRAJ17)
CAMTLTGNKITF

SEQ ID NO: 486346 - protein, 16 aa, Homo sapiens
  CDR3 for beta chain variable domain of TCR clone 243173 (TRBV19, TRBJ2-1)
CASSKAGPSSYNEQFF

SEQ ID NO: 486347 - protein, 12 aa, Homo sapiens
  CDR3 for alpha chain variable domain of TCR clone 243174 (TRAV12-3, TRAJ17)
CAMTLTGNKLTF

SEQ ID NO: 486348 - protein, 15 aa, Homo sapiens
  CDR3 for beta chain variable domain of TCR clone 243174 (TRBV19, TRBJ1-6)
CAGSTQGAVGSPLHF

SEQ ID NO: 486349 - protein, 15 aa, Homo sapiens
  CDR3 for alpha chain variable domain of TCR clone 243175 (TRAV35, TRAJ50)
CAGQLRKTSYDKVIF

SEQ ID NO: 486350 - protein, 16 aa, Homo sapiens
  CDR3 for beta chain variable domain of TCR clone 243175 (TRBV7-3, TRBJ2-2)
CASSLKRGTLSGELFF

SEQ ID NO: 486351 - protein, 16 aa, Homo sapiens
  CDR3 for alpha chain variable domain of TCR clone 243176 (TRAV16, TRAJ52)
CALSAAGGTSYGKLAF

SEQ ID NO: 486352 - protein, 12 aa, Homo sapiens
  CDR3 for beta chain variable domain of TCR clone 243176 (TRBV12-4, TRBJ1-3)
CASSFSGNTIYF

SEQ ID NO: 486353 - protein, 14 aa, Homo sapiens
  CDR3 for alpha chain variable domain of TCR clone 243177 (TRAV1-2, TRAJ16)
CAVNRFSDGQKLLF

SEQ ID NO: 486354 - protein, 17 aa, Homo sapiens
  CDR3 for beta chain variable domain of TCR clone 243177 (TRBV4-3, TRBJ2-3)
CASSQDPLAGAVDTQYF

SEQ ID NO: 486355 - protein, 15 aa, Homo sapiens
  CDR3 for alpha chain variable domain of TCR clone 243178 (TRAV8-3, TRAJ6)
CAVGPLGGGSYIPTF

SEQ ID NO: 486356 - protein, 16 aa, Homo sapiens
  CDR3 for beta chain variable domain of TCR clone 243178 (TRBV18, TRBJ2-4)
CASSPPYSGAKNIQYF

SEQ ID NO: 486357 - protein, 14 aa, Homo sapiens
  CDR3 for alpha chain variable domain of TCR clone 243179 (TRAV38-2/DV8, TRAJ23)
CAYRSQNQGGKLIF

SEQ ID NO: 486358 - protein, 13 aa, Homo sapiens
  CDR3 for beta chain variable domain of TCR clone 243179 (TRBV24-1, TRBJ2-1)
CVTSAGPYNEQFF

SEQ ID NO: 486359 - protein, 13 aa, Homo sapiens
  CDR3 for alpha chain variable domain of TCR clone 243180 (TRAV16, TRAJ34)
CDLTGYNTYKLIF

SEQ ID NO: 486360 - protein, 13 aa, Homo sapiens
  CDR3 for beta chain variable domain of TCR clone 243180 (TRBV6-1, TRBJ2-1)
CASREDGGHEQFF

SEQ ID NO: 486361 - protein, 13 aa, Homo sapiens
  CDR3 for alpha chain variable domain of TCR clone 243181 (TRAV16, TRAJ10)
CALLTGGGNKLAF

SEQ ID NO: 486362 - protein, 12 aa, Homo sapiens
  CDR3 for beta chain variable domain of TCR clone 243181 (TRBV28, TRBJ2-7)
CASTGNHYEQYF

SEQ ID NO: 486363 - protein, 16 aa, Homo sapiens
  CDR3 for alpha chain variable domain of TCR clone 243182 (TRAV30, TRAJ24)
CGTEIVDADSWGKFQF

SEQ ID NO: 486364 - protein, 14 aa, Homo sapiens
  CDR3 for beta chain variable domain of TCR clone 243182 (TRBV13, TRBJ2-1)
CASSPRPRYNEQLF

SEQ ID NO: 486365 - protein, 13 aa, Homo sapiens
  CDR3 for alpha chain variable domain of TCR clone 243183 (TRAV12-3, TRAJ46)
CAVEKSSGDKLTF

SEQ ID NO: 486366 - protein, 13 aa, Homo sapiens
  CDR3 for beta chain variable domain of TCR clone 243183 (TRBV6-1, TRBJ2-1)
CASSHDRNNEQFF

SEQ ID NO: 486367 - protein, 16 aa, Homo sapiens
  CDR3 for alpha chain variable domain of TCR clone 243184 (TRAV12-2, TRAJ18)
CAVTTNRGSTLGRLYF

SEQ ID NO: 486368 - protein, 14 aa, Homo sapiens
  CDR3 for beta chain variable domain of TCR clone 243184 (TRBV4-2, TRBJ1-5)
CASSQDSINQPQHF

SEQ ID NO: 486369 - protein, 11 aa, Homo sapiens
  CDR3 for alpha chain variable domain of TCR clone 243185 (TRAV17, TRAJ31)
CATSNNARLMF

SEQ ID NO: 486370 - protein, 14 aa, Homo sapiens
  CDR3 for beta chain variable domain of TCR clone 243185 (TRBV18, TRBJ2-7)
CASSPRGGAYEQYV

SEQ ID NO: 486371 - protein, 13 aa, Homo sapiens
  CDR3 for alpha chain variable domain of TCR clone 243186 (TRAV13-1, TRAJ5)
CAEGVTCRRALTF

SEQ ID NO: 486372 - protein, 15 aa, Homo sapiens
  CDR3 for beta chain variable domain of TCR clone 243186 (TRBV7-9, TRBJ2-7)
CASSPGGGLTYEQYF

SEQ ID NO: 486373 - protein, 13 aa, Homo sapiens
  CDR3 for alpha chain variable domain of TCR clone 243187 (TRAV29/DV5, TRAJ29)
CAASAAGNTPLFF

SEQ ID NO: 486374 - protein, 15 aa, Homo sapiens
  CDR3 for beta chain variable domain of TCR clone 243187 (TRBV28, TRBJ2-1)
CASSIIAGGRSEQFF

SEQ ID NO: 486375 - protein, 17 aa, Homo sapiens
  CDR3 for alpha chain variable domain of TCR clone 243188 (TRAV3, TRAJ42)
CAVRDRDYGGSQGNLIF

SEQ ID NO: 486376 - protein, 13 aa, Homo sapiens
  CDR3 for beta chain variable domain of TCR clone 243188 (TRBV9, TRBJ2-1)
CASSPSGGNEQFF

SEQ ID NO: 486377 - protein, 15 aa, Homo sapiens
  CDR3 for alpha chain variable domain of TCR clone 243189 (TRAV12-2, TRAJ43)
CAFDMGFGVGTRLTV

SEQ ID NO: 486378 - protein, 18 aa, Homo sapiens
  CDR3 for beta chain variable domain of TCR clone 243189 (TRBV20-1, TRBJ2-3)
CSASGLAGGPGTTDTQYF

SEQ ID NO: 486379 - protein, 14 aa, Homo sapiens
  CDR3 for alpha chain variable domain of TCR clone 243190 (TRAV2, TRAJ37)
CAVDFTSNTGKLIF

SEQ ID NO: 486380 - protein, 16 aa, Homo sapiens
  CDR3 for beta chain variable domain of TCR clone 243190 (TRBV4-2, TRBJ2-3)
CASSQELAGDTDTQYF

SEQ ID NO: 486381 - protein, 16 aa, Homo sapiens
  CDR3 for alpha chain variable domain of TCR clone 243191 (TRAV30, TRAJ24)
CGTEIVDADSWGKFQF

SEQ ID NO: 486382 - protein, 15 aa, Homo sapiens
  CDR3 for beta chain variable domain of TCR clone 243191 (TRBV5-1, TRBJ1-1)
CASSLGEGENTEAFF

SEQ ID NO: 486383 - protein, 13 aa, Homo sapiens
  CDR3 for alpha chain variable domain of TCR clone 243192 (TRAV13-2, TRAJ13)
CAERPGRYQKVTF

SEQ ID NO: 486384 - protein, 19 aa, Homo sapiens
  CDR3 for beta chain variable domain of TCR clone 243192 (TRBV4-1, TRBJ2-1)
CASSQGPLPGLGSRNEQFF

SEQ ID NO: 486385 - protein, 13 aa, Homo sapiens
  CDR3 for alpha chain variable domain of TCR clone 243193 (TRAV17, TRAJ7)
CATDLYGNNRLAF

SEQ ID NO: 486386 - protein, 15 aa, Homo sapiens
  CDR3 for beta chain variable domain of TCR clone 243193 (TRBV6-1, TRBJ2-5)
CASSEGWGIQETQYF

SEQ ID NO: 486387 - protein, 16 aa, Homo sapiens
  CDR3 for alpha chain variable domain of TCR clone 243194 (TRAV30, TRAJ24)
CGTEIMDADSWGKFQF

SEQ ID NO: 486388 - protein, 14 aa, Homo sapiens
  CDR3 for beta chain variable domain of TCR clone 243194 (TRBV12-5, TRBJ2-5)
CASGSRTHQGTQYF

SEQ ID NO: 486389 - protein, 13 aa, Homo sapiens
  CDR3 for alpha chain variable domain of TCR clone 243195 (TRAV3, TRAJ15)
CAVRDQAGTSLIF

SEQ ID NO: 486390 - protein, 15 aa, Homo sapiens
  CDR3 for beta chain variable domain of TCR clone 243195 (TRBV11-1, TRBJ2-7)
CASSLDYGASYEQYF

SEQ ID NO: 486391 - protein, 13 aa, Homo sapiens
  CDR3 for alpha chain variable domain of TCR clone 243196 (TRAV14/DV4, TRAJ4)
CAMKAGGYNKLIF

SEQ ID NO: 486392 - protein, 15 aa, Homo sapiens
  CDR3 for beta chain variable domain of TCR clone 243196 (TRBV11-3, TRBJ1-1)
CVSSLGGPGDTEAFF

SEQ ID NO: 486393 - protein, 13 aa, Homo sapiens
  CDR3 for alpha chain variable domain of TCR clone 243197 (TRAV36/DV7, TRAJ53)
CALSGGSNYKLTF

SEQ ID NO: 486394 - protein, 15 aa, Homo sapiens
  CDR3 for beta chain variable domain of TCR clone 243197 (TRBV2, TRBJ2-7)
CASSEGLARSYEQYF

SEQ ID NO: 486395 - protein, 10 aa, Homo sapiens
  CDR3 for alpha chain variable domain of TCR clone 243198 (TRAV23/DV6, TRAJ57)
CAASSTLSQG

SEQ ID NO: 486396 - protein, 14 aa, Homo sapiens
  CDR3 for beta chain variable domain of TCR clone 243198 (TRBV25-1, TRBJ1-1)
CASTHVGGNTEAFF

SEQ ID NO: 486397 - protein, 12 aa, Homo sapiens
  CDR3 for alpha chain variable domain of TCR clone 243199 (TRAV8-3, TRAJ26)
CAGDNYGQNLFF

SEQ ID NO: 486398 - protein, 11 aa, Homo sapiens
  CDR3 for beta chain variable domain of TCR clone 243199 (TRBV10-3, TRBJ2-7)
CAISEGLEQYF

SEQ ID NO: 486399 - protein, 15 aa, Homo sapiens
  CDR3 for alpha chain variable domain of TCR clone 243200 (TRAV26-1, TRAJ28)
CIVRVAGAGSYQLTF

SEQ ID NO: 486400 - protein, 19 aa, Homo sapiens
  CDR3 for beta chain variable domain of TCR clone 243200 (TRBV7-3, TRBJ2-7)
CASSLTGVAGGWPSYEQNF

SEQ ID NO: 486401 - protein, 15 aa, Homo sapiens
  CDR3 for alpha chain variable domain of TCR clone 243201 (TRAV35, TRAJ58)
CAGRRQEASGSRLTF

SEQ ID NO: 486402 - protein, 15 aa, Homo sapiens
  CDR3 for beta chain variable domain of TCR clone 243201 (TRBV2, TRBJ2-1)
CRSVGGSLSYNEQFF

SEQ ID NO: 486403 - protein, 13 aa, Homo sapiens
  CDR3 for alpha chain variable domain of TCR clone 243202 (TRAV8-3, TRAJ31)
CAVGARNNASLMF

SEQ ID NO: 486404 - protein, 14 aa, Homo sapiens
  CDR3 for beta chain variable domain of TCR clone 243202 (TRBV12-5, TRBJ2-5)
CASGSRTHQETQYF

SEQ ID NO: 486405 - protein, 14 aa, Homo sapiens
  CDR3 for alpha chain variable domain of TCR clone 243203 (TRAV17, TRAJ15)
CATAPNQAGTALIF

SEQ ID NO: 486406 - protein, 14 aa, Homo sapiens
  CDR3 for beta chain variable domain of TCR clone 243203 (TRBV19, TRBJ2-7)
CASSMVQGAIEQYF

SEQ ID NO: 486407 - protein, 16 aa, Homo sapiens
  CDR3 for alpha chain variable domain of TCR clone 243204 (TRAV3, TRAJ21)
CAVRDIERGNFNNFYF

SEQ ID NO: 486408 - protein, 13 aa, Homo sapiens
  CDR3 for beta chain variable domain of TCR clone 243204 (TRBV4-2, TRBJ1-1)
CASSQAGNTEAFF

SEQ ID NO: 486409 - protein, 11 aa, Homo sapiens
  CDR3 for alpha chain variable domain of TCR clone 243205 (TRAV13-1, TRAJ39)
CASHAGNMLTF

SEQ ID NO: 486410 - protein, 13 aa, Homo sapiens
  CDR3 for beta chain variable domain of TCR clone 243205 (TRBV7-9, TRBJ1-2)
CASGLKQNYGYTF

SEQ ID NO: 486411 - protein, 15 aa, Homo sapiens
  CDR3 for alpha chain variable domain of TCR clone 243206 (TRAV14/DV4, TRAJ33)
CAMREGRDSNYQLIW

SEQ ID NO: 486412 - protein, 12 aa, Homo sapiens
  CDR3 for beta chain variable domain of TCR clone 243206 (TRBV5-4, TRBJ2-5)
CASNSTRETQYF

SEQ ID NO: 486413 - protein, 14 aa, Homo sapiens
  CDR3 for alpha chain variable domain of TCR clone 243207 (TRAV17, TRAJ37)
CATDGSSNTGKLIL

SEQ ID NO: 486414 - protein, 13 aa, Homo sapiens
  CDR3 for beta chain variable domain of TCR clone 243207 (TRBV11-2, TRBJ2-1)
CASSLDLVNEQFF

SEQ ID NO: 486415 - protein, 13 aa, Homo sapiens
  CDR3 for alpha chain variable domain of TCR clone 243208 (TRAV13-1, TRAJ6)
CAASSGGSYIPTF

SEQ ID NO: 486416 - protein, 11 aa, Homo sapiens
  CDR3 for beta chain variable domain of TCR clone 243208 (TRBV29-1, TRBJ2-5)
CSEDRTGTQYF

SEQ ID NO: 486417 - protein, 11 aa, Homo sapiens
  CDR3 for alpha chain variable domain of TCR clone 243209 (TRAV8-4, TRAJ20)
CALTNVLTTTS

SEQ ID NO: 486418 - protein, 16 aa, Homo sapiens
  CDR3 for beta chain variable domain of TCR clone 243209 (TRBV6-1, TRBJ1-2)
CASSGAWQGRSHGYTF

SEQ ID NO: 486419 - protein, 15 aa, Homo sapiens
  CDR3 for alpha chain variable domain of TCR clone 243210 (TRAV21, TRAJ36)
CAVRRKQTGANNLFF

SEQ ID NO: 486420 - protein, 16 aa, Homo sapiens
  CDR3 for beta chain variable domain of TCR clone 243210 (TRBV20-1, TRBJ1-4)
CSARPYGGELNEKLFF

SEQ ID NO: 486421 - protein, 13 aa, Homo sapiens
  CDR3 for alpha chain variable domain of TCR clone 243211 (TRAV13-1, TRAJ5)
CAASETGRRHLTF

SEQ ID NO: 486422 - protein, 12 aa, Homo sapiens
  CDR3 for beta chain variable domain of TCR clone 243211 (TRBV28, TRBJ2-3)
CASSLYRDTQYF

SEQ ID NO: 486423 - protein, 12 aa, Homo sapiens
  CDR3 for alpha chain variable domain of TCR clone 243212 (TRAV12-2, TRAJ21)
CAPSDNFNKFYF

SEQ ID NO: 486424 - protein, 20 aa, Homo sapiens
  CDR3 for beta chain variable domain of TCR clone 243212 (TRBV28, TRBJ2-1)
CASTPIGRSPGLAGGNEQFF

SEQ ID NO: 486425 - protein, 15 aa, Homo sapiens
  CDR3 for alpha chain variable domain of TCR clone 243213 (TRAV17, TRAJ29)
TSMLRTHSGNTPLVF

SEQ ID NO: 486426 - protein, 13 aa, Homo sapiens
  CDR3 for beta chain variable domain of TCR clone 243213 (TRBV5-7, TRBJ2-6)
CASTSSGANVLTF

SEQ ID NO: 486427 - protein, 12 aa, Homo sapiens
  CDR3 for alpha chain variable domain of TCR clone 243214 (TRAV16, TRAJ10)
CSRTGGGNKLTF

SEQ ID NO: 486428 - protein, 16 aa, Homo sapiens
  CDR3 for beta chain variable domain of TCR clone 243214 (TRBV7-3, TRBJ2-2)
CASSLKRGTLSGELFV

SEQ ID NO: 486429 - protein, 14 aa, Homo sapiens
  CDR3 for alpha chain variable domain of TCR clone 243215 (TRAV3, TRAJ9)
CAVRGNTGGFKPIF

SEQ ID NO: 486430 - protein, 14 aa, Homo sapiens
  CDR3 for beta chain variable domain of TCR clone 243215 (TRBV15, TRBJ2-1)
CATSGVEDYNEQFF

SEQ ID NO: 486431 - protein, 13 aa, Homo sapiens
  CDR3 for alpha chain variable domain of TCR clone 243216 (TRAV25, TRAJ30)
CAGRVDRDDKIIF

SEQ ID NO: 486432 - protein, 17 aa, Homo sapiens
  CDR3 for beta chain variable domain of TCR clone 243216 (TRBV7-9, TRBJ2-6)
CASRFGAGYSGANVLTF

SEQ ID NO: 486433 - protein, 12 aa, Homo sapiens
  CDR3 for alpha chain variable domain of TCR clone 243217 (TRAV12-3, TRAJ17)
CALTLTGNKLTF

SEQ ID NO: 486434 - protein, 14 aa, Homo sapiens
  CDR3 for beta chain variable domain of TCR clone 243217 (TRBV20-1, TRBJ2-1)
CSAQIGGSANEQFF

SEQ ID NO: 486435 - protein, 12 aa, Homo sapiens
  CDR3 for alpha chain variable domain of TCR clone 243218 (TRAV27, TRAJ9)
CAGESGGFKTIF

SEQ ID NO: 486436 - protein, 16 aa, Homo sapiens
  CDR3 for beta chain variable domain of TCR clone 243218 (TRBV4-2, TRBJ1-2)
CASSQEIGGASYGYTF

SEQ ID NO: 486437 - protein, 11 aa, Homo sapiens
  CDR3 for alpha chain variable domain of TCR clone 243219 (TRAV2, TRAJ13)
CASGGYQKVTF

SEQ ID NO: 486438 - protein, 16 aa, Homo sapiens
  CDR3 for beta chain variable domain of TCR clone 243219 (TRBV7-2, TRBJ2-7)
CASSLDPGGGSGEQYF

SEQ ID NO: 486439 - protein, 16 aa, Homo sapiens
  CDR3 for alpha chain variable domain of TCR clone 243220 (TRAV3, TRAJ18)
CAVRDGRGPTLWRLYF

SEQ ID NO: 486440 - protein, 15 aa, Homo sapiens
  CDR3 for beta chain variable domain of TCR clone 243220 (TRBV7-9, TRBJ1-6)
CASSSPGRGNSPLHF

SEQ ID NO: 486441 - protein, 12 aa, Homo sapiens
  CDR3 for alpha chain variable domain of TCR clone 243221 (TRAV29/DV5, TRAJ15)
CASNEAGTALIF

SEQ ID NO: 486442 - protein, 15 aa, Homo sapiens
  CDR3 for beta chain variable domain of TCR clone 243221 (TRBV11-2, TRBJ2-2)
CASSSDRVNAGELFF

SEQ ID NO: 486443 - protein, 15 aa, Homo sapiens
  CDR3 for alpha chain variable domain of TCR clone 243222 (TRAV8-2, TRAJ40)
CVVLGTTSGTYKYIF

SEQ ID NO: 486444 - protein, 15 aa, Homo sapiens
  CDR3 for beta chain variable domain of TCR clone 243222 (TRBV11-2, TRBJ2-3)
CASGPGGGATDTQYF

SEQ ID NO: 486445 - protein, 14 aa, Homo sapiens
  CDR3 for alpha chain variable domain of TCR clone 243223 (TRAV12-2, TRAJ17)
CAANIKAAGNKLTF

SEQ ID NO: 486446 - protein, 13 aa, Homo sapiens
  CDR3 for beta chain variable domain of TCR clone 243223 (TRBV7-8, TRBJ2-7)
CASSLTGGSEQYF

SEQ ID NO: 486447 - protein, 14 aa, Homo sapiens
  CDR3 for alpha chain variable domain of TCR clone 243224 (TRAV38-2/DV8, TRAJ30)
CAYRRADRDDKIIF

SEQ ID NO: 486448 - protein, 16 aa, Homo sapiens
  CDR3 for beta chain variable domain of TCR clone 243224 (TRBV15, TRBJ1-3)
CATSSPIGFSGNTIYF

SEQ ID NO: 486449 - protein, 13 aa, Homo sapiens
  CDR3 for alpha chain variable domain of TCR clone 243225 (TRAV27, TRAJ45)
CRSSVGGADGLTF

SEQ ID NO: 486450 - protein, 17 aa, Homo sapiens
  CDR3 for beta chain variable domain of TCR clone 243225 (TRBV11-2, TRBJ2-1)
CASSLYPPGVEYNEQFV

SEQ ID NO: 486451 - protein, 14 aa, Homo sapiens
  CDR3 for alpha chain variable domain of TCR clone 243226 (TRAV12-2, TRAJ13)
CAVKKTGGYQKVTF

SEQ ID NO: 486452 - protein, 14 aa, Homo sapiens
  CDR3 for beta chain variable domain of TCR clone 243226 (TRBV2, TRBJ1-2)
CASSADRGLRGYTF

SEQ ID NO: 486453 - protein, 19 aa, Homo sapiens
  CDR3 for alpha chain variable domain of TCR clone 243227 (TRAV21, TRAJ52)
CAVKWPLGAGGTSYGKLTF

SEQ ID NO: 486454 - protein, 12 aa, Homo sapiens
  CDR3 for beta chain variable domain of TCR clone 243227 (TRBV12-4, TRBJ2-1)
CASSPGRNEQFF

SEQ ID NO: 486455 - protein, 12 aa, Homo sapiens
  CDR3 for alpha chain variable domain of TCR clone 243228 (TRAV1-1, TRAJ39)
CAVPVVGNMLTF

SEQ ID NO: 486456 - protein, 14 aa, Homo sapiens
  CDR3 for beta chain variable domain of TCR clone 243228 (TRBV18, TRBJ2-1)
CASSPQGRFNEQFF

SEQ ID NO: 486457 - protein, 18 aa, Homo sapiens
  CDR3 for alpha chain variable domain of TCR clone 243229 (TRAV21, TRAJ52)
CAVRPSPAGGTSYGKLKF

SEQ ID NO: 486458 - protein, 13 aa, Homo sapiens
  CDR3 for beta chain variable domain of TCR clone 243229 (TRBV7-3, TRBJ1-1)
CASSQDWVAEAFF

SEQ ID NO: 486459 - protein, 14 aa, Homo sapiens
  CDR3 for alpha chain variable domain of TCR clone 243230 (TRAV1-2, TRAJ8)
CAVREDTGCQKLVF

SEQ ID NO: 486460 - protein, 11 aa, Homo sapiens
  CDR3 for beta chain variable domain of TCR clone 243230 (TRBV11-3, TRBJ2-7)
CASSRTYEQCF

SEQ ID NO: 486461 - protein, 15 aa, Homo sapiens
  CDR3 for alpha chain variable domain of TCR clone 243231 (TRAV27, TRAJ38)
CSARRNAGNNRKLIW

SEQ ID NO: 486462 - protein, 13 aa, Homo sapiens
  CDR3 for beta chain variable domain of TCR clone 243231 (TRBV12-5, TRBJ2-3)
CASGDRRSDTQYF

SEQ ID NO: 486463 - protein, 13 aa, Homo sapiens
  CDR3 for alpha chain variable domain of TCR clone 243232 (TRAV12-2, TRAJ39)
CPVNNNEGNMLTF

SEQ ID NO: 486464 - protein, 13 aa, Homo sapiens
  CDR3 for beta chain variable domain of TCR clone 243232 (TRBV2, TRBJ1-5)
CATAGPGNQPQHF

SEQ ID NO: 486465 - protein, 14 aa, Homo sapiens
  CDR3 for alpha chain variable domain of TCR clone 243233 (TRAV29/DV5, TRAJ45)
CAASFRGGADGLTF

SEQ ID NO: 486466 - protein, 13 aa, Homo sapiens
  CDR3 for beta chain variable domain of TCR clone 243233 (TRBV7-3, TRBJ1-1)
CASSQDWGAEAFF

SEQ ID NO: 486467 - protein, 13 aa, Homo sapiens
  CDR3 for alpha chain variable domain of TCR clone 243234 (TRAV26-2, TRAJ43)
CILRAVNNNDMRF

SEQ ID NO: 486468 - protein, 13 aa, Homo sapiens
  CDR3 for beta chain variable domain of TCR clone 243234 (TRBV10-2, TRBJ2-7)
CASGASGGYEQYF

SEQ ID NO: 486469 - protein, 14 aa, Homo sapiens
  CDR3 for alpha chain variable domain of TCR clone 243235 (TRAV8-2, TRAJ44)
CVVSLTGTASKLTF

SEQ ID NO: 486470 - protein, 14 aa, Homo sapiens
  CDR3 for beta chain variable domain of TCR clone 243235 (TRBV12-4, TRBJ1-1)
CASSLGTGGTEAFF

SEQ ID NO: 486471 - protein, 17 aa, Homo sapiens
  CDR3 for alpha chain variable domain of TCR clone 243236 (TRAV21, TRAJ52)
CAVGVNAGGTSYGKLTF

SEQ ID NO: 486472 - protein, 19 aa, Homo sapiens
  CDR3 for beta chain variable domain of TCR clone 243236 (TRBV2, TRBJ2-7)
CASSDDETSGRANDYEQYF

SEQ ID NO: 486473 - protein, 13 aa, Homo sapiens
  CDR3 for alpha chain variable domain of TCR clone 243237 (TRAV12-3, TRAJ33)
CAMSVNSNYQLIW

SEQ ID NO: 486474 - protein, 13 aa, Homo sapiens
  CDR3 for beta chain variable domain of TCR clone 243237 (TRBV7-2, TRBJ1-2)
CASSLKQNYGYTF

SEQ ID NO: 486475 - protein, 10 aa, Homo sapiens
  CDR3 for alpha chain variable domain of TCR clone 243238 (TRAV5, TRAJ34)
CAEDTDKLIF

SEQ ID NO: 486476 - protein, 17 aa, Homo sapiens
  CDR3 for beta chain variable domain of TCR clone 243238 (TRBV7-9, TRBJ2-6)
CASSFGAGYSGANVLTF

SEQ ID NO: 486477 - protein, 12 aa, Homo sapiens
  CDR3 for alpha chain variable domain of TCR clone 243239 (TRAV1-1, TRAJ39)
CAVPVVGNMLTF

SEQ ID NO: 486478 - protein, 13 aa, Homo sapiens
  CDR3 for beta chain variable domain of TCR clone 243239 (TRBV11-3, TRBJ2-7)
CASSLDKLYEQYF

SEQ ID NO: 486479 - protein, 15 aa, Homo sapiens
  CDR3 for alpha chain variable domain of TCR clone 243240 (TRAV38-2/DV8, TRAJ26)
CAYRSRDNYGQSFVF

SEQ ID NO: 486480 - protein, 14 aa, Homo sapiens
  CDR3 for beta chain variable domain of TCR clone 243240 (TRBV29-1, TRBJ1-3)
CSVADRVVGNTIYF

SEQ ID NO: 486481 - protein, 14 aa, Homo sapiens
  CDR3 for alpha chain variable domain of TCR clone 243241 (TRAV1-2, TRAJ8)
CAVREDTGFQKLVF

SEQ ID NO: 486482 - protein, 16 aa, Homo sapiens
  CDR3 for beta chain variable domain of TCR clone 243241 (TRBV20-1, TRBJ2-1)
CSASDLKQGMNNEQFF

SEQ ID NO: 486483 - protein, 13 aa, Homo sapiens
  CDR3 for alpha chain variable domain of TCR clone 243242 (TRAV21, TRAJ32)
CAVSGGATNKLIF

SEQ ID NO: 486484 - protein, 18 aa, Homo sapiens
  CDR3 for beta chain variable domain of TCR clone 243242 (TRBV23-1, TRBJ2-1)
TVSLRPQSMAPAHNEQFF

SEQ ID NO: 486485 - protein, 18 aa, Homo sapiens
  CDR3 for alpha chain variable domain of TCR clone 243243 (TRAV26-1, TRAJ23)
CIVRVGLEGWNQGGKLIF

SEQ ID NO: 486486 - protein, 16 aa, Homo sapiens
  CDR3 for beta chain variable domain of TCR clone 243243 (TRBV12-4, TRBJ2-5)
CASSFFVRGRQETQYF

SEQ ID NO: 486487 - protein, 17 aa, Homo sapiens
  CDR3 for alpha chain variable domain of TCR clone 243244 (TRAV8-6, TRAJ58)
CAVSSWVGETSGSRLTF

SEQ ID NO: 486488 - protein, 12 aa, Homo sapiens
  CDR3 for beta chain variable domain of TCR clone 243244 (TRBV27, TRBJ2-5)
CASSLKGETQYF

SEQ ID NO: 486489 - protein, 14 aa, Homo sapiens
  CDR3 for alpha chain variable domain of TCR clone 243245 (TRAV8-2, TRAJ23)
CVVSDDNQGGKLIF

SEQ ID NO: 486490 - protein, 13 aa, Homo sapiens
  CDR3 for beta chain variable domain of TCR clone 243245 (TRBV7-7, TRBJ2-2)
CASSITSAGELFF

SEQ ID NO: 486491 - protein, 17 aa, Homo sapiens
  CDR3 for alpha chain variable domain of TCR clone 243246 (TRAV26-2, TRAJ42)
CILRDVGYGGSQGNLIF

SEQ ID NO: 486492 - protein, 16 aa, Homo sapiens
  CDR3 for beta chain variable domain of TCR clone 243246 (TRBV12-4, TRBJ2-7)
CASSLIGGTRTYEQYF

SEQ ID NO: 486493 - protein, 13 aa, Homo sapiens
  CDR3 for alpha chain variable domain of TCR clone 243247 (TRAV12-2, TRAJ24)
CAVSTDSWGRLQF

SEQ ID NO: 486494 - protein, 12 aa, Homo sapiens
  CDR3 for beta chain variable domain of TCR clone 243247 (TRBV7-6, TRBJ2-7)
CASSLADSEQYF

SEQ ID NO: 486495 - protein, 13 aa, Homo sapiens
  CDR3 for alpha chain variable domain of TCR clone 243248 (TRAV8-3, TRAJ15)
CAVGIQAGTALLF

SEQ ID NO: 486496 - protein, 17 aa, Homo sapiens
  CDR3 for beta chain variable domain of TCR clone 243248 (TRBV20-1, TRBJ2-1)
CSARDPLAGVSYNEQFF

SEQ ID NO: 486497 - protein, 14 aa, Homo sapiens
  CDR3 for alpha chain variable domain of TCR clone 243249 (TRAV17, TRAJ15)
CATTTNQAGTALIF

SEQ ID NO: 486498 - protein, 16 aa, Homo sapiens
  CDR3 for beta chain variable domain of TCR clone 243249 (TRBV4-1, TRBJ2-7)
CASSRGDSLNSYEQYF

SEQ ID NO: 486499 - protein, 16 aa, Homo sapiens
  CDR3 for alpha chain variable domain of TCR clone 243250 (TRAV30, TRAJ24)
CGTEIVDADSWGKFQF

SEQ ID NO: 486500 - protein, 17 aa, Homo sapiens
  CDR3 for beta chain variable domain of TCR clone 243250 (TRBV20-1, TRBJ2-3)
CSARDGWNAKERDTQYF

SEQ ID NO: 486501 - protein, 15 aa, Homo sapiens
  CDR3 for alpha chain variable domain of TCR clone 243251 (TRAV26-2, TRAJ57)
CILRDIRGGSEKLVL

SEQ ID NO: 486502 - protein, 11 aa, Homo sapiens
  CDR3 for beta chain variable domain of TCR clone 243251 (TRBV3-1, TRBJ2-7)
CASTSLGEQYF

SEQ ID NO: 486503 - protein, 17 aa, Homo sapiens
  CDR3 for alpha chain variable domain of TCR clone 243252 (TRAV3, TRAJ6)
CAVRDGPRAGGSYIPTF

SEQ ID NO: 486504 - protein, 15 aa, Homo sapiens
  CDR3 for beta chain variable domain of TCR clone 243252 (TRBV4-2, TRBJ1-1)
CASSQAGNTEAFLDK

SEQ ID NO: 486505 - protein, 10 aa, Homo sapiens
  CDR3 for alpha chain variable domain of TCR clone 243253 (TRAV30, TRAJ48)
CGIGNEKLTF

SEQ ID NO: 486506 - protein, 14 aa, Homo sapiens
  CDR3 for beta chain variable domain of TCR clone 243253 (TRBV7-7, TRBJ2-2)
CATRQDSDTGELFF

SEQ ID NO: 486507 - protein, 13 aa, Homo sapiens
  CDR3 for alpha chain variable domain of TCR clone 243254 (TRAV27, TRAJ40)
CAGPPSGTYKYIF

SEQ ID NO: 486508 - protein, 17 aa, Homo sapiens
  CDR3 for beta chain variable domain of TCR clone 243254 (TRBV7-8, TRBJ2-6)
CASSAGTGGAGANVLTF

SEQ ID NO: 486509 - protein, 14 aa, Homo sapiens
  CDR3 for alpha chain variable domain of TCR clone 243255 (TRAV13-1, TRAJ15)
CAASKTQAGTALIF

SEQ ID NO: 486510 - protein, 14 aa, Homo sapiens
  CDR3 for beta chain variable domain of TCR clone 243255 (TRBV2, TRBJ2-1)
CASSDRAYYNEQFF

SEQ ID NO: 486511 - protein, 12 aa, Homo sapiens
  CDR3 for alpha chain variable domain of TCR clone 243256 (TRAV12-3, TRAJ17)
CAMTLTGNKLTF

SEQ ID NO: 486512 - protein, 15 aa, Homo sapiens
  CDR3 for beta chain variable domain of TCR clone 243256 (TRBV20-1, TRBJ2-7)
CSARDRVFGMDERYF

SEQ ID NO: 486513 - protein, 17 aa, Homo sapiens
  CDR3 for alpha chain variable domain of TCR clone 243257 (TRAV2, TRAJ22)
ILQVREADAAEQRQLTF

SEQ ID NO: 486514 - protein, 16 aa, Homo sapiens
  CDR3 for beta chain variable domain of TCR clone 243257 (TRBV2, TRBJ2-5)
CASSETQGVGEETQNF

SEQ ID NO: 486515 - protein, 12 aa, Homo sapiens
  CDR3 for alpha chain variable domain of TCR clone 243258 (TRAV3, TRAJ31)
CAVRDGNARHMF

SEQ ID NO: 486516 - protein, 18 aa, Homo sapiens
  CDR3 for beta chain variable domain of TCR clone 243258 (TRBV7-2, TRBJ2-3)
CASSLKREGSGITDTQYF

SEQ ID NO: 486517 - protein, 14 aa, Homo sapiens
  CDR3 for alpha chain variable domain of TCR clone 243259 (TRAV10, TRAJ48)
CVGVFHFGNEKLTF

SEQ ID NO: 486518 - protein, 14 aa, Homo sapiens
  CDR3 for beta chain variable domain of TCR clone 243259 (TRBV12-5, TRBJ2-5)
CASGSRTHQETQYF

SEQ ID NO: 486519 - protein, 13 aa, Homo sapiens
  CDR3 for alpha chain variable domain of TCR clone 243260 (TRAV30, TRAJ6)
CGTEAGGSYIPTF

SEQ ID NO: 486520 - protein, 12 aa, Homo sapiens
  CDR3 for beta chain variable domain of TCR clone 243260 (TRBV18, TRBJ2-5)
CASSPNQETQYF

SEQ ID NO: 486521 - protein, 12 aa, Homo sapiens
  CDR3 for alpha chain variable domain of TCR clone 243261 (TRAV21, TRAJ23)
CAVMLQGGKLIF

SEQ ID NO: 486522 - protein, 15 aa, Homo sapiens
  CDR3 for beta chain variable domain of TCR clone 243261 (TRBV7-3, TRBJ2-2)
CQQLKAGDLVRELFF

SEQ ID NO: 486523 - protein, 17 aa, Homo sapiens
  CDR3 for alpha chain variable domain of TCR clone 243262 (TRAV13-1, TRAJ52)
CAASLGAGGTSYGKLTF

SEQ ID NO: 486524 - protein, 15 aa, Homo sapiens
  CDR3 for beta chain variable domain of TCR clone 243262 (TRBV2, TRBJ2-1)
CASSELAGSYNEQCF

SEQ ID NO: 486525 - protein, 14 aa, Homo sapiens
  CDR3 for alpha chain variable domain of TCR clone 243263 (TRAV2, TRAJ37)
CAVDFTSNTGTLIF

SEQ ID NO: 486526 - protein, 15 aa, Homo sapiens
  CDR3 for beta chain variable domain of TCR clone 243263 (TRBV27, TRBJ2-1)
CASSNGGGSSNEQFF

SEQ ID NO: 486527 - protein, 16 aa, Homo sapiens
  CDR3 for alpha chain variable domain of TCR clone 243264 (TRAV8-3, TRAJ28)
CAVGATLGLGVTNPLS

SEQ ID NO: 486528 - protein, 14 aa, Homo sapiens
  CDR3 for beta chain variable domain of TCR clone 243264 (TRBV7-2, TRBJ2-1)
CASSLGVGYNEQFF

SEQ ID NO: 486529 - protein, 15 aa, Homo sapiens
  CDR3 for alpha chain variable domain of TCR clone 243265 (TRAV3, TRAJ22)
CAVRDRGGSARQLTF

SEQ ID NO: 486530 - protein, 15 aa, Homo sapiens
  CDR3 for beta chain variable domain of TCR clone 243265 (TRBV7-3, TRBJ2-1)
CASSATGGGEVEQFF

SEQ ID NO: 486531 - protein, 14 aa, Homo sapiens
  CDR3 for alpha chain variable domain of TCR clone 243266 (TRAV17, TRAJ57)
CATDPQGGSEKLVF

SEQ ID NO: 486532 - protein, 18 aa, Homo sapiens
  CDR3 for beta chain variable domain of TCR clone 243266 (TRBV11-2, TRBJ2-3)
CASSLGGASRGAPNTEYF

SEQ ID NO: 486533 - protein, 13 aa, Homo sapiens
  CDR3 for alpha chain variable domain of TCR clone 243267 (TRAV8-1, TRAJ28)
CAVSGTGSYQLTF

SEQ ID NO: 486534 - protein, 16 aa, Homo sapiens
  CDR3 for beta chain variable domain of TCR clone 243267 (TRBV12-4, TRBJ1-5)
CASSRPVGGSNQPQHF

SEQ ID NO: 486535 - protein, 14 aa, Homo sapiens
  CDR3 for alpha chain variable domain of TCR clone 243268 (TRAV8-3, TRAJ4)
CAVGAAGGYNKLIF

SEQ ID NO: 486536 - protein, 12 aa, Homo sapiens
  CDR3 for beta chain variable domain of TCR clone 243268 (TRBV2, TRBJ2-7)
CASKRGSYEQYF

SEQ ID NO: 486537 - protein, 18 aa, Homo sapiens
  CDR3 for alpha chain variable domain of TCR clone 243269 (TRAV21, TRAJ52)
CAVRPSPAGGTSYGKLTF

SEQ ID NO: 486538 - protein, 17 aa, Homo sapiens
  CDR3 for beta chain variable domain of TCR clone 243269 (TRBV4-3, TRBJ2-2)
CASSQSFNLEFPGELFF

SEQ ID NO: 486539 - protein, 15 aa, Homo sapiens
  CDR3 for alpha chain variable domain of TCR clone 243270 (TRAV3, TRAJ22)
CAVRDRGGSARQLTF

SEQ ID NO: 486540 - protein, 16 aa, Homo sapiens
  CDR3 for beta chain variable domain of TCR clone 243270 (TRBV5-4, TRBJ2-3)
CASQQTGAGGSDTQYF

SEQ ID NO: 486541 - protein, 13 aa, Homo sapiens
  CDR3 for alpha chain variable domain of TCR clone 243271 (TRAV21, TRAJ6)
CAVTTGGSYIPTF

SEQ ID NO: 486542 - protein, 15 aa, Homo sapiens
  CDR3 for beta chain variable domain of TCR clone 243271 (TRBV19, TRBJ2-5)
CASSRLAGVEETQYF

SEQ ID NO: 486543 - protein, 14 aa, Homo sapiens
  CDR3 for alpha chain variable domain of TCR clone 243272 (TRAV36/DV7, TRAJ40)
CAVEGASGTYKYIF

SEQ ID NO: 486544 - protein, 12 aa, Homo sapiens
  CDR3 for beta chain variable domain of TCR clone 243272 (TRBV27, TRBJ2-5)
CASSLKGETQYF

SEQ ID NO: 486545 - protein, 17 aa, Homo sapiens
  CDR3 for alpha chain variable domain of TCR clone 243273 (TRAV17, TRAJ28)
CATDPRRGGAGSYQLTF

SEQ ID NO: 486546 - protein, 16 aa, Homo sapiens
  CDR3 for beta chain variable domain of TCR clone 243273 (TRBV27, TRBJ2-2)
CASSFRGLVRTGELFF

SEQ ID NO: 486547 - protein, 14 aa, Homo sapiens
  CDR3 for alpha chain variable domain of TCR clone 243274 (TRAV1-2, TRAJ15)
CAVRDRQAGTALIF

SEQ ID NO: 486548 - protein, 15 aa, Homo sapiens
  CDR3 for beta chain variable domain of TCR clone 243274 (TRBV6-5, TRBJ2-7)
CASSYSSSGSYEQYF

SEQ ID NO: 486549 - protein, 13 aa, Homo sapiens
  CDR3 for alpha chain variable domain of TCR clone 243275 (TRAV27, TRAJ8)
CAGGPTGVQKLVF

SEQ ID NO: 486550 - protein, 15 aa, Homo sapiens
  CDR3 for beta chain variable domain of TCR clone 243275 (TRBV6-1, TRBJ2-7)
CASSESMGDFYEQYF

SEQ ID NO: 486551 - protein, 13 aa, Homo sapiens
  CDR3 for alpha chain variable domain of TCR clone 243276 (TRAV20, TRAJ42)
CAVQGGSQGNLIF

SEQ ID NO: 486552 - protein, 15 aa, Homo sapiens
  CDR3 for beta chain variable domain of TCR clone 243276 (TRBV10-1, TRBJ2-1)
CASSEWRGTYNEQFC

SEQ ID NO: 486553 - protein, 13 aa, Homo sapiens
  CDR3 for alpha chain variable domain of TCR clone 243277 (TRAV1-2, TRAJ9)
CAALNTGGFKTIF

SEQ ID NO: 486554 - protein, 14 aa, Homo sapiens
  CDR3 for beta chain variable domain of TCR clone 243277 (TRBV20-1, TRBJ2-5)
CSALVPGYQETQYF

SEQ ID NO: 486555 - protein, 13 aa, Homo sapiens
  CDR3 for alpha chain variable domain of TCR clone 243278 (TRAV21, TRAJ20)
CAVGLRVDYKLSF

SEQ ID NO: 486556 - protein, 13 aa, Homo sapiens
  CDR3 for beta chain variable domain of TCR clone 243278 (TRBV18, TRBJ2-7)
CASQAGGGYEQYF

SEQ ID NO: 486557 - protein, 14 aa, Homo sapiens
  CDR3 for alpha chain variable domain of TCR clone 243279 (TRAV1-2, TRAJ16)
CAVNRFSDDQKLLF

SEQ ID NO: 486558 - protein, 12 aa, Homo sapiens
  CDR3 for beta chain variable domain of TCR clone 243279 (TRBV11-2, TRBJ2-2)
CASSLGGGELFF

SEQ ID NO: 486559 - protein, 14 aa, Homo sapiens
  CDR3 for alpha chain variable domain of TCR clone 243280 (TRAV1-1, TRAJ27)
CAVIYNTNAGKSTF

SEQ ID NO: 486560 - protein, 13 aa, Homo sapiens
  CDR3 for beta chain variable domain of TCR clone 243280 (TRBV2, TRBJ1-1)
CASRWTVNTEAFF

SEQ ID NO: 486561 - protein, 16 aa, Homo sapiens
  CDR3 for alpha chain variable domain of TCR clone 243281 (TRAV3, TRAJ10)
CAVRDMRAGGGNKLTF

SEQ ID NO: 486562 - protein, 15 aa, Homo sapiens
  CDR3 for beta chain variable domain of TCR clone 243281 (TRBV7-3, TRBJ2-1)
CASSLDGNSYNEQFF

SEQ ID NO: 486563 - protein, 14 aa, Homo sapiens
  CDR3 for alpha chain variable domain of TCR clone 243282 (TRAV12-3, TRAJ29)
CAMSPYSGNTPLVF

SEQ ID NO: 486564 - protein, 12 aa, Homo sapiens
  CDR3 for beta chain variable domain of TCR clone 243282 (TRBV9, TRBJ2-1)
CASSVGGTDIFV

SEQ ID NO: 486565 - protein, 15 aa, Homo sapiens
  CDR3 for alpha chain variable domain of TCR clone 243283 (TRAV4, TRAJ36)
CLVGVRQTGANNLFF

SEQ ID NO: 486566 - protein, 15 aa, Homo sapiens
  CDR3 for beta chain variable domain of TCR clone 243283 (TRBV7-6, TRBJ2-1)
CASSSLAGEGNEQFF

SEQ ID NO: 486567 - protein, 16 aa, Homo sapiens
  CDR3 for alpha chain variable domain of TCR clone 243284 (TRAV30, TRAJ24)
CGTEIVDADSWGKFQF

SEQ ID NO: 486568 - protein, 12 aa, Homo sapiens
  CDR3 for beta chain variable domain of TCR clone 243284 (TRBV7-9, TRBJ2-7)
CASSSKREEQYF

SEQ ID NO: 486569 - protein, 13 aa, Homo sapiens
  CDR3 for alpha chain variable domain of TCR clone 243285 (TRAV36/DV7, TRAJ49)
CAGEANTGNQFYF

SEQ ID NO: 486570 - protein, 14 aa, Homo sapiens
  CDR3 for beta chain variable domain of TCR clone 243285 (TRBV20-1, TRBJ2-5)
CSASSGRAAETQYF

SEQ ID NO: 486571 - protein, 14 aa, Homo sapiens
  CDR3 for alpha chain variable domain of TCR clone 243286 (TRAV12-3, TRAJ10)
SHLPLTGGGNKITF

SEQ ID NO: 486572 - protein, 15 aa, Homo sapiens
  CDR3 for beta chain variable domain of TCR clone 243286 (TRBV6-3, TRBJ2-7)
CASSSPGTVFYEQYF

SEQ ID NO: 486573 - protein, 14 aa, Homo sapiens
  CDR3 for alpha chain variable domain of TCR clone 243287 (TRAV13-1, TRAJ44)
CAAKATGTASKLTF

SEQ ID NO: 486574 - protein, 14 aa, Homo sapiens
  CDR3 for beta chain variable domain of TCR clone 243287 (TRBV7-8, TRBJ1-5)
CAISLGAFNQPQHF

SEQ ID NO: 486575 - protein, 23 aa, Homo sapiens
  CDR3 for alpha chain variable domain of TCR clone 243288 (TRAV8-4, )
CAVTPGGAGNNHIQNPDPAVYQL

SEQ ID NO: 486576 - protein, 14 aa, Homo sapiens
  CDR3 for beta chain variable domain of TCR clone 243288 (TRBV18, TRBJ2-5)
CASSPGVSQETQYF

SEQ ID NO: 486577 - protein, 14 aa, Homo sapiens
  CDR3 for alpha chain variable domain of TCR clone 243289 (TRAV21, TRAJ35)
CAVMPIGFGNVLHC

SEQ ID NO: 486578 - protein, 20 aa, Homo sapiens
  CDR3 for beta chain variable domain of TCR clone 243289 (TRBV7-8, TRBJ2-2)
CASSHLFPGPTIHITGEVFF

SEQ ID NO: 486579 - protein, 14 aa, Homo sapiens
  CDR3 for alpha chain variable domain of TCR clone 243290 (TRAV1-2, TRAJ6)
CAVSLPGGSYIPTL

SEQ ID NO: 486580 - protein, 15 aa, Homo sapiens
  CDR3 for beta chain variable domain of TCR clone 243290 (TRBV28, TRBJ2-7)
CASSPGGGGFYEQYS

SEQ ID NO: 486581 - protein, 12 aa, Homo sapiens
  CDR3 for alpha chain variable domain of TCR clone 243291 (TRAV12-3, TRAJ17)
CAMTLTGNKINF

SEQ ID NO: 486582 - protein, 15 aa, Homo sapiens
  CDR3 for beta chain variable domain of TCR clone 243291 (TRBV20-1, TRBJ2-7)
CSARDRVSGMDEQYF

SEQ ID NO: 486583 - protein, 15 aa, Homo sapiens
  CDR3 for alpha chain variable domain of TCR clone 243292 (TRAV21, TRAJ56)
CAVTKYTGANSKLPF

SEQ ID NO: 486584 - protein, 14 aa, Homo sapiens
  CDR3 for beta chain variable domain of TCR clone 243292 (TRBV20-1, TRBJ2-3)
CSARVRGSTDTQYF

SEQ ID NO: 486585 - protein, 13 aa, Homo sapiens
  CDR3 for alpha chain variable domain of TCR clone 243293 (TRAV2, TRAJ24)
CAVEDSGRGKFQF

SEQ ID NO: 486586 - protein, 13 aa, Homo sapiens
  CDR3 for beta chain variable domain of TCR clone 243293 (TRBV10-3, TRBJ2-7)
CASKLAVNYEQFF

SEQ ID NO: 486587 - protein, 16 aa, Homo sapiens
  CDR3 for alpha chain variable domain of TCR clone 243294 (TRAV3, TRAJ10)
CAVRDMNAGGGNRPTL

SEQ ID NO: 486588 - protein, 16 aa, Homo sapiens
  CDR3 for beta chain variable domain of TCR clone 243294 (TRBV6-3, TRBJ1-2)
CASSYSRRASNYGYTF

SEQ ID NO: 486589 - protein, 12 aa, Homo sapiens
  CDR3 for alpha chain variable domain of TCR clone 243295 (TRAV25, TRAJ31)
CAGHLNNARLMF

SEQ ID NO: 486590 - protein, 15 aa, Homo sapiens
  CDR3 for beta chain variable domain of TCR clone 243295 (TRBV19, TRBJ1-6)
CASSTQGAVGSPLHF

SEQ ID NO: 486591 - protein, 13 aa, Homo sapiens
  CDR3 for alpha chain variable domain of TCR clone 243296 (TRAV23/DV6, TRAJ22)
CAPYSGSARQLTF

SEQ ID NO: 486592 - protein, 15 aa, Homo sapiens
  CDR3 for beta chain variable domain of TCR clone 243296 (TRBV11-2, TRBJ1-6)
CASSLEPWAVSPLHF

SEQ ID NO: 486593 - protein, 15 aa, Homo sapiens
  CDR3 for alpha chain variable domain of TCR clone 243297 (TRAV3, TRAJ22)
CAVRDRGGSVRQLTF

SEQ ID NO: 486594 - protein, 20 aa, Homo sapiens
  CDR3 for beta chain variable domain of TCR clone 243297 (TRBV11-2, TRBJ1-6)
CASSLVFATGGSVHPSTLGT

SEQ ID NO: 486595 - protein, 12 aa, Homo sapiens
  CDR3 for alpha chain variable domain of TCR clone 243298 (TRAV1-2, TRAJ33)
CAALDSNYQLIW

SEQ ID NO: 486596 - protein, 16 aa, Homo sapiens
  CDR3 for beta chain variable domain of TCR clone 243298 (TRBV28, TRBJ2-1)
CASSSPEYPRDNEQFF

SEQ ID NO: 486597 - protein, 12 aa, Homo sapiens
  CDR3 for alpha chain variable domain of TCR clone 243299 (TRAV9-2, TRAJ26)
CALRGYGQNFVF

SEQ ID NO: 486598 - protein, 11 aa, Homo sapiens
  CDR3 for beta chain variable domain of TCR clone 243299 (TRBV6-3, TRBJ2-3)
CATGQADTQYF

SEQ ID NO: 486599 - protein, 14 aa, Homo sapiens
  CDR3 for alpha chain variable domain of TCR clone 243300 (TRAV27, TRAJ41)
CAVRTQIPVMHSTS

SEQ ID NO: 486600 - protein, 15 aa, Homo sapiens
  CDR3 for beta chain variable domain of TCR clone 243300 (TRBV9, TRBJ1-6)
CASSVAGTGDSPLHF

SEQ ID NO: 486601 - protein, 13 aa, Homo sapiens
  CDR3 for alpha chain variable domain of TCR clone 243301 (TRAV3, TRAJ8)
CAVRFTGFQKLAF

SEQ ID NO: 486602 - protein, 15 aa, Homo sapiens
  CDR3 for beta chain variable domain of TCR clone 243301 (TRBV20-1, TRBJ2-7)
CSARDRVSGMDEQYF

SEQ ID NO: 486603 - protein, 16 aa, Homo sapiens
  CDR3 for alpha chain variable domain of TCR clone 243302 (TRAV27, TRAJ13)
CAGAKSDSGGYQKVTF

SEQ ID NO: 486604 - protein, 13 aa, Homo sapiens
  CDR3 for beta chain variable domain of TCR clone 243302 (TRBV29-1, TRBJ2-2)
CSTTGVNTGELFF

SEQ ID NO: 486605 - protein, 17 aa, Homo sapiens
  CDR3 for alpha chain variable domain of TCR clone 243303 (TRAV25, TRAJ52)
CAGPLDAGGTSYGKLRF

SEQ ID NO: 486606 - protein, 14 aa, Homo sapiens
  CDR3 for beta chain variable domain of TCR clone 243303 (TRBV29-1, TRBJ1-1)
CSVDLQGASTEAFF

SEQ ID NO: 486607 - protein, 14 aa, Homo sapiens
  CDR3 for alpha chain variable domain of TCR clone 243304 (TRAV8-3, TRAJ4)
CAVGAAGGYNKLIF

SEQ ID NO: 486608 - protein, 13 aa, Homo sapiens
  CDR3 for beta chain variable domain of TCR clone 243304 (TRBV19, TRBJ2-1)
CASSMYGVNEQFF

SEQ ID NO: 486609 - protein, 14 aa, Homo sapiens
  CDR3 for alpha chain variable domain of TCR clone 243305 (TRAV9-2, TRAJ39)
CALYIYNAGNMLTF

SEQ ID NO: 486610 - protein, 11 aa, Homo sapiens
  CDR3 for beta chain variable domain of TCR clone 243305 (TRBV5-1, TRBJ1-1)
CASSSDGEAFF

SEQ ID NO: 486611 - protein, 14 aa, Homo sapiens
  CDR3 for alpha chain variable domain of TCR clone 243306 (TRAV12-2, TRAJ45)
CAVYSGGGADGLTF

SEQ ID NO: 486612 - protein, 14 aa, Homo sapiens
  CDR3 for beta chain variable domain of TCR clone 243306 (TRBV6-5, TRBJ1-2)
CASTRGGVSDGYTF

SEQ ID NO: 486613 - protein, 11 aa, Homo sapiens
  CDR3 for alpha chain variable domain of TCR clone 243307 (TRAV21, TRAJ11)
CAVNGYSTLTF

SEQ ID NO: 486614 - protein, 11 aa, Homo sapiens
  CDR3 for beta chain variable domain of TCR clone 243307 (TRBV19, TRBJ1-1)
CASSIGGEALF

SEQ ID NO: 486615 - protein, 15 aa, Homo sapiens
  CDR3 for alpha chain variable domain of TCR clone 243308 (TRAV21, TRAJ40)
CAVRPQTSGTYKYIF

SEQ ID NO: 486616 - protein, 13 aa, Homo sapiens
  CDR3 for beta chain variable domain of TCR clone 243308 (TRBV7-2, TRBJ2-2)
CASSSVRAEELFF

SEQ ID NO: 486617 - protein, 16 aa, Homo sapiens
  CDR3 for alpha chain variable domain of TCR clone 243309 (TRAV26-1, TRAJ48)
IASSDLSNFGNEKLNF

SEQ ID NO: 486618 - protein, 14 aa, Homo sapiens
  CDR3 for beta chain variable domain of TCR clone 243309 (TRBV13, TRBJ2-7)
CASSLKGASYEQYF

SEQ ID NO: 486619 - protein, 14 aa, Homo sapiens
  CDR3 for alpha chain variable domain of TCR clone 243310 (TRAV26-1, TRAJ34)
CIVRVAYNTDKLIF

SEQ ID NO: 486620 - protein, 15 aa, Homo sapiens
  CDR3 for beta chain variable domain of TCR clone 243310 (TRBV20-1, TRBJ2-1)
CSARGIGGTYNEQFF

SEQ ID NO: 486621 - protein, 18 aa, Homo sapiens
  CDR3 for alpha chain variable domain of TCR clone 243311 (TRAV13-1, TRAJ52)
CAASKRNAGGTSYGKLTF

SEQ ID NO: 486622 - protein, 15 aa, Homo sapiens
  CDR3 for beta chain variable domain of TCR clone 243311 (TRBV6-3, TRBJ2-7)
CASSSPGTVFYEQYF

SEQ ID NO: 486623 - protein, 17 aa, Homo sapiens
  CDR3 for alpha chain variable domain of TCR clone 243312 (TRAV13-1, TRAJ52)
CAAGRNAGGTSYGKLTF

SEQ ID NO: 486624 - protein, 12 aa, Homo sapiens
  CDR3 for beta chain variable domain of TCR clone 243312 (TRBV7-9, TRBJ2-7)
CATRTDAYEQYF

SEQ ID NO: 486625 - protein, 14 aa, Homo sapiens
  CDR3 for alpha chain variable domain of TCR clone 243313 (TRAV13-1, TRAJ35)
CAASKGGFGNVLHC

SEQ ID NO: 486626 - protein, 16 aa, Homo sapiens
  CDR3 for beta chain variable domain of TCR clone 243313 (TRBV12-4, TRBJ1-2)
CASSPTATGKTRGYTF

SEQ ID NO: 486627 - protein, 13 aa, Homo sapiens
  CDR3 for alpha chain variable domain of TCR clone 243314 (TRAV1-2, TRAJ9)
CVALNTGGFKTIF

SEQ ID NO: 486628 - protein, 14 aa, Homo sapiens
  CDR3 for beta chain variable domain of TCR clone 243314 (TRBV7-3, TRBJ2-1)
CASSLAGGTNEQFF

SEQ ID NO: 486629 - protein, 16 aa, Homo sapiens
  CDR3 for alpha chain variable domain of TCR clone 243315 (TRAV3, TRAJ21)
CAVRDIERGNLNKFYF

SEQ ID NO: 486630 - protein, 16 aa, Homo sapiens
  CDR3 for beta chain variable domain of TCR clone 243315 (TRBV12-4, TRBJ1-5)
CVSSRPVGGSNQPQHF

SEQ ID NO: 486631 - protein, 16 aa, Homo sapiens
  CDR3 for alpha chain variable domain of TCR clone 243316 (TRAV26-1, TRAJ53)
CIVRVAMGGSNYKLTF

SEQ ID NO: 486632 - protein, 22 aa, Homo sapiens
  CDR3 for beta chain variable domain of TCR clone 243316 (TRBV6-1, TRBJ1-3)
CASVQGGGWKHHIFWRGKLAHC

SEQ ID NO: 486633 - protein, 14 aa, Homo sapiens
  CDR3 for alpha chain variable domain of TCR clone 243317 (TRAV12-2, TRAJ17)
CAVLFKAAGNKLTF

SEQ ID NO: 486634 - protein, 13 aa, Homo sapiens
  CDR3 for beta chain variable domain of TCR clone 243317 (TRBV13, TRBJ2-5)
CASSLGGEETQYF

SEQ ID NO: 486635 - protein, 11 aa, Homo sapiens
  CDR3 for alpha chain variable domain of TCR clone 243318 (TRAV2, TRAJ13)
CASGGYQKVTF

SEQ ID NO: 486636 - protein, 15 aa, Homo sapiens
  CDR3 for beta chain variable domain of TCR clone 243318 (TRBV19, TRBJ2-1)
CASIKGRGPYNEQFF

SEQ ID NO: 486637 - protein, 14 aa, Homo sapiens
  CDR3 for alpha chain variable domain of TCR clone 243319 (TRAV13-1, TRAJ35)
CAASKGGFGNVQHC

SEQ ID NO: 486638 - protein, 13 aa, Homo sapiens
  CDR3 for beta chain variable domain of TCR clone 243319 (TRBV7-3, TRBJ1-1)
CASSQNWGAEAFF

SEQ ID NO: 486639 - protein, 14 aa, Homo sapiens
  CDR3 for alpha chain variable domain of TCR clone 243320 (TRAV1-2, TRAJ16)
CAVHRFSDGQKLLF

SEQ ID NO: 486640 - protein, 15 aa, Homo sapiens
  CDR3 for beta chain variable domain of TCR clone 243320 (TRBV11-3, TRBJ2-3)
CASLKDGREGDTQYF

SEQ ID NO: 486641 - protein, 15 aa, Homo sapiens
  CDR3 for alpha chain variable domain of TCR clone 243321 (TRAV21, TRAJ53)
CASLNSGGSNYKLTF

SEQ ID NO: 486642 - protein, 17 aa, Homo sapiens
  CDR3 for beta chain variable domain of TCR clone 243321 (TRBV7-8, TRBJ2-6)
CASSAGTGGAGANVLTF

SEQ ID NO: 486643 - protein, 14 aa, Homo sapiens
  CDR3 for alpha chain variable domain of TCR clone 243322 (TRAV21, TRAJ45)
CAVSSGGGADGLTF

SEQ ID NO: 486644 - protein, 16 aa, Homo sapiens
  CDR3 for beta chain variable domain of TCR clone 243322 (TRBV2, TRBJ2-7)
CASSEPWTGPSYEQYF

SEQ ID NO: 486645 - protein, 17 aa, Homo sapiens
  CDR3 for alpha chain variable domain of TCR clone 243323 (TRAV26-2, TRAJ52)
CILPSSAGGTSYGKLTF

SEQ ID NO: 486646 - protein, 17 aa, Homo sapiens
  CDR3 for beta chain variable domain of TCR clone 243323 (TRBV6-3, TRBJ1-6)
CASAEQGAGSYNSPLHF

SEQ ID NO: 486647 - protein, 14 aa, Homo sapiens
  CDR3 for alpha chain variable domain of TCR clone 243324 (TRAV26-1, TRAJ26)
CIVRVASYGQNFVF

SEQ ID NO: 486648 - protein, 12 aa, Homo sapiens
  CDR3 for beta chain variable domain of TCR clone 243324 (TRBV11-2, TRBJ2-2)
CASSLGGGELFF

SEQ ID NO: 486649 - protein, 14 aa, Homo sapiens
  CDR3 for alpha chain variable domain of TCR clone 243325 (TRAV8-6, TRAJ16)
CAVTSFSDGQKLLF

SEQ ID NO: 486650 - protein, 20 aa, Homo sapiens
  CDR3 for beta chain variable domain of TCR clone 243325 (TRBV7-8, TRBJ2-2)
CASSHLFPGPTIHITGELFF

SEQ ID NO: 486651 - protein, 17 aa, Homo sapiens
  CDR3 for alpha chain variable domain of TCR clone 243326 (TRAV8-4, TRAJ45)
CAVSEGGSGGGADGLTF

SEQ ID NO: 486652 - protein, 22 aa, Homo sapiens
  CDR3 for beta chain variable domain of TCR clone 243326 (TRBV7-3, TRBJ2-2)
GGTQPCISVPAAQEDTPGSCFF

SEQ ID NO: 486653 - protein, 15 aa, Homo sapiens
  CDR3 for alpha chain variable domain of TCR clone 243327 (TRAV23/DV6, TRAJ4)
CAASPLRGGYNKLIF

SEQ ID NO: 486654 - protein, 14 aa, Homo sapiens
  CDR3 for beta chain variable domain of TCR clone 243327 (TRBV7-2, TRBJ2-2)
CASRGQGAAGELFF

SEQ ID NO: 486655 - protein, 14 aa, Homo sapiens
  CDR3 for alpha chain variable domain of TCR clone 243328 (TRAV21, TRAJ35)
CAVMPIGFGNVLHC

SEQ ID NO: 486656 - protein, 18 aa, Homo sapiens
  CDR3 for beta chain variable domain of TCR clone 243328 (TRBV4-1, TRBJ1-5)
CASSQDPRGQGLNQPQHF

SEQ ID NO: 486657 - protein, 14 aa, Homo sapiens
  CDR3 for alpha chain variable domain of TCR clone 243329 (TRAV12-2, TRAJ40)
CAVKIPSGTYKYIF

SEQ ID NO: 486658 - protein, 20 aa, Homo sapiens
  CDR3 for beta chain variable domain of TCR clone 243329 (TRBV28, TRBJ2-1)
CASTPIGRSPGLAGGNGQFF

SEQ ID NO: 486659 - protein, 17 aa, Homo sapiens
  CDR3 for alpha chain variable domain of TCR clone 243330 (TRAV3, TRAJ12)
CAVRDGGRMDSTYKLIF

SEQ ID NO: 486660 - protein, 12 aa, Homo sapiens
  CDR3 for beta chain variable domain of TCR clone 243330 (TRBV11-2, TRBJ2-2)
CASSLGGGELFF

SEQ ID NO: 486661 - protein, 15 aa, Homo sapiens
  CDR3 for alpha chain variable domain of TCR clone 243331 (TRAV17, TRAJ57)
CATCPSQGGSEKLVF

SEQ ID NO: 486662 - protein, 11 aa, Homo sapiens
  CDR3 for beta chain variable domain of TCR clone 243331 (TRBV29-1, TRBJ2-5)
CSEDRTGTQYF

SEQ ID NO: 486663 - protein, 10 aa, Homo sapiens
  CDR3 for alpha chain variable domain of TCR clone 243332 (TRAV1-2, TRAJ31)
CAFFDARLMF

SEQ ID NO: 486664 - protein, 17 aa, Homo sapiens
  CDR3 for beta chain variable domain of TCR clone 243332 (TRBV15, TRBJ1-2)
CATSGREIDVVNYGDTF

SEQ ID NO: 486665 - protein, 14 aa, Homo sapiens
  CDR3 for alpha chain variable domain of TCR clone 243333 (TRAV4, TRAJ6)
CLVGEAGGSYMPTF

SEQ ID NO: 486666 - protein, 16 aa, Homo sapiens
  CDR3 for beta chain variable domain of TCR clone 243333 (TRBV7-6, TRBJ2-1)
CASSLNEGPSYNEQLF

SEQ ID NO: 486667 - protein, 15 aa, Homo sapiens
  CDR3 for alpha chain variable domain of TCR clone 243334 (TRAV8-1, TRAJ23)
CAVNSHYNQGGKLIF

SEQ ID NO: 486668 - protein, 13 aa, Homo sapiens
  CDR3 for beta chain variable domain of TCR clone 243334 (TRBV7-9, TRBJ1-2)
CASSLKQNYGYTF

SEQ ID NO: 486669 - protein, 12 aa, Homo sapiens
  CDR3 for alpha chain variable domain of TCR clone 243335 (TRAV21, TRAJ33)
CAKMDSSYQLIW

SEQ ID NO: 486670 - protein, 15 aa, Homo sapiens
  CDR3 for beta chain variable domain of TCR clone 243335 (TRBV19, TRBJ2-7)
CASSIGGGLVNEQYF

SEQ ID NO: 486671 - protein, 14 aa, Homo sapiens
  CDR3 for alpha chain variable domain of TCR clone 243336 (TRAV21, TRAJ28)
CAVGSGAGSYQLTF

SEQ ID NO: 486672 - protein, 14 aa, Homo sapiens
  CDR3 for beta chain variable domain of TCR clone 243336 (TRBV18, TRBJ1-4)
CASSRGPNGEKLFF

SEQ ID NO: 486673 - protein, 14 aa, Homo sapiens
  CDR3 for alpha chain variable domain of TCR clone 243337 (TRAV17, TRAJ16)
CATAAFSDGQKLPF

SEQ ID NO: 486674 - protein, 14 aa, Homo sapiens
  CDR3 for beta chain variable domain of TCR clone 243337 (TRBV18, TRBJ2-1)
CQLTPSASYNEQFF

SEQ ID NO: 486675 - protein, 13 aa, Homo sapiens
  CDR3 for alpha chain variable domain of TCR clone 243338 (TRAV1-1, TRAJ9)
CAAKNTGGFKTIF

SEQ ID NO: 486676 - protein, 14 aa, Homo sapiens
  CDR3 for beta chain variable domain of TCR clone 243338 (TRBV6-1, TRBJ1-3)
CASVQGGGGNTIYF

SEQ ID NO: 486677 - protein, 13 aa, Homo sapiens
  CDR3 for alpha chain variable domain of TCR clone 243339 (TRAV20, TRAJ20)
CAVQAGSGYKLSF

SEQ ID NO: 486678 - protein, 12 aa, Homo sapiens
  CDR3 for beta chain variable domain of TCR clone 243339 (TRBV12-4, TRBJ2-7)
CASSLGGYEQYF

SEQ ID NO: 486679 - protein, 19 aa, Homo sapiens
  CDR3 for alpha chain variable domain of TCR clone 243340 (TRAV3, TRAJ37)
CAVRDIVGGYPSNTGKLIV

SEQ ID NO: 486680 - protein, 14 aa, Homo sapiens
  CDR3 for beta chain variable domain of TCR clone 243340 (TRBV7-8, TRBJ2-3)
CASSLEAGTDTQYF

SEQ ID NO: 486681 - protein, 14 aa, Homo sapiens
  CDR3 for alpha chain variable domain of TCR clone 243341 (TRAV12-3, TRAJ10)
SHLPLTGGGNKLTF

SEQ ID NO: 486682 - protein, 14 aa, Homo sapiens
  CDR3 for beta chain variable domain of TCR clone 243341 (TRBV4-2, TRBJ2-1)
CASGLDRAYNEQYF

SEQ ID NO: 486683 - protein, 14 aa, Homo sapiens
  CDR3 for alpha chain variable domain of TCR clone 243342 (TRAV26-1, TRAJ38)
CIADNAGNNRKLSW

SEQ ID NO: 486684 - protein, 14 aa, Homo sapiens
  CDR3 for beta chain variable domain of TCR clone 243342 (TRBV19, TRBJ2-1)
CASPTFVLSGEQFF

SEQ ID NO: 486685 - protein, 13 aa, Homo sapiens
  CDR3 for alpha chain variable domain of TCR clone 243343 (TRAV13-1, TRAJ11)
CAAVLSGYSTFTF

SEQ ID NO: 486686 - protein, 17 aa, Homo sapiens
  CDR3 for beta chain variable domain of TCR clone 243343 (TRBV25-1, TRBJ2-7)
CASSDARVVFSSYEQYF

SEQ ID NO: 486687 - protein, 13 aa, Homo sapiens
  CDR3 for alpha chain variable domain of TCR clone 243344 (TRAV3, TRAJ15)
CAVRDQAGTALIF

SEQ ID NO: 486688 - protein, 17 aa, Homo sapiens
  CDR3 for beta chain variable domain of TCR clone 243344 (TRBV5-1, TRBJ2-1)
CASSTGTSGYSYNEQFF

SEQ ID NO: 486689 - protein, 14 aa, Homo sapiens
  CDR3 for alpha chain variable domain of TCR clone 243345 (TRAV12-3, TRAJ56)
CAMSVTGANSKLTF

SEQ ID NO: 486690 - protein, 14 aa, Homo sapiens
  CDR3 for beta chain variable domain of TCR clone 243345 (TRBV7-2, TRBJ2-5)
CASSLSGGGETQYF

SEQ ID NO: 486691 - protein, 15 aa, Homo sapiens
  CDR3 for alpha chain variable domain of TCR clone 243346 (TRAV8-4, TRAJ40)
CAGSSITSGTYKYIF

SEQ ID NO: 486692 - protein, 13 aa, Homo sapiens
  CDR3 for beta chain variable domain of TCR clone 243346 (TRBV2, TRBJ2-1)
CATSRGTDNEQFF

SEQ ID NO: 486693 - protein, 18 aa, Homo sapiens
  CDR3 for alpha chain variable domain of TCR clone 243347 (TRAV26-2, TRAJ33)
CCVPLHPEEPASNYQLIW

SEQ ID NO: 486694 - protein, 18 aa, Homo sapiens
  CDR3 for beta chain variable domain of TCR clone 243347 (TRBV10-3, TRBJ2-2)
CTSVPSTRQGANTGELFF

SEQ ID NO: 486695 - protein, 10 aa, Homo sapiens
  CDR3 for alpha chain variable domain of TCR clone 243348 (TRAV38-1, TRAJ34)
CAFMDDKLIF

SEQ ID NO: 486696 - protein, 17 aa, Homo sapiens
  CDR3 for beta chain variable domain of TCR clone 243348 (TRBV11-3, TRBJ2-3)
CASSLGLTGGGKDTQYF

SEQ ID NO: 486697 - protein, 16 aa, Homo sapiens
  CDR3 for alpha chain variable domain of TCR clone 243349 (TRAV23/DV6, TRAJ9)
CAARIGGNTGSFKTIF

SEQ ID NO: 486698 - protein, 13 aa, Homo sapiens
  CDR3 for beta chain variable domain of TCR clone 243349 (TRBV7-9, TRBJ1-2)
CASSLKQNYGYTF

SEQ ID NO: 486699 - protein, 14 aa, Homo sapiens
  CDR3 for alpha chain variable domain of TCR clone 243350 (TRAV29/DV5, TRAJ36)
CAARRKTGANNLFF

SEQ ID NO: 486700 - protein, 15 aa, Homo sapiens
  CDR3 for beta chain variable domain of TCR clone 243350 (TRBV2, TRBJ1-2)
CASSEIGGANYGYTF

SEQ ID NO: 486701 - protein, 14 aa, Homo sapiens
  CDR3 for alpha chain variable domain of TCR clone 243351 (TRAV12-2, TRAJ4)
CAEDLSGGYNKLIL

SEQ ID NO: 486702 - protein, 13 aa, Homo sapiens
  CDR3 for beta chain variable domain of TCR clone 243351 (TRBV7-9, TRBJ1-2)
CASSLKRNYGYTF

SEQ ID NO: 486703 - protein, 16 aa, Homo sapiens
  CDR3 for alpha chain variable domain of TCR clone 243352 (TRAV23/DV6, TRAJ9)
CAASIGGNTGGFKTIF

SEQ ID NO: 486704 - protein, 12 aa, Homo sapiens
  CDR3 for beta chain variable domain of TCR clone 243352 (TRBV7-8, TRBJ2-3)
CASSLWDEAQYF

SEQ ID NO: 486705 - protein, 14 aa, Homo sapiens
  CDR3 for alpha chain variable domain of TCR clone 243353 (TRAV9-2, TRAJ39)
CALYIYNAGNMFTF

SEQ ID NO: 486706 - protein, 13 aa, Homo sapiens
  CDR3 for beta chain variable domain of TCR clone 243353 (TRBV29-1, TRBJ2-5)
CSVTIASEETQYF

SEQ ID NO: 486707 - protein, 15 aa, Homo sapiens
  CDR3 for alpha chain variable domain of TCR clone 243354 (TRAV3, TRAJ3)
CAVRDGHSSASKIIF

SEQ ID NO: 486708 - protein, 15 aa, Homo sapiens
  CDR3 for beta chain variable domain of TCR clone 243354 (TRBV6-1, TRBJ2-3)
CASSERGGITDTQYF

SEQ ID NO: 486709 - protein, 16 aa, Homo sapiens
  CDR3 for alpha chain variable domain of TCR clone 243355 (TRAV12-3, TRAJ53)
CAMSPGRGGSNYKLTF

SEQ ID NO: 486710 - protein, 16 aa, Homo sapiens
  CDR3 for beta chain variable domain of TCR clone 243355 (TRBV4-2, TRBJ1-1)
CASSQAGFGMNTEDFF

SEQ ID NO: 486711 - protein, 13 aa, Homo sapiens
  CDR3 for alpha chain variable domain of TCR clone 243356 (TRAV8-3, TRAJ48)
CAVVRFGNEKLTF

SEQ ID NO: 486712 - protein, 16 aa, Homo sapiens
  CDR3 for beta chain variable domain of TCR clone 243356 (TRBV20-1, TRBJ1-2)
CSASMGQGVANYGYTF

SEQ ID NO: 486713 - protein, 13 aa, Homo sapiens
  CDR3 for alpha chain variable domain of TCR clone 243357 (TRAV17, TRAJ29)
CATDAFRKHTSCL

SEQ ID NO: 486714 - protein, 15 aa, Homo sapiens
  CDR3 for beta chain variable domain of TCR clone 243357 (TRBV20-1, TRBJ2-7)
CSAREGRDSLYEQYF

SEQ ID NO: 486715 - protein, 12 aa, Homo sapiens
  CDR3 for alpha chain variable domain of TCR clone 243358 (TRAV3, TRAJ26)
CAVRDYGQNFVF

SEQ ID NO: 486716 - protein, 20 aa, Homo sapiens
  CDR3 for beta chain variable domain of TCR clone 243358 (TRBV7-8, TRBJ2-2)
CASSHLFPGPTIHITGELFF

SEQ ID NO: 486717 - protein, 16 aa, Homo sapiens
  CDR3 for alpha chain variable domain of TCR clone 243359 (TRAV12-1, TRAJ42)
CVVTPYYGGSQGNLIF

SEQ ID NO: 486718 - protein, 15 aa, Homo sapiens
  CDR3 for beta chain variable domain of TCR clone 243359 (TRBV20-1, TRBJ2-7)
CSARDRVSGMDEQYF

SEQ ID NO: 486719 - protein, 13 aa, Homo sapiens
  CDR3 for alpha chain variable domain of TCR clone 243360 (TRAV27, TRAJ45)
CRSSGGGADVLTF

SEQ ID NO: 486720 - protein, 15 aa, Homo sapiens
  CDR3 for beta chain variable domain of TCR clone 243360 (TRBV20-1, TRBJ2-7)
CSARDRVSGMDEQYF

SEQ ID NO: 486721 - protein, 12 aa, Homo sapiens
  CDR3 for alpha chain variable domain of TCR clone 243361 (TRAV3, TRAJ20)
CAVRDGDHKLSF

SEQ ID NO: 486722 - protein, 13 aa, Homo sapiens
  CDR3 for beta chain variable domain of TCR clone 243361 (TRBV9, TRBJ2-1)
CASSVGQGGEQFF

SEQ ID NO: 486723 - protein, 18 aa, Homo sapiens
  CDR3 for alpha chain variable domain of TCR clone 243362 (TRAV26-2, TRAJ45)
CILRLWGYSGGGADGLTF

SEQ ID NO: 486724 - protein, 17 aa, Homo sapiens
  CDR3 for beta chain variable domain of TCR clone 243362 (TRBV28, TRBJ2-3)
CASSPTPAGGRVDMQYF

SEQ ID NO: 486725 - protein, 12 aa, Homo sapiens
  CDR3 for alpha chain variable domain of TCR clone 243363 (TRAV1-1, TRAJ9)
CAVDTGGFKTIF

SEQ ID NO: 486726 - protein, 14 aa, Homo sapiens
  CDR3 for beta chain variable domain of TCR clone 243363 (TRBV18, TRBJ2-5)
CASSPGVSQETQYF

SEQ ID NO: 486727 - protein, 12 aa, Homo sapiens
  CDR3 for alpha chain variable domain of TCR clone 243364 (TRAV16, TRAJ10)
CSRTGGGNKLTL

SEQ ID NO: 486728 - protein, 14 aa, Homo sapiens
  CDR3 for beta chain variable domain of TCR clone 243364 (TRBV7-2, TRBJ2-1)
CASSLGVGYNEQFF

SEQ ID NO: 486729 - protein, 15 aa, Homo sapiens
  CDR3 for alpha chain variable domain of TCR clone 243365 (TRAV26-1, TRAJ29)
CIVRVEGSGNTPLVF

SEQ ID NO: 486730 - protein, 15 aa, Homo sapiens
  CDR3 for beta chain variable domain of TCR clone 243365 (TRBV18, TRBJ2-5)
CASSLIPSGGETQYF

SEQ ID NO: 486731 - protein, 15 aa, Homo sapiens
  CDR3 for alpha chain variable domain of TCR clone 243366 (TRAV26-1, TRAJ17)
CIVRVVKAAGNKLTF

SEQ ID NO: 486732 - protein, 16 aa, Homo sapiens
  CDR3 for beta chain variable domain of TCR clone 243366 (TRBV7-9, TRBJ2-1)
CASSLVAGPSYNEQFF

SEQ ID NO: 486733 - protein, 14 aa, Homo sapiens
  CDR3 for alpha chain variable domain of TCR clone 243367 (TRAV1-2, TRAJ16)
CDVNRFSDGQKLLF

SEQ ID NO: 486734 - protein, 17 aa, Homo sapiens
  CDR3 for beta chain variable domain of TCR clone 243367 (TRBV15, TRBJ1-2)
RATSGREIDVVNYGYTF

SEQ ID NO: 486735 - protein, 15 aa, Homo sapiens
  CDR3 for alpha chain variable domain of TCR clone 243368 (TRAV25, TRAJ53)
CAATGGGGSNYKLTF

SEQ ID NO: 486736 - protein, 19 aa, Homo sapiens
  CDR3 for beta chain variable domain of TCR clone 243368 (TRBV7-2, TRBJ2-3)
CARSFLSRNWGGGTDTQYF

SEQ ID NO: 486737 - protein, 15 aa, Homo sapiens
  CDR3 for alpha chain variable domain of TCR clone 243369 (TRAV8-3, TRAJ45)
CASSYSGGGADGLTF

SEQ ID NO: 486738 - protein, 14 aa, Homo sapiens
  CDR3 for beta chain variable domain of TCR clone 243369 (TRBV7-8, TRBJ2-7)
CASSLGRASYEQYF

SEQ ID NO: 486739 - protein, 17 aa, Homo sapiens
  CDR3 for alpha chain variable domain of TCR clone 243370 (TRAV3, TRAJ38)
CAVRDCLNAGNNRKVIW

SEQ ID NO: 486740 - protein, 13 aa, Homo sapiens
  CDR3 for beta chain variable domain of TCR clone 243370 (TRBV23-1, TRBJ1-4)
CASRGKFNEKLFF

SEQ ID NO: 486741 - protein, 15 aa, Homo sapiens
  CDR3 for alpha chain variable domain of TCR clone 243371 (TRAV27, TRAJ38)
CAARRNAGNNRKLIW

SEQ ID NO: 486742 - protein, 14 aa, Homo sapiens
  CDR3 for beta chain variable domain of TCR clone 243371 (TRBV7-9, TRBJ2-2)
CASSGLADTGELFF

SEQ ID NO: 486743 - protein, 14 aa, Homo sapiens
  CDR3 for alpha chain variable domain of TCR clone 243372 (TRAV29/DV5, TRAJ28)
CAARAGAGSYLLTF

SEQ ID NO: 486744 - protein, 13 aa, Homo sapiens
  CDR3 for beta chain variable domain of TCR clone 243372 (TRBV7-2, TRBJ1-5)
CASSFARNQPQHF

SEQ ID NO: 486745 - protein, 15 aa, Homo sapiens
  CDR3 for alpha chain variable domain of TCR clone 243373 (TRAV17, TRAJ57)
CATGPSQGGSEKLVF

SEQ ID NO: 486746 - protein, 13 aa, Homo sapiens
  CDR3 for beta chain variable domain of TCR clone 243373 (TRBV12-4, TRBJ1-5)
CASSPRQYQPQHF

SEQ ID NO: 486747 - protein, 11 aa, Homo sapiens
  CDR3 for alpha chain variable domain of TCR clone 243374 (TRAV4, TRAJ31)
CLVGDNARLMV

SEQ ID NO: 486748 - protein, 15 aa, Homo sapiens
  CDR3 for beta chain variable domain of TCR clone 243374 (TRBV10-2, TRBJ2-6)
CASSEQGTGANVLTF

SEQ ID NO: 486749 - protein, 17 aa, Homo sapiens
  CDR3 for alpha chain variable domain of TCR clone 243375 (TRAV3, TRAJ28)
CAVREAYSGAGSYRLTF

SEQ ID NO: 486750 - protein, 18 aa, Homo sapiens
  CDR3 for beta chain variable domain of TCR clone 243375 (TRBV27, TRBJ2-1)
CASGNRAVGVGSKNEQFF

SEQ ID NO: 486751 - protein, 16 aa, Homo sapiens
  CDR3 for alpha chain variable domain of TCR clone 243376 (TRAV26-1, TRAJ45)
CIVEKYSGGGAVGLTF

SEQ ID NO: 486752 - protein, 15 aa, Homo sapiens
  CDR3 for beta chain variable domain of TCR clone 243376 (TRBV15, TRBJ2-7)
CHQQRPIQQAYEQYF

SEQ ID NO: 486753 - protein, 14 aa, Homo sapiens
  CDR3 for alpha chain variable domain of TCR clone 243377 (TRAV35, TRAJ22)
CAGLRPGSARQLTF

SEQ ID NO: 486754 - protein, 14 aa, Homo sapiens
  CDR3 for beta chain variable domain of TCR clone 243377 (TRBV7-2, TRBJ2-7)
RASSPKTSFYEQYF

SEQ ID NO: 486755 - protein, 15 aa, Homo sapiens
  CDR3 for alpha chain variable domain of TCR clone 243378 (TRAV17, TRAJ13)
CATDAGSAGYQKVTF

SEQ ID NO: 486756 - protein, 17 aa, Homo sapiens
  CDR3 for beta chain variable domain of TCR clone 243378 (TRBV11-2, TRBJ2-1)
CASSLCPPGVEYNEQFF

SEQ ID NO: 486757 - protein, 10 aa, Homo sapiens
  CDR3 for alpha chain variable domain of TCR clone 243379 (TRAV5, TRAJ34)
CAEDTNKLIF

SEQ ID NO: 486758 - protein, 12 aa, Homo sapiens
  CDR3 for beta chain variable domain of TCR clone 243379 (TRBV11-2, TRBJ2-2)
CASSLGGGELFF

SEQ ID NO: 486759 - protein, 17 aa, Homo sapiens
  CDR3 for alpha chain variable domain of TCR clone 243380 (TRAV4, TRAJ13)
CLVGVQGSSGGYQKVTF

SEQ ID NO: 486760 - protein, 18 aa, Homo sapiens
  CDR3 for beta chain variable domain of TCR clone 243380 (TRBV15, TRBJ2-3)
CVPPAEMAPGAGTHTQYF

SEQ ID NO: 486761 - protein, 12 aa, Homo sapiens
  CDR3 for alpha chain variable domain of TCR clone 243381 (TRAV20, TRAJ54)
CAVQEGAQKLVF

SEQ ID NO: 486762 - protein, 13 aa, Homo sapiens
  CDR3 for beta chain variable domain of TCR clone 243381 (TRBV20-1, TRBJ1-1)
CSARVGGNTEAFF

SEQ ID NO: 486763 - protein, 12 aa, Homo sapiens
  CDR3 for alpha chain variable domain of TCR clone 243382 (TRAV21, TRAJ11)
CAATSGYSTLTF

SEQ ID NO: 486764 - protein, 12 aa, Homo sapiens
  CDR3 for beta chain variable domain of TCR clone 243382 (TRBV28, TRBJ2-3)
CASSLYRDTQYF

SEQ ID NO: 486765 - protein, 10 aa, Homo sapiens
  CDR3 for alpha chain variable domain of TCR clone 243383 (TRAV8-6, TRAJ26)
CVGDGQNFVF

SEQ ID NO: 486766 - protein, 14 aa, Homo sapiens
  CDR3 for beta chain variable domain of TCR clone 243383 (TRBV20-1, TRBJ2-4)
CSAVAGGPGNIQYF

SEQ ID NO: 486767 - protein, 21 aa, Homo sapiens
  CDR3 for alpha chain variable domain of TCR clone 243384 (TRAV30, TRAJ43)
GLPAQLLRNPLPIIELNDMRF

SEQ ID NO: 486768 - protein, 14 aa, Homo sapiens
  CDR3 for beta chain variable domain of TCR clone 243384 (TRBV27, TRBJ2-1)
CASRHLGGGKEQFL

SEQ ID NO: 486769 - protein, 12 aa, Homo sapiens
  CDR3 for alpha chain variable domain of TCR clone 243385 (TRAV16, TRAJ10)
CSRTGGGNKLTF

SEQ ID NO: 486770 - protein, 16 aa, Homo sapiens
  CDR3 for beta chain variable domain of TCR clone 243385 (TRBV4-2, TRBJ1-2)
CASSQAGTKANYGYTF

SEQ ID NO: 486771 - protein, 15 aa, Homo sapiens
  CDR3 for alpha chain variable domain of TCR clone 243386 (TRAV35, TRAJ40)
CAGQLGTSGTYKYIF

SEQ ID NO: 486772 - protein, 14 aa, Homo sapiens
  CDR3 for beta chain variable domain of TCR clone 243386 (TRBV7-3, TRBJ2-1)
WAGSLAGGTNEQFF

SEQ ID NO: 486773 - protein, 19 aa, Homo sapiens
  CDR3 for alpha chain variable domain of TCR clone 243387 (TRAV3, TRAJ6)
CAVRDRNPSRSGGSYIPTF

SEQ ID NO: 486774 - protein, 15 aa, Homo sapiens
  CDR3 for beta chain variable domain of TCR clone 243387 (TRBV18, TRBJ2-7)
CASSPNFMDSYEQYF

SEQ ID NO: 486775 - protein, 13 aa, Homo sapiens
  CDR3 for alpha chain variable domain of TCR clone 243388 (TRAV8-3, TRAJ44)
CAVVPGTASKLTL

SEQ ID NO: 486776 - protein, 14 aa, Homo sapiens
  CDR3 for beta chain variable domain of TCR clone 243388 (TRBV11-2, TRBJ2-3)
CASSRLARTDTQHF

SEQ ID NO: 486777 - protein, 11 aa, Homo sapiens
  CDR3 for alpha chain variable domain of TCR clone 243389 (TRAV35, TRAJ34)
CLARNTDKLIF

SEQ ID NO: 486778 - protein, 14 aa, Homo sapiens
  CDR3 for beta chain variable domain of TCR clone 243389 (TRBV5-1, TRBJ2-7)
CASSRGESLYEQYF

SEQ ID NO: 486779 - protein, 12 aa, Homo sapiens
  CDR3 for alpha chain variable domain of TCR clone 243390 (TRAV17, TRAJ20)
CATQSNDYKLSF

SEQ ID NO: 486780 - protein, 13 aa, Homo sapiens
  CDR3 for beta chain variable domain of TCR clone 243390 (TRBV10-3, TRBJ1-1)
CAIIPEGGTDAFF

SEQ ID NO: 486781 - protein, 14 aa, Homo sapiens
  CDR3 for alpha chain variable domain of TCR clone 243391 (TRAV13-1, TRAJ35)
CAASKGSFGNVLHC

SEQ ID NO: 486782 - protein, 14 aa, Homo sapiens
  CDR3 for beta chain variable domain of TCR clone 243391 (TRBV7-9, TRBJ2-1)
CASSPRDSLYEQFF

SEQ ID NO: 486783 - protein, 14 aa, Homo sapiens
  CDR3 for alpha chain variable domain of TCR clone 243392 (TRAV35, TRAJ22)
CAGLRPGSARQLTF

SEQ ID NO: 486784 - protein, 13 aa, Homo sapiens
  CDR3 for beta chain variable domain of TCR clone 243392 (TRBV12-4, TRBJ2-7)
CASSPTETYEQYF

SEQ ID NO: 486785 - protein, 11 aa, Homo sapiens
  CDR3 for alpha chain variable domain of TCR clone 243393 (TRAV16, TRAJ31)
CALFNNARLMF

SEQ ID NO: 486786 - protein, 16 aa, Homo sapiens
  CDR3 for beta chain variable domain of TCR clone 243393 (TRBV13, TRBJ2-2)
CASSPRTGEHTGELFF

SEQ ID NO: 486787 - protein, 14 aa, Homo sapiens
  CDR3 for alpha chain variable domain of TCR clone 243394 (TRAV12-2, TRAJ13)
SAVKKTGGYQKVTF

SEQ ID NO: 486788 - protein, 13 aa, Homo sapiens
  CDR3 for beta chain variable domain of TCR clone 243394 (TRBV7-9, TRBJ1-2)
CASSLKQNYGYTF

SEQ ID NO: 486789 - protein, 12 aa, Homo sapiens
  CDR3 for alpha chain variable domain of TCR clone 243395 (TRAV12-1, TRAJ16)
CVVFRDGQKLLF

SEQ ID NO: 486790 - protein, 16 aa, Homo sapiens
  CDR3 for beta chain variable domain of TCR clone 243395 (TRBV27, TRBJ2-5)
CASSYGPGGQKETQYF

SEQ ID NO: 486791 - protein, 12 aa, Homo sapiens
  CDR3 for alpha chain variable domain of TCR clone 243396 (TRAV2, TRAJ26)
CAGSPGRLWLEF

SEQ ID NO: 486792 - protein, 13 aa, Homo sapiens
  CDR3 for beta chain variable domain of TCR clone 243396 (TRBV7-9, TRBJ1-2)
CASSLKQNYGYTF

SEQ ID NO: 486793 - protein, 18 aa, Homo sapiens
  CDR3 for alpha chain variable domain of TCR clone 243397 (TRAV21, TRAJ52)
CAVRPSPAGGTSYGKLTS

SEQ ID NO: 486794 - protein, 16 aa, Homo sapiens
  CDR3 for beta chain variable domain of TCR clone 243397 (TRBV19, TRBJ2-2)
CASRSPGTGATGELFF

SEQ ID NO: 486795 - protein, 12 aa, Homo sapiens
  CDR3 for alpha chain variable domain of TCR clone 243398 (TRAV12-1, TRAJ40)
CVVYSGTYKYIF

SEQ ID NO: 486796 - protein, 16 aa, Homo sapiens
  CDR3 for beta chain variable domain of TCR clone 243398 (TRBV5-1, TRBJ2-1)
CASSMRTGTEHNEQFF

SEQ ID NO: 486797 - protein, 15 aa, Homo sapiens
  CDR3 for alpha chain variable domain of TCR clone 243399 (TRAV2, TRAJ37)
CAVGDGSSNTGKLIF

SEQ ID NO: 486798 - protein, 13 aa, Homo sapiens
  CDR3 for beta chain variable domain of TCR clone 243399 (TRBV20-1, TRBJ2-7)
CSAQTWLSYEQYF

SEQ ID NO: 486799 - protein, 16 aa, Homo sapiens
  CDR3 for alpha chain variable domain of TCR clone 243400 (TRAV1-2, TRAJ10)
CAVSGVLTGGGNKLTF

SEQ ID NO: 486800 - protein, 13 aa, Homo sapiens
  CDR3 for beta chain variable domain of TCR clone 243400 (TRBV7-9, TRBJ1-2)
CASSLKQNYGYTF

SEQ ID NO: 486801 - protein, 12 aa, Homo sapiens
  CDR3 for alpha chain variable domain of TCR clone 243401 (TRAV3, TRAJ31)
CAVRPRGPRLMF

SEQ ID NO: 486802 - protein, 17 aa, Homo sapiens
  CDR3 for beta chain variable domain of TCR clone 243401 (TRBV7-9, TRBJ1-5)
CASSASQGCYSNQPQHF

SEQ ID NO: 486803 - protein, 16 aa, Homo sapiens
  CDR3 for alpha chain variable domain of TCR clone 243402 (TRAV3, TRAJ37)
CAVRPHGSGNTGKLIF

SEQ ID NO: 486804 - protein, 16 aa, Homo sapiens
  CDR3 for beta chain variable domain of TCR clone 243402 (TRBV5-4, TRBJ2-1)
CASSLVGSGQDNEQFF

SEQ ID NO: 486805 - protein, 10 aa, Homo sapiens
  CDR3 for alpha chain variable domain of TCR clone 243403 (TRAV2, TRAJ34)
CAVVNDKLIF

SEQ ID NO: 486806 - protein, 14 aa, Homo sapiens
  CDR3 for beta chain variable domain of TCR clone 243403 (TRBV5-5, TRBJ2-2)
CASSLLGDTGELFF

SEQ ID NO: 486807 - protein, 13 aa, Homo sapiens
  CDR3 for alpha chain variable domain of TCR clone 243404 (TRAV1-2, TRAJ9)
CAALNTGGFKTIF

SEQ ID NO: 486808 - protein, 15 aa, Homo sapiens
  CDR3 for beta chain variable domain of TCR clone 243404 (TRBV7-3, TRBJ2-1)
CASSYSTSAHNEQFF

SEQ ID NO: 486809 - protein, 12 aa, Homo sapiens
  CDR3 for alpha chain variable domain of TCR clone 243405 (TRAV1-2, TRAJ29)
CAVPSGITPLVF

SEQ ID NO: 486810 - protein, 12 aa, Homo sapiens
  CDR3 for beta chain variable domain of TCR clone 243405 (TRBV7-9, TRBJ2-7)
CASSFGSYEQYF

SEQ ID NO: 486811 - protein, 18 aa, Homo sapiens
  CDR3 for alpha chain variable domain of TCR clone 243406 (TRAV14/DV4, TRAJ11)
CAMREAHHRNSGYSTLTF

SEQ ID NO: 486812 - protein, 16 aa, Homo sapiens
  CDR3 for beta chain variable domain of TCR clone 243406 (TRBV7-2, TRBJ1-4)
CASSLAPGRRDEKLFF

SEQ ID NO: 486813 - protein, 21 aa, Homo sapiens
  CDR3 for alpha chain variable domain of TCR clone 243407 (TRAV1-1, TRAJ6)
CLLLLRCERLERTGGSYIPTF

SEQ ID NO: 486814 - protein, 13 aa, Homo sapiens
  CDR3 for beta chain variable domain of TCR clone 243407 (TRBV10-2, TRBJ2-7)
GASGASGGYEQYF

SEQ ID NO: 486815 - protein, 13 aa, Homo sapiens
  CDR3 for alpha chain variable domain of TCR clone 243408 (TRAV26-1, TRAJ34)
CIVRPWITDKLLC

SEQ ID NO: 486816 - protein, 14 aa, Homo sapiens
  CDR3 for beta chain variable domain of TCR clone 243408 (TRBV12-4, TRBJ1-4)
CASSRQGANEKLFF

SEQ ID NO: 486817 - protein, 11 aa, Homo sapiens
  CDR3 for alpha chain variable domain of TCR clone 243409 (TRAV2, TRAJ30)
CAANRDDKIIF

SEQ ID NO: 486818 - protein, 13 aa, Homo sapiens
  CDR3 for beta chain variable domain of TCR clone 243409 (TRBV20-1, TRBJ1-1)
CSAPLGGGTEAFF

SEQ ID NO: 486819 - protein, 14 aa, Homo sapiens
  CDR3 for alpha chain variable domain of TCR clone 243410 (TRAV9-2, TRAJ39)
CALYIYNAGNMLTF

SEQ ID NO: 486820 - protein, 16 aa, Homo sapiens
  CDR3 for beta chain variable domain of TCR clone 243410 (TRBV5-1, TRBJ1-1)
CASSSGGNSLDTEAFF

SEQ ID NO: 486821 - protein, 11 aa, Homo sapiens
  CDR3 for alpha chain variable domain of TCR clone 243411 (TRAV1-2, TRAJ20)
CAVANDSKLSF

SEQ ID NO: 486822 - protein, 12 aa, Homo sapiens
  CDR3 for beta chain variable domain of TCR clone 243411 (TRBV7-8, TRBJ2-7)
CASSLGDREQYF

SEQ ID NO: 486823 - protein, 16 aa, Homo sapiens
  CDR3 for alpha chain variable domain of TCR clone 243412 (TRAV21, TRAJ37)
CAVRTPGPSNTGKLIF

SEQ ID NO: 486824 - protein, 13 aa, Homo sapiens
  CDR3 for beta chain variable domain of TCR clone 243412 (TRBV7-9, TRBJ2-5)
CASLPSGRETQYF

SEQ ID NO: 486825 - protein, 12 aa, Homo sapiens
  CDR3 for alpha chain variable domain of TCR clone 243413 (TRAV2, TRAJ10)
CASTGGGNKLNF

SEQ ID NO: 486826 - protein, 13 aa, Homo sapiens
  CDR3 for beta chain variable domain of TCR clone 243413 (TRBV7-2, TRBJ2-2)
CQQRTGAAGELFF

SEQ ID NO: 486827 - protein, 17 aa, Homo sapiens
  CDR3 for alpha chain variable domain of TCR clone 243414 (TRAV3, TRAJ22)
CAVRDPPLEGFCKATDL

SEQ ID NO: 486828 - protein, 15 aa, Homo sapiens
  CDR3 for beta chain variable domain of TCR clone 243414 (TRBV19, TRBJ1-1)
CASTSGQIQNTEAFF

SEQ ID NO: 486829 - protein, 12 aa, Homo sapiens
  CDR3 for alpha chain variable domain of TCR clone 243415 (TRAV1-1, TRAJ39)
CAVPVVGNMLSF

SEQ ID NO: 486830 - protein, 16 aa, Homo sapiens
  CDR3 for beta chain variable domain of TCR clone 243415 (TRBV19, TRBJ2-3)
CASSPGAASRTDTQYF

SEQ ID NO: 486831 - protein, 13 aa, Homo sapiens
  CDR3 for alpha chain variable domain of TCR clone 243416 (TRAV12-2, TRAJ24)
CTVSTDSWGKLQF

SEQ ID NO: 486832 - protein, 12 aa, Homo sapiens
  CDR3 for beta chain variable domain of TCR clone 243416 (TRBV7-6, TRBJ2-7)
CASSLADSEQYF

SEQ ID NO: 486833 - protein, 16 aa, Homo sapiens
  CDR3 for alpha chain variable domain of TCR clone 243417 (TRAV3, TRAJ37)
CAVRVRGSGNPGKLIF

SEQ ID NO: 486834 - protein, 16 aa, Homo sapiens
  CDR3 for beta chain variable domain of TCR clone 243417 (TRBV19, TRBJ2-1)
CASSKAGPSSYNEQFF

SEQ ID NO: 486835 - protein, 14 aa, Homo sapiens
  CDR3 for alpha chain variable domain of TCR clone 243418 (TRAV9-2, TRAJ39)
CALYIYNAGNMLPF

SEQ ID NO: 486836 - protein, 15 aa, Homo sapiens
  CDR3 for beta chain variable domain of TCR clone 243418 (TRBV12-5, TRBJ2-2)
CASGRLGGNTGELFF

SEQ ID NO: 486837 - protein, 14 aa, Homo sapiens
  CDR3 for alpha chain variable domain of TCR clone 243419 (TRAV17, TRAJ5)
CATVALTGRRALTF

SEQ ID NO: 486838 - protein, 14 aa, Homo sapiens
  CDR3 for beta chain variable domain of TCR clone 243419 (TRBV28, TRBJ2-7)
CASSPYGMACEQYF

SEQ ID NO: 486839 - protein, 14 aa, Homo sapiens
  CDR3 for alpha chain variable domain of TCR clone 243420 (TRAV13-2, TRAJ43)
CAEIPTYNNNDMRF

SEQ ID NO: 486840 - protein, 15 aa, Homo sapiens
  CDR3 for beta chain variable domain of TCR clone 243420 (TRBV7-9, TRBJ2-2)
CASGPLDTFPGELFC

SEQ ID NO: 486841 - protein, 14 aa, Homo sapiens
  CDR3 for alpha chain variable domain of TCR clone 243421 (TRAV1-2, TRAJ8)
CAVREDTGFQKLVF

SEQ ID NO: 486842 - protein, 14 aa, Homo sapiens
  CDR3 for beta chain variable domain of TCR clone 243421 (TRBV15, TRBJ2-3)
CATGSGTSTDTQYF

SEQ ID NO: 486843 - protein, 15 aa, Homo sapiens
  CDR3 for alpha chain variable domain of TCR clone 243422 (TRAV12-2, TRAJ43)
CAFDMRFGTGTRLTV

SEQ ID NO: 486844 - protein, 13 aa, Homo sapiens
  CDR3 for beta chain variable domain of TCR clone 243422 (TRBV4-2, TRBJ1-1)
CASSQAGNTEAFF

SEQ ID NO: 486845 - protein, 12 aa, Homo sapiens
  CDR3 for alpha chain variable domain of TCR clone 243423 (TRAV1-2, TRAJ33)
CAALDSNYQLIW

SEQ ID NO: 486846 - protein, 13 aa, Homo sapiens
  CDR3 for beta chain variable domain of TCR clone 243423 (TRBV3-1, TRBJ1-2)
CASSQIQGHGYTF

SEQ ID NO: 486847 - protein, 15 aa, Homo sapiens
  CDR3 for alpha chain variable domain of TCR clone 243424 (TRAV14/DV4, TRAJ10)
CAMRELTGGGNKLTF

SEQ ID NO: 486848 - protein, 13 aa, Homo sapiens
  CDR3 for beta chain variable domain of TCR clone 243424 (TRBV27, TRBJ2-1)
CASSLSRSHEQFF

SEQ ID NO: 486849 - protein, 17 aa, Homo sapiens
  CDR3 for alpha chain variable domain of TCR clone 243425 (TRAV13-1, TRAJ31)
CAPRDRLMFGDGTQLVV

SEQ ID NO: 486850 - protein, 13 aa, Homo sapiens
  CDR3 for beta chain variable domain of TCR clone 243425 (TRBV12-4, TRBJ2-7)
CASSLSGVYEQYF

SEQ ID NO: 486851 - protein, 10 aa, Homo sapiens
  CDR3 for alpha chain variable domain of TCR clone 243426 (TRAV16, TRAJ26)
CAPEALWSEF

SEQ ID NO: 486852 - protein, 15 aa, Homo sapiens
  CDR3 for beta chain variable domain of TCR clone 243426 (TRBV7-2, TRBJ2-3)
CASSLTGTSTDTQYF

SEQ ID NO: 486853 - protein, 21 aa, Homo sapiens
  CDR3 for alpha chain variable domain of TCR clone 243427 (TRAV12-1, TRAJ37)
CVVNGGLWQHRQTNPWARDNF

SEQ ID NO: 486854 - protein, 12 aa, Homo sapiens
  CDR3 for beta chain variable domain of TCR clone 243427 (TRBV20-1, TRBJ1-2)
CSAPGFNYGYTF

SEQ ID NO: 486855 - protein, 14 aa, Homo sapiens
  CDR3 for alpha chain variable domain of TCR clone 243428 (TRAV1-2, TRAJ16)
CAVNRFSDGQKLLF

SEQ ID NO: 486856 - protein, 14 aa, Homo sapiens
  CDR3 for beta chain variable domain of TCR clone 243428 (TRBV7-3, TRBJ1-1)
CARSLKGGNTEAFF

SEQ ID NO: 486857 - protein, 15 aa, Homo sapiens
  CDR3 for alpha chain variable domain of TCR clone 243429 (TRAV8-2, TRAJ27)
CVVSDRGTNAGKSTF

SEQ ID NO: 486858 - protein, 14 aa, Homo sapiens
  CDR3 for beta chain variable domain of TCR clone 243429 (TRBV12-4, TRBJ2-3)
CASSLGQGTDTQYF

SEQ ID NO: 486859 - protein, 12 aa, Homo sapiens
  CDR3 for alpha chain variable domain of TCR clone 243430 (TRAV8-3, TRAJ6)
CAVAGGSDIPTF

SEQ ID NO: 486860 - protein, 14 aa, Homo sapiens
  CDR3 for beta chain variable domain of TCR clone 243430 (TRBV27, TRBJ2-7)
CASATGTERREQYF

SEQ ID NO: 486861 - protein, 12 aa, Homo sapiens
  CDR3 for alpha chain variable domain of TCR clone 243431 (TRAV12-3, TRAJ17)
CAMTLTGKKLTF

SEQ ID NO: 486862 - protein, 14 aa, Homo sapiens
  CDR3 for beta chain variable domain of TCR clone 243431 (TRBV11-2, TRBJ2-3)
CASSRLARTDTQYF

SEQ ID NO: 486863 - protein, 14 aa, Homo sapiens
  CDR3 for alpha chain variable domain of TCR clone 243432 (TRAV12-3, TRAJ57)
CAMSAWGGSEKRVF

SEQ ID NO: 486864 - protein, 14 aa, Homo sapiens
  CDR3 for beta chain variable domain of TCR clone 243432 (TRBV18, TRBJ2-5)
CASSPGVSQETQYF

SEQ ID NO: 486865 - protein, 14 aa, Homo sapiens
  CDR3 for alpha chain variable domain of TCR clone 243433 (TRAV16, TRAJ33)
CALSAMDINYQLIW

SEQ ID NO: 486866 - protein, 17 aa, Homo sapiens
  CDR3 for beta chain variable domain of TCR clone 243433 (TRBV25-1, TRBJ2-7)
CASSDARVVFSSYEQYF

SEQ ID NO: 486867 - protein, 14 aa, Homo sapiens
  CDR3 for alpha chain variable domain of TCR clone 243434 (TRAV16, TRAJ58)
CALFKETSGSRLTF

SEQ ID NO: 486868 - protein, 15 aa, Homo sapiens
  CDR3 for beta chain variable domain of TCR clone 243434 (TRBV9, TRBJ1-6)
CASSVAGTGDSPIHF

SEQ ID NO: 486869 - protein, 16 aa, Homo sapiens
  CDR3 for alpha chain variable domain of TCR clone 243435 (TRAV12-3, TRAJ53)
CAMSTGSGGSNYKLTF

SEQ ID NO: 486870 - protein, 16 aa, Homo sapiens
  CDR3 for beta chain variable domain of TCR clone 243435 (TRBV19, TRBJ2-1)
CASSKAGPSSYNEQFF

SEQ ID NO: 486871 - protein, 15 aa, Homo sapiens
  CDR3 for alpha chain variable domain of TCR clone 243436 (TRAV21, TRAJ37)
CAVRPTLGNTGKLIF

SEQ ID NO: 486872 - protein, 16 aa, Homo sapiens
  CDR3 for beta chain variable domain of TCR clone 243436 (TRBV24-1, TRBJ2-3)
CATSDRRQDLTDTQYF

SEQ ID NO: 486873 - protein, 13 aa, Homo sapiens
  CDR3 for alpha chain variable domain of TCR clone 243437 (TRAV12-1, TRAJ16)
CVVNGPGGQKLLF

SEQ ID NO: 486874 - protein, 15 aa, Homo sapiens
  CDR3 for beta chain variable domain of TCR clone 243437 (TRBV6-3, TRBJ2-7)
CASSSPGTVFYEQYF

SEQ ID NO: 486875 - protein, 15 aa, Homo sapiens
  CDR3 for alpha chain variable domain of TCR clone 243438 (TRAV3, TRAJ11)
CAVRDRGSGYSTLTF

SEQ ID NO: 486876 - protein, 19 aa, Homo sapiens
  CDR3 for beta chain variable domain of TCR clone 243438 (TRBV25-1, TRBJ2-2)
CAILVYRVDRGRKTGEQFF

SEQ ID NO: 486877 - protein, 14 aa, Homo sapiens
  CDR3 for alpha chain variable domain of TCR clone 243439 (TRAV26-1, TRAJ38)
CIAYNAGNNRKLIW

SEQ ID NO: 486878 - protein, 13 aa, Homo sapiens
  CDR3 for beta chain variable domain of TCR clone 243439 (TRBV7-9, TRBJ1-2)
CASSLKQNYGYTF

SEQ ID NO: 486879 - protein, 18 aa, Homo sapiens
  CDR3 for alpha chain variable domain of TCR clone 243440 (TRAV9-2, TRAJ52)
CALSRHYAGGTSYGKLTF

SEQ ID NO: 486880 - protein, 13 aa, Homo sapiens
  CDR3 for beta chain variable domain of TCR clone 243440 (TRBV9, TRBJ2-1)
CASSVGQGGEQFF

SEQ ID NO: 486881 - protein, 13 aa, Homo sapiens
  CDR3 for alpha chain variable domain of TCR clone 243441 (TRAV1-1, TRAJ11)
CAVLNSGYSTLTF

SEQ ID NO: 486882 - protein, 17 aa, Homo sapiens
  CDR3 for beta chain variable domain of TCR clone 243441 (TRBV4-3, TRBJ2-1)
CASSQFSSGRASGEQFF

SEQ ID NO: 486883 - protein, 11 aa, Homo sapiens
  CDR3 for alpha chain variable domain of TCR clone 243442 (TRAV13-2, TRAJ20)
CADSNDYKLSV

SEQ ID NO: 486884 - protein, 16 aa, Homo sapiens
  CDR3 for beta chain variable domain of TCR clone 243442 (TRBV10-3, TRBJ2-1)
CAISGVGDGGGGEQFF

SEQ ID NO: 486885 - protein, 12 aa, Homo sapiens
  CDR3 for alpha chain variable domain of TCR clone 243443 (TRAV12-1, TRAJ23)
CVVNIPGGKLLF

SEQ ID NO: 486886 - protein, 15 aa, Homo sapiens
  CDR3 for beta chain variable domain of TCR clone 243443 (TRBV7-2, TRBJ2-7)
CASSLVSSGSYEQYF

SEQ ID NO: 486887 - protein, 13 aa, Homo sapiens
  CDR3 for alpha chain variable domain of TCR clone 243444 (TRAV16, TRAJ28)
CAPTGAGSYQLTF

SEQ ID NO: 486888 - protein, 16 aa, Homo sapiens
  CDR3 for beta chain variable domain of TCR clone 243444 (TRBV28, TRBJ1-5)
CASSLTGQGWNQAQHF

SEQ ID NO: 486889 - protein, 17 aa, Homo sapiens
  CDR3 for alpha chain variable domain of TCR clone 243445 (TRAV12-3, TRAJ6)
CAMSARGGAGGSYIPTF

SEQ ID NO: 486890 - protein, 11 aa, Homo sapiens
  CDR3 for beta chain variable domain of TCR clone 243445 (TRBV12-4, TRBJ2-3)
CSSTLPDTQYF

SEQ ID NO: 486891 - protein, 15 aa, Homo sapiens
  CDR3 for alpha chain variable domain of TCR clone 243446 (TRAV13-2, TRAJ10)
CAENKIGGGGNKPTF

SEQ ID NO: 486892 - protein, 15 aa, Homo sapiens
  CDR3 for beta chain variable domain of TCR clone 243446 (TRBV5-1, TRBJ1-2)
CASSPGDRGSYGYTF

SEQ ID NO: 486893 - protein, 13 aa, Homo sapiens
  CDR3 for alpha chain variable domain of TCR clone 243447 (TRAV12-3, TRAJ40)
CAMSDSGTYKYIF

SEQ ID NO: 486894 - protein, 14 aa, Homo sapiens
  CDR3 for beta chain variable domain of TCR clone 243447 (TRBV7-2, TRBJ1-5)
CASSTQGAGHPQHF

SEQ ID NO: 486895 - protein, 17 aa, Homo sapiens
  CDR3 for alpha chain variable domain of TCR clone 243448 (TRAV4, TRAJ42)
CLVGVLNYGGSQGNLIF

SEQ ID NO: 486896 - protein, 12 aa, Homo sapiens
  CDR3 for beta chain variable domain of TCR clone 243448 (TRBV20-1, TRBJ2-1)
FSAQYTYNEQFF

SEQ ID NO: 486897 - protein, 11 aa, Homo sapiens
  CDR3 for alpha chain variable domain of TCR clone 243449 (TRAV12-2, TRAJ31)
CAILNNARLMF

SEQ ID NO: 486898 - protein, 13 aa, Homo sapiens
  CDR3 for beta chain variable domain of TCR clone 243449 (TRBV20-1, TRBJ1-1)
CSARVGQGTEAFF

SEQ ID NO: 486899 - protein, 14 aa, Homo sapiens
  CDR3 for alpha chain variable domain of TCR clone 243450 (TRAV21, TRAJ58)
CAVRRGRSGSRLTF

SEQ ID NO: 486900 - protein, 15 aa, Homo sapiens
  CDR3 for beta chain variable domain of TCR clone 243450 (TRBV2, TRBJ2-1)
CASSELAGSYNEQFF

SEQ ID NO: 486901 - protein, 11 aa, Homo sapiens
  CDR3 for alpha chain variable domain of TCR clone 243451 (TRAV3, TRAJ21)
CAVVNFNKFYF

SEQ ID NO: 486902 - protein, 15 aa, Homo sapiens
  CDR3 for beta chain variable domain of TCR clone 243451 (TRBV15, TRBJ2-2)
CATSGTGGRVGELFF

SEQ ID NO: 486903 - protein, 13 aa, Homo sapiens
  CDR3 for alpha chain variable domain of TCR clone 243452 (TRAV8-3, TRAJ28)
CAVGAVGSYQLTF

SEQ ID NO: 486904 - protein, 17 aa, Homo sapiens
  CDR3 for beta chain variable domain of TCR clone 243452 (TRBV7-9, TRBJ1-5)
CASSQGHQPNSPSILVM

SEQ ID NO: 486905 - protein, 13 aa, Homo sapiens
  CDR3 for alpha chain variable domain of TCR clone 243453 (TRAV3, TRAJ20)
CAVRDTGDYKLSF

SEQ ID NO: 486906 - protein, 14 aa, Homo sapiens
  CDR3 for beta chain variable domain of TCR clone 243453 (TRBV28, TRBJ2-3)
CASSLTDLLDTQYF

SEQ ID NO: 486907 - protein, 13 aa, Homo sapiens
  CDR3 for alpha chain variable domain of TCR clone 243454 (TRAV8-3, TRAJ40)
CAVGAQYLRNLQI

SEQ ID NO: 486908 - protein, 16 aa, Homo sapiens
  CDR3 for beta chain variable domain of TCR clone 243454 (TRBV29-1, TRBJ2-7)
CSVEDAEDGTAYEQYF

SEQ ID NO: 486909 - protein, 15 aa, Homo sapiens
  CDR3 for alpha chain variable domain of TCR clone 243455 (TRAV2, TRAJ15)
CAVEDRGQAGTALIF

SEQ ID NO: 486910 - protein, 17 aa, Homo sapiens
  CDR3 for beta chain variable domain of TCR clone 243455 (TRBV7-8, TRBJ2-6)
CASSAGTGGAGANVLTF

SEQ ID NO: 486911 - protein, 10 aa, Homo sapiens
  CDR3 for alpha chain variable domain of TCR clone 243456 (TRAV23/DV6, TRAJ43)
CSVAVAALEQ

SEQ ID NO: 486912 - protein, 13 aa, Homo sapiens
  CDR3 for beta chain variable domain of TCR clone 243456 (TRBV12-4, TRBJ1-2)
CASSLRQGKGYTF

SEQ ID NO: 486913 - protein, 19 aa, Homo sapiens
  CDR3 for alpha chain variable domain of TCR clone 243457 (TRAV2, TRAJ20)
ILQVREADAAVYRDCKLSF

SEQ ID NO: 486914 - protein, 12 aa, Homo sapiens
  CDR3 for beta chain variable domain of TCR clone 243457 (TRBV7-9, TRBJ1-1)
CASSLVRGEAFF

SEQ ID NO: 486915 - protein, 15 aa, Homo sapiens
  CDR3 for alpha chain variable domain of TCR clone 243458 (TRAV3, TRAJ22)
CAVRDRGGSARQLTF

SEQ ID NO: 486916 - protein, 12 aa, Homo sapiens
  CDR3 for beta chain variable domain of TCR clone 243458 (TRBV14, TRBJ2-7)
CASSSLKGEQYF

SEQ ID NO: 486917 - protein, 12 aa, Homo sapiens
  CDR3 for alpha chain variable domain of TCR clone 243459 (TRAV1-2, TRAJ29)
CAVPSGNTPLVF

SEQ ID NO: 486918 - protein, 15 aa, Homo sapiens
  CDR3 for beta chain variable domain of TCR clone 243459 (TRBV7-2, TRBJ1-2)
CASSPRAGWNYGYAF

SEQ ID NO: 486919 - protein, 14 aa, Homo sapiens
  CDR3 for alpha chain variable domain of TCR clone 243460 (TRAV16, TRAJ40)
CALHESYYLRNLQI

SEQ ID NO: 486920 - protein, 12 aa, Homo sapiens
  CDR3 for beta chain variable domain of TCR clone 243460 (TRBV11-2, TRBJ2-2)
CASSLPTGELFF

SEQ ID NO: 486921 - protein, 13 aa, Homo sapiens
  CDR3 for alpha chain variable domain of TCR clone 243461 (TRAV12-3, TRAJ33)
CAMSVNSNHQLIW

SEQ ID NO: 486922 - protein, 17 aa, Homo sapiens
  CDR3 for beta chain variable domain of TCR clone 243461 (TRBV7-8, TRBJ2-7)
CASSFTSGRPPSYEQYF

SEQ ID NO: 486923 - protein, 14 aa, Homo sapiens
  CDR3 for alpha chain variable domain of TCR clone 243462 (TRAV12-3, TRAJ5)
CAMSTYTGRRALTF

SEQ ID NO: 486924 - protein, 13 aa, Homo sapiens
  CDR3 for beta chain variable domain of TCR clone 243462 (TRBV28, TRBJ2-3)
CASYTGGGDTQYF

SEQ ID NO: 486925 - protein, 14 aa, Homo sapiens
  CDR3 for alpha chain variable domain of TCR clone 243463 (TRAV38-1, TRAJ43)
CAFMKHNNNNDMRF

SEQ ID NO: 486926 - protein, 11 aa, Homo sapiens
  CDR3 for beta chain variable domain of TCR clone 243463 (TRBV11-2, TRBJ2-2)
CASSLPGELFF

SEQ ID NO: 486927 - protein, 16 aa, Homo sapiens
  CDR3 for alpha chain variable domain of TCR clone 243464 (TRAV30, TRAJ24)
CGTEIVDADSWGKFQF

SEQ ID NO: 486928 - protein, 15 aa, Homo sapiens
  CDR3 for beta chain variable domain of TCR clone 243464 (TRBV12-4, TRBJ2-1)
CASSLRDAAYNEQFF

SEQ ID NO: 486929 - protein, 17 aa, Homo sapiens
  CDR3 for alpha chain variable domain of TCR clone 243465 (TRAV4, TRAJ18)
CLVGERSVGSTLGRLYF

SEQ ID NO: 486930 - protein, 16 aa, Homo sapiens
  CDR3 for beta chain variable domain of TCR clone 243465 (TRBV15, TRBJ1-4)
CATSRDSPPGREKLFV

SEQ ID NO: 486931 - protein, 13 aa, Homo sapiens
  CDR3 for alpha chain variable domain of TCR clone 243466 (TRAV13-1, TRAJ40)
CAARTSGTYKYIF

SEQ ID NO: 486932 - protein, 16 aa, Homo sapiens
  CDR3 for beta chain variable domain of TCR clone 243466 (TRBV20-1, TRBJ1-2)
CSASMGQGVANYGYTF

SEQ ID NO: 486933 - protein, 14 aa, Homo sapiens
  CDR3 for alpha chain variable domain of TCR clone 243467 (TRAV17, TRAJ34)
CATDSLAGTDKHIF

SEQ ID NO: 486934 - protein, 13 aa, Homo sapiens
  CDR3 for beta chain variable domain of TCR clone 243467 (TRBV11-2, TRBJ2-7)
CASSGTRPYEQYF

SEQ ID NO: 486935 - protein, 16 aa, Homo sapiens
  CDR3 for alpha chain variable domain of TCR clone 243468 (TRAV26-1, TRAJ23)
CIVRPHGNNQGVKLIF

SEQ ID NO: 486936 - protein, 13 aa, Homo sapiens
  CDR3 for beta chain variable domain of TCR clone 243468 (TRBV27, TRBJ2-7)
CASSLTTGYKQYF

SEQ ID NO: 486937 - protein, 22 aa, Homo sapiens
  CDR3 for alpha chain variable domain of TCR clone 243469 (TRAV8-4, TRAJ9)
CAVRINTGGFKTILEQEQDYLL

SEQ ID NO: 486938 - protein, 15 aa, Homo sapiens
  CDR3 for beta chain variable domain of TCR clone 243469 (TRBV20-1, TRBJ2-7)
CSARDRVSGMDEQYF

SEQ ID NO: 486939 - protein, 13 aa, Homo sapiens
  CDR3 for alpha chain variable domain of TCR clone 243470 (TRAV16, TRAJ52)
CTLRGTSYGKLTF

SEQ ID NO: 486940 - protein, 18 aa, Homo sapiens
  CDR3 for beta chain variable domain of TCR clone 243470 (TRBV13, TRBJ2-6)
CASSPMTSGGSGANVLTF

SEQ ID NO: 486941 - protein, 14 aa, Homo sapiens
  CDR3 for alpha chain variable domain of TCR clone 243471 (TRAV12-1, TRAJ9)
FVVTGDTGGFKTIF

SEQ ID NO: 486942 - protein, 16 aa, Homo sapiens
  CDR3 for beta chain variable domain of TCR clone 243471 (TRBV29-1, TRBJ1-2)
CSVEANRDIANYGYTF

SEQ ID NO: 486943 - protein, 13 aa, Homo sapiens
  CDR3 for alpha chain variable domain of TCR clone 243472 (TRAV1-2, TRAJ9)
CAALNTGGFKTIF

SEQ ID NO: 486944 - protein, 16 aa, Homo sapiens
  CDR3 for beta chain variable domain of TCR clone 243472 (TRBV28, TRBJ1-5)
CASSLRGGYSNQPQHF

SEQ ID NO: 486945 - protein, 14 aa, Homo sapiens
  CDR3 for alpha chain variable domain of TCR clone 243473 (TRAV17, TRAJ34)
CATDSLEGTDKLIF

SEQ ID NO: 486946 - protein, 12 aa, Homo sapiens
  CDR3 for beta chain variable domain of TCR clone 243473 (TRBV11-2, TRBJ2-1)
CASSPGNNEQFF

SEQ ID NO: 486947 - protein, 14 aa, Homo sapiens
  CDR3 for alpha chain variable domain of TCR clone 243474 (TRAV27, TRAJ44)
CAASFTGTASRLTF

SEQ ID NO: 486948 - protein, 13 aa, Homo sapiens
  CDR3 for beta chain variable domain of TCR clone 243474 (TRBV27, TRBJ2-3)
CATSRGGLYTQYF

SEQ ID NO: 486949 - protein, 13 aa, Homo sapiens
  CDR3 for alpha chain variable domain of TCR clone 243475 (TRAV12-1, TRAJ20)
CVGQRFNDYKLSF

SEQ ID NO: 486950 - protein, 12 aa, Homo sapiens
  CDR3 for beta chain variable domain of TCR clone 243475 (TRBV29-1, TRBJ2-3)
CSVTGGADTQYF

SEQ ID NO: 486951 - protein, 18 aa, Homo sapiens
  CDR3 for alpha chain variable domain of TCR clone 243476 (TRAV21, TRAJ52)
CAVRPSPAGGTSYGKLTF

SEQ ID NO: 486952 - protein, 12 aa, Homo sapiens
  CDR3 for beta chain variable domain of TCR clone 243476 (TRBV3-1, TRBJ2-3)
CASSQNRDTQYF

SEQ ID NO: 486953 - protein, 13 aa, Homo sapiens
  CDR3 for alpha chain variable domain of TCR clone 243477 (TRAV12-2, TRAJ40)
CAVAPSGTYKYIF

SEQ ID NO: 486954 - protein, 13 aa, Homo sapiens
  CDR3 for beta chain variable domain of TCR clone 243477 (TRBV11-3, TRBJ2-5)
CASSSGLQETQFF

SEQ ID NO: 486955 - protein, 15 aa, Homo sapiens
  CDR3 for alpha chain variable domain of TCR clone 243478 (TRAV16, TRAJ20)
CALKGGLRADHKLSF

SEQ ID NO: 486956 - protein, 16 aa, Homo sapiens
  CDR3 for beta chain variable domain of TCR clone 243478 (TRBV11-3, TRBJ2-2)
CASSSRTSPGTGELFF

SEQ ID NO: 486957 - protein, 11 aa, Homo sapiens
  CDR3 for alpha chain variable domain of TCR clone 243479 (TRAV1-2, TRAJ40)
CAVPGTYEYIF

SEQ ID NO: 486958 - protein, 15 aa, Homo sapiens
  CDR3 for beta chain variable domain of TCR clone 243479 (TRBV25-1, TRBJ1-4)
CTSSPGDSTNEKLFF

SEQ ID NO: 486959 - protein, 10 aa, Homo sapiens
  CDR3 for alpha chain variable domain of TCR clone 243480 (TRAV30, TRAJ48)
CGIGNEKLTF

SEQ ID NO: 486960 - protein, 13 aa, Homo sapiens
  CDR3 for beta chain variable domain of TCR clone 243480 (TRBV4-1, TRBJ2-1)
CASSQAGGDEQFF

SEQ ID NO: 486961 - protein, 16 aa, Homo sapiens
  CDR3 for alpha chain variable domain of TCR clone 243481 (TRAV8-3, TRAJ52)
YAVQPAGGTSYGKLTF

SEQ ID NO: 486962 - protein, 15 aa, Homo sapiens
  CDR3 for beta chain variable domain of TCR clone 243481 (TRBV11-2, TRBJ2-7)
CASSLAGGVATEQYF

SEQ ID NO: 486963 - protein, 13 aa, Homo sapiens
  CDR3 for alpha chain variable domain of TCR clone 243482 (TRAV17, TRAJ26)
CATVDNYGQNFVF

SEQ ID NO: 486964 - protein, 17 aa, Homo sapiens
  CDR3 for beta chain variable domain of TCR clone 243482 (TRBV28, TRBJ2-5)
CASSTPEGDALQETQYF

SEQ ID NO: 486965 - protein, 17 aa, Homo sapiens
  CDR3 for alpha chain variable domain of TCR clone 243483 (TRAV13-1, TRAJ28)
CAASPPYAGAGSYQLTF

SEQ ID NO: 486966 - protein, 16 aa, Homo sapiens
  CDR3 for beta chain variable domain of TCR clone 243483 (TRBV19, TRBJ2-1)
CASSKAGPSSYNEQFF

SEQ ID NO: 486967 - protein, 15 aa, Homo sapiens
  CDR3 for alpha chain variable domain of TCR clone 243484 (TRAV16, TRAJ16)
CALQGGGSDGQKLLF

SEQ ID NO: 486968 - protein, 14 aa, Homo sapiens
  CDR3 for beta chain variable domain of TCR clone 243484 (TRBV5-5, TRBJ1-5)
CASSGQGVDQPQHF

SEQ ID NO: 486969 - protein, 10 aa, Homo sapiens
  CDR3 for alpha chain variable domain of TCR clone 243485 (TRAV13-1, TRAJ27)
CAPLARQLNL

SEQ ID NO: 486970 - protein, 13 aa, Homo sapiens
  CDR3 for beta chain variable domain of TCR clone 243485 (TRBV7-3, TRBJ1-1)
CASSQDWGAEAFF

SEQ ID NO: 486971 - protein, 13 aa, Homo sapiens
  CDR3 for alpha chain variable domain of TCR clone 243486 (TRAV1-2, TRAJ9)
CAALNTGGFKTIF

SEQ ID NO: 486972 - protein, 15 aa, Homo sapiens
  CDR3 for beta chain variable domain of TCR clone 243486 (TRBV6-3, TRBJ2-7)
CASSSPVTVFYEQYF

SEQ ID NO: 486973 - protein, 14 aa, Homo sapiens
  CDR3 for alpha chain variable domain of TCR clone 243487 (TRAV8-4, TRAJ38)
CAVSYAGNNRKLCW

SEQ ID NO: 486974 - protein, 15 aa, Homo sapiens
  CDR3 for beta chain variable domain of TCR clone 243487 (TRBV12-4, TRBJ2-1)
CASSLLATGNNEQFF

SEQ ID NO: 486975 - protein, 12 aa, Homo sapiens
  CDR3 for alpha chain variable domain of TCR clone 243488 (TRAV8-3, TRAJ41)
CAVALSGYALNF

SEQ ID NO: 486976 - protein, 17 aa, Homo sapiens
  CDR3 for beta chain variable domain of TCR clone 243488 (TRBV7-3, TRBJ2-2)
CSSSLSGTSGGTGELFF

SEQ ID NO: 486977 - protein, 13 aa, Homo sapiens
  CDR3 for alpha chain variable domain of TCR clone 243489 (TRAV21, TRAJ27)
CAPRPGNAGKSTF

SEQ ID NO: 486978 - protein, 16 aa, Homo sapiens
  CDR3 for beta chain variable domain of TCR clone 243489 (TRBV11-2, TRBJ2-4)
CASSQEGRGGLDIQYF

SEQ ID NO: 486979 - protein, 20 aa, Homo sapiens
  CDR3 for alpha chain variable domain of TCR clone 243490 (TRAV30, TRAJ54)
SAAQSRSETQVVQGAQKPVF

SEQ ID NO: 486980 - protein, 11 aa, Homo sapiens
  CDR3 for beta chain variable domain of TCR clone 243490 (TRBV25-1, TRBJ2-4)
CQSRDKNIQYF

SEQ ID NO: 486981 - protein, 14 aa, Homo sapiens
  CDR3 for alpha chain variable domain of TCR clone 243491 (TRAV23/DV6, TRAJ24)
CAASLSHSWGKLQF

SEQ ID NO: 486982 - protein, 16 aa, Homo sapiens
  CDR3 for beta chain variable domain of TCR clone 243491 (TRBV7-9, TRBJ2-6)
CASSLKGPLRANVLTF

SEQ ID NO: 486983 - protein, 12 aa, Homo sapiens
  CDR3 for alpha chain variable domain of TCR clone 243492 (TRAV29/DV5, TRAJ26)
CAAIPSGQNFVF

SEQ ID NO: 486984 - protein, 15 aa, Homo sapiens
  CDR3 for beta chain variable domain of TCR clone 243492 (TRBV19, TRBJ1-5)
CASSDSGPRNQPHHF

SEQ ID NO: 486985 - protein, 13 aa, Homo sapiens
  CDR3 for alpha chain variable domain of TCR clone 243493 (TRAV21, TRAJ57)
CAVTKGGSEKLVF

SEQ ID NO: 486986 - protein, 14 aa, Homo sapiens
  CDR3 for beta chain variable domain of TCR clone 243493 (TRBV12-4, TRBJ1-1)
CASSFSQMNTEAFF

SEQ ID NO: 486987 - protein, 12 aa, Homo sapiens
  CDR3 for alpha chain variable domain of TCR clone 243494 (TRAV8-4, TRAJ43)
CAVSVNNNDMRF

SEQ ID NO: 486988 - protein, 13 aa, Homo sapiens
  CDR3 for beta chain variable domain of TCR clone 243494 (TRBV20-1, TRBJ2-7)
CSARIPPAYEQYF

SEQ ID NO: 486989 - protein, 12 aa, Homo sapiens
  CDR3 for alpha chain variable domain of TCR clone 243495 (TRAV27, TRAJ9)
CAGESGGFNNIF

SEQ ID NO: 486990 - protein, 18 aa, Homo sapiens
  CDR3 for beta chain variable domain of TCR clone 243495 (TRBV10-2, TRBJ2-2)
CISAPAVHRQADAGELFF

SEQ ID NO: 486991 - protein, 14 aa, Homo sapiens
  CDR3 for alpha chain variable domain of TCR clone 243496 (TRAV2, TRAJ9)
CAVEYRSGGFKTIF

SEQ ID NO: 486992 - protein, 14 aa, Homo sapiens
  CDR3 for beta chain variable domain of TCR clone 243496 (TRBV4-1, TRBJ2-2)
CASSQAVNTGELFF

SEQ ID NO: 486993 - protein, 15 aa, Homo sapiens
  CDR3 for alpha chain variable domain of TCR clone 243497 (TRAV26-1, TRAJ29)
CIVRVEGSGNTPLVF

SEQ ID NO: 486994 - protein, 13 aa, Homo sapiens
  CDR3 for beta chain variable domain of TCR clone 243497 (TRBV4-1, TRBJ2-2)
CASSQENTGELFF

SEQ ID NO: 486995 - protein, 17 aa, Homo sapiens
  CDR3 for alpha chain variable domain of TCR clone 243498 (TRAV4, TRAJ13)
CLVGVQGSSGGYQKVTF

SEQ ID NO: 486996 - protein, 18 aa, Homo sapiens
  CDR3 for beta chain variable domain of TCR clone 243498 (TRBV15, TRBJ2-3)
CATSRDGARSWDTDTKYF

SEQ ID NO: 486997 - protein, 14 aa, Homo sapiens
  CDR3 for alpha chain variable domain of TCR clone 243499 (TRAV2, TRAJ9)
CDVEDRSGGFKTIF

SEQ ID NO: 486998 - protein, 13 aa, Homo sapiens
  CDR3 for beta chain variable domain of TCR clone 243499 (TRBV7-2, TRBJ2-2)
CASSLAVTGELFF

SEQ ID NO: 486999 - protein, 14 aa, Homo sapiens
  CDR3 for alpha chain variable domain of TCR clone 243500 (TRAV17, TRAJ56)
CATVPAGANSKLTF

SEQ ID NO: 487000 - protein, 14 aa, Homo sapiens
  CDR3 for beta chain variable domain of TCR clone 243500 (TRBV7-8, TRBJ2-7)
CASSPRDRVYEQYF

SEQ ID NO: 487001 - protein, 14 aa, Homo sapiens
  CDR3 for alpha chain variable domain of TCR clone 243501 (TRAV35, TRAJ50)
CAGHRKTSYDKVIF

SEQ ID NO: 487002 - protein, 16 aa, Homo sapiens
  CDR3 for beta chain variable domain of TCR clone 243501 (TRBV20-1, TRBJ1-4)
CSAPGQGLLTNEKLFF

SEQ ID NO: 487003 - protein, 14 aa, Homo sapiens
  CDR3 for alpha chain variable domain of TCR clone 243502 (TRAV12-2, TRAJ13)
CAVKKTGGYQKVTF

SEQ ID NO: 487004 - protein, 15 aa, Homo sapiens
  CDR3 for beta chain variable domain of TCR clone 243502 (TRBV11-2, TRBJ1-6)
CASTLRGTGNSPLRF

SEQ ID NO: 487005 - protein, 11 aa, Homo sapiens
  CDR3 for alpha chain variable domain of TCR clone 243503 (TRAV12-1, TRAJ16)
CGDPDGQKLLF

SEQ ID NO: 487006 - protein, 13 aa, Homo sapiens
  CDR3 for beta chain variable domain of TCR clone 243503 (TRBV27, TRBJ1-4)
CASSVMGDEKLFF

SEQ ID NO: 487007 - protein, 12 aa, Homo sapiens
  CDR3 for alpha chain variable domain of TCR clone 243504 (TRAV3, TRAJ20)
CAVRDPDYKLSF

SEQ ID NO: 487008 - protein, 14 aa, Homo sapiens
  CDR3 for beta chain variable domain of TCR clone 243504 (TRBV7-6, TRBJ2-3)
CASSLGTVTDTQYF

SEQ ID NO: 487009 - protein, 12 aa, Homo sapiens
  CDR3 for alpha chain variable domain of TCR clone 243505 (TRAV13-2, TRAJ23)
CAERHRGGKLIF

SEQ ID NO: 487010 - protein, 13 aa, Homo sapiens
  CDR3 for beta chain variable domain of TCR clone 243505 (TRBV20-1, TRBJ2-5)
CSATEDSQETQYF

SEQ ID NO: 487011 - protein, 15 aa, Homo sapiens
  CDR3 for alpha chain variable domain of TCR clone 243506 (TRAV8-3, TRAJ41)
CAVGSNSNSGYALNF

SEQ ID NO: 487012 - protein, 17 aa, Homo sapiens
  CDR3 for beta chain variable domain of TCR clone 243506 (TRBV25-1, TRBJ2-1)
CASNAYGQGRGVYEQFF

SEQ ID NO: 487013 - protein, 12 aa, Homo sapiens
  CDR3 for alpha chain variable domain of TCR clone 243507 (TRAV12-3, TRAJ3)
CAIDSSASKIIF

SEQ ID NO: 487014 - protein, 17 aa, Homo sapiens
  CDR3 for beta chain variable domain of TCR clone 243507 (TRBV7-9, TRBJ2-3)
CASSLEEAGAYPDTQDF

SEQ ID NO: 487015 - protein, 14 aa, Homo sapiens
  CDR3 for alpha chain variable domain of TCR clone 243508 (TRAV13-1, TRAJ8)
CAASEDTGFQQLVF

SEQ ID NO: 487016 - protein, 13 aa, Homo sapiens
  CDR3 for beta chain variable domain of TCR clone 243508 (TRBV19, TRBJ1-5)
CASSTRRDQPQLF

SEQ ID NO: 487017 - protein, 14 aa, Homo sapiens
  CDR3 for alpha chain variable domain of TCR clone 243509 (TRAV35, TRAJ22)
CAGVRPGSARQLTF

SEQ ID NO: 487018 - protein, 14 aa, Homo sapiens
  CDR3 for beta chain variable domain of TCR clone 243509 (TRBV11-3, TRBJ2-3)
CASSSGQGPDTQYF

SEQ ID NO: 487019 - protein, 15 aa, Homo sapiens
  CDR3 for alpha chain variable domain of TCR clone 243510 (TRAV26-1, TRAJ40)
CIVRAVPSGTYKYIF

SEQ ID NO: 487020 - protein, 14 aa, Homo sapiens
  CDR3 for beta chain variable domain of TCR clone 243510 (TRBV19, TRBJ2-7)
CASKDPGLANEQFF

SEQ ID NO: 487021 - protein, 12 aa, Homo sapiens
  CDR3 for alpha chain variable domain of TCR clone 243511 (TRAV3, TRAJ31)
CAAQRANARLMF

SEQ ID NO: 487022 - protein, 12 aa, Homo sapiens
  CDR3 for beta chain variable domain of TCR clone 243511 (TRBV5-1, TRBJ1-2)
CASSQDTYGYTF

SEQ ID NO: 487023 - protein, 13 aa, Homo sapiens
  CDR3 for alpha chain variable domain of TCR clone 243512 (TRAV17, TRAJ5)
CALRGTGRRALTF

SEQ ID NO: 487024 - protein, 12 aa, Homo sapiens
  CDR3 for beta chain variable domain of TCR clone 243512 (TRBV3-1, TRBJ1-1)
CASSHQDREAFF

SEQ ID NO: 487025 - protein, 13 aa, Homo sapiens
  CDR3 for alpha chain variable domain of TCR clone 243513 (TRAV8-3, TRAJ28)
CAVGAVGSYQLTF

SEQ ID NO: 487026 - protein, 16 aa, Homo sapiens
  CDR3 for beta chain variable domain of TCR clone 243513 (TRBV7-2, TRBJ1-6)
CASSSFESSYNSPLHF

SEQ ID NO: 487027 - protein, 13 aa, Homo sapiens
  CDR3 for alpha chain variable domain of TCR clone 243514 (TRAV12-1, TRAJ20)
CVGQRFSDYKLSF

SEQ ID NO: 487028 - protein, 14 aa, Homo sapiens
  CDR3 for beta chain variable domain of TCR clone 243514 (TRBV6-3, TRBJ1-5)
CASSYSRFAQPQHF

SEQ ID NO: 487029 - protein, 14 aa, Homo sapiens
  CDR3 for alpha chain variable domain of TCR clone 243515 (TRAV17, TRAJ34)
CATDSLEGTDKLIF

SEQ ID NO: 487030 - protein, 13 aa, Homo sapiens
  CDR3 for beta chain variable domain of TCR clone 243515 (TRBV20-1, TRBJ1-1)
CSARGGGNTEAFF

SEQ ID NO: 487031 - protein, 14 aa, Homo sapiens
  CDR3 for alpha chain variable domain of TCR clone 243516 (TRAV26-1, TRAJ38)
CIADNAGNNRKLIW

SEQ ID NO: 487032 - protein, 12 aa, Homo sapiens
  CDR3 for beta chain variable domain of TCR clone 243516 (TRBV6-1, TRBJ2-7)
CASSDYSYEQYF

SEQ ID NO: 487033 - protein, 18 aa, Homo sapiens
  CDR3 for alpha chain variable domain of TCR clone 243517 (TRAV13-1, TRAJ52)
CAAKNPNAGVTSYGKLTF

SEQ ID NO: 487034 - protein, 12 aa, Homo sapiens
  CDR3 for beta chain variable domain of TCR clone 243517 (TRBV11-2, TRBJ2-2)
CASSLGGGELFF

SEQ ID NO: 487035 - protein, 14 aa, Homo sapiens
  CDR3 for alpha chain variable domain of TCR clone 243518 (TRAV12-1, TRAJ43)
CVVNGRSNNNDMRF

SEQ ID NO: 487036 - protein, 13 aa, Homo sapiens
  CDR3 for beta chain variable domain of TCR clone 243518 (TRBV19, TRBJ2-7)
CASSPRQSYEQYF

SEQ ID NO: 487037 - protein, 18 aa, Homo sapiens
  CDR3 for alpha chain variable domain of TCR clone 243519 (TRAV13-1, TRAJ52)
CAAKNPNAGGTSYGTLTF

SEQ ID NO: 487038 - protein, 13 aa, Homo sapiens
  CDR3 for beta chain variable domain of TCR clone 243519 (TRBV27, TRBJ1-1)
CASSLAIGAEAFF

SEQ ID NO: 487039 - protein, 15 aa, Homo sapiens
  CDR3 for alpha chain variable domain of TCR clone 243520 (TRAV8-2, TRAJ24)
CVVSDRTDSWGKLQF

SEQ ID NO: 487040 - protein, 12 aa, Homo sapiens
  CDR3 for beta chain variable domain of TCR clone 243520 (TRBV11-2, TRBJ2-1)
CASSTGNNEQFF

SEQ ID NO: 487041 - protein, 14 aa, Homo sapiens
  CDR3 for alpha chain variable domain of TCR clone 243521 (TRAV34, TRAJ44)
CGADGTGPASKLTF

SEQ ID NO: 487042 - protein, 15 aa, Homo sapiens
  CDR3 for beta chain variable domain of TCR clone 243521 (TRBV5-1, TRBJ2-1)
CASSPPRAPYNEQFF

SEQ ID NO: 487043 - protein, 16 aa, Homo sapiens
  CDR3 for alpha chain variable domain of TCR clone 243522 (TRAV12-2, TRAJ52)
CRLANAGGTSYGKLTF

SEQ ID NO: 487044 - protein, 17 aa, Homo sapiens
  CDR3 for beta chain variable domain of TCR clone 243522 (TRBV13, TRBJ2-3)
CASSLSRVAGGRNTQYF

SEQ ID NO: 487045 - protein, 13 aa, Homo sapiens
  CDR3 for alpha chain variable domain of TCR clone 243523 (TRAV8-6, TRAJ8)
CAVSNTGFQKLVF

SEQ ID NO: 487046 - protein, 15 aa, Homo sapiens
  CDR3 for beta chain variable domain of TCR clone 243523 (TRBV7-9, TRBJ1-5)
CASSQGHQPNQPQHF

SEQ ID NO: 487047 - protein, 14 aa, Homo sapiens
  CDR3 for alpha chain variable domain of TCR clone 243524 (TRAV35, TRAJ33)
CAGSSQDSNYRLIW

SEQ ID NO: 487048 - protein, 15 aa, Homo sapiens
  CDR3 for beta chain variable domain of TCR clone 243524 (TRBV20-1, TRBJ2-7)
CSAECGTSGAYEQYF

SEQ ID NO: 487049 - protein, 10 aa, Homo sapiens
  CDR3 for alpha chain variable domain of TCR clone 243525 (TRAV13-2, TRAJ49)
CADTGNQFYF

SEQ ID NO: 487050 - protein, 16 aa, Homo sapiens
  CDR3 for beta chain variable domain of TCR clone 243525 (TRBV20-1, TRBJ1-2)
CSASMGQGVANYGYTF

SEQ ID NO: 487051 - protein, 14 aa, Homo sapiens
  CDR3 for alpha chain variable domain of TCR clone 243526 (TRAV26-2, TRAJ38)
CILYNAGNNRKLIW

SEQ ID NO: 487052 - protein, 15 aa, Homo sapiens
  CDR3 for beta chain variable domain of TCR clone 243526 (TRBV7-9, TRBJ1-6)
CASSSPGRGNSPLHF

SEQ ID NO: 487053 - protein, 14 aa, Homo sapiens
  CDR3 for alpha chain variable domain of TCR clone 243527 (TRAV17, TRAJ12)
CATDEKDSSYKLIV

SEQ ID NO: 487054 - protein, 16 aa, Homo sapiens
  CDR3 for beta chain variable domain of TCR clone 243527 (TRBV11-2, TRBJ2-1)
CASSPRLAGVYNEQFF

SEQ ID NO: 487055 - protein, 13 aa, Homo sapiens
  CDR3 for alpha chain variable domain of TCR clone 243528 (TRAV9-2, TRAJ53)
CALSGGSNYKLTF

SEQ ID NO: 487056 - protein, 11 aa, Homo sapiens
  CDR3 for beta chain variable domain of TCR clone 243528 (TRBV11-2, TRBJ2-2)
CASGLPGELFF

SEQ ID NO: 487057 - protein, 13 aa, Homo sapiens
  CDR3 for alpha chain variable domain of TCR clone 243529 (TRAV21, TRAJ47)
CAVSGLYGNKLVF

SEQ ID NO: 487058 - protein, 17 aa, Homo sapiens
  CDR3 for beta chain variable domain of TCR clone 243529 (TRBV15, TRBJ2-3)
CATSGRTSEEGTDTQYF

SEQ ID NO: 487059 - protein, 10 aa, Homo sapiens
  CDR3 for alpha chain variable domain of TCR clone 243530 (TRAV13-1, TRAJ41)
CASSGPRRTQ

SEQ ID NO: 487060 - protein, 16 aa, Homo sapiens
  CDR3 for beta chain variable domain of TCR clone 243530 (TRBV18, TRBJ2-3)
CASSPPAGGPRKYAVF

SEQ ID NO: 487061 - protein, 14 aa, Homo sapiens
  CDR3 for alpha chain variable domain of TCR clone 243531 (TRAV9-2, TRAJ39)
CALYIYNAGNMLTF

SEQ ID NO: 487062 - protein, 16 aa, Homo sapiens
  CDR3 for beta chain variable domain of TCR clone 243531 (TRBV7-8, TRBJ2-4)
CASSAERTLAKNIQYF

SEQ ID NO: 487063 - protein, 14 aa, Homo sapiens
  CDR3 for alpha chain variable domain of TCR clone 243532 (TRAV29/DV5, TRAJ28)
CAARAGAGSYQLTF

SEQ ID NO: 487064 - protein, 14 aa, Homo sapiens
  CDR3 for beta chain variable domain of TCR clone 243532 (TRBV19, TRBJ2-1)
CASPTFVLSGEQFF

SEQ ID NO: 487065 - protein, 14 aa, Homo sapiens
  CDR3 for alpha chain variable domain of TCR clone 243533 (TRAV3, TRAJ22)
CAVRDYGSARQPTF

SEQ ID NO: 487066 - protein, 13 aa, Homo sapiens
  CDR3 for beta chain variable domain of TCR clone 243533 (TRBV11-2, TRBJ2-5)
CASGHGAKETQYF

SEQ ID NO: 487067 - protein, 16 aa, Homo sapiens
  CDR3 for alpha chain variable domain of TCR clone 243534 (TRAV16, TRAJ52)
CALSAAGGTSYGKLTF

SEQ ID NO: 487068 - protein, 16 aa, Homo sapiens
  CDR3 for beta chain variable domain of TCR clone 243534 (TRBV12-4, TRBJ1-5)
CASSRPVGGSNQPQHS

SEQ ID NO: 487069 - protein, 11 aa, Homo sapiens
  CDR3 for alpha chain variable domain of TCR clone 243535 (TRAV26-1, TRAJ27)
CIDPHAGKSTF

SEQ ID NO: 487070 - protein, 18 aa, Homo sapiens
  CDR3 for beta chain variable domain of TCR clone 243535 (TRBV7-9, TRBJ2-6)
CAISFPGAGISGANVLTF

SEQ ID NO: 487071 - protein, 13 aa, Homo sapiens
  CDR3 for alpha chain variable domain of TCR clone 243536 (TRAV21, TRAJ27)
CAARPGNAGKSTF

SEQ ID NO: 487072 - protein, 13 aa, Homo sapiens
  CDR3 for beta chain variable domain of TCR clone 243536 (TRBV7-6, TRBJ2-3)
CASSLDSHRYAVF

SEQ ID NO: 487073 - protein, 13 aa, Homo sapiens
  CDR3 for alpha chain variable domain of TCR clone 243537 (TRAV1-2, TRAJ9)
CAALNTGGFKTIF

SEQ ID NO: 487074 - protein, 13 aa, Homo sapiens
  CDR3 for beta chain variable domain of TCR clone 243537 (TRBV7-9, TRBJ2-1)
CASSLDVGNEQFF

SEQ ID NO: 487075 - protein, 18 aa, Homo sapiens
  CDR3 for alpha chain variable domain of TCR clone 243538 (TRAV12-3, TRAJ52)
CAMSVGGAGGTSYGKLTF

SEQ ID NO: 487076 - protein, 17 aa, Homo sapiens
  CDR3 for beta chain variable domain of TCR clone 243538 (TRBV7-3, TRBJ2-3)
RASSLMKRMRGADTQYF

SEQ ID NO: 487077 - protein, 17 aa, Homo sapiens
  CDR3 for alpha chain variable domain of TCR clone 243539 (TRAV13-1, TRAJ52)
CAAGRNAGGTSYGKLTF

SEQ ID NO: 487078 - protein, 13 aa, Homo sapiens
  CDR3 for beta chain variable domain of TCR clone 243539 (TRBV7-2, TRBJ1-1)
CASNLKGAKVAFL

SEQ ID NO: 487079 - protein, 18 aa, Homo sapiens
  CDR3 for alpha chain variable domain of TCR clone 243540 (TRAV26-1, TRAJ52)
CIVRVAGAGGTSYGKLTF

SEQ ID NO: 487080 - protein, 13 aa, Homo sapiens
  CDR3 for beta chain variable domain of TCR clone 243540 (TRBV7-8, TRBJ1-2)
CASSAQGYYGYTF

SEQ ID NO: 487081 - protein, 14 aa, Homo sapiens
  CDR3 for alpha chain variable domain of TCR clone 243541 (TRAV23/DV6, TRAJ37)
CAASTSSHTRKLIF

SEQ ID NO: 487082 - protein, 13 aa, Homo sapiens
  CDR3 for beta chain variable domain of TCR clone 243541 (TRBV7-7, TRBJ1-1)
CASSLGANTEAFF

SEQ ID NO: 487083 - protein, 15 aa, Homo sapiens
  CDR3 for alpha chain variable domain of TCR clone 243542 (TRAV35, TRAJ40)
CAGQLWASGTYKYIF

SEQ ID NO: 487084 - protein, 12 aa, Homo sapiens
  CDR3 for beta chain variable domain of TCR clone 243542 (TRBV7-8, TRBJ2-7)
CASSLAGYEQYF

SEQ ID NO: 487085 - protein, 18 aa, Homo sapiens
  CDR3 for alpha chain variable domain of TCR clone 243543 (TRAV21, TRAJ13)
CAVPRSFWGLPESYLLNW

SEQ ID NO: 487086 - protein, 13 aa, Homo sapiens
  CDR3 for beta chain variable domain of TCR clone 243543 (TRBV7-2, TRBJ2-2)
CASSSVRAGELFF

SEQ ID NO: 487087 - protein, 10 aa, Homo sapiens
  CDR3 for alpha chain variable domain of TCR clone 243544 (TRAV13-1, TRAJ7)
LIGGNTRLAF

SEQ ID NO: 487088 - protein, 15 aa, Homo sapiens
  CDR3 for beta chain variable domain of TCR clone 243544 (TRBV7-9, TRBJ1-1)
CASSLLEQGGTEAFF

SEQ ID NO: 487089 - protein, 14 aa, Homo sapiens
  CDR3 for alpha chain variable domain of TCR clone 243545 (TRAV13-1, TRAJ10)
CAAKEPGGGNKLTI

SEQ ID NO: 487090 - protein, 15 aa, Homo sapiens
  CDR3 for beta chain variable domain of TCR clone 243545 (TRBV27, TRBJ2-1)
CASSNGGGSSNEQFF

SEQ ID NO: 487091 - protein, 14 aa, Homo sapiens
  CDR3 for alpha chain variable domain of TCR clone 243546 (TRAV8-3, TRAJ40)
CAMALTSGTYKYIF

SEQ ID NO: 487092 - protein, 14 aa, Homo sapiens
  CDR3 for beta chain variable domain of TCR clone 243546 (TRBV11-3, TRBJ1-1)
CASSPGAWNTEAFF

SEQ ID NO: 487093 - protein, 16 aa, Homo sapiens
  CDR3 for alpha chain variable domain of TCR clone 243547 (TRAV14/DV4, TRAJ53)
CAMREGGGGSNYKLTF

SEQ ID NO: 487094 - protein, 11 aa, Homo sapiens
  CDR3 for beta chain variable domain of TCR clone 243547 (TRBV24-1, TRBJ2-3)
CATSDLDTQYF

SEQ ID NO: 487095 - protein, 16 aa, Homo sapiens
  CDR3 for alpha chain variable domain of TCR clone 243548 (TRAV30, TRAJ24)
CGTEIVDADSWRKFKF

SEQ ID NO: 487096 - protein, 14 aa, Homo sapiens
  CDR3 for beta chain variable domain of TCR clone 243548 (TRBV12-5, TRBJ2-5)
CASGSRTHQETQYF

SEQ ID NO: 487097 - protein, 15 aa, Homo sapiens
  CDR3 for alpha chain variable domain of TCR clone 243549 (TRAV2, TRAJ28)
CAVPYSGAGSYQLTF

SEQ ID NO: 487098 - protein, 17 aa, Homo sapiens
  CDR3 for beta chain variable domain of TCR clone 243549 (TRBV20-1, TRBJ2-4)
CSARDWANGGRENIQYF

SEQ ID NO: 487099 - protein, 15 aa, Homo sapiens
  CDR3 for alpha chain variable domain of TCR clone 243550 (TRAV29/DV5, TRAJ10)
CAAFGVTGGGNKLTF

SEQ ID NO: 487100 - protein, 14 aa, Homo sapiens
  CDR3 for beta chain variable domain of TCR clone 243550 (TRBV19, TRBJ2-1)
CASPTFVLSGEQFF

SEQ ID NO: 487101 - protein, 13 aa, Homo sapiens
  CDR3 for alpha chain variable domain of TCR clone 243551 (TRAV12-2, TRAJ39)
CAVNNNAGNMLTF

SEQ ID NO: 487102 - protein, 17 aa, Homo sapiens
  CDR3 for beta chain variable domain of TCR clone 243551 (TRBV11-2, TRBJ2-1)
CASSLYPPGVEYNEQFF

SEQ ID NO: 487103 - protein, 11 aa, Homo sapiens
  CDR3 for alpha chain variable domain of TCR clone 243552 (TRAV12-3, TRAJ6)
CAMSGSYIPTF

SEQ ID NO: 487104 - protein, 15 aa, Homo sapiens
  CDR3 for beta chain variable domain of TCR clone 243552 (TRBV2, TRBJ2-7)
CASSEGLARSYEQYF

SEQ ID NO: 487105 - protein, 14 aa, Homo sapiens
  CDR3 for alpha chain variable domain of TCR clone 243553 (TRAV20, TRAJ56)
CAVQFGGANSKLTF

SEQ ID NO: 487106 - protein, 14 aa, Homo sapiens
  CDR3 for beta chain variable domain of TCR clone 243553 (TRBV7-2, TRBJ1-1)
CASSCLTGTTEAFF

SEQ ID NO: 487107 - protein, 16 aa, Homo sapiens
  CDR3 for alpha chain variable domain of TCR clone 243554 (TRAV26-1, TRAJ53)
CIVRVAMGGSKYKLTF

SEQ ID NO: 487108 - protein, 12 aa, Homo sapiens
  CDR3 for beta chain variable domain of TCR clone 243554 (TRBV7-9, TRBJ1-5)
CASSPQGQPHHF

SEQ ID NO: 487109 - protein, 13 aa, Homo sapiens
  CDR3 for alpha chain variable domain of TCR clone 243555 (TRAV2, TRAJ40)
CAVVTSGTYKYIF

SEQ ID NO: 487110 - protein, 13 aa, Homo sapiens
  CDR3 for beta chain variable domain of TCR clone 243555 (TRBV12-4, TRBJ2-5)
CASSLGGSRTQYF

SEQ ID NO: 487111 - protein, 20 aa, Homo sapiens
  CDR3 for alpha chain variable domain of TCR clone 243556 (TRAV21, TRAJ4)
AASQPGDSATLAGGYNKLIF

SEQ ID NO: 487112 - protein, 15 aa, Homo sapiens
  CDR3 for beta chain variable domain of TCR clone 243556 (TRBV27, TRBJ2-1)
CASSNGGGSSNEQFF

SEQ ID NO: 487113 - protein, 13 aa, Homo sapiens
  CDR3 for alpha chain variable domain of TCR clone 243557 (TRAV12-2, TRAJ39)
CAVNNNAGNMLTV

SEQ ID NO: 487114 - protein, 16 aa, Homo sapiens
  CDR3 for beta chain variable domain of TCR clone 243557 (TRBV19, TRBJ2-1)
CASSMGGGSSYNEQFF

SEQ ID NO: 487115 - protein, 14 aa, Homo sapiens
  CDR3 for alpha chain variable domain of TCR clone 243558 (TRAV13-1, TRAJ9)
CAASALTGGFKTIF

SEQ ID NO: 487116 - protein, 13 aa, Homo sapiens
  CDR3 for beta chain variable domain of TCR clone 243558 (TRBV4-2, TRBJ1-1)
CASSQAGNTEAFF

SEQ ID NO: 487117 - protein, 14 aa, Homo sapiens
  CDR3 for alpha chain variable domain of TCR clone 243559 (TRAV17, TRAJ57)
CATDPQGGSEKLVF

SEQ ID NO: 487118 - protein, 18 aa, Homo sapiens
  CDR3 for beta chain variable domain of TCR clone 243559 (TRBV6-6, TRBJ1-3)
CASSYSKWDAISGDTIYF

SEQ ID NO: 487119 - protein, 11 aa, Homo sapiens
  CDR3 for alpha chain variable domain of TCR clone 243560 (TRAV1-2, TRAJ20)
CAVANDYKLSF

SEQ ID NO: 487120 - protein, 18 aa, Homo sapiens
  CDR3 for beta chain variable domain of TCR clone 243560 (TRBV20-1, TRBJ2-6)
CSAETTPTHSSGANVLTF

SEQ ID NO: 487121 - protein, 15 aa, Homo sapiens
  CDR3 for alpha chain variable domain of TCR clone 243561 (TRAV13-1, TRAJ57)
QVPPLSQGGSEKLVF

SEQ ID NO: 487122 - protein, 14 aa, Homo sapiens
  CDR3 for beta chain variable domain of TCR clone 243561 (TRBV12-5, TRBJ2-5)
CASGSRTHQETQYF

SEQ ID NO: 487123 - protein, 12 aa, Homo sapiens
  CDR3 for alpha chain variable domain of TCR clone 243562 (TRAV36/DV7, TRAJ54)
CAVVRGAQKLVF

SEQ ID NO: 487124 - protein, 13 aa, Homo sapiens
  CDR3 for beta chain variable domain of TCR clone 243562 (TRBV20-1, TRBJ1-1)
CSARVGGNTEAFF

SEQ ID NO: 487125 - protein, 17 aa, Homo sapiens
  CDR3 for alpha chain variable domain of TCR clone 243563 (TRAV38-2/DV8, TRAJ45)
CAYRSMYSGGGADGLTF

SEQ ID NO: 487126 - protein, 17 aa, Homo sapiens
  CDR3 for beta chain variable domain of TCR clone 243563 (TRBV11-2, TRBJ2-1)
CASSLYPPGVEYNEQFF

SEQ ID NO: 487127 - protein, 14 aa, Homo sapiens
  CDR3 for alpha chain variable domain of TCR clone 243564 (TRAV13-1, TRAJ35)
CAASKGGFGNVLHF

SEQ ID NO: 487128 - protein, 16 aa, Homo sapiens
  CDR3 for beta chain variable domain of TCR clone 243564 (TRBV27, TRBJ2-7)
CASSSERRDSAYEQYF

SEQ ID NO: 487129 - protein, 14 aa, Homo sapiens
  CDR3 for alpha chain variable domain of TCR clone 243565 (TRAV12-2, TRAJ40)
CAVKIPSGTYKYIF

SEQ ID NO: 487130 - protein, 13 aa, Homo sapiens
  CDR3 for beta chain variable domain of TCR clone 243565 (TRBV7-9, TRBJ1-2)
CASSLKQNCGYTF

SEQ ID NO: 487131 - protein, 15 aa, Homo sapiens
  CDR3 for alpha chain variable domain of TCR clone 243566 (TRAV2, TRAJ9)
CAVDDRGTGGFKTIF

SEQ ID NO: 487132 - protein, 14 aa, Homo sapiens
  CDR3 for beta chain variable domain of TCR clone 243566 (TRBV7-2, TRBJ2-7)
CASSPKTSFYEQYF

SEQ ID NO: 487133 - protein, 14 aa, Homo sapiens
  CDR3 for alpha chain variable domain of TCR clone 243567 (TRAV35, TRAJ42)
CCVPYGGSQGNLIF

SEQ ID NO: 487134 - protein, 18 aa, Homo sapiens
  CDR3 for beta chain variable domain of TCR clone 243567 (TRBV13, TRBJ2-6)
CASSSMTSGGSGANVLTF

SEQ ID NO: 487135 - protein, 15 aa, Homo sapiens
  CDR3 for alpha chain variable domain of TCR clone 243568 (TRAV12-3, TRAJ6)
CAMSATTGGSYIPTF

SEQ ID NO: 487136 - protein, 17 aa, Homo sapiens
  CDR3 for beta chain variable domain of TCR clone 243568 (TRBV5-1, TRBJ2-5)
CASSPVALGQNQETQYF

SEQ ID NO: 487137 - protein, 14 aa, Homo sapiens
  CDR3 for alpha chain variable domain of TCR clone 243569 (TRAV1-2, TRAJ16)
CAVNRFSDGQKLLF

SEQ ID NO: 487138 - protein, 14 aa, Homo sapiens
  CDR3 for beta chain variable domain of TCR clone 243569 (TRBV19, TRBJ2-7)
CASSMGLGAIEQYF

SEQ ID NO: 487139 - protein, 12 aa, Homo sapiens
  CDR3 for alpha chain variable domain of TCR clone 243570 (TRAV16, TRAJ56)
CAPTGANTKLTF

SEQ ID NO: 487140 - protein, 17 aa, Homo sapiens
  CDR3 for beta chain variable domain of TCR clone 243570 (TRBV27, TRBJ2-6)
CASSLTGFASGANVLTF

SEQ ID NO: 487141 - protein, 17 aa, Homo sapiens
  CDR3 for alpha chain variable domain of TCR clone 243571 (TRAV27, TRAJ57)
CGGERGCTQGGSEKLVF

SEQ ID NO: 487142 - protein, 15 aa, Homo sapiens
  CDR3 for beta chain variable domain of TCR clone 243571 (TRBV27, TRBJ1-6)
CASSFDRGLGSALHF

SEQ ID NO: 487143 - protein, 16 aa, Homo sapiens
  CDR3 for alpha chain variable domain of TCR clone 243572 (TRAV3, TRAJ37)
CAVRGKGCGNTGKLIY

SEQ ID NO: 487144 - protein, 13 aa, Homo sapiens
  CDR3 for beta chain variable domain of TCR clone 243572 (TRBV14, TRBJ2-7)
CASSQDRRYEQYF

SEQ ID NO: 487145 - protein, 17 aa, Homo sapiens
  CDR3 for alpha chain variable domain of TCR clone 243573 (TRAV26-1, TRAJ37)
CIVRVITVLSNTGRLIF

SEQ ID NO: 487146 - protein, 14 aa, Homo sapiens
  CDR3 for beta chain variable domain of TCR clone 243573 (TRBV19, TRBJ2-1)
CASPTFVLSGEQFF

SEQ ID NO: 487147 - protein, 12 aa, Homo sapiens
  CDR3 for alpha chain variable domain of TCR clone 243574 (TRAV21, TRAJ11)
CAATSGYSTLTF

SEQ ID NO: 487148 - protein, 13 aa, Homo sapiens
  CDR3 for beta chain variable domain of TCR clone 243574 (TRBV19, TRBJ1-3)
CASRLSLGNTIYF

SEQ ID NO: 487149 - protein, 14 aa, Homo sapiens
  CDR3 for alpha chain variable domain of TCR clone 243575 (TRAV1-2, TRAJ8)
CAVREDTGFQKLVF

SEQ ID NO: 487150 - protein, 16 aa, Homo sapiens
  CDR3 for beta chain variable domain of TCR clone 243575 (TRBV10-2, TRBJ2-7)
CASSESPGSSGFEQYF

SEQ ID NO: 487151 - protein, 11 aa, Homo sapiens
  CDR3 for alpha chain variable domain of TCR clone 243576 (TRAV21, TRAJ31)
CAVRNNARLMF

SEQ ID NO: 487152 - protein, 15 aa, Homo sapiens
  CDR3 for beta chain variable domain of TCR clone 243576 (TRBV27, TRBJ1-5)
CASSLGTGFDQPQHF

SEQ ID NO: 487153 - protein, 13 aa, Homo sapiens
  CDR3 for alpha chain variable domain of TCR clone 243577 (TRAV20, TRAJ34)
GAVHLHNTDKLIF

SEQ ID NO: 487154 - protein, 14 aa, Homo sapiens
  CDR3 for beta chain variable domain of TCR clone 243577 (TRBV7-2, TRBJ1-1)
CASSFLTGTTEAFF

SEQ ID NO: 487155 - protein, 10 aa, Homo sapiens
  CDR3 for alpha chain variable domain of TCR clone 243578 (TRAV17, TRAJ52)
SATSYGKLTF

SEQ ID NO: 487156 - protein, 10 aa, Homo sapiens
  CDR3 for beta chain variable domain of TCR clone 243578 (TRBV29-1, TRBJ2-5)
RGTSAETQYF

SEQ ID NO: 487157 - protein, 12 aa, Homo sapiens
  CDR3 for alpha chain variable domain of TCR clone 243579 (TRAV12-3, TRAJ17)
CAMTLTGNKLTF

SEQ ID NO: 487158 - protein, 15 aa, Homo sapiens
  CDR3 for beta chain variable domain of TCR clone 243579 (TRBV7-2, TRBJ2-3)
CASSLASARTDTQYF

SEQ ID NO: 487159 - protein, 12 aa, Homo sapiens
  CDR3 for alpha chain variable domain of TCR clone 243580 (TRAV8-3, TRAJ41)
CAVGALGYALNF

SEQ ID NO: 487160 - protein, 16 aa, Homo sapiens
  CDR3 for beta chain variable domain of TCR clone 243580 (TRBV7-6, TRBJ2-3)
CAGSDSRGEGTDTQYF

SEQ ID NO: 487161 - protein, 12 aa, Homo sapiens
  CDR3 for alpha chain variable domain of TCR clone 243581 (TRAV21, TRAJ17)
CAMTLTGNKLTF

SEQ ID NO: 487162 - protein, 13 aa, Homo sapiens
  CDR3 for beta chain variable domain of TCR clone 243581 (TRBV7-9, TRBJ1-2)
CASSLKQNYGYTF

SEQ ID NO: 487163 - protein, 21 aa, Homo sapiens
  CDR3 for alpha chain variable domain of TCR clone 243582 (TRAV13-1, TRAJ37)
CAATPKEIKHRQTNLWARDNF

SEQ ID NO: 487164 - protein, 13 aa, Homo sapiens
  CDR3 for beta chain variable domain of TCR clone 243582 (TRBV20-1, TRBJ2-7)
CSATSEDSYEQYV

SEQ ID NO: 487165 - protein, 16 aa, Homo sapiens
  CDR3 for alpha chain variable domain of TCR clone 243583 (TRAV17, TRAJ9)
CATGEWGGTVGFKTIF

SEQ ID NO: 487166 - protein, 15 aa, Homo sapiens
  CDR3 for beta chain variable domain of TCR clone 243583 (TRBV20-1, TRBJ1-2)
CSARDSRGRNYGYTF

SEQ ID NO: 487167 - protein, 12 aa, Homo sapiens
  CDR3 for alpha chain variable domain of TCR clone 243584 (TRAV21, TRAJ3)
CCFYSSGSKIIF

SEQ ID NO: 487168 - protein, 15 aa, Homo sapiens
  CDR3 for beta chain variable domain of TCR clone 243584 (TRBV20-1, TRBJ2-7)
CSARDRVSGMDEQYF

SEQ ID NO: 487169 - protein, 13 aa, Homo sapiens
  CDR3 for alpha chain variable domain of TCR clone 243585 (TRAV30, TRAJ39)
CGTEKNTGDMLTF

SEQ ID NO: 487170 - protein, 12 aa, Homo sapiens
  CDR3 for beta chain variable domain of TCR clone 243585 (TRBV12-4, TRBJ2-5)
CASGSAQETQYF

SEQ ID NO: 487171 - protein, 23 aa, Homo sapiens
  CDR3 for alpha chain variable domain of TCR clone 243586 (TRAV1-1, TRAJ4)
LLQELQMKDSASYFCALYNKLIF

SEQ ID NO: 487172 - protein, 16 aa, Homo sapiens
  CDR3 for beta chain variable domain of TCR clone 243586 (TRBV12-4, TRBJ2-7)
CASSLIGGTGTYEQYF

SEQ ID NO: 487173 - protein, 16 aa, Homo sapiens
  CDR3 for alpha chain variable domain of TCR clone 243587 (TRAV8-4, TRAJ18)
CAVTANGGSTLGRLCF

SEQ ID NO: 487174 - protein, 14 aa, Homo sapiens
  CDR3 for beta chain variable domain of TCR clone 243587 (TRBV12-4, TRBJ1-2)
CASSSAGHIYGYTF

SEQ ID NO: 487175 - protein, 15 aa, Homo sapiens
  CDR3 for alpha chain variable domain of TCR clone 243588 (TRAV29/DV5, TRAJ24)
CAASGATDSWGKFQF

SEQ ID NO: 487176 - protein, 13 aa, Homo sapiens
  CDR3 for beta chain variable domain of TCR clone 243588 (TRBV10-3, TRBJ2-7)
CASKLAVNYEQYF

SEQ ID NO: 487177 - protein, 14 aa, Homo sapiens
  CDR3 for alpha chain variable domain of TCR clone 243589 (TRAV8-3, TRAJ48)
CCGCGQFGNEKLTF

SEQ ID NO: 487178 - protein, 14 aa, Homo sapiens
  CDR3 for beta chain variable domain of TCR clone 243589 (TRBV5-1, TRBJ2-2)
CASSLGGGSGELFF

SEQ ID NO: 487179 - protein, 14 aa, Homo sapiens
  CDR3 for alpha chain variable domain of TCR clone 243590 (TRAV12-3, TRAJ10)
SHLPLTGGGNKLTF

SEQ ID NO: 487180 - protein, 14 aa, Homo sapiens
  CDR3 for beta chain variable domain of TCR clone 243590 (TRBV5-1, TRBJ2-3)
CASSLERDLGTQYF

SEQ ID NO: 487181 - protein, 13 aa, Homo sapiens
  CDR3 for alpha chain variable domain of TCR clone 243591 (TRAV21, TRAJ20)
CAVGLRVDYKLSF

SEQ ID NO: 487182 - protein, 13 aa, Homo sapiens
  CDR3 for beta chain variable domain of TCR clone 243591 (TRBV6-1, TRBJ1-1)
CASSRQGIAEAFF

SEQ ID NO: 487183 - protein, 17 aa, Homo sapiens
  CDR3 for alpha chain variable domain of TCR clone 243592 (TRAV13-2, TRAJ31)
CAENARLMFGDGTQLVV

SEQ ID NO: 487184 - protein, 12 aa, Homo sapiens
  CDR3 for beta chain variable domain of TCR clone 243592 (TRBV11-2, TRBJ2-2)
CASSLGGGELFF

SEQ ID NO: 487185 - protein, 17 aa, Homo sapiens
  CDR3 for alpha chain variable domain of TCR clone 243593 (TRAV3, TRAJ6)
CAVRDGPRAGGRYIPTF

SEQ ID NO: 487186 - protein, 15 aa, Homo sapiens
  CDR3 for beta chain variable domain of TCR clone 243593 (TRBV19, TRBJ1-1)
CASSIGGGRNTEAFF

SEQ ID NO: 487187 - protein, 14 aa, Homo sapiens
  CDR3 for alpha chain variable domain of TCR clone 243594 (TRAV13-1, TRAJ47)
CAADPGEYGNKLVF

SEQ ID NO: 487188 - protein, 13 aa, Homo sapiens
  CDR3 for beta chain variable domain of TCR clone 243594 (TRBV2, TRBJ2-2)
SASSKKNTGELFF

SEQ ID NO: 487189 - protein, 13 aa, Homo sapiens
  CDR3 for alpha chain variable domain of TCR clone 243595 (TRAV27, TRAJ49)
CAPRPYTGNQFYF

SEQ ID NO: 487190 - protein, 14 aa, Homo sapiens
  CDR3 for beta chain variable domain of TCR clone 243595 (TRBV2, TRBJ2-3)
CASSEGQNTDTQYF

SEQ ID NO: 487191 - protein, 12 aa, Homo sapiens
  CDR3 for alpha chain variable domain of TCR clone 243596 (TRAV12-3, TRAJ17)
CAMTLTGNKLTF

SEQ ID NO: 487192 - protein, 15 aa, Homo sapiens
  CDR3 for beta chain variable domain of TCR clone 243596 (TRBV6-5, TRBJ2-2)
CASRPGQTNTGELFF

SEQ ID NO: 487193 - protein, 14 aa, Homo sapiens
  CDR3 for alpha chain variable domain of TCR clone 243597 (TRAV21, TRAJ58)
CAVRGETSGSRLTL

SEQ ID NO: 487194 - protein, 17 aa, Homo sapiens
  CDR3 for beta chain variable domain of TCR clone 243597 (TRBV28, TRBJ2-3)
CASSPTPAGGRVDTQYF

SEQ ID NO: 487195 - protein, 13 aa, Homo sapiens
  CDR3 for alpha chain variable domain of TCR clone 243598 (TRAV2, TRAJ40)
CAVVTSGTYKYIV

SEQ ID NO: 487196 - protein, 13 aa, Homo sapiens
  CDR3 for beta chain variable domain of TCR clone 243598 (TRBV12-5, TRBJ2-3)
CASGDRQSDTQYV

SEQ ID NO: 487197 - protein, 11 aa, Homo sapiens
  CDR3 for alpha chain variable domain of TCR clone 243599 (TRAV2, TRAJ23)
CAVVTRGKLIF

SEQ ID NO: 487198 - protein, 14 aa, Homo sapiens
  CDR3 for beta chain variable domain of TCR clone 243599 (TRBV2, TRBJ2-3)
CASSEGQNTDTQYF

SEQ ID NO: 487199 - protein, 11 aa, Homo sapiens
  CDR3 for alpha chain variable domain of TCR clone 243600 (TRAV2, TRAJ13)
CASGGYQKVTF

SEQ ID NO: 487200 - protein, 13 aa, Homo sapiens
  CDR3 for beta chain variable domain of TCR clone 243600 (TRBV20-1, TRBJ1-1)
CSAPLGGGTEAFC

SEQ ID NO: 487201 - protein, 13 aa, Homo sapiens
  CDR3 for alpha chain variable domain of TCR clone 243601 (TRAV8-3, TRAJ28)
CAVGAVGSYQLTF

SEQ ID NO: 487202 - protein, 16 aa, Homo sapiens
  CDR3 for beta chain variable domain of TCR clone 243601 (TRBV7-3, TRBJ2-1)
CASSKPLAGGYNEQFF

SEQ ID NO: 487203 - protein, 11 aa, Homo sapiens
  CDR3 for alpha chain variable domain of TCR clone 243602 (TRAV12-2, TRAJ29)
CAVTLRSPLVF

SEQ ID NO: 487204 - protein, 16 aa, Homo sapiens
  CDR3 for beta chain variable domain of TCR clone 243602 (TRBV6-1, TRBJ2-5)
CASSETLDRGAETQYF

SEQ ID NO: 487205 - protein, 13 aa, Homo sapiens
  CDR3 for alpha chain variable domain of TCR clone 243603 (TRAV13-1, TRAJ5)
CAARVTGRRALTF

SEQ ID NO: 487206 - protein, 15 aa, Homo sapiens
  CDR3 for beta chain variable domain of TCR clone 243603 (TRBV28, TRBJ2-7)
CARSPGGRGFYEQYF

SEQ ID NO: 487207 - protein, 16 aa, Homo sapiens
  CDR3 for alpha chain variable domain of TCR clone 243604 (TRAV20, TRAJ22)
CDVQASSSGSARQLTF

SEQ ID NO: 487208 - protein, 13 aa, Homo sapiens
  CDR3 for beta chain variable domain of TCR clone 243604 (TRBV7-2, TRBJ2-5)
CASSQTSVETRYF

SEQ ID NO: 487209 - protein, 16 aa, Homo sapiens
  CDR3 for alpha chain variable domain of TCR clone 243605 (TRAV3, TRAJ37)
CAVRPHGYGNTGKLIF

SEQ ID NO: 487210 - protein, 14 aa, Homo sapiens
  CDR3 for beta chain variable domain of TCR clone 243605 (TRBV2, TRBJ2-1)
CASSDRAYYNEQFF

SEQ ID NO: 487211 - protein, 14 aa, Homo sapiens
  CDR3 for alpha chain variable domain of TCR clone 243606 (TRAV12-3, TRAJ10)
SHLPLTGGGNKLTF

SEQ ID NO: 487212 - protein, 13 aa, Homo sapiens
  CDR3 for beta chain variable domain of TCR clone 243606 (TRBV28, TRBJ2-7)
CAGAQQGLDEQYF

SEQ ID NO: 487213 - protein, 14 aa, Homo sapiens
  CDR3 for alpha chain variable domain of TCR clone 243607 (TRAV17, TRAJ57)
CATDPRGGSEKLVF

SEQ ID NO: 487214 - protein, 13 aa, Homo sapiens
  CDR3 for beta chain variable domain of TCR clone 243607 (TRBV7-9, TRBJ1-2)
CASSLRQNYGYTF

SEQ ID NO: 487215 - protein, 13 aa, Homo sapiens
  CDR3 for alpha chain variable domain of TCR clone 243608 (TRAV12-1, TRAJ40)
CVVPTSGTYKYIF

SEQ ID NO: 487216 - protein, 18 aa, Homo sapiens
  CDR3 for beta chain variable domain of TCR clone 243608 (TRBV7-6, TRBJ2-1)
CASSPRTSGMRSYNEQFF

SEQ ID NO: 487217 - protein, 11 aa, Homo sapiens
  CDR3 for alpha chain variable domain of TCR clone 243609 (TRAV23/DV6, TRAJ21)
CAANNFNKFYF

SEQ ID NO: 487218 - protein, 12 aa, Homo sapiens
  CDR3 for beta chain variable domain of TCR clone 243609 (TRBV11-2, TRBJ2-1)
CASSPGNNEQFS

SEQ ID NO: 487219 - protein, 16 aa, Homo sapiens
  CDR3 for alpha chain variable domain of TCR clone 243610 (TRAV8-6, TRAJ4)
CAVAKILSGGYNKLIF

SEQ ID NO: 487220 - protein, 17 aa, Homo sapiens
  CDR3 for beta chain variable domain of TCR clone 243610 (TRBV20-1, TRBJ2-1)
CSASSSGLAGSYNEQFF

SEQ ID NO: 487221 - protein, 15 aa, Homo sapiens
  CDR3 for alpha chain variable domain of TCR clone 243611 (TRAV2, TRAJ9)
CAVEDRGTGGFKTIF

SEQ ID NO: 487222 - protein, 12 aa, Homo sapiens
  CDR3 for beta chain variable domain of TCR clone 243611 (TRBV11-3, TRBJ1-1)
CASSHRQGEAFF

SEQ ID NO: 487223 - protein, 14 aa, Homo sapiens
  CDR3 for alpha chain variable domain of TCR clone 243612 (TRAV1-1, TRAJ34)
CAVSPRYNTDKLIF

SEQ ID NO: 487224 - protein, 16 aa, Homo sapiens
  CDR3 for beta chain variable domain of TCR clone 243612 (TRBV19, TRBJ2-1)
CASSSKGTRSYNEQFF

SEQ ID NO: 487225 - protein, 17 aa, Homo sapiens
  CDR3 for alpha chain variable domain of TCR clone 243613 (TRAV3, TRAJ17)
CAVRERSCRQQANFLRR

SEQ ID NO: 487226 - protein, 17 aa, Homo sapiens
  CDR3 for beta chain variable domain of TCR clone 243613 (TRBV13, TRBJ2-3)
CASSLSRVAGGRNTQYF

SEQ ID NO: 487227 - protein, 12 aa, Homo sapiens
  CDR3 for alpha chain variable domain of TCR clone 243614 (TRAV20, TRAJ37)
CVLPSNTGKLIF

SEQ ID NO: 487228 - protein, 14 aa, Homo sapiens
  CDR3 for beta chain variable domain of TCR clone 243614 (TRBV19, TRBJ2-1)
CASPTFVLSGEKFF

SEQ ID NO: 487229 - protein, 12 aa, Homo sapiens
  CDR3 for alpha chain variable domain of TCR clone 243615 (TRAV29/DV5, TRAJ34)
CAARHNTDKLIF

SEQ ID NO: 487230 - protein, 16 aa, Homo sapiens
  CDR3 for beta chain variable domain of TCR clone 243615 (TRBV7-2, TRBJ2-3)
CASSLVALYSTDTQYF

SEQ ID NO: 487231 - protein, 12 aa, Homo sapiens
  CDR3 for alpha chain variable domain of TCR clone 243616 (TRAV16, TRAJ10)
CSRKGGGNKLTF

SEQ ID NO: 487232 - protein, 13 aa, Homo sapiens
  CDR3 for beta chain variable domain of TCR clone 243616 (TRBV7-3, TRBJ1-1)
CASSQDWGAEAFF

SEQ ID NO: 487233 - protein, 13 aa, Homo sapiens
  CDR3 for alpha chain variable domain of TCR clone 243617 (TRAV21, TRAJ26)
CAVLDNYGQNFVF

SEQ ID NO: 487234 - protein, 16 aa, Homo sapiens
  CDR3 for beta chain variable domain of TCR clone 243617 (TRBV29-1, TRBJ2-2)
CSVETRAGGNTGELFF

SEQ ID NO: 487235 - protein, 14 aa, Homo sapiens
  CDR3 for alpha chain variable domain of TCR clone 243618 (TRAV17, TRAJ35)
CATDRPGFGNVLHC

SEQ ID NO: 487236 - protein, 19 aa, Homo sapiens
  CDR3 for beta chain variable domain of TCR clone 243618 (TRBV11-3, TRBJ2-2)
CASSTRPGAETTNTGELVF

SEQ ID NO: 487237 - protein, 14 aa, Homo sapiens
  CDR3 for alpha chain variable domain of TCR clone 243619 (TRAV21, TRAJ45)
CAVSSGGGADGLTF

SEQ ID NO: 487238 - protein, 15 aa, Homo sapiens
  CDR3 for beta chain variable domain of TCR clone 243619 (TRBV6-1, TRBJ2-4)
CASSEAVWTINVQYF

SEQ ID NO: 487239 - protein, 19 aa, Homo sapiens
  CDR3 for alpha chain variable domain of TCR clone 243620 (TRAV26-1, TRAJ52)
CIVRAHRNAGGTSYGKLTF

SEQ ID NO: 487240 - protein, 13 aa, Homo sapiens
  CDR3 for beta chain variable domain of TCR clone 243620 (TRBV4-1, TRBJ2-2)
CASSQENTGELFF

SEQ ID NO: 487241 - protein, 13 aa, Homo sapiens
  CDR3 for alpha chain variable domain of TCR clone 243621 (TRAV2, TRAJ40)
CAVVTSGTYKCIF

SEQ ID NO: 487242 - protein, 12 aa, Homo sapiens
  CDR3 for beta chain variable domain of TCR clone 243621 (TRBV6-3, TRBJ2-7)
CASSLTPYEQYF

SEQ ID NO: 487243 - protein, 14 aa, Homo sapiens
  CDR3 for alpha chain variable domain of TCR clone 243622 (TRAV34, TRAJ44)
CGADGTGTASKLTF

SEQ ID NO: 487244 - protein, 15 aa, Homo sapiens
  CDR3 for beta chain variable domain of TCR clone 243622 (TRBV5-1, TRBJ2-1)
CARSPPRAPYNEQFF

SEQ ID NO: 487245 - protein, 12 aa, Homo sapiens
  CDR3 for alpha chain variable domain of TCR clone 243623 (TRAV20, TRAJ23)
CAVHNQGGKLIF

SEQ ID NO: 487246 - protein, 16 aa, Homo sapiens
  CDR3 for beta chain variable domain of TCR clone 243623 (TRBV7-6, TRBJ2-3)
CASSWLKIRSILAQAP

SEQ ID NO: 487247 - protein, 12 aa, Homo sapiens
  CDR3 for alpha chain variable domain of TCR clone 243624 (TRAV21, TRAJ11)
CAATSGYSALTF

SEQ ID NO: 487248 - protein, 16 aa, Homo sapiens
  CDR3 for beta chain variable domain of TCR clone 243624 (TRBV28, TRBJ2-2)
CASSLEGGSNTGELFF

SEQ ID NO: 487249 - protein, 15 aa, Homo sapiens
  CDR3 for alpha chain variable domain of TCR clone 243625 (TRAV4, TRAJ39)
CLVGPNNNAGNMLTF

SEQ ID NO: 487250 - protein, 17 aa, Homo sapiens
  CDR3 for beta chain variable domain of TCR clone 243625 (TRBV7-8, TRBJ2-6)
CASSAGTGGAGANVLTF

SEQ ID NO: 487251 - protein, 16 aa, Homo sapiens
  CDR3 for alpha chain variable domain of TCR clone 243626 (TRAV14/DV4, TRAJ54)
CAMREGRIQGAQKLVF

SEQ ID NO: 487252 - protein, 16 aa, Homo sapiens
  CDR3 for beta chain variable domain of TCR clone 243626 (TRBV2, TRBJ1-3)
CASSGQGPSSGNTIYF

SEQ ID NO: 487253 - protein, 12 aa, Homo sapiens
  CDR3 for alpha chain variable domain of TCR clone 243627 (TRAV25, TRAJ16)
CAGPKDGQKLLF

SEQ ID NO: 487254 - protein, 15 aa, Homo sapiens
  CDR3 for beta chain variable domain of TCR clone 243627 (TRBV15, TRBJ2-2)
CATSGTGGRVGELFF

SEQ ID NO: 487255 - protein, 10 aa, Homo sapiens
  CDR3 for alpha chain variable domain of TCR clone 243628 (TRAV23/DV6, TRAJ57)
CAASSTLSQG

SEQ ID NO: 487256 - protein, 15 aa, Homo sapiens
  CDR3 for beta chain variable domain of TCR clone 243628 (TRBV2, TRBJ2-3)
CASSDFEKATDTQYF

SEQ ID NO: 487257 - protein, 11 aa, Homo sapiens
  CDR3 for alpha chain variable domain of TCR clone 243629 (TRAV6, TRAJ30)
PLCSLDDKIIF

SEQ ID NO: 487258 - protein, 12 aa, Homo sapiens
  CDR3 for beta chain variable domain of TCR clone 243629 (TRBV11-3, TRBJ1-1)
CASSHRQGEAFF

SEQ ID NO: 487259 - protein, 22 aa, Homo sapiens
  CDR3 for alpha chain variable domain of TCR clone 243630 (TRAV21, )
CAVRQDAGNNHIQNPNPAVYQL

SEQ ID NO: 487260 - protein, 16 aa, Homo sapiens
  CDR3 for beta chain variable domain of TCR clone 243630 (TRBV4-2, TRBJ1-1)
CASRPLDGGGDTEAFF

SEQ ID NO: 487261 - protein, 13 aa, Homo sapiens
  CDR3 for alpha chain variable domain of TCR clone 243631 (TRAV12-1, TRAJ37)
CVVNAGNIGKLIF

SEQ ID NO: 487262 - protein, 14 aa, Homo sapiens
  CDR3 for beta chain variable domain of TCR clone 243631 (TRBV7-2, TRBJ2-3)
CASRRGLAADTQYF

SEQ ID NO: 487263 - protein, 12 aa, Homo sapiens
  CDR3 for alpha chain variable domain of TCR clone 243632 (TRAV12-3, TRAJ4)
CAMTGAGTRLSV

SEQ ID NO: 487264 - protein, 14 aa, Homo sapiens
  CDR3 for beta chain variable domain of TCR clone 243632 (TRBV10-3, TRBJ1-1)
CAISDTDRGVEAFF

SEQ ID NO: 487265 - protein, 14 aa, Homo sapiens
  CDR3 for alpha chain variable domain of TCR clone 243633 (TRAV8-4, TRAJ34)
CAGSDPGDTDKLIF

SEQ ID NO: 487266 - protein, 15 aa, Homo sapiens
  CDR3 for beta chain variable domain of TCR clone 243633 (TRBV6-6, TRBJ1-1)
CASSPRGDVETEAFF

SEQ ID NO: 487267 - protein, 15 aa, Homo sapiens
  CDR3 for alpha chain variable domain of TCR clone 243634 (TRAV8-3, TRAJ45)
CASSYLGGGAAGLTF

SEQ ID NO: 487268 - protein, 13 aa, Homo sapiens
  CDR3 for beta chain variable domain of TCR clone 243634 (TRBV10-3, TRBJ2-7)
CASKLAVNYEQYF

SEQ ID NO: 487269 - protein, 15 aa, Homo sapiens
  CDR3 for alpha chain variable domain of TCR clone 243635 (TRAV8-4, TRAJ29)
CAVSEDFRGNTPLVF

SEQ ID NO: 487270 - protein, 14 aa, Homo sapiens
  CDR3 for beta chain variable domain of TCR clone 243635 (TRBV25-1, TRBJ1-1)
CASTHLGGNTEAFF

SEQ ID NO: 487271 - protein, 13 aa, Homo sapiens
  CDR3 for alpha chain variable domain of TCR clone 243636 (TRAV41, TRAJ48)
SVLVNFGNEKLTF

SEQ ID NO: 487272 - protein, 16 aa, Homo sapiens
  CDR3 for beta chain variable domain of TCR clone 243636 (TRBV12-5, TRBJ2-5)
CASGPRTSGNQETQYF

SEQ ID NO: 487273 - protein, 10 aa, Homo sapiens
  CDR3 for alpha chain variable domain of TCR clone 243637 (TRAV12-1, TRAJ43)
CVLHNNDMRF

SEQ ID NO: 487274 - protein, 13 aa, Homo sapiens
  CDR3 for beta chain variable domain of TCR clone 243637 (TRBV12-4, TRBJ1-2)
CASSSGLTVISTF

SEQ ID NO: 487275 - protein, 14 aa, Homo sapiens
  CDR3 for alpha chain variable domain of TCR clone 243638 (TRAV12-3, TRAJ21)
CAMNPGDNFNKFYF

SEQ ID NO: 487276 - protein, 13 aa, Homo sapiens
  CDR3 for beta chain variable domain of TCR clone 243638 (TRBV7-9, TRBJ2-1)
CAGSLDVGNEQFF

SEQ ID NO: 487277 - protein, 14 aa, Homo sapiens
  CDR3 for alpha chain variable domain of TCR clone 243639 (TRAV12-2, TRAJ9)
CAVNALEGGFKTIF

SEQ ID NO: 487278 - protein, 16 aa, Homo sapiens
  CDR3 for beta chain variable domain of TCR clone 243639 (TRBV19, TRBJ1-6)
CASSVAPVAGNSTLLF

SEQ ID NO: 487279 - protein, 17 aa, Homo sapiens
  CDR3 for alpha chain variable domain of TCR clone 243640 (TRAV12-2, TRAJ4)
CAVNVRPVSGGYNKLIF

SEQ ID NO: 487280 - protein, 14 aa, Homo sapiens
  CDR3 for beta chain variable domain of TCR clone 243640 (TRBV7-9, TRBJ1-1)
CASTPLQSYTEAFF

SEQ ID NO: 487281 - protein, 14 aa, Homo sapiens
  CDR3 for alpha chain variable domain of TCR clone 243641 (TRAV36/DV7, TRAJ16)
CAVEADSDGQKLLF

SEQ ID NO: 487282 - protein, 12 aa, Homo sapiens
  CDR3 for beta chain variable domain of TCR clone 243641 (TRBV5-4, TRBJ2-3)
NLAGGALDTQYF

SEQ ID NO: 487283 - protein, 15 aa, Homo sapiens
  CDR3 for alpha chain variable domain of TCR clone 243642 (TRAV38-1, TRAJ37)
CAFIFGSGNTGKLNF

SEQ ID NO: 487284 - protein, 12 aa, Homo sapiens
  CDR3 for beta chain variable domain of TCR clone 243642 (TRBV7-9, TRBJ2-7)
CASSLEGYEQYF

SEQ ID NO: 487285 - protein, 14 aa, Homo sapiens
  CDR3 for alpha chain variable domain of TCR clone 243643 (TRAV27, TRAJ49)
CAGRPEGTGNQFNF

SEQ ID NO: 487286 - protein, 15 aa, Homo sapiens
  CDR3 for beta chain variable domain of TCR clone 243643 (TRBV19, TRBJ2-1)
CASSIQATSYNEQFF

SEQ ID NO: 487287 - protein, 14 aa, Homo sapiens
  CDR3 for alpha chain variable domain of TCR clone 243644 (TRAV8-6, TRAJ37)
CADPVSSNTGKLIF

SEQ ID NO: 487288 - protein, 16 aa, Homo sapiens
  CDR3 for beta chain variable domain of TCR clone 243644 (TRBV20-1, TRBJ1-2)
CSASMGQGVANYGYTF

SEQ ID NO: 487289 - protein, 23 aa, Homo sapiens
  CDR3 for alpha chain variable domain of TCR clone 243645 (TRAV12-2, TRAJ36)
SLLIRGSQPSDSATLERANNLFF

SEQ ID NO: 487290 - protein, 14 aa, Homo sapiens
  CDR3 for beta chain variable domain of TCR clone 243645 (TRBV12-4, TRBJ1-1)
CASTWTGHDTEAFF

SEQ ID NO: 487291 - protein, 16 aa, Homo sapiens
  CDR3 for alpha chain variable domain of TCR clone 243646 (TRAV14/DV4, TRAJ15)
CAMREGPAQAGTALIF

SEQ ID NO: 487292 - protein, 12 aa, Homo sapiens
  CDR3 for beta chain variable domain of TCR clone 243646 (TRBV28, TRBJ2-6)
CAIQAGANVLTC

SEQ ID NO: 487293 - protein, 13 aa, Homo sapiens
  CDR3 for alpha chain variable domain of TCR clone 243647 (TRAV27, TRAJ41)
CAGEGNSGYALNF

SEQ ID NO: 487294 - protein, 13 aa, Homo sapiens
  CDR3 for beta chain variable domain of TCR clone 243647 (TRBV19, TRBJ1-2)
CASSVPGQDGDTF

SEQ ID NO: 487295 - protein, 15 aa, Homo sapiens
  CDR3 for alpha chain variable domain of TCR clone 243648 (TRAV12-2, TRAJ53)
CAGNGGGGSNYKLTF

SEQ ID NO: 487296 - protein, 14 aa, Homo sapiens
  CDR3 for beta chain variable domain of TCR clone 243648 (TRBV11-2, TRBJ2-5)
CASSRTGGIETQYF

SEQ ID NO: 487297 - protein, 12 aa, Homo sapiens
  CDR3 for alpha chain variable domain of TCR clone 243649 (TRAV4, TRAJ26)
CLVGDYGQNFVF

SEQ ID NO: 487298 - protein, 15 aa, Homo sapiens
  CDR3 for beta chain variable domain of TCR clone 243649 (TRBV19, TRBJ1-2)
CASSVGQVLNYGYTF

SEQ ID NO: 487299 - protein, 16 aa, Homo sapiens
  CDR3 for alpha chain variable domain of TCR clone 243650 (TRAV4, TRAJ13)
CCVLLPPPGGYQKVTF

SEQ ID NO: 487300 - protein, 14 aa, Homo sapiens
  CDR3 for beta chain variable domain of TCR clone 243650 (TRBV25-1, TRBJ1-1)
CASTHLGGNTEAFF

SEQ ID NO: 487301 - protein, 19 aa, Homo sapiens
  CDR3 for alpha chain variable domain of TCR clone 243651 (TRAV8-3, TRAJ8)
LSTSVMWDPMNTGFQKLVF

SEQ ID NO: 487302 - protein, 13 aa, Homo sapiens
  CDR3 for beta chain variable domain of TCR clone 243651 (TRBV10-2, TRBJ2-3)
CASSESGDHTQYF

SEQ ID NO: 487303 - protein, 12 aa, Homo sapiens
  CDR3 for alpha chain variable domain of TCR clone 243652 (TRAV16, TRAJ10)
CSRTGGGNKLTF

SEQ ID NO: 487304 - protein, 12 aa, Homo sapiens
  CDR3 for beta chain variable domain of TCR clone 243652 (TRBV19, TRBJ2-7)
CASTDRGYEQYF

SEQ ID NO: 487305 - protein, 13 aa, Homo sapiens
  CDR3 for alpha chain variable domain of TCR clone 243653 (TRAV8-3, TRAJ43)
CAVGPDNNNDMRF

SEQ ID NO: 487306 - protein, 12 aa, Homo sapiens
  CDR3 for beta chain variable domain of TCR clone 243653 (TRBV7-2, TRBJ1-6)
CASSLSSSALHF

SEQ ID NO: 487307 - protein, 12 aa, Homo sapiens
  CDR3 for alpha chain variable domain of TCR clone 243654 (TRAV13-1, TRAJ17)
CAARTAGNKLTF

SEQ ID NO: 487308 - protein, 15 aa, Homo sapiens
  CDR3 for beta chain variable domain of TCR clone 243654 (TRBV7-6, TRBJ1-1)
CASSHQGGANTEAFF

SEQ ID NO: 487309 - protein, 12 aa, Homo sapiens
  CDR3 for alpha chain variable domain of TCR clone 243655 (TRAV20, TRAJ36)
CAVLTGANNLFF

SEQ ID NO: 487310 - protein, 16 aa, Homo sapiens
  CDR3 for beta chain variable domain of TCR clone 243655 (TRBV5-5, TRBJ1-6)
CASGYLSTGFNSPLHF

SEQ ID NO: 487311 - protein, 17 aa, Homo sapiens
  CDR3 for alpha chain variable domain of TCR clone 243656 (TRAV35, TRAJ28)
CAGLQVYSGAGSYQLTF

SEQ ID NO: 487312 - protein, 16 aa, Homo sapiens
  CDR3 for beta chain variable domain of TCR clone 243656 (TRBV7-2, TRBJ2-1)
CAISLVGGPELNEQFF

SEQ ID NO: 487313 - protein, 12 aa, Homo sapiens
  CDR3 for alpha chain variable domain of TCR clone 243657 (TRAV12-1, TRAJ20)
CVVNPDDYKLSF

SEQ ID NO: 487314 - protein, 15 aa, Homo sapiens
  CDR3 for beta chain variable domain of TCR clone 243657 (TRBV10-1, TRBJ2-1)
CASSEWRGTYNEQFF

SEQ ID NO: 487315 - protein, 16 aa, Homo sapiens
  CDR3 for alpha chain variable domain of TCR clone 243658 (TRAV8-3, TRAJ13)
CAVGAYPSGDSQKVTF

SEQ ID NO: 487316 - protein, 13 aa, Homo sapiens
  CDR3 for beta chain variable domain of TCR clone 243658 (TRBV7-9, TRBJ1-2)
CASILKQNYGYTF

SEQ ID NO: 487317 - protein, 12 aa, Homo sapiens
  CDR3 for alpha chain variable domain of TCR clone 243659 (TRAV13-2, TRAJ23)
CAERHRGGKLIF

SEQ ID NO: 487318 - protein, 14 aa, Homo sapiens
  CDR3 for beta chain variable domain of TCR clone 243659 (TRBV19, TRBJ1-2)
CASSIGAGSYGYTF

SEQ ID NO: 487319 - protein, 14 aa, Homo sapiens
  CDR3 for alpha chain variable domain of TCR clone 243660 (TRAV1-2, TRAJ8)
CAVREDTGFQKLVF

SEQ ID NO: 487320 - protein, 16 aa, Homo sapiens
  CDR3 for beta chain variable domain of TCR clone 243660 (TRBV15, TRBJ2-3)
YATSRDLGIVTDTQYF

SEQ ID NO: 487321 - protein, 15 aa, Homo sapiens
  CDR3 for alpha chain variable domain of TCR clone 243661 (TRAV3, TRAJ4)
CAVRDGTGGYNKLIF

SEQ ID NO: 487322 - protein, 14 aa, Homo sapiens
  CDR3 for beta chain variable domain of TCR clone 243661 (TRBV11-3, TRBJ2-1)
CASSATTSGSIQFF

SEQ ID NO: 487323 - protein, 12 aa, Homo sapiens
  CDR3 for alpha chain variable domain of TCR clone 243662 (TRAV8-3, TRAJ20)
CAVGANDYKLSF

SEQ ID NO: 487324 - protein, 16 aa, Homo sapiens
  CDR3 for beta chain variable domain of TCR clone 243662 (TRBV6-1, TRBJ2-5)
CASSETLDRGAETQYF

SEQ ID NO: 487325 - protein, 15 aa, Homo sapiens
  CDR3 for alpha chain variable domain of TCR clone 243663 (TRAV12-2, TRAJ53)
CAVNGGGGSKYKLKF

SEQ ID NO: 487326 - protein, 15 aa, Homo sapiens
  CDR3 for beta chain variable domain of TCR clone 243663 (TRBV20-1, TRBJ2-7)
CSARDRVSGMDEQYF

SEQ ID NO: 487327 - protein, 12 aa, Homo sapiens
  CDR3 for alpha chain variable domain of TCR clone 243664 (TRAV12-3, TRAJ17)
CAMTLTGNKLTF

SEQ ID NO: 487328 - protein, 16 aa, Homo sapiens
  CDR3 for beta chain variable domain of TCR clone 243664 (TRBV20-1, TRBJ1-4)
CSAPGQGLLTNEELFF

SEQ ID NO: 487329 - protein, 15 aa, Homo sapiens
  CDR3 for alpha chain variable domain of TCR clone 243665 (TRAV12-2, TRAJ53)
CAVNGGGGSNYKLTF

SEQ ID NO: 487330 - protein, 11 aa, Homo sapiens
  CDR3 for beta chain variable domain of TCR clone 243665 (TRBV7-2, TRBJ2-7)
CASSSGLWQYF

SEQ ID NO: 487331 - protein, 12 aa, Homo sapiens
  CDR3 for alpha chain variable domain of TCR clone 243666 (TRAV12-3, TRAJ4)
CEMTGAGTRLAV

SEQ ID NO: 487332 - protein, 14 aa, Homo sapiens
  CDR3 for beta chain variable domain of TCR clone 243666 (TRBV10-3, TRBJ1-1)
CAISDTDRGVEAFF

SEQ ID NO: 487333 - protein, 14 aa, Homo sapiens
  CDR3 for alpha chain variable domain of TCR clone 243667 (TRAV12-1, TRAJ3)
CVANPASSASKIIF

SEQ ID NO: 487334 - protein, 15 aa, Homo sapiens
  CDR3 for beta chain variable domain of TCR clone 243667 (TRBV5-7, TRBJ1-2)
CAGSSPGQGNYGYTF

SEQ ID NO: 487335 - protein, 13 aa, Homo sapiens
  CDR3 for alpha chain variable domain of TCR clone 243668 (TRAV17, TRAJ9)
YATDYTGGFKTIF

SEQ ID NO: 487336 - protein, 14 aa, Homo sapiens
  CDR3 for beta chain variable domain of TCR clone 243668 (TRBV19, TRBJ2-5)
CASSMTGQQETQYF

SEQ ID NO: 487337 - protein, 15 aa, Homo sapiens
  CDR3 for alpha chain variable domain of TCR clone 243669 (TRAV3, TRAJ5)
CAVRDLDTGRRALTF

SEQ ID NO: 487338 - protein, 16 aa, Homo sapiens
  CDR3 for beta chain variable domain of TCR clone 243669 (TRBV4-1, TRBJ2-7)
CASSQEWTSGPLEQYF

SEQ ID NO: 487339 - protein, 14 aa, Homo sapiens
  CDR3 for alpha chain variable domain of TCR clone 243670 (TRAV12-1, TRAJ4)
CVGDFSGCYNKLIF

SEQ ID NO: 487340 - protein, 15 aa, Homo sapiens
  CDR3 for beta chain variable domain of TCR clone 243670 (TRBV4-2, TRBJ2-7)
CASSQVDRSSYEQYF

SEQ ID NO: 487341 - protein, 17 aa, Homo sapiens
  CDR3 for alpha chain variable domain of TCR clone 243671 (TRAV26-2, TRAJ52)
CILSSSSGGTSYGKLTF

SEQ ID NO: 487342 - protein, 11 aa, Homo sapiens
  CDR3 for beta chain variable domain of TCR clone 243671 (TRBV19, TRBJ1-1)
CAALRNTEAFF

SEQ ID NO: 487343 - protein, 17 aa, Homo sapiens
  CDR3 for alpha chain variable domain of TCR clone 243672 (TRAV3, TRAJ12)
CAVRDGGRVDSSYKLIF

SEQ ID NO: 487344 - protein, 13 aa, Homo sapiens
  CDR3 for beta chain variable domain of TCR clone 243672 (TRBV20-1, TRBJ1-1)
CSAPLGGGTEAFF

SEQ ID NO: 487345 - protein, 13 aa, Homo sapiens
  CDR3 for alpha chain variable domain of TCR clone 243673 (TRAV13-2, TRAJ13)
CAATAGGYQKVTF

SEQ ID NO: 487346 - protein, 15 aa, Homo sapiens
  CDR3 for beta chain variable domain of TCR clone 243673 (TRBV20-1, TRBJ1-5)
CSARVGRVVSQPQHF

SEQ ID NO: 487347 - protein, 12 aa, Homo sapiens
  CDR3 for alpha chain variable domain of TCR clone 243674 (TRAV12-2, TRAJ42)
CAVGGSQGNLIF

SEQ ID NO: 487348 - protein, 15 aa, Homo sapiens
  CDR3 for beta chain variable domain of TCR clone 243674 (TRBV9, TRBJ1-6)
CASSVAGTGDSPLHV

SEQ ID NO: 487349 - protein, 16 aa, Homo sapiens
  CDR3 for alpha chain variable domain of TCR clone 243675 (TRAV35, TRAJ28)
CAGYLYSGAGSYQLTF

SEQ ID NO: 487350 - protein, 16 aa, Homo sapiens
  CDR3 for beta chain variable domain of TCR clone 243675 (TRBV5-1, TRBJ2-1)
CGSSHGLAGPQNEQFF

SEQ ID NO: 487351 - protein, 14 aa, Homo sapiens
  CDR3 for alpha chain variable domain of TCR clone 243676 (TRAV8-4, TRAJ5)
CAVSTDTGRRALTF

SEQ ID NO: 487352 - protein, 11 aa, Homo sapiens
  CDR3 for beta chain variable domain of TCR clone 243676 (TRBV11-2, TRBJ1-1)
CASSINTEAFF

SEQ ID NO: 487353 - protein, 14 aa, Homo sapiens
  CDR3 for alpha chain variable domain of TCR clone 243677 (TRAV35, TRAJ42)
CAVRYGGSQGNLIF

SEQ ID NO: 487354 - protein, 15 aa, Homo sapiens
  CDR3 for beta chain variable domain of TCR clone 243677 (TRBV7-9, TRBJ2-1)
GASSLGWGRANEQFF

SEQ ID NO: 487355 - protein, 15 aa, Homo sapiens
  CDR3 for alpha chain variable domain of TCR clone 243678 (TRAV3, TRAJ22)
CVVRDRGGSARQLTF

SEQ ID NO: 487356 - protein, 14 aa, Homo sapiens
  CDR3 for beta chain variable domain of TCR clone 243678 (TRBV19, TRBJ1-5)
CASSLGLIGQPQHF

SEQ ID NO: 487357 - protein, 14 aa, Homo sapiens
  CDR3 for alpha chain variable domain of TCR clone 243679 (TRAV20, TRAJ26)
CAVQAAIYGQNFVF

SEQ ID NO: 487358 - protein, 16 aa, Homo sapiens
  CDR3 for beta chain variable domain of TCR clone 243679 (TRBV18, TRBJ2-2)
CASSPPRTANTGELFF

SEQ ID NO: 487359 - protein, 13 aa, Homo sapiens
  CDR3 for alpha chain variable domain of TCR clone 243680 (TRAV3, TRAJ30)
CAVRDRGDDKIIF

SEQ ID NO: 487360 - protein, 14 aa, Homo sapiens
  CDR3 for beta chain variable domain of TCR clone 243680 (TRBV2, TRBJ2-7)
CASSLTSGGYEQYF

SEQ ID NO: 487361 - protein, 11 aa, Homo sapiens
  CDR3 for alpha chain variable domain of TCR clone 243681 (TRAV2, TRAJ33)
CAVESNYQLIW

SEQ ID NO: 487362 - protein, 14 aa, Homo sapiens
  CDR3 for beta chain variable domain of TCR clone 243681 (TRBV2, TRBJ2-7)
CASSLTSGGYEQYF

SEQ ID NO: 487363 - protein, 11 aa, Homo sapiens
  CDR3 for alpha chain variable domain of TCR clone 243682 (TRAV17, TRAJ9)
CGFTGGFKTIF

SEQ ID NO: 487364 - protein, 16 aa, Homo sapiens
  CDR3 for beta chain variable domain of TCR clone 243682 (TRBV4-2, TRBJ2-3)
CASSQELAGDTDTQYF

SEQ ID NO: 487365 - protein, 14 aa, Homo sapiens
  CDR3 for alpha chain variable domain of TCR clone 243683 (TRAV1-2, TRAJ16)
CAVNRFSDGQKLLF

SEQ ID NO: 487366 - protein, 14 aa, Homo sapiens
  CDR3 for beta chain variable domain of TCR clone 243683 (TRBV12-4, TRBJ1-1)
CASSLGTRGTEAFF

SEQ ID NO: 487367 - protein, 12 aa, Homo sapiens
  CDR3 for alpha chain variable domain of TCR clone 243684 (TRAV27, TRAJ13)
CAGVRGYHKVTF

SEQ ID NO: 487368 - protein, 11 aa, Homo sapiens
  CDR3 for beta chain variable domain of TCR clone 243684 (TRBV6-1, TRBJ2-5)
CASTGVETQYF

SEQ ID NO: 487369 - protein, 13 aa, Homo sapiens
  CDR3 for alpha chain variable domain of TCR clone 243685 (TRAV29/DV5, TRAJ9)
CAASETGGVKTIF

SEQ ID NO: 487370 - protein, 15 aa, Homo sapiens
  CDR3 for beta chain variable domain of TCR clone 243685 (TRBV19, TRBJ2-1)
CASSMGSGTGRQQFF

SEQ ID NO: 487371 - protein, 11 aa, Homo sapiens
  CDR3 for alpha chain variable domain of TCR clone 243686 (TRAV21, TRAJ34)
CAHDNTDKLIF

SEQ ID NO: 487372 - protein, 11 aa, Homo sapiens
  CDR3 for beta chain variable domain of TCR clone 243686 (TRBV29-1, TRBJ2-5)
CSEDRTGTQYF

SEQ ID NO: 487373 - protein, 16 aa, Homo sapiens
  CDR3 for alpha chain variable domain of TCR clone 243687 (TRAV30, TRAJ24)
CGTEIVDADSWGKFQF

SEQ ID NO: 487374 - protein, 13 aa, Homo sapiens
  CDR3 for beta chain variable domain of TCR clone 243687 (TRBV12-5, TRBJ2-5)
CCGSRTHQETQYF

SEQ ID NO: 487375 - protein, 13 aa, Homo sapiens
  CDR3 for alpha chain variable domain of TCR clone 243688 (TRAV12-1, TRAJ26)
RVVRRNYGQNFVF

SEQ ID NO: 487376 - protein, 15 aa, Homo sapiens
  CDR3 for beta chain variable domain of TCR clone 243688 (TRBV28, TRBJ2-1)
CASSIIAGGRSEQFF

SEQ ID NO: 487377 - protein, 16 aa, Homo sapiens
  CDR3 for alpha chain variable domain of TCR clone 243689 (TRAV13-1, TRAJ22)
CAAKGGRSGSARQLTF

SEQ ID NO: 487378 - protein, 15 aa, Homo sapiens
  CDR3 for beta chain variable domain of TCR clone 243689 (TRBV9, TRBJ1-6)
CASSVAGTGDAPLHF

SEQ ID NO: 487379 - protein, 12 aa, Homo sapiens
  CDR3 for alpha chain variable domain of TCR clone 243690 (TRAV30, TRAJ39)
CGRGNAGNMLTF

SEQ ID NO: 487380 - protein, 14 aa, Homo sapiens
  CDR3 for beta chain variable domain of TCR clone 243690 (TRBV7-2, TRBJ1-5)
CASSTQGAGQPQHF

SEQ ID NO: 487381 - protein, 14 aa, Homo sapiens
  CDR3 for alpha chain variable domain of TCR clone 243691 (TRAV1-2, TRAJ16)
CAVNRFSDGQKLLF

SEQ ID NO: 487382 - protein, 13 aa, Homo sapiens
  CDR3 for beta chain variable domain of TCR clone 243691 (TRBV10-3, TRBJ2-7)
FASKLAVNYEQYF

SEQ ID NO: 487383 - protein, 15 aa, Homo sapiens
  CDR3 for alpha chain variable domain of TCR clone 243692 (TRAV17, TRAJ23)
CATDAEDNQGGKLIF

SEQ ID NO: 487384 - protein, 12 aa, Homo sapiens
  CDR3 for beta chain variable domain of TCR clone 243692 (TRBV2, TRBJ2-1)
CVKREGYNEQFF

SEQ ID NO: 487385 - protein, 14 aa, Homo sapiens
  CDR3 for alpha chain variable domain of TCR clone 243693 (TRAV35, TRAJ22)
CAGLRPGSARQLTF

SEQ ID NO: 487386 - protein, 15 aa, Homo sapiens
  CDR3 for beta chain variable domain of TCR clone 243693 (TRBV12-4, TRBJ2-5)
CASSSPTGLQETQYF

SEQ ID NO: 487387 - protein, 11 aa, Homo sapiens
  CDR3 for alpha chain variable domain of TCR clone 243694 (TRAV17, TRAJ43)
CATPRSNDMRF

SEQ ID NO: 487388 - protein, 19 aa, Homo sapiens
  CDR3 for beta chain variable domain of TCR clone 243694 (TRBV11-2, TRBJ2-3)
CASSFLSRNWGGGTDTQYF

SEQ ID NO: 487389 - protein, 23 aa, Homo sapiens
  CDR3 for alpha chain variable domain of TCR clone 243695 (TRAV26-1, TRAJ38)
CIADNAGNNHIQNPDPAVYQLRD

SEQ ID NO: 487390 - protein, 12 aa, Homo sapiens
  CDR3 for beta chain variable domain of TCR clone 243695 (TRBV11-2, TRBJ2-2)
CASSLGGGKLFF

SEQ ID NO: 487391 - protein, 14 aa, Homo sapiens
  CDR3 for alpha chain variable domain of TCR clone 243696 (TRAV26-1, TRAJ45)
CIVRAVGGADGLTF

SEQ ID NO: 487392 - protein, 16 aa, Homo sapiens
  CDR3 for beta chain variable domain of TCR clone 243696 (TRBV7-9, TRBJ1-1)
CASGLTQVRSNTEAFF

SEQ ID NO: 487393 - protein, 16 aa, Homo sapiens
  CDR3 for alpha chain variable domain of TCR clone 243697 (TRAV1-2, TRAJ10)
CSVRGVLTGGGNKLTF

SEQ ID NO: 487394 - protein, 13 aa, Homo sapiens
  CDR3 for beta chain variable domain of TCR clone 243697 (TRBV20-1, TRBJ1-6)
CSAPLGVGSPLHF

SEQ ID NO: 487395 - protein, 11 aa, Homo sapiens
  CDR3 for alpha chain variable domain of TCR clone 243698 (TRAV29/DV5, TRAJ31)
CAASYRDRLMF

SEQ ID NO: 487396 - protein, 20 aa, Homo sapiens
  CDR3 for beta chain variable domain of TCR clone 243698 (TRBV19, TRBJ2-1)
CASSISRTVTSTRLNNEQFF

SEQ ID NO: 487397 - protein, 11 aa, Homo sapiens
  CDR3 for alpha chain variable domain of TCR clone 243699 (TRAV23/DV6, TRAJ43)
CAASSGNNMRF

SEQ ID NO: 487398 - protein, 14 aa, Homo sapiens
  CDR3 for beta chain variable domain of TCR clone 243699 (TRBV4-1, TRBJ1-2)
CASSQDPLPYGYTF

SEQ ID NO: 487399 - protein, 15 aa, Homo sapiens
  CDR3 for alpha chain variable domain of TCR clone 243700 (TRAV26-2, TRAJ26)
CILRDFDNYGQNFVF

SEQ ID NO: 487400 - protein, 14 aa, Homo sapiens
  CDR3 for beta chain variable domain of TCR clone 243700 (TRBV29-1, TRBJ2-5)
CSFWTPYVGETQYF

SEQ ID NO: 487401 - protein, 15 aa, Homo sapiens
  CDR3 for alpha chain variable domain of TCR clone 243701 (TRAV21, TRAJ53)
CATLNSGGSNYKLTF

SEQ ID NO: 487402 - protein, 13 aa, Homo sapiens
  CDR3 for beta chain variable domain of TCR clone 243701 (TRBV4-1, TRBJ2-1)
CASSQAGGDEQFF

SEQ ID NO: 487403 - protein, 15 aa, Homo sapiens
  CDR3 for alpha chain variable domain of TCR clone 243702 (TRAV12-2, TRAJ53)
CAVNGGGGSNYKLTF

SEQ ID NO: 487404 - protein, 14 aa, Homo sapiens
  CDR3 for beta chain variable domain of TCR clone 243702 (TRBV18, TRBJ1-1)
CASSQGQGNTEAFF

SEQ ID NO: 487405 - protein, 20 aa, Homo sapiens
  CDR3 for alpha chain variable domain of TCR clone 243703 (TRAV12-1, TRAJ42)
SSVIQPPTSVKGGSQGNLIF

SEQ ID NO: 487406 - protein, 17 aa, Homo sapiens
  CDR3 for beta chain variable domain of TCR clone 243703 (TRBV11-2, TRBJ2-1)
CASSLYPPGVECNEQFF

SEQ ID NO: 487407 - protein, 11 aa, Homo sapiens
  CDR3 for alpha chain variable domain of TCR clone 243704 (TRAV1-2, TRAJ31)
CAVNNNARLMF

SEQ ID NO: 487408 - protein, 13 aa, Homo sapiens
  CDR3 for beta chain variable domain of TCR clone 243704 (TRBV7-9, TRBJ2-7)
CASSFAGAYEQYF

SEQ ID NO: 487409 - protein, 18 aa, Homo sapiens
  CDR3 for alpha chain variable domain of TCR clone 243705 (TRAV21, TRAJ52)
CAVRPSPAGGTSYGKLTF

SEQ ID NO: 487410 - protein, 15 aa, Homo sapiens
  CDR3 for beta chain variable domain of TCR clone 243705 (TRBV5-1, TRBJ2-7)
CASSLYPDGGYEQYF

SEQ ID NO: 487411 - protein, 14 aa, Homo sapiens
  CDR3 for alpha chain variable domain of TCR clone 243706 (TRAV8-4, TRAJ13)
CAVTLSGGYQKVTF

SEQ ID NO: 487412 - protein, 14 aa, Homo sapiens
  CDR3 for beta chain variable domain of TCR clone 243706 (TRBV19, TRBJ2-2)
CASSTLHRSGELFF

SEQ ID NO: 487413 - protein, 15 aa, Homo sapiens
  CDR3 for alpha chain variable domain of TCR clone 243707 (TRAV26-1, TRAJ9)
FIVRESNTGGFKPIF

SEQ ID NO: 487414 - protein, 11 aa, Homo sapiens
  CDR3 for beta chain variable domain of TCR clone 243707 (TRBV7-6, TRBJ2-5)
CASSFQETQYF

SEQ ID NO: 487415 - protein, 16 aa, Homo sapiens
  CDR3 for alpha chain variable domain of TCR clone 243708 (TRAV4, TRAJ6)
CLVGVYASGGSYLPTF

SEQ ID NO: 487416 - protein, 15 aa, Homo sapiens
  CDR3 for beta chain variable domain of TCR clone 243708 (TRBV14, TRBJ2-5)
CASSQGDRDQETQYF

SEQ ID NO: 487417 - protein, 14 aa, Homo sapiens
  CDR3 for alpha chain variable domain of TCR clone 243709 (TRAV1-2, TRAJ16)
CAVNRFSDGQKLLF

SEQ ID NO: 487418 - protein, 15 aa, Homo sapiens
  CDR3 for beta chain variable domain of TCR clone 243709 (TRBV7-9, TRBJ1-6)
CARSAPGRGNSPLHF

SEQ ID NO: 487419 - protein, 18 aa, Homo sapiens
  CDR3 for alpha chain variable domain of TCR clone 243710 (TRAV12-3, TRAJ52)
CAMSRTNAGGTSYGKLTF

SEQ ID NO: 487420 - protein, 15 aa, Homo sapiens
  CDR3 for beta chain variable domain of TCR clone 243710 (TRBV7-2, TRBJ2-7)
CASSWGQGAIYEQYF

SEQ ID NO: 487421 - protein, 23 aa, Homo sapiens
  CDR3 for alpha chain variable domain of TCR clone 243711 (TRAV26-1, TRAJ38)
CIAANAGNNHIQNPDPAVYQLRN

SEQ ID NO: 487422 - protein, 13 aa, Homo sapiens
  CDR3 for beta chain variable domain of TCR clone 243711 (TRBV20-1, TRBJ1-1)
CSARGGGNTEAFF

SEQ ID NO: 487423 - protein, 13 aa, Homo sapiens
  CDR3 for alpha chain variable domain of TCR clone 243712 (TRAV8-6, TRAJ49)
CAVITKTGNQFNF

SEQ ID NO: 487424 - protein, 14 aa, Homo sapiens
  CDR3 for beta chain variable domain of TCR clone 243712 (TRBV5-1, TRBJ2-7)
CASSRGESLYEQYF

SEQ ID NO: 487425 - protein, 12 aa, Homo sapiens
  CDR3 for alpha chain variable domain of TCR clone 243713 (TRAV25, TRAJ48)
CAWLFGNEKLTF

SEQ ID NO: 487426 - protein, 14 aa, Homo sapiens
  CDR3 for beta chain variable domain of TCR clone 243713 (TRBV25-1, TRBJ1-1)
CASTHLGGNTEAFF

SEQ ID NO: 487427 - protein, 16 aa, Homo sapiens
  CDR3 for alpha chain variable domain of TCR clone 243714 (TRAV12-3, TRAJ53)
CAMSPGSGGGNYKLTF

SEQ ID NO: 487428 - protein, 11 aa, Homo sapiens
  CDR3 for beta chain variable domain of TCR clone 243714 (TRBV29-1, TRBJ2-5)
RSEDRTGTQYF

SEQ ID NO: 487429 - protein, 13 aa, Homo sapiens
  CDR3 for alpha chain variable domain of TCR clone 243715 (TRAV27, TRAJ57)
CRSAQGGSEKLVF

SEQ ID NO: 487430 - protein, 16 aa, Homo sapiens
  CDR3 for beta chain variable domain of TCR clone 243715 (TRBV27, TRBJ2-2)
CASSSSGVSNTGELFF

SEQ ID NO: 487431 - protein, 11 aa, Homo sapiens
  CDR3 for alpha chain variable domain of TCR clone 243716 (TRAV26-1, TRAJ37)
CIVRVRRKLIF

SEQ ID NO: 487432 - protein, 13 aa, Homo sapiens
  CDR3 for beta chain variable domain of TCR clone 243716 (TRBV14, TRBJ1-2)
CASSEDRRYGYTF

SEQ ID NO: 487433 - protein, 13 aa, Homo sapiens
  CDR3 for alpha chain variable domain of TCR clone 243717 (TRAV12-3, TRAJ48)
CAMSLVGNEKLTF

SEQ ID NO: 487434 - protein, 15 aa, Homo sapiens
  CDR3 for beta chain variable domain of TCR clone 243717 (TRBV5-1, TRBJ2-1)
CASSPPRAPYNEQFF

SEQ ID NO: 487435 - protein, 14 aa, Homo sapiens
  CDR3 for alpha chain variable domain of TCR clone 243718 (TRAV12-2, TRAJ11)
CAVEGGSGYSTLTF

SEQ ID NO: 487436 - protein, 15 aa, Homo sapiens
  CDR3 for beta chain variable domain of TCR clone 243718 (TRBV12-4, TRBJ2-2)
CASSPQPGSTGELFF

SEQ ID NO: 487437 - protein, 14 aa, Homo sapiens
  CDR3 for alpha chain variable domain of TCR clone 243719 (TRAV26-1, TRAJ48)
CIVRVGFGNEKLNF

SEQ ID NO: 487438 - protein, 13 aa, Homo sapiens
  CDR3 for beta chain variable domain of TCR clone 243719 (TRBV7-7, TRBJ2-7)
CASSLFSGYEQYF

SEQ ID NO: 487439 - protein, 13 aa, Homo sapiens
  CDR3 for alpha chain variable domain of TCR clone 243720 (TRAV12-2, TRAJ9)
WAVKWAGGFKTIF

SEQ ID NO: 487440 - protein, 17 aa, Homo sapiens
  CDR3 for beta chain variable domain of TCR clone 243720 (TRBV7-8, TRBJ2-6)
CASSAGTGGAGANVLTF

SEQ ID NO: 487441 - protein, 14 aa, Homo sapiens
  CDR3 for alpha chain variable domain of TCR clone 243721 (TRAV8-3, TRAJ28)
CAVVPGAGSYQLTF

SEQ ID NO: 487442 - protein, 14 aa, Homo sapiens
  CDR3 for beta chain variable domain of TCR clone 243721 (TRBV6-3, TRBJ2-2)
CASTYTPDTGELFF

SEQ ID NO: 487443 - protein, 16 aa, Homo sapiens
  CDR3 for alpha chain variable domain of TCR clone 243722 (TRAV35, TRAJ28)
CAGQRYSGARSYQLTF

SEQ ID NO: 487444 - protein, 14 aa, Homo sapiens
  CDR3 for beta chain variable domain of TCR clone 243722 (TRBV18, TRBJ2-7)
CASSPRGGAYEQYF

SEQ ID NO: 487445 - protein, 12 aa, Homo sapiens
  CDR3 for alpha chain variable domain of TCR clone 243723 (TRAV20, TRAJ49)
CAVNEDGNQFYF

SEQ ID NO: 487446 - protein, 14 aa, Homo sapiens
  CDR3 for beta chain variable domain of TCR clone 243723 (TRBV6-5, TRBJ2-7)
CASSLFPGGYEQYF

SEQ ID NO: 487447 - protein, 11 aa, Homo sapiens
  CDR3 for alpha chain variable domain of TCR clone 243724 (TRAV3, TRAJ17)
PRGAAGNKLTF

SEQ ID NO: 487448 - protein, 15 aa, Homo sapiens
  CDR3 for beta chain variable domain of TCR clone 243724 (TRBV20-1, TRBJ2-7)
CSARDRVSGMDEQYF

SEQ ID NO: 487449 - protein, 12 aa, Homo sapiens
  CDR3 for alpha chain variable domain of TCR clone 243725 (TRAV8-3, TRAJ5)
CAVGGGLRALTF

SEQ ID NO: 487450 - protein, 13 aa, Homo sapiens
  CDR3 for beta chain variable domain of TCR clone 243725 (TRBV7-2, TRBJ2-2)
CASSLAVTGELIF

SEQ ID NO: 487451 - protein, 12 aa, Homo sapiens
  CDR3 for alpha chain variable domain of TCR clone 243726 (TRAV13-1, TRAJ53)
AASGGSNYKLTF

SEQ ID NO: 487452 - protein, 19 aa, Homo sapiens
  CDR3 for beta chain variable domain of TCR clone 243726 (TRBV7-6, TRBJ2-5)
CASSLVGPGTSGEQETQYF

SEQ ID NO: 487453 - protein, 14 aa, Homo sapiens
  CDR3 for alpha chain variable domain of TCR clone 243727 (TRAV26-1, TRAJ38)
CIADNAGNNRKLIW

SEQ ID NO: 487454 - protein, 16 aa, Homo sapiens
  CDR3 for beta chain variable domain of TCR clone 243727 (TRBV2, TRBJ2-1)
CASRPRSGGPYGEQFF

SEQ ID NO: 487455 - protein, 16 aa, Homo sapiens
  CDR3 for alpha chain variable domain of TCR clone 243728 (TRAV21, TRAJ52)
CAVTNAGGTSHGKLTF

SEQ ID NO: 487456 - protein, 17 aa, Homo sapiens
  CDR3 for beta chain variable domain of TCR clone 243728 (TRBV28, TRBJ2-5)
CASSRQGGLAGAETQYF

SEQ ID NO: 487457 - protein, 13 aa, Homo sapiens
  CDR3 for alpha chain variable domain of TCR clone 243729 (TRAV1-2, TRAJ31)
CAVRPNNNARLMF

SEQ ID NO: 487458 - protein, 14 aa, Homo sapiens
  CDR3 for beta chain variable domain of TCR clone 243729 (TRBV11-2, TRBJ2-7)
CASSRSGGAGEQYF

SEQ ID NO: 487459 - protein, 12 aa, Homo sapiens
  CDR3 for alpha chain variable domain of TCR clone 243730 (TRAV13-1, TRAJ21)
CAAKEGFNKFYF

SEQ ID NO: 487460 - protein, 17 aa, Homo sapiens
  CDR3 for beta chain variable domain of TCR clone 243730 (TRBV7-3, TRBJ2-3)
CARSLMKRMRGADTQYF

SEQ ID NO: 487461 - protein, 22 aa, Homo sapiens
  CDR3 for alpha chain variable domain of TCR clone 243731 (TRAV26-1, TRAJ30)
CIVRVRTEMTRSSLEKGHDFIF

SEQ ID NO: 487462 - protein, 18 aa, Homo sapiens
  CDR3 for beta chain variable domain of TCR clone 243731 (TRBV4-1, TRBJ1-5)
CASSQGPRGQGLNQPQHF

SEQ ID NO: 487463 - protein, 13 aa, Homo sapiens
  CDR3 for alpha chain variable domain of TCR clone 243732 (TRAV8-3, TRAJ48)
CAVVPFGNEKLTF

SEQ ID NO: 487464 - protein, 14 aa, Homo sapiens
  CDR3 for beta chain variable domain of TCR clone 243732 (TRBV18, TRBJ2-7)
CASSPRGGAHEQYF

SEQ ID NO: 487465 - protein, 16 aa, Homo sapiens
  CDR3 for alpha chain variable domain of TCR clone 243733 (TRAV16, TRAJ52)
CALSGVGGTSDGKLTF

SEQ ID NO: 487466 - protein, 14 aa, Homo sapiens
  CDR3 for beta chain variable domain of TCR clone 243733 (TRBV19, TRBJ1-2)
CASSRQGQAYGYTF

SEQ ID NO: 487467 - protein, 11 aa, Homo sapiens
  CDR3 for alpha chain variable domain of TCR clone 243734 (TRAV2, TRAJ33)
CAVDSNYQLIW

SEQ ID NO: 487468 - protein, 14 aa, Homo sapiens
  CDR3 for beta chain variable domain of TCR clone 243734 (TRBV28, TRBJ2-4)
CASTQVTGVNIQYF

SEQ ID NO: 487469 - protein, 14 aa, Homo sapiens
  CDR3 for alpha chain variable domain of TCR clone 243735 (TRAV21, TRAJ45)
CAVSSGGGADGLTF

SEQ ID NO: 487470 - protein, 13 aa, Homo sapiens
  CDR3 for beta chain variable domain of TCR clone 243735 (TRBV7-3, TRBJ1-1)
CASSQDWGAEAFF

SEQ ID NO: 487471 - protein, 11 aa, Homo sapiens
  CDR3 for alpha chain variable domain of TCR clone 243736 (TRAV2, TRAJ40)
CAVEGTYKYIF

SEQ ID NO: 487472 - protein, 16 aa, Homo sapiens
  CDR3 for beta chain variable domain of TCR clone 243736 (TRBV7-3, TRBJ2-2)
CASSLKRGTLSGELFF

SEQ ID NO: 487473 - protein, 11 aa, Homo sapiens
  CDR3 for alpha chain variable domain of TCR clone 243737 (TRAV9-2, TRAJ11)
CVPAGYSTITF

SEQ ID NO: 487474 - protein, 14 aa, Homo sapiens
  CDR3 for beta chain variable domain of TCR clone 243737 (TRBV2, TRBJ2-7)
CASSLTSGGYEQYF

SEQ ID NO: 487475 - protein, 14 aa, Homo sapiens
  CDR3 for alpha chain variable domain of TCR clone 243738 (TRAV20, TRAJ56)
CAVQFGGANSKLTF

SEQ ID NO: 487476 - protein, 12 aa, Homo sapiens
  CDR3 for beta chain variable domain of TCR clone 243738 (TRBV7-8, TRBJ2-7)
CASSLGDREQYV

SEQ ID NO: 487477 - protein, 14 aa, Homo sapiens
  CDR3 for alpha chain variable domain of TCR clone 243739 (TRAV12-2, TRAJ9)
CAVNMEGGGFKTIF

SEQ ID NO: 487478 - protein, 16 aa, Homo sapiens
  CDR3 for beta chain variable domain of TCR clone 243739 (TRBV7-3, TRBJ2-2)
CASSLKRGTLSGELFF

SEQ ID NO: 487479 - protein, 12 aa, Homo sapiens
  CDR3 for alpha chain variable domain of TCR clone 243740 (TRAV8-6, TRAJ4)
CAVSDHPNKLIF

SEQ ID NO: 487480 - protein, 15 aa, Homo sapiens
  CDR3 for beta chain variable domain of TCR clone 243740 (TRBV4-1, TRBJ1-4)
CASSDTGGTNEKLFF

SEQ ID NO: 487481 - protein, 13 aa, Homo sapiens
  CDR3 for alpha chain variable domain of TCR clone 243741 (TRAV8-3, TRAJ4)
WVFYSGGYNKLIF

SEQ ID NO: 487482 - protein, 14 aa, Homo sapiens
  CDR3 for beta chain variable domain of TCR clone 243741 (TRBV7-9, TRBJ2-3)
CAGSLEDGTDTQYF

SEQ ID NO: 487483 - protein, 12 aa, Homo sapiens
  CDR3 for alpha chain variable domain of TCR clone 243742 (TRAV27, TRAJ35)
CAGADFVNVLHC

SEQ ID NO: 487484 - protein, 13 aa, Homo sapiens
  CDR3 for beta chain variable domain of TCR clone 243742 (TRBV7-3, TRBJ1-1)
CASSQDWGAEAFF

SEQ ID NO: 487485 - protein, 14 aa, Homo sapiens
  CDR3 for alpha chain variable domain of TCR clone 243743 (TRAV12-2, TRAJ13)
CAVKKTGGYQKVTF

SEQ ID NO: 487486 - protein, 12 aa, Homo sapiens
  CDR3 for beta chain variable domain of TCR clone 243743 (TRBV6-3, TRBJ2-7)
CASSLAPYEQYF

SEQ ID NO: 487487 - protein, 13 aa, Homo sapiens
  CDR3 for alpha chain variable domain of TCR clone 243744 (TRAV27, TRAJ24)
CAGDRDSWGKLQF

SEQ ID NO: 487488 - protein, 20 aa, Homo sapiens
  CDR3 for beta chain variable domain of TCR clone 243744 (TRBV7-8, TRBJ2-2)
CASSHLFPGPTIHITGELFF

SEQ ID NO: 487489 - protein, 15 aa, Homo sapiens
  CDR3 for alpha chain variable domain of TCR clone 243745 (TRAV8-3, TRAJ27)
CAVGPAKTSAGKSTF

SEQ ID NO: 487490 - protein, 15 aa, Homo sapiens
  CDR3 for beta chain variable domain of TCR clone 243745 (TRBV7-2, TRBJ2-1)
CASSSGLAGGNEQFF

SEQ ID NO: 487491 - protein, 14 aa, Homo sapiens
  CDR3 for alpha chain variable domain of TCR clone 243746 (TRAV17, TRAJ31)
CATVLRINNARLMF

SEQ ID NO: 487492 - protein, 14 aa, Homo sapiens
  CDR3 for beta chain variable domain of TCR clone 243746 (TRBV12-4, TRBJ2-5)
CASRLWQKQETQYF

SEQ ID NO: 487493 - protein, 14 aa, Homo sapiens
  CDR3 for alpha chain variable domain of TCR clone 243747 (TRAV8-3, TRAJ39)
CAVGANNAGNMLTF

SEQ ID NO: 487494 - protein, 16 aa, Homo sapiens
  CDR3 for beta chain variable domain of TCR clone 243747 (TRBV2, TRBJ2-1)
CASSVGGSLSYNEQFF

SEQ ID NO: 487495 - protein, 16 aa, Homo sapiens
  CDR3 for alpha chain variable domain of TCR clone 243748 (TRAV16, TRAJ4)
CDLSRMFSGCYNKLIF

SEQ ID NO: 487496 - protein, 12 aa, Homo sapiens
  CDR3 for beta chain variable domain of TCR clone 243748 (TRBV29-1, TRBJ2-3)
CSVTGGADTQYF

SEQ ID NO: 487497 - protein, 14 aa, Homo sapiens
  CDR3 for alpha chain variable domain of TCR clone 243749 (TRAV13-2, TRAJ22)
CADGTLGSARQLTF

SEQ ID NO: 487498 - protein, 16 aa, Homo sapiens
  CDR3 for beta chain variable domain of TCR clone 243749 (TRBV19, TRBJ2-1)
CASSSKGTRSYIEQFF

SEQ ID NO: 487499 - protein, 11 aa, Homo sapiens
  CDR3 for alpha chain variable domain of TCR clone 243750 (TRAV29/DV5, TRAJ47)
CAAQRGNKLVF

SEQ ID NO: 487500 - protein, 12 aa, Homo sapiens
  CDR3 for beta chain variable domain of TCR clone 243750 (TRBV11-2, TRBJ2-7)
CASSLPAYEQYF

SEQ ID NO: 487501 - protein, 11 aa, Homo sapiens
  CDR3 for alpha chain variable domain of TCR clone 243751 (TRAV1-2, TRAJ20)
CAVSNDYKLSF

SEQ ID NO: 487502 - protein, 16 aa, Homo sapiens
  CDR3 for beta chain variable domain of TCR clone 243751 (TRBV29-1, TRBJ2-6)
CSVEDITYPGANVLTF

SEQ ID NO: 487503 - protein, 14 aa, Homo sapiens
  CDR3 for alpha chain variable domain of TCR clone 243752 (TRAV4, TRAJ30)
CLVGDMNRDDKIIF

SEQ ID NO: 487504 - protein, 14 aa, Homo sapiens
  CDR3 for beta chain variable domain of TCR clone 243752 (TRBV12-4, TRBJ1-1)
CASSLGTGGTEAFF

SEQ ID NO: 487505 - protein, 13 aa, Homo sapiens
  CDR3 for alpha chain variable domain of TCR clone 243753 (TRAV21, TRAJ27)
CAARPGNAGKSTF

SEQ ID NO: 487506 - protein, 19 aa, Homo sapiens
  CDR3 for beta chain variable domain of TCR clone 243753 (TRBV4-2, TRBJ2-5)
CASSPIKTGPGAKQETQYF

SEQ ID NO: 487507 - protein, 11 aa, Homo sapiens
  CDR3 for alpha chain variable domain of TCR clone 243754 (TRAV17, TRAJ9)
CATTGGFKTIF

SEQ ID NO: 487508 - protein, 20 aa, Homo sapiens
  CDR3 for beta chain variable domain of TCR clone 243754 (TRBV28, TRBJ2-1)
CASTPIGLSPGLAGGNEQFF

SEQ ID NO: 487509 - protein, 15 aa, Homo sapiens
  CDR3 for alpha chain variable domain of TCR clone 243755 (TRAV13-1, TRAJ5)
CAVYIRDTGRGALTF

SEQ ID NO: 487510 - protein, 16 aa, Homo sapiens
  CDR3 for beta chain variable domain of TCR clone 243755 (TRBV12-4, TRBJ2-1)
CASTEQGMDRSNEQFF

SEQ ID NO: 487511 - protein, 15 aa, Homo sapiens
  CDR3 for alpha chain variable domain of TCR clone 243756 (TRAV13-1, TRAJ44)
CAASRGGGTASKLTC

SEQ ID NO: 487512 - protein, 12 aa, Homo sapiens
  CDR3 for beta chain variable domain of TCR clone 243756 (TRBV11-2, TRBJ2-2)
CASSLGGGELFF

SEQ ID NO: 487513 - protein, 16 aa, Homo sapiens
  CDR3 for alpha chain variable domain of TCR clone 243757 (TRAV12-3, TRAJ53)
CAMSPGSGGSNYKLTF

SEQ ID NO: 487514 - protein, 17 aa, Homo sapiens
  CDR3 for beta chain variable domain of TCR clone 243757 (TRBV28, TRBJ2-7)
CASSLGLAGGPTYEQYF

SEQ ID NO: 487515 - protein, 12 aa, Homo sapiens
  CDR3 for alpha chain variable domain of TCR clone 243758 (TRAV29/DV5, TRAJ34)
FAARHNTDKPIF

SEQ ID NO: 487516 - protein, 13 aa, Homo sapiens
  CDR3 for beta chain variable domain of TCR clone 243758 (TRBV19, TRBJ2-1)
CASSPAGSGEQFF

SEQ ID NO: 487517 - protein, 14 aa, Homo sapiens
  CDR3 for alpha chain variable domain of TCR clone 243759 (TRAV35, TRAJ13)
CAGSPSGGYQKVTF

SEQ ID NO: 487518 - protein, 13 aa, Homo sapiens
  CDR3 for beta chain variable domain of TCR clone 243759 (TRBV29-1, TRBJ1-1)
CSVGDSRNTEAFF

SEQ ID NO: 487519 - protein, 16 aa, Homo sapiens
  CDR3 for alpha chain variable domain of TCR clone 243760 (TRAV6, TRAJ37)
CALDIFGSSNTGKLIF

SEQ ID NO: 487520 - protein, 14 aa, Homo sapiens
  CDR3 for beta chain variable domain of TCR clone 243760 (TRBV5-7, TRBJ2-7)
CASSLRFATYEQYF

SEQ ID NO: 487521 - protein, 14 aa, Homo sapiens
  CDR3 for alpha chain variable domain of TCR clone 243761 (TRAV16, TRAJ39)
CALSKNNAGNMLTF

SEQ ID NO: 487522 - protein, 14 aa, Homo sapiens
  CDR3 for beta chain variable domain of TCR clone 243761 (TRBV5-1, TRBJ1-1)
CASSFTGRNTEAFF

SEQ ID NO: 487523 - protein, 15 aa, Homo sapiens
  CDR3 for alpha chain variable domain of TCR clone 243762 (TRAV21, TRAJ32)
CAAAPYGCATNKLIF

SEQ ID NO: 487524 - protein, 17 aa, Homo sapiens
  CDR3 for beta chain variable domain of TCR clone 243762 (TRBV18, TRBJ2-3)
CASSPFGDGGFTDTQYF

SEQ ID NO: 487525 - protein, 14 aa, Homo sapiens
  CDR3 for alpha chain variable domain of TCR clone 243763 (TRAV3, TRAJ20)
CAVRDSFNDYKLSY

SEQ ID NO: 487526 - protein, 14 aa, Homo sapiens
  CDR3 for beta chain variable domain of TCR clone 243763 (TRBV19, TRBJ2-1)
CASPTFVLSGEQFF

SEQ ID NO: 487527 - protein, 16 aa, Homo sapiens
  CDR3 for alpha chain variable domain of TCR clone 243764 (TRAV21, TRAJ37)
CAVRTAASSNTGKLIF

SEQ ID NO: 487528 - protein, 13 aa, Homo sapiens
  CDR3 for beta chain variable domain of TCR clone 243764 (TRBV7-9, TRBJ2-5)
CASLPSGRETQYF

SEQ ID NO: 487529 - protein, 12 aa, Homo sapiens
  CDR3 for alpha chain variable domain of TCR clone 243765 (TRAV17, TRAJ53)
CEGGGSNYKLTF

SEQ ID NO: 487530 - protein, 16 aa, Homo sapiens
  CDR3 for beta chain variable domain of TCR clone 243765 (TRBV11-2, TRBJ2-3)
CASSFQGRGALDTQYF

SEQ ID NO: 487531 - protein, 14 aa, Homo sapiens
  CDR3 for alpha chain variable domain of TCR clone 243766 (TRAV8-2, TRAJ4)
CVVSPSGGYNKLIF

SEQ ID NO: 487532 - protein, 13 aa, Homo sapiens
  CDR3 for beta chain variable domain of TCR clone 243766 (TRBV2, TRBJ1-1)
CASSEGGNTEAFF

SEQ ID NO: 487533 - protein, 14 aa, Homo sapiens
  CDR3 for alpha chain variable domain of TCR clone 243767 (TRAV17, TRAJ6)
CATDASGGSYIPTF

SEQ ID NO: 487534 - protein, 15 aa, Homo sapiens
  CDR3 for beta chain variable domain of TCR clone 243767 (TRBV19, TRBJ1-1)
CASTSGQIQNTEAFF

SEQ ID NO: 487535 - protein, 15 aa, Homo sapiens
  CDR3 for alpha chain variable domain of TCR clone 243768 (TRAV8-3, TRAJ3)
CAVAHSGSSASKIIF

SEQ ID NO: 487536 - protein, 15 aa, Homo sapiens
  CDR3 for beta chain variable domain of TCR clone 243768 (TRBV2, TRBJ2-3)
CASSDFEKATDTQYF

SEQ ID NO: 487537 - protein, 16 aa, Homo sapiens
  CDR3 for alpha chain variable domain of TCR clone 243769 (TRAV3, TRAJ18)
CAVRDGRGSTLGRLYF

SEQ ID NO: 487538 - protein, 18 aa, Homo sapiens
  CDR3 for beta chain variable domain of TCR clone 243769 (TRBV7-9, TRBJ2-7)
CASSLTTSGSRTWYEQYF

SEQ ID NO: 487539 - protein, 15 aa, Homo sapiens
  CDR3 for alpha chain variable domain of TCR clone 243770 (TRAV25, TRAJ52)
CAGTSGGTSYGKLTF

SEQ ID NO: 487540 - protein, 13 aa, Homo sapiens
  CDR3 for beta chain variable domain of TCR clone 243770 (TRBV15, TRBJ1-2)
CATSRGPRTGAVS

SEQ ID NO: 487541 - protein, 13 aa, Homo sapiens
  CDR3 for alpha chain variable domain of TCR clone 243771 (TRAV29/DV5, TRAJ31)
CAASRNNNARLMF

SEQ ID NO: 487542 - protein, 14 aa, Homo sapiens
  CDR3 for beta chain variable domain of TCR clone 243771 (TRBV19, TRBJ2-1)
CASGRAGPGNEQFF

SEQ ID NO: 487543 - protein, 13 aa, Homo sapiens
  CDR3 for alpha chain variable domain of TCR clone 243772 (TRAV2, TRAJ15)
CSVASQAGTALIF

SEQ ID NO: 487544 - protein, 14 aa, Homo sapiens
  CDR3 for beta chain variable domain of TCR clone 243772 (TRBV19, TRBJ2-1)
CASPTFVLSGEQFF

SEQ ID NO: 487545 - protein, 14 aa, Homo sapiens
  CDR3 for alpha chain variable domain of TCR clone 243773 (TRAV1-2, TRAJ8)
CAVREDTGFQKLVF

SEQ ID NO: 487546 - protein, 12 aa, Homo sapiens
  CDR3 for beta chain variable domain of TCR clone 243773 (TRBV7-9, TRBJ2-7)
CASSLEGYELYF

SEQ ID NO: 487547 - protein, 12 aa, Homo sapiens
  CDR3 for alpha chain variable domain of TCR clone 243774 (TRAV3, TRAJ43)
CAVRDPNNDMRF

SEQ ID NO: 487548 - protein, 15 aa, Homo sapiens
  CDR3 for beta chain variable domain of TCR clone 243774 (TRBV27, TRBJ1-5)
CASSLGSGFDQPQHF

SEQ ID NO: 487549 - protein, 16 aa, Homo sapiens
  CDR3 for alpha chain variable domain of TCR clone 243775 (TRAV3, TRAJ37)
CAVRGKGSGNTGKLIF

SEQ ID NO: 487550 - protein, 12 aa, Homo sapiens
  CDR3 for beta chain variable domain of TCR clone 243775 (TRBV19, TRBJ1-4)
CASKDWPGGLFF

SEQ ID NO: 487551 - protein, 15 aa, Homo sapiens
  CDR3 for alpha chain variable domain of TCR clone 243776 (TRAV2, TRAJ9)
CAVEDRGTGAFKTIF

SEQ ID NO: 487552 - protein, 13 aa, Homo sapiens
  CDR3 for beta chain variable domain of TCR clone 243776 (TRBV7-9, TRBJ1-2)
CASSLKQNYGYTF

SEQ ID NO: 487553 - protein, 14 aa, Homo sapiens
  CDR3 for alpha chain variable domain of TCR clone 243777 (TRAV1-2, TRAJ8)
CAVREDTGFQKLVF

SEQ ID NO: 487554 - protein, 15 aa, Homo sapiens
  CDR3 for beta chain variable domain of TCR clone 243777 (TRBV27, TRBJ2-1)
CASGNGGGSSNEQFF

SEQ ID NO: 487555 - protein, 11 aa, Homo sapiens
  CDR3 for alpha chain variable domain of TCR clone 243778 (TRAV3, TRAJ49)
CAPITGNQFYF

SEQ ID NO: 487556 - protein, 16 aa, Homo sapiens
  CDR3 for beta chain variable domain of TCR clone 243778 (TRBV27, TRBJ2-2)
CASSSSGVSNTGELFF

SEQ ID NO: 487557 - protein, 16 aa, Homo sapiens
  CDR3 for alpha chain variable domain of TCR clone 243779 (TRAV30, TRAJ24)
CGTEIVYADSWGKFQF

SEQ ID NO: 487558 - protein, 15 aa, Homo sapiens
  CDR3 for beta chain variable domain of TCR clone 243779 (TRBV7-9, TRBJ1-4)
CASSARTGGNEKLFF

SEQ ID NO: 487559 - protein, 18 aa, Homo sapiens
  CDR3 for alpha chain variable domain of TCR clone 243780 (TRAV13-1, TRAJ52)
CAAKNPNAGGTSYGKLTF

SEQ ID NO: 487560 - protein, 15 aa, Homo sapiens
  CDR3 for beta chain variable domain of TCR clone 243780 (TRBV27, TRBJ2-1)
CASSNGGVSSNEQFF

SEQ ID NO: 487561 - protein, 15 aa, Homo sapiens
  CDR3 for alpha chain variable domain of TCR clone 243781 (TRAV21, TRAJ53)
CATLNSGGSHYKLTF

SEQ ID NO: 487562 - protein, 16 aa, Homo sapiens
  CDR3 for beta chain variable domain of TCR clone 243781 (TRBV7-9, TRBJ1-2)
CASSLGFSSGEDGYTF

SEQ ID NO: 487563 - protein, 13 aa, Homo sapiens
  CDR3 for alpha chain variable domain of TCR clone 243782 (TRAV8-6, TRAJ41)
CAVSENSGYALNF

SEQ ID NO: 487564 - protein, 13 aa, Homo sapiens
  CDR3 for beta chain variable domain of TCR clone 243782 (TRBV7-3, TRBJ1-1)
CASSQDWGAEAFF

SEQ ID NO: 487565 - protein, 16 aa, Homo sapiens
  CDR3 for alpha chain variable domain of TCR clone 243783 (TRAV3, TRAJ23)
CAVKIGIYNQGGKLIF

SEQ ID NO: 487566 - protein, 17 aa, Homo sapiens
  CDR3 for beta chain variable domain of TCR clone 243783 (TRBV10-3, TRBJ2-6)
SAISESTAPSGANDLTF

SEQ ID NO: 487567 - protein, 14 aa, Homo sapiens
  CDR3 for alpha chain variable domain of TCR clone 243784 (TRAV12-2, TRAJ13)
CAVKKTGGYQKVTF

SEQ ID NO: 487568 - protein, 16 aa, Homo sapiens
  CDR3 for beta chain variable domain of TCR clone 243784 (TRBV15, TRBJ1-4)
CATSRDSPPGREKLFF

SEQ ID NO: 487569 - protein, 12 aa, Homo sapiens
  CDR3 for alpha chain variable domain of TCR clone 243785 (TRAV12-3, TRAJ17)
CAMTLTGNKRTF

SEQ ID NO: 487570 - protein, 17 aa, Homo sapiens
  CDR3 for beta chain variable domain of TCR clone 243785 (TRBV20-1, TRBJ2-1)
CSASSSGLAGSYNEQFF

SEQ ID NO: 487571 - protein, 17 aa, Homo sapiens
  CDR3 for alpha chain variable domain of TCR clone 243786 (TRAV27, TRAJ45)
ASTSVQELGGGADGLTF

SEQ ID NO: 487572 - protein, 17 aa, Homo sapiens
  CDR3 for beta chain variable domain of TCR clone 243786 (TRBV11-2, TRBJ2-1)
CASSLYPPGVEYNEQFF

SEQ ID NO: 487573 - protein, 15 aa, Homo sapiens
  CDR3 for alpha chain variable domain of TCR clone 243787 (TRAV29/DV5, TRAJ42)
CAAKTDGGSQGNLIF

SEQ ID NO: 487574 - protein, 12 aa, Homo sapiens
  CDR3 for beta chain variable domain of TCR clone 243787 (TRBV11-2, TRBJ2-1)
CASSPGNNEQFS

SEQ ID NO: 487575 - protein, 16 aa, Homo sapiens
  CDR3 for alpha chain variable domain of TCR clone 243788 (TRAV26-1, TRAJ37)
CIVRGDGSGNTGKLIF

SEQ ID NO: 487576 - protein, 17 aa, Homo sapiens
  CDR3 for beta chain variable domain of TCR clone 243788 (TRBV4-1, TRBJ2-7)
CASSRDPLGIRGGEQYF

SEQ ID NO: 487577 - protein, 15 aa, Homo sapiens
  CDR3 for alpha chain variable domain of TCR clone 243789 (TRAV4, TRAJ32)
CLVGEDGGATNKLIF

SEQ ID NO: 487578 - protein, 14 aa, Homo sapiens
  CDR3 for beta chain variable domain of TCR clone 243789 (TRBV2, TRBJ2-1)
CASRTGSSYNEQFF

SEQ ID NO: 487579 - protein, 14 aa, Homo sapiens
  CDR3 for alpha chain variable domain of TCR clone 243790 (TRAV13-1, TRAJ9)
CAASALTGGFKTIF

SEQ ID NO: 487580 - protein, 13 aa, Homo sapiens
  CDR3 for beta chain variable domain of TCR clone 243790 (TRBV12-4, TRBJ2-2)
CASSITWSGELFF

SEQ ID NO: 487581 - protein, 14 aa, Homo sapiens
  CDR3 for alpha chain variable domain of TCR clone 243791 (TRAV8-4, TRAJ13)
CAVTLSGGYQKVTF

SEQ ID NO: 487582 - protein, 14 aa, Homo sapiens
  CDR3 for beta chain variable domain of TCR clone 243791 (TRBV7-2, TRBJ1-6)
CASSQAGGGSPLHF

SEQ ID NO: 487583 - protein, 19 aa, Homo sapiens
  CDR3 for alpha chain variable domain of TCR clone 243792 (TRAV35, TRAJ47)
CAGAFGLSDSYGIWKQTGL

SEQ ID NO: 487584 - protein, 11 aa, Homo sapiens
  CDR3 for beta chain variable domain of TCR clone 243792 (TRBV29-1, TRBJ1-1)
CSVEVGTRTFF

SEQ ID NO: 487585 - protein, 15 aa, Homo sapiens
  CDR3 for alpha chain variable domain of TCR clone 243793 (TRAV17, TRAJ56)
CATEPFTGANSKLTF

SEQ ID NO: 487586 - protein, 14 aa, Homo sapiens
  CDR3 for beta chain variable domain of TCR clone 243793 (TRBV19, TRBJ2-1)
CASPTSVLSGEQFF

SEQ ID NO: 487587 - protein, 14 aa, Homo sapiens
  CDR3 for alpha chain variable domain of TCR clone 243794 (TRAV26-1, TRAJ38)
CIADNAGNNRKLIW

SEQ ID NO: 487588 - protein, 12 aa, Homo sapiens
  CDR3 for beta chain variable domain of TCR clone 243794 (TRBV7-9, TRBJ1-5)
CASSPQGQPQHF

SEQ ID NO: 487589 - protein, 14 aa, Homo sapiens
  CDR3 for alpha chain variable domain of TCR clone 243795 (TRAV1-2, TRAJ33)
CAVRAPDSNYPLIW

SEQ ID NO: 487590 - protein, 14 aa, Homo sapiens
  CDR3 for beta chain variable domain of TCR clone 243795 (TRBV11-3, TRBJ1-6)
CASSFSGGDSPLHF

SEQ ID NO: 487591 - protein, 14 aa, Homo sapiens
  CDR3 for alpha chain variable domain of TCR clone 243796 (TRAV12-2, TRAJ17)
CAVLFKAAGNKLTF

SEQ ID NO: 487592 - protein, 17 aa, Homo sapiens
  CDR3 for beta chain variable domain of TCR clone 243796 (TRBV7-9, IGHJ2)
CASSSGQLGGRSEKLFF

SEQ ID NO: 487593 - protein, 12 aa, Homo sapiens
  CDR3 for alpha chain variable domain of TCR clone 243797 (TRAV1-1, TRAJ43)
CAPRVSSNDMRF

SEQ ID NO: 487594 - protein, 14 aa, Homo sapiens
  CDR3 for beta chain variable domain of TCR clone 243797 (TRBV11-2, TRBJ2-3)
CASSRLARTDTQYF

SEQ ID NO: 487595 - protein, 11 aa, Homo sapiens
  CDR3 for alpha chain variable domain of TCR clone 243798 (TRAV23/DV6, TRAJ58)
CAARLLRGETS

SEQ ID NO: 487596 - protein, 12 aa, Homo sapiens
  CDR3 for beta chain variable domain of TCR clone 243798 (TRBV12-4, TRBJ2-3)
CASSSTTDTQYF

SEQ ID NO: 487597 - protein, 11 aa, Homo sapiens
  CDR3 for alpha chain variable domain of TCR clone 243799 (TRAV2, TRAJ21)
CAVFNFNKFYF

SEQ ID NO: 487598 - protein, 13 aa, Homo sapiens
  CDR3 for beta chain variable domain of TCR clone 243799 (TRBV20-1, TRBJ1-1)
CSPRGGGNTEAFF

SEQ ID NO: 487599 - protein, 19 aa, Homo sapiens
  CDR3 for alpha chain variable domain of TCR clone 243800 (TRAV26-1, TRAJ28)
CIVRVAHAYSGAGSYPLTF

SEQ ID NO: 487600 - protein, 15 aa, Homo sapiens
  CDR3 for beta chain variable domain of TCR clone 243800 (TRBV5-1, TRBJ1-3)
CASSSKTGAGNTIYF

SEQ ID NO: 487601 - protein, 11 aa, Homo sapiens
  CDR3 for alpha chain variable domain of TCR clone 243801 (TRAV29/DV5, TRAJ49)
CAAVPCNQFYF

SEQ ID NO: 487602 - protein, 17 aa, Homo sapiens
  CDR3 for beta chain variable domain of TCR clone 243801 (TRBV4-2, TRBJ1-1)
CASTQFGGGSGNTEAFF

SEQ ID NO: 487603 - protein, 15 aa, Homo sapiens
  CDR3 for alpha chain variable domain of TCR clone 243802 (TRAV2, TRAJ44)
CAVEAYTGTASKLAF

SEQ ID NO: 487604 - protein, 17 aa, Homo sapiens
  CDR3 for beta chain variable domain of TCR clone 243802 (TRBV12-4, TRBJ2-1)
CASSPGLAGGRINEQFF

SEQ ID NO: 487605 - protein, 13 aa, Homo sapiens
  CDR3 for alpha chain variable domain of TCR clone 243803 (TRAV13-1, TRAJ11)
CAASKEGYSTLTF

SEQ ID NO: 487606 - protein, 21 aa, Homo sapiens
  CDR3 for beta chain variable domain of TCR clone 243803 (TRBV23-1, TRBJ2-5)
CASTPPGQGTGGDPVLRARHA

SEQ ID NO: 487607 - protein, 15 aa, Homo sapiens
  CDR3 for alpha chain variable domain of TCR clone 243804 (TRAV35, TRAJ52)
CAGPRGGTSYGKLTF

SEQ ID NO: 487608 - protein, 14 aa, Homo sapiens
  CDR3 for beta chain variable domain of TCR clone 243804 (TRBV20-1, TRBJ2-7)
CSTWTALSSYEQYF

SEQ ID NO: 487609 - protein, 14 aa, Homo sapiens
  CDR3 for alpha chain variable domain of TCR clone 243805 (TRAV8-4, TRAJ13)
CAVTLSGGYQKVTF

SEQ ID NO: 487610 - protein, 14 aa, Homo sapiens
  CDR3 for beta chain variable domain of TCR clone 243805 (TRBV6-1, TRBJ2-6)
CASQQGAGANVLTF

SEQ ID NO: 487611 - protein, 13 aa, Homo sapiens
  CDR3 for alpha chain variable domain of TCR clone 243806 (TRAV30, TRAJ6)
CGFIEGGSYIPTF

SEQ ID NO: 487612 - protein, 15 aa, Homo sapiens
  CDR3 for beta chain variable domain of TCR clone 243806 (TRBV7-8, TRBJ1-5)
CASSLERRGLEPQHF

SEQ ID NO: 487613 - protein, 15 aa, Homo sapiens
  CDR3 for alpha chain variable domain of TCR clone 243807 (TRAV8-2, TRAJ16)
CVVSDGFSNGQKLLF

SEQ ID NO: 487614 - protein, 15 aa, Homo sapiens
  CDR3 for beta chain variable domain of TCR clone 243807 (TRBV5-1, TRBJ2-4)
CASSLGGGGSYIQYV

SEQ ID NO: 487615 - protein, 17 aa, Homo sapiens
  CDR3 for alpha chain variable domain of TCR clone 243808 (TRAV4, TRAJ42)
CLVGVLNYGGSEGNLIF

SEQ ID NO: 487616 - protein, 12 aa, Homo sapiens
  CDR3 for beta chain variable domain of TCR clone 243808 (TRBV20-1, TRBJ2-1)
CSAQYTYNEQFF

SEQ ID NO: 487617 - protein, 16 aa, Homo sapiens
  CDR3 for alpha chain variable domain of TCR clone 243809 (TRAV16, TRAJ52)
CALSAAGGTSYGKLRF

SEQ ID NO: 487618 - protein, 12 aa, Homo sapiens
  CDR3 for beta chain variable domain of TCR clone 243809 (TRBV12-4, TRBJ1-3)
CASSFSGNTIYF

SEQ ID NO: 487619 - protein, 11 aa, Homo sapiens
  CDR3 for alpha chain variable domain of TCR clone 243810 (TRAV1-2, TRAJ40)
CAVPGTYKYIF

SEQ ID NO: 487620 - protein, 15 aa, Homo sapiens
  CDR3 for beta chain variable domain of TCR clone 243810 (TRBV12-4, TRBJ2-1)
CASSLLATGNNEQFF

SEQ ID NO: 487621 - protein, 14 aa, Homo sapiens
  CDR3 for alpha chain variable domain of TCR clone 243811 (TRAV12-1, TRAJ23)
CVVIVYNQGGKLIF

SEQ ID NO: 487622 - protein, 15 aa, Homo sapiens
  CDR3 for beta chain variable domain of TCR clone 243811 (TRBV20-1, TRBJ1-5)
CSAKPPGQGPQPQHF

SEQ ID NO: 487623 - protein, 11 aa, Homo sapiens
  CDR3 for alpha chain variable domain of TCR clone 243812 (TRAV12-1, TRAJ40)
CGLLGTYKYIF

SEQ ID NO: 487624 - protein, 18 aa, Homo sapiens
  CDR3 for beta chain variable domain of TCR clone 243812 (TRBV11-2, TRBJ2-3)
CASSLGGASRGAPNTQYF

SEQ ID NO: 487625 - protein, 15 aa, Homo sapiens
  CDR3 for alpha chain variable domain of TCR clone 243813 (TRAV25, TRAJ53)
CPTSNSGGSNYNLTF

SEQ ID NO: 487626 - protein, 14 aa, Homo sapiens
  CDR3 for beta chain variable domain of TCR clone 243813 (TRBV11-3, TRBJ2-3)
CASSRLARTDTQYF

SEQ ID NO: 487627 - protein, 12 aa, Homo sapiens
  CDR3 for alpha chain variable domain of TCR clone 243814 (TRAV12-3, TRAJ17)
CAVTLTGNKLTF

SEQ ID NO: 487628 - protein, 20 aa, Homo sapiens
  CDR3 for beta chain variable domain of TCR clone 243814 (TRBV7-8, TRBJ2-2)
CASSHLFPGPTIHITGELFF

SEQ ID NO: 487629 - protein, 12 aa, Homo sapiens
  CDR3 for alpha chain variable domain of TCR clone 243815 (TRAV12-2, TRAJ43)
CAVNVNNNEMRF

SEQ ID NO: 487630 - protein, 14 aa, Homo sapiens
  CDR3 for beta chain variable domain of TCR clone 243815 (TRBV25-1, TRBJ2-2)
CASSELGLPGELFF

SEQ ID NO: 487631 - protein, 16 aa, Homo sapiens
  CDR3 for alpha chain variable domain of TCR clone 243816 (TRAV14/DV4, TRAJ20)
CSMREGRSRDDYKLSF

SEQ ID NO: 487632 - protein, 14 aa, Homo sapiens
  CDR3 for beta chain variable domain of TCR clone 243816 (TRBV20-1, TRBJ1-1)
CSAQTRIGGTEAFF

SEQ ID NO: 487633 - protein, 17 aa, Homo sapiens
  CDR3 for alpha chain variable domain of TCR clone 243817 (TRAV27, TRAJ42)
CAERVIYYGGSQGNLIF

SEQ ID NO: 487634 - protein, 14 aa, Homo sapiens
  CDR3 for beta chain variable domain of TCR clone 243817 (TRBV6-6, TRBJ2-3)
CASRLQREADTQYC

SEQ ID NO: 487635 - protein, 15 aa, Homo sapiens
  CDR3 for alpha chain variable domain of TCR clone 243818 (TRAV27, TRAJ38)
CASRRNAGNNRKLIW

SEQ ID NO: 487636 - protein, 17 aa, Homo sapiens
  CDR3 for beta chain variable domain of TCR clone 243818 (TRBV20-1, TRBJ2-2)
CSASGSGQGGLTGELFF

SEQ ID NO: 487637 - protein, 12 aa, Homo sapiens
  CDR3 for alpha chain variable domain of TCR clone 243819 (TRAV16, TRAJ13)
CITLRGYQQVTF

SEQ ID NO: 487638 - protein, 17 aa, Homo sapiens
  CDR3 for beta chain variable domain of TCR clone 243819 (TRBV28, TRBJ2-5)
CASSRQGGLAGAETQYF

SEQ ID NO: 487639 - protein, 14 aa, Homo sapiens
  CDR3 for alpha chain variable domain of TCR clone 243820 (TRAV12-3, TRAJ10)
SHLPLTGGGNKLTF

SEQ ID NO: 487640 - protein, 15 aa, Homo sapiens
  CDR3 for beta chain variable domain of TCR clone 243820 (TRBV6-5, TRBJ2-7)
CASSAGGRWSYEQYF

SEQ ID NO: 487641 - protein, 12 aa, Homo sapiens
  CDR3 for alpha chain variable domain of TCR clone 243821 (TRAV12-3, TRAJ3)
CAMDSSASKIIF

SEQ ID NO: 487642 - protein, 17 aa, Homo sapiens
  CDR3 for beta chain variable domain of TCR clone 243821 (TRBV7-9, TRBJ2-3)
CASSLEEAGAYPDTQYF

SEQ ID NO: 487643 - protein, 14 aa, Homo sapiens
  CDR3 for alpha chain variable domain of TCR clone 243822 (TRAV1-2, TRAJ8)
CAVSEETGFQKLLF

SEQ ID NO: 487644 - protein, 15 aa, Homo sapiens
  CDR3 for beta chain variable domain of TCR clone 243822 (TRBV6-3, TRBJ2-7)
CASSSPGTVFYEQYF

SEQ ID NO: 487645 - protein, 15 aa, Homo sapiens
  CDR3 for alpha chain variable domain of TCR clone 243823 (TRAV29/DV5, TRAJ24)
CAASGATDSWGKFQF

SEQ ID NO: 487646 - protein, 15 aa, Homo sapiens
  CDR3 for beta chain variable domain of TCR clone 243823 (TRBV7-9, TRBJ1-4)
CASSRTGGFNEKLFF

SEQ ID NO: 487647 - protein, 15 aa, Homo sapiens
  CDR3 for alpha chain variable domain of TCR clone 243824 (TRAV3, TRAJ4)
CAVRDGTVCYNKLIF

SEQ ID NO: 487648 - protein, 16 aa, Homo sapiens
  CDR3 for beta chain variable domain of TCR clone 243824 (TRBV27, TRBJ2-2)
CASSSSGVSNTGELFF

SEQ ID NO: 487649 - protein, 14 aa, Homo sapiens
  CDR3 for alpha chain variable domain of TCR clone 243825 (TRAV25, TRAJ35)
CARRMEGFGNVLHC

SEQ ID NO: 487650 - protein, 16 aa, Homo sapiens
  CDR3 for beta chain variable domain of TCR clone 243825 (TRBV19, TRBJ1-5)
CASSIDRGGPRQPQHF

SEQ ID NO: 487651 - protein, 14 aa, Homo sapiens
  CDR3 for alpha chain variable domain of TCR clone 243826 (TRAV8-4, TRAJ15)
CAVTTREAGTALIF

SEQ ID NO: 487652 - protein, 13 aa, Homo sapiens
  CDR3 for beta chain variable domain of TCR clone 243826 (TRBV10-3, TRBJ2-7)
CAISEKGGYEQYF

SEQ ID NO: 487653 - protein, 14 aa, Homo sapiens
  CDR3 for alpha chain variable domain of TCR clone 243827 (TRAV35, TRAJ50)
CAGHRTTSYDKVIF

SEQ ID NO: 487654 - protein, 13 aa, Homo sapiens
  CDR3 for beta chain variable domain of TCR clone 243827 (TRBV7-7, TRBJ2-3)
CASSLSRADTQYF

SEQ ID NO: 487655 - protein, 14 aa, Homo sapiens
  CDR3 for alpha chain variable domain of TCR clone 243828 (TRAV1-2, TRAJ8)
CAVREGTGFQKLVF

SEQ ID NO: 487656 - protein, 16 aa, Homo sapiens
  CDR3 for beta chain variable domain of TCR clone 243828 (TRBV6-1, TRBJ2-5)
CASSETLDRGAETQYF

SEQ ID NO: 487657 - protein, 14 aa, Homo sapiens
  CDR3 for alpha chain variable domain of TCR clone 243829 (TRAV1-2, TRAJ8)
CAVREDTGFQKLVF

SEQ ID NO: 487658 - protein, 13 aa, Homo sapiens
  CDR3 for beta chain variable domain of TCR clone 243829 (TRBV27, TRBJ1-1)
CASSLSIGDEAFF

SEQ ID NO: 487659 - protein, 15 aa, Homo sapiens
  CDR3 for alpha chain variable domain of TCR clone 243830 (TRAV3, TRAJ5)
CAVRDLDTGRRARTF

SEQ ID NO: 487660 - protein, 16 aa, Homo sapiens
  CDR3 for beta chain variable domain of TCR clone 243830 (TRBV7-2, TRBJ1-5)
CASSPWGPEGNQPQHF

SEQ ID NO: 487661 - protein, 15 aa, Homo sapiens
  CDR3 for alpha chain variable domain of TCR clone 243831 (TRAV23/DV6, TRAJ44)
CAARLLTGTASKLTI

SEQ ID NO: 487662 - protein, 15 aa, Homo sapiens
  CDR3 for beta chain variable domain of TCR clone 243831 (TRBV12-4, TRBJ1-5)
CASTLNRVSNQPQHF

SEQ ID NO: 487663 - protein, 15 aa, Homo sapiens
  CDR3 for alpha chain variable domain of TCR clone 243832 (TRAV3, TRAJ22)
CAVRDRGGSARQLNF

SEQ ID NO: 487664 - protein, 14 aa, Homo sapiens
  CDR3 for beta chain variable domain of TCR clone 243832 (TRBV25-1, TRBJ1-1)
CASTHLGGNTEAFF

SEQ ID NO: 487665 - protein, 14 aa, Homo sapiens
  CDR3 for alpha chain variable domain of TCR clone 243833 (TRAV12-2, TRAJ17)
CAVLFKAAGNKLTF

SEQ ID NO: 487666 - protein, 14 aa, Homo sapiens
  CDR3 for beta chain variable domain of TCR clone 243833 (TRBV28, TRBJ1-5)
CASSLGVLVKPRHF

SEQ ID NO: 487667 - protein, 14 aa, Homo sapiens
  CDR3 for alpha chain variable domain of TCR clone 243834 (TRAV12-2, TRAJ13)
CAVKKTGVYQKVTF

SEQ ID NO: 487668 - protein, 11 aa, Homo sapiens
  CDR3 for beta chain variable domain of TCR clone 243834 (TRBV11-2, TRBJ2-2)
CASSLPGELFF

SEQ ID NO: 487669 - protein, 14 aa, Homo sapiens
  CDR3 for alpha chain variable domain of TCR clone 243835 (TRAV8-1, TRAJ24)
CAVNAADIWGKLQF

SEQ ID NO: 487670 - protein, 16 aa, Homo sapiens
  CDR3 for beta chain variable domain of TCR clone 243835 (TRBV4-3, TRBJ2-1)
CASSPALDRGVNEQFF

SEQ ID NO: 487671 - protein, 12 aa, Homo sapiens
  CDR3 for alpha chain variable domain of TCR clone 243836 (TRAV3, TRAJ39)
CAVIEWSNMLTF

SEQ ID NO: 487672 - protein, 12 aa, Homo sapiens
  CDR3 for beta chain variable domain of TCR clone 243836 (TRBV4-1, TRBJ2-3)
CASSQGTDTQYF

SEQ ID NO: 487673 - protein, 12 aa, Homo sapiens
  CDR3 for alpha chain variable domain of TCR clone 243837 (TRAV12-3, TRAJ17)
CAMTLTGNKLTF

SEQ ID NO: 487674 - protein, 11 aa, Homo sapiens
  CDR3 for beta chain variable domain of TCR clone 243837 (TRBV11-2, TRBJ1-1)
CASGINTEAFV

SEQ ID NO: 487675 - protein, 15 aa, Homo sapiens
  CDR3 for alpha chain variable domain of TCR clone 243838 (TRAV4, TRAJ39)
CLVGPNNSAGNKLTF

SEQ ID NO: 487676 - protein, 16 aa, Homo sapiens
  CDR3 for beta chain variable domain of TCR clone 243838 (TRBV13, TRBJ2-2)
CASSPRTGEHTGELFF

SEQ ID NO: 487677 - protein, 11 aa, Homo sapiens
  CDR3 for alpha chain variable domain of TCR clone 243839 (TRAV12-3, TRAJ43)
CAMNVSNDMRF

SEQ ID NO: 487678 - protein, 13 aa, Homo sapiens
  CDR3 for beta chain variable domain of TCR clone 243839 (TRBV20-1, TRBJ1-1)
CSAPLGGGTESFF

SEQ ID NO: 487679 - protein, 14 aa, Homo sapiens
  CDR3 for alpha chain variable domain of TCR clone 243840 (TRAV13-1, TRAJ20)
CAARPGPNYYKLSF

SEQ ID NO: 487680 - protein, 13 aa, Homo sapiens
  CDR3 for beta chain variable domain of TCR clone 243840 (TRBV20-1, TRBJ1-1)
CSAPPGGHTEAFF

SEQ ID NO: 487681 - protein, 15 aa, Homo sapiens
  CDR3 for alpha chain variable domain of TCR clone 243841 (TRAV9-2, TRAJ8)
CALRGLNTGFQKLVF

SEQ ID NO: 487682 - protein, 17 aa, Homo sapiens
  CDR3 for beta chain variable domain of TCR clone 243841 (TRBV24-1, TRBJ2-1)
CATSDVSTSGTYNEQFF

SEQ ID NO: 487683 - protein, 13 aa, Homo sapiens
  CDR3 for alpha chain variable domain of TCR clone 243842 (TRAV12-3, TRAJ43)
CAIIRPNNNDMRF

SEQ ID NO: 487684 - protein, 12 aa, Homo sapiens
  CDR3 for beta chain variable domain of TCR clone 243842 (TRBV11-2, TRBJ2-5)
CASSLGQETQYF

SEQ ID NO: 487685 - protein, 14 aa, Homo sapiens
  CDR3 for alpha chain variable domain of TCR clone 243843 (TRAV16, TRAJ17)
CALSGRAAGNKLTF

SEQ ID NO: 487686 - protein, 14 aa, Homo sapiens
  CDR3 for beta chain variable domain of TCR clone 243843 (TRBV7-9, TRBJ2-7)
CASSPRTGTYEQYF

SEQ ID NO: 487687 - protein, 14 aa, Homo sapiens
  CDR3 for alpha chain variable domain of TCR clone 243844 (TRAV1-2, TRAJ8)
CAVREDTGFQKLVF

SEQ ID NO: 487688 - protein, 15 aa, Homo sapiens
  CDR3 for beta chain variable domain of TCR clone 243844 (TRBV7-9, TRBJ1-6)
CASSSPGRGNSPLRF

SEQ ID NO: 487689 - protein, 12 aa, Homo sapiens
  CDR3 for alpha chain variable domain of TCR clone 243845 (TRAV12-3, TRAJ17)
CAMTLTGNKLTF

SEQ ID NO: 487690 - protein, 12 aa, Homo sapiens
  CDR3 for beta chain variable domain of TCR clone 243845 (TRBV25-1, TRBJ1-1)
CASRHMNTEAFF

SEQ ID NO: 487691 - protein, 14 aa, Homo sapiens
  CDR3 for alpha chain variable domain of TCR clone 243846 (TRAV19, TRAJ4)
CASGISGGYNKLIF

SEQ ID NO: 487692 - protein, 13 aa, Homo sapiens
  CDR3 for beta chain variable domain of TCR clone 243846 (TRBV19, TRBJ1-2)
CASSVPGQDGYTV

SEQ ID NO: 487693 - protein, 14 aa, Homo sapiens
  CDR3 for alpha chain variable domain of TCR clone 243847 (TRAV35, TRAJ42)
CAGSYGGSQGNLIF

SEQ ID NO: 487694 - protein, 15 aa, Homo sapiens
  CDR3 for beta chain variable domain of TCR clone 243847 (TRBV7-9, TRBJ2-1)
CASSLGWGRANEQFF

SEQ ID NO: 487695 - protein, 14 aa, Homo sapiens
  CDR3 for alpha chain variable domain of TCR clone 243848 (TRAV12-2, TRAJ13)
CAVQKTGGYQKVTF

SEQ ID NO: 487696 - protein, 11 aa, Homo sapiens
  CDR3 for beta chain variable domain of TCR clone 243848 (TRBV12-4, TRBJ2-2)
CASSSAGELFF

SEQ ID NO: 487697 - protein, 17 aa, Homo sapiens
  CDR3 for alpha chain variable domain of TCR clone 243849 (TRAV38-2/DV8, TRAJ38)
CAYRSARGAGNNRKLIW

SEQ ID NO: 487698 - protein, 13 aa, Homo sapiens
  CDR3 for beta chain variable domain of TCR clone 243849 (TRBV6-5, TRBJ2-1)
CGSRGRVGNEQFF

SEQ ID NO: 487699 - protein, 11 aa, Homo sapiens
  CDR3 for alpha chain variable domain of TCR clone 243850 (TRAV13-2, TRAJ20)
CADYNDYKLSF

SEQ ID NO: 487700 - protein, 12 aa, Homo sapiens
  CDR3 for beta chain variable domain of TCR clone 243850 (TRBV11-2, TRBJ2-2)
CASSLGGGELFF

SEQ ID NO: 487701 - protein, 12 aa, Homo sapiens
  CDR3 for alpha chain variable domain of TCR clone 243851 (TRAV12-2, TRAJ29)
CAVDSGNTPLVF

SEQ ID NO: 487702 - protein, 13 aa, Homo sapiens
  CDR3 for beta chain variable domain of TCR clone 243851 (TRBV19, TRBJ1-2)
CASSQGQVYGDTF

SEQ ID NO: 487703 - protein, 15 aa, Homo sapiens
  CDR3 for alpha chain variable domain of TCR clone 243852 (TRAV17, TRAJ16)
CATALRFSDGQKLLF

SEQ ID NO: 487704 - protein, 15 aa, Homo sapiens
  CDR3 for beta chain variable domain of TCR clone 243852 (TRBV19, TRBJ1-1)
CASTSGQIQNTEAFF

SEQ ID NO: 487705 - protein, 14 aa, Homo sapiens
  CDR3 for alpha chain variable domain of TCR clone 243853 (TRAV2, TRAJ9)
CAVEDRSGGFKTIF

SEQ ID NO: 487706 - protein, 11 aa, Homo sapiens
  CDR3 for beta chain variable domain of TCR clone 243853 (TRBV7-9, TRBJ2-5)
CASRLGETQYF

SEQ ID NO: 487707 - protein, 16 aa, Homo sapiens
  CDR3 for alpha chain variable domain of TCR clone 243854 (TRAV12-3, TRAJ53)
CAMSPGSGGSNYKLTF

SEQ ID NO: 487708 - protein, 15 aa, Homo sapiens
  CDR3 for beta chain variable domain of TCR clone 243854 (TRBV5-7, TRBJ2-1)
CASSRRLAGDNEQFF

SEQ ID NO: 487709 - protein, 17 aa, Homo sapiens
  CDR3 for alpha chain variable domain of TCR clone 243855 (TRAV38-2/DV8, TRAJ57)
CAYRRVLTQGGSEKLVF

SEQ ID NO: 487710 - protein, 16 aa, Homo sapiens
  CDR3 for beta chain variable domain of TCR clone 243855 (TRBV7-3, TRBJ2-2)
CASSLKRGTLSGEMFF

SEQ ID NO: 487711 - protein, 12 aa, Homo sapiens
  CDR3 for alpha chain variable domain of TCR clone 243856 (TRAV20, TRAJ49)
CAVNKDGNQFYF

SEQ ID NO: 487712 - protein, 14 aa, Homo sapiens
  CDR3 for beta chain variable domain of TCR clone 243856 (TRBV25-1, TRBJ1-1)
CASTHLGGNTEAFF

SEQ ID NO: 487713 - protein, 15 aa, Homo sapiens
  CDR3 for alpha chain variable domain of TCR clone 243857 (TRAV21, TRAJ24)
CAARSSTDSWGKLQF

SEQ ID NO: 487714 - protein, 15 aa, Homo sapiens
  CDR3 for beta chain variable domain of TCR clone 243857 (TRBV4-1, TRBJ2-7)
CASSQNTVRLYEQYF

SEQ ID NO: 487715 - protein, 13 aa, Homo sapiens
  CDR3 for alpha chain variable domain of TCR clone 243858 (TRAV13-2, TRAJ48)
CAEMDFGNEKLTF

SEQ ID NO: 487716 - protein, 14 aa, Homo sapiens
  CDR3 for beta chain variable domain of TCR clone 243858 (TRBV15, TRBJ2-3)
CATRSGTSTHTQYF

SEQ ID NO: 487717 - protein, 12 aa, Homo sapiens
  CDR3 for alpha chain variable domain of TCR clone 243859 (TRAV3, TRAJ27)
CAVRDKAGKSTF

SEQ ID NO: 487718 - protein, 15 aa, Homo sapiens
  CDR3 for beta chain variable domain of TCR clone 243859 (TRBV11-1, TRBJ2-3)
CASSLLLASTDTQYF

SEQ ID NO: 487719 - protein, 16 aa, Homo sapiens
  CDR3 for alpha chain variable domain of TCR clone 243860 (TRAV3, TRAJ6)
CAVRDGMGRRKLHTYI

SEQ ID NO: 487720 - protein, 15 aa, Homo sapiens
  CDR3 for beta chain variable domain of TCR clone 243860 (TRBV5-1, TRBJ2-7)
CASSLGDFTTYEQHF

SEQ ID NO: 487721 - protein, 15 aa, Homo sapiens
  CDR3 for alpha chain variable domain of TCR clone 243861 (TRAV34, TRAJ38)
CGADFTPGNNRKLIW

SEQ ID NO: 487722 - protein, 14 aa, Homo sapiens
  CDR3 for beta chain variable domain of TCR clone 243861 (TRBV28, TRBJ1-2)
CASYSVIPNYGYTF

SEQ ID NO: 487723 - protein, 16 aa, Homo sapiens
  CDR3 for alpha chain variable domain of TCR clone 243862 (TRAV3, TRAJ28)
CAVLPRSGAGSYPLTF

SEQ ID NO: 487724 - protein, 18 aa, Homo sapiens
  CDR3 for beta chain variable domain of TCR clone 243862 (TRBV23-1, TRBJ2-7)
CASSQYRRTDSTSSTSGR

SEQ ID NO: 487725 - protein, 14 aa, Homo sapiens
  CDR3 for alpha chain variable domain of TCR clone 243863 (TRAV12-1, TRAJ38)
CVVDDAGNNRKLIW

SEQ ID NO: 487726 - protein, 14 aa, Homo sapiens
  CDR3 for beta chain variable domain of TCR clone 243863 (TRBV19, TRBJ1-5)
CASSIVQGIQPQHF

SEQ ID NO: 487727 - protein, 15 aa, Homo sapiens
  CDR3 for alpha chain variable domain of TCR clone 243864 (TRAV3, TRAJ9)
CAVRDSNTGGFKTIF

SEQ ID NO: 487728 - protein, 16 aa, Homo sapiens
  CDR3 for beta chain variable domain of TCR clone 243864 (TRBV15, TRBJ2-5)
CATSPTTGQGMENQYF

SEQ ID NO: 487729 - protein, 15 aa, Homo sapiens
  CDR3 for alpha chain variable domain of TCR clone 243865 (TRAV27, TRAJ38)
CAARRNAGNNRKLIW

SEQ ID NO: 487730 - protein, 17 aa, Homo sapiens
  CDR3 for beta chain variable domain of TCR clone 243865 (TRBV13, TRBJ2-3)
CASNLSRVAGGRNTQYF

SEQ ID NO: 487731 - protein, 14 aa, Homo sapiens
  CDR3 for alpha chain variable domain of TCR clone 243866 (TRAV2, TRAJ37)
CAVAYTSNTGKLIF

SEQ ID NO: 487732 - protein, 15 aa, Homo sapiens
  CDR3 for beta chain variable domain of TCR clone 243866 (TRBV5-1, TRBJ2-1)
CASSPPRAPYNEQFF

SEQ ID NO: 487733 - protein, 13 aa, Homo sapiens
  CDR3 for alpha chain variable domain of TCR clone 243867 (TRAV13-1, TRAJ37)
CAARSGNTGKLIF

SEQ ID NO: 487734 - protein, 13 aa, Homo sapiens
  CDR3 for beta chain variable domain of TCR clone 243867 (TRBV7-9, TRBJ1-2)
CASSLKQNYGYTF

SEQ ID NO: 487735 - protein, 11 aa, Homo sapiens
  CDR3 for alpha chain variable domain of TCR clone 243868 (TRAV3, TRAJ21)
CAVGNFNKFYF

SEQ ID NO: 487736 - protein, 15 aa, Homo sapiens
  CDR3 for beta chain variable domain of TCR clone 243868 (TRBV7-2, TRBJ1-2)
CASSQVWAATSGYTF

SEQ ID NO: 487737 - protein, 21 aa, Homo sapiens
  CDR3 for alpha chain variable domain of TCR clone 243869 (TRAV1-2, TRAJ42)
CLLPLCCERRRYGGSQGNLIF

SEQ ID NO: 487738 - protein, 13 aa, Homo sapiens
  CDR3 for beta chain variable domain of TCR clone 243869 (TRBV12-5, TRBJ2-3)
CASGDRQSDTQYF

SEQ ID NO: 487739 - protein, 10 aa, Homo sapiens
  CDR3 for alpha chain variable domain of TCR clone 243870 (TRAV2, TRAJ34)
CAVVNDRLIF

SEQ ID NO: 487740 - protein, 16 aa, Homo sapiens
  CDR3 for beta chain variable domain of TCR clone 243870 (TRBV5-1, TRBJ2-3)
CASSLGLAVYTDTQYF

SEQ ID NO: 487741 - protein, 15 aa, Homo sapiens
  CDR3 for alpha chain variable domain of TCR clone 243871 (TRAV13-1, TRAJ17)
CAASIERAAGNKLTL

SEQ ID NO: 487742 - protein, 14 aa, Homo sapiens
  CDR3 for beta chain variable domain of TCR clone 243871 (TRBV7-9, TRBJ2-1)
CASSPRDSLYEQFF

SEQ ID NO: 487743 - protein, 14 aa, Homo sapiens
  CDR3 for alpha chain variable domain of TCR clone 243872 (TRAV1-2, TRAJ8)
CAVREDTDFQKLVF

SEQ ID NO: 487744 - protein, 16 aa, Homo sapiens
  CDR3 for beta chain variable domain of TCR clone 243872 (TRBV4-1, TRBJ2-3)
CASSQSTSGAEDTQYF

SEQ ID NO: 487745 - protein, 13 aa, Homo sapiens
  CDR3 for alpha chain variable domain of TCR clone 243873 (TRAV17, TRAJ4)
CATKSGGYNKLIF

SEQ ID NO: 487746 - protein, 13 aa, Homo sapiens
  CDR3 for beta chain variable domain of TCR clone 243873 (TRBV20-1, TRBJ1-1)
CSARGGGNTEAFF

SEQ ID NO: 487747 - protein, 19 aa, Homo sapiens
  CDR3 for alpha chain variable domain of TCR clone 243874 (TRAV3, TRAJ6)
CAVRDRNPSRSGGSYIPTF

SEQ ID NO: 487748 - protein, 15 aa, Homo sapiens
  CDR3 for beta chain variable domain of TCR clone 243874 (TRBV18, TRBJ2-7)
CASSPTFMYSYEQYF

SEQ ID NO: 487749 - protein, 14 aa, Homo sapiens
  CDR3 for alpha chain variable domain of TCR clone 243875 (TRAV13-1, TRAJ21)
LQQRKASTNFTLDL

SEQ ID NO: 487750 - protein, 15 aa, Homo sapiens
  CDR3 for beta chain variable domain of TCR clone 243875 (TRBV19, TRBJ2-1)
CASSSPGVPLDEQFF

SEQ ID NO: 487751 - protein, 13 aa, Homo sapiens
  CDR3 for alpha chain variable domain of TCR clone 243876 (TRAV27, TRAJ49)
CAPRPYTGNQFYF

SEQ ID NO: 487752 - protein, 19 aa, Homo sapiens
  CDR3 for beta chain variable domain of TCR clone 243876 (TRBV12-4, TRBJ2-6)
CASSLSLGQGGSGANVLTF

SEQ ID NO: 487753 - protein, 18 aa, Homo sapiens
  CDR3 for alpha chain variable domain of TCR clone 243877 (TRAV21, TRAJ52)
CAVRPSPAGGTSYGKLTF

SEQ ID NO: 487754 - protein, 11 aa, Homo sapiens
  CDR3 for beta chain variable domain of TCR clone 243877 (TRBV6-1, TRBJ2-1)
CASISSNEQFF

SEQ ID NO: 487755 - protein, 13 aa, Homo sapiens
  CDR3 for alpha chain variable domain of TCR clone 243878 (TRAV8-4, TRAJ9)
CAVSGAGGFKTIF

SEQ ID NO: 487756 - protein, 12 aa, Homo sapiens
  CDR3 for beta chain variable domain of TCR clone 243878 (TRBV7-9, TRBJ2-7)
CASSQGVYEQYF

SEQ ID NO: 487757 - protein, 17 aa, Homo sapiens
  CDR3 for alpha chain variable domain of TCR clone 243879 (TRAV3, TRAJ12)
CAVRDGGRMDSSYKLIF

SEQ ID NO: 487758 - protein, 12 aa, Homo sapiens
  CDR3 for beta chain variable domain of TCR clone 243879 (TRBV5-1, TRBJ2-3)
CSVTGGADTQYF

SEQ ID NO: 487759 - protein, 12 aa, Homo sapiens
  CDR3 for alpha chain variable domain of TCR clone 243880 (TRAV2, TRAJ36)
CAELTGANNLFF

SEQ ID NO: 487760 - protein, 17 aa, Homo sapiens
  CDR3 for beta chain variable domain of TCR clone 243880 (TRBV4-1, TRBJ1-4)
CASSQEGPRGVEEKLFF

SEQ ID NO: 487761 - protein, 13 aa, Homo sapiens
  CDR3 for alpha chain variable domain of TCR clone 243881 (TRAV17, TRAJ9)
CATAITGGFKTIF

SEQ ID NO: 487762 - protein, 16 aa, Homo sapiens
  CDR3 for beta chain variable domain of TCR clone 243881 (TRBV15, TRBJ2-1)
CATSRNLAGGYNEKFF

SEQ ID NO: 487763 - protein, 15 aa, Homo sapiens
  CDR3 for alpha chain variable domain of TCR clone 243882 (TRAV3, TRAJ22)
CAVRDRGGSARQMTF

SEQ ID NO: 487764 - protein, 13 aa, Homo sapiens
  CDR3 for beta chain variable domain of TCR clone 243882 (TRBV7-9, TRBJ1-2)
CASSLKQNYGYTF

SEQ ID NO: 487765 - protein, 16 aa, Homo sapiens
  CDR3 for alpha chain variable domain of TCR clone 243883 (TRAV3, TRAJ21)
CAVRDIERGNFNKFYF

SEQ ID NO: 487766 - protein, 16 aa, Homo sapiens
  CDR3 for beta chain variable domain of TCR clone 243883 (TRBV19, TRBJ2-1)
CASSKAGPSSDNEQFF

SEQ ID NO: 487767 - protein, 17 aa, Homo sapiens
  CDR3 for alpha chain variable domain of TCR clone 243884 (TRAV13-1, TRAJ31)
CAPRDRLMFGDGTQLVV

SEQ ID NO: 487768 - protein, 12 aa, Homo sapiens
  CDR3 for beta chain variable domain of TCR clone 243884 (TRBV7-9, TRBJ2-7)
CASSSEGYEQYF

SEQ ID NO: 487769 - protein, 13 aa, Homo sapiens
  CDR3 for alpha chain variable domain of TCR clone 243885 (TRAV21, TRAJ45)
CAAPGVGADGLTF

SEQ ID NO: 487770 - protein, 18 aa, Homo sapiens
  CDR3 for beta chain variable domain of TCR clone 243885 (TRBV4-3, TRBJ1-4)
CASSQGSGQGAANEKLFF

SEQ ID NO: 487771 - protein, 12 aa, Homo sapiens
  CDR3 for alpha chain variable domain of TCR clone 243886 (TRAV35, TRAJ57)
LGPRGGSEKLVF

SEQ ID NO: 487772 - protein, 16 aa, Homo sapiens
  CDR3 for beta chain variable domain of TCR clone 243886 (TRBV7-2, TRBJ1-5)
CASSWTGGPGNQPQHF

SEQ ID NO: 487773 - protein, 14 aa, Homo sapiens
  CDR3 for alpha chain variable domain of TCR clone 243887 (TRAV1-2, TRAJ16)
CAVNRFSDGQNLLF

SEQ ID NO: 487774 - protein, 14 aa, Homo sapiens
  CDR3 for beta chain variable domain of TCR clone 243887 (TRBV11-2, TRBJ2-3)
CASSRLARTDTQYF

SEQ ID NO: 487775 - protein, 15 aa, Homo sapiens
  CDR3 for alpha chain variable domain of TCR clone 243888 (TRAV17, TRAJ22)
CATVAPSGSSRQLTF

SEQ ID NO: 487776 - protein, 16 aa, Homo sapiens
  CDR3 for beta chain variable domain of TCR clone 243888 (TRBV10-3, TRBJ2-7)
CAISADFADRPYEQYF

SEQ ID NO: 487777 - protein, 13 aa, Homo sapiens
  CDR3 for alpha chain variable domain of TCR clone 243889 (TRAV29/DV5, TRAJ31)
CAASRNNNARLMF

SEQ ID NO: 487778 - protein, 16 aa, Homo sapiens
  CDR3 for beta chain variable domain of TCR clone 243889 (TRBV13, TRBJ2-2)
CASSLGRGYGTGELFF

SEQ ID NO: 487779 - protein, 18 aa, Homo sapiens
  CDR3 for alpha chain variable domain of TCR clone 243890 (TRAV12-2, )
CAVEDIQNPDPAVYQVRD

SEQ ID NO: 487780 - protein, 15 aa, Homo sapiens
  CDR3 for beta chain variable domain of TCR clone 243890 (TRBV11-1, TRBJ2-7)
CASSLNYGASYEQYF

SEQ ID NO: 487781 - protein, 13 aa, Homo sapiens
  CDR3 for alpha chain variable domain of TCR clone 243891 (TRAV21, TRAJ20)
CAVGLRVDYKLSF

SEQ ID NO: 487782 - protein, 12 aa, Homo sapiens
  CDR3 for beta chain variable domain of TCR clone 243891 (TRBV2, TRBJ2-1)
CAYGPPGNEQFF

SEQ ID NO: 487783 - protein, 14 aa, Homo sapiens
  CDR3 for alpha chain variable domain of TCR clone 243892 (TRAV3, TRAJ21)
CAVESQANFNKFSF

SEQ ID NO: 487784 - protein, 18 aa, Homo sapiens
  CDR3 for beta chain variable domain of TCR clone 243892 (TRBV7-9, TRBJ2-1)
CASSLAVSGTSRRNEQFF

SEQ ID NO: 487785 - protein, 15 aa, Homo sapiens
  CDR3 for alpha chain variable domain of TCR clone 243893 (TRAV8-3, TRAJ27)
CAVGPSKTNAGKSTF

SEQ ID NO: 487786 - protein, 14 aa, Homo sapiens
  CDR3 for beta chain variable domain of TCR clone 243893 (TRBV7-2, TRBJ2-1)
CQSSGLAGGNEQFF

SEQ ID NO: 487787 - protein, 14 aa, Homo sapiens
  CDR3 for alpha chain variable domain of TCR clone 243894 (TRAV17, TRAJ40)
CATAPTSGTYKHIF

SEQ ID NO: 487788 - protein, 13 aa, Homo sapiens
  CDR3 for beta chain variable domain of TCR clone 243894 (TRBV27, TRBJ2-1)
CASSSGSYNEQFF

SEQ ID NO: 487789 - protein, 12 aa, Homo sapiens
  CDR3 for alpha chain variable domain of TCR clone 243895 (TRAV25, TRAJ33)
CAGPDSNYQLIC

SEQ ID NO: 487790 - protein, 20 aa, Homo sapiens
  CDR3 for beta chain variable domain of TCR clone 243895 (TRBV4-1, TRBJ2-2)
CASSQASPPGLASNTGELFF

SEQ ID NO: 487791 - protein, 17 aa, Homo sapiens
  CDR3 for alpha chain variable domain of TCR clone 243896 (TRAV3, TRAJ6)
CAVRDGPRAGGSYIPTF

SEQ ID NO: 487792 - protein, 18 aa, Homo sapiens
  CDR3 for beta chain variable domain of TCR clone 243896 (TRBV20-1, TRBJ2-2)
CSARVQTARPSGTGELFF

SEQ ID NO: 487793 - protein, 13 aa, Homo sapiens
  CDR3 for alpha chain variable domain of TCR clone 243897 (TRAV1-1, TRAJ7)
CAVRDHGNNKLAF

SEQ ID NO: 487794 - protein, 20 aa, Homo sapiens
  CDR3 for beta chain variable domain of TCR clone 243897 (TRBV28, TRBJ2-3)
CASSLGVRSTSGRSTDTQYF

SEQ ID NO: 487795 - protein, 14 aa, Homo sapiens
  CDR3 for alpha chain variable domain of TCR clone 243898 (TRAV12-1, TRAJ27)
CGEHIRTNAGKSTF

SEQ ID NO: 487796 - protein, 15 aa, Homo sapiens
  CDR3 for beta chain variable domain of TCR clone 243898 (TRBV19, TRBJ1-1)
CASTSGQTQNTEAFF

SEQ ID NO: 487797 - protein, 14 aa, Homo sapiens
  CDR3 for alpha chain variable domain of TCR clone 243899 (TRAV12-2, TRAJ33)
CAVDYPDSNYQLIW

SEQ ID NO: 487798 - protein, 12 aa, Homo sapiens
  CDR3 for beta chain variable domain of TCR clone 243899 (TRBV11-2, TRBJ2-7)
CASSLPTYEQYF

SEQ ID NO: 487799 - protein, 23 aa, Homo sapiens
  CDR3 for alpha chain variable domain of TCR clone 243900 (TRAV10, TRAJ34)
CVVSGKHRQAHIWDWDQITSLSK

SEQ ID NO: 487800 - protein, 14 aa, Homo sapiens
  CDR3 for beta chain variable domain of TCR clone 243900 (TRBV19, TRBJ2-1)
CASPTFVLSGEQFF

SEQ ID NO: 487801 - protein, 12 aa, Homo sapiens
  CDR3 for alpha chain variable domain of TCR clone 243901 (TRAV12-3, TRAJ17)
CAMTLTDNKLTF

SEQ ID NO: 487802 - protein, 16 aa, Homo sapiens
  CDR3 for beta chain variable domain of TCR clone 243901 (TRBV18, TRBJ1-5)
CASSPYRVEGNQPQHF

SEQ ID NO: 487803 - protein, 13 aa, Homo sapiens
  CDR3 for alpha chain variable domain of TCR clone 243902 (TRAV21, TRAJ20)
CAVGLRVDYKLSF

SEQ ID NO: 487804 - protein, 13 aa, Homo sapiens
  CDR3 for beta chain variable domain of TCR clone 243902 (TRBV15, TRBJ1-2)
CATSMTANYGYTF

SEQ ID NO: 487805 - protein, 13 aa, Homo sapiens
  CDR3 for alpha chain variable domain of TCR clone 243903 (TRAV21, TRAJ57)
CAVIEGGSETLVF

SEQ ID NO: 487806 - protein, 15 aa, Homo sapiens
  CDR3 for beta chain variable domain of TCR clone 243903 (TRBV10-3, TRBJ2-5)
CAISEFGRGQETQYF

SEQ ID NO: 487807 - protein, 13 aa, Homo sapiens
  CDR3 for alpha chain variable domain of TCR clone 243904 (TRAV8-3, TRAJ48)
CAVGPFGHEKLTF

SEQ ID NO: 487808 - protein, 12 aa, Homo sapiens
  CDR3 for beta chain variable domain of TCR clone 243904 (TRBV11-2, TRBJ2-2)
CASSLGGGELFF

SEQ ID NO: 487809 - protein, 12 aa, Homo sapiens
  CDR3 for alpha chain variable domain of TCR clone 243905 (TRAV13-2, TRAJ23)
CEERHRGGKLIF

SEQ ID NO: 487810 - protein, 16 aa, Homo sapiens
  CDR3 for beta chain variable domain of TCR clone 243905 (TRBV7-9, TRBJ1-2)
CASSLGFSSGEDGYTF

SEQ ID NO: 487811 - protein, 11 aa, Homo sapiens
  CDR3 for alpha chain variable domain of TCR clone 243906 (TRAV21, TRAJ9)
CAVPGGFKTIF

SEQ ID NO: 487812 - protein, 20 aa, Homo sapiens
  CDR3 for beta chain variable domain of TCR clone 243906 (TRBV7-9, TRBJ2-5)
RGTRPCVSVPLQGAQETQYF

SEQ ID NO: 487813 - protein, 11 aa, Homo sapiens
  CDR3 for alpha chain variable domain of TCR clone 243907 (TRAV3, TRAJ21)
CALGNFNKFYF

SEQ ID NO: 487814 - protein, 15 aa, Homo sapiens
  CDR3 for beta chain variable domain of TCR clone 243907 (TRBV5-1, TRBJ2-1)
CASSLVANSYNEQFF

SEQ ID NO: 487815 - protein, 14 aa, Homo sapiens
  CDR3 for alpha chain variable domain of TCR clone 243908 (TRAV2, TRAJ9)
CAVEDRSGGFKTIF

SEQ ID NO: 487816 - protein, 16 aa, Homo sapiens
  CDR3 for beta chain variable domain of TCR clone 243908 (TRBV4-2, TRBJ1-5)
CASSQGQGASNQPQHF

SEQ ID NO: 487817 - protein, 13 aa, Homo sapiens
  CDR3 for alpha chain variable domain of TCR clone 243909 (TRAV12-2, TRAJ50)
CAVIVTSYDKVIF

SEQ ID NO: 487818 - protein, 12 aa, Homo sapiens
  CDR3 for beta chain variable domain of TCR clone 243909 (TRBV4-1, TRBJ2-3)
CASSQGTDTQYF

SEQ ID NO: 487819 - protein, 11 aa, Homo sapiens
  CDR3 for alpha chain variable domain of TCR clone 243910 (TRAV4, TRAJ31)
CLVGDNARLMF

SEQ ID NO: 487820 - protein, 13 aa, Homo sapiens
  CDR3 for beta chain variable domain of TCR clone 243910 (TRBV4-1, TRBJ2-5)
CASSLTRGETQYF

SEQ ID NO: 487821 - protein, 15 aa, Homo sapiens
  CDR3 for alpha chain variable domain of TCR clone 243911 (TRAV1-2, TRAJ24)
CAVRGSTDSWGRFQF

SEQ ID NO: 487822 - protein, 16 aa, Homo sapiens
  CDR3 for beta chain variable domain of TCR clone 243911 (TRBV20-1, TRBJ2-1)
CSAATQGPVSYNEQFF

SEQ ID NO: 487823 - protein, 19 aa, Homo sapiens
  CDR3 for alpha chain variable domain of TCR clone 243912 (TRAV27, TRAJ53)
ASTSVQSRNSGGSNYKLTF

SEQ ID NO: 487824 - protein, 13 aa, Homo sapiens
  CDR3 for beta chain variable domain of TCR clone 243912 (TRBV5-5, TRBJ1-2)
CASSFWRGEDYTF

SEQ ID NO: 487825 - protein, 11 aa, Homo sapiens
  CDR3 for alpha chain variable domain of TCR clone 243913 (TRAV12-1, TRAJ30)
CVVNGQDKIIF

SEQ ID NO: 487826 - protein, 12 aa, Homo sapiens
  CDR3 for beta chain variable domain of TCR clone 243913 (TRBV11-2, TRBJ2-2)
CASSLGGGELFL

SEQ ID NO: 487827 - protein, 21 aa, Homo sapiens
  CDR3 for alpha chain variable domain of TCR clone 243914 (TRAV26-1, TRAJ38)
CIADNAGNNHIQNPDPAVYQL

SEQ ID NO: 487828 - protein, 13 aa, Homo sapiens
  CDR3 for beta chain variable domain of TCR clone 243914 (TRBV20-1, TRBJ1-1)
CSARGVGNTEAFF

SEQ ID NO: 487829 - protein, 16 aa, Homo sapiens
  CDR3 for alpha chain variable domain of TCR clone 243915 (TRAV27, TRAJ52)
CVGAGAGGTSYGKLTF

SEQ ID NO: 487830 - protein, 17 aa, Homo sapiens
  CDR3 for beta chain variable domain of TCR clone 243915 (TRBV24-1, TRBJ2-3)
CATSDLPSGEDTDTQYF

SEQ ID NO: 487831 - protein, 19 aa, Homo sapiens
  CDR3 for alpha chain variable domain of TCR clone 243916 (TRAV26-1, TRAJ52)
CIVRAHRNAGGTSYGKLTF

SEQ ID NO: 487832 - protein, 15 aa, Homo sapiens
  CDR3 for beta chain variable domain of TCR clone 243916 (TRBV12-4, TRBJ2-5)
CARSPPTGLQETQYV

SEQ ID NO: 487833 - protein, 13 aa, Homo sapiens
  CDR3 for alpha chain variable domain of TCR clone 243917 (TRAV12-1, TRAJ26)
CVVRRNYVQNFVF

SEQ ID NO: 487834 - protein, 14 aa, Homo sapiens
  CDR3 for beta chain variable domain of TCR clone 243917 (TRBV6-3, TRBJ1-1)
CASRYTGESTEAFF

SEQ ID NO: 487835 - protein, 15 aa, Homo sapiens
  CDR3 for alpha chain variable domain of TCR clone 243918 (TRAV17, TRAJ16)
CATALRFSDGQKLLF

SEQ ID NO: 487836 - protein, 12 aa, Homo sapiens
  CDR3 for beta chain variable domain of TCR clone 243918 (TRBV24-1, TRBJ1-1)
CATLYPDTEAFF

SEQ ID NO: 487837 - protein, 16 aa, Homo sapiens
  CDR3 for alpha chain variable domain of TCR clone 243919 (TRAV8-3, TRAJ13)
CAVGAYPSGGYQKVTF

SEQ ID NO: 487838 - protein, 14 aa, Homo sapiens
  CDR3 for beta chain variable domain of TCR clone 243919 (TRBV7-3, TRBJ1-1)
CASSLKGGNTEAFF

SEQ ID NO: 487839 - protein, 11 aa, Homo sapiens
  CDR3 for alpha chain variable domain of TCR clone 243920 (TRAV12-3, TRAJ27)
CAMANAGKSTF

SEQ ID NO: 487840 - protein, 12 aa, Homo sapiens
  CDR3 for beta chain variable domain of TCR clone 243920 (TRBV7-3, TRBJ1-2)
CASSKKGVPVTF

SEQ ID NO: 487841 - protein, 14 aa, Homo sapiens
  CDR3 for alpha chain variable domain of TCR clone 243921 (TRAV12-2, TRAJ40)
CAVKIPSGTYKYIF

SEQ ID NO: 487842 - protein, 15 aa, Homo sapiens
  CDR3 for beta chain variable domain of TCR clone 243921 (TRBV19, TRBJ2-1)
CASSSPGVPLNEQFF

SEQ ID NO: 487843 - protein, 11 aa, Homo sapiens
  CDR3 for alpha chain variable domain of TCR clone 243922 (TRAV16, TRAJ33)
CALHSNYQLIW

SEQ ID NO: 487844 - protein, 17 aa, Homo sapiens
  CDR3 for beta chain variable domain of TCR clone 243922 (TRBV4-1, TRBJ2-7)
CISAPAANREGFDEQYY

SEQ ID NO: 487845 - protein, 14 aa, Homo sapiens
  CDR3 for alpha chain variable domain of TCR clone 243923 (TRAV1-2, TRAJ16)
CAVNRFSDGQKLLF

SEQ ID NO: 487846 - protein, 15 aa, Homo sapiens
  CDR3 for beta chain variable domain of TCR clone 243923 (TRBV19, TRBJ1-1)
CASTSGQIQNTEAFC

SEQ ID NO: 487847 - protein, 14 aa, Homo sapiens
  CDR3 for alpha chain variable domain of TCR clone 243924 (TRAV27, TRAJ22)
CAGLPSGSARQLTF

SEQ ID NO: 487848 - protein, 15 aa, Homo sapiens
  CDR3 for beta chain variable domain of TCR clone 243924 (TRBV5-1, TRBJ2-1)
CASSLVANSYNEQFF

SEQ ID NO: 487849 - protein, 14 aa, Homo sapiens
  CDR3 for alpha chain variable domain of TCR clone 243925 (TRAV3, TRAJ26)
CAVRDYNYGQNFVF

SEQ ID NO: 487850 - protein, 15 aa, Homo sapiens
  CDR3 for beta chain variable domain of TCR clone 243925 (TRBV20-1, TRBJ2-5)
CSAIPPGRGGETQYF

SEQ ID NO: 487851 - protein, 14 aa, Homo sapiens
  CDR3 for alpha chain variable domain of TCR clone 243926 (TRAV23/DV6, TRAJ6)
CAASRSGGSYIPTS

SEQ ID NO: 487852 - protein, 17 aa, Homo sapiens
  CDR3 for beta chain variable domain of TCR clone 243926 (TRBV20-1, TRBJ2-1)
CSASASGLAGSYNEQFF

SEQ ID NO: 487853 - protein, 12 aa, Homo sapiens
  CDR3 for alpha chain variable domain of TCR clone 243927 (TRAV27, TRAJ9)
CAGESGGFKTIF

SEQ ID NO: 487854 - protein, 18 aa, Homo sapiens
  CDR3 for beta chain variable domain of TCR clone 243927 (TRBV10-2, TRBJ2-2)
CNSAPAVHRQADAGELFF

SEQ ID NO: 487855 - protein, 17 aa, Homo sapiens
  CDR3 for alpha chain variable domain of TCR clone 243928 (TRAV4, TRAJ20)
CTTASWVKGNNDYKLSF

SEQ ID NO: 487856 - protein, 17 aa, Homo sapiens
  CDR3 for beta chain variable domain of TCR clone 243928 (TRBV11-2, TRBJ2-1)
CASSLYPPGVEYNEQFF

SEQ ID NO: 487857 - protein, 15 aa, Homo sapiens
  CDR3 for alpha chain variable domain of TCR clone 243929 (TRAV27, TRAJ38)
CAARRNAGNNRKLIW

SEQ ID NO: 487858 - protein, 15 aa, Homo sapiens
  CDR3 for beta chain variable domain of TCR clone 243929 (TRBV6-6, TRBJ2-5)
CASSPGGGLEETQYF

SEQ ID NO: 487859 - protein, 13 aa, Homo sapiens
  CDR3 for alpha chain variable domain of TCR clone 243930 (TRAV21, TRAJ15)
CAVRNQAGTALIF

SEQ ID NO: 487860 - protein, 16 aa, Homo sapiens
  CDR3 for beta chain variable domain of TCR clone 243930 (TRBV20-1, TRBJ2-5)
CSPGGASGGYMETQYF

SEQ ID NO: 487861 - protein, 16 aa, Homo sapiens
  CDR3 for alpha chain variable domain of TCR clone 243931 (TRAV13-1, TRAJ48)
CAASIFGNFGNEQLTF

SEQ ID NO: 487862 - protein, 16 aa, Homo sapiens
  CDR3 for beta chain variable domain of TCR clone 243931 (TRBV18, TRBJ1-5)
CASSPYRVEGNQPQHF

SEQ ID NO: 487863 - protein, 13 aa, Homo sapiens
  CDR3 for alpha chain variable domain of TCR clone 243932 (TRAV35, TRAJ42)
CAGFPGSQGNLIF

SEQ ID NO: 487864 - protein, 14 aa, Homo sapiens
  CDR3 for beta chain variable domain of TCR clone 243932 (TRBV18, TRBJ2-1)
CASSPPTSGGIVIF

SEQ ID NO: 487865 - protein, 13 aa, Homo sapiens
  CDR3 for alpha chain variable domain of TCR clone 243933 (TRAV24, TRAJ42)
CALSTGSQGNLIF

SEQ ID NO: 487866 - protein, 16 aa, Homo sapiens
  CDR3 for beta chain variable domain of TCR clone 243933 (TRBV15, TRBJ1-2)
CATSRGPRTGGGGYTF

SEQ ID NO: 487867 - protein, 15 aa, Homo sapiens
  CDR3 for alpha chain variable domain of TCR clone 243934 (TRAV29/DV5, TRAJ24)
CAASGATDSWGKFQF

SEQ ID NO: 487868 - protein, 14 aa, Homo sapiens
  CDR3 for beta chain variable domain of TCR clone 243934 (TRBV12-5, TRBJ2-5)
CASGSRTHQETQYF

SEQ ID NO: 487869 - protein, 15 aa, Homo sapiens
  CDR3 for alpha chain variable domain of TCR clone 243935 (TRAV26-1, TRAJ42)
FIVRVKGGSHGNLIF

SEQ ID NO: 487870 - protein, 14 aa, Homo sapiens
  CDR3 for beta chain variable domain of TCR clone 243935 (TRBV19, TRBJ2-2)
CATTGHANTGELFF

SEQ ID NO: 487871 - protein, 14 aa, Homo sapiens
  CDR3 for alpha chain variable domain of TCR clone 243936 (TRAV12-1, TRAJ17)
CVVNYKAAGNKLTF

SEQ ID NO: 487872 - protein, 17 aa, Homo sapiens
  CDR3 for beta chain variable domain of TCR clone 243936 (TRBV20-1, TRBJ2-5)
CSASSSGLAGSYNEQYF

SEQ ID NO: 487873 - protein, 17 aa, Homo sapiens
  CDR3 for alpha chain variable domain of TCR clone 243937 (TRAV8-3, TRAJ50)
CDVGAVDTETSYDKVIF

SEQ ID NO: 487874 - protein, 13 aa, Homo sapiens
  CDR3 for beta chain variable domain of TCR clone 243937 (TRBV7-9, TRBJ2-2)
CASSSAGTGELFF

SEQ ID NO: 487875 - protein, 12 aa, Homo sapiens
  CDR3 for alpha chain variable domain of TCR clone 243938 (TRAV21, TRAJ27)
FSPPGNAGKSTF

SEQ ID NO: 487876 - protein, 13 aa, Homo sapiens
  CDR3 for beta chain variable domain of TCR clone 243938 (TRBV2, TRBJ1-1)
CARNPTGGFHAFF

SEQ ID NO: 487877 - protein, 23 aa, Homo sapiens
  CDR3 for alpha chain variable domain of TCR clone 243939 (TRAV12-2, TRAJ43)
SLLIRDSQPSDSATCLCAFDMRF

SEQ ID NO: 487878 - protein, 18 aa, Homo sapiens
  CDR3 for beta chain variable domain of TCR clone 243939 (TRBV20-1, TRBJ2-3)
CSASGLAGGPGTTDTQYF

SEQ ID NO: 487879 - protein, 13 aa, Homo sapiens
  CDR3 for alpha chain variable domain of TCR clone 243940 (TRAV21, TRAJ20)
CAVGLRVDYKLSF

SEQ ID NO: 487880 - protein, 13 aa, Homo sapiens
  CDR3 for beta chain variable domain of TCR clone 243940 (TRBV6-1, TRBJ1-1)
CASSRQGNTAAFF

SEQ ID NO: 487881 - protein, 14 aa, Homo sapiens
  CDR3 for alpha chain variable domain of TCR clone 243941 (TRAV12-1, TRAJ29)
CVVNEGSGNTPLVF

SEQ ID NO: 487882 - protein, 13 aa, Homo sapiens
  CDR3 for beta chain variable domain of TCR clone 243941 (TRBV7-9, TRBJ1-2)
CASSPSNFWGYTF

SEQ ID NO: 487883 - protein, 16 aa, Homo sapiens
  CDR3 for alpha chain variable domain of TCR clone 243942 (TRAV30, TRAJ24)
CGTEIVDADSWGKFQF

SEQ ID NO: 487884 - protein, 16 aa, Homo sapiens
  CDR3 for beta chain variable domain of TCR clone 243942 (TRBV7-9, TRBJ1-2)
CASSLGFSSGEDGYTL

SEQ ID NO: 487885 - protein, 15 aa, Homo sapiens
  CDR3 for alpha chain variable domain of TCR clone 243943 (TRAV26-1, TRAJ29)
FIVRVEGSGNTPLFF

SEQ ID NO: 487886 - protein, 14 aa, Homo sapiens
  CDR3 for beta chain variable domain of TCR clone 243943 (TRBV18, TRBJ2-5)
CASSPGVSQETQYF

SEQ ID NO: 487887 - protein, 16 aa, Homo sapiens
  CDR3 for alpha chain variable domain of TCR clone 243944 (TRAV12-3, TRAJ28)
CAMRANSGAVSYQLTF

SEQ ID NO: 487888 - protein, 16 aa, Homo sapiens
  CDR3 for beta chain variable domain of TCR clone 243944 (TRBV7-8, TRBJ1-3)
CASSRLEARSGNTIYF

SEQ ID NO: 487889 - protein, 15 aa, Homo sapiens
  CDR3 for alpha chain variable domain of TCR clone 243945 (TRAV8-3, TRAJ44)
CAVGAGAGSASKLTF

SEQ ID NO: 487890 - protein, 12 aa, Homo sapiens
  CDR3 for beta chain variable domain of TCR clone 243945 (TRBV7-8, TRBJ2-4)
CASSLGGNIQYF

SEQ ID NO: 487891 - protein, 14 aa, Homo sapiens
  CDR3 for alpha chain variable domain of TCR clone 243946 (TRAV12-1, TRAJ24)
CVVRSTDSWGNSSL

SEQ ID NO: 487892 - protein, 13 aa, Homo sapiens
  CDR3 for beta chain variable domain of TCR clone 243946 (TRBV2, TRBJ2-3)
CASILAGGQGQYF

SEQ ID NO: 487893 - protein, 15 aa, Homo sapiens
  CDR3 for alpha chain variable domain of TCR clone 243947 (TRAV17, TRAJ57)
CATGPSQGGSEKLVF

SEQ ID NO: 487894 - protein, 16 aa, Homo sapiens
  CDR3 for beta chain variable domain of TCR clone 243947 (TRBV12-4, TRBJ1-5)
CARSRPVGGSKQPQHF

SEQ ID NO: 487895 - protein, 14 aa, Homo sapiens
  CDR3 for alpha chain variable domain of TCR clone 243948 (TRAV23/DV6, TRAJ39)
CAASMRGAGNMLTF

SEQ ID NO: 487896 - protein, 14 aa, Homo sapiens
  CDR3 for beta chain variable domain of TCR clone 243948 (TRBV10-3, TRBJ2-3)
CASSVTRSRDTQYF

SEQ ID NO: 487897 - protein, 11 aa, Homo sapiens
  CDR3 for alpha chain variable domain of TCR clone 243949 (TRAV2, TRAJ21)
CAVFNFNKFYF

SEQ ID NO: 487898 - protein, 13 aa, Homo sapiens
  CDR3 for beta chain variable domain of TCR clone 243949 (TRBV7-3, TRBJ2-1)
CASSLDSYNEQFF

SEQ ID NO: 487899 - protein, 14 aa, Homo sapiens
  CDR3 for alpha chain variable domain of TCR clone 243950 (TRAV8-4, TRAJ34)
CAVSDPGVTDKLIF

SEQ ID NO: 487900 - protein, 13 aa, Homo sapiens
  CDR3 for beta chain variable domain of TCR clone 243950 (TRBV7-9, TRBJ2-5)
CASLSPGQETQYF

SEQ ID NO: 487901 - protein, 16 aa, Homo sapiens
  CDR3 for alpha chain variable domain of TCR clone 243951 (TRAV8-1, TRAJ39)
CAVNVPSYNAGNMFTF

SEQ ID NO: 487902 - protein, 15 aa, Homo sapiens
  CDR3 for beta chain variable domain of TCR clone 243951 (TRBV4-1, TRBJ2-3)
CASRSTRAGTDTQYF

SEQ ID NO: 487903 - protein, 15 aa, Homo sapiens
  CDR3 for alpha chain variable domain of TCR clone 243952 (TRAV8-3, TRAJ41)
CAVGSNSNSGYAFNF

SEQ ID NO: 487904 - protein, 17 aa, Homo sapiens
  CDR3 for beta chain variable domain of TCR clone 243952 (TRBV25-1, TRBJ2-1)
CASSAYGQGRGVYEQFF

SEQ ID NO: 487905 - protein, 14 aa, Homo sapiens
  CDR3 for alpha chain variable domain of TCR clone 243953 (TRAV1-2, TRAJ16)
CAVNRVSDGQKLLF

SEQ ID NO: 487906 - protein, 16 aa, Homo sapiens
  CDR3 for beta chain variable domain of TCR clone 243953 (TRBV27, TRBJ2-2)
CASSFRGLVRTGELFF

SEQ ID NO: 487907 - protein, 15 aa, Homo sapiens
  CDR3 for alpha chain variable domain of TCR clone 243954 (TRAV3, TRAJ15)
CAVRPANQAGTALFF

SEQ ID NO: 487908 - protein, 17 aa, Homo sapiens
  CDR3 for beta chain variable domain of TCR clone 243954 (TRBV20-1, TRBJ2-1)
CSASSSGLAGSYNEQFF

SEQ ID NO: 487909 - protein, 12 aa, Homo sapiens
  CDR3 for alpha chain variable domain of TCR clone 243955 (TRAV8-3, TRAJ22)
FGGQSSARQLTF

SEQ ID NO: 487910 - protein, 14 aa, Homo sapiens
  CDR3 for beta chain variable domain of TCR clone 243955 (TRBV25-1, TRBJ1-1)
CASTHLGGNTEAFF

SEQ ID NO: 487911 - protein, 13 aa, Homo sapiens
  CDR3 for alpha chain variable domain of TCR clone 243956 (TRAV38-1, TRAJ42)
CARWGGSQGNLIF

SEQ ID NO: 487912 - protein, 17 aa, Homo sapiens
  CDR3 for beta chain variable domain of TCR clone 243956 (TRBV20-1, TRBJ2-1)
CSARDPLAGAWDNEQSF

SEQ ID NO: 487913 - protein, 12 aa, Homo sapiens
  CDR3 for alpha chain variable domain of TCR clone 243957 (TRAV17, TRAJ20)
CAPDSNDYKLSF

SEQ ID NO: 487914 - protein, 17 aa, Homo sapiens
  CDR3 for beta chain variable domain of TCR clone 243957 (TRBV5-1, TRBJ2-2)
CASSLAGLSGGTGELFF

SEQ ID NO: 487915 - protein, 14 aa, Homo sapiens
  CDR3 for alpha chain variable domain of TCR clone 243958 (TRAV9-2, TRAJ39)
CALYIYNAGNLLTF

SEQ ID NO: 487916 - protein, 14 aa, Homo sapiens
  CDR3 for beta chain variable domain of TCR clone 243958 (TRBV12-5, TRBJ2-5)
CASGSRTHQETQYF

SEQ ID NO: 487917 - protein, 13 aa, Homo sapiens
  CDR3 for alpha chain variable domain of TCR clone 243959 (TRAV3, TRAJ21)
CAVREPDSNKFYF

SEQ ID NO: 487918 - protein, 12 aa, Homo sapiens
  CDR3 for beta chain variable domain of TCR clone 243959 (TRBV5-1, TRBJ2-4)
LAGEWTKNIQYF

SEQ ID NO: 487919 - protein, 13 aa, Homo sapiens
  CDR3 for alpha chain variable domain of TCR clone 243960 (TRAV36/DV7, TRAJ57)
CAVGEGGAEKLVF

SEQ ID NO: 487920 - protein, 16 aa, Homo sapiens
  CDR3 for beta chain variable domain of TCR clone 243960 (TRBV2, TRBJ1-4)
CASNLLQGATNEKLFF

SEQ ID NO: 487921 - protein, 15 aa, Homo sapiens
  CDR3 for alpha chain variable domain of TCR clone 243961 (TRAV13-1, TRAJ17)
CAASIERAAGNQLTF

SEQ ID NO: 487922 - protein, 17 aa, Homo sapiens
  CDR3 for beta chain variable domain of TCR clone 243961 (TRBV13, TRBJ2-3)
CASSLSRVAGGRNTQYF

SEQ ID NO: 487923 - protein, 15 aa, Homo sapiens
  CDR3 for alpha chain variable domain of TCR clone 243962 (TRAV17, TRAJ57)
CAAGPSQGESEKLVF

SEQ ID NO: 487924 - protein, 16 aa, Homo sapiens
  CDR3 for beta chain variable domain of TCR clone 243962 (TRBV12-4, TRBJ1-5)
CASSRPVGGSNQPQHF

SEQ ID NO: 487925 - protein, 17 aa, Homo sapiens
  CDR3 for alpha chain variable domain of TCR clone 243963 (TRAV4, TRAJ22)
CCVLLTRGGGSARQLTF

SEQ ID NO: 487926 - protein, 14 aa, Homo sapiens
  CDR3 for beta chain variable domain of TCR clone 243963 (TRBV20-1, TRBJ1-1)
CSASAVNGYTEAFF

SEQ ID NO: 487927 - protein, 14 aa, Homo sapiens
  CDR3 for alpha chain variable domain of TCR clone 243964 (TRAV26-1, TRAJ29)
CIVRVGSGNTPLVF

SEQ ID NO: 487928 - protein, 14 aa, Homo sapiens
  CDR3 for beta chain variable domain of TCR clone 243964 (TRBV18, TRBJ2-5)
CASSPGVSQETQYF

SEQ ID NO: 487929 - protein, 14 aa, Homo sapiens
  CDR3 for alpha chain variable domain of TCR clone 243965 (TRAV12-1, TRAJ42)
CVVIYGGSQGNLIF

SEQ ID NO: 487930 - protein, 17 aa, Homo sapiens
  CDR3 for beta chain variable domain of TCR clone 243965 (TRBV3-1, TRBJ2-6)
CASSPNTGPDGANVLTF

SEQ ID NO: 487931 - protein, 13 aa, Homo sapiens
  CDR3 for alpha chain variable domain of TCR clone 243966 (TRAV8-4, TRAJ10)
CAAFTGGGNKLTF

SEQ ID NO: 487932 - protein, 15 aa, Homo sapiens
  CDR3 for beta chain variable domain of TCR clone 243966 (TRBV9, TRBJ1-6)
CASSVAGTGDSPLHF

SEQ ID NO: 487933 - protein, 14 aa, Homo sapiens
  CDR3 for alpha chain variable domain of TCR clone 243967 (TRAV30, TRAJ33)
CGTERRFSNYQLIW

SEQ ID NO: 487934 - protein, 16 aa, Homo sapiens
  CDR3 for beta chain variable domain of TCR clone 243967 (TRBV7-3, TRBJ2-2)
CASSLKRGTLSVELFF

SEQ ID NO: 487935 - protein, 14 aa, Homo sapiens
  CDR3 for alpha chain variable domain of TCR clone 243968 (TRAV3, TRAJ21)
CAVESKANFNKFYF

SEQ ID NO: 487936 - protein, 18 aa, Homo sapiens
  CDR3 for beta chain variable domain of TCR clone 243968 (TRBV7-9, TRBJ2-1)
CASSLAVSGTSGRNEQFF

SEQ ID NO: 487937 - protein, 19 aa, Homo sapiens
  CDR3 for alpha chain variable domain of TCR clone 243969 (TRAV26-1, TRAJ52)
CIVRAHRNASGTSYGKLTF

SEQ ID NO: 487938 - protein, 15 aa, Homo sapiens
  CDR3 for beta chain variable domain of TCR clone 243969 (TRBV12-4, TRBJ2-5)
CASSPPTGLQEAQYF

SEQ ID NO: 487939 - protein, 12 aa, Homo sapiens
  CDR3 for alpha chain variable domain of TCR clone 243970 (TRAV4, TRAJ6)
CLATGGSYIPTF

SEQ ID NO: 487940 - protein, 18 aa, Homo sapiens
  CDR3 for beta chain variable domain of TCR clone 243970 (TRBV20-1, TRBJ2-3)
CSASGLAGGPGTTDTQYF

SEQ ID NO: 487941 - protein, 13 aa, Homo sapiens
  CDR3 for alpha chain variable domain of TCR clone 243971 (TRAV13-1, TRAJ39)
CATSIVMQATCSP

SEQ ID NO: 487942 - protein, 16 aa, Homo sapiens
  CDR3 for beta chain variable domain of TCR clone 243971 (TRBV20-1, TRBJ1-4)
CSAPGQGLLTNDKLFF

SEQ ID NO: 487943 - protein, 10 aa, Homo sapiens
  CDR3 for alpha chain variable domain of TCR clone 243972 (TRAV4, TRAJ31)
CLAPRDRPMF

SEQ ID NO: 487944 - protein, 13 aa, Homo sapiens
  CDR3 for beta chain variable domain of TCR clone 243972 (TRBV7-9, TRBJ1-2)
CASSLKQNYGYTF

SEQ ID NO: 487945 - protein, 11 aa, Homo sapiens
  CDR3 for alpha chain variable domain of TCR clone 243973 (TRAV12-1, TRAJ21)
CVVNNFNKFYF

SEQ ID NO: 487946 - protein, 15 aa, Homo sapiens
  CDR3 for beta chain variable domain of TCR clone 243973 (TRBV12-4, TRBJ2-5)
CASSPTTGLQETQYF

SEQ ID NO: 487947 - protein, 15 aa, Homo sapiens
  CDR3 for alpha chain variable domain of TCR clone 243974 (TRAV26-1, TRAJ29)
CIVKVEGSGNTPLVF

SEQ ID NO: 487948 - protein, 14 aa, Homo sapiens
  CDR3 for beta chain variable domain of TCR clone 243974 (TRBV18, TRBJ2-5)
CASSPGVSQEIQYF

SEQ ID NO: 487949 - protein, 11 aa, Homo sapiens
  CDR3 for alpha chain variable domain of TCR clone 243975 (TRAV1-2, TRAJ40)
FAVPGTYKYIF

SEQ ID NO: 487950 - protein, 15 aa, Homo sapiens
  CDR3 for beta chain variable domain of TCR clone 243975 (TRBV5-7, TRBJ1-5)
CASSYGKLWDQPQHF

SEQ ID NO: 487951 - protein, 16 aa, Homo sapiens
  CDR3 for alpha chain variable domain of TCR clone 243976 (TRAV3, TRAJ37)
CAVRGKGSGNTGKLIF

SEQ ID NO: 487952 - protein, 16 aa, Homo sapiens
  CDR3 for beta chain variable domain of TCR clone 243976 (TRBV12-5, TRBJ2-5)
CASGPRTSGKQETQYF

SEQ ID NO: 487953 - protein, 13 aa, Homo sapiens
  CDR3 for alpha chain variable domain of TCR clone 243977 (TRAV12-2, TRAJ17)
CVLFKAAGNKLTF

SEQ ID NO: 487954 - protein, 17 aa, Homo sapiens
  CDR3 for beta chain variable domain of TCR clone 243977 (TRBV20-1, TRBJ2-2)
CSASGSGQGGLTGELFF

SEQ ID NO: 487955 - protein, 15 aa, Homo sapiens
  CDR3 for alpha chain variable domain of TCR clone 243978 (TRAV8-4, TRAJ37)
CPVSRGSGNTGKLIF

SEQ ID NO: 487956 - protein, 16 aa, Homo sapiens
  CDR3 for beta chain variable domain of TCR clone 243978 (TRBV7-3, TRBJ2-3)
CASSLSGYRPEDTQYF

SEQ ID NO: 487957 - protein, 15 aa, Homo sapiens
  CDR3 for alpha chain variable domain of TCR clone 243979 (TRAV26-2, TRAJ28)
CILVESGAGSYQLTF

SEQ ID NO: 487958 - protein, 16 aa, Homo sapiens
  CDR3 for beta chain variable domain of TCR clone 243979 (TRBV4-2, TRBJ1-2)
CASSQEIGGASYCYTF

SEQ ID NO: 487959 - protein, 13 aa, Homo sapiens
  CDR3 for alpha chain variable domain of TCR clone 243980 (TRAV8-3, TRAJ37)
CAVPSSNTGKLIF

SEQ ID NO: 487960 - protein, 16 aa, Homo sapiens
  CDR3 for beta chain variable domain of TCR clone 243980 (TRBV11-2, TRBJ2-7)
CASSPTTGGVSYEQYF

SEQ ID NO: 487961 - protein, 16 aa, Homo sapiens
  CDR3 for alpha chain variable domain of TCR clone 243981 (TRAV30, TRAJ24)
CGTELVDADSWGKFQF

SEQ ID NO: 487962 - protein, 14 aa, Homo sapiens
  CDR3 for beta chain variable domain of TCR clone 243981 (TRBV12-5, TRBJ2-5)
CASGSRTRQETQYF

SEQ ID NO: 487963 - protein, 13 aa, Homo sapiens
  CDR3 for alpha chain variable domain of TCR clone 243982 (TRAV21, TRAJ57)
YAVIEGGAEKLVF

SEQ ID NO: 487964 - protein, 15 aa, Homo sapiens
  CDR3 for beta chain variable domain of TCR clone 243982 (TRBV10-3, TRBJ2-5)
CAISEFGRGQETQYF

SEQ ID NO: 487965 - protein, 13 aa, Homo sapiens
  CDR3 for alpha chain variable domain of TCR clone 243983 (TRAV8-4, TRAJ24)
CAVSGDSWGKFQF

SEQ ID NO: 487966 - protein, 14 aa, Homo sapiens
  CDR3 for beta chain variable domain of TCR clone 243983 (TRBV11-1, TRBJ2-7)
CARSFRQGSYEQYF

SEQ ID NO: 487967 - protein, 12 aa, Homo sapiens
  CDR3 for alpha chain variable domain of TCR clone 243984 (TRAV1-1, TRAJ39)
CAVPMVGNMLTF

SEQ ID NO: 487968 - protein, 13 aa, Homo sapiens
  CDR3 for beta chain variable domain of TCR clone 243984 (TRBV7-9, TRBJ2-1)
CASSSSNFNEQFF

SEQ ID NO: 487969 - protein, 17 aa, Homo sapiens
  CDR3 for alpha chain variable domain of TCR clone 243985 (TRAV3, TRAJ6)
CAVRDGPRAGGSYIPTF

SEQ ID NO: 487970 - protein, 16 aa, Homo sapiens
  CDR3 for beta chain variable domain of TCR clone 243985 (TRBV7-8, TRBJ2-3)
CASSTEGQRETDMQYF

SEQ ID NO: 487971 - protein, 16 aa, Homo sapiens
  CDR3 for alpha chain variable domain of TCR clone 243986 (TRAV13-2, TRAJ52)
CREPPTGGTSYGKLTF

SEQ ID NO: 487972 - protein, 15 aa, Homo sapiens
  CDR3 for beta chain variable domain of TCR clone 243986 (TRBV28, TRBJ2-7)
CASSQLGAGGHEQYF

SEQ ID NO: 487973 - protein, 14 aa, Homo sapiens
  CDR3 for alpha chain variable domain of TCR clone 243987 (TRAV12-2, TRAJ40)
CAVKIPSGTYKYIF

SEQ ID NO: 487974 - protein, 17 aa, Homo sapiens
  CDR3 for beta chain variable domain of TCR clone 243987 (TRBV11-2, TRBJ2-1)
CACSLYPPGVEYNEQFF

SEQ ID NO: 487975 - protein, 22 aa, Homo sapiens
  CDR3 for alpha chain variable domain of TCR clone 243988 (TRAV10, TRAJ6)
CVVSTQEEATYLHLEEEPALLF

SEQ ID NO: 487976 - protein, 12 aa, Homo sapiens
  CDR3 for beta chain variable domain of TCR clone 243988 (TRBV11-2, TRBJ2-2)
CASSLGGGELFF

SEQ ID NO: 487977 - protein, 12 aa, Homo sapiens
  CDR3 for alpha chain variable domain of TCR clone 243989 (TRAV12-3, TRAJ20)
CAMVIGDYKLSF

SEQ ID NO: 487978 - protein, 13 aa, Homo sapiens
  CDR3 for beta chain variable domain of TCR clone 243989 (TRBV23-1, TRBJ1-4)
CASRGKFNEKLFL

SEQ ID NO: 487979 - protein, 14 aa, Homo sapiens
  CDR3 for alpha chain variable domain of TCR clone 243990 (TRAV35, TRAJ13)
CAGRSPGGYQKVTF

SEQ ID NO: 487980 - protein, 15 aa, Homo sapiens
  CDR3 for beta chain variable domain of TCR clone 243990 (TRBV19, TRBJ2-4)
CASRGPRRGENIQYF

SEQ ID NO: 487981 - protein, 11 aa, Homo sapiens
  CDR3 for alpha chain variable domain of TCR clone 243991 (TRAV1-1, TRAJ23)
CSVRQGGKLIF

SEQ ID NO: 487982 - protein, 20 aa, Homo sapiens
  CDR3 for beta chain variable domain of TCR clone 243991 (TRBV7-8, TRBJ2-2)
WASSHFFPGPTIHITGELFF

SEQ ID NO: 487983 - protein, 15 aa, Homo sapiens
  CDR3 for alpha chain variable domain of TCR clone 243992 (TRAV8-2, TRAJ24)
CVVSDRTDSWGKLRF

SEQ ID NO: 487984 - protein, 11 aa, Homo sapiens
  CDR3 for beta chain variable domain of TCR clone 243992 (TRBV20-1, TRBJ1-2)
CSVQGAGGYTF

SEQ ID NO: 487985 - protein, 13 aa, Homo sapiens
  CDR3 for alpha chain variable domain of TCR clone 243993 (TRAV20, TRAJ54)
CAVQAGGAQKLVF

SEQ ID NO: 487986 - protein, 14 aa, Homo sapiens
  CDR3 for beta chain variable domain of TCR clone 243993 (TRBV7-6, TRBJ2-1)
CASSLGGGADEQFF

SEQ ID NO: 487987 - protein, 12 aa, Homo sapiens
  CDR3 for alpha chain variable domain of TCR clone 243994 (TRAV12-3, TRAJ17)
CAMTLTGNKLTL

SEQ ID NO: 487988 - protein, 15 aa, Homo sapiens
  CDR3 for beta chain variable domain of TCR clone 243994 (TRBV20-1, TRBJ2-7)
CSARDRVCGMDEQYF

SEQ ID NO: 487989 - protein, 14 aa, Homo sapiens
  CDR3 for alpha chain variable domain of TCR clone 243995 (TRAV12-3, TRAJ10)
SHLPLTGGGNKLTF

SEQ ID NO: 487990 - protein, 20 aa, Homo sapiens
  CDR3 for beta chain variable domain of TCR clone 243995 (TRBV19, TRBJ2-1)
CASSISRTVTSTRLNNEQFF

SEQ ID NO: 487991 - protein, 14 aa, Homo sapiens
  CDR3 for alpha chain variable domain of TCR clone 243996 (TRAV1-2, TRAJ16)
CAVNRFSGGQKLLF

SEQ ID NO: 487992 - protein, 15 aa, Homo sapiens
  CDR3 for beta chain variable domain of TCR clone 243996 (TRBV9, TRBJ1-6)
CASSVAGTGDSPLNF

SEQ ID NO: 487993 - protein, 14 aa, Homo sapiens
  CDR3 for alpha chain variable domain of TCR clone 243997 (TRAV12-3, TRAJ9)
CAMSGHTGGFKTIF

SEQ ID NO: 487994 - protein, 15 aa, Homo sapiens
  CDR3 for beta chain variable domain of TCR clone 243997 (TRBV7-2, TRBJ2-1)
CASSSGLAGGNEQFF

SEQ ID NO: 487995 - protein, 15 aa, Homo sapiens
  CDR3 for alpha chain variable domain of TCR clone 243998 (TRAV2, TRAJ13)
CATPSYSGGYQKVTF

SEQ ID NO: 487996 - protein, 13 aa, Homo sapiens
  CDR3 for beta chain variable domain of TCR clone 243998 (TRBV14, TRBJ1-5)
CASSQDRRGTQHF

SEQ ID NO: 487997 - protein, 15 aa, Homo sapiens
  CDR3 for alpha chain variable domain of TCR clone 243999 (TRAV8-3, TRAJ11)
CAVGLLNSGYSTLTF

SEQ ID NO: 487998 - protein, 12 aa, Homo sapiens
  CDR3 for beta chain variable domain of TCR clone 243999 (TRBV29-1, TRBJ2-3)
CSVTGGADTQYF

SEQ ID NO: 487999 - protein, 11 aa, Homo sapiens
  CDR3 for alpha chain variable domain of TCR clone 244000 (TRAV35, TRAJ30)
CDPGGDDKIIF

SEQ ID NO: 488000 - protein, 14 aa, Homo sapiens
  CDR3 for beta chain variable domain of TCR clone 244000 (TRBV7-6, TRBJ2-1)
CASSLGGGADEQFF

SEQ ID NO: 488001 - protein, 14 aa, Homo sapiens
  CDR3 for alpha chain variable domain of TCR clone 244001 (TRAV1-2, TRAJ8)
CAVREDTGFQKLVF

SEQ ID NO: 488002 - protein, 19 aa, Homo sapiens
  CDR3 for beta chain variable domain of TCR clone 244001 (TRBV2, TRBJ2-7)
CASSRGPNDQGLASYEQYF

SEQ ID NO: 488003 - protein, 14 aa, Homo sapiens
  CDR3 for alpha chain variable domain of TCR clone 244002 (TRAV13-1, TRAJ35)
CAAIKGGFGNVLHC

SEQ ID NO: 488004 - protein, 13 aa, Homo sapiens
  CDR3 for beta chain variable domain of TCR clone 244002 (TRBV7-3, TRBJ1-1)
CASSQDWGAEAFF

SEQ ID NO: 488005 - protein, 15 aa, Homo sapiens
  CDR3 for alpha chain variable domain of TCR clone 244003 (TRAV17, TRAJ57)
CATGPSQGGSEKLVF

SEQ ID NO: 488006 - protein, 16 aa, Homo sapiens
  CDR3 for beta chain variable domain of TCR clone 244003 (TRBV12-4, TRBJ1-5)
CASSRRVGGSNQPQQF

SEQ ID NO: 488007 - protein, 12 aa, Homo sapiens
  CDR3 for alpha chain variable domain of TCR clone 244004 (TRAV6, TRAJ40)
CARTSGNYKYIF

SEQ ID NO: 488008 - protein, 12 aa, Homo sapiens
  CDR3 for beta chain variable domain of TCR clone 244004 (TRBV27, TRBJ2-5)
CASSPTGETQYF

SEQ ID NO: 488009 - protein, 14 aa, Homo sapiens
  CDR3 for alpha chain variable domain of TCR clone 244005 (TRAV1-1, TRAJ28)
CAAPSGAGSYQLTF

SEQ ID NO: 488010 - protein, 13 aa, Homo sapiens
  CDR3 for beta chain variable domain of TCR clone 244005 (TRBV19, TRBJ2-7)
CASRKAGGSEQYF

SEQ ID NO: 488011 - protein, 14 aa, Homo sapiens
  CDR3 for alpha chain variable domain of TCR clone 244006 (TRAV1-2, TRAJ16)
CAVNRVSDGQKLLF

SEQ ID NO: 488012 - protein, 14 aa, Homo sapiens
  CDR3 for beta chain variable domain of TCR clone 244006 (TRBV7-3, TRBJ2-1)
CASSLAGGTNEQFL

SEQ ID NO: 488013 - protein, 13 aa, Homo sapiens
  CDR3 for alpha chain variable domain of TCR clone 244007 (TRAV3, TRAJ31)
CAVREGNNARLMF

SEQ ID NO: 488014 - protein, 14 aa, Homo sapiens
  CDR3 for beta chain variable domain of TCR clone 244007 (TRBV7-3, TRBJ2-1)
CASSLSGSYNEQFF

SEQ ID NO: 488015 - protein, 12 aa, Homo sapiens
  CDR3 for alpha chain variable domain of TCR clone 244008 (TRAV13-1, TRAJ27)
CAAHTNAGKSTF

SEQ ID NO: 488016 - protein, 14 aa, Homo sapiens
  CDR3 for beta chain variable domain of TCR clone 244008 (TRBV12-5, TRBJ2-5)
CASGTRTHQETQYF

SEQ ID NO: 488017 - protein, 16 aa, Homo sapiens
  CDR3 for alpha chain variable domain of TCR clone 244009 (TRAV12-2, TRAJ52)
CRLANAGGTSYGKLTF

SEQ ID NO: 488018 - protein, 15 aa, Homo sapiens
  CDR3 for beta chain variable domain of TCR clone 244009 (TRBV5-1, TRBJ2-3)
CASSYTSGSTDTQYF

SEQ ID NO: 488019 - protein, 16 aa, Homo sapiens
  CDR3 for alpha chain variable domain of TCR clone 244010 (TRAV1-2, TRAJ10)
CAVRGVLTGGGDKLTF

SEQ ID NO: 488020 - protein, 13 aa, Homo sapiens
  CDR3 for beta chain variable domain of TCR clone 244010 (TRBV20-1, TRBJ1-1)
CSAGTVGNTEAFF

SEQ ID NO: 488021 - protein, 14 aa, Homo sapiens
  CDR3 for alpha chain variable domain of TCR clone 244011 (TRAV38-1, TRAJ45)
CAYYSGGGADGLTF

SEQ ID NO: 488022 - protein, 12 aa, Homo sapiens
  CDR3 for beta chain variable domain of TCR clone 244011 (TRBV7-9, TRBJ1-1)
CASSLVRGEAFF

SEQ ID NO: 488023 - protein, 14 aa, Homo sapiens
  CDR3 for alpha chain variable domain of TCR clone 244012 (TRAV12-3, TRAJ10)
SHLPLTGGGNKLTF

SEQ ID NO: 488024 - protein, 14 aa, Homo sapiens
  CDR3 for beta chain variable domain of TCR clone 244012 (TRBV20-1, TRBJ1-1)
CSAQTRIGGTEAFS

SEQ ID NO: 488025 - protein, 14 aa, Homo sapiens
  CDR3 for alpha chain variable domain of TCR clone 244013 (TRAV26-1, TRAJ49)
CIVRLTNTGNQFHF

SEQ ID NO: 488026 - protein, 13 aa, Homo sapiens
  CDR3 for beta chain variable domain of TCR clone 244013 (TRBV10-1, TRBJ1-1)
CASQGQTNTEAFF

SEQ ID NO: 488027 - protein, 13 aa, Homo sapiens
  CDR3 for alpha chain variable domain of TCR clone 244014 (TRAV21, TRAJ27)
CAALNTMQANQPL

SEQ ID NO: 488028 - protein, 15 aa, Homo sapiens
  CDR3 for beta chain variable domain of TCR clone 244014 (TRBV20-1, TRBJ2-7)
CSARKGLAESYEQYF

SEQ ID NO: 488029 - protein, 14 aa, Homo sapiens
  CDR3 for alpha chain variable domain of TCR clone 244015 (TRAV13-1, TRAJ40)
FAARSTSGTYKYIF

SEQ ID NO: 488030 - protein, 15 aa, Homo sapiens
  CDR3 for beta chain variable domain of TCR clone 244015 (TRBV18, TRBJ1-5)
CASSETGGNNQPQHF

SEQ ID NO: 488031 - protein, 14 aa, Homo sapiens
  CDR3 for alpha chain variable domain of TCR clone 244016 (TRAV12-2, TRAJ15)
CAPHTGQAGTALIF

SEQ ID NO: 488032 - protein, 14 aa, Homo sapiens
  CDR3 for beta chain variable domain of TCR clone 244016 (TRBV5-1, TRBJ2-7)
CASSRGESLYEQYF

SEQ ID NO: 488033 - protein, 13 aa, Homo sapiens
  CDR3 for alpha chain variable domain of TCR clone 244017 (TRAV36/DV7, TRAJ38)
CVANAGNNRKLIW

SEQ ID NO: 488034 - protein, 15 aa, Homo sapiens
  CDR3 for beta chain variable domain of TCR clone 244017 (TRBV7-3, TRBJ2-3)
CASSLTSGETDTQYF

SEQ ID NO: 488035 - protein, 15 aa, Homo sapiens
  CDR3 for alpha chain variable domain of TCR clone 244018 (TRAV26-1, TRAJ23)
CFVRVAGYQGGKLIF

SEQ ID NO: 488036 - protein, 18 aa, Homo sapiens
  CDR3 for beta chain variable domain of TCR clone 244018 (TRBV28, TRBJ2-1)
CASSSTSGRANSYNEQFF

SEQ ID NO: 488037 - protein, 15 aa, Homo sapiens
  CDR3 for alpha chain variable domain of TCR clone 244019 (TRAV26-1, TRAJ29)
CIVRVEGSGNTPLVF

SEQ ID NO: 488038 - protein, 14 aa, Homo sapiens
  CDR3 for beta chain variable domain of TCR clone 244019 (TRBV18, TRBJ2-5)
CASSPGVSEETRYF

SEQ ID NO: 488039 - protein, 14 aa, Homo sapiens
  CDR3 for alpha chain variable domain of TCR clone 244020 (TRAV12-2, TRAJ17)
CAVLFKAAGNKLTF

SEQ ID NO: 488040 - protein, 15 aa, Homo sapiens
  CDR3 for beta chain variable domain of TCR clone 244020 (TRBV7-2, TRBJ1-2)
CASSPRAGWNYGYTF

SEQ ID NO: 488041 - protein, 12 aa, Homo sapiens
  CDR3 for alpha chain variable domain of TCR clone 244021 (TRAV12-1, TRAJ20)
CVVNPDDYKLSF

SEQ ID NO: 488042 - protein, 15 aa, Homo sapiens
  CDR3 for beta chain variable domain of TCR clone 244021 (TRBV5-7, TRBJ2-6)
CASSHQVSGANVLTF

SEQ ID NO: 488043 - protein, 16 aa, Homo sapiens
  CDR3 for alpha chain variable domain of TCR clone 244022 (TRAV3, TRAJ42)
CAVRDIEGGSQGNLIF

SEQ ID NO: 488044 - protein, 15 aa, Homo sapiens
  CDR3 for beta chain variable domain of TCR clone 244022 (TRBV9, TRBJ2-2)
CAGSDFAGASGELFF

SEQ ID NO: 488045 - protein, 16 aa, Homo sapiens
  CDR3 for alpha chain variable domain of TCR clone 244023 (TRAV12-2, TRAJ6)
CAAPLAGSGGSYIPTF

SEQ ID NO: 488046 - protein, 10 aa, Homo sapiens
  CDR3 for beta chain variable domain of TCR clone 244023 (TRBV28, TRBJ1-2)
CASSSDRSVF

SEQ ID NO: 488047 - protein, 13 aa, Homo sapiens
  CDR3 for alpha chain variable domain of TCR clone 244024 (TRAV29/DV5, TRAJ44)
CAASTGTASKLTF

SEQ ID NO: 488048 - protein, 13 aa, Homo sapiens
  CDR3 for beta chain variable domain of TCR clone 244024 (TRBV19, TRBJ1-2)
CASSVPGQDGDTF

SEQ ID NO: 488049 - protein, 14 aa, Homo sapiens
  CDR3 for alpha chain variable domain of TCR clone 244025 (TRAV2, TRAJ9)
CAVEDRSGGFKTIF

SEQ ID NO: 488050 - protein, 14 aa, Homo sapiens
  CDR3 for beta chain variable domain of TCR clone 244025 (TRBV28, TRBJ2-7)
CASTCYGRAHEQYF

SEQ ID NO: 488051 - protein, 14 aa, Homo sapiens
  CDR3 for alpha chain variable domain of TCR clone 244026 (TRAV12-2, TRAJ13)
CAVKKAGGYQKVTF

SEQ ID NO: 488052 - protein, 15 aa, Homo sapiens
  CDR3 for beta chain variable domain of TCR clone 244026 (TRBV6-3, TRBJ2-7)
CASSSPGTVFYEQYF

SEQ ID NO: 488053 - protein, 21 aa, Homo sapiens
  CDR3 for alpha chain variable domain of TCR clone 244027 (TRAV8-3, TRAJ10)
CAVGHTHGRRKQTHLWERHSA

SEQ ID NO: 488054 - protein, 10 aa, Homo sapiens
  CDR3 for beta chain variable domain of TCR clone 244027 (TRBV20-1, TRBJ2-5)
CSARFETQYF

SEQ ID NO: 488055 - protein, 17 aa, Homo sapiens
  CDR3 for alpha chain variable domain of TCR clone 244028 (TRAV3, TRAJ12)
CAVRDGGRMDSSYKLIF

SEQ ID NO: 488056 - protein, 14 aa, Homo sapiens
  CDR3 for beta chain variable domain of TCR clone 244028 (TRBV7-9, TRBJ1-2)
CASSRQGANNGYTF

SEQ ID NO: 488057 - protein, 16 aa, Homo sapiens
  CDR3 for alpha chain variable domain of TCR clone 244029 (TRAV3, TRAJ8)
CAVRDYPNTGFQKLVF

SEQ ID NO: 488058 - protein, 13 aa, Homo sapiens
  CDR3 for beta chain variable domain of TCR clone 244029 (TRBV7-9, TRBJ1-2)
CASSLKQNYGYTF

SEQ ID NO: 488059 - protein, 15 aa, Homo sapiens
  CDR3 for alpha chain variable domain of TCR clone 244030 (TRAV26-1, TRAJ40)
RIVRVTTSGTYKSIF

SEQ ID NO: 488060 - protein, 12 aa, Homo sapiens
  CDR3 for beta chain variable domain of TCR clone 244030 (TRBV7-9, TRBJ1-4)
CASSTDREKLFF

SEQ ID NO: 488061 - protein, 17 aa, Homo sapiens
  CDR3 for alpha chain variable domain of TCR clone 244031 (TRAV3, TRAJ42)
CAVRDRAYGGSQGNLIF

SEQ ID NO: 488062 - protein, 14 aa, Homo sapiens
  CDR3 for beta chain variable domain of TCR clone 244031 (TRBV19, TRBJ2-2)
CTSSGQGIAGELFF

SEQ ID NO: 488063 - protein, 16 aa, Homo sapiens
  CDR3 for alpha chain variable domain of TCR clone 244032 (TRAV30, TRAJ24)
CGTEIVDADSWGKFEF

SEQ ID NO: 488064 - protein, 13 aa, Homo sapiens
  CDR3 for beta chain variable domain of TCR clone 244032 (TRBV12-4, TRBJ2-7)
CASSPTETYEQYF

SEQ ID NO: 488065 - protein, 18 aa, Homo sapiens
  CDR3 for alpha chain variable domain of TCR clone 244033 (TRAV26-2, TRAJ54)
CILRDVEVGIQGAQKLVF

SEQ ID NO: 488066 - protein, 14 aa, Homo sapiens
  CDR3 for beta chain variable domain of TCR clone 244033 (TRBV7-2, TRBJ2-7)
CASSPETSFYEQYF

SEQ ID NO: 488067 - protein, 12 aa, Homo sapiens
  CDR3 for alpha chain variable domain of TCR clone 244034 (TRAV3, TRAJ26)
CAVRDYGQKFVF

SEQ ID NO: 488068 - protein, 16 aa, Homo sapiens
  CDR3 for beta chain variable domain of TCR clone 244034 (TRBV11-2, TRBJ1-2)
SASSPSGREANYGYTF

SEQ ID NO: 488069 - protein, 19 aa, Homo sapiens
  CDR3 for alpha chain variable domain of TCR clone 244035 (TRAV26-1, TRAJ52)
CIVRAHRNAGGTSYRKLTF

SEQ ID NO: 488070 - protein, 15 aa, Homo sapiens
  CDR3 for beta chain variable domain of TCR clone 244035 (TRBV12-4, TRBJ2-5)
CASSPPTGLQETQYF

SEQ ID NO: 488071 - protein, 14 aa, Homo sapiens
  CDR3 for alpha chain variable domain of TCR clone 244036 (TRAV38-1, TRAJ40)
CALRPTSGTYKYIF

SEQ ID NO: 488072 - protein, 15 aa, Homo sapiens
  CDR3 for beta chain variable domain of TCR clone 244036 (TRBV6-1, TRBJ2-3)
CASSERGGITDTQYF

SEQ ID NO: 488073 - protein, 20 aa, Homo sapiens
  CDR3 for alpha chain variable domain of TCR clone 244037 (TRAV21, TRAJ4)
AASQPGDSATLAGGYNKLIF

SEQ ID NO: 488074 - protein, 19 aa, Homo sapiens
  CDR3 for beta chain variable domain of TCR clone 244037 (TRBV18, TRBJ1-3)
CASSPLSRTGMSSGNSIYF

SEQ ID NO: 488075 - protein, 16 aa, Homo sapiens
  CDR3 for alpha chain variable domain of TCR clone 244038 (TRAV3, TRAJ37)
CAVRGKGSGNTGKLIF

SEQ ID NO: 488076 - protein, 13 aa, Homo sapiens
  CDR3 for beta chain variable domain of TCR clone 244038 (TRBV14, TRBJ2-7)
FASSQDRRYERYF

SEQ ID NO: 488077 - protein, 13 aa, Homo sapiens
  CDR3 for alpha chain variable domain of TCR clone 244039 (TRAV27, TRAJ45)
CRSSGGGADGLTF

SEQ ID NO: 488078 - protein, 15 aa, Homo sapiens
  CDR3 for beta chain variable domain of TCR clone 244039 (TRBV9, TRBJ2-2)
CASSDFAGVSGELFF

SEQ ID NO: 488079 - protein, 14 aa, Homo sapiens
  CDR3 for alpha chain variable domain of TCR clone 244040 (TRAV20, TRAJ29)
CAVQAWVGNTPLVF

SEQ ID NO: 488080 - protein, 15 aa, Homo sapiens
  CDR3 for beta chain variable domain of TCR clone 244040 (TRBV29-1, TRBJ2-7)
FSVEFFDRGSYEQYF

SEQ ID NO: 488081 - protein, 17 aa, Homo sapiens
  CDR3 for alpha chain variable domain of TCR clone 244041 (TRAV3, TRAJ6)
CAVRDGPRARGGYIPTF

SEQ ID NO: 488082 - protein, 14 aa, Homo sapiens
  CDR3 for beta chain variable domain of TCR clone 244041 (TRBV7-2, TRBJ2-7)
CASSPKTSFYEQYF

SEQ ID NO: 488083 - protein, 14 aa, Homo sapiens
  CDR3 for alpha chain variable domain of TCR clone 244042 (TRAV23/DV6, TRAJ17)
CAASVQAAGNKLTF

SEQ ID NO: 488084 - protein, 16 aa, Homo sapiens
  CDR3 for beta chain variable domain of TCR clone 244042 (TRBV11-2, TRBJ1-1)
CASSLRQGGEHSKAFF

SEQ ID NO: 488085 - protein, 17 aa, Homo sapiens
  CDR3 for alpha chain variable domain of TCR clone 244043 (TRAV3, TRAJ12)
CAVRDGGRMDSSYKLIF

SEQ ID NO: 488086 - protein, 15 aa, Homo sapiens
  CDR3 for beta chain variable domain of TCR clone 244043 (TRBV4-1, TRBJ2-5)
CASSQWDLYQETQYF

SEQ ID NO: 488087 - protein, 13 aa, Homo sapiens
  CDR3 for alpha chain variable domain of TCR clone 244044 (TRAV38-2/DV8, TRAJ34)
CAYRTWNTDKLIF

SEQ ID NO: 488088 - protein, 18 aa, Homo sapiens
  CDR3 for beta chain variable domain of TCR clone 244044 (TRBV6-6, TRBJ1-3)
CVSSYSKWDSISGNTIYF

SEQ ID NO: 488089 - protein, 11 aa, Homo sapiens
  CDR3 for alpha chain variable domain of TCR clone 244045 (TRAV12-3, TRAJ27)
CAMAHAGKSTF

SEQ ID NO: 488090 - protein, 13 aa, Homo sapiens
  CDR3 for beta chain variable domain of TCR clone 244045 (TRBV20-1, TRBJ1-1)
CSARVGGNTEAFF

SEQ ID NO: 488091 - protein, 13 aa, Homo sapiens
  CDR3 for alpha chain variable domain of TCR clone 244046 (TRAV26-1, )
CIVSHRVEGFWNQ

SEQ ID NO: 488092 - protein, 14 aa, Homo sapiens
  CDR3 for beta chain variable domain of TCR clone 244046 (TRBV20-1, TRBJ2-7)
CSAWAALSSYEQYF

SEQ ID NO: 488093 - protein, 10 aa, Homo sapiens
  CDR3 for alpha chain variable domain of TCR clone 244047 (TRAV1-2, TRAJ20)
CALNDYKLSF

SEQ ID NO: 488094 - protein, 14 aa, Homo sapiens
  CDR3 for beta chain variable domain of TCR clone 244047 (TRBV18, TRBJ2-5)
CASSPGVSQETQYF

SEQ ID NO: 488095 - protein, 15 aa, Homo sapiens
  CDR3 for alpha chain variable domain of TCR clone 244048 (TRAV8-4, TRAJ37)
CAVSTRSGNTGKLIF

SEQ ID NO: 488096 - protein, 16 aa, Homo sapiens
  CDR3 for beta chain variable domain of TCR clone 244048 (TRBV4-2, TRBJ2-3)
CASSQELAGDTDTQYF

SEQ ID NO: 488097 - protein, 14 aa, Homo sapiens
  CDR3 for alpha chain variable domain of TCR clone 244049 (TRAV17, TRAJ45)
CATASGGGADGLTF

SEQ ID NO: 488098 - protein, 14 aa, Homo sapiens
  CDR3 for beta chain variable domain of TCR clone 244049 (TRBV20-1, TRBJ2-1)
CSAQIGGSANEQFF

SEQ ID NO: 488099 - protein, 13 aa, Homo sapiens
  CDR3 for alpha chain variable domain of TCR clone 244050 (TRAV8-3, TRAJ48)
CCGCHFGNEKLTF

SEQ ID NO: 488100 - protein, 12 aa, Homo sapiens
  CDR3 for beta chain variable domain of TCR clone 244050 (TRBV7-2, TRBJ2-5)
CASSQYQETQYF

SEQ ID NO: 488101 - protein, 17 aa, Homo sapiens
  CDR3 for alpha chain variable domain of TCR clone 244051 (TRAV17, TRAJ28)
CATDPRRGGAGSYQLTF

SEQ ID NO: 488102 - protein, 16 aa, Homo sapiens
  CDR3 for beta chain variable domain of TCR clone 244051 (TRBV25-1, TRBJ1-1)
CASSVDRDRGRIEAFF

SEQ ID NO: 488103 - protein, 12 aa, Homo sapiens
  CDR3 for alpha chain variable domain of TCR clone 244052 (TRAV12-3, TRAJ20)
CAMVRGDYKLSF

SEQ ID NO: 488104 - protein, 16 aa, Homo sapiens
  CDR3 for beta chain variable domain of TCR clone 244052 (TRBV12-4, TRBJ1-5)
CASIRPVGGSNQPQHF

SEQ ID NO: 488105 - protein, 15 aa, Homo sapiens
  CDR3 for alpha chain variable domain of TCR clone 244053 (TRAV35, TRAJ58)
CAWRRQETSGYRLTF

SEQ ID NO: 488106 - protein, 11 aa, Homo sapiens
  CDR3 for beta chain variable domain of TCR clone 244053 (TRBV11-2, TRBJ1-1)
CASSINTEAFF

SEQ ID NO: 488107 - protein, 17 aa, Homo sapiens
  CDR3 for alpha chain variable domain of TCR clone 244054 (TRAV3, TRAJ28)
CAVREAYSGAGSYQITF

SEQ ID NO: 488108 - protein, 15 aa, Homo sapiens
  CDR3 for beta chain variable domain of TCR clone 244054 (TRBV4-1, TRBJ2-5)
CASSQWDLYQETQYF

SEQ ID NO: 488109 - protein, 15 aa, Homo sapiens
  CDR3 for alpha chain variable domain of TCR clone 244055 (TRAV14/DV4, TRAJ12)
CAMREERDSSYKLIF

SEQ ID NO: 488110 - protein, 16 aa, Homo sapiens
  CDR3 for beta chain variable domain of TCR clone 244055 (TRBV20-1, TRBJ2-3)
CSAVRDRGPIADTQYF

SEQ ID NO: 488111 - protein, 17 aa, Homo sapiens
  CDR3 for alpha chain variable domain of TCR clone 244056 (TRAV4, TRAJ18)
CLVGERSVGSTLGRLYF

SEQ ID NO: 488112 - protein, 15 aa, Homo sapiens
  CDR3 for beta chain variable domain of TCR clone 244056 (TRBV9, TRBJ1-6)
CASSVAGTGDSTLHF

SEQ ID NO: 488113 - protein, 17 aa, Homo sapiens
  CDR3 for alpha chain variable domain of TCR clone 244057 (TRAV13-1, TRAJ52)
CAASSGAAGTSYGKLTF

SEQ ID NO: 488114 - protein, 15 aa, Homo sapiens
  CDR3 for beta chain variable domain of TCR clone 244057 (TRBV2, TRBJ2-1)
CASSELAGSYNEQFF

SEQ ID NO: 488115 - protein, 15 aa, Homo sapiens
  CDR3 for alpha chain variable domain of TCR clone 244058 (TRAV12-1, TRAJ9)
CVVSFGDTGGFKTIF

SEQ ID NO: 488116 - protein, 13 aa, Homo sapiens
  CDR3 for beta chain variable domain of TCR clone 244058 (TRBV9, TRBJ2-1)
CASSVGQGGEQFF

SEQ ID NO: 488117 - protein, 14 aa, Homo sapiens
  CDR3 for alpha chain variable domain of TCR clone 244059 (TRAV26-1, TRAJ48)
CIVRVGFGNEKLTF

SEQ ID NO: 488118 - protein, 15 aa, Homo sapiens
  CDR3 for beta chain variable domain of TCR clone 244059 (TRBV7-2, TRBJ2-3)
CASSSTGLETDTQYF

SEQ ID NO: 488119 - protein, 14 aa, Homo sapiens
  CDR3 for alpha chain variable domain of TCR clone 244060 (TRAV29/DV5, TRAJ36)
CAARRKTGANNPFF

SEQ ID NO: 488120 - protein, 12 aa, Homo sapiens
  CDR3 for beta chain variable domain of TCR clone 244060 (TRBV11-2, TRBJ2-2)
CASSLGGGELFF

SEQ ID NO: 488121 - protein, 16 aa, Homo sapiens
  CDR3 for alpha chain variable domain of TCR clone 244061 (TRAV12-3, TRAJ53)
CAMSPGSGGSNYKLTF

SEQ ID NO: 488122 - protein, 14 aa, Homo sapiens
  CDR3 for beta chain variable domain of TCR clone 244061 (TRBV7-8, TRBJ2-7)
CASSPRDRVYEQYF

SEQ ID NO: 488123 - protein, 14 aa, Homo sapiens
  CDR3 for alpha chain variable domain of TCR clone 244062 (TRAV1-2, TRAJ16)
CAANRFSDGQKLLF

SEQ ID NO: 488124 - protein, 12 aa, Homo sapiens
  CDR3 for beta chain variable domain of TCR clone 244062 (TRBV11-2, TRBJ2-2)
CASSLGGGELFF

SEQ ID NO: 488125 - protein, 15 aa, Homo sapiens
  CDR3 for alpha chain variable domain of TCR clone 244063 (TRAV26-1, TRAJ52)
FIVGEGGPSYGKLTF

SEQ ID NO: 488126 - protein, 16 aa, Homo sapiens
  CDR3 for beta chain variable domain of TCR clone 244063 (TRBV6-5, TRBJ2-7)
CASSSLAGTFSYEQYF

SEQ ID NO: 488127 - protein, 11 aa, Homo sapiens
  CDR3 for alpha chain variable domain of TCR clone 244064 (TRAV2, TRAJ21)
CAVVNFNKFYF

SEQ ID NO: 488128 - protein, 14 aa, Homo sapiens
  CDR3 for beta chain variable domain of TCR clone 244064 (TRBV15, TRBJ2-3)
CATRSGTSTDTQHF

SEQ ID NO: 488129 - protein, 14 aa, Homo sapiens
  CDR3 for alpha chain variable domain of TCR clone 244065 (TRAV2, TRAJ37)
CDVDFTSNTGKLIF

SEQ ID NO: 488130 - protein, 15 aa, Homo sapiens
  CDR3 for beta chain variable domain of TCR clone 244065 (TRBV20-1, TRBJ1-1)
CNASRGVTGNTEAFF

SEQ ID NO: 488131 - protein, 17 aa, Homo sapiens
  CDR3 for alpha chain variable domain of TCR clone 244066 (TRAV3, TRAJ6)
RAVRDGPRAGGSYIPPF

SEQ ID NO: 488132 - protein, 14 aa, Homo sapiens
  CDR3 for beta chain variable domain of TCR clone 244066 (TRBV7-2, TRBJ2-7)
CASSPKTSFYEQYF

SEQ ID NO: 488133 - protein, 15 aa, Homo sapiens
  CDR3 for alpha chain variable domain of TCR clone 244067 (TRAV8-6, TRAJ8)
CAVRDWNTGFQKLVF

SEQ ID NO: 488134 - protein, 13 aa, Homo sapiens
  CDR3 for beta chain variable domain of TCR clone 244067 (TRBV19, TRBJ1-2)
CASSQGQVYGYTF

SEQ ID NO: 488135 - protein, 16 aa, Homo sapiens
  CDR3 for alpha chain variable domain of TCR clone 244068 (TRAV17, TRAJ54)
CATDSDIIQGAQKLVF

SEQ ID NO: 488136 - protein, 14 aa, Homo sapiens
  CDR3 for beta chain variable domain of TCR clone 244068 (TRBV25-1, TRBJ1-1)
CASTHLGGNTEAFF

SEQ ID NO: 488137 - protein, 14 aa, Homo sapiens
  CDR3 for alpha chain variable domain of TCR clone 244069 (TRAV17, TRAJ57)
CATDPQGGSEKLVF

SEQ ID NO: 488138 - protein, 13 aa, Homo sapiens
  CDR3 for beta chain variable domain of TCR clone 244069 (TRBV20-1, TRBJ1-1)
CSAPLGGGAEAFF

SEQ ID NO: 488139 - protein, 16 aa, Homo sapiens
  CDR3 for alpha chain variable domain of TCR clone 244070 (TRAV30, TRAJ44)
CGTEDKRTGTASKITF

SEQ ID NO: 488140 - protein, 16 aa, Homo sapiens
  CDR3 for beta chain variable domain of TCR clone 244070 (TRBV10-2, TRBJ2-7)
CASSESPGSSGCEQYF

SEQ ID NO: 488141 - protein, 12 aa, Homo sapiens
  CDR3 for alpha chain variable domain of TCR clone 244071 (TRAV21, TRAJ22)
CAVSGSARQLTF

SEQ ID NO: 488142 - protein, 14 aa, Homo sapiens
  CDR3 for beta chain variable domain of TCR clone 244071 (TRBV25-1, TRBJ1-1)
CASTHLGGNTEAFF

SEQ ID NO: 488143 - protein, 17 aa, Homo sapiens
  CDR3 for alpha chain variable domain of TCR clone 244072 (TRAV23/DV6, TRAJ58)
CAARLLRGETSGSRLTF

SEQ ID NO: 488144 - protein, 11 aa, Homo sapiens
  CDR3 for beta chain variable domain of TCR clone 244072 (TRBV7-8, TRBJ2-7)
CASSLSLEQYF

SEQ ID NO: 488145 - protein, 13 aa, Homo sapiens
  CDR3 for alpha chain variable domain of TCR clone 244073 (TRAV12-2, TRAJ15)
CAVFNQAGTALIF

SEQ ID NO: 488146 - protein, 15 aa, Homo sapiens
  CDR3 for beta chain variable domain of TCR clone 244073 (TRBV7-8, TRBJ1-5)
CASSRGGSADQPHHF

SEQ ID NO: 488147 - protein, 15 aa, Homo sapiens
  CDR3 for alpha chain variable domain of TCR clone 244074 (TRAV2, TRAJ11)
CAVGGRNSGYSTLTL

SEQ ID NO: 488148 - protein, 14 aa, Homo sapiens
  CDR3 for beta chain variable domain of TCR clone 244074 (TRBV4-1, TRBJ2-2)
CASSQAVNTGELFF

SEQ ID NO: 488149 - protein, 15 aa, Homo sapiens
  CDR3 for alpha chain variable domain of TCR clone 244075 (TRAV3, TRAJ5)
CAERGLDTGRRALTF

SEQ ID NO: 488150 - protein, 13 aa, Homo sapiens
  CDR3 for beta chain variable domain of TCR clone 244075 (TRBV24-1, TRBJ2-2)
CATSDWSTGELFF

SEQ ID NO: 488151 - protein, 13 aa, Homo sapiens
  CDR3 for alpha chain variable domain of TCR clone 244076 (TRAV3, TRAJ41)
CAVSSNSGYALNF

SEQ ID NO: 488152 - protein, 14 aa, Homo sapiens
  CDR3 for beta chain variable domain of TCR clone 244076 (TRBV7-9, TRBJ2-1)
CASSQGQAEAEQFF

SEQ ID NO: 488153 - protein, 15 aa, Homo sapiens
  CDR3 for alpha chain variable domain of TCR clone 244077 (TRAV21, TRAJ53)
CATLNSGGSNYKLTF

SEQ ID NO: 488154 - protein, 16 aa, Homo sapiens
  CDR3 for beta chain variable domain of TCR clone 244077 (TRBV20-1, TRBJ1-2)
CSASMGQGVANYDYAF

SEQ ID NO: 488155 - protein, 14 aa, Homo sapiens
  CDR3 for alpha chain variable domain of TCR clone 244078 (TRAV26-1, TRAJ21)
CIVRVVYNFNKFYF

SEQ ID NO: 488156 - protein, 11 aa, Homo sapiens
  CDR3 for beta chain variable domain of TCR clone 244078 (TRBV5-6, TRBJ2-5)
CASSLERNQYF

SEQ ID NO: 488157 - protein, 14 aa, Homo sapiens
  CDR3 for alpha chain variable domain of TCR clone 244079 (TRAV29/DV5, TRAJ36)
CAARRKTEANNLFF

SEQ ID NO: 488158 - protein, 15 aa, Homo sapiens
  CDR3 for beta chain variable domain of TCR clone 244079 (TRBV9, TRBJ1-6)
CASSVAGTGDSPLHF

SEQ ID NO: 488159 - protein, 13 aa, Homo sapiens
  CDR3 for alpha chain variable domain of TCR clone 244080 (TRAV27, TRAJ41)
CAGEGNSGYALNF

SEQ ID NO: 488160 - protein, 14 aa, Homo sapiens
  CDR3 for beta chain variable domain of TCR clone 244080 (TRBV19, TRBJ2-1)
CASSMGSGATEQFF

SEQ ID NO: 488161 - protein, 16 aa, Homo sapiens
  CDR3 for alpha chain variable domain of TCR clone 244081 (TRAV30, TRAJ24)
CGTEIVDADRWGKFQF

SEQ ID NO: 488162 - protein, 14 aa, Homo sapiens
  CDR3 for beta chain variable domain of TCR clone 244081 (TRBV12-5, TRBJ2-5)
CAGGARTHQETQYF

SEQ ID NO: 488163 - protein, 20 aa, Homo sapiens
  CDR3 for alpha chain variable domain of TCR clone 244082 (TRAV26-2, TRAJ39)
CCVLLLPESAFYNAGNMLTF

SEQ ID NO: 488164 - protein, 14 aa, Homo sapiens
  CDR3 for beta chain variable domain of TCR clone 244082 (TRBV12-4, TRBJ1-4)
CASRMTGRSEKLFF

SEQ ID NO: 488165 - protein, 14 aa, Homo sapiens
  CDR3 for alpha chain variable domain of TCR clone 244083 (TRAV22, TRAJ6)
CAGVGPGGSYIPTF

SEQ ID NO: 488166 - protein, 14 aa, Homo sapiens
  CDR3 for beta chain variable domain of TCR clone 244083 (TRBV9, TRBJ2-7)
CASSVGVGSCEQYF

SEQ ID NO: 488167 - protein, 16 aa, Homo sapiens
  CDR3 for alpha chain variable domain of TCR clone 244084 (TRAV3, TRAJ10)
CAVRDMRAGGGNKLTF

SEQ ID NO: 488168 - protein, 15 aa, Homo sapiens
  CDR3 for beta chain variable domain of TCR clone 244084 (TRBV28, TRBJ1-2)
CASSSYRGLVYGYTF

SEQ ID NO: 488169 - protein, 15 aa, Homo sapiens
  CDR3 for alpha chain variable domain of TCR clone 244085 (TRAV12-3, TRAJ6)
CAMIAASGGSYIPTF

SEQ ID NO: 488170 - protein, 13 aa, Homo sapiens
  CDR3 for beta chain variable domain of TCR clone 244085 (TRBV20-1, TRBJ1-2)
CSASTERIYGYTF

SEQ ID NO: 488171 - protein, 12 aa, Homo sapiens
  CDR3 for alpha chain variable domain of TCR clone 244086 (TRAV1-2, TRAJ29)
CAVPSGNTPLVF

SEQ ID NO: 488172 - protein, 14 aa, Homo sapiens
  CDR3 for beta chain variable domain of TCR clone 244086 (TRBV4-2, TRBJ1-5)
CASSRDRGNQPQHF

SEQ ID NO: 488173 - protein, 13 aa, Homo sapiens
  CDR3 for alpha chain variable domain of TCR clone 244087 (TRAV8-6, TRAJ50)
CAVIKTSYDKVIF

SEQ ID NO: 488174 - protein, 15 aa, Homo sapiens
  CDR3 for beta chain variable domain of TCR clone 244087 (TRBV20-1, TRBJ2-3)
CSATGTSGFTDTQYF

SEQ ID NO: 488175 - protein, 13 aa, Homo sapiens
  CDR3 for alpha chain variable domain of TCR clone 244088 (TRAV13-1, TRAJ39)
CSKYSNAGNMLTF

SEQ ID NO: 488176 - protein, 13 aa, Homo sapiens
  CDR3 for beta chain variable domain of TCR clone 244088 (TRBV7-9, TRBJ1-2)
CASSLKQNYGYSF

SEQ ID NO: 488177 - protein, 15 aa, Homo sapiens
  CDR3 for alpha chain variable domain of TCR clone 244089 (TRAV4, TRAJ26)
CLVWGLDNYGQNCVF

SEQ ID NO: 488178 - protein, 13 aa, Homo sapiens
  CDR3 for beta chain variable domain of TCR clone 244089 (TRBV20-1, TRBJ2-5)
CSASLTGRETQYC

SEQ ID NO: 488179 - protein, 14 aa, Homo sapiens
  CDR3 for alpha chain variable domain of TCR clone 244090 (TRAV27, TRAJ15)
CAGFDNQAGTALIF

SEQ ID NO: 488180 - protein, 13 aa, Homo sapiens
  CDR3 for beta chain variable domain of TCR clone 244090 (TRBV19, TRBJ1-2)
CASSVPGQDGYTF

SEQ ID NO: 488181 - protein, 12 aa, Homo sapiens
  CDR3 for alpha chain variable domain of TCR clone 244091 (TRAV21, TRAJ49)
FAVNDGGNQFYF

SEQ ID NO: 488182 - protein, 14 aa, Homo sapiens
  CDR3 for beta chain variable domain of TCR clone 244091 (TRBV12-5, TRBJ2-5)
CASGSRTHQETQYF

SEQ ID NO: 488183 - protein, 11 aa, Homo sapiens
  CDR3 for alpha chain variable domain of TCR clone 244092 (TRAV1-1, TRAJ30)
CAQNRDDKIIF

SEQ ID NO: 488184 - protein, 14 aa, Homo sapiens
  CDR3 for beta chain variable domain of TCR clone 244092 (TRBV7-8, TRBJ2-7)
CASSPGLADYEQYI

SEQ ID NO: 488185 - protein, 14 aa, Homo sapiens
  CDR3 for alpha chain variable domain of TCR clone 244093 (TRAV26-1, TRAJ57)
CIRAGQGGSERLVF

SEQ ID NO: 488186 - protein, 13 aa, Homo sapiens
  CDR3 for beta chain variable domain of TCR clone 244093 (TRBV19, TRBJ2-7)
CASSLTTSYEQYF

SEQ ID NO: 488187 - protein, 14 aa, Homo sapiens
  CDR3 for alpha chain variable domain of TCR clone 244094 (TRAV12-2, TRAJ9)
CAVNMEGGGFKTIF

SEQ ID NO: 488188 - protein, 12 aa, Homo sapiens
  CDR3 for beta chain variable domain of TCR clone 244094 (TRBV12-4, TRBJ2-7)
CASSLGGYEQYF

SEQ ID NO: 488189 - protein, 11 aa, Homo sapiens
  CDR3 for alpha chain variable domain of TCR clone 244095 (TRAV1-2, TRAJ40)
CAVPGTYKYIF

SEQ ID NO: 488190 - protein, 14 aa, Homo sapiens
  CDR3 for beta chain variable domain of TCR clone 244095 (TRBV9, TRBJ2-7)
CASSPLRAVGEQYF

SEQ ID NO: 488191 - protein, 13 aa, Homo sapiens
  CDR3 for alpha chain variable domain of TCR clone 244096 (TRAV30, TRAJ24)
CGTVTDSWGKLQF

SEQ ID NO: 488192 - protein, 16 aa, Homo sapiens
  CDR3 for beta chain variable domain of TCR clone 244096 (TRBV12-4, TRBJ1-5)
CASSRPVGGSNQPQHF

SEQ ID NO: 488193 - protein, 15 aa, Homo sapiens
  CDR3 for alpha chain variable domain of TCR clone 244097 (TRAV27, TRAJ38)
CAARRNAGNNRKLIW

SEQ ID NO: 488194 - protein, 15 aa, Homo sapiens
  CDR3 for beta chain variable domain of TCR clone 244097 (TRBV5-1, TRBJ2-1)
CASSPPRGPYNEQFF

SEQ ID NO: 488195 - protein, 17 aa, Homo sapiens
  CDR3 for alpha chain variable domain of TCR clone 244098 (TRAV26-1, TRAJ40)
CIVRAVPSGTYKYILEQ

SEQ ID NO: 488196 - protein, 15 aa, Homo sapiens
  CDR3 for beta chain variable domain of TCR clone 244098 (TRBV20-1, TRBJ2-7)
CSARDRVSGMDEQYF

SEQ ID NO: 488197 - protein, 15 aa, Homo sapiens
  CDR3 for alpha chain variable domain of TCR clone 244099 (TRAV17, TRAJ16)
CATALRFLDGQKLLF

SEQ ID NO: 488198 - protein, 12 aa, Homo sapiens
  CDR3 for beta chain variable domain of TCR clone 244099 (TRBV2, TRBJ2-7)
CASSDPDYEQYF

SEQ ID NO: 488199 - protein, 11 aa, Homo sapiens
  CDR3 for alpha chain variable domain of TCR clone 244100 (TRAV21, TRAJ34)
CAVSNTDKLIF

SEQ ID NO: 488200 - protein, 12 aa, Homo sapiens
  CDR3 for beta chain variable domain of TCR clone 244100 (TRBV11-2, TRBJ2-2)
CASSLGGGELFF

SEQ ID NO: 488201 - protein, 14 aa, Homo sapiens
  CDR3 for alpha chain variable domain of TCR clone 244101 (TRAV23/DV6, TRAJ8)
CAASKATGFQKLAC

SEQ ID NO: 488202 - protein, 15 aa, Homo sapiens
  CDR3 for beta chain variable domain of TCR clone 244101 (TRBV28, TRBJ2-3)
CASSPERQGANTQYF

SEQ ID NO: 488203 - protein, 12 aa, Homo sapiens
  CDR3 for alpha chain variable domain of TCR clone 244102 (TRAV12-3, TRAJ17)
CAMTLTGNKLTF

SEQ ID NO: 488204 - protein, 15 aa, Homo sapiens
  CDR3 for beta chain variable domain of TCR clone 244102 (TRBV20-1, TRBJ2-7)
GSARDRGSGMDEQFF

SEQ ID NO: 488205 - protein, 12 aa, Homo sapiens
  CDR3 for alpha chain variable domain of TCR clone 244103 (TRAV12-1, TRAJ31)
RVSWNNNARLMF

SEQ ID NO: 488206 - protein, 15 aa, Homo sapiens
  CDR3 for beta chain variable domain of TCR clone 244103 (TRBV7-2, TRBJ1-5)
CASSLDRGQDQPQHF

SEQ ID NO: 488207 - protein, 13 aa, Homo sapiens
  CDR3 for alpha chain variable domain of TCR clone 244104 (TRAV3, TRAJ33)
CAVRDRSNYQLIW

SEQ ID NO: 488208 - protein, 16 aa, Homo sapiens
  CDR3 for beta chain variable domain of TCR clone 244104 (TRBV4-2, TRBJ2-7)
CASSQDRGTSSYEQNF

SEQ ID NO: 488209 - protein, 11 aa, Homo sapiens
  CDR3 for alpha chain variable domain of TCR clone 244105 (TRAV12-3, TRAJ43)
CAMSVSNDTRF

SEQ ID NO: 488210 - protein, 14 aa, Homo sapiens
  CDR3 for beta chain variable domain of TCR clone 244105 (TRBV20-1, TRBJ1-1)
SAVLHLGGGTEAFF

SEQ ID NO: 488211 - protein, 14 aa, Homo sapiens
  CDR3 for alpha chain variable domain of TCR clone 244106 (TRAV8-2, TRAJ6)
CVVISAGGSYIPKF

SEQ ID NO: 488212 - protein, 16 aa, Homo sapiens
  CDR3 for beta chain variable domain of TCR clone 244106 (TRBV7-6, TRBJ2-6)
CASSLPGLSGANVLTF

SEQ ID NO: 488213 - protein, 15 aa, Homo sapiens
  CDR3 for alpha chain variable domain of TCR clone 244107 (TRAV13-1, TRAJ8)
CAASIPNTGFQKLVF

SEQ ID NO: 488214 - protein, 16 aa, Homo sapiens
  CDR3 for beta chain variable domain of TCR clone 244107 (TRBV7-9, TRBJ1-2)
CASSLGFSSGEDGYTF

SEQ ID NO: 488215 - protein, 13 aa, Homo sapiens
  CDR3 for alpha chain variable domain of TCR clone 244108 (TRAV8-3, TRAJ36)
CAVGATRANNLFF

SEQ ID NO: 488216 - protein, 15 aa, Homo sapiens
  CDR3 for beta chain variable domain of TCR clone 244108 (TRBV7-2, TRBJ1-2)
CASSPRAGWNYGYAF

SEQ ID NO: 488217 - protein, 13 aa, Homo sapiens
  CDR3 for alpha chain variable domain of TCR clone 244109 (TRAV16, TRAJ22)
SAMLAGSARQLTF

SEQ ID NO: 488218 - protein, 14 aa, Homo sapiens
  CDR3 for beta chain variable domain of TCR clone 244109 (TRBV7-2, TRBJ2-7)
CASSLYPGRYEQYF

SEQ ID NO: 488219 - protein, 13 aa, Homo sapiens
  CDR3 for alpha chain variable domain of TCR clone 244110 (TRAV2, TRAJ40)
CAVVTSVTYKYIF

SEQ ID NO: 488220 - protein, 16 aa, Homo sapiens
  CDR3 for beta chain variable domain of TCR clone 244110 (TRBV12-5, TRBJ2-5)
CASGPRTSGNQETQYF

SEQ ID NO: 488221 - protein, 16 aa, Homo sapiens
  CDR3 for alpha chain variable domain of TCR clone 244111 (TRAV17, TRAJ35)
CATAEGGIGSGNVLHC

SEQ ID NO: 488222 - protein, 14 aa, Homo sapiens
  CDR3 for beta chain variable domain of TCR clone 244111 (TRBV2, TRBJ2-2)
CASRRDTVAGELFF

SEQ ID NO: 488223 - protein, 12 aa, Homo sapiens
  CDR3 for alpha chain variable domain of TCR clone 244112 (TRAV21, TRAJ49)
CAVRNTGNQFYF

SEQ ID NO: 488224 - protein, 14 aa, Homo sapiens
  CDR3 for beta chain variable domain of TCR clone 244112 (TRBV10-3, TRBJ2-5)
CAIRTSGGQETQYF

SEQ ID NO: 488225 - protein, 15 aa, Homo sapiens
  CDR3 for alpha chain variable domain of TCR clone 244113 (TRAV26-1, TRAJ23)
CIVRVAGYQVGKLIF

SEQ ID NO: 488226 - protein, 18 aa, Homo sapiens
  CDR3 for beta chain variable domain of TCR clone 244113 (TRBV28, TRBJ2-1)
CASSSTSGRANSYNEQFF

SEQ ID NO: 488227 - protein, 11 aa, Homo sapiens
  CDR3 for alpha chain variable domain of TCR clone 244114 (TRAV2, TRAJ23)
CAVETRGKLIC

SEQ ID NO: 488228 - protein, 14 aa, Homo sapiens
  CDR3 for beta chain variable domain of TCR clone 244114 (TRBV2, TRBJ2-3)
CASSEGQNTDTQYL

SEQ ID NO: 488229 - protein, 16 aa, Homo sapiens
  CDR3 for alpha chain variable domain of TCR clone 244115 (TRAV30, TRAJ24)
CGTEIVDADSWGKFQF

SEQ ID NO: 488230 - protein, 15 aa, Homo sapiens
  CDR3 for beta chain variable domain of TCR clone 244115 (TRBV4-1, TRBJ2-7)
CASSQEGGPSYEQYF

SEQ ID NO: 488231 - protein, 15 aa, Homo sapiens
  CDR3 for alpha chain variable domain of TCR clone 244116 (TRAV8-4, TRAJ8)
CAVSDLNTGFQKLVF

SEQ ID NO: 488232 - protein, 14 aa, Homo sapiens
  CDR3 for beta chain variable domain of TCR clone 244116 (TRBV7-2, TRBJ2-3)
CASSQTGSSYTQIL

SEQ ID NO: 488233 - protein, 14 aa, Homo sapiens
  CDR3 for alpha chain variable domain of TCR clone 244117 (TRAV2, TRAJ37)
CAVDFTSKTGKLIF

SEQ ID NO: 488234 - protein, 15 aa, Homo sapiens
  CDR3 for beta chain variable domain of TCR clone 244117 (TRBV20-1, TRBJ1-1)
CSASRGMTGNTEAFF

SEQ ID NO: 488235 - protein, 15 aa, Homo sapiens
  CDR3 for alpha chain variable domain of TCR clone 244118 (TRAV30, TRAJ32)
CGTEILVGATNKLIF

SEQ ID NO: 488236 - protein, 17 aa, Homo sapiens
  CDR3 for beta chain variable domain of TCR clone 244118 (TRBV5-4, TRBJ2-1)
CASSSAGGRGPYNEQSF

SEQ ID NO: 488237 - protein, 14 aa, Homo sapiens
  CDR3 for alpha chain variable domain of TCR clone 244119 (TRAV8-3, TRAJ13)
CAVGAQEGYQKGTF

SEQ ID NO: 488238 - protein, 13 aa, Homo sapiens
  CDR3 for beta chain variable domain of TCR clone 244119 (TRBV11-2, TRBJ2-5)
CASSSTGEETQYF

SEQ ID NO: 488239 - protein, 16 aa, Homo sapiens
  CDR3 for alpha chain variable domain of TCR clone 244120 (TRAV23/DV6, TRAJ34)
CAASGALSYNTDKPIF

SEQ ID NO: 488240 - protein, 16 aa, Homo sapiens
  CDR3 for beta chain variable domain of TCR clone 244120 (TRBV3-1, TRBJ2-7)
CASSQGATGVAYEQYF

SEQ ID NO: 488241 - protein, 11 aa, Homo sapiens
  CDR3 for alpha chain variable domain of TCR clone 244121 (TRAV2, TRAJ13)
CASGGYQKVTF

SEQ ID NO: 488242 - protein, 14 aa, Homo sapiens
  CDR3 for beta chain variable domain of TCR clone 244121 (TRBV5-1, TRBJ2-5)
CASSLIGTEETQYF

SEQ ID NO: 488243 - protein, 10 aa, Homo sapiens
  CDR3 for alpha chain variable domain of TCR clone 244122 (TRAV2, TRAJ34)
CAVVNDQLIF

SEQ ID NO: 488244 - protein, 15 aa, Homo sapiens
  CDR3 for beta chain variable domain of TCR clone 244122 (TRBV3-1, TRBJ2-2)
CASSQDWTRAGELFF

SEQ ID NO: 488245 - protein, 15 aa, Homo sapiens
  CDR3 for alpha chain variable domain of TCR clone 244123 (TRAV26-1, TRAJ29)
CIVRVEGSGNTPLVF

SEQ ID NO: 488246 - protein, 13 aa, Homo sapiens
  CDR3 for beta chain variable domain of TCR clone 244123 (TRBV20-1, TRBJ2-3)
CSASGGSTDTQYF

SEQ ID NO: 488247 - protein, 20 aa, Homo sapiens
  CDR3 for alpha chain variable domain of TCR clone 244124 (TRAV1-1, TRAJ4)
CLLLLRCEGFLSGGYNKLIF

SEQ ID NO: 488248 - protein, 14 aa, Homo sapiens
  CDR3 for beta chain variable domain of TCR clone 244124 (TRBV7-2, TRBJ2-7)
CASSPKTSFYEQYF

SEQ ID NO: 488249 - protein, 17 aa, Homo sapiens
  CDR3 for alpha chain variable domain of TCR clone 244125 (TRAV3, TRAJ42)
CAVRDRDYGGSKGNLIF

SEQ ID NO: 488250 - protein, 16 aa, Homo sapiens
  CDR3 for beta chain variable domain of TCR clone 244125 (TRBV4-2, TRBJ2-7)
CASSQEGLANSYEQYF

SEQ ID NO: 488251 - protein, 12 aa, Homo sapiens
  CDR3 for alpha chain variable domain of TCR clone 244126 (TRAV2, TRAJ10)
CASTGGGNKLIF

SEQ ID NO: 488252 - protein, 17 aa, Homo sapiens
  CDR3 for beta chain variable domain of TCR clone 244126 (TRBV5-4, TRBJ1-1)
CASFPPKGRLQNTEAFF

SEQ ID NO: 488253 - protein, 15 aa, Homo sapiens
  CDR3 for alpha chain variable domain of TCR clone 244127 (TRAV8-3, TRAJ20)
CAVEAKGSNEYKLSF

SEQ ID NO: 488254 - protein, 16 aa, Homo sapiens
  CDR3 for beta chain variable domain of TCR clone 244127 (TRBV4-2, TRBJ2-3)
CASSQELAGDTDTQYF

SEQ ID NO: 488255 - protein, 15 aa, Homo sapiens
  CDR3 for alpha chain variable domain of TCR clone 244128 (TRAV20, TRAJ6)
CAVRLQSGGSYIPTF

SEQ ID NO: 488256 - protein, 13 aa, Homo sapiens
  CDR3 for beta chain variable domain of TCR clone 244128 (TRBV12-4, TRBJ2-7)
CQSASGGWYEQYF

SEQ ID NO: 488257 - protein, 14 aa, Homo sapiens
  CDR3 for alpha chain variable domain of TCR clone 244129 (TRAV38-1, TRAJ40)
CALRPTSGTYKYIF

SEQ ID NO: 488258 - protein, 13 aa, Homo sapiens
  CDR3 for beta chain variable domain of TCR clone 244129 (TRBV7-9, TRBJ2-5)
CASLPSGRETQYF

SEQ ID NO: 488259 - protein, 13 aa, Homo sapiens
  CDR3 for alpha chain variable domain of TCR clone 244130 (TRAV26-1, TRAJ34)
CIVRVGNTDKLIF

SEQ ID NO: 488260 - protein, 21 aa, Homo sapiens
  CDR3 for beta chain variable domain of TCR clone 244130 (TRBV4-1, TRBJ2-5)
CASSHGLAGDPRDPVLRARHA

SEQ ID NO: 488261 - protein, 16 aa, Homo sapiens
  CDR3 for alpha chain variable domain of TCR clone 244131 (TRAV22, TRAJ45)
CAVERGKRGCADGLTF

SEQ ID NO: 488262 - protein, 16 aa, Homo sapiens
  CDR3 for beta chain variable domain of TCR clone 244131 (TRBV5-1, TRBJ2-5)
CASSLRRTSGQETQYF

SEQ ID NO: 488263 - protein, 11 aa, Homo sapiens
  CDR3 for alpha chain variable domain of TCR clone 244132 (TRAV12-2, TRAJ33)
CAVTSNYQLIW

SEQ ID NO: 488264 - protein, 15 aa, Homo sapiens
  CDR3 for beta chain variable domain of TCR clone 244132 (TRBV25-1, TRBJ1-4)
CASSPGDSTNEKLSF

SEQ ID NO: 488265 - protein, 14 aa, Homo sapiens
  CDR3 for alpha chain variable domain of TCR clone 244133 (TRAV8-1, TRAJ5)
CAVSMDTGRRALTF

SEQ ID NO: 488266 - protein, 13 aa, Homo sapiens
  CDR3 for beta chain variable domain of TCR clone 244133 (TRBV2, TRBJ2-7)
CASSVGGSGEQYF

SEQ ID NO: 488267 - protein, 11 aa, Homo sapiens
  CDR3 for alpha chain variable domain of TCR clone 244134 (TRAV2, TRAJ13)
CASGGYQKVTF

SEQ ID NO: 488268 - protein, 14 aa, Homo sapiens
  CDR3 for beta chain variable domain of TCR clone 244134 (TRBV19, TRBJ2-1)
CASSKDRGQDEQVF

SEQ ID NO: 488269 - protein, 14 aa, Homo sapiens
  CDR3 for alpha chain variable domain of TCR clone 244135 (TRAV2, TRAJ9)
CAVEDRSGGCKTIF

SEQ ID NO: 488270 - protein, 11 aa, Homo sapiens
  CDR3 for beta chain variable domain of TCR clone 244135 (TRBV12-4, TRBJ2-3)
CASTATDTQYF

SEQ ID NO: 488271 - protein, 12 aa, Homo sapiens
  CDR3 for alpha chain variable domain of TCR clone 244136 (TRAV3, TRAJ43)
CAVRDPNNDMRF

SEQ ID NO: 488272 - protein, 16 aa, Homo sapiens
  CDR3 for beta chain variable domain of TCR clone 244136 (TRBV28, TRBJ2-7)
CASSFPDRRLTYEQYF

SEQ ID NO: 488273 - protein, 15 aa, Homo sapiens
  CDR3 for alpha chain variable domain of TCR clone 244137 (TRAV21, TRAJ24)
CAARSSTDSWGKLQF

SEQ ID NO: 488274 - protein, 14 aa, Homo sapiens
  CDR3 for beta chain variable domain of TCR clone 244137 (TRBV19, TRBJ2-1)
CASPTVVLSGEQFF

SEQ ID NO: 488275 - protein, 13 aa, Homo sapiens
  CDR3 for alpha chain variable domain of TCR clone 244138 (TRAV8-6, TRAJ16)
CAVSRWVGQKLLF

SEQ ID NO: 488276 - protein, 15 aa, Homo sapiens
  CDR3 for beta chain variable domain of TCR clone 244138 (TRBV12-4, TRBJ2-1)
CANSLSTGVSNEQFF

SEQ ID NO: 488277 - protein, 10 aa, Homo sapiens
  CDR3 for alpha chain variable domain of TCR clone 244139 (TRAV12-1, TRAJ33)
SVASNYQLIW

SEQ ID NO: 488278 - protein, 15 aa, Homo sapiens
  CDR3 for beta chain variable domain of TCR clone 244139 (TRBV5-4, TRBJ1-4)
CASSHGDGENEKLFF

SEQ ID NO: 488279 - protein, 17 aa, Homo sapiens
  CDR3 for alpha chain variable domain of TCR clone 244140 (TRAV3, TRAJ12)
CSVRDGGRMDSSYKLIF

SEQ ID NO: 488280 - protein, 13 aa, Homo sapiens
  CDR3 for beta chain variable domain of TCR clone 244140 (TRBV15, TRBJ1-6)
CATSGGLNSPLHF

SEQ ID NO: 488281 - protein, 15 aa, Homo sapiens
  CDR3 for alpha chain variable domain of TCR clone 244141 (TRAV17, TRAJ16)
CATALRFSDGQKLPF

SEQ ID NO: 488282 - protein, 15 aa, Homo sapiens
  CDR3 for beta chain variable domain of TCR clone 244141 (TRBV20-1, TRBJ1-1)
CSASRGVTGSTEAFF

SEQ ID NO: 488283 - protein, 15 aa, Homo sapiens
  CDR3 for alpha chain variable domain of TCR clone 244142 (TRAV21, TRAJ53)
CATLNSGGSNYKLTF

SEQ ID NO: 488284 - protein, 14 aa, Homo sapiens
  CDR3 for beta chain variable domain of TCR clone 244142 (TRBV7-2, TRBJ2-7)
CAIRSQGAAYEQYF

SEQ ID NO: 488285 - protein, 14 aa, Homo sapiens
  CDR3 for alpha chain variable domain of TCR clone 244143 (TRAV13-1, TRAJ44)
CAAKASGTASKLTF

SEQ ID NO: 488286 - protein, 12 aa, Homo sapiens
  CDR3 for beta chain variable domain of TCR clone 244143 (TRBV3-1, TRBJ2-1)
CASSQGSSGQFF

SEQ ID NO: 488287 - protein, 14 aa, Homo sapiens
  CDR3 for alpha chain variable domain of TCR clone 244144 (TRAV26-1, TRAJ39)
CIVRGSRAGNILTF

SEQ ID NO: 488288 - protein, 15 aa, Homo sapiens
  CDR3 for beta chain variable domain of TCR clone 244144 (TRBV7-9, TRBJ1-5)
FASSQGHQPNQPQHF

SEQ ID NO: 488289 - protein, 11 aa, Homo sapiens
  CDR3 for alpha chain variable domain of TCR clone 244145 (TRAV2, TRAJ13)
CASGGYQKVTF

SEQ ID NO: 488290 - protein, 16 aa, Homo sapiens
  CDR3 for beta chain variable domain of TCR clone 244145 (TRBV12-5, TRBJ2-5)
CASGPRTSGNQETQFF

SEQ ID NO: 488291 - protein, 11 aa, Homo sapiens
  CDR3 for alpha chain variable domain of TCR clone 244146 (TRAV2, TRAJ13)
CASGGYQKVTF

SEQ ID NO: 488292 - protein, 14 aa, Homo sapiens
  CDR3 for beta chain variable domain of TCR clone 244146 (TRBV7-2, TRBJ1-3)
CASSLGIAGNTIYF

SEQ ID NO: 488293 - protein, 13 aa, Homo sapiens
  CDR3 for alpha chain variable domain of TCR clone 244147 (TRAV35, TRAJ50)
CWSPKTSYDNVIF

SEQ ID NO: 488294 - protein, 13 aa, Homo sapiens
  CDR3 for beta chain variable domain of TCR clone 244147 (TRBV7-7, TRBJ2-3)
CASSLSRADTQYF

SEQ ID NO: 488295 - protein, 15 aa, Homo sapiens
  CDR3 for alpha chain variable domain of TCR clone 244148 (TRAV35, TRAJ40)
CAGQLWDSGTYKYIF

SEQ ID NO: 488296 - protein, 12 aa, Homo sapiens
  CDR3 for beta chain variable domain of TCR clone 244148 (TRBV11-2, TRBJ2-1)
CASSPGNNEQFF

SEQ ID NO: 488297 - protein, 14 aa, Homo sapiens
  CDR3 for alpha chain variable domain of TCR clone 244149 (TRAV2, TRAJ41)
CAVGTSNSGYALNF

SEQ ID NO: 488298 - protein, 11 aa, Homo sapiens
  CDR3 for beta chain variable domain of TCR clone 244149 (TRBV18, TRBJ2-5)
CASSPRETQYF

SEQ ID NO: 488299 - protein, 13 aa, Homo sapiens
  CDR3 for alpha chain variable domain of TCR clone 244150 (TRAV1-1, TRAJ33)
CAVRRDSNYQLIW

SEQ ID NO: 488300 - protein, 20 aa, Homo sapiens
  CDR3 for beta chain variable domain of TCR clone 244150 (TRBV28, TRBJ2-1)
CASTPIGRSPGLAGGNEQLF

SEQ ID NO: 488301 - protein, 14 aa, Homo sapiens
  CDR3 for alpha chain variable domain of TCR clone 244151 (TRAV38-1, TRAJ40)
CALRPTSGTFKYIF

SEQ ID NO: 488302 - protein, 14 aa, Homo sapiens
  CDR3 for beta chain variable domain of TCR clone 244151 (TRBV25-1, TRBJ1-1)
CASTHLVGNTEAFF

SEQ ID NO: 488303 - protein, 12 aa, Homo sapiens
  CDR3 for alpha chain variable domain of TCR clone 244152 (TRAV17, TRAJ49)
CATVTTGNQFYF

SEQ ID NO: 488304 - protein, 15 aa, Homo sapiens
  CDR3 for beta chain variable domain of TCR clone 244152 (TRBV5-7, TRBJ1-2)
CASSLGVAANYGYTF

SEQ ID NO: 488305 - protein, 12 aa, Homo sapiens
  CDR3 for alpha chain variable domain of TCR clone 244153 (TRAV21, TRAJ56)
CGYTGANSKLTF

SEQ ID NO: 488306 - protein, 14 aa, Homo sapiens
  CDR3 for beta chain variable domain of TCR clone 244153 (TRBV19, TRBJ2-1)
CASEVTGARNEQFF

SEQ ID NO: 488307 - protein, 15 aa, Homo sapiens
  CDR3 for alpha chain variable domain of TCR clone 244154 (TRAV17, TRAJ56)
CATDANTGANRKLTL

SEQ ID NO: 488308 - protein, 16 aa, Homo sapiens
  CDR3 for beta chain variable domain of TCR clone 244154 (TRBV7-3, TRBJ2-2)
CASSLKRGTLSGELFF

SEQ ID NO: 488309 - protein, 10 aa, Homo sapiens
  CDR3 for alpha chain variable domain of TCR clone 244155 (TRAV13-1, TRAJ27)
CAPLARQINL

SEQ ID NO: 488310 - protein, 13 aa, Homo sapiens
  CDR3 for beta chain variable domain of TCR clone 244155 (TRBV7-3, TRBJ1-1)
CASSQDWGDEAFF

SEQ ID NO: 488311 - protein, 13 aa, Homo sapiens
  CDR3 for alpha chain variable domain of TCR clone 244156 (TRAV29/DV5, TRAJ31)
CAASRNNNARLTF

SEQ ID NO: 488312 - protein, 12 aa, Homo sapiens
  CDR3 for beta chain variable domain of TCR clone 244156 (TRBV11-2, TRBJ2-1)
CASSPGNNEQFF

SEQ ID NO: 488313 - protein, 15 aa, Homo sapiens
  CDR3 for alpha chain variable domain of TCR clone 244157 (TRAV16, TRAJ12)
CSKWPLRDSSYKLIF

SEQ ID NO: 488314 - protein, 17 aa, Homo sapiens
  CDR3 for beta chain variable domain of TCR clone 244157 (TRBV11-3, TRBJ2-3)
CASSLGLTGGGTDTQYF

SEQ ID NO: 488315 - protein, 12 aa, Homo sapiens
  CDR3 for alpha chain variable domain of TCR clone 244158 (TRAV12-3, TRAJ39)
CAMTQAGNMLTF

SEQ ID NO: 488316 - protein, 16 aa, Homo sapiens
  CDR3 for beta chain variable domain of TCR clone 244158 (TRBV7-3, TRBJ2-2)
CASSLKRGTLSGELFF

SEQ ID NO: 488317 - protein, 18 aa, Homo sapiens
  CDR3 for alpha chain variable domain of TCR clone 244159 (TRAV21, TRAJ52)
CAVRPSPSGGTSYGKLTF

SEQ ID NO: 488318 - protein, 17 aa, Homo sapiens
  CDR3 for beta chain variable domain of TCR clone 244159 (TRBV13, TRBJ2-3)
CASSLSRVAGWRNTQYF

SEQ ID NO: 488319 - protein, 14 aa, Homo sapiens
  CDR3 for alpha chain variable domain of TCR clone 244160 (TRAV14/DV4, TRAJ58)
CAMRARTSGSRVTF

SEQ ID NO: 488320 - protein, 18 aa, Homo sapiens
  CDR3 for beta chain variable domain of TCR clone 244160 (TRBV12-4, TRBJ1-5)
CASSLFLVGVGAYQPQHF

SEQ ID NO: 488321 - protein, 14 aa, Homo sapiens
  CDR3 for alpha chain variable domain of TCR clone 244161 (TRAV20, TRAJ21)
CAAGGIYNFNKFYF

SEQ ID NO: 488322 - protein, 15 aa, Homo sapiens
  CDR3 for beta chain variable domain of TCR clone 244161 (TRBV20-1, TRBJ2-7)
CSARDRVSGMDEQYF

SEQ ID NO: 488323 - protein, 15 aa, Homo sapiens
  CDR3 for alpha chain variable domain of TCR clone 244162 (TRAV26-2, TRAJ21)
CILSNTTSTNFTLDL

SEQ ID NO: 488324 - protein, 16 aa, Homo sapiens
  CDR3 for beta chain variable domain of TCR clone 244162 (TRBV4-2, TRBJ2-6)
CASSRARSSGANVLTF

SEQ ID NO: 488325 - protein, 13 aa, Homo sapiens
  CDR3 for alpha chain variable domain of TCR clone 244163 (TRAV13-2, TRAJ53)
CAENMGSNYKLTF

SEQ ID NO: 488326 - protein, 13 aa, Homo sapiens
  CDR3 for beta chain variable domain of TCR clone 244163 (TRBV4-1, TRBJ2-2)
WASSQENTGELFF

SEQ ID NO: 488327 - protein, 13 aa, Homo sapiens
  CDR3 for alpha chain variable domain of TCR clone 244164 (TRAV12-3, TRAJ33)
CAMSVNSNYQLIW

SEQ ID NO: 488328 - protein, 13 aa, Homo sapiens
  CDR3 for beta chain variable domain of TCR clone 244164 (TRBV7-2, TRBJ2-2)
CASSLPVTGELFF

SEQ ID NO: 488329 - protein, 16 aa, Homo sapiens
  CDR3 for alpha chain variable domain of TCR clone 244165 (TRAV12-1, TRAJ22)
CVVNTISSGSARQLTF

SEQ ID NO: 488330 - protein, 13 aa, Homo sapiens
  CDR3 for beta chain variable domain of TCR clone 244165 (TRBV19, TRBJ2-1)
CASNGGVFSEHFF

SEQ ID NO: 488331 - protein, 11 aa, Homo sapiens
  CDR3 for alpha chain variable domain of TCR clone 244166 (TRAV1-1, TRAJ23)
CAVRQGGKLIF

SEQ ID NO: 488332 - protein, 17 aa, Homo sapiens
  CDR3 for beta chain variable domain of TCR clone 244166 (TRBV18, TRBJ2-1)
CASSKGLSGGADNEQFF

SEQ ID NO: 488333 - protein, 14 aa, Homo sapiens
  CDR3 for alpha chain variable domain of TCR clone 244167 (TRAV16, TRAJ32)
CALKSGGPTNKLIF

SEQ ID NO: 488334 - protein, 17 aa, Homo sapiens
  CDR3 for beta chain variable domain of TCR clone 244167 (TRBV20-1, TRBJ2-1)
CSASSSGPAGSYNEQFF

SEQ ID NO: 488335 - protein, 10 aa, Homo sapiens
  CDR3 for alpha chain variable domain of TCR clone 244168 (TRAV2, TRAJ34)
CAVVNDKLIF

SEQ ID NO: 488336 - protein, 16 aa, Homo sapiens
  CDR3 for beta chain variable domain of TCR clone 244168 (TRBV19, TRBJ2-3)
CASSPGAASRTDTQYF

SEQ ID NO: 488337 - protein, 18 aa, Homo sapiens
  CDR3 for alpha chain variable domain of TCR clone 244169 (TRAV26-1, TRAJ30)
CCVLLHRQSTNRDDKIIF

SEQ ID NO: 488338 - protein, 18 aa, Homo sapiens
  CDR3 for beta chain variable domain of TCR clone 244169 (TRBV4-1, TRBJ1-5)
CASSQDPRGQGLNQHQHF

SEQ ID NO: 488339 - protein, 13 aa, Homo sapiens
  CDR3 for alpha chain variable domain of TCR clone 244170 (TRAV3, TRAJ15)
CAVRDQAGTALIF

SEQ ID NO: 488340 - protein, 13 aa, Homo sapiens
  CDR3 for beta chain variable domain of TCR clone 244170 (TRBV10-2, TRBJ2-7)
CASSAESPYEQYF

SEQ ID NO: 488341 - protein, 14 aa, Homo sapiens
  CDR3 for alpha chain variable domain of TCR clone 244171 (TRAV12-2, TRAJ13)
CAVKKTGGYQKVTF

SEQ ID NO: 488342 - protein, 19 aa, Homo sapiens
  CDR3 for beta chain variable domain of TCR clone 244171 (TRBV25-1, TRBJ2-2)
CAILVYREDRGRKTGELFF

SEQ ID NO: 488343 - protein, 15 aa, Homo sapiens
  CDR3 for alpha chain variable domain of TCR clone 244172 (TRAV2, TRAJ22)
CAVPSRGGSARQLTF

SEQ ID NO: 488344 - protein, 14 aa, Homo sapiens
  CDR3 for beta chain variable domain of TCR clone 244172 (TRBV19, TRBJ1-2)
CASSIGAGSYGYTF

SEQ ID NO: 488345 - protein, 12 aa, Homo sapiens
  CDR3 for alpha chain variable domain of TCR clone 244173 (TRAV8-3, TRAJ47)
CAVGAHGIWKQT

SEQ ID NO: 488346 - protein, 14 aa, Homo sapiens
  CDR3 for beta chain variable domain of TCR clone 244173 (TRBV18, TRBJ2-5)
CASSPGVSQETQYF

SEQ ID NO: 488347 - protein, 14 aa, Homo sapiens
  CDR3 for alpha chain variable domain of TCR clone 244174 (TRAV3, TRAJ9)
CAVRLNTGGFKTIF

SEQ ID NO: 488348 - protein, 16 aa, Homo sapiens
  CDR3 for beta chain variable domain of TCR clone 244174 (TRBV18, TRBJ2-2)
CASSPPRTANTGELFF

SEQ ID NO: 488349 - protein, 15 aa, Homo sapiens
  CDR3 for alpha chain variable domain of TCR clone 244175 (TRAV3, TRAJ29)
CAVRDPLSGNTPLVF

SEQ ID NO: 488350 - protein, 15 aa, Homo sapiens
  CDR3 for beta chain variable domain of TCR clone 244175 (TRBV9, TRBJ1-6)
CASSVAGTGDSPLHF

SEQ ID NO: 488351 - protein, 14 aa, Homo sapiens
  CDR3 for alpha chain variable domain of TCR clone 244176 (TRAV17, TRAJ31)
CATVLRNNNARLMF

SEQ ID NO: 488352 - protein, 18 aa, Homo sapiens
  CDR3 for beta chain variable domain of TCR clone 244176 (TRBV12-4, TRBJ2-5)
CASSLWQTRDPVLRARHA

SEQ ID NO: 488353 - protein, 13 aa, Homo sapiens
  CDR3 for alpha chain variable domain of TCR clone 244177 (TRAV3, TRAJ21)
CAVREPDFNKFYF

SEQ ID NO: 488354 - protein, 13 aa, Homo sapiens
  CDR3 for beta chain variable domain of TCR clone 244177 (TRBV28, TRBJ1-5)
CASSDRGNQPQHF

SEQ ID NO: 488355 - protein, 12 aa, Homo sapiens
  CDR3 for alpha chain variable domain of TCR clone 244178 (TRAV3, TRAJ7)
CADLLWEQQTRF

SEQ ID NO: 488356 - protein, 21 aa, Homo sapiens
  CDR3 for beta chain variable domain of TCR clone 244178 (TRBV7-3, TRBJ2-5)
GGTKPCISVPAASGGGETQYF

SEQ ID NO: 488357 - protein, 15 aa, Homo sapiens
  CDR3 for alpha chain variable domain of TCR clone 244179 (TRAV23/DV6, TRAJ13)
CAAWPGGGGYQKVTF

SEQ ID NO: 488358 - protein, 16 aa, Homo sapiens
  CDR3 for beta chain variable domain of TCR clone 244179 (TRBV20-1, TRBJ1-4)
CSAPGQGLLTNEKLFF

SEQ ID NO: 488359 - protein, 13 aa, Homo sapiens
  CDR3 for alpha chain variable domain of TCR clone 244180 (TRAV20, TRAJ37)
CAVCSSNTGKLIF

SEQ ID NO: 488360 - protein, 14 aa, Homo sapiens
  CDR3 for beta chain variable domain of TCR clone 244180 (TRBV7-2, TRBJ2-7)
CASSPKTSFYEQYF

SEQ ID NO: 488361 - protein, 14 aa, Homo sapiens
  CDR3 for alpha chain variable domain of TCR clone 244181 (TRAV4, TRAJ23)
CLVGSYNQGGKLIF

SEQ ID NO: 488362 - protein, 18 aa, Homo sapiens
  CDR3 for beta chain variable domain of TCR clone 244181 (TRBV6-5, TRBJ2-6)
CASRTPGQGKTGANVLTF

SEQ ID NO: 488363 - protein, 14 aa, Homo sapiens
  CDR3 for alpha chain variable domain of TCR clone 244182 (TRAV1-2, TRAJ16)
CAVNRFSDVQKLLF

SEQ ID NO: 488364 - protein, 15 aa, Homo sapiens
  CDR3 for beta chain variable domain of TCR clone 244182 (TRBV18, TRBJ2-1)
CASSPPSASYNEQFF

SEQ ID NO: 488365 - protein, 11 aa, Homo sapiens
  CDR3 for alpha chain variable domain of TCR clone 244183 (TRAV1-2, TRAJ31)
CAVNNNARLMF

SEQ ID NO: 488366 - protein, 16 aa, Homo sapiens
  CDR3 for beta chain variable domain of TCR clone 244183 (TRBV28, TRBJ1-5)
CASRFRGAVQNQPQHF

SEQ ID NO: 488367 - protein, 13 aa, Homo sapiens
  CDR3 for alpha chain variable domain of TCR clone 244184 (TRAV13-2, TRAJ53)
CAENMGSNYKLTF

SEQ ID NO: 488368 - protein, 13 aa, Homo sapiens
  CDR3 for beta chain variable domain of TCR clone 244184 (TRBV4-1, TRBJ2-2)
CASSEENTGELFF

SEQ ID NO: 488369 - protein, 15 aa, Homo sapiens
  CDR3 for alpha chain variable domain of TCR clone 244185 (TRAV12-1, TRAJ26)
CVVNSWVTMVRILSL

SEQ ID NO: 488370 - protein, 13 aa, Homo sapiens
  CDR3 for beta chain variable domain of TCR clone 244185 (TRBV10-3, TRBJ2-7)
CAAKLAVNYEQYF

SEQ ID NO: 488371 - protein, 14 aa, Homo sapiens
  CDR3 for alpha chain variable domain of TCR clone 244186 (TRAV12-2, TRAJ17)
CAALFKAAGNKLTF

SEQ ID NO: 488372 - protein, 16 aa, Homo sapiens
  CDR3 for beta chain variable domain of TCR clone 244186 (TRBV24-1, TRBJ2-3)
CATSDPGTGATDTQYF

SEQ ID NO: 488373 - protein, 10 aa, Homo sapiens
  CDR3 for alpha chain variable domain of TCR clone 244187 (TRAV23/DV6, TRAJ57)
CAASSTLSQG

SEQ ID NO: 488374 - protein, 16 aa, Homo sapiens
  CDR3 for beta chain variable domain of TCR clone 244187 (TRBV4-2, TRBJ2-3)
CASSQELAGDTDTQYF

SEQ ID NO: 488375 - protein, 13 aa, Homo sapiens
  CDR3 for alpha chain variable domain of TCR clone 244188 (TRAV27, TRAJ56)
CAGKPGANSKLTF

SEQ ID NO: 488376 - protein, 13 aa, Homo sapiens
  CDR3 for beta chain variable domain of TCR clone 244188 (TRBV7-9, TRBJ1-2)
CASSLKQNYGYTF

SEQ ID NO: 488377 - protein, 11 aa, Homo sapiens
  CDR3 for alpha chain variable domain of TCR clone 244189 (TRAV1-2, TRAJ20)
CAVANDYKLSF

SEQ ID NO: 488378 - protein, 13 aa, Homo sapiens
  CDR3 for beta chain variable domain of TCR clone 244189 (TRBV4-1, TRBJ2-2)
CASSQENTGELFF

SEQ ID NO: 488379 - protein, 13 aa, Homo sapiens
  CDR3 for alpha chain variable domain of TCR clone 244190 (TRAV12-2, TRAJ10)
CAVPTGGGYKLTF

SEQ ID NO: 488380 - protein, 11 aa, Homo sapiens
  CDR3 for beta chain variable domain of TCR clone 244190 (TRBV6-1, TRBJ2-1)
CASISSNEQFF

SEQ ID NO: 488381 - protein, 13 aa, Homo sapiens
  CDR3 for alpha chain variable domain of TCR clone 244191 (TRAV20, TRAJ37)
CAGCPSNTGKLIF

SEQ ID NO: 488382 - protein, 14 aa, Homo sapiens
  CDR3 for beta chain variable domain of TCR clone 244191 (TRBV20-1, TRBJ2-5)
CSARDGRAGETQYF

SEQ ID NO: 488383 - protein, 12 aa, Homo sapiens
  CDR3 for alpha chain variable domain of TCR clone 244192 (TRAV8-2, TRAJ6)
CDVSKGSYIPTF

SEQ ID NO: 488384 - protein, 18 aa, Homo sapiens
  CDR3 for beta chain variable domain of TCR clone 244192 (TRBV4-1, TRBJ2-3)
CASSQGGASGGATDTQYF

SEQ ID NO: 488385 - protein, 11 aa, Homo sapiens
  CDR3 for alpha chain variable domain of TCR clone 244193 (TRAV1-1, TRAJ23)
CAVRQGGKLIF

SEQ ID NO: 488386 - protein, 18 aa, Homo sapiens
  CDR3 for beta chain variable domain of TCR clone 244193 (TRBV4-1, TRBJ2-1)
CASSLVGGELAGFNEQFF

SEQ ID NO: 488387 - protein, 13 aa, Homo sapiens
  CDR3 for alpha chain variable domain of TCR clone 244194 (TRAV13-1, TRAJ21)
CTASIYNFNKFYF

SEQ ID NO: 488388 - protein, 12 aa, Homo sapiens
  CDR3 for beta chain variable domain of TCR clone 244194 (TRBV11-2, TRBJ2-1)
CASSPGNNEQFF

SEQ ID NO: 488389 - protein, 14 aa, Homo sapiens
  CDR3 for alpha chain variable domain of TCR clone 244195 (TRAV1-2, TRAJ29)
CAVRELTSATPLVF

SEQ ID NO: 488390 - protein, 17 aa, Homo sapiens
  CDR3 for beta chain variable domain of TCR clone 244195 (TRBV20-1, TRBJ1-5)
CSASLSPGQGGNQPQHF

SEQ ID NO: 488391 - protein, 17 aa, Homo sapiens
  CDR3 for alpha chain variable domain of TCR clone 244196 (TRAV13-1, TRAJ52)
CAAGRNAGGTSYGKLTL

SEQ ID NO: 488392 - protein, 12 aa, Homo sapiens
  CDR3 for beta chain variable domain of TCR clone 244196 (TRBV7-9, TRBJ1-1)
CASSLVRGEAFF

SEQ ID NO: 488393 - protein, 16 aa, Homo sapiens
  CDR3 for alpha chain variable domain of TCR clone 244197 (TRAV27, TRAJ52)
CAGAGAGGTSYGKLTF

SEQ ID NO: 488394 - protein, 17 aa, Homo sapiens
  CDR3 for beta chain variable domain of TCR clone 244197 (TRBV24-1, TRBJ2-3)
CATSDLPSGEDIDTQYF

SEQ ID NO: 488395 - protein, 12 aa, Homo sapiens
  CDR3 for alpha chain variable domain of TCR clone 244198 (TRAV12-3, TRAJ17)
CAMTLTGNKPTF

SEQ ID NO: 488396 - protein, 17 aa, Homo sapiens
  CDR3 for beta chain variable domain of TCR clone 244198 (TRBV7-3, TRBJ2-3)
CASSLMRRMRGADTQYF

SEQ ID NO: 488397 - protein, 13 aa, Homo sapiens
  CDR3 for alpha chain variable domain of TCR clone 244199 (TRAV3, TRAJ36)
CAVKRTGANNLFF

SEQ ID NO: 488398 - protein, 12 aa, Homo sapiens
  CDR3 for beta chain variable domain of TCR clone 244199 (TRBV27, TRBJ2-2)
CASKLVTGELFF

SEQ ID NO: 488399 - protein, 18 aa, Homo sapiens
  CDR3 for alpha chain variable domain of TCR clone 244200 (TRAV21, TRAJ13)
CAVPRSFWGLPESYLWNW

SEQ ID NO: 488400 - protein, 14 aa, Homo sapiens
  CDR3 for beta chain variable domain of TCR clone 244200 (TRBV20-1, TRBJ2-7)
CSAKDRKGAYEQYF

SEQ ID NO: 488401 - protein, 14 aa, Homo sapiens
  CDR3 for alpha chain variable domain of TCR clone 244201 (TRAV13-1, TRAJ44)
CAAKATGTASKLTF

SEQ ID NO: 488402 - protein, 15 aa, Homo sapiens
  CDR3 for beta chain variable domain of TCR clone 244201 (TRBV7-2, TRBJ1-2)
CASSLAPDRGLGYTF

SEQ ID NO: 488403 - protein, 13 aa, Homo sapiens
  CDR3 for alpha chain variable domain of TCR clone 244202 (TRAV8-3, TRAJ28)
CAVGAVGSYQLTF

SEQ ID NO: 488404 - protein, 12 aa, Homo sapiens
  CDR3 for beta chain variable domain of TCR clone 244202 (TRBV6-1, TRBJ2-7)
CASSEPLYEQYF

SEQ ID NO: 488405 - protein, 14 aa, Homo sapiens
  CDR3 for alpha chain variable domain of TCR clone 244203 (TRAV36/DV7, TRAJ40)
CAVETTSGTYEYIF

SEQ ID NO: 488406 - protein, 13 aa, Homo sapiens
  CDR3 for beta chain variable domain of TCR clone 244203 (TRBV10-3, TRBJ2-5)
CAMTSGAGETQYF

SEQ ID NO: 488407 - protein, 14 aa, Homo sapiens
  CDR3 for alpha chain variable domain of TCR clone 244204 (TRAV9-2, TRAJ39)
CALYIYNAGNMLTF

SEQ ID NO: 488408 - protein, 16 aa, Homo sapiens
  CDR3 for beta chain variable domain of TCR clone 244204 (TRBV12-4, TRBJ2-5)
CTSVPAVAGAGETQYF

SEQ ID NO: 488409 - protein, 18 aa, Homo sapiens
  CDR3 for alpha chain variable domain of TCR clone 244205 (TRAV13-1, TRAJ52)
CAAKNPNPGGTSYGNLTF

SEQ ID NO: 488410 - protein, 14 aa, Homo sapiens
  CDR3 for beta chain variable domain of TCR clone 244205 (TRBV6-5, TRBJ1-1)
CASSFGQGLTEAFF

SEQ ID NO: 488411 - protein, 13 aa, Homo sapiens
  CDR3 for alpha chain variable domain of TCR clone 244206 (TRAV27, TRAJ16)
CAGACSDGQKLLF

SEQ ID NO: 488412 - protein, 13 aa, Homo sapiens
  CDR3 for beta chain variable domain of TCR clone 244206 (TRBV7-9, TRBJ1-2)
CASSLKQNYGYTF

SEQ ID NO: 488413 - protein, 12 aa, Homo sapiens
  CDR3 for alpha chain variable domain of TCR clone 244207 (TRAV4, TRAJ9)
CLVPTGGFKTIF

SEQ ID NO: 488414 - protein, 12 aa, Homo sapiens
  CDR3 for beta chain variable domain of TCR clone 244207 (TRBV18, TRBJ2-1)
CASSSDEDEQFF

SEQ ID NO: 488415 - protein, 15 aa, Homo sapiens
  CDR3 for alpha chain variable domain of TCR clone 244208 (TRAV35, TRAJ41)
CAGQLFSNSGYALNF

SEQ ID NO: 488416 - protein, 13 aa, Homo sapiens
  CDR3 for beta chain variable domain of TCR clone 244208 (TRBV20-1, TRBJ1-1)
CSARVGGNTEAFF

SEQ ID NO: 488417 - protein, 13 aa, Homo sapiens
  CDR3 for alpha chain variable domain of TCR clone 244209 (TRAV1-1, TRAJ23)
YAVVANQGGKLIF

SEQ ID NO: 488418 - protein, 15 aa, Homo sapiens
  CDR3 for beta chain variable domain of TCR clone 244209 (TRBV11-3, TRBJ2-3)
CASLKDGREGDTQYF

SEQ ID NO: 488419 - protein, 10 aa, Homo sapiens
  CDR3 for alpha chain variable domain of TCR clone 244210 (TRAV1-2, TRAJ20)
CALNDYKLSF

SEQ ID NO: 488420 - protein, 13 aa, Homo sapiens
  CDR3 for beta chain variable domain of TCR clone 244210 (TRBV12-4, TRBJ2-7)
CASSFVPTAEQYF

SEQ ID NO: 488421 - protein, 16 aa, Homo sapiens
  CDR3 for alpha chain variable domain of TCR clone 244211 (TRAV4, TRAJ22)
CLVGDLYSGSARQLTF

SEQ ID NO: 488422 - protein, 16 aa, Homo sapiens
  CDR3 for beta chain variable domain of TCR clone 244211 (TRBV7-9, TRBJ2-1)
CASSDVAGAPKMSSSS

SEQ ID NO: 488423 - protein, 13 aa, Homo sapiens
  CDR3 for alpha chain variable domain of TCR clone 244212 (TRAV12-1, TRAJ26)
CVVNNNYGQNFVF

SEQ ID NO: 488424 - protein, 15 aa, Homo sapiens
  CDR3 for beta chain variable domain of TCR clone 244212 (TRBV4-1, TRBJ2-7)
CASSQGLAGAYEQYF

SEQ ID NO: 488425 - protein, 12 aa, Homo sapiens
  CDR3 for alpha chain variable domain of TCR clone 244213 (TRAV25, TRAJ11)
CAGASGYSTLTF

SEQ ID NO: 488426 - protein, 14 aa, Homo sapiens
  CDR3 for beta chain variable domain of TCR clone 244213 (TRBV5-8, TRBJ2-3)
CASSLGQGTDAQYF

SEQ ID NO: 488427 - protein, 17 aa, Homo sapiens
  CDR3 for alpha chain variable domain of TCR clone 244214 (TRAV3, TRAJ6)
CAVRYGPRAGGSYIPTF

SEQ ID NO: 488428 - protein, 14 aa, Homo sapiens
  CDR3 for beta chain variable domain of TCR clone 244214 (TRBV7-2, TRBJ2-7)
CASRSQGAAYEQYF

SEQ ID NO: 488429 - protein, 12 aa, Homo sapiens
  CDR3 for alpha chain variable domain of TCR clone 244215 (TRAV8-3, TRAJ26)
CAGDNYGQNFVF

SEQ ID NO: 488430 - protein, 15 aa, Homo sapiens
  CDR3 for beta chain variable domain of TCR clone 244215 (TRBV5-1, TRBJ2-3)
CASSVTSVSTDTQYF

SEQ ID NO: 488431 - protein, 12 aa, Homo sapiens
  CDR3 for alpha chain variable domain of TCR clone 244216 (TRAV21, TRAJ49)
CAVSWTGNQFYF

SEQ ID NO: 488432 - protein, 18 aa, Homo sapiens
  CDR3 for beta chain variable domain of TCR clone 244216 (TRBV7-8, TRBJ2-1)
CASSLAEGLAGGLNEQFF

SEQ ID NO: 488433 - protein, 14 aa, Homo sapiens
  CDR3 for alpha chain variable domain of TCR clone 244217 (TRAV8-3, TRAJ35)
CAVVPPGFGNVLHF

SEQ ID NO: 488434 - protein, 15 aa, Homo sapiens
  CDR3 for beta chain variable domain of TCR clone 244217 (TRBV6-1, TRBJ2-2)
CASSAGQGYTGELFF

SEQ ID NO: 488435 - protein, 13 aa, Homo sapiens
  CDR3 for alpha chain variable domain of TCR clone 244218 (TRAV26-1, TRAJ47)
CILKGEYGSKLVF

SEQ ID NO: 488436 - protein, 15 aa, Homo sapiens
  CDR3 for beta chain variable domain of TCR clone 244218 (TRBV28, TRBJ1-3)
CASSMGWASGNTIYF

SEQ ID NO: 488437 - protein, 12 aa, Homo sapiens
  CDR3 for alpha chain variable domain of TCR clone 244219 (TRAV27, TRAJ35)
CAGADFGNVLHC

SEQ ID NO: 488438 - protein, 16 aa, Homo sapiens
  CDR3 for beta chain variable domain of TCR clone 244219 (TRBV6-1, TRBJ2-1)
CARILRQGSSYNEQFF

SEQ ID NO: 488439 - protein, 15 aa, Homo sapiens
  CDR3 for alpha chain variable domain of TCR clone 244220 (TRAV3, TRAJ29)
CAVRAPLSGNTPLVF

SEQ ID NO: 488440 - protein, 15 aa, Homo sapiens
  CDR3 for beta chain variable domain of TCR clone 244220 (TRBV28, TRBJ1-1)
CASRIKGVLNTEAFF

SEQ ID NO: 488441 - protein, 13 aa, Homo sapiens
  CDR3 for alpha chain variable domain of TCR clone 244221 (TRAV35, TRAJ32)
CAGVGGATNKLIF

SEQ ID NO: 488442 - protein, 13 aa, Homo sapiens
  CDR3 for beta chain variable domain of TCR clone 244221 (TRBV13, TRBJ2-1)
CASTPGSYNEQFF

SEQ ID NO: 488443 - protein, 13 aa, Homo sapiens
  CDR3 for alpha chain variable domain of TCR clone 244222 (TRAV21, TRAJ20)
CAVGVFADYKLSF

SEQ ID NO: 488444 - protein, 16 aa, Homo sapiens
  CDR3 for beta chain variable domain of TCR clone 244222 (TRBV6-1, TRBJ2-5)
CASSETLDRGAETQYF

SEQ ID NO: 488445 - protein, 13 aa, Homo sapiens
  CDR3 for alpha chain variable domain of TCR clone 244223 (TRAV1-1, TRAJ9)
CAAKNTGGFKTIF

SEQ ID NO: 488446 - protein, 13 aa, Homo sapiens
  CDR3 for beta chain variable domain of TCR clone 244223 (TRBV19, TRBJ1-5)
CASSEGSNQPQHF

SEQ ID NO: 488447 - protein, 13 aa, Homo sapiens
  CDR3 for alpha chain variable domain of TCR clone 244224 (TRAV8-4, TRAJ10)
CAAFTGGGNKLTF

SEQ ID NO: 488448 - protein, 12 aa, Homo sapiens
  CDR3 for beta chain variable domain of TCR clone 244224 (TRBV3-1, TRBJ2-1)
CACSQGSSGQFF

SEQ ID NO: 488449 - protein, 12 aa, Homo sapiens
  CDR3 for alpha chain variable domain of TCR clone 244225 (TRAV9-2, TRAJ23)
CALQNQGGKLIF

SEQ ID NO: 488450 - protein, 16 aa, Homo sapiens
  CDR3 for beta chain variable domain of TCR clone 244225 (TRBV24-1, TRBJ2-3)
CATSDPGTGATDTQYF

SEQ ID NO: 488451 - protein, 11 aa, Homo sapiens
  CDR3 for alpha chain variable domain of TCR clone 244226 (TRAV17, TRAJ9)
CGFTGGFKTIF

SEQ ID NO: 488452 - protein, 19 aa, Homo sapiens
  CDR3 for beta chain variable domain of TCR clone 244226 (TRBV19, TRBJ2-5)
CASSIGQVTDFFLGETQYF

SEQ ID NO: 488453 - protein, 15 aa, Homo sapiens
  CDR3 for alpha chain variable domain of TCR clone 244227 (TRAV3, TRAJ22)
CAVRDRGGSARQLDF

SEQ ID NO: 488454 - protein, 12 aa, Homo sapiens
  CDR3 for beta chain variable domain of TCR clone 244227 (TRBV12-4, TRBJ1-2)
CASSFIWLHLRF

SEQ ID NO: 488455 - protein, 15 aa, Homo sapiens
  CDR3 for alpha chain variable domain of TCR clone 244228 (TRAV3, TRAJ22)
CAVRDRGGSARQLTF

SEQ ID NO: 488456 - protein, 15 aa, Homo sapiens
  CDR3 for beta chain variable domain of TCR clone 244228 (TRBV7-2, TRBJ1-1)
CASSFAGDRDTEAFF

SEQ ID NO: 488457 - protein, 21 aa, Homo sapiens
  CDR3 for alpha chain variable domain of TCR clone 244229 (TRAV8-3, )
CAVGASNAGNNNIQNPDPAVY

SEQ ID NO: 488458 - protein, 15 aa, Homo sapiens
  CDR3 for beta chain variable domain of TCR clone 244229 (TRBV11-3, TRBJ1-3)
CASSLFGPSGNTIYF

SEQ ID NO: 488459 - protein, 14 aa, Homo sapiens
  CDR3 for alpha chain variable domain of TCR clone 244230 (TRAV1-2, TRAJ16)
CAVNRFSDGQKLLF

SEQ ID NO: 488460 - protein, 14 aa, Homo sapiens
  CDR3 for beta chain variable domain of TCR clone 244230 (TRBV10-2, TRBJ1-5)
CASSSTGRSQPQHF

SEQ ID NO: 488461 - protein, 17 aa, Homo sapiens
  CDR3 for alpha chain variable domain of TCR clone 244231 (TRAV3, TRAJ28)
CAVREAYSGAGSYQLTF

SEQ ID NO: 488462 - protein, 14 aa, Homo sapiens
  CDR3 for beta chain variable domain of TCR clone 244231 (TRBV7-2, TRBJ2-7)
CASSSISGFSEQYF

SEQ ID NO: 488463 - protein, 16 aa, Homo sapiens
  CDR3 for alpha chain variable domain of TCR clone 244232 (TRAV3, TRAJ37)
CAVRGKGSGSTGQLIF

SEQ ID NO: 488464 - protein, 20 aa, Homo sapiens
  CDR3 for beta chain variable domain of TCR clone 244232 (TRBV7-8, TRBJ2-2)
CASSHLFPGPTIHITGELFF

SEQ ID NO: 488465 - protein, 15 aa, Homo sapiens
  CDR3 for alpha chain variable domain of TCR clone 244233 (TRAV3, TRAJ13)
CAVRVYSGGYQKVTF

SEQ ID NO: 488466 - protein, 15 aa, Homo sapiens
  CDR3 for beta chain variable domain of TCR clone 244233 (TRBV5-6, TRBJ1-2)
CASSLWVAANYGYAF

SEQ ID NO: 488467 - protein, 14 aa, Homo sapiens
  CDR3 for alpha chain variable domain of TCR clone 244234 (TRAV8-3, TRAJ6)
CAVGVSGGSYIPTF

SEQ ID NO: 488468 - protein, 17 aa, Homo sapiens
  CDR3 for beta chain variable domain of TCR clone 244234 (TRBV18, TRBJ2-2)
CASSPSDPWQNTGELFF

SEQ ID NO: 488469 - protein, 15 aa, Homo sapiens
  CDR3 for alpha chain variable domain of TCR clone 244235 (TRAV3, TRAJ47)
CAVRDIGEYGNKLGF

SEQ ID NO: 488470 - protein, 14 aa, Homo sapiens
  CDR3 for beta chain variable domain of TCR clone 244235 (TRBV13, TRBJ2-5)
CASSLERVGETQYF

SEQ ID NO: 488471 - protein, 14 aa, Homo sapiens
  CDR3 for alpha chain variable domain of TCR clone 244236 (TRAV17, TRAJ57)
CATDPQGGSEKLVF

SEQ ID NO: 488472 - protein, 15 aa, Homo sapiens
  CDR3 for beta chain variable domain of TCR clone 244236 (TRBV7-3, TRBJ2-2)
CARSETGQGTGELFF

SEQ ID NO: 488473 - protein, 16 aa, Homo sapiens
  CDR3 for alpha chain variable domain of TCR clone 244237 (TRAV8-2, TRAJ50)
CVVSDHMKTSYDKMIF

SEQ ID NO: 488474 - protein, 15 aa, Homo sapiens
  CDR3 for beta chain variable domain of TCR clone 244237 (TRBV7-2, TRBJ2-1)
CASSFQADEYNEQFF

SEQ ID NO: 488475 - protein, 14 aa, Homo sapiens
  CDR3 for alpha chain variable domain of TCR clone 244238 (TRAV8-3, TRAJ17)
CAVALQSCRQQANF

SEQ ID NO: 488476 - protein, 15 aa, Homo sapiens
  CDR3 for beta chain variable domain of TCR clone 244238 (TRBV4-1, TRBJ2-7)
CASSQQGQGFDEQYF

SEQ ID NO: 488477 - protein, 13 aa, Homo sapiens
  CDR3 for alpha chain variable domain of TCR clone 244239 (TRAV13-2, TRAJ53)
CAENMGSNYKLTF

SEQ ID NO: 488478 - protein, 13 aa, Homo sapiens
  CDR3 for beta chain variable domain of TCR clone 244239 (TRBV4-1, TRBJ2-2)
CASSQESTGELFS

SEQ ID NO: 488479 - protein, 12 aa, Homo sapiens
  CDR3 for alpha chain variable domain of TCR clone 244240 (TRAV23/DV6, TRAJ58)
CAARLLRGETSR

SEQ ID NO: 488480 - protein, 14 aa, Homo sapiens
  CDR3 for beta chain variable domain of TCR clone 244240 (TRBV2, TRBJ2-7)
CASSLTSGGYEQYF

SEQ ID NO: 488481 - protein, 14 aa, Homo sapiens
  CDR3 for alpha chain variable domain of TCR clone 244241 (TRAV26-1, TRAJ45)
CIVRVVGGADGLTF

SEQ ID NO: 488482 - protein, 16 aa, Homo sapiens
  CDR3 for beta chain variable domain of TCR clone 244241 (TRBV7-9, TRBJ1-1)
CASSSTQVRSNTEAFF

SEQ ID NO: 488483 - protein, 14 aa, Homo sapiens
  CDR3 for alpha chain variable domain of TCR clone 244242 (TRAV1-2, TRAJ8)
CAVREDTGFQKLVF

SEQ ID NO: 488484 - protein, 12 aa, Homo sapiens
  CDR3 for beta chain variable domain of TCR clone 244242 (TRBV7-2, TRBJ2-5)
CASSQYQETQYI

SEQ ID NO: 488485 - protein, 16 aa, Homo sapiens
  CDR3 for alpha chain variable domain of TCR clone 244243 (TRAV12-3, TRAJ53)
CAMSPGSGGSNYKLTF

SEQ ID NO: 488486 - protein, 18 aa, Homo sapiens
  CDR3 for beta chain variable domain of TCR clone 244243 (TRBV18, TRBJ1-3)
CASSPRGGAGPSGNTIYF

SEQ ID NO: 488487 - protein, 12 aa, Homo sapiens
  CDR3 for alpha chain variable domain of TCR clone 244244 (TRAV12-2, TRAJ17)
CRGRAAGNKLTF

SEQ ID NO: 488488 - protein, 15 aa, Homo sapiens
  CDR3 for beta chain variable domain of TCR clone 244244 (TRBV5-5, TRBJ1-5)
CASSLKGGGEQPQHF

SEQ ID NO: 488489 - protein, 14 aa, Homo sapiens
  CDR3 for alpha chain variable domain of TCR clone 244245 (TRAV3, TRAJ10)
CAVRDTGGGNKLTF

SEQ ID NO: 488490 - protein, 15 aa, Homo sapiens
  CDR3 for beta chain variable domain of TCR clone 244245 (TRBV27, TRBJ2-1)
CASSNGGGSSNEQFF

SEQ ID NO: 488491 - protein, 10 aa, Homo sapiens
  CDR3 for alpha chain variable domain of TCR clone 244246 (TRAV20, TRAJ22)
CAAPARQLTF

SEQ ID NO: 488492 - protein, 14 aa, Homo sapiens
  CDR3 for beta chain variable domain of TCR clone 244246 (TRBV19, TRBJ2-1)
CASSMGSGATEQSF

SEQ ID NO: 488493 - protein, 12 aa, Homo sapiens
  CDR3 for alpha chain variable domain of TCR clone 244247 (TRAV25, TRAJ11)
CAGASGYSTLTF

SEQ ID NO: 488494 - protein, 15 aa, Homo sapiens
  CDR3 for beta chain variable domain of TCR clone 244247 (TRBV28, TRBJ2-7)
CASSPGGRGFYEQYF

SEQ ID NO: 488495 - protein, 11 aa, Homo sapiens
  CDR3 for alpha chain variable domain of TCR clone 244248 (TRAV2, TRAJ33)
CAVVSNYQLIW

SEQ ID NO: 488496 - protein, 12 aa, Homo sapiens
  CDR3 for beta chain variable domain of TCR clone 244248 (TRBV11-2, TRBJ2-2)
CASSLGGGELFF

SEQ ID NO: 488497 - protein, 16 aa, Homo sapiens
  CDR3 for alpha chain variable domain of TCR clone 244249 (TRAV3, TRAJ37)
CAVRGKGSGNTGKLIF

SEQ ID NO: 488498 - protein, 13 aa, Homo sapiens
  CDR3 for beta chain variable domain of TCR clone 244249 (TRBV7-3, TRBJ1-1)
CASSQDWGAEAYF

SEQ ID NO: 488499 - protein, 16 aa, Homo sapiens
  CDR3 for alpha chain variable domain of TCR clone 244250 (TRAV12-2, TRAJ28)
CAVITDSGAGSYQLTF

SEQ ID NO: 488500 - protein, 14 aa, Homo sapiens
  CDR3 for beta chain variable domain of TCR clone 244250 (TRBV25-1, TRBJ1-1)
CASTHLGRNTEAFF

SEQ ID NO: 488501 - protein, 11 aa, Homo sapiens
  CDR3 for alpha chain variable domain of TCR clone 244251 (TRAV38-2/DV8, TRAJ30)
CAYLRDDKIIF

SEQ ID NO: 488502 - protein, 14 aa, Homo sapiens
  CDR3 for beta chain variable domain of TCR clone 244251 (TRBV6-3, TRBJ1-5)
CASSYVQGGQPQHF

SEQ ID NO: 488503 - protein, 12 aa, Homo sapiens
  CDR3 for alpha chain variable domain of TCR clone 244252 (TRAV12-3, TRAJ5)
CAMDTGRRALTF

SEQ ID NO: 488504 - protein, 14 aa, Homo sapiens
  CDR3 for beta chain variable domain of TCR clone 244252 (TRBV20-1, TRBJ1-1)
CSAQTRIGGTEAFF

SEQ ID NO: 488505 - protein, 14 aa, Homo sapiens
  CDR3 for alpha chain variable domain of TCR clone 244253 (TRAV1-2, TRAJ16)
CVVNRFSDCQKLLF

SEQ ID NO: 488506 - protein, 15 aa, Homo sapiens
  CDR3 for beta chain variable domain of TCR clone 244253 (TRBV9, TRBJ1-6)
CASSVAGTGDSPLHF

SEQ ID NO: 488507 - protein, 10 aa, Homo sapiens
  CDR3 for alpha chain variable domain of TCR clone 244254 (TRAV13-1, TRAJ30)
CAARDEKIIF

SEQ ID NO: 488508 - protein, 15 aa, Homo sapiens
  CDR3 for beta chain variable domain of TCR clone 244254 (TRBV7-9, TRBJ1-2)
CASSLDREPNYGYTF

SEQ ID NO: 488509 - protein, 12 aa, Homo sapiens
  CDR3 for alpha chain variable domain of TCR clone 244255 (TRAV13-1, TRAJ17)
CAARTAGNKLTF

SEQ ID NO: 488510 - protein, 15 aa, Homo sapiens
  CDR3 for beta chain variable domain of TCR clone 244255 (TRBV7-6, TRBJ1-1)
CASSPQEGANTEAFF

SEQ ID NO: 488511 - protein, 18 aa, Homo sapiens
  CDR3 for alpha chain variable domain of TCR clone 244256 (TRAV21, TRAJ52)
CAVRPSPAGGTSYGKLTF

SEQ ID NO: 488512 - protein, 15 aa, Homo sapiens
  CDR3 for beta chain variable domain of TCR clone 244256 (TRBV12-4, TRBJ1-2)
CASSLAHRDGQAYTF

SEQ ID NO: 488513 - protein, 15 aa, Homo sapiens
  CDR3 for alpha chain variable domain of TCR clone 244257 (TRAV2, TRAJ9)
CAVEDRGTGGFKTIF

SEQ ID NO: 488514 - protein, 19 aa, Homo sapiens
  CDR3 for beta chain variable domain of TCR clone 244257 (TRBV28, TRBJ2-1)
CASSFSIRGSGRTRYEQFF

SEQ ID NO: 488515 - protein, 12 aa, Homo sapiens
  CDR3 for alpha chain variable domain of TCR clone 244258 (TRAV21, TRAJ13)
TGPSGGYQKVTF

SEQ ID NO: 488516 - protein, 15 aa, Homo sapiens
  CDR3 for beta chain variable domain of TCR clone 244258 (TRBV7-9, TRBJ1-6)
CASSSPGRGNSPLHF

SEQ ID NO: 488517 - protein, 16 aa, Homo sapiens
  CDR3 for alpha chain variable domain of TCR clone 244259 (TRAV26-1, TRAJ56)
CIVRARERGANSKLTF

SEQ ID NO: 488518 - protein, 13 aa, Homo sapiens
  CDR3 for beta chain variable domain of TCR clone 244259 (TRBV7-2, TRBJ1-1)
CASSLRANTKAFF

SEQ ID NO: 488519 - protein, 23 aa, Homo sapiens
  CDR3 for alpha chain variable domain of TCR clone 244260 (TRAV8-6, TRAJ36)
CAVSDWLGQKTSSLGVERDSPVF

SEQ ID NO: 488520 - protein, 15 aa, Homo sapiens
  CDR3 for beta chain variable domain of TCR clone 244260 (TRBV6-1, TRBJ2-3)
CASSERGGITDTQYF

SEQ ID NO: 488521 - protein, 11 aa, Homo sapiens
  CDR3 for alpha chain variable domain of TCR clone 244261 (TRAV35, TRAJ22)
CAGPGVGQLTF

SEQ ID NO: 488522 - protein, 11 aa, Homo sapiens
  CDR3 for beta chain variable domain of TCR clone 244261 (TRBV7-3, TRBJ2-2)
CASSLPGELFF

SEQ ID NO: 488523 - protein, 16 aa, Homo sapiens
  CDR3 for alpha chain variable domain of TCR clone 244262 (TRAV30, TRAJ24)
CGTEIVDADSWGKFQF

SEQ ID NO: 488524 - protein, 14 aa, Homo sapiens
  CDR3 for beta chain variable domain of TCR clone 244262 (TRBV7-2, TRBJ1-2)
CASNQTGSTYGYTF

SEQ ID NO: 488525 - protein, 15 aa, Homo sapiens
  CDR3 for alpha chain variable domain of TCR clone 244263 (TRAV35, TRAJ42)
CAGQGYGGSQVNLIF

SEQ ID NO: 488526 - protein, 13 aa, Homo sapiens
  CDR3 for beta chain variable domain of TCR clone 244263 (TRBV7-2, TRBJ1-1)
CASSLVQGAEAFF

SEQ ID NO: 488527 - protein, 13 aa, Homo sapiens
  CDR3 for alpha chain variable domain of TCR clone 244264 (TRAV8-4, TRAJ39)
STPPSDAGNMLTF

SEQ ID NO: 488528 - protein, 13 aa, Homo sapiens
  CDR3 for beta chain variable domain of TCR clone 244264 (TRBV12-4, TRBJ2-7)
CTSSPTETYEQYF

SEQ ID NO: 488529 - protein, 12 aa, Homo sapiens
  CDR3 for alpha chain variable domain of TCR clone 244265 (TRAV2, TRAJ3)
CAVRSSASKIIF

SEQ ID NO: 488530 - protein, 15 aa, Homo sapiens
  CDR3 for beta chain variable domain of TCR clone 244265 (TRBV20-1, TRBJ2-7)
CSARDRVSGMEEQYF

SEQ ID NO: 488531 - protein, 15 aa, Homo sapiens
  CDR3 for alpha chain variable domain of TCR clone 244266 (TRAV12-2, TRAJ8)
CAVREENTGFQKLVF

SEQ ID NO: 488532 - protein, 12 aa, Homo sapiens
  CDR3 for beta chain variable domain of TCR clone 244266 (TRBV11-2, TRBJ2-1)
CASSPGNNEQFF

SEQ ID NO: 488533 - protein, 10 aa, Homo sapiens
  CDR3 for alpha chain variable domain of TCR clone 244267 (TRAV23/DV6, TRAJ57)
CAASSTLSQG

SEQ ID NO: 488534 - protein, 14 aa, Homo sapiens
  CDR3 for beta chain variable domain of TCR clone 244267 (TRBV25-1, TRBJ1-1)
CASTHLGGNTQPFF

SEQ ID NO: 488535 - protein, 17 aa, Homo sapiens
  CDR3 for alpha chain variable domain of TCR clone 244268 (TRAV13-1, TRAJ28)
CAASPPYSGAGSYQLTF

SEQ ID NO: 488536 - protein, 13 aa, Homo sapiens
  CDR3 for beta chain variable domain of TCR clone 244268 (TRBV2, TRBJ1-1)
CARNPTGGFHAFF

SEQ ID NO: 488537 - protein, 14 aa, Homo sapiens
  CDR3 for alpha chain variable domain of TCR clone 244269 (TRAV12-2, TRAJ13)
CAVKKTGGYQKVTF

SEQ ID NO: 488538 - protein, 15 aa, Homo sapiens
  CDR3 for beta chain variable domain of TCR clone 244269 (TRBV9, TRBJ1-6)
CASSVAGTGDTPLHF

SEQ ID NO: 488539 - protein, 15 aa, Homo sapiens
  CDR3 for alpha chain variable domain of TCR clone 244270 (TRAV12-2, TRAJ56)
CAVNPFTGANSKLTF

SEQ ID NO: 488540 - protein, 13 aa, Homo sapiens
  CDR3 for beta chain variable domain of TCR clone 244270 (TRBV20-1, TRBJ1-2)
CSARARVYGGYTF

SEQ ID NO: 488541 - protein, 12 aa, Homo sapiens
  CDR3 for alpha chain variable domain of TCR clone 244271 (TRAV4, TRAJ26)
CLVGDYGQNFVY

SEQ ID NO: 488542 - protein, 13 aa, Homo sapiens
  CDR3 for beta chain variable domain of TCR clone 244271 (TRBV7-9, TRBJ1-2)
CASSLKQNYGYTF

SEQ ID NO: 488543 - protein, 10 aa, Homo sapiens
  CDR3 for alpha chain variable domain of TCR clone 244272 (TRAV8-4, TRAJ43)
CAVSADDMRF

SEQ ID NO: 488544 - protein, 14 aa, Homo sapiens
  CDR3 for beta chain variable domain of TCR clone 244272 (TRBV7-2, TRBJ2-7)
CASSPKTSFYEQYF

SEQ ID NO: 488545 - protein, 15 aa, Homo sapiens
  CDR3 for alpha chain variable domain of TCR clone 244273 (TRAV14/DV4, TRAJ33)
CAMREGRHSNYQLIW

SEQ ID NO: 488546 - protein, 15 aa, Homo sapiens
  CDR3 for beta chain variable domain of TCR clone 244273 (TRBV5-5, TRBJ1-5)
CASSSTPGSNQPQHF

SEQ ID NO: 488547 - protein, 10 aa, Homo sapiens
  CDR3 for alpha chain variable domain of TCR clone 244274 (TRAV8-4, TRAJ43)
CAVSADDKRF

SEQ ID NO: 488548 - protein, 15 aa, Homo sapiens
  CDR3 for beta chain variable domain of TCR clone 244274 (TRBV5-1, TRBJ2-3)
CASSVTSGSTDTQYF

SEQ ID NO: 488549 - protein, 14 aa, Homo sapiens
  CDR3 for alpha chain variable domain of TCR clone 244275 (TRAV21, TRAJ11)
CAVRRNSRYSTLTF

SEQ ID NO: 488550 - protein, 11 aa, Homo sapiens
  CDR3 for beta chain variable domain of TCR clone 244275 (TRBV11-2, TRBJ1-1)
CASSINTEAFF

SEQ ID NO: 488551 - protein, 13 aa, Homo sapiens
  CDR3 for alpha chain variable domain of TCR clone 244276 (TRAV29/DV5, TRAJ31)
CAASRNNNARLMF

SEQ ID NO: 488552 - protein, 13 aa, Homo sapiens
  CDR3 for beta chain variable domain of TCR clone 244276 (TRBV24-1, TRBJ2-2)
CATSDWSTGELFF

SEQ ID NO: 488553 - protein, 14 aa, Homo sapiens
  CDR3 for alpha chain variable domain of TCR clone 244277 (TRAV1-1, TRAJ27)
CAVIYNTNAGKSTF

SEQ ID NO: 488554 - protein, 15 aa, Homo sapiens
  CDR3 for beta chain variable domain of TCR clone 244277 (TRBV7-2, TRBJ2-1)
CASSSGLAGGNAQFF

SEQ ID NO: 488555 - protein, 15 aa, Homo sapiens
  CDR3 for alpha chain variable domain of TCR clone 244278 (TRAV17, TRAJ57)
CATGPSQGGSEKLGF

SEQ ID NO: 488556 - protein, 15 aa, Homo sapiens
  CDR3 for beta chain variable domain of TCR clone 244278 (TRBV25-1, TRBJ1-4)
CASSPGDSTNEKLFF

SEQ ID NO: 488557 - protein, 13 aa, Homo sapiens
  CDR3 for alpha chain variable domain of TCR clone 244279 (TRAV21, TRAJ27)
CAARPGHAGKSAF

SEQ ID NO: 488558 - protein, 14 aa, Homo sapiens
  CDR3 for beta chain variable domain of TCR clone 244279 (TRBV7-6, TRBJ2-3)
CASSLGTVTDTQYF

SEQ ID NO: 488559 - protein, 12 aa, Homo sapiens
  CDR3 for alpha chain variable domain of TCR clone 244280 (TRAV12-3, TRAJ17)
CAMTHTGNKLTF

SEQ ID NO: 488560 - protein, 15 aa, Homo sapiens
  CDR3 for beta chain variable domain of TCR clone 244280 (TRBV19, TRBJ2-1)
CASSILGEGRNEQFF

SEQ ID NO: 488561 - protein, 14 aa, Homo sapiens
  CDR3 for alpha chain variable domain of TCR clone 244281 (TRAV35, TRAJ53)
GRVNSGGSNYKLTF

SEQ ID NO: 488562 - protein, 14 aa, Homo sapiens
  CDR3 for beta chain variable domain of TCR clone 244281 (TRBV7-3, TRBJ2-2)
CASSLLGSTGQLFF

SEQ ID NO: 488563 - protein, 14 aa, Homo sapiens
  CDR3 for alpha chain variable domain of TCR clone 244282 (TRAV1-2, TRAJ16)
CAVNRFSDGQKLLV

SEQ ID NO: 488564 - protein, 15 aa, Homo sapiens
  CDR3 for beta chain variable domain of TCR clone 244282 (TRBV6-1, TRBJ2-3)
CASSERGGITDTQYF

SEQ ID NO: 488565 - protein, 15 aa, Homo sapiens
  CDR3 for alpha chain variable domain of TCR clone 244283 (TRAV38-1, TRAJ37)
CAFIHGSGNTGKLIF

SEQ ID NO: 488566 - protein, 12 aa, Homo sapiens
  CDR3 for beta chain variable domain of TCR clone 244283 (TRBV7-9, TRBJ2-7)
CASSFGSDEQYF

SEQ ID NO: 488567 - protein, 15 aa, Homo sapiens
  CDR3 for alpha chain variable domain of TCR clone 244284 (TRAV29/DV5, TRAJ37)
CAASPSTSNTGKLIF

SEQ ID NO: 488568 - protein, 15 aa, Homo sapiens
  CDR3 for beta chain variable domain of TCR clone 244284 (TRBV4-1, TRBJ2-7)
CASSQNTGRLYEQYF

SEQ ID NO: 488569 - protein, 13 aa, Homo sapiens
  CDR3 for alpha chain variable domain of TCR clone 244285 (TRAV36/DV7, TRAJ29)
CAVEPSGNTLLVF

SEQ ID NO: 488570 - protein, 11 aa, Homo sapiens
  CDR3 for beta chain variable domain of TCR clone 244285 (TRBV19, TRBJ2-7)
CASGNSYEQYF

SEQ ID NO: 488571 - protein, 18 aa, Homo sapiens
  CDR3 for alpha chain variable domain of TCR clone 244286 (TRAV21, TRAJ52)
CAVRPSPAGGTSYGKLTF

SEQ ID NO: 488572 - protein, 13 aa, Homo sapiens
  CDR3 for beta chain variable domain of TCR clone 244286 (TRBV7-3, TRBJ2-5)
CASSSDREETQYF

SEQ ID NO: 488573 - protein, 17 aa, Homo sapiens
  CDR3 for alpha chain variable domain of TCR clone 244287 (TRAV3, TRAJ6)
CAVSDGPRAGGSYIPTF

SEQ ID NO: 488574 - protein, 14 aa, Homo sapiens
  CDR3 for beta chain variable domain of TCR clone 244287 (TRBV7-2, TRBJ2-7)
RASSPKTSFYEQYF

SEQ ID NO: 488575 - protein, 14 aa, Homo sapiens
  CDR3 for alpha chain variable domain of TCR clone 244288 (TRAV1-2, TRAJ8)
CAVREDTGFQKLVF

SEQ ID NO: 488576 - protein, 11 aa, Homo sapiens
  CDR3 for beta chain variable domain of TCR clone 244288 (TRBV7-3, TRBJ2-1)
CASSLNNEQFF

SEQ ID NO: 488577 - protein, 14 aa, Homo sapiens
  CDR3 for alpha chain variable domain of TCR clone 244289 (TRAV1-2, TRAJ16)
RAVNRFSDGQKLLF

SEQ ID NO: 488578 - protein, 13 aa, Homo sapiens
  CDR3 for beta chain variable domain of TCR clone 244289 (TRBV4-1, TRBJ2-1)
CASSQAGGGEQFF

SEQ ID NO: 488579 - protein, 14 aa, Homo sapiens
  CDR3 for alpha chain variable domain of TCR clone 244290 (TRAV13-1, TRAJ35)
CAASKGGFGNVLHC

SEQ ID NO: 488580 - protein, 20 aa, Homo sapiens
  CDR3 for beta chain variable domain of TCR clone 244290 (TRBV7-3, TRBJ1-1)
GGTQPCISVPAARIGGQAFF

SEQ ID NO: 488581 - protein, 14 aa, Homo sapiens
  CDR3 for alpha chain variable domain of TCR clone 244291 (TRAV12-3, TRAJ3)
CNERGDSSASKIIF

SEQ ID NO: 488582 - protein, 13 aa, Homo sapiens
  CDR3 for beta chain variable domain of TCR clone 244291 (TRBV12-4, TRBJ1-5)
CASSPDRAQPQHF

SEQ ID NO: 488583 - protein, 14 aa, Homo sapiens
  CDR3 for alpha chain variable domain of TCR clone 244292 (TRAV1-2, TRAJ16)
CAVNRVSDGQKLLF

SEQ ID NO: 488584 - protein, 14 aa, Homo sapiens
  CDR3 for beta chain variable domain of TCR clone 244292 (TRBV7-3, TRBJ2-1)
CASSLAGGTNEQFF

SEQ ID NO: 488585 - protein, 11 aa, Homo sapiens
  CDR3 for alpha chain variable domain of TCR clone 244293 (TRAV1-1, TRAJ23)
CAVRQGGRLIF

SEQ ID NO: 488586 - protein, 15 aa, Homo sapiens
  CDR3 for beta chain variable domain of TCR clone 244293 (TRBV20-1, TRBJ1-1)
CSASRGVTGNTEAFF

SEQ ID NO: 488587 - protein, 12 aa, Homo sapiens
  CDR3 for alpha chain variable domain of TCR clone 244294 (TRAV8-4, TRAJ43)
CAVSVNYNDMRF

SEQ ID NO: 488588 - protein, 13 aa, Homo sapiens
  CDR3 for beta chain variable domain of TCR clone 244294 (TRBV7-9, TRBJ1-2)
CASSLKQNYGYTF

SEQ ID NO: 488589 - protein, 19 aa, Homo sapiens
  CDR3 for alpha chain variable domain of TCR clone 244295 (TRAV17, TRAJ54)
CFLLLCYDPVRTGSPELVF

SEQ ID NO: 488590 - protein, 16 aa, Homo sapiens
  CDR3 for beta chain variable domain of TCR clone 244295 (TRBV12-4, TRBJ2-3)
CASSLRLAETTDTQYF

SEQ ID NO: 488591 - protein, 16 aa, Homo sapiens
  CDR3 for alpha chain variable domain of TCR clone 244296 (TRAV17, TRAJ52)
CATDGAGGTSYGKLTF

SEQ ID NO: 488592 - protein, 13 aa, Homo sapiens
  CDR3 for beta chain variable domain of TCR clone 244296 (TRBV15, TRBJ1-2)
CATSRGQLYGYTF

SEQ ID NO: 488593 - protein, 14 aa, Homo sapiens
  CDR3 for alpha chain variable domain of TCR clone 244297 (TRAV12-3, TRAJ54)
RAMSALQGAQKLVF

SEQ ID NO: 488594 - protein, 15 aa, Homo sapiens
  CDR3 for beta chain variable domain of TCR clone 244297 (TRBV19, TRBJ2-4)
CASSTPGIAKNIQYF

SEQ ID NO: 488595 - protein, 14 aa, Homo sapiens
  CDR3 for alpha chain variable domain of TCR clone 244298 (TRAV12-2, TRAJ53)
CAVKGGGSNYKLTF

SEQ ID NO: 488596 - protein, 14 aa, Homo sapiens
  CDR3 for beta chain variable domain of TCR clone 244298 (TRBV7-2, TRBJ2-7)
CASRSQGAAYEQYF

SEQ ID NO: 488597 - protein, 11 aa, Homo sapiens
  CDR3 for alpha chain variable domain of TCR clone 244299 (TRAV1-2, TRAJ20)
CAVANDYKLSF

SEQ ID NO: 488598 - protein, 13 aa, Homo sapiens
  CDR3 for beta chain variable domain of TCR clone 244299 (TRBV18, TRBJ2-7)
CASFRDSAYEQYF

SEQ ID NO: 488599 - protein, 13 aa, Homo sapiens
  CDR3 for alpha chain variable domain of TCR clone 244300 (TRAV13-2, TRAJ48)
CAEMDFGKEKGTF

SEQ ID NO: 488600 - protein, 15 aa, Homo sapiens
  CDR3 for beta chain variable domain of TCR clone 244300 (TRBV7-9, TRBJ1-6)
CARSSPGRGNSPLHF

SEQ ID NO: 488601 - protein, 14 aa, Homo sapiens
  CDR3 for alpha chain variable domain of TCR clone 244301 (TRAV13-2, TRAJ32)
CAESLGGATNKLIF

SEQ ID NO: 488602 - protein, 16 aa, Homo sapiens
  CDR3 for beta chain variable domain of TCR clone 244301 (TRBV6-1, TRBJ2-5)
CASSETLDRGAETQYF

SEQ ID NO: 488603 - protein, 21 aa, Homo sapiens
  CDR3 for alpha chain variable domain of TCR clone 244302 (TRAV1-1, TRAJ6)
CLLLLRCERLERTGGSYIPTF

SEQ ID NO: 488604 - protein, 16 aa, Homo sapiens
  CDR3 for beta chain variable domain of TCR clone 244302 (TRBV5-1, TRBJ1-1)
CASSSGGNSLNTEAFF

SEQ ID NO: 488605 - protein, 18 aa, Homo sapiens
  CDR3 for alpha chain variable domain of TCR clone 244303 (TRAV13-1, TRAJ52)
CAAKKPNAGGTSYGKLTF

SEQ ID NO: 488606 - protein, 18 aa, Homo sapiens
  CDR3 for beta chain variable domain of TCR clone 244303 (TRBV4-1, TRBJ1-4)
CASSPRTGGAWTNEKLFF

SEQ ID NO: 488607 - protein, 13 aa, Homo sapiens
  CDR3 for alpha chain variable domain of TCR clone 244304 (TRAV12-2, TRAJ47)
CAVFMEYGNKLVF

SEQ ID NO: 488608 - protein, 14 aa, Homo sapiens
  CDR3 for beta chain variable domain of TCR clone 244304 (TRBV4-1, TRBJ1-5)
CGSSQGPTNQPQHF

SEQ ID NO: 488609 - protein, 18 aa, Homo sapiens
  CDR3 for alpha chain variable domain of TCR clone 244305 (TRAV26-1, TRAJ56)
CIVRVASRVTGANSKLTF

SEQ ID NO: 488610 - protein, 13 aa, Homo sapiens
  CDR3 for beta chain variable domain of TCR clone 244305 (TRBV19, TRBJ2-1)
CSPTFVLSGEQFF

SEQ ID NO: 488611 - protein, 13 aa, Homo sapiens
  CDR3 for alpha chain variable domain of TCR clone 244306 (TRAV8-3, TRAJ44)
CAVVPGTASKLTF

SEQ ID NO: 488612 - protein, 12 aa, Homo sapiens
  CDR3 for beta chain variable domain of TCR clone 244306 (TRBV19, TRBJ2-1)
CASSQISNEQFF

SEQ ID NO: 488613 - protein, 12 aa, Homo sapiens
  CDR3 for alpha chain variable domain of TCR clone 244307 (TRAV13-1, TRAJ21)
CAAKEGFNKFYF

SEQ ID NO: 488614 - protein, 13 aa, Homo sapiens
  CDR3 for beta chain variable domain of TCR clone 244307 (TRBV7-9, TRBJ2-7)
CASSPFDHYEQYF

SEQ ID NO: 488615 - protein, 14 aa, Homo sapiens
  CDR3 for alpha chain variable domain of TCR clone 244308 (TRAV12-2, TRAJ44)
CAVNPAGTASKLTF

SEQ ID NO: 488616 - protein, 15 aa, Homo sapiens
  CDR3 for beta chain variable domain of TCR clone 244308 (TRBV6-5, TRBJ2-1)
CASSSTSSFYNEQFF

SEQ ID NO: 488617 - protein, 13 aa, Homo sapiens
  CDR3 for alpha chain variable domain of TCR clone 244309 (TRAV27, TRAJ49)
CAPRPYTANQFYF

SEQ ID NO: 488618 - protein, 16 aa, Homo sapiens
  CDR3 for beta chain variable domain of TCR clone 244309 (TRBV4-1, TRBJ1-2)
YASSQDAGQVLYGYTF

SEQ ID NO: 488619 - protein, 16 aa, Homo sapiens
  CDR3 for alpha chain variable domain of TCR clone 244310 (TRAV30, TRAJ24)
CGTEMVDADSWGKFQF

SEQ ID NO: 488620 - protein, 15 aa, Homo sapiens
  CDR3 for beta chain variable domain of TCR clone 244310 (TRBV5-1, TRBJ2-2)
CASSSQGGNTGELFF

SEQ ID NO: 488621 - protein, 11 aa, Homo sapiens
  CDR3 for alpha chain variable domain of TCR clone 244311 (TRAV2, TRAJ13)
CASGGYQKVTF

SEQ ID NO: 488622 - protein, 13 aa, Homo sapiens
  CDR3 for beta chain variable domain of TCR clone 244311 (TRBV20-1, TRBJ2-5)
CSAREAFQETQYF

SEQ ID NO: 488623 - protein, 15 aa, Homo sapiens
  CDR3 for alpha chain variable domain of TCR clone 244312 (TRAV8-4, TRAJ36)
CAVRKSWTGANNPFF

SEQ ID NO: 488624 - protein, 17 aa, Homo sapiens
  CDR3 for beta chain variable domain of TCR clone 244312 (TRBV3-1, TRBJ2-2)
CASSQDSQGPNNGELFF

SEQ ID NO: 488625 - protein, 11 aa, Homo sapiens
  CDR3 for alpha chain variable domain of TCR clone 244313 (TRAV39, TRAJ49)
CAVDISTQFYF

SEQ ID NO: 488626 - protein, 13 aa, Homo sapiens
  CDR3 for beta chain variable domain of TCR clone 244313 (TRBV7-9, TRBJ1-2)
CASSLKQNYGYTF

SEQ ID NO: 488627 - protein, 15 aa, Homo sapiens
  CDR3 for alpha chain variable domain of TCR clone 244314 (TRAV17, TRAJ57)
CATGPSQGGSEKLVF

SEQ ID NO: 488628 - protein, 15 aa, Homo sapiens
  CDR3 for beta chain variable domain of TCR clone 244314 (TRBV5-1, TRBJ1-1)
CASSSTTGTNTEAFF

SEQ ID NO: 488629 - protein, 10 aa, Homo sapiens
  CDR3 for alpha chain variable domain of TCR clone 244315 (TRAV21, TRAJ34)
CAADTDKLIF

SEQ ID NO: 488630 - protein, 12 aa, Homo sapiens
  CDR3 for beta chain variable domain of TCR clone 244315 (TRBV7-8, TRBJ2-7)
CASSLGDREQYF

SEQ ID NO: 488631 - protein, 18 aa, Homo sapiens
  CDR3 for alpha chain variable domain of TCR clone 244316 (TRAV38-1, TRAJ40)
CDVFLCFTPYLRNLQYIF

SEQ ID NO: 488632 - protein, 14 aa, Homo sapiens
  CDR3 for beta chain variable domain of TCR clone 244316 (TRBV25-1, TRBJ1-1)
CASTHLGGNTEAFF

SEQ ID NO: 488633 - protein, 23 aa, Homo sapiens
  CDR3 for alpha chain variable domain of TCR clone 244317 (TRAV8-4, TRAJ38)
CARLNAGNNHIQNPDPAVYLLRD

SEQ ID NO: 488634 - protein, 14 aa, Homo sapiens
  CDR3 for beta chain variable domain of TCR clone 244317 (TRBV7-8, TRBJ2-3)
CASSLEAGTDTQYF

SEQ ID NO: 488635 - protein, 16 aa, Homo sapiens
  CDR3 for alpha chain variable domain of TCR clone 244318 (TRAV21, TRAJ52)
CAVTNAGGASYGKLTF

SEQ ID NO: 488636 - protein, 13 aa, Homo sapiens
  CDR3 for beta chain variable domain of TCR clone 244318 (TRBV20-1, TRBJ2-3)
CSARLAGTDTQYF

SEQ ID NO: 488637 - protein, 10 aa, Homo sapiens
  CDR3 for alpha chain variable domain of TCR clone 244319 (TRAV12-3, TRAJ34)
CAMSADKLIF

SEQ ID NO: 488638 - protein, 15 aa, Homo sapiens
  CDR3 for beta chain variable domain of TCR clone 244319 (TRBV4-1, TRBJ1-4)
CASSDTGGTNEKLFF

SEQ ID NO: 488639 - protein, 14 aa, Homo sapiens
  CDR3 for alpha chain variable domain of TCR clone 244320 (TRAV12-2, TRAJ17)
CAVLFKAAGNKLTF

SEQ ID NO: 488640 - protein, 13 aa, Homo sapiens
  CDR3 for beta chain variable domain of TCR clone 244320 (TRBV19, TRBJ1-2)
CASSRGQVYGYTF

SEQ ID NO: 488641 - protein, 11 aa, Homo sapiens
  CDR3 for alpha chain variable domain of TCR clone 244321 (TRAV21, TRAJ34)
CAVTNTDKLIF

SEQ ID NO: 488642 - protein, 18 aa, Homo sapiens
  CDR3 for beta chain variable domain of TCR clone 244321 (TRBV4-1, TRBJ1-5)
CASSQDPRGQGLNQPQHF

SEQ ID NO: 488643 - protein, 13 aa, Homo sapiens
  CDR3 for alpha chain variable domain of TCR clone 244322 (TRAV12-3, TRAJ54)
CAMKVQGAQKLVF

SEQ ID NO: 488644 - protein, 15 aa, Homo sapiens
  CDR3 for beta chain variable domain of TCR clone 244322 (TRBV28, TRBJ2-7)
CASSPPGTGSYEQYF

SEQ ID NO: 488645 - protein, 13 aa, Homo sapiens
  CDR3 for alpha chain variable domain of TCR clone 244323 (TRAV4, TRAJ28)
CLFIWGWELPTHF

SEQ ID NO: 488646 - protein, 14 aa, Homo sapiens
  CDR3 for beta chain variable domain of TCR clone 244323 (TRBV7-9, TRBJ2-5)
CASSLDTAQETQYF

SEQ ID NO: 488647 - protein, 11 aa, Homo sapiens
  CDR3 for alpha chain variable domain of TCR clone 244324 (TRAV2, TRAJ13)
CASGGYQKVTL

SEQ ID NO: 488648 - protein, 15 aa, Homo sapiens
  CDR3 for beta chain variable domain of TCR clone 244324 (TRBV27, TRBJ2-5)
CASSLYPRGGETQYF

SEQ ID NO: 488649 - protein, 13 aa, Homo sapiens
  CDR3 for alpha chain variable domain of TCR clone 244325 (TRAV12-3, TRAJ33)
CAMSVNSNYQLIW

SEQ ID NO: 488650 - protein, 13 aa, Homo sapiens
  CDR3 for beta chain variable domain of TCR clone 244325 (TRBV4-1, TRBJ2-2)
CASSQENTGEMFF

SEQ ID NO: 488651 - protein, 16 aa, Homo sapiens
  CDR3 for alpha chain variable domain of TCR clone 244326 (TRAV21, TRAJ52)
AASQPGDSATYLCAVR

SEQ ID NO: 488652 - protein, 15 aa, Homo sapiens
  CDR3 for beta chain variable domain of TCR clone 244326 (TRBV18, TRBJ1-5)
CAISPSDRSNQPQHF

SEQ ID NO: 488653 - protein, 12 aa, Homo sapiens
  CDR3 for alpha chain variable domain of TCR clone 244327 (TRAV29/DV5, TRAJ49)
CAATDTGNQFYF

SEQ ID NO: 488654 - protein, 18 aa, Homo sapiens
  CDR3 for beta chain variable domain of TCR clone 244327 (TRBV27, TRBJ2-1)
CASGNRAVGVGSKNEQFF

SEQ ID NO: 488655 - protein, 14 aa, Homo sapiens
  CDR3 for alpha chain variable domain of TCR clone 244328 (TRAV1-2, TRAJ16)
CAVNRFSDGQKLLF

SEQ ID NO: 488656 - protein, 16 aa, Homo sapiens
  CDR3 for beta chain variable domain of TCR clone 244328 (TRBV11-2, TRBJ2-1)
CASARGSYSHHNEQFF

SEQ ID NO: 488657 - protein, 15 aa, Homo sapiens
  CDR3 for alpha chain variable domain of TCR clone 244329 (TRAV3, TRAJ4)
CAQNMFSGGYNKLIF

SEQ ID NO: 488658 - protein, 14 aa, Homo sapiens
  CDR3 for beta chain variable domain of TCR clone 244329 (TRBV7-2, TRBJ2-7)
CASRSQGAAYEQYF

SEQ ID NO: 488659 - protein, 13 aa, Homo sapiens
  CDR3 for alpha chain variable domain of TCR clone 244330 (TRAV21, TRAJ15)
CAVANQAGTALIV

SEQ ID NO: 488660 - protein, 14 aa, Homo sapiens
  CDR3 for beta chain variable domain of TCR clone 244330 (TRBV27, TRBJ2-2)
CASSLGAATGELFF

SEQ ID NO: 488661 - protein, 22 aa, Homo sapiens
  CDR3 for alpha chain variable domain of TCR clone 244331 (TRAV13-2, )
CAEILSIPDIQNPDPAVYQLID

SEQ ID NO: 488662 - protein, 11 aa, Homo sapiens
  CDR3 for beta chain variable domain of TCR clone 244331 (TRBV20-1, TRBJ2-7)
RSARLSYEQYF

SEQ ID NO: 488663 - protein, 16 aa, Homo sapiens
  CDR3 for alpha chain variable domain of TCR clone 244332 (TRAV16, TRAJ42)
CSLSGLLGGSQGNLIF

SEQ ID NO: 488664 - protein, 15 aa, Homo sapiens
  CDR3 for beta chain variable domain of TCR clone 244332 (TRBV5-1, TRBJ2-1)
CASSPGGLAGNEQFF

SEQ ID NO: 488665 - protein, 17 aa, Homo sapiens
  CDR3 for alpha chain variable domain of TCR clone 244333 (TRAV3, TRAJ6)
CAVRDGPRAGGSYIPTF

SEQ ID NO: 488666 - protein, 17 aa, Homo sapiens
  CDR3 for beta chain variable domain of TCR clone 244333 (TRBV7-3, TRBJ2-3)
CASSLMKRIRGADTQYF

SEQ ID NO: 488667 - protein, 14 aa, Homo sapiens
  CDR3 for alpha chain variable domain of TCR clone 244334 (TRAV35, TRAJ22)
CAGPRPGYARQLTF

SEQ ID NO: 488668 - protein, 14 aa, Homo sapiens
  CDR3 for beta chain variable domain of TCR clone 244334 (TRBV11-3, TRBJ2-3)
CASSSGQGPDTQYF

SEQ ID NO: 488669 - protein, 13 aa, Homo sapiens
  CDR3 for alpha chain variable domain of TCR clone 244335 (TRAV16, TRAJ22)
SAMLAGSARHLTF

SEQ ID NO: 488670 - protein, 17 aa, Homo sapiens
  CDR3 for beta chain variable domain of TCR clone 244335 (TRBV13, TRBJ2-3)
CASSLSRVAGGRNTQYF

SEQ ID NO: 488671 - protein, 14 aa, Homo sapiens
  CDR3 for alpha chain variable domain of TCR clone 244336 (TRAV12-1, TRAJ42)
WVVIYGGSQGNLIF

SEQ ID NO: 488672 - protein, 12 aa, Homo sapiens
  CDR3 for beta chain variable domain of TCR clone 244336 (TRBV11-2, TRBJ2-4)
CASSSASGSEYF

SEQ ID NO: 488673 - protein, 12 aa, Homo sapiens
  CDR3 for alpha chain variable domain of TCR clone 244337 (TRAV24, TRAJ47)
CAFGAYGNKLVF

SEQ ID NO: 488674 - protein, 13 aa, Homo sapiens
  CDR3 for beta chain variable domain of TCR clone 244337 (TRBV7-2, TRBJ2-2)
CASSSVRAGELFF

SEQ ID NO: 488675 - protein, 18 aa, Homo sapiens
  CDR3 for alpha chain variable domain of TCR clone 244338 (TRAV26-2, TRAJ45)
CILRVDKYSGGGTDGLTF

SEQ ID NO: 488676 - protein, 11 aa, Homo sapiens
  CDR3 for beta chain variable domain of TCR clone 244338 (TRBV29-1, TRBJ2-5)
CSEDRTGTQYF

SEQ ID NO: 488677 - protein, 14 aa, Homo sapiens
  CDR3 for alpha chain variable domain of TCR clone 244339 (TRAV13-2, TRAJ43)
CAVIPTYNNNDMRF

SEQ ID NO: 488678 - protein, 15 aa, Homo sapiens
  CDR3 for beta chain variable domain of TCR clone 244339 (TRBV7-9, TRBJ2-2)
CASGPLDTFPGELFF

SEQ ID NO: 488679 - protein, 13 aa, Homo sapiens
  CDR3 for alpha chain variable domain of TCR clone 244340 (TRAV8-3, TRAJ28)
CAVGAVGSYQLTF

SEQ ID NO: 488680 - protein, 14 aa, Homo sapiens
  CDR3 for beta chain variable domain of TCR clone 244340 (TRBV7-9, TRBJ1-5)
CQSQGHQPNQPQHF

SEQ ID NO: 488681 - protein, 17 aa, Homo sapiens
  CDR3 for alpha chain variable domain of TCR clone 244341 (TRAV12-2, TRAJ6)
CAPQGPPRAGGSYIPTF

SEQ ID NO: 488682 - protein, 16 aa, Homo sapiens
  CDR3 for beta chain variable domain of TCR clone 244341 (TRBV19, TRBJ2-2)
CASSTARVSNTGELFF

SEQ ID NO: 488683 - protein, 12 aa, Homo sapiens
  CDR3 for alpha chain variable domain of TCR clone 244342 (TRAV25, TRAJ16)
CAGNRDGQKLLF

SEQ ID NO: 488684 - protein, 16 aa, Homo sapiens
  CDR3 for beta chain variable domain of TCR clone 244342 (TRBV29-1, TRBJ1-2)
CSVEANRDIANYGYTF

SEQ ID NO: 488685 - protein, 15 aa, Homo sapiens
  CDR3 for alpha chain variable domain of TCR clone 244343 (TRAV14/DV4, TRAJ12)
CAMREERDSSYKLIF

SEQ ID NO: 488686 - protein, 12 aa, Homo sapiens
  CDR3 for beta chain variable domain of TCR clone 244343 (TRBV11-2, TRBJ2-5)
CASSLVGETQYF

SEQ ID NO: 488687 - protein, 14 aa, Homo sapiens
  CDR3 for alpha chain variable domain of TCR clone 244344 (TRAV13-1, TRAJ10)
WAASSTGGGNKLTF

SEQ ID NO: 488688 - protein, 15 aa, Homo sapiens
  CDR3 for beta chain variable domain of TCR clone 244344 (TRBV11-3, TRBJ1-3)
CASSLFGPSGNTIYF

SEQ ID NO: 488689 - protein, 17 aa, Homo sapiens
  CDR3 for alpha chain variable domain of TCR clone 244345 (TRAV3, TRAJ42)
CAVGDRDYGGSQGNSIF

SEQ ID NO: 488690 - protein, 15 aa, Homo sapiens
  CDR3 for beta chain variable domain of TCR clone 244345 (TRBV2, TRBJ2-7)
CASSEGLARSYEQYF

SEQ ID NO: 488691 - protein, 14 aa, Homo sapiens
  CDR3 for alpha chain variable domain of TCR clone 244346 (TRAV1-1, TRAJ27)
CAVIYNTNAGKSTF

SEQ ID NO: 488692 - protein, 14 aa, Homo sapiens
  CDR3 for beta chain variable domain of TCR clone 244346 (TRBV5-1, TRBJ2-1)
CASSWSGSYNEQFF

SEQ ID NO: 488693 - protein, 15 aa, Homo sapiens
  CDR3 for alpha chain variable domain of TCR clone 244347 (TRAV13-1, TRAJ6)
CAAIHPLGGSYIPTF

SEQ ID NO: 488694 - protein, 14 aa, Homo sapiens
  CDR3 for beta chain variable domain of TCR clone 244347 (TRBV7-9, TRBJ2-2)
CASGLAINTGELFF

SEQ ID NO: 488695 - protein, 12 aa, Homo sapiens
  CDR3 for alpha chain variable domain of TCR clone 244348 (TRAV2, TRAJ33)
CAVEDSNYQLIW

SEQ ID NO: 488696 - protein, 15 aa, Homo sapiens
  CDR3 for beta chain variable domain of TCR clone 244348 (TRBV7-9, TRBJ1-6)
CASSSPGRGNSPLHF

SEQ ID NO: 488697 - protein, 13 aa, Homo sapiens
  CDR3 for alpha chain variable domain of TCR clone 244349 (TRAV13-1, TRAJ39)
CSKYSNAGNMLTF

SEQ ID NO: 488698 - protein, 16 aa, Homo sapiens
  CDR3 for beta chain variable domain of TCR clone 244349 (TRBV28, TRBJ2-7)
CASSLFFETGGPEQYF

SEQ ID NO: 488699 - protein, 14 aa, Homo sapiens
  CDR3 for alpha chain variable domain of TCR clone 244350 (TRAV17, TRAJ57)
CVTDPQGGSEKLVF

SEQ ID NO: 488700 - protein, 16 aa, Homo sapiens
  CDR3 for beta chain variable domain of TCR clone 244350 (TRBV27, TRBJ2-2)
CASSFRGLVRTGELFF

SEQ ID NO: 488701 - protein, 16 aa, Homo sapiens
  CDR3 for alpha chain variable domain of TCR clone 244351 (TRAV12-3, TRAJ53)
CAMSSGSGGSNYKLTF

SEQ ID NO: 488702 - protein, 14 aa, Homo sapiens
  CDR3 for beta chain variable domain of TCR clone 244351 (TRBV7-2, TRBJ1-1)
CASSFLTGTTEAFF

SEQ ID NO: 488703 - protein, 13 aa, Homo sapiens
  CDR3 for alpha chain variable domain of TCR clone 244352 (TRAV3, TRAJ21)
CVVREQDFNKFYF

SEQ ID NO: 488704 - protein, 13 aa, Homo sapiens
  CDR3 for beta chain variable domain of TCR clone 244352 (TRBV12-4, TRBJ1-2)
CASSYRVNYGYTF

SEQ ID NO: 488705 - protein, 15 aa, Homo sapiens
  CDR3 for alpha chain variable domain of TCR clone 244353 (TRAV3, TRAJ9)
CAVRARNTGGFNTIF

SEQ ID NO: 488706 - protein, 15 aa, Homo sapiens
  CDR3 for beta chain variable domain of TCR clone 244353 (TRBV27, TRBJ1-1)
CASSPYADPYTEAFF

SEQ ID NO: 488707 - protein, 13 aa, Homo sapiens
  CDR3 for alpha chain variable domain of TCR clone 244354 (TRAV21, TRAJ20)
CAVGLRVDYKLSF

SEQ ID NO: 488708 - protein, 14 aa, Homo sapiens
  CDR3 for beta chain variable domain of TCR clone 244354 (TRBV7-2, TRBJ1-1)
CASSFLTGTTEAFS

SEQ ID NO: 488709 - protein, 19 aa, Homo sapiens
  CDR3 for alpha chain variable domain of TCR clone 244355 (TRAV29/DV5, TRAJ49)
CSVLLCSKLTVDTGNQFYF

SEQ ID NO: 488710 - protein, 17 aa, Homo sapiens
  CDR3 for beta chain variable domain of TCR clone 244355 (TRBV13, TRBJ2-3)
CASSLSMVAGGRNTQYF

SEQ ID NO: 488711 - protein, 23 aa, Homo sapiens
  CDR3 for alpha chain variable domain of TCR clone 244356 (TRAV26-1, )
CIADNAGNNDIQNPDPAVYQLRD

SEQ ID NO: 488712 - protein, 13 aa, Homo sapiens
  CDR3 for beta chain variable domain of TCR clone 244356 (TRBV10-3, TRBJ2-7)
CASKLAVNYEQYF

SEQ ID NO: 488713 - protein, 14 aa, Homo sapiens
  CDR3 for alpha chain variable domain of TCR clone 244357 (TRAV4, TRAJ26)
CLVGPHNYGQNFVF

SEQ ID NO: 488714 - protein, 11 aa, Homo sapiens
  CDR3 for beta chain variable domain of TCR clone 244357 (TRBV11-2, TRBJ2-2)
CASSLPGELFF

SEQ ID NO: 488715 - protein, 15 aa, Homo sapiens
  CDR3 for alpha chain variable domain of TCR clone 244358 (TRAV3, TRAJ20)
CAVRDIKLSDYKLSF

SEQ ID NO: 488716 - protein, 14 aa, Homo sapiens
  CDR3 for beta chain variable domain of TCR clone 244358 (TRBV7-9, TRBJ2-1)
CASRPTGLRNEQFF

SEQ ID NO: 488717 - protein, 17 aa, Homo sapiens
  CDR3 for alpha chain variable domain of TCR clone 244359 (TRAV4, TRAJ10)
CLVGDITPTGGGNKLTF

SEQ ID NO: 488718 - protein, 17 aa, Homo sapiens
  CDR3 for beta chain variable domain of TCR clone 244359 (TRBV20-1, TRBJ2-2)
CSASGSGQGGLTGELFF

SEQ ID NO: 488719 - protein, 17 aa, Homo sapiens
  CDR3 for alpha chain variable domain of TCR clone 244360 (TRAV3, TRAJ6)
CAVRDGPRAGGSYIPTF

SEQ ID NO: 488720 - protein, 15 aa, Homo sapiens
  CDR3 for beta chain variable domain of TCR clone 244360 (TRBV19, TRBJ2-3)
CASSIAGGSTDTQYF

SEQ ID NO: 488721 - protein, 11 aa, Homo sapiens
  CDR3 for alpha chain variable domain of TCR clone 244361 (TRAV16, TRAJ42)
CALASQGNLIF

SEQ ID NO: 488722 - protein, 15 aa, Homo sapiens
  CDR3 for beta chain variable domain of TCR clone 244361 (TRBV27, TRBJ2-1)
CASSNGGGSSNEQFF

SEQ ID NO: 488723 - protein, 14 aa, Homo sapiens
  CDR3 for alpha chain variable domain of TCR clone 244362 (TRAV13-1, TRAJ35)
CAASKGGFGNVLNC

SEQ ID NO: 488724 - protein, 13 aa, Homo sapiens
  CDR3 for beta chain variable domain of TCR clone 244362 (TRBV7-3, TRBJ1-1)
CASSQEWGAEAFF

SEQ ID NO: 488725 - protein, 11 aa, Homo sapiens
  CDR3 for alpha chain variable domain of TCR clone 244363 (TRAV1-2, TRAJ31)
CAVNNNARLMF

SEQ ID NO: 488726 - protein, 14 aa, Homo sapiens
  CDR3 for beta chain variable domain of TCR clone 244363 (TRBV28, TRBJ1-2)
CASRIQGANYGYTF

SEQ ID NO: 488727 - protein, 14 aa, Homo sapiens
  CDR3 for alpha chain variable domain of TCR clone 244364 (TRAV12-3, TRAJ9)
CAMSPNTGGLKTIF

SEQ ID NO: 488728 - protein, 11 aa, Homo sapiens
  CDR3 for beta chain variable domain of TCR clone 244364 (TRBV29-1, TRBJ2-5)
CSEDRTGTQYF

SEQ ID NO: 488729 - protein, 14 aa, Homo sapiens
  CDR3 for alpha chain variable domain of TCR clone 244365 (TRAV12-2, TRAJ40)
CAVKIPSGTYKYIF

SEQ ID NO: 488730 - protein, 14 aa, Homo sapiens
  CDR3 for beta chain variable domain of TCR clone 244365 (TRBV11-2, TRBJ1-5)
CASSLDRGRQAQHF

SEQ ID NO: 488731 - protein, 17 aa, Homo sapiens
  CDR3 for alpha chain variable domain of TCR clone 244366 (TRAV3, TRAJ42)
CAVRDRDYGGSQGNLIF

SEQ ID NO: 488732 - protein, 15 aa, Homo sapiens
  CDR3 for beta chain variable domain of TCR clone 244366 (TRBV6-1, TRBJ2-1)
CASSELRGQYNEQFF

SEQ ID NO: 488733 - protein, 18 aa, Homo sapiens
  CDR3 for alpha chain variable domain of TCR clone 244367 (TRAV21, TRAJ52)
CAVRPSPAGGTSYGKPTF

SEQ ID NO: 488734 - protein, 17 aa, Homo sapiens
  CDR3 for beta chain variable domain of TCR clone 244367 (TRBV13, TRBJ2-3)
CASSLSRVAGGRNAQYF

SEQ ID NO: 488735 - protein, 14 aa, Homo sapiens
  CDR3 for alpha chain variable domain of TCR clone 244368 (TRAV12-1, TRAJ34)
CVVNLDYSTDKLIF

SEQ ID NO: 488736 - protein, 13 aa, Homo sapiens
  CDR3 for beta chain variable domain of TCR clone 244368 (TRBV29-1, TRBJ2-1)
CSVEGGRVNEQFF

SEQ ID NO: 488737 - protein, 13 aa, Homo sapiens
  CDR3 for alpha chain variable domain of TCR clone 244369 (TRAV17, TRAJ9)
CATGSTGGFKPIF

SEQ ID NO: 488738 - protein, 14 aa, Homo sapiens
  CDR3 for beta chain variable domain of TCR clone 244369 (TRBV7-8, TRBJ2-7)
CASTFRGGPNEQYF

SEQ ID NO: 488739 - protein, 10 aa, Homo sapiens
  CDR3 for alpha chain variable domain of TCR clone 244370 (TRAV1-2, TRAJ20)
CACNDYKLSF

SEQ ID NO: 488740 - protein, 16 aa, Homo sapiens
  CDR3 for beta chain variable domain of TCR clone 244370 (TRBV20-1, TRBJ2-1)
CSARDLKQGINNEQFF

SEQ ID NO: 488741 - protein, 16 aa, Homo sapiens
  CDR3 for alpha chain variable domain of TCR clone 244371 (TRAV27, TRAJ52)
CAGALAGGTSYGRLTF

SEQ ID NO: 488742 - protein, 12 aa, Homo sapiens
  CDR3 for beta chain variable domain of TCR clone 244371 (TRBV27, TRBJ2-1)
CASRGFYNEQFF

SEQ ID NO: 488743 - protein, 15 aa, Homo sapiens
  CDR3 for alpha chain variable domain of TCR clone 244372 (TRAV27, TRAJ38)
CAARRNAGTNRKLIW

SEQ ID NO: 488744 - protein, 15 aa, Homo sapiens
  CDR3 for beta chain variable domain of TCR clone 244372 (TRBV5-1, TRBJ2-1)
CASSPPRAPYNEQFF

SEQ ID NO: 488745 - protein, 15 aa, Homo sapiens
  CDR3 for alpha chain variable domain of TCR clone 244373 (TRAV21, TRAJ18)
CAVRDRGSTLGRLYF

SEQ ID NO: 488746 - protein, 15 aa, Homo sapiens
  CDR3 for beta chain variable domain of TCR clone 244373 (TRBV15, TRBJ1-1)
CATSLQGGRNTEAFF

SEQ ID NO: 488747 - protein, 15 aa, Homo sapiens
  CDR3 for alpha chain variable domain of TCR clone 244374 (TRAV36/DV7, TRAJ54)
CAVEKPVQGAQKLVV

SEQ ID NO: 488748 - protein, 14 aa, Homo sapiens
  CDR3 for beta chain variable domain of TCR clone 244374 (TRBV4-3, TRBJ2-2)
CASSQGHVTGELFF

SEQ ID NO: 488749 - protein, 14 aa, Homo sapiens
  CDR3 for alpha chain variable domain of TCR clone 244375 (TRAV2, TRAJ9)
CVVEDRSGGFKTIF

SEQ ID NO: 488750 - protein, 11 aa, Homo sapiens
  CDR3 for beta chain variable domain of TCR clone 244375 (TRBV7-9, TRBJ2-5)
CASSLGETQYF

SEQ ID NO: 488751 - protein, 14 aa, Homo sapiens
  CDR3 for alpha chain variable domain of TCR clone 244376 (TRAV21, TRAJ15)
CAVSLNRAGTALIF

SEQ ID NO: 488752 - protein, 11 aa, Homo sapiens
  CDR3 for beta chain variable domain of TCR clone 244376 (TRBV20-1, TRBJ2-7)
CGARTSYEQYF

SEQ ID NO: 488753 - protein, 15 aa, Homo sapiens
  CDR3 for alpha chain variable domain of TCR clone 244377 (TRAV3, TRAJ30)
CAVIDEYGRDDKIIF

SEQ ID NO: 488754 - protein, 16 aa, Homo sapiens
  CDR3 for beta chain variable domain of TCR clone 244377 (TRBV5-1, TRBJ2-5)
CASSLANHRGRETQYF

SEQ ID NO: 488755 - protein, 13 aa, Homo sapiens
  CDR3 for alpha chain variable domain of TCR clone 244378 (TRAV1-2, TRAJ12)
CAVSMDSSYKLIF

SEQ ID NO: 488756 - protein, 13 aa, Homo sapiens
  CDR3 for beta chain variable domain of TCR clone 244378 (TRBV4-2, TRBJ1-1)
CASSQAGNTEAFF

SEQ ID NO: 488757 - protein, 14 aa, Homo sapiens
  CDR3 for alpha chain variable domain of TCR clone 244379 (TRAV12-2, TRAJ17)
CAVLFKAAGNKLTF

SEQ ID NO: 488758 - protein, 16 aa, Homo sapiens
  CDR3 for beta chain variable domain of TCR clone 244379 (TRBV11-2, TRBJ2-2)
CASSLRTGNLIGELFF

SEQ ID NO: 488759 - protein, 14 aa, Homo sapiens
  CDR3 for alpha chain variable domain of TCR clone 244380 (TRAV30, TRAJ33)
CGTVTPRSNYQLIL

SEQ ID NO: 488760 - protein, 16 aa, Homo sapiens
  CDR3 for beta chain variable domain of TCR clone 244380 (TRBV3-1, TRBJ2-5)
CASSPGQFNGFGNQYF

SEQ ID NO: 488761 - protein, 13 aa, Homo sapiens
  CDR3 for alpha chain variable domain of TCR clone 244381 (TRAV20, TRAJ37)
CAGCSSNTGKLIL

SEQ ID NO: 488762 - protein, 11 aa, Homo sapiens
  CDR3 for beta chain variable domain of TCR clone 244381 (TRBV12-4, TRBJ2-3)
CASNATDTQYF

SEQ ID NO: 488763 - protein, 15 aa, Homo sapiens
  CDR3 for alpha chain variable domain of TCR clone 244382 (TRAV1-2, TRAJ30)
CAVRPHGKRDDKIIF

SEQ ID NO: 488764 - protein, 13 aa, Homo sapiens
  CDR3 for beta chain variable domain of TCR clone 244382 (TRBV4-1, TRBJ2-7)
CASSQGQAYEQYF

SEQ ID NO: 488765 - protein, 12 aa, Homo sapiens
  CDR3 for alpha chain variable domain of TCR clone 244383 (TRAV12-1, TRAJ30)
CVVNPRDDKIIF

SEQ ID NO: 488766 - protein, 18 aa, Homo sapiens
  CDR3 for beta chain variable domain of TCR clone 244383 (TRBV5-1, TRBJ2-7)
CASSLAGFGGMSSYKQYF

SEQ ID NO: 488767 - protein, 14 aa, Homo sapiens
  CDR3 for alpha chain variable domain of TCR clone 244384 (TRAV26-1, TRAJ21)
CIVRPPYNFNKFYF

SEQ ID NO: 488768 - protein, 14 aa, Homo sapiens
  CDR3 for beta chain variable domain of TCR clone 244384 (TRBV11-3, TRBJ2-1)
CASSATTSGSIQFY

SEQ ID NO: 488769 - protein, 12 aa, Homo sapiens
  CDR3 for alpha chain variable domain of TCR clone 244385 (TRAV16, TRAJ10)
CSRTGGGNKLTF

SEQ ID NO: 488770 - protein, 14 aa, Homo sapiens
  CDR3 for beta chain variable domain of TCR clone 244385 (TRBV24-1, TRBJ1-1)
CATSIPRGDTEAFF

SEQ ID NO: 488771 - protein, 13 aa, Homo sapiens
  CDR3 for alpha chain variable domain of TCR clone 244386 (TRAV17, TRAJ9)
CATDYTGGFKTIF

SEQ ID NO: 488772 - protein, 14 aa, Homo sapiens
  CDR3 for beta chain variable domain of TCR clone 244386 (TRBV19, TRBJ2-5)
CARSMTGQQETQYF

SEQ ID NO: 488773 - protein, 15 aa, Homo sapiens
  CDR3 for alpha chain variable domain of TCR clone 244387 (TRAV26-1, TRAJ22)
CIVRVSFWFCKATDL

SEQ ID NO: 488774 - protein, 15 aa, Homo sapiens
  CDR3 for beta chain variable domain of TCR clone 244387 (TRBV5-1, TRBJ2-1)
CASTGSGRTYNEQFF

SEQ ID NO: 488775 - protein, 17 aa, Homo sapiens
  CDR3 for alpha chain variable domain of TCR clone 244388 (TRAV3, TRAJ42)
CAVRDRDYGGSQGNLLF

SEQ ID NO: 488776 - protein, 12 aa, Homo sapiens
  CDR3 for beta chain variable domain of TCR clone 244388 (TRBV20-1, TRBJ2-7)
CSAITPTKEQDF

SEQ ID NO: 488777 - protein, 11 aa, Homo sapiens
  CDR3 for alpha chain variable domain of TCR clone 244389 (TRAV12-2, TRAJ23)
CAVDQGGKLIF

SEQ ID NO: 488778 - protein, 13 aa, Homo sapiens
  CDR3 for beta chain variable domain of TCR clone 244389 (TRBV7-7, TRBJ2-3)
CASSLSRADTQYF

SEQ ID NO: 488779 - protein, 13 aa, Homo sapiens
  CDR3 for alpha chain variable domain of TCR clone 244390 (TRAV12-2, TRAJ34)
CAVRGYNTDKLIF

SEQ ID NO: 488780 - protein, 15 aa, Homo sapiens
  CDR3 for beta chain variable domain of TCR clone 244390 (TRBV28, TRBJ2-1)
CSSRTGAGVIARQFF

SEQ ID NO: 488781 - protein, 14 aa, Homo sapiens
  CDR3 for alpha chain variable domain of TCR clone 244391 (TRAV2, TRAJ37)
CAVDFTSNTGKLIF

SEQ ID NO: 488782 - protein, 15 aa, Homo sapiens
  CDR3 for beta chain variable domain of TCR clone 244391 (TRBV20-1, TRBJ1-1)
CSASRGVTANTEAFF

SEQ ID NO: 488783 - protein, 14 aa, Homo sapiens
  CDR3 for alpha chain variable domain of TCR clone 244392 (TRAV12-2, TRAJ13)
CAVKKTGGYQRATF

SEQ ID NO: 488784 - protein, 11 aa, Homo sapiens
  CDR3 for beta chain variable domain of TCR clone 244392 (TRBV11-2, TRBJ2-2)
CASSLPGELFF

SEQ ID NO: 488785 - protein, 14 aa, Homo sapiens
  CDR3 for alpha chain variable domain of TCR clone 244393 (TRAV12-2, TRAJ13)
CAVKKTGGYQKVTF

SEQ ID NO: 488786 - protein, 14 aa, Homo sapiens
  CDR3 for beta chain variable domain of TCR clone 244393 (TRBV5-7, TRBJ1-2)
CASILVRGDYGYTF

SEQ ID NO: 488787 - protein, 17 aa, Homo sapiens
  CDR3 for alpha chain variable domain of TCR clone 244394 (TRAV3, TRAJ6)
CAVRDGPRAGGSHIPTS

SEQ ID NO: 488788 - protein, 14 aa, Homo sapiens
  CDR3 for beta chain variable domain of TCR clone 244394 (TRBV7-2, TRBJ2-7)
CASSPKTSFYEQYF

SEQ ID NO: 488789 - protein, 14 aa, Homo sapiens
  CDR3 for alpha chain variable domain of TCR clone 244395 (TRAV12-1, TRAJ42)
CVAIYGGSQGNLIF

SEQ ID NO: 488790 - protein, 13 aa, Homo sapiens
  CDR3 for beta chain variable domain of TCR clone 244395 (TRBV18, TRBJ2-5)
CASSPPGKETQYF

SEQ ID NO: 488791 - protein, 16 aa, Homo sapiens
  CDR3 for alpha chain variable domain of TCR clone 244396 (TRAV4, TRAJ5)
CLVGPDHGHGQESTYF

SEQ ID NO: 488792 - protein, 13 aa, Homo sapiens
  CDR3 for beta chain variable domain of TCR clone 244396 (TRBV7-3, TRBJ2-2)
CASSLWSVGELFF

SEQ ID NO: 488793 - protein, 13 aa, Homo sapiens
  CDR3 for alpha chain variable domain of TCR clone 244397 (TRAV13-1, TRAJ6)
CAASRGGSYIPTF

SEQ ID NO: 488794 - protein, 15 aa, Homo sapiens
  CDR3 for beta chain variable domain of TCR clone 244397 (TRBV7-3, TRBJ2-1)
CASSQRGGALIEQFF

SEQ ID NO: 488795 - protein, 12 aa, Homo sapiens
  CDR3 for alpha chain variable domain of TCR clone 244398 (TRAV36/DV7, TRAJ54)
CAVVRGAQKLVL

SEQ ID NO: 488796 - protein, 14 aa, Homo sapiens
  CDR3 for beta chain variable domain of TCR clone 244398 (TRBV7-3, TRBJ1-1)
CASSLEGGNTEAFF

SEQ ID NO: 488797 - protein, 15 aa, Homo sapiens
  CDR3 for alpha chain variable domain of TCR clone 244399 (TRAV17, TRAJ37)
CATDGGSSNTGKLIF

SEQ ID NO: 488798 - protein, 15 aa, Homo sapiens
  CDR3 for beta chain variable domain of TCR clone 244399 (TRBV9, TRBJ1-6)
CASSVAGTGDSPLHF

SEQ ID NO: 488799 - protein, 19 aa, Homo sapiens
  CDR3 for alpha chain variable domain of TCR clone 244400 (TRAV26-1, TRAJ52)
CIVRAHRNAGGISYGKLTF

SEQ ID NO: 488800 - protein, 13 aa, Homo sapiens
  CDR3 for beta chain variable domain of TCR clone 244400 (TRBV20-1, TRBJ2-7)
CSATHTSGYEQYF

SEQ ID NO: 488801 - protein, 17 aa, Homo sapiens
  CDR3 for alpha chain variable domain of TCR clone 244401 (TRAV8-3, TRAJ34)
CAIPGKLIFGTGTRLQV

SEQ ID NO: 488802 - protein, 14 aa, Homo sapiens
  CDR3 for beta chain variable domain of TCR clone 244401 (TRBV5-7, TRBJ2-1)
CQQPPTSGVGEQFF

SEQ ID NO: 488803 - protein, 12 aa, Homo sapiens
  CDR3 for alpha chain variable domain of TCR clone 244402 (TRAV8-3, TRAJ20)
CAVGANDYKLSF

SEQ ID NO: 488804 - protein, 12 aa, Homo sapiens
  CDR3 for beta chain variable domain of TCR clone 244402 (TRBV12-4, TRBJ2-3)
CASSSTTDTQYF

SEQ ID NO: 488805 - protein, 11 aa, Homo sapiens
  CDR3 for alpha chain variable domain of TCR clone 244403 (TRAV4, TRAJ31)
CLVGDNARLMF

SEQ ID NO: 488806 - protein, 16 aa, Homo sapiens
  CDR3 for beta chain variable domain of TCR clone 244403 (TRBV7-2, TRBJ2-5)
CDSSSKWLSGQETQYF

SEQ ID NO: 488807 - protein, 15 aa, Homo sapiens
  CDR3 for alpha chain variable domain of TCR clone 244404 (TRAV8-4, TRAJ3)
CAVIGENLVQQCFQA

SEQ ID NO: 488808 - protein, 12 aa, Homo sapiens
  CDR3 for beta chain variable domain of TCR clone 244404 (TRBV11-2, TRBJ2-2)
CASSLGGGELFF

SEQ ID NO: 488809 - protein, 16 aa, Homo sapiens
  CDR3 for alpha chain variable domain of TCR clone 244405 (TRAV30, TRAJ24)
CVTEIVDADSWGKFQF

SEQ ID NO: 488810 - protein, 19 aa, Homo sapiens
  CDR3 for beta chain variable domain of TCR clone 244405 (TRBV25-1, TRBJ2-2)
CAILVYRVDRGRKTGELFF

SEQ ID NO: 488811 - protein, 16 aa, Homo sapiens
  CDR3 for alpha chain variable domain of TCR clone 244406 (TRAV3, TRAJ4)
RAVRPSPSGVYNKLIF

SEQ ID NO: 488812 - protein, 12 aa, Homo sapiens
  CDR3 for beta chain variable domain of TCR clone 244406 (TRBV7-9, TRBJ2-7)
CASSQGIYEQYF

SEQ ID NO: 488813 - protein, 15 aa, Homo sapiens
  CDR3 for alpha chain variable domain of TCR clone 244407 (TRAV25, TRAJ10)
CAVPLLTGGGNKLTF

SEQ ID NO: 488814 - protein, 15 aa, Homo sapiens
  CDR3 for beta chain variable domain of TCR clone 244407 (TRBV12-5, TRBJ2-2)
CASGRLGGNTGELFF

SEQ ID NO: 488815 - protein, 17 aa, Homo sapiens
  CDR3 for alpha chain variable domain of TCR clone 244408 (TRAV26-2, TRAJ42)
CILRDVGYGGSQGNIIF

SEQ ID NO: 488816 - protein, 16 aa, Homo sapiens
  CDR3 for beta chain variable domain of TCR clone 244408 (TRBV6-3, TRBJ2-2)
CASSFSGTDNTGELFF

SEQ ID NO: 488817 - protein, 10 aa, Homo sapiens
  CDR3 for alpha chain variable domain of TCR clone 244409 (TRAV12-2, TRAJ10)
CAAWTGVETH

SEQ ID NO: 488818 - protein, 17 aa, Homo sapiens
  CDR3 for beta chain variable domain of TCR clone 244409 (TRBV13, TRBJ2-3)
CASSLSRVAGGRNTRYF

SEQ ID NO: 488819 - protein, 15 aa, Homo sapiens
  CDR3 for alpha chain variable domain of TCR clone 244410 (TRAV3, TRAJ5)
CAGRDLDTGRRALTF

SEQ ID NO: 488820 - protein, 14 aa, Homo sapiens
  CDR3 for beta chain variable domain of TCR clone 244410 (TRBV25-1, TRBJ1-1)
CASTHLGGNTEAFF

SEQ ID NO: 488821 - protein, 14 aa, Homo sapiens
  CDR3 for alpha chain variable domain of TCR clone 244411 (TRAV9-2, TRAJ15)
CALSESQAGTALIF

SEQ ID NO: 488822 - protein, 12 aa, Homo sapiens
  CDR3 for beta chain variable domain of TCR clone 244411 (TRBV28, TRBJ2-3)
CASSLYRDTQYF

SEQ ID NO: 488823 - protein, 14 aa, Homo sapiens
  CDR3 for alpha chain variable domain of TCR clone 244412 (TRAV8-4, TRAJ34)
CAVSDPGDTYKLIF

SEQ ID NO: 488824 - protein, 14 aa, Homo sapiens
  CDR3 for beta chain variable domain of TCR clone 244412 (TRBV11-2, TRBJ2-5)
CASSRTGGIETQYF

SEQ ID NO: 488825 - protein, 17 aa, Homo sapiens
  CDR3 for alpha chain variable domain of TCR clone 244413 (TRAV1-2, TRAJ8)
CAVRDPDENTGFQKLVF

SEQ ID NO: 488826 - protein, 16 aa, Homo sapiens
  CDR3 for beta chain variable domain of TCR clone 244413 (TRBV7-9, TRBJ2-2)
CASSGFGGANTGELYS

SEQ ID NO: 488827 - protein, 14 aa, Homo sapiens
  CDR3 for alpha chain variable domain of TCR clone 244414 (TRAV12-2, TRAJ40)
CAVKIPSGTTKYIF

SEQ ID NO: 488828 - protein, 14 aa, Homo sapiens
  CDR3 for beta chain variable domain of TCR clone 244414 (TRBV20-1, TRBJ1-1)
CSAQTRIGGTEAFF

SEQ ID NO: 488829 - protein, 14 aa, Homo sapiens
  CDR3 for alpha chain variable domain of TCR clone 244415 (TRAV34, TRAJ22)
CGADTSGSARQLTF

SEQ ID NO: 488830 - protein, 16 aa, Homo sapiens
  CDR3 for beta chain variable domain of TCR clone 244415 (TRBV2, TRBJ2-3)
CQHRGAPRRWTDTQYF

SEQ ID NO: 488831 - protein, 14 aa, Homo sapiens
  CDR3 for alpha chain variable domain of TCR clone 244416 (TRAV29/DV5, TRAJ36)
CAARRKTVANNLFF

SEQ ID NO: 488832 - protein, 15 aa, Homo sapiens
  CDR3 for beta chain variable domain of TCR clone 244416 (TRBV9, TRBJ1-6)
CASSVAGTGDSPLHF

SEQ ID NO: 488833 - protein, 13 aa, Homo sapiens
  CDR3 for alpha chain variable domain of TCR clone 244417 (TRAV12-1, TRAJ11)
CVATRGGYSTLTF

SEQ ID NO: 488834 - protein, 13 aa, Homo sapiens
  CDR3 for beta chain variable domain of TCR clone 244417 (TRBV20-1, TRBJ1-2)
CSARDQGAYGYTF

SEQ ID NO: 488835 - protein, 11 aa, Homo sapiens
  CDR3 for alpha chain variable domain of TCR clone 244418 (TRAV21, TRAJ7)
CAAYGNNRLAF

SEQ ID NO: 488836 - protein, 14 aa, Homo sapiens
  CDR3 for beta chain variable domain of TCR clone 244418 (TRBV4-1, TRBJ2-7)
CASSRTGVAFEQYL

SEQ ID NO: 488837 - protein, 17 aa, Homo sapiens
  CDR3 for alpha chain variable domain of TCR clone 244419 (TRAV3, TRAJ7)
CAVRDMSPFEGTTDSLL

SEQ ID NO: 488838 - protein, 17 aa, Homo sapiens
  CDR3 for beta chain variable domain of TCR clone 244419 (TRBV15, TRBJ1-2)
CATSGREIDVVNYGYTF

SEQ ID NO: 488839 - protein, 15 aa, Homo sapiens
  CDR3 for alpha chain variable domain of TCR clone 244420 (TRAV23/DV6, TRAJ15)
CAASRRNQAGTALIF

SEQ ID NO: 488840 - protein, 13 aa, Homo sapiens
  CDR3 for beta chain variable domain of TCR clone 244420 (TRBV15, TRBJ2-7)
CATSTTGHYEQYF

SEQ ID NO: 488841 - protein, 14 aa, Homo sapiens
  CDR3 for alpha chain variable domain of TCR clone 244421 (TRAV8-3, TRAJ39)
CAVGADNAGNMLTF

SEQ ID NO: 488842 - protein, 15 aa, Homo sapiens
  CDR3 for beta chain variable domain of TCR clone 244421 (TRBV4-3, TRBJ1-1)
CASSQGLGRGTEAFF

SEQ ID NO: 488843 - protein, 17 aa, Homo sapiens
  CDR3 for alpha chain variable domain of TCR clone 244422 (TRAV27, TRAJ18)
CAGLHRGRGSTLWRLYF

SEQ ID NO: 488844 - protein, 14 aa, Homo sapiens
  CDR3 for beta chain variable domain of TCR clone 244422 (TRBV20-1, TRBJ1-5)
CSARGRGSDQPQHF

SEQ ID NO: 488845 - protein, 18 aa, Homo sapiens
  CDR3 for alpha chain variable domain of TCR clone 244423 (TRAV14/DV4, TRAJ52)
CAMREANAGGTSYGKLTF

SEQ ID NO: 488846 - protein, 14 aa, Homo sapiens
  CDR3 for beta chain variable domain of TCR clone 244423 (TRBV7-2, TRBJ2-7)
CASSPKTSFYEQYF

SEQ ID NO: 488847 - protein, 17 aa, Homo sapiens
  CDR3 for alpha chain variable domain of TCR clone 244424 (TRAV9-2, TRAJ45)
CALSGYYSGGGADGLTF

SEQ ID NO: 488848 - protein, 13 aa, Homo sapiens
  CDR3 for beta chain variable domain of TCR clone 244424 (TRBV27, TRBJ2-7)
CASSLTTGYEQYF

SEQ ID NO: 488849 - protein, 18 aa, Homo sapiens
  CDR3 for alpha chain variable domain of TCR clone 244425 (TRAV21, TRAJ52)
CAVRPSPAGGTSYGKLTF

SEQ ID NO: 488850 - protein, 15 aa, Homo sapiens
  CDR3 for beta chain variable domain of TCR clone 244425 (TRBV7-3, TRBJ2-1)
CQQLQTSGRYNEQFF

SEQ ID NO: 488851 - protein, 15 aa, Homo sapiens
  CDR3 for alpha chain variable domain of TCR clone 244426 (TRAV21, TRAJ53)
CATLNSGGSNYKLTF

SEQ ID NO: 488852 - protein, 16 aa, Homo sapiens
  CDR3 for beta chain variable domain of TCR clone 244426 (TRBV24-1, TRBJ2-3)
CATSDPGTGATDTQYL

SEQ ID NO: 488853 - protein, 17 aa, Homo sapiens
  CDR3 for alpha chain variable domain of TCR clone 244427 (TRAV23/DV6, TRAJ57)
CAASSTLSQGGSEKLVF

SEQ ID NO: 488854 - protein, 14 aa, Homo sapiens
  CDR3 for beta chain variable domain of TCR clone 244427 (TRBV25-1, TRBJ1-1)
CASTHLGGNIEAFF

SEQ ID NO: 488855 - protein, 14 aa, Homo sapiens
  CDR3 for alpha chain variable domain of TCR clone 244428 (TRAV12-1, TRAJ17)
CVVNFKAAGNKLTF

SEQ ID NO: 488856 - protein, 12 aa, Homo sapiens
  CDR3 for beta chain variable domain of TCR clone 244428 (TRBV29-1, TRBJ2-3)
CSVTGGADTQYF

SEQ ID NO: 488857 - protein, 15 aa, Homo sapiens
  CDR3 for alpha chain variable domain of TCR clone 244429 (TRAV27, TRAJ38)
CAARRNAGNNRKLIW

SEQ ID NO: 488858 - protein, 15 aa, Homo sapiens
  CDR3 for beta chain variable domain of TCR clone 244429 (TRBV20-1, TRBJ1-5)
CSAFKNGQRNQPQHF

SEQ ID NO: 488859 - protein, 11 aa, Homo sapiens
  CDR3 for alpha chain variable domain of TCR clone 244430 (TRAV17, TRAJ36)
CAPTGTNNLFF

SEQ ID NO: 488860 - protein, 14 aa, Homo sapiens
  CDR3 for beta chain variable domain of TCR clone 244430 (TRBV5-1, TRBJ2-1)
CASSLVTEYNEQFF

SEQ ID NO: 488861 - protein, 12 aa, Homo sapiens
  CDR3 for alpha chain variable domain of TCR clone 244431 (TRAV27, TRAJ36)
ASTPAGANNLFF

SEQ ID NO: 488862 - protein, 13 aa, Homo sapiens
  CDR3 for beta chain variable domain of TCR clone 244431 (TRBV7-9, TRBJ2-3)
CASSPGSTDTLYF

SEQ ID NO: 488863 - protein, 13 aa, Homo sapiens
  CDR3 for alpha chain variable domain of TCR clone 244432 (TRAV8-1, TRAJ32)
CAAAGGATNKLIF

SEQ ID NO: 488864 - protein, 18 aa, Homo sapiens
  CDR3 for beta chain variable domain of TCR clone 244432 (TRBV18, TRBJ2-3)
CASSYTSGAAGGTDTQYF

SEQ ID NO: 488865 - protein, 12 aa, Homo sapiens
  CDR3 for alpha chain variable domain of TCR clone 244433 (TRAV8-3, TRAJ41)
CAVALSGYALNF

SEQ ID NO: 488866 - protein, 18 aa, Homo sapiens
  CDR3 for beta chain variable domain of TCR clone 244433 (TRBV20-1, TRBJ2-6)
CSAETTPTHGFGANVLTF

SEQ ID NO: 488867 - protein, 14 aa, Homo sapiens
  CDR3 for alpha chain variable domain of TCR clone 244434 (TRAV29/DV5, TRAJ20)
CAATIRSNDYKLRF

SEQ ID NO: 488868 - protein, 15 aa, Homo sapiens
  CDR3 for beta chain variable domain of TCR clone 244434 (TRBV20-1, TRBJ2-1)
CSASSAGSSYNEQFF

SEQ ID NO: 488869 - protein, 14 aa, Homo sapiens
  CDR3 for alpha chain variable domain of TCR clone 244435 (TRAV8-3, TRAJ4)
CAVGAAGGYNKLIF

SEQ ID NO: 488870 - protein, 14 aa, Homo sapiens
  CDR3 for beta chain variable domain of TCR clone 244435 (TRBV20-1, TRBJ2-3)
CSARGGTSTDTQYF

SEQ ID NO: 488871 - protein, 12 aa, Homo sapiens
  CDR3 for alpha chain variable domain of TCR clone 244436 (TRAV13-1, TRAJ9)
CASHTGGFNTIF

SEQ ID NO: 488872 - protein, 18 aa, Homo sapiens
  CDR3 for beta chain variable domain of TCR clone 244436 (TRBV11-2, TRBJ2-3)
CASSLGGASRGAPNTQYF

SEQ ID NO: 488873 - protein, 14 aa, Homo sapiens
  CDR3 for alpha chain variable domain of TCR clone 244437 (TRAV27, TRAJ36)
CAGPPKRGANNLFF

SEQ ID NO: 488874 - protein, 15 aa, Homo sapiens
  CDR3 for beta chain variable domain of TCR clone 244437 (TRBV18, TRBJ2-7)
CASSPASTPNYEQCF

SEQ ID NO: 488875 - protein, 12 aa, Homo sapiens
  CDR3 for alpha chain variable domain of TCR clone 244438 (TRAV23/DV6, TRAJ17)
CAAKAAGNKLTF

SEQ ID NO: 488876 - protein, 17 aa, Homo sapiens
  CDR3 for beta chain variable domain of TCR clone 244438 (TRBV5-7, TRBJ1-1)
CASSLRFRGLMNTEAFF

SEQ ID NO: 488877 - protein, 14 aa, Homo sapiens
  CDR3 for alpha chain variable domain of TCR clone 244439 (TRAV29/DV5, TRAJ45)
FAASFRGGADGLTF

SEQ ID NO: 488878 - protein, 11 aa, Homo sapiens
  CDR3 for beta chain variable domain of TCR clone 244439 (TRBV11-2, TRBJ2-2)
CASSVPGELFF

SEQ ID NO: 488879 - protein, 16 aa, Homo sapiens
  CDR3 for alpha chain variable domain of TCR clone 244440 (TRAV3, TRAJ10)
CAVRDMRAGGGNKLTF

SEQ ID NO: 488880 - protein, 13 aa, Homo sapiens
  CDR3 for beta chain variable domain of TCR clone 244440 (TRBV7-9, TRBJ1-2)
SASSLKQNYGYTF

SEQ ID NO: 488881 - protein, 16 aa, Homo sapiens
  CDR3 for alpha chain variable domain of TCR clone 244441 (TRAV30, TRAJ24)
CGTSIVDADSWGKFQF

SEQ ID NO: 488882 - protein, 15 aa, Homo sapiens
  CDR3 for beta chain variable domain of TCR clone 244441 (TRBV12-4, TRBJ2-1)
CASSLLGRTYNEQFF

SEQ ID NO: 488883 - protein, 13 aa, Homo sapiens
  CDR3 for alpha chain variable domain of TCR clone 244442 (TRAV1-1, TRAJ9)
CAAKNTGGFKTIF

SEQ ID NO: 488884 - protein, 13 aa, Homo sapiens
  CDR3 for beta chain variable domain of TCR clone 244442 (TRBV14, TRBJ1-1)
CASSREFGTEAFF

SEQ ID NO: 488885 - protein, 16 aa, Homo sapiens
  CDR3 for alpha chain variable domain of TCR clone 244443 (TRAV1-1, TRAJ29)
CAVRSTRNSGNTPLVF

SEQ ID NO: 488886 - protein, 15 aa, Homo sapiens
  CDR3 for beta chain variable domain of TCR clone 244443 (TRBV29-1, TRBJ2-1)
CSVGRHALFYNEEFF

SEQ ID NO: 488887 - protein, 15 aa, Homo sapiens
  CDR3 for alpha chain variable domain of TCR clone 244444 (TRAV2, TRAJ24)
CAVEVLTDSWGKFQF

SEQ ID NO: 488888 - protein, 17 aa, Homo sapiens
  CDR3 for beta chain variable domain of TCR clone 244444 (TRBV2, TRBJ1-6)
CASSLRSGGLMTSPLHF

SEQ ID NO: 488889 - protein, 15 aa, Homo sapiens
  CDR3 for alpha chain variable domain of TCR clone 244445 (TRAV3, TRAJ32)
CAVSRYGGATNKLIF

SEQ ID NO: 488890 - protein, 15 aa, Homo sapiens
  CDR3 for beta chain variable domain of TCR clone 244445 (TRBV27, TRBJ2-1)
CASSNGGGSSNEQFF

SEQ ID NO: 488891 - protein, 15 aa, Homo sapiens
  CDR3 for alpha chain variable domain of TCR clone 244446 (TRAV17, TRAJ23)
CATDAEDNQGGKLIF

SEQ ID NO: 488892 - protein, 12 aa, Homo sapiens
  CDR3 for beta chain variable domain of TCR clone 244446 (TRBV2, TRBJ2-1)
CAKGEGYNEQFF

SEQ ID NO: 488893 - protein, 13 aa, Homo sapiens
  CDR3 for alpha chain variable domain of TCR clone 244447 (TRAV29/DV5, TRAJ31)
SAASRNNNARLMF

SEQ ID NO: 488894 - protein, 14 aa, Homo sapiens
  CDR3 for beta chain variable domain of TCR clone 244447 (TRBV2, TRBJ1-5)
CASGGVLSNQPQHF

SEQ ID NO: 488895 - protein, 12 aa, Homo sapiens
  CDR3 for alpha chain variable domain of TCR clone 244448 (TRAV21, TRAJ33)
CAVQDSNYQLIW

SEQ ID NO: 488896 - protein, 14 aa, Homo sapiens
  CDR3 for beta chain variable domain of TCR clone 244448 (TRBV2, TRBJ2-7)
CASSLTSGGYEQYF

SEQ ID NO: 488897 - protein, 11 aa, Homo sapiens
  CDR3 for alpha chain variable domain of TCR clone 244449 (TRAV17, TRAJ43)
CATPRSNDMRF

SEQ ID NO: 488898 - protein, 12 aa, Homo sapiens
  CDR3 for beta chain variable domain of TCR clone 244449 (TRBV11-2, TRBJ2-7)
CASSLPTYEQYF

SEQ ID NO: 488899 - protein, 15 aa, Homo sapiens
  CDR3 for alpha chain variable domain of TCR clone 244450 (TRAV21, TRAJ52)
CAVRGGGTSYGKLTF

SEQ ID NO: 488900 - protein, 13 aa, Homo sapiens
  CDR3 for beta chain variable domain of TCR clone 244450 (TRBV6-5, TRBJ2-5)
CSTAPSPQETQYF

SEQ ID NO: 488901 - protein, 11 aa, Homo sapiens
  CDR3 for alpha chain variable domain of TCR clone 244451 (TRAV2, TRAJ33)
CAVDSNYQIIW

SEQ ID NO: 488902 - protein, 14 aa, Homo sapiens
  CDR3 for beta chain variable domain of TCR clone 244451 (TRBV11-2, TRBJ2-3)
CASSRLARTDTQYF

SEQ ID NO: 488903 - protein, 16 aa, Homo sapiens
  CDR3 for alpha chain variable domain of TCR clone 244452 (TRAV12-3, TRAJ53)
CAMSPGSGGSNYKLTF

SEQ ID NO: 488904 - protein, 16 aa, Homo sapiens
  CDR3 for beta chain variable domain of TCR clone 244452 (TRBV29-1, TRBJ2-6)
CSVEDITYSGANVLTF

SEQ ID NO: 488905 - protein, 14 aa, Homo sapiens
  CDR3 for alpha chain variable domain of TCR clone 244453 (TRAV12-3, TRAJ22)
CAMSLFDSARQLTF

SEQ ID NO: 488906 - protein, 11 aa, Homo sapiens
  CDR3 for beta chain variable domain of TCR clone 244453 (TRBV12-4, TRBJ2-2)
CASSSAGELFF

SEQ ID NO: 488907 - protein, 16 aa, Homo sapiens
  CDR3 for alpha chain variable domain of TCR clone 244454 (TRAV8-4, TRAJ45)
CAVSAGVGGGADGLTF

SEQ ID NO: 488908 - protein, 15 aa, Homo sapiens
  CDR3 for beta chain variable domain of TCR clone 244454 (TRBV5-7, TRBJ1-2)
CASSLAWTGGCGYTF

SEQ ID NO: 488909 - protein, 16 aa, Homo sapiens
  CDR3 for alpha chain variable domain of TCR clone 244455 (TRAV39, TRAJ53)
CAADAGSGGSNYKLTF

SEQ ID NO: 488910 - protein, 16 aa, Homo sapiens
  CDR3 for beta chain variable domain of TCR clone 244455 (TRBV12-4, TRBJ2-2)
CASSFWIVGNTGELFF

SEQ ID NO: 488911 - protein, 14 aa, Homo sapiens
  CDR3 for alpha chain variable domain of TCR clone 244456 (TRAV12-2, TRAJ13)
GAVKKTGGYQKVTF

SEQ ID NO: 488912 - protein, 15 aa, Homo sapiens
  CDR3 for beta chain variable domain of TCR clone 244456 (TRBV27, TRBJ2-1)
CASSNGGGSSNGQFF

SEQ ID NO: 488913 - protein, 15 aa, Homo sapiens
  CDR3 for alpha chain variable domain of TCR clone 244457 (TRAV3, TRAJ4)
CAVRDGTGGYNKLIF

SEQ ID NO: 488914 - protein, 18 aa, Homo sapiens
  CDR3 for beta chain variable domain of TCR clone 244457 (TRBV11-2, TRBJ2-3)
CASSLGGASRGAPNTQYF

SEQ ID NO: 488915 - protein, 12 aa, Homo sapiens
  CDR3 for alpha chain variable domain of TCR clone 244458 (TRAV21, TRAJ13)
PGPSGGYQKVNF

SEQ ID NO: 488916 - protein, 15 aa, Homo sapiens
  CDR3 for beta chain variable domain of TCR clone 244458 (TRBV7-9, TRBJ1-6)
CASSSPGRGNSPLHF

SEQ ID NO: 488917 - protein, 13 aa, Homo sapiens
  CDR3 for alpha chain variable domain of TCR clone 244459 (TRAV13-1, TRAJ43)
CATSLSNNNDMRF

SEQ ID NO: 488918 - protein, 15 aa, Homo sapiens
  CDR3 for beta chain variable domain of TCR clone 244459 (TRBV5-1, TRBJ2-1)
CASSQAGYWWNEQFF

SEQ ID NO: 488919 - protein, 17 aa, Homo sapiens
  CDR3 for alpha chain variable domain of TCR clone 244460 (TRAV17, TRAJ15)
CFLLLCYGRAGRNSLIL

SEQ ID NO: 488920 - protein, 15 aa, Homo sapiens
  CDR3 for beta chain variable domain of TCR clone 244460 (TRBV20-1, TRBJ2-7)
CSARDRVSGMDEQYF

SEQ ID NO: 488921 - protein, 14 aa, Homo sapiens
  CDR3 for alpha chain variable domain of TCR clone 244461 (TRAV1-2, TRAJ16)
CAVNRFSDGQKLLF

SEQ ID NO: 488922 - protein, 12 aa, Homo sapiens
  CDR3 for beta chain variable domain of TCR clone 244461 (TRBV2, TRBJ2-3)
CASSPSPDTQYF

SEQ ID NO: 488923 - protein, 18 aa, Homo sapiens
  CDR3 for alpha chain variable domain of TCR clone 244462 (TRAV21, TRAJ52)
CAVRPSPAGGTSCGKLTF

SEQ ID NO: 488924 - protein, 17 aa, Homo sapiens
  CDR3 for beta chain variable domain of TCR clone 244462 (TRBV13, TRBJ2-3)
CASSLSRIAGGRNTQYF

SEQ ID NO: 488925 - protein, 12 aa, Homo sapiens
  CDR3 for alpha chain variable domain of TCR clone 244463 (TRAV26-1, TRAJ31)
CIVRNNNARLMF

SEQ ID NO: 488926 - protein, 15 aa, Homo sapiens
  CDR3 for beta chain variable domain of TCR clone 244463 (TRBV20-1, TRBJ2-4)
CSARDLTGGPNIQYY

SEQ ID NO: 488927 - protein, 18 aa, Homo sapiens
  CDR3 for alpha chain variable domain of TCR clone 244464 (TRAV21, TRAJ13)
CAVPRSFWGLPASYLWNC

SEQ ID NO: 488928 - protein, 14 aa, Homo sapiens
  CDR3 for beta chain variable domain of TCR clone 244464 (TRBV27, TRBJ2-5)
CQQFIPAGGETQYF

SEQ ID NO: 488929 - protein, 16 aa, Homo sapiens
  CDR3 for alpha chain variable domain of TCR clone 244465 (TRAV3, TRAJ10)
CAVRDMRAGGGNKLTF

SEQ ID NO: 488930 - protein, 13 aa, Homo sapiens
  CDR3 for beta chain variable domain of TCR clone 244465 (TRBV27, TRBJ1-4)
CAGSLMGDEKLFF

SEQ ID NO: 488931 - protein, 13 aa, Homo sapiens
  CDR3 for alpha chain variable domain of TCR clone 244466 (TRAV27, TRAJ37)
CAGGPSNTGKLIF

SEQ ID NO: 488932 - protein, 15 aa, Homo sapiens
  CDR3 for beta chain variable domain of TCR clone 244466 (TRBV25-1, TRBJ2-5)
CASSDTGTHQETQYF

SEQ ID NO: 488933 - protein, 16 aa, Homo sapiens
  CDR3 for alpha chain variable domain of TCR clone 244467 (TRAV1-2, TRAJ10)
CAVRGVLTGGGNKLTF

SEQ ID NO: 488934 - protein, 14 aa, Homo sapiens
  CDR3 for beta chain variable domain of TCR clone 244467 (TRBV7-8, TRBJ2-3)
CASSSRDSTDTQYF

SEQ ID NO: 488935 - protein, 14 aa, Homo sapiens
  CDR3 for alpha chain variable domain of TCR clone 244468 (TRAV17, TRAJ22)
CATSPSGYARQLTF

SEQ ID NO: 488936 - protein, 15 aa, Homo sapiens
  CDR3 for beta chain variable domain of TCR clone 244468 (TRBV4-1, TRBJ2-5)
CASSQWDVYQETQYF

SEQ ID NO: 488937 - protein, 11 aa, Homo sapiens
  CDR3 for alpha chain variable domain of TCR clone 244469 (TRAV1-2, TRAJ40)
CAVPGTYKYIF

SEQ ID NO: 488938 - protein, 13 aa, Homo sapiens
  CDR3 for beta chain variable domain of TCR clone 244469 (TRBV5-7, TRBJ1-2)
CASSLIRAPGYTF

SEQ ID NO: 488939 - protein, 13 aa, Homo sapiens
  CDR3 for alpha chain variable domain of TCR clone 244470 (TRAV3, TRAJ15)
CAVRDQAGTALIF

SEQ ID NO: 488940 - protein, 14 aa, Homo sapiens
  CDR3 for beta chain variable domain of TCR clone 244470 (TRBV11-2, TRBJ2-1)
CASSLDSNYNEQVF

SEQ ID NO: 488941 - protein, 14 aa, Homo sapiens
  CDR3 for alpha chain variable domain of TCR clone 244471 (TRAV26-2, TRAJ23)
CIKGGPNQGGKLIF

SEQ ID NO: 488942 - protein, 15 aa, Homo sapiens
  CDR3 for beta chain variable domain of TCR clone 244471 (TRBV7-9, TRBJ2-7)
CASSLVPQGALERYF

SEQ ID NO: 488943 - protein, 12 aa, Homo sapiens
  CDR3 for alpha chain variable domain of TCR clone 244472 (TRAV27, TRAJ13)
CAGAGGYQKVTF

SEQ ID NO: 488944 - protein, 12 aa, Homo sapiens
  CDR3 for beta chain variable domain of TCR clone 244472 (TRBV2, TRBJ1-2)
CASSGQTYGYTF

SEQ ID NO: 488945 - protein, 11 aa, Homo sapiens
  CDR3 for alpha chain variable domain of TCR clone 244473 (TRAV2, TRAJ33)
CAVESNYQLIW

SEQ ID NO: 488946 - protein, 15 aa, Homo sapiens
  CDR3 for beta chain variable domain of TCR clone 244473 (TRBV19, TRBJ1-1)
CASTSGQIQNTKAFF

SEQ ID NO: 488947 - protein, 16 aa, Homo sapiens
  CDR3 for alpha chain variable domain of TCR clone 244474 (TRAV26-1, TRAJ37)
CIVRGDGSGNTGKLIF

SEQ ID NO: 488948 - protein, 17 aa, Homo sapiens
  CDR3 for beta chain variable domain of TCR clone 244474 (TRBV4-1, TRBJ2-7)
CASSRDPLGVRGGEQDF

SEQ ID NO: 488949 - protein, 13 aa, Homo sapiens
  CDR3 for alpha chain variable domain of TCR clone 244475 (TRAV12-3, TRAJ33)
CAMSVNSNYQLIW

SEQ ID NO: 488950 - protein, 16 aa, Homo sapiens
  CDR3 for beta chain variable domain of TCR clone 244475 (TRBV7-2, TRBJ2-7)
CASSFPLAGGPLEQYF

SEQ ID NO: 488951 - protein, 14 aa, Homo sapiens
  CDR3 for alpha chain variable domain of TCR clone 244476 (TRAV12-2, TRAJ13)
CAVKPSGGYQKVNF

SEQ ID NO: 488952 - protein, 13 aa, Homo sapiens
  CDR3 for beta chain variable domain of TCR clone 244476 (TRBV20-1, TRBJ1-6)
CSAKLGGTSPLHF

SEQ ID NO: 488953 - protein, 15 aa, Homo sapiens
  CDR3 for alpha chain variable domain of TCR clone 244477 (TRAV30, TRAJ57)
CGTAIPQGGSEKLVF

SEQ ID NO: 488954 - protein, 13 aa, Homo sapiens
  CDR3 for beta chain variable domain of TCR clone 244477 (TRBV20-1, TRBJ1-1)
CSAPLGGGTEAFF

SEQ ID NO: 488955 - protein, 15 aa, Homo sapiens
  CDR3 for alpha chain variable domain of TCR clone 244478 (TRAV3, TRAJ22)
CAVRDRGGSARQLTF

SEQ ID NO: 488956 - protein, 14 aa, Homo sapiens
  CDR3 for beta chain variable domain of TCR clone 244478 (TRBV5-1, TRBJ1-1)
CASSFTGRNTEASF

SEQ ID NO: 488957 - protein, 15 aa, Homo sapiens
  CDR3 for alpha chain variable domain of TCR clone 244479 (TRAV8-3, TRAJ27)
CAVGPSKTNAGKSTF

SEQ ID NO: 488958 - protein, 17 aa, Homo sapiens
  CDR3 for beta chain variable domain of TCR clone 244479 (TRBV5-1, TRBJ1-6)
CASSFGEVSSYNSPLHF

SEQ ID NO: 488959 - protein, 15 aa, Homo sapiens
  CDR3 for alpha chain variable domain of TCR clone 244480 (TRAV23/DV6, TRAJ33)
CAASNSGGGNYKLLW

SEQ ID NO: 488960 - protein, 14 aa, Homo sapiens
  CDR3 for beta chain variable domain of TCR clone 244480 (TRBV7-2, TRBJ2-7)
CASSLYPGRYEQYF

SEQ ID NO: 488961 - protein, 12 aa, Homo sapiens
  CDR3 for alpha chain variable domain of TCR clone 244481 (TRAV35, TRAJ39)
LAPNNAGNMLTF

SEQ ID NO: 488962 - protein, 16 aa, Homo sapiens
  CDR3 for beta chain variable domain of TCR clone 244481 (TRBV2, TRBJ2-3)
CASSTSVEGVTDTQYC

SEQ ID NO: 488963 - protein, 15 aa, Homo sapiens
  CDR3 for alpha chain variable domain of TCR clone 244482 (TRAV13-1, TRAJ52)
CAATSPRTSYGKLTF

SEQ ID NO: 488964 - protein, 13 aa, Homo sapiens
  CDR3 for beta chain variable domain of TCR clone 244482 (TRBV10-3, TRBJ2-7)
CASKLAVNYEQYF

SEQ ID NO: 488965 - protein, 12 aa, Homo sapiens
  CDR3 for alpha chain variable domain of TCR clone 244483 (TRAV17, TRAJ57)
CATDGGSEKLVF

SEQ ID NO: 488966 - protein, 13 aa, Homo sapiens
  CDR3 for beta chain variable domain of TCR clone 244483 (TRBV7-9, TRBJ2-7)
CASSFAGAYVQYF

SEQ ID NO: 488967 - protein, 15 aa, Homo sapiens
  CDR3 for alpha chain variable domain of TCR clone 244484 (TRAV26-1, TRAJ29)
CIVRVAGSGNTPLVF

SEQ ID NO: 488968 - protein, 14 aa, Homo sapiens
  CDR3 for beta chain variable domain of TCR clone 244484 (TRBV18, TRBJ2-5)
CASSPGMSQETQYF

SEQ ID NO: 488969 - protein, 12 aa, Homo sapiens
  CDR3 for alpha chain variable domain of TCR clone 244485 (TRAV12-3, TRAJ17)
CAMTITDNKLTF

SEQ ID NO: 488970 - protein, 15 aa, Homo sapiens
  CDR3 for beta chain variable domain of TCR clone 244485 (TRBV20-1, TRBJ2-7)
CSARDRVSGMDEQYF

SEQ ID NO: 488971 - protein, 15 aa, Homo sapiens
  CDR3 for alpha chain variable domain of TCR clone 244486 (TRAV16, TRAJ57)
CSLPYTQGGSEKLVF

SEQ ID NO: 488972 - protein, 17 aa, Homo sapiens
  CDR3 for beta chain variable domain of TCR clone 244486 (TRBV24-1, TRBJ2-4)
CATSDAEARGVRNIQYF

SEQ ID NO: 488973 - protein, 16 aa, Homo sapiens
  CDR3 for alpha chain variable domain of TCR clone 244487 (TRAV12-3, TRAJ53)
CAMSPGSGGSNYKLTF

SEQ ID NO: 488974 - protein, 15 aa, Homo sapiens
  CDR3 for beta chain variable domain of TCR clone 244487 (TRBV27, TRBJ2-1)
CASINGGGSSNEQFF

SEQ ID NO: 488975 - protein, 11 aa, Homo sapiens
  CDR3 for alpha chain variable domain of TCR clone 244488 (TRAV2, TRAJ33)
CAVDSNYHLIW

SEQ ID NO: 488976 - protein, 14 aa, Homo sapiens
  CDR3 for beta chain variable domain of TCR clone 244488 (TRBV11-2, TRBJ2-3)
CASSRLARTDTQYF

SEQ ID NO: 488977 - protein, 10 aa, Homo sapiens
  CDR3 for alpha chain variable domain of TCR clone 244489 (TRAV2, TRAJ40)
CGAGTYKYIF

SEQ ID NO: 488978 - protein, 12 aa, Homo sapiens
  CDR3 for beta chain variable domain of TCR clone 244489 (TRBV7-9, TRBJ2-7)
CASSIKREEQYF

SEQ ID NO: 488979 - protein, 14 aa, Homo sapiens
  CDR3 for alpha chain variable domain of TCR clone 244490 (TRAV35, TRAJ33)
CAGSSKDSNYQLIW

SEQ ID NO: 488980 - protein, 13 aa, Homo sapiens
  CDR3 for beta chain variable domain of TCR clone 244490 (TRBV18, TRBJ1-1)
CASSGGRNTEAFF

SEQ ID NO: 488981 - protein, 14 aa, Homo sapiens
  CDR3 for alpha chain variable domain of TCR clone 244491 (TRAV8-3, TRAJ4)
CAVGAAGGYNKLIF

SEQ ID NO: 488982 - protein, 14 aa, Homo sapiens
  CDR3 for beta chain variable domain of TCR clone 244491 (TRBV25-1, TRBJ1-1)
CASTHLGGNTEAFC

SEQ ID NO: 488983 - protein, 13 aa, Homo sapiens
  CDR3 for alpha chain variable domain of TCR clone 244492 (TRAV8-3, TRAJ6)
RAVEKGGSYIPTF

SEQ ID NO: 488984 - protein, 15 aa, Homo sapiens
  CDR3 for beta chain variable domain of TCR clone 244492 (TRBV28, TRBJ2-5)
CASSADRGRGETQYF

SEQ ID NO: 488985 - protein, 14 aa, Homo sapiens
  CDR3 for alpha chain variable domain of TCR clone 244493 (TRAV38-1, TRAJ40)
CALRPTSGTYKYIF

SEQ ID NO: 488986 - protein, 14 aa, Homo sapiens
  CDR3 for beta chain variable domain of TCR clone 244493 (TRBV25-1, TRBJ1-1)
GASTHLGGNTEAFF

SEQ ID NO: 488987 - protein, 16 aa, Homo sapiens
  CDR3 for alpha chain variable domain of TCR clone 244494 (TRAV38-1, TRAJ56)
CAFMKRQTGANSKLTF

SEQ ID NO: 488988 - protein, 15 aa, Homo sapiens
  CDR3 for beta chain variable domain of TCR clone 244494 (TRBV6-3, TRBJ2-7)
CASSSPGTVFYEQYF

SEQ ID NO: 488989 - protein, 15 aa, Homo sapiens
  CDR3 for alpha chain variable domain of TCR clone 244495 (TRAV3, TRAJ20)
CAVRDIKLSDYKLSF

SEQ ID NO: 488990 - protein, 15 aa, Homo sapiens
  CDR3 for beta chain variable domain of TCR clone 244495 (TRBV7-9, TRBJ1-6)
GASSSPGRGKSPLHF

SEQ ID NO: 488991 - protein, 14 aa, Homo sapiens
  CDR3 for alpha chain variable domain of TCR clone 244496 (TRAV1-2, TRAJ8)
CAVREDTGFQKLVF

SEQ ID NO: 488992 - protein, 13 aa, Homo sapiens
  CDR3 for beta chain variable domain of TCR clone 244496 (TRBV10-3, TRBJ1-2)
CAISERDGYGYTF

SEQ ID NO: 488993 - protein, 17 aa, Homo sapiens
  CDR3 for alpha chain variable domain of TCR clone 244497 (TRAV3, TRAJ6)
CAVRDGPRAGGSYIPTF

SEQ ID NO: 488994 - protein, 16 aa, Homo sapiens
  CDR3 for beta chain variable domain of TCR clone 244497 (TRBV4-2, TRBJ1-1)
CASSQAGFGMNTEAFF

SEQ ID NO: 488995 - protein, 16 aa, Homo sapiens
  CDR3 for alpha chain variable domain of TCR clone 244498 (TRAV21, TRAJ37)
CAVRPRGSSNTGKLIF

SEQ ID NO: 488996 - protein, 16 aa, Homo sapiens
  CDR3 for beta chain variable domain of TCR clone 244498 (TRBV12-5, TRBJ2-5)
CASGPRTSGNQETQYF

SEQ ID NO: 488997 - protein, 12 aa, Homo sapiens
  CDR3 for alpha chain variable domain of TCR clone 244499 (TRAV12-3, TRAJ17)
CAVTLTGHKLTF

SEQ ID NO: 488998 - protein, 15 aa, Homo sapiens
  CDR3 for beta chain variable domain of TCR clone 244499 (TRBV12-4, TRBJ2-5)
CASSHPTGLQETQYF

SEQ ID NO: 488999 - protein, 11 aa, Homo sapiens
  CDR3 for alpha chain variable domain of TCR clone 244500 (TRAV12-2, TRAJ29)
CAVTLRSPLVF

SEQ ID NO: 489000 - protein, 16 aa, Homo sapiens
  CDR3 for beta chain variable domain of TCR clone 244500 (TRBV19, TRBJ1-5)
CVSSIDRGGPRQPQHF

SEQ ID NO: 489001 - protein, 11 aa, Homo sapiens
  CDR3 for alpha chain variable domain of TCR clone 244501 (TRAV12-2, TRAJ29)
CAVTLRRPLFF

SEQ ID NO: 489002 - protein, 16 aa, Homo sapiens
  CDR3 for beta chain variable domain of TCR clone 244501 (TRBV19, TRBJ1-5)
CASSIDRGGPRQPQHF

SEQ ID NO: 489003 - protein, 14 aa, Homo sapiens
  CDR3 for alpha chain variable domain of TCR clone 244502 (TRAV26-1, TRAJ34)
CIVRVAYNTDKLIF

SEQ ID NO: 489004 - protein, 13 aa, Homo sapiens
  CDR3 for beta chain variable domain of TCR clone 244502 (TRBV6-3, TRBJ2-1)
CASSYDNYNEQFF

SEQ ID NO: 489005 - protein, 13 aa, Homo sapiens
  CDR3 for alpha chain variable domain of TCR clone 244503 (TRAV8-6, TRAJ49)
CAVITNTGNQFYF

SEQ ID NO: 489006 - protein, 13 aa, Homo sapiens
  CDR3 for beta chain variable domain of TCR clone 244503 (TRBV19, TRBJ2-1)
CATSRGVYNEQFF

SEQ ID NO: 489007 - protein, 13 aa, Homo sapiens
  CDR3 for alpha chain variable domain of TCR clone 244504 (TRAV12-1, TRAJ40)
CVVPTSGTYKYIF

SEQ ID NO: 489008 - protein, 18 aa, Homo sapiens
  CDR3 for beta chain variable domain of TCR clone 244504 (TRBV7-9, TRBJ2-7)
CASSLTTSGSRTWYEQYF

SEQ ID NO: 489009 - protein, 14 aa, Homo sapiens
  CDR3 for alpha chain variable domain of TCR clone 244505 (TRAV38-1, TRAJ45)
CAYYSGGGADGLTF

SEQ ID NO: 489010 - protein, 16 aa, Homo sapiens
  CDR3 for beta chain variable domain of TCR clone 244505 (TRBV6-1, TRBJ2-1)
CASILRQGSSYNEQFF

SEQ ID NO: 489011 - protein, 13 aa, Homo sapiens
  CDR3 for alpha chain variable domain of TCR clone 244506 (TRAV13-2, TRAJ48)
CAEMDFGIEKLTF

SEQ ID NO: 489012 - protein, 15 aa, Homo sapiens
  CDR3 for beta chain variable domain of TCR clone 244506 (TRBV7-9, TRBJ1-6)
CASSSTGRGNSPLHF

SEQ ID NO: 489013 - protein, 15 aa, Homo sapiens
  CDR3 for alpha chain variable domain of TCR clone 244507 (TRAV13-1, TRAJ50)
CAAKGSETSYDKVIF

SEQ ID NO: 489014 - protein, 12 aa, Homo sapiens
  CDR3 for beta chain variable domain of TCR clone 244507 (TRBV20-1, TRBJ2-1)
CSAQYTYNEQFF

SEQ ID NO: 489015 - protein, 12 aa, Homo sapiens
  CDR3 for alpha chain variable domain of TCR clone 244508 (TRAV26-1, TRAJ43)
CIVRPRGDDMRF

SEQ ID NO: 489016 - protein, 16 aa, Homo sapiens
  CDR3 for beta chain variable domain of TCR clone 244508 (TRBV3-1, TRBJ2-1)
CASRQGGRRSFDEQFF

SEQ ID NO: 489017 - protein, 13 aa, Homo sapiens
  CDR3 for alpha chain variable domain of TCR clone 244509 (TRAV17, TRAJ26)
CATVDNYGQNFGF

SEQ ID NO: 489018 - protein, 16 aa, Homo sapiens
  CDR3 for beta chain variable domain of TCR clone 244509 (TRBV2, TRBJ2-1)
CASSVGGSLSYNEQFF

SEQ ID NO: 489019 - protein, 14 aa, Homo sapiens
  CDR3 for alpha chain variable domain of TCR clone 244510 (TRAV17, TRAJ57)
CATDPQGGSEKLVF

SEQ ID NO: 489020 - protein, 18 aa, Homo sapiens
  CDR3 for beta chain variable domain of TCR clone 244510 (TRBV19, TRBJ2-6)
CASSKNRGTHSGANVLTF

SEQ ID NO: 489021 - protein, 12 aa, Homo sapiens
  CDR3 for alpha chain variable domain of TCR clone 244511 (TRAV12-2, TRAJ52)
CAGGTSYGKLTF

SEQ ID NO: 489022 - protein, 13 aa, Homo sapiens
  CDR3 for beta chain variable domain of TCR clone 244511 (TRBV11-2, TRBJ2-1)
CASSLRLTHEQFF

SEQ ID NO: 489023 - protein, 16 aa, Homo sapiens
  CDR3 for alpha chain variable domain of TCR clone 244512 (TRAV30, TRAJ24)
CGTEIVDADRWGKFQF

SEQ ID NO: 489024 - protein, 15 aa, Homo sapiens
  CDR3 for beta chain variable domain of TCR clone 244512 (TRBV7-2, TRBJ2-7)
CASSLAVGQVYEQYF

SEQ ID NO: 489025 - protein, 11 aa, Homo sapiens
  CDR3 for alpha chain variable domain of TCR clone 244513 (TRAV12-2, TRAJ31)
CAVTRWASLMF

SEQ ID NO: 489026 - protein, 13 aa, Homo sapiens
  CDR3 for beta chain variable domain of TCR clone 244513 (TRBV9, TRBJ2-2)
CASSPRPAGELFF

SEQ ID NO: 489027 - protein, 12 aa, Homo sapiens
  CDR3 for alpha chain variable domain of TCR clone 244514 (TRAV12-3, TRAJ17)
CAMTLTGNELTF

SEQ ID NO: 489028 - protein, 15 aa, Homo sapiens
  CDR3 for beta chain variable domain of TCR clone 244514 (TRBV11-2, TRBJ2-2)
CASSSDRVNAGELFF

SEQ ID NO: 489029 - protein, 13 aa, Homo sapiens
  CDR3 for alpha chain variable domain of TCR clone 244515 (TRAV12-1, TRAJ11)
CVVDRAGYSTLTF

SEQ ID NO: 489030 - protein, 15 aa, Homo sapiens
  CDR3 for beta chain variable domain of TCR clone 244515 (TRBV7-3, TRBJ2-2)
CASSETGQGTGELFF

SEQ ID NO: 489031 - protein, 16 aa, Homo sapiens
  CDR3 for alpha chain variable domain of TCR clone 244516 (TRAV30, TRAJ24)
CGTEIVDADSWRKFQF

SEQ ID NO: 489032 - protein, 18 aa, Homo sapiens
  CDR3 for beta chain variable domain of TCR clone 244516 (TRBV11-2, TRBJ2-6)
CASSLNPFLGTGANVLTF

SEQ ID NO: 489033 - protein, 14 aa, Homo sapiens
  CDR3 for alpha chain variable domain of TCR clone 244517 (TRAV16, TRAJ33)
CALSAMDSNYQLIW

SEQ ID NO: 489034 - protein, 15 aa, Homo sapiens
  CDR3 for beta chain variable domain of TCR clone 244517 (TRBV9, TRBJ1-6)
CASSVAGTGDSPLLF

SEQ ID NO: 489035 - protein, 14 aa, Homo sapiens
  CDR3 for alpha chain variable domain of TCR clone 244518 (TRAV12-3, TRAJ15)
CAMIPPQAGAALIF

SEQ ID NO: 489036 - protein, 14 aa, Homo sapiens
  CDR3 for beta chain variable domain of TCR clone 244518 (TRBV20-1, TRBJ2-2)
CSARRRLATGGLFF

SEQ ID NO: 489037 - protein, 15 aa, Homo sapiens
  CDR3 for alpha chain variable domain of TCR clone 244519 (TRAV12-1, TRAJ10)
CVVNKLTRGGNKLTF

SEQ ID NO: 489038 - protein, 17 aa, Homo sapiens
  CDR3 for beta chain variable domain of TCR clone 244519 (TRBV5-1, TRBJ1-6)
CASSPSLQGSDNSPLHF

SEQ ID NO: 489039 - protein, 16 aa, Homo sapiens
  CDR3 for alpha chain variable domain of TCR clone 244520 (TRAV3, TRAJ10)
CAVRDMRAGGGDKLTF

SEQ ID NO: 489040 - protein, 12 aa, Homo sapiens
  CDR3 for beta chain variable domain of TCR clone 244520 (TRBV20-1, TRBJ2-7)
CSAGLKMGEQYF

SEQ ID NO: 489041 - protein, 16 aa, Homo sapiens
  CDR3 for alpha chain variable domain of TCR clone 244521 (TRAV3, TRAJ34)
CAVRSRGTPTSSSLGL

SEQ ID NO: 489042 - protein, 15 aa, Homo sapiens
  CDR3 for beta chain variable domain of TCR clone 244521 (TRBV6-3, TRBJ2-7)
CASSSPGTVFYEQYF

SEQ ID NO: 489043 - protein, 16 aa, Homo sapiens
  CDR3 for alpha chain variable domain of TCR clone 244522 (TRAV30, TRAJ24)
CGTEIVGADSWGKFQF

SEQ ID NO: 489044 - protein, 14 aa, Homo sapiens
  CDR3 for beta chain variable domain of TCR clone 244522 (TRBV12-5, TRBJ2-5)
CASGSRTHQETQYS

SEQ ID NO: 489045 - protein, 13 aa, Homo sapiens
  CDR3 for alpha chain variable domain of TCR clone 244523 (TRAV26-2, TRAJ43)
CILRAVNNNDVRF

SEQ ID NO: 489046 - protein, 15 aa, Homo sapiens
  CDR3 for beta chain variable domain of TCR clone 244523 (TRBV7-2, TRBJ2-1)
CASTHGTGIYNEQLF

SEQ ID NO: 489047 - protein, 14 aa, Homo sapiens
  CDR3 for alpha chain variable domain of TCR clone 244524 (TRAV12-1, TRAJ6)
CVVKRSGGRYIPTF

SEQ ID NO: 489048 - protein, 14 aa, Homo sapiens
  CDR3 for beta chain variable domain of TCR clone 244524 (TRBV7-9, TRBJ2-1)
CASSSDRGLDEQFF

SEQ ID NO: 489049 - protein, 11 aa, Homo sapiens
  CDR3 for alpha chain variable domain of TCR clone 244525 (TRAV21, TRAJ34)
CAHYNTDKLIF

SEQ ID NO: 489050 - protein, 18 aa, Homo sapiens
  CDR3 for beta chain variable domain of TCR clone 244525 (TRBV28, TRBJ2-1)
CASSSPSGLAGAIYEQFF

SEQ ID NO: 489051 - protein, 15 aa, Homo sapiens
  CDR3 for alpha chain variable domain of TCR clone 244526 (TRAV3, TRAJ3)
CAVRDGHSSSSKITF

SEQ ID NO: 489052 - protein, 14 aa, Homo sapiens
  CDR3 for beta chain variable domain of TCR clone 244526 (TRBV28, TRBJ1-4)
CASSFGTFDEKLFF

SEQ ID NO: 489053 - protein, 14 aa, Homo sapiens
  CDR3 for alpha chain variable domain of TCR clone 244527 (TRAV13-1, TRAJ44)
CTAKATGTASKLTF

SEQ ID NO: 489054 - protein, 17 aa, Homo sapiens
  CDR3 for beta chain variable domain of TCR clone 244527 (TRBV7-3, TRBJ2-3)
RASSFMKRMRGADTQYF

SEQ ID NO: 489055 - protein, 14 aa, Homo sapiens
  CDR3 for alpha chain variable domain of TCR clone 244528 (TRAV1-2, TRAJ16)
CAVNRFSDGQKLLF

SEQ ID NO: 489056 - protein, 14 aa, Homo sapiens
  CDR3 for beta chain variable domain of TCR clone 244528 (TRBV25-1, TRBJ1-1)
CASTHLGRNTEAFF

SEQ ID NO: 489057 - protein, 14 aa, Homo sapiens
  CDR3 for alpha chain variable domain of TCR clone 244529 (TRAV13-2, TRAJ17)
CAENSKAAGNKLTF

SEQ ID NO: 489058 - protein, 11 aa, Homo sapiens
  CDR3 for beta chain variable domain of TCR clone 244529 (TRBV6-3, TRBJ2-3)
CATGQAATQYF

SEQ ID NO: 489059 - protein, 17 aa, Homo sapiens
  CDR3 for alpha chain variable domain of TCR clone 244530 (TRAV26-1, TRAJ37)
CIVRVITVSSNTGKLIF

SEQ ID NO: 489060 - protein, 18 aa, Homo sapiens
  CDR3 for beta chain variable domain of TCR clone 244530 (TRBV3-1, TRBJ2-7)
CASSRISAGGRSSYEQYF

SEQ ID NO: 489061 - protein, 14 aa, Homo sapiens
  CDR3 for alpha chain variable domain of TCR clone 244531 (TRAV12-2, TRAJ24)
CDVTPADSWGKLQF

SEQ ID NO: 489062 - protein, 15 aa, Homo sapiens
  CDR3 for beta chain variable domain of TCR clone 244531 (TRBV27, TRBJ2-1)
CASSNGGGSSNEQFF

SEQ ID NO: 489063 - protein, 15 aa, Homo sapiens
  CDR3 for alpha chain variable domain of TCR clone 244532 (TRAV23/DV6, TRAJ13)
CAAWPGGGGYQKVTF

SEQ ID NO: 489064 - protein, 14 aa, Homo sapiens
  CDR3 for beta chain variable domain of TCR clone 244532 (TRBV12-4, TRBJ1-1)
CASSLGTGGTEAFF

SEQ ID NO: 489065 - protein, 15 aa, Homo sapiens
  CDR3 for alpha chain variable domain of TCR clone 244533 (TRAV8-3, TRAJ45)
CASSYSGVGSDGLTF

SEQ ID NO: 489066 - protein, 13 aa, Homo sapiens
  CDR3 for beta chain variable domain of TCR clone 244533 (TRBV10-3, TRBJ2-7)
CASKLAVNYEQYF

SEQ ID NO: 489067 - protein, 13 aa, Homo sapiens
  CDR3 for alpha chain variable domain of TCR clone 244534 (TRAV2, TRAJ15)
CAVVSQAGTALIF

SEQ ID NO: 489068 - protein, 16 aa, Homo sapiens
  CDR3 for beta chain variable domain of TCR clone 244534 (TRBV18, TRBJ1-5)
CASSPYRVEGNQPQHF

SEQ ID NO: 489069 - protein, 16 aa, Homo sapiens
  CDR3 for alpha chain variable domain of TCR clone 244535 (TRAV4, TRAJ22)
CLVGDLYSGSARQLTF

SEQ ID NO: 489070 - protein, 12 aa, Homo sapiens
  CDR3 for beta chain variable domain of TCR clone 244535 (TRBV29-1, TRBJ2-3)
CSVTGGADTQYF

SEQ ID NO: 489071 - protein, 14 aa, Homo sapiens
  CDR3 for alpha chain variable domain of TCR clone 244536 (TRAV26-1, TRAJ38)
CIADNAGNNRKLIW

SEQ ID NO: 489072 - protein, 13 aa, Homo sapiens
  CDR3 for beta chain variable domain of TCR clone 244536 (TRBV15, TRBJ1-6)
CATSGGLNSPLRV

SEQ ID NO: 489073 - protein, 13 aa, Homo sapiens
  CDR3 for alpha chain variable domain of TCR clone 244537 (TRAV26-1, TRAJ29)
CIVRRSGNTPLVF

SEQ ID NO: 489074 - protein, 14 aa, Homo sapiens
  CDR3 for beta chain variable domain of TCR clone 244537 (TRBV4-1, TRBJ2-2)
CASSQAVNTGELFF

SEQ ID NO: 489075 - protein, 15 aa, Homo sapiens
  CDR3 for alpha chain variable domain of TCR clone 244538 (TRAV25, TRAJ53)
CPTSNSGGSNYKLTF

SEQ ID NO: 489076 - protein, 14 aa, Homo sapiens
  CDR3 for beta chain variable domain of TCR clone 244538 (TRBV18, TRBJ2-7)
CASSPRGGAYEQYF

SEQ ID NO: 489077 - protein, 16 aa, Homo sapiens
  CDR3 for alpha chain variable domain of TCR clone 244539 (TRAV30, TRAJ24)
CGTEIVDADSWGKFQF

SEQ ID NO: 489078 - protein, 14 aa, Homo sapiens
  CDR3 for beta chain variable domain of TCR clone 244539 (TRBV12-5, TRBJ2-5)
CASGSRAHQETKYF

SEQ ID NO: 489079 - protein, 14 aa, Homo sapiens
  CDR3 for alpha chain variable domain of TCR clone 244540 (TRAV13-1, TRAJ44)
CAAKATGTASKLTF

SEQ ID NO: 489080 - protein, 16 aa, Homo sapiens
  CDR3 for beta chain variable domain of TCR clone 244540 (TRBV3-1, TRBJ2-1)
CASSQVGGTSYNEQFF

SEQ ID NO: 489081 - protein, 13 aa, Homo sapiens
  CDR3 for alpha chain variable domain of TCR clone 244541 (TRAV21, TRAJ20)
CAVGLRVDYKLSF

SEQ ID NO: 489082 - protein, 14 aa, Homo sapiens
  CDR3 for beta chain variable domain of TCR clone 244541 (TRBV10-2, TRBJ1-3)
CASRPPAAENTIYF

SEQ ID NO: 489083 - protein, 12 aa, Homo sapiens
  CDR3 for alpha chain variable domain of TCR clone 244542 (TRAV13-2, TRAJ23)
CAERHWGGKLIF

SEQ ID NO: 489084 - protein, 13 aa, Homo sapiens
  CDR3 for beta chain variable domain of TCR clone 244542 (TRBV11-2, TRBJ2-1)
CASSLGLAGGRFF

SEQ ID NO: 489085 - protein, 14 aa, Homo sapiens
  CDR3 for alpha chain variable domain of TCR clone 244543 (TRAV12-1, TRAJ17)
CAVNYKAAGNKLTF

SEQ ID NO: 489086 - protein, 15 aa, Homo sapiens
  CDR3 for beta chain variable domain of TCR clone 244543 (TRBV18, TRBJ2-1)
CASSPPSASYNEQFF

SEQ ID NO: 489087 - protein, 14 aa, Homo sapiens
  CDR3 for alpha chain variable domain of TCR clone 244544 (TRAV12-2, TRAJ17)
CAVLFKAAGNKLTF

SEQ ID NO: 489088 - protein, 12 aa, Homo sapiens
  CDR3 for beta chain variable domain of TCR clone 244544 (TRBV7-9, TRBJ1-1)
CASSLVRGEAFF

SEQ ID NO: 489089 - protein, 13 aa, Homo sapiens
  CDR3 for alpha chain variable domain of TCR clone 244545 (TRAV3, TRAJ21)
CAVREPDFNKFYF

SEQ ID NO: 489090 - protein, 15 aa, Homo sapiens
  CDR3 for beta chain variable domain of TCR clone 244545 (TRBV28, TRBJ2-7)
CASSPGGRGFYEQYF

SEQ ID NO: 489091 - protein, 14 aa, Homo sapiens
  CDR3 for alpha chain variable domain of TCR clone 244546 (TRAV26-1, TRAJ34)
CIVRVAYNTDKLIF

SEQ ID NO: 489092 - protein, 18 aa, Homo sapiens
  CDR3 for beta chain variable domain of TCR clone 244546 (TRBV18, TRBJ1-3)
CASSPRGGAGPSGNTIYF

SEQ ID NO: 489093 - protein, 17 aa, Homo sapiens
  CDR3 for alpha chain variable domain of TCR clone 244547 (TRAV17, TRAJ52)
CATERPSGGTSYGKLTF

SEQ ID NO: 489094 - protein, 17 aa, Homo sapiens
  CDR3 for beta chain variable domain of TCR clone 244547 (TRBV11-2, TRBJ2-1)
CASSLYPPGVEYNEQFF

SEQ ID NO: 489095 - protein, 17 aa, Homo sapiens
  CDR3 for alpha chain variable domain of TCR clone 244548 (TRAV4, TRAJ22)
CCVLLPRGGGSVRQLTF

SEQ ID NO: 489096 - protein, 14 aa, Homo sapiens
  CDR3 for beta chain variable domain of TCR clone 244548 (TRBV20-1, TRBJ1-1)
CSARAVNGYTEAFF

SEQ ID NO: 489097 - protein, 13 aa, Homo sapiens
  CDR3 for alpha chain variable domain of TCR clone 244549 (TRAV35, TRAJ32)
CAGVGGATNKLIF

SEQ ID NO: 489098 - protein, 17 aa, Homo sapiens
  CDR3 for beta chain variable domain of TCR clone 244549 (TRBV4-3, TRBJ2-1)
CASSQFSSWRASGEQFF

SEQ ID NO: 489099 - protein, 14 aa, Homo sapiens
  CDR3 for alpha chain variable domain of TCR clone 244550 (TRAV8-3, TRAJ44)
CAVGNTGTASKLTF

SEQ ID NO: 489100 - protein, 15 aa, Homo sapiens
  CDR3 for beta chain variable domain of TCR clone 244550 (TRBV28, TRBJ2-7)
CPSSFRGQGRYEQYF

SEQ ID NO: 489101 - protein, 13 aa, Homo sapiens
  CDR3 for alpha chain variable domain of TCR clone 244551 (TRAV21, TRAJ36)
CAVIKTGANNLFF

SEQ ID NO: 489102 - protein, 14 aa, Homo sapiens
  CDR3 for beta chain variable domain of TCR clone 244551 (TRBV7-2, TRBJ1-1)
CASSFLTGTTEAFF

SEQ ID NO: 489103 - protein, 14 aa, Homo sapiens
  CDR3 for alpha chain variable domain of TCR clone 244552 (TRAV3, TRAJ7)
CAVREEEREQQTRF

SEQ ID NO: 489104 - protein, 12 aa, Homo sapiens
  CDR3 for beta chain variable domain of TCR clone 244552 (TRBV7-8, TRBJ2-1)
CASSLGHNEQFF

SEQ ID NO: 489105 - protein, 15 aa, Homo sapiens
  CDR3 for alpha chain variable domain of TCR clone 244553 (TRAV3, TRAJ42)
CAVRGGTGIQGNLIF

SEQ ID NO: 489106 - protein, 14 aa, Homo sapiens
  CDR3 for beta chain variable domain of TCR clone 244553 (TRBV19, TRBJ1-2)
CASSSLFARDVHTF

SEQ ID NO: 489107 - protein, 15 aa, Homo sapiens
  CDR3 for alpha chain variable domain of TCR clone 244554 (TRAV1-2, TRAJ28)
CAVQYSGAGSYQLTF

SEQ ID NO: 489108 - protein, 15 aa, Homo sapiens
  CDR3 for beta chain variable domain of TCR clone 244554 (TRBV7-9, TRBJ1-6)
CASSSPGRGNSPLHF

SEQ ID NO: 489109 - protein, 17 aa, Homo sapiens
  CDR3 for alpha chain variable domain of TCR clone 244555 (TRAV1-1, TRAJ28)
CAVDPAYSGSGSYQLTF

SEQ ID NO: 489110 - protein, 14 aa, Homo sapiens
  CDR3 for beta chain variable domain of TCR clone 244555 (TRBV19, TRBJ2-1)
CASPTFVLSGEQFF

SEQ ID NO: 489111 - protein, 16 aa, Homo sapiens
  CDR3 for alpha chain variable domain of TCR clone 244556 (TRAV3, TRAJ37)
CAVRPHVSGNTGKLIF

SEQ ID NO: 489112 - protein, 14 aa, Homo sapiens
  CDR3 for beta chain variable domain of TCR clone 244556 (TRBV25-1, TRBJ1-1)
CASTHLGGNTEAFF

SEQ ID NO: 489113 - protein, 17 aa, Homo sapiens
  CDR3 for alpha chain variable domain of TCR clone 244557 (TRAV3, TRAJ12)
CAVRDGGGMDSSYKLIF

SEQ ID NO: 489114 - protein, 14 aa, Homo sapiens
  CDR3 for beta chain variable domain of TCR clone 244557 (TRBV19, TRBJ2-1)
CASPTFVLSGEQFF

SEQ ID NO: 489115 - protein, 14 aa, Homo sapiens
  CDR3 for alpha chain variable domain of TCR clone 244558 (TRAV13-1, TRAJ35)
CSASKGGFGNVLHC

SEQ ID NO: 489116 - protein, 13 aa, Homo sapiens
  CDR3 for beta chain variable domain of TCR clone 244558 (TRBV7-3, TRBJ1-1)
CASGQDWGAEAFF

SEQ ID NO: 489117 - protein, 16 aa, Homo sapiens
  CDR3 for alpha chain variable domain of TCR clone 244559 (TRAV26-1, TRAJ33)
CIVPLWREDSNYQLIW

SEQ ID NO: 489118 - protein, 14 aa, Homo sapiens
  CDR3 for beta chain variable domain of TCR clone 244559 (TRBV6-3, TRBJ1-1)
CASSYHSKNTEAFF

SEQ ID NO: 489119 - protein, 13 aa, Homo sapiens
  CDR3 for alpha chain variable domain of TCR clone 244560 (TRAV26-1, TRAJ48)
CIVRVVGDEKLTF

SEQ ID NO: 489120 - protein, 12 aa, Homo sapiens
  CDR3 for beta chain variable domain of TCR clone 244560 (TRBV11-2, TRBJ2-2)
CASSLPTGELFF

SEQ ID NO: 489121 - protein, 12 aa, Homo sapiens
  CDR3 for alpha chain variable domain of TCR clone 244561 (TRAV30, TRAJ43)
CGTEERGNDMRF

SEQ ID NO: 489122 - protein, 15 aa, Homo sapiens
  CDR3 for beta chain variable domain of TCR clone 244561 (TRBV28, TRBJ2-5)
CASSCRQGALETQYF

SEQ ID NO: 489123 - protein, 14 aa, Homo sapiens
  CDR3 for alpha chain variable domain of TCR clone 244562 (TRAV8-4, TRAJ8)
CAVIGNTGFQKLVF

SEQ ID NO: 489124 - protein, 16 aa, Homo sapiens
  CDR3 for beta chain variable domain of TCR clone 244562 (TRBV9, TRBJ2-1)
CASSVEGDGSYNEQFV

SEQ ID NO: 489125 - protein, 15 aa, Homo sapiens
  CDR3 for alpha chain variable domain of TCR clone 244563 (TRAV16, TRAJ17)
CALSGNKAAGNKLTF

SEQ ID NO: 489126 - protein, 16 aa, Homo sapiens
  CDR3 for beta chain variable domain of TCR clone 244563 (TRBV7-6, TRBJ1-6)
CASSSLPAGEYSSLHF

SEQ ID NO: 489127 - protein, 17 aa, Homo sapiens
  CDR3 for alpha chain variable domain of TCR clone 244564 (TRAV1-2, TRAJ8)
CAVRDPDENAGFQKLVF

SEQ ID NO: 489128 - protein, 16 aa, Homo sapiens
  CDR3 for beta chain variable domain of TCR clone 244564 (TRBV7-9, TRBJ2-2)
CASSGFGGANTGELFF

SEQ ID NO: 489129 - protein, 12 aa, Homo sapiens
  CDR3 for alpha chain variable domain of TCR clone 244565 (TRAV8-3, TRAJ20)
CAVDFNDYKLSF

SEQ ID NO: 489130 - protein, 14 aa, Homo sapiens
  CDR3 for beta chain variable domain of TCR clone 244565 (TRBV18, TRBJ2-7)
CASSPRGVAYEQYF

SEQ ID NO: 489131 - protein, 15 aa, Homo sapiens
  CDR3 for alpha chain variable domain of TCR clone 244566 (TRAV8-1, TRAJ6)
CAVNAGAGGSYIPTF

SEQ ID NO: 489132 - protein, 14 aa, Homo sapiens
  CDR3 for beta chain variable domain of TCR clone 244566 (TRBV25-1, TRBJ1-6)
CASSLSADIPPLHF

SEQ ID NO: 489133 - protein, 11 aa, Homo sapiens
  CDR3 for alpha chain variable domain of TCR clone 244567 (TRAV2, TRAJ33)
CAVESTYQLIW

SEQ ID NO: 489134 - protein, 15 aa, Homo sapiens
  CDR3 for beta chain variable domain of TCR clone 244567 (TRBV19, TRBJ1-1)
CASTSGQIQNTEAFF

SEQ ID NO: 489135 - protein, 16 aa, Homo sapiens
  CDR3 for alpha chain variable domain of TCR clone 244568 (TRAV12-1, TRAJ53)
CVATSVAGGSNYKLTF

SEQ ID NO: 489136 - protein, 16 aa, Homo sapiens
  CDR3 for beta chain variable domain of TCR clone 244568 (TRBV6-6, TRBJ2-3)
CASSYSHAGSTGTRYF

SEQ ID NO: 489137 - protein, 13 aa, Homo sapiens
  CDR3 for alpha chain variable domain of TCR clone 244569 (TRAV39, TRAJ33)
CAVDRASNYQLIW

SEQ ID NO: 489138 - protein, 15 aa, Homo sapiens
  CDR3 for beta chain variable domain of TCR clone 244569 (TRBV5-1, TRBJ2-5)
CASSFKGGDQETQYF

SEQ ID NO: 489139 - protein, 12 aa, Homo sapiens
  CDR3 for alpha chain variable domain of TCR clone 244570 (TRAV16, TRAJ26)
CALRSYSQNFVF

SEQ ID NO: 489140 - protein, 14 aa, Homo sapiens
  CDR3 for beta chain variable domain of TCR clone 244570 (TRBV10-3, TRBJ2-1)
CAISSDLAYNEQFF

SEQ ID NO: 489141 - protein, 14 aa, Homo sapiens
  CDR3 for alpha chain variable domain of TCR clone 244571 (TRAV1-2, TRAJ8)
CAVREDTGFQKLVF

SEQ ID NO: 489142 - protein, 15 aa, Homo sapiens
  CDR3 for beta chain variable domain of TCR clone 244571 (TRBV5-1, TRBJ1-5)
CASSLGTVSNQPQHF

SEQ ID NO: 489143 - protein, 15 aa, Homo sapiens
  CDR3 for alpha chain variable domain of TCR clone 244572 (TRAV27, TRAJ38)
CAARRNAGNNRKLMW

SEQ ID NO: 489144 - protein, 13 aa, Homo sapiens
  CDR3 for beta chain variable domain of TCR clone 244572 (TRBV12-5, TRBJ2-3)
CASGDRQTDTQYF

SEQ ID NO: 489145 - protein, 14 aa, Homo sapiens
  CDR3 for alpha chain variable domain of TCR clone 244573 (TRAV23/DV6, TRAJ39)
CAASIGNAGNMLTF

SEQ ID NO: 489146 - protein, 14 aa, Homo sapiens
  CDR3 for beta chain variable domain of TCR clone 244573 (TRBV7-3, TRBJ1-1)
CASSLKGGNTEAVF

SEQ ID NO: 489147 - protein, 15 aa, Homo sapiens
  CDR3 for alpha chain variable domain of TCR clone 244574 (TRAV26-1, TRAJ39)
CIVRDGSNAGNMLTF

SEQ ID NO: 489148 - protein, 15 aa, Homo sapiens
  CDR3 for beta chain variable domain of TCR clone 244574 (TRBV28, TRBJ2-1)
CASSLDTSSYNEQFF

SEQ ID NO: 489149 - protein, 13 aa, Homo sapiens
  CDR3 for alpha chain variable domain of TCR clone 244575 (TRAV2, TRAJ24)
CAASTDSWGKLQF

SEQ ID NO: 489150 - protein, 14 aa, Homo sapiens
  CDR3 for beta chain variable domain of TCR clone 244575 (TRBV13, TRBJ2-5)
CASSLGTAQETQYF

SEQ ID NO: 489151 - protein, 12 aa, Homo sapiens
  CDR3 for alpha chain variable domain of TCR clone 244576 (TRAV13-2, TRAJ8)
CAPWLGFQKLVF

SEQ ID NO: 489152 - protein, 15 aa, Homo sapiens
  CDR3 for beta chain variable domain of TCR clone 244576 (TRBV11-3, TRBJ2-1)
CASSLGDSSHNEQFF

SEQ ID NO: 489153 - protein, 14 aa, Homo sapiens
  CDR3 for alpha chain variable domain of TCR clone 244577 (TRAV8-3, TRAJ4)
CAVGAAGGYNKLIF

SEQ ID NO: 489154 - protein, 13 aa, Homo sapiens
  CDR3 for beta chain variable domain of TCR clone 244577 (TRBV12-5, TRBJ2-3)
CASGDRQSDTQYF

SEQ ID NO: 489155 - protein, 14 aa, Homo sapiens
  CDR3 for alpha chain variable domain of TCR clone 244578 (TRAV12-1, TRAJ38)
CGELKAGNNRKLIW

SEQ ID NO: 489156 - protein, 15 aa, Homo sapiens
  CDR3 for beta chain variable domain of TCR clone 244578 (TRBV18, TRBJ2-1)
CSSSPPSASYNEQFF

SEQ ID NO: 489157 - protein, 11 aa, Homo sapiens
  CDR3 for alpha chain variable domain of TCR clone 244579 (TRAV13-1, TRAJ5)
CAPKGRRALTF

SEQ ID NO: 489158 - protein, 16 aa, Homo sapiens
  CDR3 for beta chain variable domain of TCR clone 244579 (TRBV4-2, TRBJ2-5)
CASSQELVGSQETQYF

SEQ ID NO: 489159 - protein, 15 aa, Homo sapiens
  CDR3 for alpha chain variable domain of TCR clone 244580 (TRAV1-2, TRAJ12)
CAVIPEVDSSSKLIF

SEQ ID NO: 489160 - protein, 12 aa, Homo sapiens
  CDR3 for beta chain variable domain of TCR clone 244580 (TRBV20-1, TRBJ1-2)
CSASHPSGGYTF

SEQ ID NO: 489161 - protein, 14 aa, Homo sapiens
  CDR3 for alpha chain variable domain of TCR clone 244581 (TRAV1-2, TRAJ16)
CAVNRFSDGQKLLF

SEQ ID NO: 489162 - protein, 14 aa, Homo sapiens
  CDR3 for beta chain variable domain of TCR clone 244581 (TRBV18, TRBJ2-7)
CASTPRGGAYEQYF

SEQ ID NO: 489163 - protein, 16 aa, Homo sapiens
  CDR3 for alpha chain variable domain of TCR clone 244582 (TRAV3, TRAJ37)
CAVRGKGSGNTGKLIF

SEQ ID NO: 489164 - protein, 12 aa, Homo sapiens
  CDR3 for beta chain variable domain of TCR clone 244582 (TRBV7-9, TRBJ2-3)
CASSFITDTQYF

SEQ ID NO: 489165 - protein, 14 aa, Homo sapiens
  CDR3 for alpha chain variable domain of TCR clone 244583 (TRAV8-3, TRAJ6)
CAVGASGGSYIPTF

SEQ ID NO: 489166 - protein, 13 aa, Homo sapiens
  CDR3 for beta chain variable domain of TCR clone 244583 (TRBV13, TRBJ2-5)
CASSPEVGETQYF

SEQ ID NO: 489167 - protein, 15 aa, Homo sapiens
  CDR3 for alpha chain variable domain of TCR clone 244584 (TRAV17, TRAJ22)
CATAAPSGSARQLTF

SEQ ID NO: 489168 - protein, 16 aa, Homo sapiens
  CDR3 for beta chain variable domain of TCR clone 244584 (TRBV10-3, TRBJ2-7)
YAISADFADRPYEQYF

SEQ ID NO: 489169 - protein, 11 aa, Homo sapiens
  CDR3 for alpha chain variable domain of TCR clone 244585 (TRAV1-1, TRAJ23)
CAVRQGGKLIF

SEQ ID NO: 489170 - protein, 16 aa, Homo sapiens
  CDR3 for beta chain variable domain of TCR clone 244585 (TRBV3-1, TRBJ2-2)
CASSHYSGRSTGELFF

SEQ ID NO: 489171 - protein, 14 aa, Homo sapiens
  CDR3 for alpha chain variable domain of TCR clone 244586 (TRAV13-1, TRAJ6)
CAASNGGGSYIPTF

SEQ ID NO: 489172 - protein, 13 aa, Homo sapiens
  CDR3 for beta chain variable domain of TCR clone 244586 (TRBV10-2, TRBJ2-7)
CASSESGVYEQYF

SEQ ID NO: 489173 - protein, 14 aa, Homo sapiens
  CDR3 for alpha chain variable domain of TCR clone 244587 (TRAV35, TRAJ38)
CAGSNAGNNRKMIW

SEQ ID NO: 489174 - protein, 12 aa, Homo sapiens
  CDR3 for beta chain variable domain of TCR clone 244587 (TRBV19, TRBJ2-7)
CASTDRGYEQYF

SEQ ID NO: 489175 - protein, 12 aa, Homo sapiens
  CDR3 for alpha chain variable domain of TCR clone 244588 (TRAV16, TRAJ10)
CSRTGGGNKLTF

SEQ ID NO: 489176 - protein, 13 aa, Homo sapiens
  CDR3 for beta chain variable domain of TCR clone 244588 (TRBV12-4, TRBJ2-7)
CASSPTETYEQYF

SEQ ID NO: 489177 - protein, 14 aa, Homo sapiens
  CDR3 for alpha chain variable domain of TCR clone 244589 (TRAV21, TRAJ35)
CAVMPIGFGNVLHC

SEQ ID NO: 489178 - protein, 12 aa, Homo sapiens
  CDR3 for beta chain variable domain of TCR clone 244589 (TRBV7-9, TRBJ2-7)
CASSVKREEQDF

SEQ ID NO: 489179 - protein, 15 aa, Homo sapiens
  CDR3 for alpha chain variable domain of TCR clone 244590 (TRAV8-2, TRAJ15)
CVVTMGNQAGTALIF

SEQ ID NO: 489180 - protein, 16 aa, Homo sapiens
  CDR3 for beta chain variable domain of TCR clone 244590 (TRBV6-1, TRBJ2-5)
CASSETLDRGAETQYF

SEQ ID NO: 489181 - protein, 10 aa, Homo sapiens
  CDR3 for alpha chain variable domain of TCR clone 244591 (TRAV1-2, TRAJ20)
CAVTDYKLSF

SEQ ID NO: 489182 - protein, 15 aa, Homo sapiens
  CDR3 for beta chain variable domain of TCR clone 244591 (TRBV7-2, TRBJ2-7)
CASSLVSSGSHEQYF

SEQ ID NO: 489183 - protein, 13 aa, Homo sapiens
  CDR3 for alpha chain variable domain of TCR clone 244592 (TRAV2, TRAJ40)
CAVVTSGTYKYIF

SEQ ID NO: 489184 - protein, 15 aa, Homo sapiens
  CDR3 for beta chain variable domain of TCR clone 244592 (TRBV7-9, TRBJ1-6)
CASSSPGRGNSPLHF

SEQ ID NO: 489185 - protein, 16 aa, Homo sapiens
  CDR3 for alpha chain variable domain of TCR clone 244593 (TRAV30, TRAJ24)
CGTEIVDAGSWGKFQF

SEQ ID NO: 489186 - protein, 12 aa, Homo sapiens
  CDR3 for beta chain variable domain of TCR clone 244593 (TRBV11-2, TRBJ2-2)
CASSLPTGELFF

SEQ ID NO: 489187 - protein, 16 aa, Homo sapiens
  CDR3 for alpha chain variable domain of TCR clone 244594 (TRAV26-1, TRAJ38)
CIVRVELGGNKRKLIW

SEQ ID NO: 489188 - protein, 14 aa, Homo sapiens
  CDR3 for beta chain variable domain of TCR clone 244594 (TRBV5-1, TRBJ2-3)
CASSPGLAADTQYF

SEQ ID NO: 489189 - protein, 15 aa, Homo sapiens
  CDR3 for alpha chain variable domain of TCR clone 244595 (TRAV8-4, TRAJ54)
CAVSDLQQGAQKLVF

SEQ ID NO: 489190 - protein, 14 aa, Homo sapiens
  CDR3 for beta chain variable domain of TCR clone 244595 (TRBV7-8, TRBJ2-3)
CASSLEAGTDTQYF

SEQ ID NO: 489191 - protein, 14 aa, Homo sapiens
  CDR3 for alpha chain variable domain of TCR clone 244596 (TRAV1-2, TRAJ6)
CAVSLSGGSYIPTF

SEQ ID NO: 489192 - protein, 16 aa, Homo sapiens
  CDR3 for beta chain variable domain of TCR clone 244596 (TRBV7-2, TRBJ2-2)
CASSITGTGGPGELFF

SEQ ID NO: 489193 - protein, 11 aa, Homo sapiens
  CDR3 for alpha chain variable domain of TCR clone 244597 (TRAV12-3, TRAJ43)
CAMSVSHDMRF

SEQ ID NO: 489194 - protein, 16 aa, Homo sapiens
  CDR3 for beta chain variable domain of TCR clone 244597 (TRBV2, TRBJ2-3)
CASSTSVEGVTDTQYF

SEQ ID NO: 489195 - protein, 17 aa, Homo sapiens
  CDR3 for alpha chain variable domain of TCR clone 244598 (TRAV13-1, TRAJ28)
CAASPPYSGAGSYKLTF

SEQ ID NO: 489196 - protein, 15 aa, Homo sapiens
  CDR3 for beta chain variable domain of TCR clone 244598 (TRBV6-3, TRBJ2-7)
CASSSPGTVFYEQYF

SEQ ID NO: 489197 - protein, 16 aa, Homo sapiens
  CDR3 for alpha chain variable domain of TCR clone 244599 (TRAV12-3, TRAJ53)
CAMSPRSGGSNYKLTF

SEQ ID NO: 489198 - protein, 16 aa, Homo sapiens
  CDR3 for beta chain variable domain of TCR clone 244599 (TRBV4-2, TRBJ1-1)
CASSQAGFGMNTEAFF

SEQ ID NO: 489199 - protein, 14 aa, Homo sapiens
  CDR3 for alpha chain variable domain of TCR clone 244600 (TRAV8-2, TRAJ37)
CVVSISGNTGKLIF

SEQ ID NO: 489200 - protein, 14 aa, Homo sapiens
  CDR3 for beta chain variable domain of TCR clone 244600 (TRBV7-6, TRBJ2-3)
CASSLGTVTDTQYF

SEQ ID NO: 489201 - protein, 12 aa, Homo sapiens
  CDR3 for alpha chain variable domain of TCR clone 244601 (TRAV17, TRAJ12)
CATLRSSYKLIF

SEQ ID NO: 489202 - protein, 16 aa, Homo sapiens
  CDR3 for beta chain variable domain of TCR clone 244601 (TRBV28, TRBJ2-7)
CASSLLLETGGPEQYF

SEQ ID NO: 489203 - protein, 21 aa, Homo sapiens
  CDR3 for alpha chain variable domain of TCR clone 244602 (TRAV3, TRAJ37)
CAVRGGLWQHRQTNLWARDNF

SEQ ID NO: 489204 - protein, 13 aa, Homo sapiens
  CDR3 for beta chain variable domain of TCR clone 244602 (TRBV14, TRBJ2-7)
CASSQDRRGEQYF

SEQ ID NO: 489205 - protein, 17 aa, Homo sapiens
  CDR3 for alpha chain variable domain of TCR clone 244603 (TRAV13-2, TRAJ28)
CAEEPAGSGAGGYQLTF

SEQ ID NO: 489206 - protein, 15 aa, Homo sapiens
  CDR3 for beta chain variable domain of TCR clone 244603 (TRBV5-5, TRBJ1-1)
CASSLVGKDNTEAFF

SEQ ID NO: 489207 - protein, 16 aa, Homo sapiens
  CDR3 for alpha chain variable domain of TCR clone 244604 (TRAV1-2, TRAJ10)
CAVRGVLTGGGNKLTF

SEQ ID NO: 489208 - protein, 15 aa, Homo sapiens
  CDR3 for beta chain variable domain of TCR clone 244604 (TRBV5-1, TRBJ2-1)
CASSPSRAPYNEQFF

SEQ ID NO: 489209 - protein, 13 aa, Homo sapiens
  CDR3 for alpha chain variable domain of TCR clone 244605 (TRAV12-3, TRAJ13)
CAMSSGGYQKVTF

SEQ ID NO: 489210 - protein, 13 aa, Homo sapiens
  CDR3 for beta chain variable domain of TCR clone 244605 (TRBV2, TRBJ1-5)
CASSQGGSQPQHF

SEQ ID NO: 489211 - protein, 16 aa, Homo sapiens
  CDR3 for alpha chain variable domain of TCR clone 244606 (TRAV3, TRAJ10)
CAVRDMRAGGGNKLTF

SEQ ID NO: 489212 - protein, 13 aa, Homo sapiens
  CDR3 for beta chain variable domain of TCR clone 244606 (TRBV9, TRBJ2-1)
CASSVGQGGEQFF

SEQ ID NO: 489213 - protein, 14 aa, Homo sapiens
  CDR3 for alpha chain variable domain of TCR clone 244607 (TRAV12-2, TRAJ13)
CAVKKTGGYQKVTF

SEQ ID NO: 489214 - protein, 13 aa, Homo sapiens
  CDR3 for beta chain variable domain of TCR clone 244607 (TRBV20-1, TRBJ1-1)
SSARGGGNTEAFF

SEQ ID NO: 489215 - protein, 13 aa, Homo sapiens
  CDR3 for alpha chain variable domain of TCR clone 244608 (TRAV25, TRAJ10)
CAGRTGGGNKLTF

SEQ ID NO: 489216 - protein, 15 aa, Homo sapiens
  CDR3 for beta chain variable domain of TCR clone 244608 (TRBV7-9, TRBJ1-4)
CASSARTGGNEKLFF

SEQ ID NO: 489217 - protein, 13 aa, Homo sapiens
  CDR3 for alpha chain variable domain of TCR clone 244609 (TRAV12-1, TRAJ21)
CVVTLYNFNKFYF

SEQ ID NO: 489218 - protein, 20 aa, Homo sapiens
  CDR3 for beta chain variable domain of TCR clone 244609 (TRBV7-8, TRBJ2-1)
CASSLAHRRAGVRSYNEQLF

SEQ ID NO: 489219 - protein, 15 aa, Homo sapiens
  CDR3 for alpha chain variable domain of TCR clone 244610 (TRAV12-2, TRAJ9)
CAVNGGYTGGFKTIF

SEQ ID NO: 489220 - protein, 15 aa, Homo sapiens
  CDR3 for beta chain variable domain of TCR clone 244610 (TRBV28, TRBJ2-5)
CASSPPWSYQETQYF

SEQ ID NO: 489221 - protein, 17 aa, Homo sapiens
  CDR3 for alpha chain variable domain of TCR clone 244611 (TRAV3, TRAJ37)
CAVRDMRTPGNTGKLIF

SEQ ID NO: 489222 - protein, 15 aa, Homo sapiens
  CDR3 for beta chain variable domain of TCR clone 244611 (TRBV7-8, TRBJ2-7)
CASSLERAGSYEQYF

SEQ ID NO: 489223 - protein, 13 aa, Homo sapiens
  CDR3 for alpha chain variable domain of TCR clone 244612 (TRAV12-3, TRAJ30)
CAMSGGRDDKIIF

SEQ ID NO: 489224 - protein, 15 aa, Homo sapiens
  CDR3 for beta chain variable domain of TCR clone 244612 (TRBV7-2, TRBJ2-7)
CASSLALGSAYEQYF

SEQ ID NO: 489225 - protein, 16 aa, Homo sapiens
  CDR3 for alpha chain variable domain of TCR clone 244613 (TRAV17, TRAJ53)
CATDALSGGSNYKLTF

SEQ ID NO: 489226 - protein, 12 aa, Homo sapiens
  CDR3 for beta chain variable domain of TCR clone 244613 (TRBV5-1, TRBJ2-7)
CASSFRGYEEYF

SEQ ID NO: 489227 - protein, 14 aa, Homo sapiens
  CDR3 for alpha chain variable domain of TCR clone 244614 (TRAV1-2, TRAJ16)
CAVNRFSDGPKLLF

SEQ ID NO: 489228 - protein, 15 aa, Homo sapiens
  CDR3 for beta chain variable domain of TCR clone 244614 (TRBV9, TRBJ1-6)
CASSGAGTGDSPLHF

SEQ ID NO: 489229 - protein, 17 aa, Homo sapiens
  CDR3 for alpha chain variable domain of TCR clone 244615 (TRAV35, TRAJ38)
CAGQLQRNAGNNRKLIW

SEQ ID NO: 489230 - protein, 15 aa, Homo sapiens
  CDR3 for beta chain variable domain of TCR clone 244615 (TRBV20-1, TRBJ2-7)
CSARDRVSGMDEQYF

SEQ ID NO: 489231 - protein, 11 aa, Homo sapiens
  CDR3 for alpha chain variable domain of TCR clone 244616 (TRAV1-2, TRAJ20)
CALANDYKLSF

SEQ ID NO: 489232 - protein, 18 aa, Homo sapiens
  CDR3 for beta chain variable domain of TCR clone 244616 (TRBV20-1, TRBJ2-6)
CSAESTPTHGSGANVLTF

SEQ ID NO: 489233 - protein, 15 aa, Homo sapiens
  CDR3 for alpha chain variable domain of TCR clone 244617 (TRAV26-1, TRAJ44)
CIARVPFGTASKLTF

SEQ ID NO: 489234 - protein, 17 aa, Homo sapiens
  CDR3 for beta chain variable domain of TCR clone 244617 (TRBV24-1, TRBJ2-4)
CATSGAEARGVRNIQYF

SEQ ID NO: 489235 - protein, 16 aa, Homo sapiens
  CDR3 for alpha chain variable domain of TCR clone 244618 (TRAV3, TRAJ10)
CAVRDMRAGGGNKLTS

SEQ ID NO: 489236 - protein, 14 aa, Homo sapiens
  CDR3 for beta chain variable domain of TCR clone 244618 (TRBV6-1, TRBJ1-3)
CASVQGGGGNTIYF

SEQ ID NO: 489237 - protein, 13 aa, Homo sapiens
  CDR3 for alpha chain variable domain of TCR clone 244619 (TRAV16, TRAJ34)
CALSPYNTDKLIF

SEQ ID NO: 489238 - protein, 12 aa, Homo sapiens
  CDR3 for beta chain variable domain of TCR clone 244619 (TRBV12-5, TRBJ2-5)
CASGQGMETQYF

SEQ ID NO: 489239 - protein, 13 aa, Homo sapiens
  CDR3 for alpha chain variable domain of TCR clone 244620 (TRAV1-2, TRAJ9)
CAALNTGGFKTIF

SEQ ID NO: 489240 - protein, 14 aa, Homo sapiens
  CDR3 for beta chain variable domain of TCR clone 244620 (TRBV28, TRBJ2-7)
CASTRSDSSYEQYF

SEQ ID NO: 489241 - protein, 14 aa, Homo sapiens
  CDR3 for alpha chain variable domain of TCR clone 244621 (TRAV14/DV4, TRAJ27)
CAMRGNTNAGKSTF

SEQ ID NO: 489242 - protein, 15 aa, Homo sapiens
  CDR3 for beta chain variable domain of TCR clone 244621 (TRBV11-2, TRBJ2-1)
CASSSPSTRYNEQFF

SEQ ID NO: 489243 - protein, 14 aa, Homo sapiens
  CDR3 for alpha chain variable domain of TCR clone 244622 (TRAV12-2, TRAJ13)
CAVKKTGGYQKVTF

SEQ ID NO: 489244 - protein, 15 aa, Homo sapiens
  CDR3 for beta chain variable domain of TCR clone 244622 (TRBV11-2, TRBJ2-2)
CASSSDRVNVGELFF

SEQ ID NO: 489245 - protein, 13 aa, Homo sapiens
  CDR3 for alpha chain variable domain of TCR clone 244623 (TRAV1-1, TRAJ23)
CAVVANQGGKLIF

SEQ ID NO: 489246 - protein, 14 aa, Homo sapiens
  CDR3 for beta chain variable domain of TCR clone 244623 (TRBV7-8, TRBJ1-2)
CASSPDSLSYGYTF

SEQ ID NO: 489247 - protein, 14 aa, Homo sapiens
  CDR3 for alpha chain variable domain of TCR clone 244624 (TRAV17, TRAJ37)
CATVPSSNTGKLIF

SEQ ID NO: 489248 - protein, 15 aa, Homo sapiens
  CDR3 for beta chain variable domain of TCR clone 244624 (TRBV12-4, TRBJ2-2)
CASRRRGDLTGELFF

SEQ ID NO: 489249 - protein, 12 aa, Homo sapiens
  CDR3 for alpha chain variable domain of TCR clone 244625 (TRAV8-1, TRAJ23)
CAVGNQGGKLIF

SEQ ID NO: 489250 - protein, 16 aa, Homo sapiens
  CDR3 for beta chain variable domain of TCR clone 244625 (TRBV7-3, TRBJ2-2)
CAISLKRGTLSGELFF

SEQ ID NO: 489251 - protein, 13 aa, Homo sapiens
  CDR3 for alpha chain variable domain of TCR clone 244626 (TRAV1-2, TRAJ12)
CAVSMDSSSKLIF

SEQ ID NO: 489252 - protein, 14 aa, Homo sapiens
  CDR3 for beta chain variable domain of TCR clone 244626 (TRBV19, TRBJ2-1)
CASSSGRDYNEQFF

SEQ ID NO: 489253 - protein, 15 aa, Homo sapiens
  CDR3 for alpha chain variable domain of TCR clone 244627 (TRAV13-1, TRAJ32)
CAASNGWWCYKQAHL

SEQ ID NO: 489254 - protein, 17 aa, Homo sapiens
  CDR3 for beta chain variable domain of TCR clone 244627 (TRBV15, TRBJ1-2)
CATSGREIDVVNYGDTF

SEQ ID NO: 489255 - protein, 15 aa, Homo sapiens
  CDR3 for alpha chain variable domain of TCR clone 244628 (TRAV8-2, TRAJ40)
CVVLGTTSGTYKYIF

SEQ ID NO: 489256 - protein, 16 aa, Homo sapiens
  CDR3 for beta chain variable domain of TCR clone 244628 (TRBV7-3, TRBJ2-1)
CSSSLEGYRSYKEQFF

SEQ ID NO: 489257 - protein, 21 aa, Homo sapiens
  CDR3 for alpha chain variable domain of TCR clone 244629 (TRAV3, TRAJ27)
CAVRPLGAGKSTFVDVTTLTV

SEQ ID NO: 489258 - protein, 13 aa, Homo sapiens
  CDR3 for beta chain variable domain of TCR clone 244629 (TRBV7-9, TRBJ2-3)
CASSPGSTDTQYF

SEQ ID NO: 489259 - protein, 13 aa, Homo sapiens
  CDR3 for alpha chain variable domain of TCR clone 244630 (TRAV21, TRAJ27)
CAARPGNAGKSTF

SEQ ID NO: 489260 - protein, 16 aa, Homo sapiens
  CDR3 for beta chain variable domain of TCR clone 244630 (TRBV20-1, TRBJ2-5)
CSPGGTSGGYMETQYF

SEQ ID NO: 489261 - protein, 18 aa, Homo sapiens
  CDR3 for alpha chain variable domain of TCR clone 244631 (TRAV21, TRAJ52)
CAVRPSPAGGTSYGKLTF

SEQ ID NO: 489262 - protein, 16 aa, Homo sapiens
  CDR3 for beta chain variable domain of TCR clone 244631 (TRBV5-1, TRBJ2-3)
CASSLAAGTSTDTQYF

SEQ ID NO: 489263 - protein, 12 aa, Homo sapiens
  CDR3 for alpha chain variable domain of TCR clone 244632 (TRAV2, TRAJ31)
CAVEEGNARLMF

SEQ ID NO: 489264 - protein, 18 aa, Homo sapiens
  CDR3 for beta chain variable domain of TCR clone 244632 (TRBV7-9, TRBJ2-3)
CASSFDLAGLATPDTQYF

SEQ ID NO: 489265 - protein, 13 aa, Homo sapiens
  CDR3 for alpha chain variable domain of TCR clone 244633 (TRAV8-1, TRAJ39)
CAVADNAGNMLTF

SEQ ID NO: 489266 - protein, 15 aa, Homo sapiens
  CDR3 for beta chain variable domain of TCR clone 244633 (TRBV7-2, TRBJ2-1)
CASSLNRGAYNEQFF

SEQ ID NO: 489267 - protein, 15 aa, Homo sapiens
  CDR3 for alpha chain variable domain of TCR clone 244634 (TRAV8-3, TRAJ11)
CAVGLLNSGYSALTL

SEQ ID NO: 489268 - protein, 16 aa, Homo sapiens
  CDR3 for beta chain variable domain of TCR clone 244634 (TRBV28, TRBJ2-7)
CASSLFFETGGPEQYF

SEQ ID NO: 489269 - protein, 10 aa, Homo sapiens
  CDR3 for alpha chain variable domain of TCR clone 244635 (TRAV8-4, TRAJ43)
CAVSLGDMRF

SEQ ID NO: 489270 - protein, 14 aa, Homo sapiens
  CDR3 for beta chain variable domain of TCR clone 244635 (TRBV6-1, TRBJ1-3)
CAIVQGGGGNTIYF

SEQ ID NO: 489271 - protein, 13 aa, Homo sapiens
  CDR3 for alpha chain variable domain of TCR clone 244636 (TRAV2, TRAJ21)
CAVEDLNFNKFYF

SEQ ID NO: 489272 - protein, 11 aa, Homo sapiens
  CDR3 for beta chain variable domain of TCR clone 244636 (TRBV7-6, TRBJ2-5)
CASSSQETQYF

SEQ ID NO: 489273 - protein, 15 aa, Homo sapiens
  CDR3 for alpha chain variable domain of TCR clone 244637 (TRAV20, TRAJ53)
CAVQASGGSNYKLTF

SEQ ID NO: 489274 - protein, 16 aa, Homo sapiens
  CDR3 for beta chain variable domain of TCR clone 244637 (TRBV12-4, TRBJ2-2)
CASSFWIVGNTGELFF

SEQ ID NO: 489275 - protein, 14 aa, Homo sapiens
  CDR3 for alpha chain variable domain of TCR clone 244638 (TRAV12-2, TRAJ45)
CAVNIGGGADGLTV

SEQ ID NO: 489276 - protein, 13 aa, Homo sapiens
  CDR3 for beta chain variable domain of TCR clone 244638 (TRBV19, TRBJ2-2)
CASGIWSTGELFF

SEQ ID NO: 489277 - protein, 14 aa, Homo sapiens
  CDR3 for alpha chain variable domain of TCR clone 244639 (TRAV29/DV5, TRAJ45)
CAASFRGGADGLTF

SEQ ID NO: 489278 - protein, 16 aa, Homo sapiens
  CDR3 for beta chain variable domain of TCR clone 244639 (TRBV12-4, TRBJ1-2)
CASSLGQYRPNYGYTF

SEQ ID NO: 489279 - protein, 12 aa, Homo sapiens
  CDR3 for alpha chain variable domain of TCR clone 244640 (TRAV12-3, TRAJ17)
CAMTLTGNKLTF

SEQ ID NO: 489280 - protein, 15 aa, Homo sapiens
  CDR3 for beta chain variable domain of TCR clone 244640 (TRBV20-1, TRBJ2-7)
CSARDRVFGRDEQYF

SEQ ID NO: 489281 - protein, 14 aa, Homo sapiens
  CDR3 for alpha chain variable domain of TCR clone 244641 (TRAV1-2, TRAJ16)
CAVNRFSDGQKLLL

SEQ ID NO: 489282 - protein, 14 aa, Homo sapiens
  CDR3 for beta chain variable domain of TCR clone 244641 (TRBV19, TRBJ2-7)
CASSMGQGAIEQYF

SEQ ID NO: 489283 - protein, 11 aa, Homo sapiens
  CDR3 for alpha chain variable domain of TCR clone 244642 (TRAV12-2, TRAJ49)
CAVNTGNQFYF

SEQ ID NO: 489284 - protein, 14 aa, Homo sapiens
  CDR3 for beta chain variable domain of TCR clone 244642 (TRBV20-1, TRBJ2-7)
CSALEWRNRGEQYF

SEQ ID NO: 489285 - protein, 14 aa, Homo sapiens
  CDR3 for alpha chain variable domain of TCR clone 244643 (TRAV9-2, TRAJ39)
CALYIYNAGNMLTF

SEQ ID NO: 489286 - protein, 16 aa, Homo sapiens
  CDR3 for beta chain variable domain of TCR clone 244643 (TRBV7-2, TRBJ1-3)
CASSRLEASSGNTIYF

SEQ ID NO: 489287 - protein, 16 aa, Homo sapiens
  CDR3 for alpha chain variable domain of TCR clone 244644 (TRAV2, TRAJ13)
CAARILGVTRKLPLEL

SEQ ID NO: 489288 - protein, 17 aa, Homo sapiens
  CDR3 for beta chain variable domain of TCR clone 244644 (TRBV13, TRBJ2-3)
CASSLSRVAGGRNTQYF

SEQ ID NO: 489289 - protein, 16 aa, Homo sapiens
  CDR3 for alpha chain variable domain of TCR clone 244645 (TRAV30, TRAJ24)
CGTEIVDDESWGKFQF

SEQ ID NO: 489290 - protein, 16 aa, Homo sapiens
  CDR3 for beta chain variable domain of TCR clone 244645 (TRBV2, TRBJ1-3)
CASSGGAGRSGNTIYF

SEQ ID NO: 489291 - protein, 12 aa, Homo sapiens
  CDR3 for alpha chain variable domain of TCR clone 244646 (TRAV35, TRAJ30)
CAGQLADDKVIF

SEQ ID NO: 489292 - protein, 18 aa, Homo sapiens
  CDR3 for beta chain variable domain of TCR clone 244646 (TRBV2, TRBJ2-3)
CASRLGLAGSLSTDTQYF

SEQ ID NO: 489293 - protein, 15 aa, Homo sapiens
  CDR3 for alpha chain variable domain of TCR clone 244647 (TRAV27, TRAJ53)
CSPEGSGGSNYKLTF

SEQ ID NO: 489294 - protein, 15 aa, Homo sapiens
  CDR3 for beta chain variable domain of TCR clone 244647 (TRBV20-1, TRBJ1-1)
CSASRGVTGNTEAFF

SEQ ID NO: 489295 - protein, 17 aa, Homo sapiens
  CDR3 for alpha chain variable domain of TCR clone 244648 (TRAV26-1, TRAJ37)
CIVRVVTVSSNTGKLIF

SEQ ID NO: 489296 - protein, 14 aa, Homo sapiens
  CDR3 for beta chain variable domain of TCR clone 244648 (TRBV19, TRBJ2-2)
CASSTLHRSGELFF

SEQ ID NO: 489297 - protein, 12 aa, Homo sapiens
  CDR3 for alpha chain variable domain of TCR clone 244649 (TRAV12-1, TRAJ40)
CVVYSGTYKYIF

SEQ ID NO: 489298 - protein, 13 aa, Homo sapiens
  CDR3 for beta chain variable domain of TCR clone 244649 (TRBV27, TRBJ2-7)
CASSLTTGYEQYF

SEQ ID NO: 489299 - protein, 14 aa, Homo sapiens
  CDR3 for alpha chain variable domain of TCR clone 244650 (TRAV26-1, TRAJ38)
CIADNAGNNRKLIW

SEQ ID NO: 489300 - protein, 12 aa, Homo sapiens
  CDR3 for beta chain variable domain of TCR clone 244650 (TRBV5-1, TRBJ2-7)
CASSLDSYEQYF

SEQ ID NO: 489301 - protein, 15 aa, Homo sapiens
  CDR3 for alpha chain variable domain of TCR clone 244651 (TRAV26-1, TRAJ29)
CIVRVEGSGNKPLVF

SEQ ID NO: 489302 - protein, 14 aa, Homo sapiens
  CDR3 for beta chain variable domain of TCR clone 244651 (TRBV18, TRBJ2-5)
CASSPAVSQETQYF

SEQ ID NO: 489303 - protein, 14 aa, Homo sapiens
  CDR3 for alpha chain variable domain of TCR clone 244652 (TRAV8-3, TRAJ10)
CAVGNAGGGNKLTF

SEQ ID NO: 489304 - protein, 16 aa, Homo sapiens
  CDR3 for beta chain variable domain of TCR clone 244652 (TRBV11-2, TRBJ1-2)
CASSLDTGGADYGYTC

SEQ ID NO: 489305 - protein, 17 aa, Homo sapiens
  CDR3 for alpha chain variable domain of TCR clone 244653 (TRAV13-1, TRAJ31)
CAPRDRLMFGDGTQLWV

SEQ ID NO: 489306 - protein, 12 aa, Homo sapiens
  CDR3 for beta chain variable domain of TCR clone 244653 (TRBV7-9, TRBJ2-7)
CASSLEGYEQYF

SEQ ID NO: 489307 - protein, 15 aa, Homo sapiens
  CDR3 for alpha chain variable domain of TCR clone 244654 (TRAV8-3, TRAJ27)
CAVGPSKTNAGKSTF

SEQ ID NO: 489308 - protein, 13 aa, Homo sapiens
  CDR3 for beta chain variable domain of TCR clone 244654 (TRBV19, TRBJ1-2)
CASSVPGQDGYTF

SEQ ID NO: 489309 - protein, 14 aa, Homo sapiens
  CDR3 for alpha chain variable domain of TCR clone 244655 (TRAV1-2, TRAJ16)
CAVNRVSDGQKLLF

SEQ ID NO: 489310 - protein, 16 aa, Homo sapiens
  CDR3 for beta chain variable domain of TCR clone 244655 (TRBV19, TRBJ2-1)
CASSEILAGDGNEQFF

SEQ ID NO: 489311 - protein, 11 aa, Homo sapiens
  CDR3 for alpha chain variable domain of TCR clone 244656 (TRAV2, TRAJ13)
CASGGYQKVTF

SEQ ID NO: 489312 - protein, 13 aa, Homo sapiens
  CDR3 for beta chain variable domain of TCR clone 244656 (TRBV20-1, TRBJ1-1)
CGARGGGNTEAFF

SEQ ID NO: 489313 - protein, 16 aa, Homo sapiens
  CDR3 for alpha chain variable domain of TCR clone 244657 (TRAV3, TRAJ10)
CAVRDMRAGGGNKLTF

SEQ ID NO: 489314 - protein, 14 aa, Homo sapiens
  CDR3 for beta chain variable domain of TCR clone 244657 (TRBV7-6, TRBJ2-5)
CASSSPSGSETQYF

SEQ ID NO: 489315 - protein, 13 aa, Homo sapiens
  CDR3 for alpha chain variable domain of TCR clone 244658 (TRAV12-3, TRAJ7)
CAMSASGNNRLTF

SEQ ID NO: 489316 - protein, 14 aa, Homo sapiens
  CDR3 for beta chain variable domain of TCR clone 244658 (TRBV13, TRBJ2-5)
CASSLGARGETQYF

SEQ ID NO: 489317 - protein, 13 aa, Homo sapiens
  CDR3 for alpha chain variable domain of TCR clone 244659 (TRAV12-3, TRAJ15)
CNDPPQAGTALIF

SEQ ID NO: 489318 - protein, 12 aa, Homo sapiens
  CDR3 for beta chain variable domain of TCR clone 244659 (TRBV11-2, TRBJ2-2)
CASSFGGGELFF

SEQ ID NO: 489319 - protein, 11 aa, Homo sapiens
  CDR3 for alpha chain variable domain of TCR clone 244660 (TRAV2, TRAJ13)
CASGGYQKVTF

SEQ ID NO: 489320 - protein, 16 aa, Homo sapiens
  CDR3 for beta chain variable domain of TCR clone 244660 (TRBV7-2, TRBJ2-5)
CASSLESAGGRETQYF

SEQ ID NO: 489321 - protein, 12 aa, Homo sapiens
  CDR3 for alpha chain variable domain of TCR clone 244661 (TRAV36/DV7, TRAJ54)
CAVVRGAQKLVF

SEQ ID NO: 489322 - protein, 14 aa, Homo sapiens
  CDR3 for beta chain variable domain of TCR clone 244661 (TRBV7-3, TRBJ2-1)
CASSLAGGTNEQFF

SEQ ID NO: 489323 - protein, 17 aa, Homo sapiens
  CDR3 for alpha chain variable domain of TCR clone 244662 (TRAV12-3, TRAJ6)
CAMSARGGAGGSYIPTF

SEQ ID NO: 489324 - protein, 15 aa, Homo sapiens
  CDR3 for beta chain variable domain of TCR clone 244662 (TRBV9, TRBJ1-6)
CASSVAGTGDSPLHL

SEQ ID NO: 489325 - protein, 15 aa, Homo sapiens
  CDR3 for alpha chain variable domain of TCR clone 244663 (TRAV26-2, TRAJ45)
CILRDRVDQEEVLTD

SEQ ID NO: 489326 - protein, 16 aa, Homo sapiens
  CDR3 for beta chain variable domain of TCR clone 244663 (TRBV12-5, TRBJ2-5)
CASGPRTSGNQETQYF

SEQ ID NO: 489327 - protein, 12 aa, Homo sapiens
  CDR3 for alpha chain variable domain of TCR clone 244664 (TRAV27, TRAJ9)
CAGESGGFKTIF

SEQ ID NO: 489328 - protein, 13 aa, Homo sapiens
  CDR3 for beta chain variable domain of TCR clone 244664 (TRBV27, TRBJ2-7)
CASSLRHRYEQYF

SEQ ID NO: 489329 - protein, 15 aa, Homo sapiens
  CDR3 for alpha chain variable domain of TCR clone 244665 (TRAV29/DV5, TRAJ29)
CAASERSSGNTPLVF

SEQ ID NO: 489330 - protein, 17 aa, Homo sapiens
  CDR3 for beta chain variable domain of TCR clone 244665 (TRBV4-1, TRBJ1-4)
CASSQVGPRGVEEKLFF

SEQ ID NO: 489331 - protein, 13 aa, Homo sapiens
  CDR3 for alpha chain variable domain of TCR clone 244666 (TRAV3, TRAJ21)
CAVREPDFNKFYF

SEQ ID NO: 489332 - protein, 15 aa, Homo sapiens
  CDR3 for beta chain variable domain of TCR clone 244666 (TRBV4-3, TRBJ2-2)
CASSQGQGGAGELFF

SEQ ID NO: 489333 - protein, 13 aa, Homo sapiens
  CDR3 for alpha chain variable domain of TCR clone 244667 (TRAV2, TRAJ15)
CAVSSQAGTALIF

SEQ ID NO: 489334 - protein, 14 aa, Homo sapiens
  CDR3 for beta chain variable domain of TCR clone 244667 (TRBV25-1, TRBJ1-1)
CASTHLGGNTEAFF

SEQ ID NO: 489335 - protein, 23 aa, Homo sapiens
  CDR3 for alpha chain variable domain of TCR clone 244668 (TRAV1-1, TRAJ11)
LLQELQMKDSASYFCAGYSTLTF

SEQ ID NO: 489336 - protein, 15 aa, Homo sapiens
  CDR3 for beta chain variable domain of TCR clone 244668 (TRBV6-5, TRBJ2-1)
CASRGDFDSYNEQFF

SEQ ID NO: 489337 - protein, 11 aa, Homo sapiens
  CDR3 for alpha chain variable domain of TCR clone 244669 (TRAV21, TRAJ9)
CAVPGGFKTIF

SEQ ID NO: 489338 - protein, 15 aa, Homo sapiens
  CDR3 for beta chain variable domain of TCR clone 244669 (TRBV5-1, TRBJ2-3)
CASSVTSGSTDTQYF

SEQ ID NO: 489339 - protein, 13 aa, Homo sapiens
  CDR3 for alpha chain variable domain of TCR clone 244670 (TRAV17, TRAJ9)
CATDGTGGFKTIF

SEQ ID NO: 489340 - protein, 15 aa, Homo sapiens
  CDR3 for beta chain variable domain of TCR clone 244670 (TRBV5-1, TRBJ2-1)
CASSPPRAPYNEQFF

SEQ ID NO: 489341 - protein, 16 aa, Homo sapiens
  CDR3 for alpha chain variable domain of TCR clone 244671 (TRAV20, TRAJ23)
CAVQPPIYNQGGKLIF

SEQ ID NO: 489342 - protein, 13 aa, Homo sapiens
  CDR3 for beta chain variable domain of TCR clone 244671 (TRBV7-9, TRBJ1-2)
CASSLKRNYGYTF

SEQ ID NO: 489343 - protein, 17 aa, Homo sapiens
  CDR3 for alpha chain variable domain of TCR clone 244672 (TRAV4, TRAJ13)
CLVGVQGSSGGYQKVTF

SEQ ID NO: 489344 - protein, 12 aa, Homo sapiens
  CDR3 for beta chain variable domain of TCR clone 244672 (TRBV29-1, TRBJ2-3)
CSVTGGADTQYF

SEQ ID NO: 489345 - protein, 13 aa, Homo sapiens
  CDR3 for alpha chain variable domain of TCR clone 244673 (TRAV12-1, TRAJ40)
CVVNSSGTYKYIF

SEQ ID NO: 489346 - protein, 14 aa, Homo sapiens
  CDR3 for beta chain variable domain of TCR clone 244673 (TRBV2, TRBJ1-6)
CASEVSSYNSPLHY

SEQ ID NO: 489347 - protein, 15 aa, Homo sapiens
  CDR3 for alpha chain variable domain of TCR clone 244674 (TRAV8-3, TRAJ45)
CASSYSGGGADGLTF

SEQ ID NO: 489348 - protein, 13 aa, Homo sapiens
  CDR3 for beta chain variable domain of TCR clone 244674 (TRBV19, TRBJ1-1)
CASSGQVNTEAFF

SEQ ID NO: 489349 - protein, 13 aa, Homo sapiens
  CDR3 for alpha chain variable domain of TCR clone 244675 (TRAV22, TRAJ29)
CAVGGSGNTPLVF

SEQ ID NO: 489350 - protein, 18 aa, Homo sapiens
  CDR3 for beta chain variable domain of TCR clone 244675 (TRBV11-2, TRBJ2-3)
CASSLGGASRGAPNTQYF

SEQ ID NO: 489351 - protein, 14 aa, Homo sapiens
  CDR3 for alpha chain variable domain of TCR clone 244676 (TRAV1-2, TRAJ8)
CAVREDTGFQKLVF

SEQ ID NO: 489352 - protein, 16 aa, Homo sapiens
  CDR3 for beta chain variable domain of TCR clone 244676 (TRBV19, TRBJ2-1)
CTSSKAGPSSYNEQFF

SEQ ID NO: 489353 - protein, 14 aa, Homo sapiens
  CDR3 for alpha chain variable domain of TCR clone 244677 (TRAV1-2, TRAJ16)
CAVNRFSDGQKLLS

SEQ ID NO: 489354 - protein, 15 aa, Homo sapiens
  CDR3 for beta chain variable domain of TCR clone 244677 (TRBV9, TRBJ1-6)
CASSVAGTGDSHLHF

SEQ ID NO: 489355 - protein, 14 aa, Homo sapiens
  CDR3 for alpha chain variable domain of TCR clone 244678 (TRAV9-2, TRAJ39)
GALYIYNAGNMLTF

SEQ ID NO: 489356 - protein, 14 aa, Homo sapiens
  CDR3 for beta chain variable domain of TCR clone 244678 (TRBV9, TRBJ2-7)
CASSPLRAVGEQYF

SEQ ID NO: 489357 - protein, 13 aa, Homo sapiens
  CDR3 for alpha chain variable domain of TCR clone 244679 (TRAV13-1, TRAJ9)
CAARGTGSFKTIF

SEQ ID NO: 489358 - protein, 12 aa, Homo sapiens
  CDR3 for beta chain variable domain of TCR clone 244679 (TRBV2, TRBJ2-1)
CAYGPPGNEQFF

SEQ ID NO: 489359 - protein, 14 aa, Homo sapiens
  CDR3 for alpha chain variable domain of TCR clone 244680 (TRAV12-2, TRAJ13)
CAVTRTGGYQKVTF

SEQ ID NO: 489360 - protein, 14 aa, Homo sapiens
  CDR3 for beta chain variable domain of TCR clone 244680 (TRBV10-3, TRBJ2-1)
CAISSDLAYNEQFF

SEQ ID NO: 489361 - protein, 13 aa, Homo sapiens
  CDR3 for alpha chain variable domain of TCR clone 244681 (TRAV17, TRAJ9)
CATDYTGGCKTIF

SEQ ID NO: 489362 - protein, 14 aa, Homo sapiens
  CDR3 for beta chain variable domain of TCR clone 244681 (TRBV7-2, TRBJ2-7)
CASSPKTSFYEQYF

SEQ ID NO: 489363 - protein, 15 aa, Homo sapiens
  CDR3 for alpha chain variable domain of TCR clone 244682 (TRAV12-3, TRAJ6)
CAMSTTTGGSYIPTF

SEQ ID NO: 489364 - protein, 14 aa, Homo sapiens
  CDR3 for beta chain variable domain of TCR clone 244682 (TRBV25-1, TRBJ1-1)
CASTHLGGNTEAFF

SEQ ID NO: 489365 - protein, 16 aa, Homo sapiens
  CDR3 for alpha chain variable domain of TCR clone 244683 (TRAV26-1, TRAJ45)
CIVEKYSGGGADGLTF

SEQ ID NO: 489366 - protein, 14 aa, Homo sapiens
  CDR3 for beta chain variable domain of TCR clone 244683 (TRBV13, TRBJ2-3)
CASSSGSPTDTQYF

SEQ ID NO: 489367 - protein, 13 aa, Homo sapiens
  CDR3 for alpha chain variable domain of TCR clone 244684 (TRAV20, TRAJ20)
CAVQAGSGYKLSF

SEQ ID NO: 489368 - protein, 16 aa, Homo sapiens
  CDR3 for beta chain variable domain of TCR clone 244684 (TRBV19, TRBJ1-1)
CASSPTRFWPGTEAFF

SEQ ID NO: 489369 - protein, 13 aa, Homo sapiens
  CDR3 for alpha chain variable domain of TCR clone 244685 (TRAV21, TRAJ26)
CAVIGNYGQHFVF

SEQ ID NO: 489370 - protein, 16 aa, Homo sapiens
  CDR3 for beta chain variable domain of TCR clone 244685 (TRBV6-3, TRBJ2-2)
CASSFSGTDNTGELFF

SEQ ID NO: 489371 - protein, 12 aa, Homo sapiens
  CDR3 for alpha chain variable domain of TCR clone 244686 (TRAV17, TRAJ20)
CATDSNDYELSF

SEQ ID NO: 489372 - protein, 17 aa, Homo sapiens
  CDR3 for beta chain variable domain of TCR clone 244686 (TRBV5-1, TRBJ2-2)
CASSLAGLSGGTGELFF

SEQ ID NO: 489373 - protein, 21 aa, Homo sapiens
  CDR3 for alpha chain variable domain of TCR clone 244687 (TRAV3, )
CAVRPTPDIQNPDPAVHQLRD

SEQ ID NO: 489374 - protein, 15 aa, Homo sapiens
  CDR3 for beta chain variable domain of TCR clone 244687 (TRBV11-3, TRBJ2-5)
CASSDTSGGIETQYF

SEQ ID NO: 489375 - protein, 11 aa, Homo sapiens
  CDR3 for alpha chain variable domain of TCR clone 244688 (TRAV1-1, TRAJ30)
CAQHRDDKIIF

SEQ ID NO: 489376 - protein, 14 aa, Homo sapiens
  CDR3 for beta chain variable domain of TCR clone 244688 (TRBV7-8, TRBJ2-7)
CASSPGLADYEQYF

SEQ ID NO: 489377 - protein, 14 aa, Homo sapiens
  CDR3 for alpha chain variable domain of TCR clone 244689 (TRAV4, TRAJ30)
CLVGDMNRDDKIIF

SEQ ID NO: 489378 - protein, 13 aa, Homo sapiens
  CDR3 for beta chain variable domain of TCR clone 244689 (TRBV4-2, TRBJ1-1)
CASSQAGNTEAFF

SEQ ID NO: 489379 - protein, 12 aa, Homo sapiens
  CDR3 for alpha chain variable domain of TCR clone 244690 (TRAV13-2, TRAJ23)
CAERHRGGKLIF

SEQ ID NO: 489380 - protein, 15 aa, Homo sapiens
  CDR3 for beta chain variable domain of TCR clone 244690 (TRBV7-6, TRBJ2-2)
CASRRTSGNTGELFF

SEQ ID NO: 489381 - protein, 13 aa, Homo sapiens
  CDR3 for alpha chain variable domain of TCR clone 244691 (TRAV2, TRAJ27)
CAVEAPMQANQPL

SEQ ID NO: 489382 - protein, 13 aa, Homo sapiens
  CDR3 for beta chain variable domain of TCR clone 244691 (TRBV10-2, TRBJ2-3)
CAISESGDHTQYF

SEQ ID NO: 489383 - protein, 17 aa, Homo sapiens
  CDR3 for alpha chain variable domain of TCR clone 244692 (TRAV16, TRAJ58)
CITVLSNGETSGSRLTF

SEQ ID NO: 489384 - protein, 15 aa, Homo sapiens
  CDR3 for beta chain variable domain of TCR clone 244692 (TRBV5-1, TRBJ2-1)
CASKGLAGVYNEQFF

SEQ ID NO: 489385 - protein, 14 aa, Homo sapiens
  CDR3 for alpha chain variable domain of TCR clone 244693 (TRAV36/DV7, TRAJ48)
CAQRRDFGKEKLTF

SEQ ID NO: 489386 - protein, 14 aa, Homo sapiens
  CDR3 for beta chain variable domain of TCR clone 244693 (TRBV28, TRBJ2-4)
CASTQVTGVNTQYF

SEQ ID NO: 489387 - protein, 14 aa, Homo sapiens
  CDR3 for alpha chain variable domain of TCR clone 244694 (TRAV1-2, TRAJ8)
FAVREDTGFQKLVF

SEQ ID NO: 489388 - protein, 14 aa, Homo sapiens
  CDR3 for beta chain variable domain of TCR clone 244694 (TRBV4-1, TRBJ2-2)
CASSQAVNTGELFF

SEQ ID NO: 489389 - protein, 16 aa, Homo sapiens
  CDR3 for alpha chain variable domain of TCR clone 244695 (TRAV3, TRAJ18)
CAVRDGRGSTLGRLYF

SEQ ID NO: 489390 - protein, 17 aa, Homo sapiens
  CDR3 for beta chain variable domain of TCR clone 244695 (TRBV5-1, TRBJ2-3)
CASSKIGLADRTDTQYC

SEQ ID NO: 489391 - protein, 13 aa, Homo sapiens
  CDR3 for alpha chain variable domain of TCR clone 244696 (TRAV12-1, TRAJ33)
CGDAPDSNYQLIW

SEQ ID NO: 489392 - protein, 15 aa, Homo sapiens
  CDR3 for beta chain variable domain of TCR clone 244696 (TRBV20-1, TRBJ2-3)
CSASPPQVSTDTQYF

SEQ ID NO: 489393 - protein, 16 aa, Homo sapiens
  CDR3 for alpha chain variable domain of TCR clone 244697 (TRAV26-1, TRAJ53)
CIVRVARGGSSYKLTF

SEQ ID NO: 489394 - protein, 12 aa, Homo sapiens
  CDR3 for beta chain variable domain of TCR clone 244697 (TRBV7-9, TRBJ1-5)
CASSPQGQPQHF

SEQ ID NO: 489395 - protein, 15 aa, Homo sapiens
  CDR3 for alpha chain variable domain of TCR clone 244698 (TRAV23/DV6, TRAJ18)
CAARYRGSTLGRLYF

SEQ ID NO: 489396 - protein, 15 aa, Homo sapiens
  CDR3 for beta chain variable domain of TCR clone 244698 (TRBV7-2, TRBJ2-3)
CASLKDGREGDTQYF

SEQ ID NO: 489397 - protein, 13 aa, Homo sapiens
  CDR3 for alpha chain variable domain of TCR clone 244699 (TRAV21, TRAJ20)
CAVGLRVDYKLSF

SEQ ID NO: 489398 - protein, 16 aa, Homo sapiens
  CDR3 for beta chain variable domain of TCR clone 244699 (TRBV27, TRBJ1-1)
CASSSRGRTGYTEAFF

SEQ ID NO: 489399 - protein, 15 aa, Homo sapiens
  CDR3 for alpha chain variable domain of TCR clone 244700 (TRAV36/DV7, TRAJ53)
CAVEGSGGSNYKLTF

SEQ ID NO: 489400 - protein, 16 aa, Homo sapiens
  CDR3 for beta chain variable domain of TCR clone 244700 (TRBV7-9, TRBJ2-2)
CASSLSGFWVTGELFF

SEQ ID NO: 489401 - protein, 15 aa, Homo sapiens
  CDR3 for alpha chain variable domain of TCR clone 244701 (TRAV26-1, TRAJ29)
CIVRVEGSGNTPLVF

SEQ ID NO: 489402 - protein, 14 aa, Homo sapiens
  CDR3 for beta chain variable domain of TCR clone 244701 (TRBV25-1, TRBJ1-1)
CASTYLGGNNEAFF

SEQ ID NO: 489403 - protein, 14 aa, Homo sapiens
  CDR3 for alpha chain variable domain of TCR clone 244702 (TRAV1-2, TRAJ8)
CAVREDTGCQKLVF

SEQ ID NO: 489404 - protein, 15 aa, Homo sapiens
  CDR3 for beta chain variable domain of TCR clone 244702 (TRBV6-3, TRBJ2-7)
CASSSPGTVFYGQYF

SEQ ID NO: 489405 - protein, 12 aa, Homo sapiens
  CDR3 for alpha chain variable domain of TCR clone 244703 (TRAV16, TRAJ17)
CAPSAAGNKLTF

SEQ ID NO: 489406 - protein, 14 aa, Homo sapiens
  CDR3 for beta chain variable domain of TCR clone 244703 (TRBV6-1, TRBJ1-3)
CASVQGGGGNTIYF

SEQ ID NO: 489407 - protein, 14 aa, Homo sapiens
  CDR3 for alpha chain variable domain of TCR clone 244704 (TRAV17, TRAJ34)
CATDSLEGTDKLIF

SEQ ID NO: 489408 - protein, 14 aa, Homo sapiens
  CDR3 for beta chain variable domain of TCR clone 244704 (TRBV11-2, TRBJ2-7)
CASSLGAGAYEQYF

SEQ ID NO: 489409 - protein, 12 aa, Homo sapiens
  CDR3 for alpha chain variable domain of TCR clone 244705 (TRAV29/DV5, TRAJ34)
CAARHNTDKLIF

SEQ ID NO: 489410 - protein, 15 aa, Homo sapiens
  CDR3 for beta chain variable domain of TCR clone 244705 (TRBV19, TRBJ2-7)
CASSPTGSGEALRYF

SEQ ID NO: 489411 - protein, 12 aa, Homo sapiens
  CDR3 for alpha chain variable domain of TCR clone 244706 (TRAV13-1, TRAJ21)
CAAKEGFNKFYF

SEQ ID NO: 489412 - protein, 16 aa, Homo sapiens
  CDR3 for beta chain variable domain of TCR clone 244706 (TRBV4-1, TRBJ2-1)
CASSLNTGIVYNEQFF

SEQ ID NO: 489413 - protein, 11 aa, Homo sapiens
  CDR3 for alpha chain variable domain of TCR clone 244707 (TRAV2, TRAJ13)
CASGGYQKVTF

SEQ ID NO: 489414 - protein, 15 aa, Homo sapiens
  CDR3 for beta chain variable domain of TCR clone 244707 (TRBV7-9, TRBJ2-7)
CASSRPGQGQDEQYF

SEQ ID NO: 489415 - protein, 14 aa, Homo sapiens
  CDR3 for alpha chain variable domain of TCR clone 244708 (TRAV1-2, TRAJ16)
CAVNRFSDGQKLLF

SEQ ID NO: 489416 - protein, 15 aa, Homo sapiens
  CDR3 for beta chain variable domain of TCR clone 244708 (TRBV25-1, TRBJ1-2)
CASSETGGPSYGYTF

SEQ ID NO: 489417 - protein, 16 aa, Homo sapiens
  CDR3 for alpha chain variable domain of TCR clone 244709 (TRAV12-3, TRAJ53)
CAMSPGGGGSNYKLTF

SEQ ID NO: 489418 - protein, 17 aa, Homo sapiens
  CDR3 for beta chain variable domain of TCR clone 244709 (TRBV28, TRBJ2-5)
CASSTPEGDALQETQYF

SEQ ID NO: 489419 - protein, 14 aa, Homo sapiens
  CDR3 for alpha chain variable domain of TCR clone 244710 (TRAV26-1, TRAJ21)
CIVRVVYNFNKFYF

SEQ ID NO: 489420 - protein, 12 aa, Homo sapiens
  CDR3 for beta chain variable domain of TCR clone 244710 (TRBV11-2, TRBJ2-2)
CASSLGGGELFF

SEQ ID NO: 489421 - protein, 11 aa, Homo sapiens
  CDR3 for alpha chain variable domain of TCR clone 244711 (TRAV21, TRAJ11)
CAVNGYSTLTF

SEQ ID NO: 489422 - protein, 18 aa, Homo sapiens
  CDR3 for beta chain variable domain of TCR clone 244711 (TRBV12-4, TRBJ2-2)
CASSLVAGTRGRTGELFF

SEQ ID NO: 489423 - protein, 14 aa, Homo sapiens
  CDR3 for alpha chain variable domain of TCR clone 244712 (TRAV8-4, TRAJ48)
CAVSETFGNEKLTF

SEQ ID NO: 489424 - protein, 14 aa, Homo sapiens
  CDR3 for beta chain variable domain of TCR clone 244712 (TRBV20-1, TRBJ2-1)
CSAQIGGSANEQFF

SEQ ID NO: 489425 - protein, 12 aa, Homo sapiens
  CDR3 for alpha chain variable domain of TCR clone 244713 (TRAV16, TRAJ22)
CALEVSARQLTV

SEQ ID NO: 489426 - protein, 13 aa, Homo sapiens
  CDR3 for beta chain variable domain of TCR clone 244713 (TRBV11-2, TRBJ2-5)
CASSFSSQETQYF

SEQ ID NO: 489427 - protein, 13 aa, Homo sapiens
  CDR3 for alpha chain variable domain of TCR clone 244714 (TRAV17, TRAJ9)
CATAYTGGFKTIF

SEQ ID NO: 489428 - protein, 14 aa, Homo sapiens
  CDR3 for beta chain variable domain of TCR clone 244714 (TRBV20-1, TRBJ2-1)
CSAQIGGSANEQFF

SEQ ID NO: 489429 - protein, 23 aa, Homo sapiens
  CDR3 for alpha chain variable domain of TCR clone 244715 (TRAV26-1, TRAJ38)
CIADNAGNNHIQNPDPAVSQLTD

SEQ ID NO: 489430 - protein, 13 aa, Homo sapiens
  CDR3 for beta chain variable domain of TCR clone 244715 (TRBV20-1, TRBJ1-1)
CSARGGGNTEAFF

SEQ ID NO: 489431 - protein, 16 aa, Homo sapiens
  CDR3 for alpha chain variable domain of TCR clone 244716 (TRAV3, TRAJ37)
CAVRGKGSGNTGKLIF

SEQ ID NO: 489432 - protein, 12 aa, Homo sapiens
  CDR3 for beta chain variable domain of TCR clone 244716 (TRBV11-2, TRBJ2-2)
YASSLPTGELFF

SEQ ID NO: 489433 - protein, 11 aa, Homo sapiens
  CDR3 for alpha chain variable domain of TCR clone 244717 (TRAV12-2, TRAJ39)
CAVNNMLTFRG

SEQ ID NO: 489434 - protein, 16 aa, Homo sapiens
  CDR3 for beta chain variable domain of TCR clone 244717 (TRBV5-3, TRBJ2-2)
CARSFGTGTNTGELFF

SEQ ID NO: 489435 - protein, 22 aa, Homo sapiens
  CDR3 for alpha chain variable domain of TCR clone 244718 (TRAV3, TRAJ38)
CAVRDCLNAGNNHIQNPDPAVY

SEQ ID NO: 489436 - protein, 16 aa, Homo sapiens
  CDR3 for beta chain variable domain of TCR clone 244718 (TRBV27, TRBJ2-2)
CASSFRGLVRTGELFF

SEQ ID NO: 489437 - protein, 12 aa, Homo sapiens
  CDR3 for alpha chain variable domain of TCR clone 244719 (TRAV22, TRAJ29)
CAPPSGNTPLVF

SEQ ID NO: 489438 - protein, 15 aa, Homo sapiens
  CDR3 for beta chain variable domain of TCR clone 244719 (TRBV19, TRBJ2-1)
CASSSPGVPLDEQFF

SEQ ID NO: 489439 - protein, 14 aa, Homo sapiens
  CDR3 for alpha chain variable domain of TCR clone 244720 (TRAV13-1, TRAJ16)
CAAGQMARSCPLQG

SEQ ID NO: 489440 - protein, 13 aa, Homo sapiens
  CDR3 for beta chain variable domain of TCR clone 244720 (TRBV7-2, TRBJ2-4)
CASSREHANIQYF

SEQ ID NO: 489441 - protein, 15 aa, Homo sapiens
  CDR3 for alpha chain variable domain of TCR clone 244721 (TRAV3, TRAJ22)
CAVRDRGGSARQLTF

SEQ ID NO: 489442 - protein, 15 aa, Homo sapiens
  CDR3 for beta chain variable domain of TCR clone 244721 (TRBV6-1, TRBJ2-4)
CASSEAVWTINTQYF

SEQ ID NO: 489443 - protein, 15 aa, Homo sapiens
  CDR3 for alpha chain variable domain of TCR clone 244722 (TRAV26-1, TRAJ29)
CIVRVEGSGNSPLVF

SEQ ID NO: 489444 - protein, 14 aa, Homo sapiens
  CDR3 for beta chain variable domain of TCR clone 244722 (TRBV25-1, TRBJ1-1)
CASTHLGGNTEAFF

SEQ ID NO: 489445 - protein, 10 aa, Homo sapiens
  CDR3 for alpha chain variable domain of TCR clone 244723 (TRAV38-2/DV8, TRAJ40)
CASGTYKYIF

SEQ ID NO: 489446 - protein, 15 aa, Homo sapiens
  CDR3 for beta chain variable domain of TCR clone 244723 (TRBV7-2, TRBJ2-1)
CASTHGTGIYNEQFF

SEQ ID NO: 489447 - protein, 15 aa, Homo sapiens
  CDR3 for alpha chain variable domain of TCR clone 244724 (TRAV13-1, TRAJ18)
CAASGGGSTLGRLYF

SEQ ID NO: 489448 - protein, 13 aa, Homo sapiens
  CDR3 for beta chain variable domain of TCR clone 244724 (TRBV10-3, TRBJ2-7)
CASKLAVNHEQYF

SEQ ID NO: 489449 - protein, 13 aa, Homo sapiens
  CDR3 for alpha chain variable domain of TCR clone 244725 (TRAV3, TRAJ30)
CAVRERGDDKIIF

SEQ ID NO: 489450 - protein, 16 aa, Homo sapiens
  CDR3 for beta chain variable domain of TCR clone 244725 (TRBV7-3, TRBJ2-2)
CASSLKRGTLSGELFF

SEQ ID NO: 489451 - protein, 16 aa, Homo sapiens
  CDR3 for alpha chain variable domain of TCR clone 244726 (TRAV3, TRAJ34)
CAVRARGTPTSSSLGL

SEQ ID NO: 489452 - protein, 12 aa, Homo sapiens
  CDR3 for beta chain variable domain of TCR clone 244726 (TRBV7-8, TRBJ2-7)
CASSLGDREQYF

SEQ ID NO: 489453 - protein, 15 aa, Homo sapiens
  CDR3 for alpha chain variable domain of TCR clone 244727 (TRAV2, TRAJ15)
CAVEDRNQAGTDLIF

SEQ ID NO: 489454 - protein, 13 aa, Homo sapiens
  CDR3 for beta chain variable domain of TCR clone 244727 (TRBV10-2, TRBJ2-7)
CASSESGVYEQYF

SEQ ID NO: 489455 - protein, 13 aa, Homo sapiens
  CDR3 for alpha chain variable domain of TCR clone 244728 (TRAV8-3, TRAJ48)
CAVVPFGNEKFTF

SEQ ID NO: 489456 - protein, 14 aa, Homo sapiens
  CDR3 for beta chain variable domain of TCR clone 244728 (TRBV12-5, TRBJ2-5)
CASGSRTHQETQYF

SEQ ID NO: 489457 - protein, 12 aa, Homo sapiens
  CDR3 for alpha chain variable domain of TCR clone 244729 (TRAV30, TRAJ43)
CGTEERGNDMRF

SEQ ID NO: 489458 - protein, 13 aa, Homo sapiens
  CDR3 for beta chain variable domain of TCR clone 244729 (TRBV12-4, TRBJ1-2)
CASSSGSEDGYTF

SEQ ID NO: 489459 - protein, 13 aa, Homo sapiens
  CDR3 for alpha chain variable domain of TCR clone 244730 (TRAV3, TRAJ41)
FAVSSNSGYALNF

SEQ ID NO: 489460 - protein, 13 aa, Homo sapiens
  CDR3 for beta chain variable domain of TCR clone 244730 (TRBV20-1, TRBJ2-2)
CSALSGGAGELFF

SEQ ID NO: 489461 - protein, 12 aa, Homo sapiens
  CDR3 for alpha chain variable domain of TCR clone 244731 (TRAV17, TRAJ20)
CATEANDYKLSF

SEQ ID NO: 489462 - protein, 17 aa, Homo sapiens
  CDR3 for beta chain variable domain of TCR clone 244731 (TRBV5-1, TRBJ2-2)
CASSMAGLAGGTGELFF

SEQ ID NO: 489463 - protein, 15 aa, Homo sapiens
  CDR3 for alpha chain variable domain of TCR clone 244732 (TRAV8-4, TRAJ36)
CAVRKSWTGANNLFL

SEQ ID NO: 489464 - protein, 17 aa, Homo sapiens
  CDR3 for beta chain variable domain of TCR clone 244732 (TRBV7-9, TRBJ2-3)
CASSPTVAGDLTDTQYF

SEQ ID NO: 489465 - protein, 13 aa, Homo sapiens
  CDR3 for alpha chain variable domain of TCR clone 244733 (TRAV20, TRAJ20)
CAVQAGSGYKLSF

SEQ ID NO: 489466 - protein, 15 aa, Homo sapiens
  CDR3 for beta chain variable domain of TCR clone 244733 (TRBV7-2, TRBJ2-1)
CASSSGLAGGNEQFV

SEQ ID NO: 489467 - protein, 16 aa, Homo sapiens
  CDR3 for alpha chain variable domain of TCR clone 244734 (TRAV12-3, TRAJ53)
CAMSPGSGGSNYKLTF

SEQ ID NO: 489468 - protein, 19 aa, Homo sapiens
  CDR3 for beta chain variable domain of TCR clone 244734 (TRBV5-1, TRBJ2-3)
CASSLWTSGGITTPDTQYF

SEQ ID NO: 489469 - protein, 11 aa, Homo sapiens
  CDR3 for alpha chain variable domain of TCR clone 244735 (TRAV1-2, TRAJ20)
CAVANDYKLSF

SEQ ID NO: 489470 - protein, 18 aa, Homo sapiens
  CDR3 for beta chain variable domain of TCR clone 244735 (TRBV20-1, TRBJ2-6)
CSAETIPTHGSGANVLTF

SEQ ID NO: 489471 - protein, 10 aa, Homo sapiens
  CDR3 for alpha chain variable domain of TCR clone 244736 (TRAV23/DV6, TRAJ57)
CAASSTLSQC

SEQ ID NO: 489472 - protein, 12 aa, Homo sapiens
  CDR3 for beta chain variable domain of TCR clone 244736 (TRBV7-6, TRBJ2-7)
CASSLADSEQYF

SEQ ID NO: 489473 - protein, 12 aa, Homo sapiens
  CDR3 for alpha chain variable domain of TCR clone 244737 (TRAV1-1, TRAJ8)
CAGGTGFQKLVF

SEQ ID NO: 489474 - protein, 16 aa, Homo sapiens
  CDR3 for beta chain variable domain of TCR clone 244737 (TRBV27, TRBJ2-2)
CASSFRGLVRTGELFF

SEQ ID NO: 489475 - protein, 12 aa, Homo sapiens
  CDR3 for alpha chain variable domain of TCR clone 244738 (TRAV12-3, TRAJ17)
CAMTLTGNKLTF

SEQ ID NO: 489476 - protein, 14 aa, Homo sapiens
  CDR3 for beta chain variable domain of TCR clone 244738 (TRBV19, TRBJ2-1)
CASPTFVLSGEQFS

SEQ ID NO: 489477 - protein, 12 aa, Homo sapiens
  CDR3 for alpha chain variable domain of TCR clone 244739 (TRAV4, TRAJ26)
CLVGDYGQNFVF

SEQ ID NO: 489478 - protein, 13 aa, Homo sapiens
  CDR3 for beta chain variable domain of TCR clone 244739 (TRBV7-2, TRBJ1-2)
CASSSNQDRRAMA

SEQ ID NO: 489479 - protein, 15 aa, Homo sapiens
  CDR3 for alpha chain variable domain of TCR clone 244740 (TRAV26-1, TRAJ44)
CIVRANTGTASKLTF

SEQ ID NO: 489480 - protein, 13 aa, Homo sapiens
  CDR3 for beta chain variable domain of TCR clone 244740 (TRBV12-5, TRBJ2-3)
CASGERQSDTQYF

SEQ ID NO: 489481 - protein, 11 aa, Homo sapiens
  CDR3 for alpha chain variable domain of TCR clone 244741 (TRAV3, TRAJ21)
CAVGNFNKFYF

SEQ ID NO: 489482 - protein, 17 aa, Homo sapiens
  CDR3 for beta chain variable domain of TCR clone 244741 (TRBV3-1, TRBJ2-7)
CASSQDLTGLSSYEQYF

SEQ ID NO: 489483 - protein, 15 aa, Homo sapiens
  CDR3 for alpha chain variable domain of TCR clone 244742 (TRAV2, TRAJ22)
CAVPSRGGSARQLTF

SEQ ID NO: 489484 - protein, 11 aa, Homo sapiens
  CDR3 for beta chain variable domain of TCR clone 244742 (TRBV27, TRBJ2-3)
CASSSGDTQYL

SEQ ID NO: 489485 - protein, 13 aa, Homo sapiens
  CDR3 for alpha chain variable domain of TCR clone 244743 (TRAV13-1, TRAJ21)
CAASIHNFNKFYF

SEQ ID NO: 489486 - protein, 15 aa, Homo sapiens
  CDR3 for beta chain variable domain of TCR clone 244743 (TRBV4-1, TRBJ1-4)
CASSDTGGTNEKLFF

SEQ ID NO: 489487 - protein, 15 aa, Homo sapiens
  CDR3 for alpha chain variable domain of TCR clone 244744 (TRAV29/DV5, TRAJ29)
CAASERSSGSTPLVF

SEQ ID NO: 489488 - protein, 14 aa, Homo sapiens
  CDR3 for beta chain variable domain of TCR clone 244744 (TRBV6-1, TRBJ1-3)
CASVQGGGGNTIYF

SEQ ID NO: 489489 - protein, 14 aa, Homo sapiens
  CDR3 for alpha chain variable domain of TCR clone 244745 (TRAV8-4, TRAJ48)
CAVSETFGNAKLTF

SEQ ID NO: 489490 - protein, 14 aa, Homo sapiens
  CDR3 for beta chain variable domain of TCR clone 244745 (TRBV13, TRBJ2-7)
CASSLKGASYEQYF

SEQ ID NO: 489491 - protein, 14 aa, Homo sapiens
  CDR3 for alpha chain variable domain of TCR clone 244746 (TRAV12-3, TRAJ10)
SHLPLTGGGNKLTF

SEQ ID NO: 489492 - protein, 14 aa, Homo sapiens
  CDR3 for beta chain variable domain of TCR clone 244746 (TRBV7-9, TRBJ2-7)
CASSLGTDPNEQYF

SEQ ID NO: 489493 - protein, 14 aa, Homo sapiens
  CDR3 for alpha chain variable domain of TCR clone 244747 (TRAV2, TRAJ9)
CAVEDRSGGFKTIF

SEQ ID NO: 489494 - protein, 13 aa, Homo sapiens
  CDR3 for beta chain variable domain of TCR clone 244747 (TRBV12-4, TRBJ1-5)
CASSPDRARPQHF

SEQ ID NO: 489495 - protein, 15 aa, Homo sapiens
  CDR3 for alpha chain variable domain of TCR clone 244748 (TRAV14/DV4, TRAJ12)
CAMREERDSSYKLIF

SEQ ID NO: 489496 - protein, 19 aa, Homo sapiens
  CDR3 for beta chain variable domain of TCR clone 244748 (TRBV7-2, TRBJ2-3)
CASSFLSRNWGGGTDTQYF

SEQ ID NO: 489497 - protein, 13 aa, Homo sapiens
  CDR3 for alpha chain variable domain of TCR clone 244749 (TRAV30, TRAJ39)
CGTEKNAGNMLTF

SEQ ID NO: 489498 - protein, 13 aa, Homo sapiens
  CDR3 for beta chain variable domain of TCR clone 244749 (TRBV12-4, TRBJ2-7)
CASSLERVREQYF

SEQ ID NO: 489499 - protein, 14 aa, Homo sapiens
  CDR3 for alpha chain variable domain of TCR clone 244750 (TRAV16, TRAJ17)
CALSGRAAGNKLTF

SEQ ID NO: 489500 - protein, 15 aa, Homo sapiens
  CDR3 for beta chain variable domain of TCR clone 244750 (TRBV18, TRBJ2-7)
CASSPTFMDSYEQYF

SEQ ID NO: 489501 - protein, 16 aa, Homo sapiens
  CDR3 for alpha chain variable domain of TCR clone 244751 (TRAV23/DV6, TRAJ9)
RAASIGGNTGGFKTIF

SEQ ID NO: 489502 - protein, 15 aa, Homo sapiens
  CDR3 for beta chain variable domain of TCR clone 244751 (TRBV5-1, TRBJ2-1)
CASSPPRAPYNEQFF

SEQ ID NO: 489503 - protein, 16 aa, Homo sapiens
  CDR3 for alpha chain variable domain of TCR clone 244752 (TRAV3, TRAJ37)
CAVRGKGSRNTGKLIF

SEQ ID NO: 489504 - protein, 13 aa, Homo sapiens
  CDR3 for beta chain variable domain of TCR clone 244752 (TRBV14, TRBJ2-7)
CASSQDRRYEQYF

SEQ ID NO: 489505 - protein, 12 aa, Homo sapiens
  CDR3 for alpha chain variable domain of TCR clone 244753 (TRAV30, TRAJ43)
CGTEERVNDMRF

SEQ ID NO: 489506 - protein, 13 aa, Homo sapiens
  CDR3 for beta chain variable domain of TCR clone 244753 (TRBV27, TRBJ2-7)
CASSFSQGYEQYF

SEQ ID NO: 489507 - protein, 16 aa, Homo sapiens
  CDR3 for alpha chain variable domain of TCR clone 244754 (TRAV26-1, )
CIDIQNPDPAGYQLRD

SEQ ID NO: 489508 - protein, 19 aa, Homo sapiens
  CDR3 for beta chain variable domain of TCR clone 244754 (TRBV19, TRBJ2-5)
CASSIGQVTDLFLGETQYF

SEQ ID NO: 489509 - protein, 16 aa, Homo sapiens
  CDR3 for alpha chain variable domain of TCR clone 244755 (TRAV20, TRAJ38)
CAVQASNAGNNRKLIW

SEQ ID NO: 489510 - protein, 14 aa, Homo sapiens
  CDR3 for beta chain variable domain of TCR clone 244755 (TRBV7-2, TRBJ2-7)
CASRSQGAAYEQYF

SEQ ID NO: 489511 - protein, 14 aa, Homo sapiens
  CDR3 for alpha chain variable domain of TCR clone 244756 (TRAV13-1, TRAJ39)
CAASKNNAGNMITF

SEQ ID NO: 489512 - protein, 14 aa, Homo sapiens
  CDR3 for beta chain variable domain of TCR clone 244756 (TRBV20-1, TRBJ2-7)
CSAPELAGVGEQYF

SEQ ID NO: 489513 - protein, 16 aa, Homo sapiens
  CDR3 for alpha chain variable domain of TCR clone 244757 (TRAV10, TRAJ13)
CVVSARNTGGYQKVTF

SEQ ID NO: 489514 - protein, 19 aa, Homo sapiens
  CDR3 for beta chain variable domain of TCR clone 244757 (TRBV12-4, TRBJ2-1)
CASTLAFDPRDKEANEQFF

SEQ ID NO: 489515 - protein, 15 aa, Homo sapiens
  CDR3 for alpha chain variable domain of TCR clone 244758 (TRAV13-1, TRAJ32)
CAASNGWWCYKQAHL

SEQ ID NO: 489516 - protein, 15 aa, Homo sapiens
  CDR3 for beta chain variable domain of TCR clone 244758 (TRBV18, TRBJ2-1)
CASSPPSPSYNEQFF

SEQ ID NO: 489517 - protein, 14 aa, Homo sapiens
  CDR3 for alpha chain variable domain of TCR clone 244759 (TRAV13-2, TRAJ45)
CAEMPGGGADGLTF

SEQ ID NO: 489518 - protein, 11 aa, Homo sapiens
  CDR3 for beta chain variable domain of TCR clone 244759 (TRBV7-3, TRBJ2-5)
CASGLSETQYF

SEQ ID NO: 489519 - protein, 13 aa, Homo sapiens
  CDR3 for alpha chain variable domain of TCR clone 244760 (TRAV21, TRAJ27)
CAARPGNAGKSTF

SEQ ID NO: 489520 - protein, 15 aa, Homo sapiens
  CDR3 for beta chain variable domain of TCR clone 244760 (TRBV20-1, TRBJ2-7)
CSARDRVSEMDEQYF

SEQ ID NO: 489521 - protein, 13 aa, Homo sapiens
  CDR3 for alpha chain variable domain of TCR clone 244761 (TRAV23/DV6, TRAJ12)
CAPGGDSSYKLIF

SEQ ID NO: 489522 - protein, 16 aa, Homo sapiens
  CDR3 for beta chain variable domain of TCR clone 244761 (TRBV2, TRBJ1-4)
CASNLLQGATNEKLFF

SEQ ID NO: 489523 - protein, 11 aa, Homo sapiens
  CDR3 for alpha chain variable domain of TCR clone 244762 (TRAV1-1, TRAJ39)
CAVSVVGTMLT

SEQ ID NO: 489524 - protein, 15 aa, Homo sapiens
  CDR3 for beta chain variable domain of TCR clone 244762 (TRBV19, TRBJ1-6)
CASSTQGAVGSPLHF

SEQ ID NO: 489525 - protein, 16 aa, Homo sapiens
  CDR3 for alpha chain variable domain of TCR clone 244763 (TRAV14/DV4, TRAJ54)
CAMREGRIQGAQKLVF

SEQ ID NO: 489526 - protein, 17 aa, Homo sapiens
  CDR3 for beta chain variable domain of TCR clone 244763 (TRBV4-1, TRBJ1-4)
CASSQEGPRGVEEKLFF

SEQ ID NO: 489527 - protein, 12 aa, Homo sapiens
  CDR3 for alpha chain variable domain of TCR clone 244764 (TRAV13-1, TRAJ21)
CAAKEGFNKFYF

SEQ ID NO: 489528 - protein, 14 aa, Homo sapiens
  CDR3 for beta chain variable domain of TCR clone 244764 (TRBV5-1, TRBJ2-7)
CASSSGESLYEQYF

SEQ ID NO: 489529 - protein, 16 aa, Homo sapiens
  CDR3 for alpha chain variable domain of TCR clone 244765 (TRAV3, TRAJ10)
CAVRDMRAGGGNKLTF

SEQ ID NO: 489530 - protein, 12 aa, Homo sapiens
  CDR3 for beta chain variable domain of TCR clone 244765 (TRBV18, TRBJ2-1)
CASSSDEDEQFF

SEQ ID NO: 489531 - protein, 14 aa, Homo sapiens
  CDR3 for alpha chain variable domain of TCR clone 244766 (TRAV38-1, TRAJ45)
CAYYSGGGADGLTF

SEQ ID NO: 489532 - protein, 13 aa, Homo sapiens
  CDR3 for beta chain variable domain of TCR clone 244766 (TRBV20-1, TRBJ1-2)
CSARDRVYGGYTF

SEQ ID NO: 489533 - protein, 14 aa, Homo sapiens
  CDR3 for alpha chain variable domain of TCR clone 244767 (TRAV17, TRAJ33)
CATDARRSNYQLIW

SEQ ID NO: 489534 - protein, 14 aa, Homo sapiens
  CDR3 for beta chain variable domain of TCR clone 244767 (TRBV25-1, TRBJ1-4)
CASSGGGQPEKLIF

SEQ ID NO: 489535 - protein, 15 aa, Homo sapiens
  CDR3 for alpha chain variable domain of TCR clone 244768 (TRAV26-1, TRAJ29)
FIVRVEGSGNTPLVF

SEQ ID NO: 489536 - protein, 15 aa, Homo sapiens
  CDR3 for beta chain variable domain of TCR clone 244768 (TRBV7-9, TRBJ1-5)
CASSQGRQPNQPQHF

SEQ ID NO: 489537 - protein, 12 aa, Homo sapiens
  CDR3 for alpha chain variable domain of TCR clone 244769 (TRAV3, TRAJ31)
CAVRDGNARLMF

SEQ ID NO: 489538 - protein, 13 aa, Homo sapiens
  CDR3 for beta chain variable domain of TCR clone 244769 (TRBV7-7, TRBJ2-2)
CASSLTSAGELFF

SEQ ID NO: 489539 - protein, 18 aa, Homo sapiens
  CDR3 for alpha chain variable domain of TCR clone 244770 (TRAV26-1, TRAJ23)
CIVRVGLEVWNQGGKLSF

SEQ ID NO: 489540 - protein, 16 aa, Homo sapiens
  CDR3 for beta chain variable domain of TCR clone 244770 (TRBV12-4, TRBJ2-5)
CASSFCVRGRQETQYF

SEQ ID NO: 489541 - protein, 13 aa, Homo sapiens
  CDR3 for alpha chain variable domain of TCR clone 244771 (TRAV1-2, TRAJ9)
CAALNTGGFKTIF

SEQ ID NO: 489542 - protein, 20 aa, Homo sapiens
  CDR3 for beta chain variable domain of TCR clone 244771 (TRBV28, TRBJ2-1)
CASTPIGRAPGLAGGNEQFF

SEQ ID NO: 489543 - protein, 12 aa, Homo sapiens
  CDR3 for alpha chain variable domain of TCR clone 244772 (TRAV1-2, TRAJ20)
CAVRDRDYKLSF

SEQ ID NO: 489544 - protein, 12 aa, Homo sapiens
  CDR3 for beta chain variable domain of TCR clone 244772 (TRBV11-2, TRBJ2-5)
CASSLDTQTQYF

SEQ ID NO: 489545 - protein, 13 aa, Homo sapiens
  CDR3 for alpha chain variable domain of TCR clone 244773 (TRAV26-1, TRAJ29)
CIVRRSGNTPLVF

SEQ ID NO: 489546 - protein, 16 aa, Homo sapiens
  CDR3 for beta chain variable domain of TCR clone 244773 (TRBV11-2, TRBJ2-7)
YASSLAPTGVNYEQYF

SEQ ID NO: 489547 - protein, 13 aa, Homo sapiens
  CDR3 for alpha chain variable domain of TCR clone 244774 (TRAV12-2, TRAJ42)
CAVKRGSQGNPIF

SEQ ID NO: 489548 - protein, 16 aa, Homo sapiens
  CDR3 for beta chain variable domain of TCR clone 244774 (TRBV9, TRBJ2-2)
CASSATGKGNTGELFF

SEQ ID NO: 489549 - protein, 15 aa, Homo sapiens
  CDR3 for alpha chain variable domain of TCR clone 244775 (TRAV3, TRAJ22)
CAVRDRGGSARQLTF

SEQ ID NO: 489550 - protein, 15 aa, Homo sapiens
  CDR3 for beta chain variable domain of TCR clone 244775 (TRBV10-3, TRBJ2-3)
CAISLTSGGTDTRYF

SEQ ID NO: 489551 - protein, 17 aa, Homo sapiens
  CDR3 for alpha chain variable domain of TCR clone 244776 (TRAV35, TRAJ28)
CAGLQVYPGAGSYQLTF

SEQ ID NO: 489552 - protein, 15 aa, Homo sapiens
  CDR3 for beta chain variable domain of TCR clone 244776 (TRBV2, TRBJ1-2)
CASSEIGGANYGYTF

SEQ ID NO: 489553 - protein, 15 aa, Homo sapiens
  CDR3 for alpha chain variable domain of TCR clone 244777 (TRAV27, TRAJ38)
CAGRFNAGNNRALIW

SEQ ID NO: 489554 - protein, 13 aa, Homo sapiens
  CDR3 for beta chain variable domain of TCR clone 244777 (TRBV12-5, TRBJ2-3)
CASQNRGTDTQYF

SEQ ID NO: 489555 - protein, 18 aa, Homo sapiens
  CDR3 for alpha chain variable domain of TCR clone 244778 (TRAV12-2, )
CAVEDMQNPDPAVYQLRD

SEQ ID NO: 489556 - protein, 15 aa, Homo sapiens
  CDR3 for beta chain variable domain of TCR clone 244778 (TRBV11-1, TRBJ2-7)
CASSLNYGASYEQYF

SEQ ID NO: 489557 - protein, 14 aa, Homo sapiens
  CDR3 for alpha chain variable domain of TCR clone 244779 (TRAV12-1, TRAJ30)
CVVNIGGRDDKIIF

SEQ ID NO: 489558 - protein, 11 aa, Homo sapiens
  CDR3 for beta chain variable domain of TCR clone 244779 (TRBV18, TRBJ2-5)
CASSPRETQYF

SEQ ID NO: 489559 - protein, 18 aa, Homo sapiens
  CDR3 for alpha chain variable domain of TCR clone 244780 (TRAV26-2, TRAJ54)
CILRDVEVGIQGAQKLVF

SEQ ID NO: 489560 - protein, 13 aa, Homo sapiens
  CDR3 for beta chain variable domain of TCR clone 244780 (TRBV19, TRBJ2-5)
CASSIPYGETQYF

SEQ ID NO: 489561 - protein, 17 aa, Homo sapiens
  CDR3 for alpha chain variable domain of TCR clone 244781 (TRAV3, TRAJ6)
CAVRDGPRVGGSYIHTF

SEQ ID NO: 489562 - protein, 12 aa, Homo sapiens
  CDR3 for beta chain variable domain of TCR clone 244781 (TRBV11-2, TRBJ2-2)
CASSLGGGELFF

SEQ ID NO: 489563 - protein, 16 aa, Homo sapiens
  CDR3 for alpha chain variable domain of TCR clone 244782 (TRAV3, TRAJ28)
CAVLPRSGSGSYQLTF

SEQ ID NO: 489564 - protein, 13 aa, Homo sapiens
  CDR3 for beta chain variable domain of TCR clone 244782 (TRBV12-4, TRBJ2-5)
CASRLAVQETQYF

SEQ ID NO: 489565 - protein, 13 aa, Homo sapiens
  CDR3 for alpha chain variable domain of TCR clone 244783 (TRAV16, TRAJ48)
CSPLNFGNEKLTF

SEQ ID NO: 489566 - protein, 11 aa, Homo sapiens
  CDR3 for beta chain variable domain of TCR clone 244783 (TRBV7-9, TRBJ2-3)
CASSPTDTQYV

SEQ ID NO: 489567 - protein, 15 aa, Homo sapiens
  CDR3 for alpha chain variable domain of TCR clone 244784 (TRAV20, TRAJ53)
CAVQASGGSNFKLTF

SEQ ID NO: 489568 - protein, 15 aa, Homo sapiens
  CDR3 for beta chain variable domain of TCR clone 244784 (TRBV9, TRBJ2-1)
CASSLAGSSYNEQFF

SEQ ID NO: 489569 - protein, 11 aa, Homo sapiens
  CDR3 for alpha chain variable domain of TCR clone 244785 (TRAV21, TRAJ34)
CAHYNTDKLIF

SEQ ID NO: 489570 - protein, 15 aa, Homo sapiens
  CDR3 for beta chain variable domain of TCR clone 244785 (TRBV11-2, TRBJ2-2)
CASRGLAANTGELFF

SEQ ID NO: 489571 - protein, 15 aa, Homo sapiens
  CDR3 for alpha chain variable domain of TCR clone 244786 (TRAV34, TRAJ38)
CGADFTPGNNRKLIW

SEQ ID NO: 489572 - protein, 14 aa, Homo sapiens
  CDR3 for beta chain variable domain of TCR clone 244786 (TRBV11-2, TRBJ2-3)
CASSLGGGANTHYF

SEQ ID NO: 489573 - protein, 11 aa, Homo sapiens
  CDR3 for alpha chain variable domain of TCR clone 244787 (TRAV21, TRAJ41)
CAVRSVYALNF

SEQ ID NO: 489574 - protein, 13 aa, Homo sapiens
  CDR3 for beta chain variable domain of TCR clone 244787 (TRBV7-2, TRBJ2-5)
CASSQTSVETQYF

SEQ ID NO: 489575 - protein, 16 aa, Homo sapiens
  CDR3 for alpha chain variable domain of TCR clone 244788 (TRAV3, TRAJ27)
CAVRDPQGTNAGKATF

SEQ ID NO: 489576 - protein, 17 aa, Homo sapiens
  CDR3 for beta chain variable domain of TCR clone 244788 (TRBV4-1, TRBJ2-7)
CASSQGRGLQTSYEQYF

SEQ ID NO: 489577 - protein, 12 aa, Homo sapiens
  CDR3 for alpha chain variable domain of TCR clone 244789 (TRAV12-3, TRAJ17)
CAMTLTGSKLTF

SEQ ID NO: 489578 - protein, 19 aa, Homo sapiens
  CDR3 for beta chain variable domain of TCR clone 244789 (TRBV25-1, TRBJ2-2)
CAILVYRVDRGRKTGELFF

SEQ ID NO: 489579 - protein, 14 aa, Homo sapiens
  CDR3 for alpha chain variable domain of TCR clone 244790 (TRAV13-1, TRAJ12)
CSNYPMDTSYKLIF

SEQ ID NO: 489580 - protein, 11 aa, Homo sapiens
  CDR3 for beta chain variable domain of TCR clone 244790 (TRBV20-1, TRBJ2-1)
CSLSSGSEQFF

SEQ ID NO: 489581 - protein, 13 aa, Homo sapiens
  CDR3 for alpha chain variable domain of TCR clone 244791 (TRAV16, TRAJ9)
CALRATGGFKTIF

SEQ ID NO: 489582 - protein, 16 aa, Homo sapiens
  CDR3 for beta chain variable domain of TCR clone 244791 (TRBV5-1, TRBJ1-3)
GASSRSGEDSGNTIYF

SEQ ID NO: 489583 - protein, 14 aa, Homo sapiens
  CDR3 for alpha chain variable domain of TCR clone 244792 (TRAV1-2, TRAJ16)
CAVNQFSDGQKLLF

SEQ ID NO: 489584 - protein, 14 aa, Homo sapiens
  CDR3 for beta chain variable domain of TCR clone 244792 (TRBV19, TRBJ2-7)
CASSVDSESYEQYF

SEQ ID NO: 489585 - protein, 16 aa, Homo sapiens
  CDR3 for alpha chain variable domain of TCR clone 244793 (TRAV16, TRAJ57)
CAPYLITKGGSEKLVF

SEQ ID NO: 489586 - protein, 17 aa, Homo sapiens
  CDR3 for beta chain variable domain of TCR clone 244793 (TRBV24-1, TRBJ2-4)
CATSDAEARGVRNMQYF

SEQ ID NO: 489587 - protein, 15 aa, Homo sapiens
  CDR3 for alpha chain variable domain of TCR clone 244794 (TRAV8-4, TRAJ3)
CAVTGENLVQQCFQD

SEQ ID NO: 489588 - protein, 12 aa, Homo sapiens
  CDR3 for beta chain variable domain of TCR clone 244794 (TRBV27, TRBJ2-5)
CASSPTGETQYF

SEQ ID NO: 489589 - protein, 13 aa, Homo sapiens
  CDR3 for alpha chain variable domain of TCR clone 244795 (TRAV13-1, TRAJ47)
CAASIEYGNKLVF

SEQ ID NO: 489590 - protein, 15 aa, Homo sapiens
  CDR3 for beta chain variable domain of TCR clone 244795 (TRBV27, TRBJ2-1)
CASSNGGGSSNEQFF

SEQ ID NO: 489591 - protein, 13 aa, Homo sapiens
  CDR3 for alpha chain variable domain of TCR clone 244796 (TRAV35, TRAJ36)
CAGPRIGANNPFF

SEQ ID NO: 489592 - protein, 15 aa, Homo sapiens
  CDR3 for beta chain variable domain of TCR clone 244796 (TRBV28, TRBJ2-5)
CASRPPWSYQETQYF

SEQ ID NO: 489593 - protein, 14 aa, Homo sapiens
  CDR3 for alpha chain variable domain of TCR clone 244797 (TRAV12-2, TRAJ45)
CAVNIGGGADGLTF

SEQ ID NO: 489594 - protein, 16 aa, Homo sapiens
  CDR3 for beta chain variable domain of TCR clone 244797 (TRBV6-6, TRBJ2-3)
CASSYSHAGSTDTQYF

SEQ ID NO: 489595 - protein, 14 aa, Homo sapiens
  CDR3 for alpha chain variable domain of TCR clone 244798 (TRAV29/DV5, TRAJ45)
CAASFRGGGDGLTF

SEQ ID NO: 489596 - protein, 11 aa, Homo sapiens
  CDR3 for beta chain variable domain of TCR clone 244798 (TRBV11-2, TRBJ2-2)
CASSLPGGLFF

SEQ ID NO: 489597 - protein, 13 aa, Homo sapiens
  CDR3 for alpha chain variable domain of TCR clone 244799 (TRAV17, TRAJ26)
CATVDNYGKNFVF

SEQ ID NO: 489598 - protein, 14 aa, Homo sapiens
  CDR3 for beta chain variable domain of TCR clone 244799 (TRBV6-1, TRBJ1-3)
CASVQGGGGNTIYF

SEQ ID NO: 489599 - protein, 14 aa, Homo sapiens
  CDR3 for alpha chain variable domain of TCR clone 244800 (TRAV36/DV7, TRAJ40)
CAVETTSGTYKYSF

SEQ ID NO: 489600 - protein, 13 aa, Homo sapiens
  CDR3 for beta chain variable domain of TCR clone 244800 (TRBV10-3, TRBJ2-5)
CAMTSGAGETQYF

SEQ ID NO: 489601 - protein, 13 aa, Homo sapiens
  CDR3 for alpha chain variable domain of TCR clone 244801 (TRAV2, TRAJ12)
CAVGADSSYKLIF

SEQ ID NO: 489602 - protein, 14 aa, Homo sapiens
  CDR3 for beta chain variable domain of TCR clone 244801 (TRBV7-3, TRBJ2-1)
CASSLAGGTNEQFF

SEQ ID NO: 489603 - protein, 13 aa, Homo sapiens
  CDR3 for alpha chain variable domain of TCR clone 244802 (TRAV12-3, TRAJ13)
CAMTSGGYQKVTF

SEQ ID NO: 489604 - protein, 14 aa, Homo sapiens
  CDR3 for beta chain variable domain of TCR clone 244802 (TRBV25-1, TRBJ1-1)
CASTHLGGNTEAFF

SEQ ID NO: 489605 - protein, 16 aa, Homo sapiens
  CDR3 for alpha chain variable domain of TCR clone 244803 (TRAV30, TRAJ24)
CGTEIVDADSWGKVQF

SEQ ID NO: 489606 - protein, 14 aa, Homo sapiens
  CDR3 for beta chain variable domain of TCR clone 244803 (TRBV12-5, TRBJ2-5)
CASGPRTHQETQYF

SEQ ID NO: 489607 - protein, 14 aa, Homo sapiens
  CDR3 for alpha chain variable domain of TCR clone 244804 (TRAV23/DV6, TRAJ27)
CAASRDTNAGKSTF

SEQ ID NO: 489608 - protein, 13 aa, Homo sapiens
  CDR3 for beta chain variable domain of TCR clone 244804 (TRBV20-1, TRBJ1-5)
CSASGRDNQPQHF

SEQ ID NO: 489609 - protein, 14 aa, Homo sapiens
  CDR3 for alpha chain variable domain of TCR clone 244805 (TRAV3, TRAJ21)
CAVRDWDNFNKFYF

SEQ ID NO: 489610 - protein, 16 aa, Homo sapiens
  CDR3 for beta chain variable domain of TCR clone 244805 (TRBV4-3, TRBJ2-1)
CASSQDSGGPYNEQFF

SEQ ID NO: 489611 - protein, 14 aa, Homo sapiens
  CDR3 for alpha chain variable domain of TCR clone 244806 (TRAV35, TRAJ13)
CAGSPSGGYQKVTF

SEQ ID NO: 489612 - protein, 17 aa, Homo sapiens
  CDR3 for beta chain variable domain of TCR clone 244806 (TRBV7-6, TRBJ2-5)
CASSPGLTDPWGETQYF

SEQ ID NO: 489613 - protein, 15 aa, Homo sapiens
  CDR3 for alpha chain variable domain of TCR clone 244807 (TRAV25, TRAJ52)
CAGTSGGTSYGKLTF

SEQ ID NO: 489614 - protein, 16 aa, Homo sapiens
  CDR3 for beta chain variable domain of TCR clone 244807 (TRBV15, TRBJ1-2)
CATSRGPRTGGGGYIF

SEQ ID NO: 489615 - protein, 10 aa, Homo sapiens
  CDR3 for alpha chain variable domain of TCR clone 244808 (TRAV3, TRAJ30)
CAVREIEIIF

SEQ ID NO: 489616 - protein, 15 aa, Homo sapiens
  CDR3 for beta chain variable domain of TCR clone 244808 (TRBV27, TRBJ2-1)
CASSNGGGSSNEQFF

SEQ ID NO: 489617 - protein, 10 aa, Homo sapiens
  CDR3 for alpha chain variable domain of TCR clone 244809 (TRAV25, TRAJ20)
CAVNGYKLSF

SEQ ID NO: 489618 - protein, 13 aa, Homo sapiens
  CDR3 for beta chain variable domain of TCR clone 244809 (TRBV6-3, TRBJ2-7)
CASSFSGGYEQYF

SEQ ID NO: 489619 - protein, 10 aa, Homo sapiens
  CDR3 for alpha chain variable domain of TCR clone 244810 (TRAV2, TRAJ34)
CAVVNDKLIF

SEQ ID NO: 489620 - protein, 14 aa, Homo sapiens
  CDR3 for beta chain variable domain of TCR clone 244810 (TRBV20-1, TRBJ2-3)
CCARGGTSTDTQYF

SEQ ID NO: 489621 - protein, 13 aa, Homo sapiens
  CDR3 for alpha chain variable domain of TCR clone 244811 (TRAV36/DV7, TRAJ33)
CAVDMDSNYQLIW

SEQ ID NO: 489622 - protein, 16 aa, Homo sapiens
  CDR3 for beta chain variable domain of TCR clone 244811 (TRBV15, TRBJ2-3)
CATRLSGGSAPDTQYF

SEQ ID NO: 489623 - protein, 20 aa, Homo sapiens
  CDR3 for alpha chain variable domain of TCR clone 244812 (TRAV26-1, TRAJ42)
CCVLLHRQTYYGGSQGNLIF

SEQ ID NO: 489624 - protein, 16 aa, Homo sapiens
  CDR3 for beta chain variable domain of TCR clone 244812 (TRBV7-3, TRBJ2-2)
CTSSLKRGTLSGELFF

SEQ ID NO: 489625 - protein, 17 aa, Homo sapiens
  CDR3 for alpha chain variable domain of TCR clone 244813 (TRAV3, TRAJ42)
CAVRDRDYGGSLGNLIF

SEQ ID NO: 489626 - protein, 14 aa, Homo sapiens
  CDR3 for beta chain variable domain of TCR clone 244813 (TRBV25-1, TRBJ1-1)
CASTHLGGNTEAFF

SEQ ID NO: 489627 - protein, 14 aa, Homo sapiens
  CDR3 for alpha chain variable domain of TCR clone 244814 (TRAV8-4, TRAJ13)
CAVTLSGGYQKVTF

SEQ ID NO: 489628 - protein, 15 aa, Homo sapiens
  CDR3 for beta chain variable domain of TCR clone 244814 (TRBV4-3, TRBJ1-1)
CASSQELGRGTEAFF

SEQ ID NO: 489629 - protein, 11 aa, Homo sapiens
  CDR3 for alpha chain variable domain of TCR clone 244815 (TRAV35, TRAJ30)
CAGERDDKIIF

SEQ ID NO: 489630 - protein, 14 aa, Homo sapiens
  CDR3 for beta chain variable domain of TCR clone 244815 (TRBV15, TRBJ2-5)
CAPSGDRGQETQYF

SEQ ID NO: 489631 - protein, 15 aa, Homo sapiens
  CDR3 for alpha chain variable domain of TCR clone 244816 (TRAV17, TRAJ23)
CATPLGYNQGGKLIF

SEQ ID NO: 489632 - protein, 14 aa, Homo sapiens
  CDR3 for beta chain variable domain of TCR clone 244816 (TRBV19, TRBJ2-7)
CASTVQGRPYEQYF

SEQ ID NO: 489633 - protein, 11 aa, Homo sapiens
  CDR3 for alpha chain variable domain of TCR clone 244817 (TRAV12-2, TRAJ49)
CAVNTGNHFYF

SEQ ID NO: 489634 - protein, 12 aa, Homo sapiens
  CDR3 for beta chain variable domain of TCR clone 244817 (TRBV2, TRBJ2-3)
CASSGRFDTQYF

SEQ ID NO: 489635 - protein, 14 aa, Homo sapiens
  CDR3 for alpha chain variable domain of TCR clone 244818 (TRAV17, TRAJ16)
CATADFSDGQKLLF

SEQ ID NO: 489636 - protein, 15 aa, Homo sapiens
  CDR3 for beta chain variable domain of TCR clone 244818 (TRBV18, TRBJ2-1)
CDSSPPSASYNEQFF

SEQ ID NO: 489637 - protein, 13 aa, Homo sapiens
  CDR3 for alpha chain variable domain of TCR clone 244819 (TRAV20, TRAJ40)
CAVRTSGTYKYIF

SEQ ID NO: 489638 - protein, 17 aa, Homo sapiens
  CDR3 for beta chain variable domain of TCR clone 244819 (TRBV11-2, TRBJ2-1)
CASSLYPPGAEYNEQFF

SEQ ID NO: 489639 - protein, 10 aa, Homo sapiens
  CDR3 for alpha chain variable domain of TCR clone 244820 (TRAV23/DV6, TRAJ57)
CAASSTLSQG

SEQ ID NO: 489640 - protein, 17 aa, Homo sapiens
  CDR3 for beta chain variable domain of TCR clone 244820 (TRBV15, TRBJ1-4)
CATSRYGTGDPNEKLFF

SEQ ID NO: 489641 - protein, 16 aa, Homo sapiens
  CDR3 for alpha chain variable domain of TCR clone 244821 (TRAV20, TRAJ53)
CAVRRGSGGSNYKLTF

SEQ ID NO: 489642 - protein, 12 aa, Homo sapiens
  CDR3 for beta chain variable domain of TCR clone 244821 (TRBV29-1, TRBJ2-3)
CSVVLGADTQYV

SEQ ID NO: 489643 - protein, 16 aa, Homo sapiens
  CDR3 for alpha chain variable domain of TCR clone 244822 (TRAV4, TRAJ22)
CLVGDLYSGSARQLTF

SEQ ID NO: 489644 - protein, 16 aa, Homo sapiens
  CDR3 for beta chain variable domain of TCR clone 244822 (TRBV7-9, TRBJ2-1)
CASCDVAGGSYNEQFF

SEQ ID NO: 489645 - protein, 15 aa, Homo sapiens
  CDR3 for alpha chain variable domain of TCR clone 244823 (TRAV2, TRAJ13)
CTTPSYSGGYQKVTF

SEQ ID NO: 489646 - protein, 14 aa, Homo sapiens
  CDR3 for beta chain variable domain of TCR clone 244823 (TRBV11-2, TRBJ2-3)
CASSRLARTDTQYF

SEQ ID NO: 489647 - protein, 11 aa, Homo sapiens
  CDR3 for alpha chain variable domain of TCR clone 244824 (TRAV1-1, TRAJ23)
CAVRQGGKLIF

SEQ ID NO: 489648 - protein, 13 aa, Homo sapiens
  CDR3 for beta chain variable domain of TCR clone 244824 (TRBV7-3, TRBJ1-1)
CASSRDWGAEAFF

SEQ ID NO: 489649 - protein, 15 aa, Homo sapiens
  CDR3 for alpha chain variable domain of TCR clone 244825 (TRAV12-1, TRAJ6)
CVVNCPLRRKLHTYI

SEQ ID NO: 489650 - protein, 15 aa, Homo sapiens
  CDR3 for beta chain variable domain of TCR clone 244825 (TRBV2, TRBJ2-1)
CASSELAGSYNEQFF

SEQ ID NO: 489651 - protein, 14 aa, Homo sapiens
  CDR3 for alpha chain variable domain of TCR clone 244826 (TRAV1-2, TRAJ16)
CAVNRFSDCQKLLF

SEQ ID NO: 489652 - protein, 16 aa, Homo sapiens
  CDR3 for beta chain variable domain of TCR clone 244826 (TRBV20-1, TRBJ1-4)
CSAPGQGLLTNEKLFF

SEQ ID NO: 489653 - protein, 16 aa, Homo sapiens
  CDR3 for alpha chain variable domain of TCR clone 244827 (TRAV17, TRAJ22)
CATGPISSGSARQLTF

SEQ ID NO: 489654 - protein, 16 aa, Homo sapiens
  CDR3 for beta chain variable domain of TCR clone 244827 (TRBV5-1, TRBJ2-3)
CASSLGLAVYTDTQYF

SEQ ID NO: 489655 - protein, 13 aa, Homo sapiens
  CDR3 for alpha chain variable domain of TCR clone 244828 (TRAV3, TRAJ41)
CAVSSNSGYALNF

SEQ ID NO: 489656 - protein, 14 aa, Homo sapiens
  CDR3 for beta chain variable domain of TCR clone 244828 (TRBV7-2, TRBJ2-7)
CASSPKTSFYEQDF

SEQ ID NO: 489657 - protein, 17 aa, Homo sapiens
  CDR3 for alpha chain variable domain of TCR clone 244829 (TRAV3, TRAJ6)
CAVRYGPRAGGSCIPTL

SEQ ID NO: 489658 - protein, 14 aa, Homo sapiens
  CDR3 for beta chain variable domain of TCR clone 244829 (TRBV7-2, TRBJ2-7)
CASSPKTSFYEQYF

SEQ ID NO: 489659 - protein, 10 aa, Homo sapiens
  CDR3 for alpha chain variable domain of TCR clone 244830 (TRAV26-2, TRAJ49)
CILLGKQFYV

SEQ ID NO: 489660 - protein, 13 aa, Homo sapiens
  CDR3 for beta chain variable domain of TCR clone 244830 (TRBV20-1, TRBJ2-7)
CSADPGATYEQYF

SEQ ID NO: 489661 - protein, 15 aa, Homo sapiens
  CDR3 for alpha chain variable domain of TCR clone 244831 (TRAV12-2, TRAJ53)
CGVNGGGGSNYKLTF

SEQ ID NO: 489662 - protein, 14 aa, Homo sapiens
  CDR3 for beta chain variable domain of TCR clone 244831 (TRBV19, TRBJ2-2)
CASSTLHRSGELFF

SEQ ID NO: 489663 - protein, 15 aa, Homo sapiens
  CDR3 for alpha chain variable domain of TCR clone 244832 (TRAV8-2, TRAJ10)
CVVSHSTGGGNKLTF

SEQ ID NO: 489664 - protein, 13 aa, Homo sapiens
  CDR3 for beta chain variable domain of TCR clone 244832 (TRBV12-4, TRBJ1-2)
CASSSGPNYGYTF

SEQ ID NO: 489665 - protein, 15 aa, Homo sapiens
  CDR3 for alpha chain variable domain of TCR clone 244833 (TRAV12-2, TRAJ43)
CAFDMRFGAGTRLTV

SEQ ID NO: 489666 - protein, 14 aa, Homo sapiens
  CDR3 for beta chain variable domain of TCR clone 244833 (TRBV4-1, TRBJ2-5)
CASSRSGSGETQYF

SEQ ID NO: 489667 - protein, 12 aa, Homo sapiens
  CDR3 for alpha chain variable domain of TCR clone 244834 (TRAV1-2, TRAJ24)
CAVGGSWGKFQF

SEQ ID NO: 489668 - protein, 13 aa, Homo sapiens
  CDR3 for beta chain variable domain of TCR clone 244834 (TRBV7-9, TRBJ2-5)
CASLPSGRETQYF

SEQ ID NO: 489669 - protein, 16 aa, Homo sapiens
  CDR3 for alpha chain variable domain of TCR clone 244835 (TRAV1-2, TRAJ10)
CAVRGVLTGGGNKLTF

SEQ ID NO: 489670 - protein, 16 aa, Homo sapiens
  CDR3 for beta chain variable domain of TCR clone 244835 (TRBV13, TRBJ2-2)
CASSEVFGANTGELFF

SEQ ID NO: 489671 - protein, 16 aa, Homo sapiens
  CDR3 for alpha chain variable domain of TCR clone 244836 (TRAV12-3, TRAJ53)
CAMSPGSGGSNYKLTF

SEQ ID NO: 489672 - protein, 15 aa, Homo sapiens
  CDR3 for beta chain variable domain of TCR clone 244836 (TRBV18, TRBJ1-1)
CASSPSSWVNTEAFF

SEQ ID NO: 489673 - protein, 14 aa, Homo sapiens
  CDR3 for alpha chain variable domain of TCR clone 244837 (TRAV8-4, TRAJ37)
CAVSEPSNTVKLIF

SEQ ID NO: 489674 - protein, 14 aa, Homo sapiens
  CDR3 for beta chain variable domain of TCR clone 244837 (TRBV28, TRBJ2-1)
CAIHRTGARTEQFF

SEQ ID NO: 489675 - protein, 16 aa, Homo sapiens
  CDR3 for alpha chain variable domain of TCR clone 244838 (TRAV12-3, TRAJ53)
CAMSPGSGGSNYKLTF

SEQ ID NO: 489676 - protein, 15 aa, Homo sapiens
  CDR3 for beta chain variable domain of TCR clone 244838 (TRBV5-1, TRBJ2-2)
CASSLAAGGSGELFF

SEQ ID NO: 489677 - protein, 14 aa, Homo sapiens
  CDR3 for alpha chain variable domain of TCR clone 244839 (TRAV27, TRAJ13)
CRSSNSGCYQKVTF

SEQ ID NO: 489678 - protein, 14 aa, Homo sapiens
  CDR3 for beta chain variable domain of TCR clone 244839 (TRBV7-6, TRBJ2-1)
CASSLGGGADEQFF

SEQ ID NO: 489679 - protein, 13 aa, Homo sapiens
  CDR3 for alpha chain variable domain of TCR clone 244840 (TRAV3, TRAJ27)
CAVRPLGAGKSTF

SEQ ID NO: 489680 - protein, 13 aa, Homo sapiens
  CDR3 for beta chain variable domain of TCR clone 244840 (TRBV2, TRBJ1-1)
CASSVSGYTEAFF

SEQ ID NO: 489681 - protein, 13 aa, Homo sapiens
  CDR3 for alpha chain variable domain of TCR clone 244841 (TRAV26-1, TRAJ34)
CIVRGHNTDKLIF

SEQ ID NO: 489682 - protein, 15 aa, Homo sapiens
  CDR3 for beta chain variable domain of TCR clone 244841 (TRBV4-1, TRBJ2-7)
CASSQEWGPSYELYF

SEQ ID NO: 489683 - protein, 10 aa, Homo sapiens
  CDR3 for alpha chain variable domain of TCR clone 244842 (TRAV36/DV7, TRAJ48)
CAVGNEKLTF

SEQ ID NO: 489684 - protein, 12 aa, Homo sapiens
  CDR3 for beta chain variable domain of TCR clone 244842 (TRBV5-1, TRBJ2-7)
CASSLDSYEQYF

SEQ ID NO: 489685 - protein, 11 aa, Homo sapiens
  CDR3 for alpha chain variable domain of TCR clone 244843 (TRAV23/DV6, TRAJ58)
CAARLLRGETS

SEQ ID NO: 489686 - protein, 15 aa, Homo sapiens
  CDR3 for beta chain variable domain of TCR clone 244843 (TRBV9, TRBJ1-6)
CASSVAGTGDSPLLF

SEQ ID NO: 489687 - protein, 14 aa, Homo sapiens
  CDR3 for alpha chain variable domain of TCR clone 244844 (TRAV12-1, TRAJ17)
CVVNYKAAGNKLTF

SEQ ID NO: 489688 - protein, 14 aa, Homo sapiens
  CDR3 for beta chain variable domain of TCR clone 244844 (TRBV7-8, TRBJ2-3)
CASSLEAGTDTQCF

SEQ ID NO: 489689 - protein, 11 aa, Homo sapiens
  CDR3 for alpha chain variable domain of TCR clone 244845 (TRAV1-2, TRAJ20)
CAVANDYKLSF

SEQ ID NO: 489690 - protein, 15 aa, Homo sapiens
  CDR3 for beta chain variable domain of TCR clone 244845 (TRBV7-6, TRBJ2-5)
CASSSGLAGVETQYF

SEQ ID NO: 489691 - protein, 14 aa, Homo sapiens
  CDR3 for alpha chain variable domain of TCR clone 244846 (TRAV35, TRAJ38)
CAGSNAGNNRKLIL

SEQ ID NO: 489692 - protein, 19 aa, Homo sapiens
  CDR3 for beta chain variable domain of TCR clone 244846 (TRBV25-1, TRBJ2-2)
CAILVYRVDRGRKTGELFF

SEQ ID NO: 489693 - protein, 12 aa, Homo sapiens
  CDR3 for alpha chain variable domain of TCR clone 244847 (TRAV29/DV5, TRAJ43)
CAAPYNNNDMRF

SEQ ID NO: 489694 - protein, 14 aa, Homo sapiens
  CDR3 for beta chain variable domain of TCR clone 244847 (TRBV5-1, TRBJ2-2)
CASSLIEGAGELFV

SEQ ID NO: 489695 - protein, 12 aa, Homo sapiens
  CDR3 for alpha chain variable domain of TCR clone 244848 (TRAV26-1, TRAJ13)
CIVSRGYQKVIF

SEQ ID NO: 489696 - protein, 14 aa, Homo sapiens
  CDR3 for beta chain variable domain of TCR clone 244848 (TRBV7-2, TRBJ2-7)
CASSPKTSFYEQYF

SEQ ID NO: 489697 - protein, 13 aa, Homo sapiens
  CDR3 for alpha chain variable domain of TCR clone 244849 (TRAV12-2, TRAJ20)
CAVYPSNDYKLSF

SEQ ID NO: 489698 - protein, 14 aa, Homo sapiens
  CDR3 for beta chain variable domain of TCR clone 244849 (TRBV20-1, TRBJ1-1)
CSAQTRIGGTEAFF

SEQ ID NO: 489699 - protein, 15 aa, Homo sapiens
  CDR3 for alpha chain variable domain of TCR clone 244850 (TRAV8-3, TRAJ45)
CASSYSGGGADGRTF

SEQ ID NO: 489700 - protein, 11 aa, Homo sapiens
  CDR3 for beta chain variable domain of TCR clone 244850 (TRBV12-4, TRBJ2-3)
CASTATDTQYF

SEQ ID NO: 489701 - protein, 14 aa, Homo sapiens
  CDR3 for alpha chain variable domain of TCR clone 244851 (TRAV26-1, TRAJ38)
CIADNAGNNRKLIW

SEQ ID NO: 489702 - protein, 13 aa, Homo sapiens
  CDR3 for beta chain variable domain of TCR clone 244851 (TRBV7-3, TRBJ2-2)
CASSLNVLGELFF

SEQ ID NO: 489703 - protein, 13 aa, Homo sapiens
  CDR3 for alpha chain variable domain of TCR clone 244852 (TRAV36/DV7, TRAJ37)
CAVFSSNTGKLIF

SEQ ID NO: 489704 - protein, 16 aa, Homo sapiens
  CDR3 for beta chain variable domain of TCR clone 244852 (TRBV6-5, TRBJ2-7)
CASSTRTRGAPYEQYF

SEQ ID NO: 489705 - protein, 12 aa, Homo sapiens
  CDR3 for alpha chain variable domain of TCR clone 244853 (TRAV21, TRAJ12)
CAVMDSSYKLIF

SEQ ID NO: 489706 - protein, 16 aa, Homo sapiens
  CDR3 for beta chain variable domain of TCR clone 244853 (TRBV7-9, TRBJ2-5)
CASGLEIGTRKETQYF

SEQ ID NO: 489707 - protein, 13 aa, Homo sapiens
  CDR3 for alpha chain variable domain of TCR clone 244854 (TRAV3, TRAJ3)
CAVADSSASKVIF

SEQ ID NO: 489708 - protein, 16 aa, Homo sapiens
  CDR3 for beta chain variable domain of TCR clone 244854 (TRBV5-1, TRBJ2-3)
CASSWGLAVYTDTQYF

SEQ ID NO: 489709 - protein, 18 aa, Homo sapiens
  CDR3 for alpha chain variable domain of TCR clone 244855 (TRAV21, TRAJ52)
CAVRPSPACGTSYGELTF

SEQ ID NO: 489710 - protein, 17 aa, Homo sapiens
  CDR3 for beta chain variable domain of TCR clone 244855 (TRBV13, TRBJ2-3)
CASSLSRVAGGRNTQYF

SEQ ID NO: 489711 - protein, 13 aa, Homo sapiens
  CDR3 for alpha chain variable domain of TCR clone 244856 (TRAV8-3, TRAJ28)
CAVGAVGSYQLTF

SEQ ID NO: 489712 - protein, 13 aa, Homo sapiens
  CDR3 for beta chain variable domain of TCR clone 244856 (TRBV12-5, TRBJ2-3)
CASGDRQSDTQYF

SEQ ID NO: 489713 - protein, 14 aa, Homo sapiens
  CDR3 for alpha chain variable domain of TCR clone 244857 (TRAV9-2, TRAJ39)
CALYIYNAGNMLTF

SEQ ID NO: 489714 - protein, 16 aa, Homo sapiens
  CDR3 for beta chain variable domain of TCR clone 244857 (TRBV20-1, TRBJ1-2)
CSASMGQGVANYGYTF

SEQ ID NO: 489715 - protein, 14 aa, Homo sapiens
  CDR3 for alpha chain variable domain of TCR clone 244858 (TRAV4, TRAJ9)
FLVGPGTGGFKTIF

SEQ ID NO: 489716 - protein, 15 aa, Homo sapiens
  CDR3 for beta chain variable domain of TCR clone 244858 (TRBV7-2, TRBJ2-1)
CASSLASGRVNEQFF

SEQ ID NO: 489717 - protein, 14 aa, Homo sapiens
  CDR3 for alpha chain variable domain of TCR clone 244859 (TRAV3, TRAJ21)
CAVESQANFNKFYF

SEQ ID NO: 489718 - protein, 13 aa, Homo sapiens
  CDR3 for beta chain variable domain of TCR clone 244859 (TRBV7-2, TRBJ2-5)
CASSQTSVETQYF

SEQ ID NO: 489719 - protein, 14 aa, Homo sapiens
  CDR3 for alpha chain variable domain of TCR clone 244860 (TRAV39, TRAJ54)
CAVVLIQGAQKLGF

SEQ ID NO: 489720 - protein, 13 aa, Homo sapiens
  CDR3 for beta chain variable domain of TCR clone 244860 (TRBV29-1, TRBJ2-5)
CSVGGTSAETQYF

SEQ ID NO: 489721 - protein, 16 aa, Homo sapiens
  CDR3 for alpha chain variable domain of TCR clone 244861 (TRAV12-2, TRAJ52)
CRLANAGGTSYGKLTF

SEQ ID NO: 489722 - protein, 14 aa, Homo sapiens
  CDR3 for beta chain variable domain of TCR clone 244861 (TRBV7-6, TRBJ2-3)
CASSLGTITDTQYF

SEQ ID NO: 489723 - protein, 13 aa, Homo sapiens
  CDR3 for alpha chain variable domain of TCR clone 244862 (TRAV24, TRAJ15)
CALSNQAGTALIF

SEQ ID NO: 489724 - protein, 16 aa, Homo sapiens
  CDR3 for beta chain variable domain of TCR clone 244862 (TRBV28, TRBJ2-7)
CASSSGTSGRGYEQYF

SEQ ID NO: 489725 - protein, 14 aa, Homo sapiens
  CDR3 for alpha chain variable domain of TCR clone 244863 (TRAV12-1, TRAJ26)
CVVKGSNYGQNFVF

SEQ ID NO: 489726 - protein, 13 aa, Homo sapiens
  CDR3 for beta chain variable domain of TCR clone 244863 (TRBV2, TRBJ2-7)
CASSVGGSGEQYF

SEQ ID NO: 489727 - protein, 13 aa, Homo sapiens
  CDR3 for alpha chain variable domain of TCR clone 244864 (TRAV36/DV7, TRAJ32)
CAGYGGATNKLIF

SEQ ID NO: 489728 - protein, 12 aa, Homo sapiens
  CDR3 for beta chain variable domain of TCR clone 244864 (TRBV11-2, TRBJ2-2)
CASSLPTGELFF

SEQ ID NO: 489729 - protein, 15 aa, Homo sapiens
  CDR3 for alpha chain variable domain of TCR clone 244865 (TRAV8-3, TRAJ45)
CASSYSGGGADGLNF

SEQ ID NO: 489730 - protein, 15 aa, Homo sapiens
  CDR3 for beta chain variable domain of TCR clone 244865 (TRBV7-2, TRBJ2-2)
CASSSLTGGTGELFF

SEQ ID NO: 489731 - protein, 16 aa, Homo sapiens
  CDR3 for alpha chain variable domain of TCR clone 244866 (TRAV13-1, TRAJ48)
CAASIFGNFGNEKLTF

SEQ ID NO: 489732 - protein, 13 aa, Homo sapiens
  CDR3 for beta chain variable domain of TCR clone 244866 (TRBV7-3, TRBJ2-3)
CASSSWSTDTQYF

SEQ ID NO: 489733 - protein, 19 aa, Homo sapiens
  CDR3 for alpha chain variable domain of TCR clone 244867 (TRAV12-3, TRAJ24)
SLFIRDSQPRADSWGKFQF

SEQ ID NO: 489734 - protein, 17 aa, Homo sapiens
  CDR3 for beta chain variable domain of TCR clone 244867 (TRBV11-2, TRBJ2-1)
CASSLYPPGVEYNEQFF

SEQ ID NO: 489735 - protein, 15 aa, Homo sapiens
  CDR3 for alpha chain variable domain of TCR clone 244868 (TRAV3, TRAJ47)
CAVRDIGEYGNKLVF

SEQ ID NO: 489736 - protein, 14 aa, Homo sapiens
  CDR3 for beta chain variable domain of TCR clone 244868 (TRBV13, TRBJ2-5)
CASSLERVGEQQYF

SEQ ID NO: 489737 - protein, 15 aa, Homo sapiens
  CDR3 for alpha chain variable domain of TCR clone 244869 (TRAV3, TRAJ32)
CAVSSYGGATNKLIF

SEQ ID NO: 489738 - protein, 13 aa, Homo sapiens
  CDR3 for beta chain variable domain of TCR clone 244869 (TRBV20-1, TRBJ2-7)
CSARPSTNYEQFF

SEQ ID NO: 489739 - protein, 14 aa, Homo sapiens
  CDR3 for alpha chain variable domain of TCR clone 244870 (TRAV30, TRAJ26)
CGTEIVSYGQNFVF

SEQ ID NO: 489740 - protein, 13 aa, Homo sapiens
  CDR3 for beta chain variable domain of TCR clone 244870 (TRBV19, TRBJ1-3)
CAGRLSLGNTIYF

SEQ ID NO: 489741 - protein, 14 aa, Homo sapiens
  CDR3 for alpha chain variable domain of TCR clone 244871 (TRAV8-1, TRAJ4)
CAVPFSGGYNKLIF

SEQ ID NO: 489742 - protein, 11 aa, Homo sapiens
  CDR3 for beta chain variable domain of TCR clone 244871 (TRBV29-1, TRBJ2-5)
CSEDRTGTQYF

SEQ ID NO: 489743 - protein, 15 aa, Homo sapiens
  CDR3 for alpha chain variable domain of TCR clone 244872 (TRAV12-2, TRAJ53)
CAVNTGGGSNYTLTF

SEQ ID NO: 489744 - protein, 15 aa, Homo sapiens
  CDR3 for beta chain variable domain of TCR clone 244872 (TRBV5-1, TRBJ2-5)
CASSLGLGEIKTQYF

SEQ ID NO: 489745 - protein, 15 aa, Homo sapiens
  CDR3 for alpha chain variable domain of TCR clone 244873 (TRAV25, TRAJ52)
CAGRPGGTSYGKLTF

SEQ ID NO: 489746 - protein, 15 aa, Homo sapiens
  CDR3 for beta chain variable domain of TCR clone 244873 (TRBV7-3, TRBJ2-1)
CASSPTGGGEVEQFF

SEQ ID NO: 489747 - protein, 14 aa, Homo sapiens
  CDR3 for alpha chain variable domain of TCR clone 244874 (TRAV13-1, TRAJ4)
CAATLPSGYNKLIF

SEQ ID NO: 489748 - protein, 14 aa, Homo sapiens
  CDR3 for beta chain variable domain of TCR clone 244874 (TRBV7-2, TRBJ2-7)
CASSPKTSFYEQYF

SEQ ID NO: 489749 - protein, 14 aa, Homo sapiens
  CDR3 for alpha chain variable domain of TCR clone 244875 (TRAV8-1, TRAJ30)
CAVNGYQRDDKIIF

SEQ ID NO: 489750 - protein, 14 aa, Homo sapiens
  CDR3 for beta chain variable domain of TCR clone 244875 (TRBV19, TRBJ2-1)
CASPTFVLSGEQFF

SEQ ID NO: 489751 - protein, 11 aa, Homo sapiens
  CDR3 for alpha chain variable domain of TCR clone 244876 (TRAV21, TRAJ34)
CAVTNTDKLIS

SEQ ID NO: 489752 - protein, 13 aa, Homo sapiens
  CDR3 for beta chain variable domain of TCR clone 244876 (TRBV7-2, TRBJ1-1)
CASNLKGAKVAFF

SEQ ID NO: 489753 - protein, 13 aa, Homo sapiens
  CDR3 for alpha chain variable domain of TCR clone 244877 (TRAV3, TRAJ21)
WAVREPDFNKFYF

SEQ ID NO: 489754 - protein, 13 aa, Homo sapiens
  CDR3 for beta chain variable domain of TCR clone 244877 (TRBV9, TRBJ2-1)
CASSPSGGNEQFF

SEQ ID NO: 489755 - protein, 14 aa, Homo sapiens
  CDR3 for alpha chain variable domain of TCR clone 244878 (TRAV12-2, TRAJ24)
CAVTPADSWGKLQF

SEQ ID NO: 489756 - protein, 15 aa, Homo sapiens
  CDR3 for beta chain variable domain of TCR clone 244878 (TRBV15, TRBJ2-1)
CATSRPGQGLNEQFF

SEQ ID NO: 489757 - protein, 13 aa, Homo sapiens
  CDR3 for alpha chain variable domain of TCR clone 244879 (TRAV17, TRAJ26)
CATVDNYGQNFVF

SEQ ID NO: 489758 - protein, 14 aa, Homo sapiens
  CDR3 for beta chain variable domain of TCR clone 244879 (TRBV19, TRBJ2-5)
CASSMTGQQETQYF

SEQ ID NO: 489759 - protein, 14 aa, Homo sapiens
  CDR3 for alpha chain variable domain of TCR clone 244880 (TRAV38-1, TRAJ40)
CALRPTSGTYKYIF

SEQ ID NO: 489760 - protein, 13 aa, Homo sapiens
  CDR3 for beta chain variable domain of TCR clone 244880 (TRBV18, TRBJ1-1)
CASSPGPSGEAFF

SEQ ID NO: 489761 - protein, 15 aa, Homo sapiens
  CDR3 for alpha chain variable domain of TCR clone 244881 (TRAV3, TRAJ47)
GAVRDIGEYGNKRVF

SEQ ID NO: 489762 - protein, 14 aa, Homo sapiens
  CDR3 for beta chain variable domain of TCR clone 244881 (TRBV13, TRBJ2-5)
CASSLERVGETQYF

SEQ ID NO: 489763 - protein, 17 aa, Homo sapiens
  CDR3 for alpha chain variable domain of TCR clone 244882 (TRAV3, TRAJ42)
CAVRDRDYGGSHGNLIF

SEQ ID NO: 489764 - protein, 13 aa, Homo sapiens
  CDR3 for beta chain variable domain of TCR clone 244882 (TRBV7-6, TRBJ1-2)
CASSLVADYGYTF

SEQ ID NO: 489765 - protein, 14 aa, Homo sapiens
  CDR3 for alpha chain variable domain of TCR clone 244883 (TRAV29/DV5, TRAJ5)
CAASGDTGRRALTF

SEQ ID NO: 489766 - protein, 14 aa, Homo sapiens
  CDR3 for beta chain variable domain of TCR clone 244883 (TRBV20-1, TRBJ2-3)
CSARGGTSTDTQYF

SEQ ID NO: 489767 - protein, 13 aa, Homo sapiens
  CDR3 for alpha chain variable domain of TCR clone 244884 (TRAV26-1, TRAJ30)
CIVNMNRDYKIIF

SEQ ID NO: 489768 - protein, 16 aa, Homo sapiens
  CDR3 for beta chain variable domain of TCR clone 244884 (TRBV16, TRBJ2-7)
CASSRPAGESSYEQYF

SEQ ID NO: 489769 - protein, 14 aa, Homo sapiens
  CDR3 for alpha chain variable domain of TCR clone 244885 (TRAV12-2, TRAJ40)
CAVKIPSGTYKYIF

SEQ ID NO: 489770 - protein, 16 aa, Homo sapiens
  CDR3 for beta chain variable domain of TCR clone 244885 (TRBV29-1, TRBJ2-7)
CSAEVVGTSGSYEQYF

SEQ ID NO: 489771 - protein, 15 aa, Homo sapiens
  CDR3 for alpha chain variable domain of TCR clone 244886 (TRAV3, TRAJ5)
CAVRDLDPCRRALTF

SEQ ID NO: 489772 - protein, 13 aa, Homo sapiens
  CDR3 for beta chain variable domain of TCR clone 244886 (TRBV12-4, TRBJ2-7)
CASSPTETYEQYF

SEQ ID NO: 489773 - protein, 12 aa, Homo sapiens
  CDR3 for alpha chain variable domain of TCR clone 244887 (TRAV21, TRAJ13)
PGPSGGYQKVTF

SEQ ID NO: 489774 - protein, 14 aa, Homo sapiens
  CDR3 for beta chain variable domain of TCR clone 244887 (TRBV20-1, TRBJ2-7)
GSAKDRKGAYEQYF

SEQ ID NO: 489775 - protein, 14 aa, Homo sapiens
  CDR3 for alpha chain variable domain of TCR clone 244888 (TRAV20, TRAJ16)
CAVRFFSDGHKLLF

SEQ ID NO: 489776 - protein, 16 aa, Homo sapiens
  CDR3 for beta chain variable domain of TCR clone 244888 (TRBV5-1, TRBJ2-3)
CASSSIGAGSTDTQYF

SEQ ID NO: 489777 - protein, 14 aa, Homo sapiens
  CDR3 for alpha chain variable domain of TCR clone 244889 (TRAV3, TRAJ22)
CAERPGRYCKATDL

SEQ ID NO: 489778 - protein, 12 aa, Homo sapiens
  CDR3 for beta chain variable domain of TCR clone 244889 (TRBV5-1, TRBJ2-7)
CASSDSTYEQYF

SEQ ID NO: 489779 - protein, 15 aa, Homo sapiens
  CDR3 for alpha chain variable domain of TCR clone 244890 (TRAV12-2, TRAJ53)
CAVNGGGGSNYTLTF

SEQ ID NO: 489780 - protein, 15 aa, Homo sapiens
  CDR3 for beta chain variable domain of TCR clone 244890 (TRBV27, TRBJ2-3)
CASSLGLAATDTQYF

SEQ ID NO: 489781 - protein, 15 aa, Homo sapiens
  CDR3 for alpha chain variable domain of TCR clone 244891 (TRAV35, TRAJ28)
CWVPILWGRELQLTF

SEQ ID NO: 489782 - protein, 16 aa, Homo sapiens
  CDR3 for beta chain variable domain of TCR clone 244891 (TRBV5-1, TRBJ2-1)
CASSHGLAGPQNEQFF

SEQ ID NO: 489783 - protein, 13 aa, Homo sapiens
  CDR3 for alpha chain variable domain of TCR clone 244892 (TRAV12-2, TRAJ52)
CAVRGTSYGKLTF

SEQ ID NO: 489784 - protein, 17 aa, Homo sapiens
  CDR3 for beta chain variable domain of TCR clone 244892 (TRBV11-2, TRBJ2-1)
CASSLYPPGVEYNEQFS

SEQ ID NO: 489785 - protein, 13 aa, Homo sapiens
  CDR3 for alpha chain variable domain of TCR clone 244893 (TRAV38-1, TRAJ20)
CAFMRDNDYKLTF

SEQ ID NO: 489786 - protein, 12 aa, Homo sapiens
  CDR3 for beta chain variable domain of TCR clone 244893 (TRBV18, TRBJ2-5)
CASSPSKETQYF

SEQ ID NO: 489787 - protein, 15 aa, Homo sapiens
  CDR3 for alpha chain variable domain of TCR clone 244894 (TRAV26-1, TRAJ27)
CIVRVLTPMQANQPL

SEQ ID NO: 489788 - protein, 13 aa, Homo sapiens
  CDR3 for beta chain variable domain of TCR clone 244894 (TRBV20-1, TRBJ2-7)
SAATHTSGYEQYF

SEQ ID NO: 489789 - protein, 15 aa, Homo sapiens
  CDR3 for alpha chain variable domain of TCR clone 244895 (TRAV4, TRAJ12)
CLVGDLMDSSYKLIF

SEQ ID NO: 489790 - protein, 14 aa, Homo sapiens
  CDR3 for beta chain variable domain of TCR clone 244895 (TRBV7-2, TRBJ1-1)
CASSHRQGPTEAFF

SEQ ID NO: 489791 - protein, 22 aa, Homo sapiens
  CDR3 for alpha chain variable domain of TCR clone 244896 (TRAV1-2, TRAJ6)
CAVSLSGGSYIPTLEEEPAFLF

SEQ ID NO: 489792 - protein, 15 aa, Homo sapiens
  CDR3 for beta chain variable domain of TCR clone 244896 (TRBV28, TRBJ2-7)
CASSPGGRGFYEQYF

SEQ ID NO: 489793 - protein, 15 aa, Homo sapiens
  CDR3 for alpha chain variable domain of TCR clone 244897 (TRAV12-2, TRAJ43)
CAFDMRFGAGTRLTV

SEQ ID NO: 489794 - protein, 17 aa, Homo sapiens
  CDR3 for beta chain variable domain of TCR clone 244897 (TRBV20-1, TRBJ2-3)
CSASGLAGGPGTRYAVF

SEQ ID NO: 489795 - protein, 13 aa, Homo sapiens
  CDR3 for alpha chain variable domain of TCR clone 244898 (TRAV3, TRAJ36)
CAARDTGANNLFF

SEQ ID NO: 489796 - protein, 15 aa, Homo sapiens
  CDR3 for beta chain variable domain of TCR clone 244898 (TRBV24-1, TRBJ2-1)
CATSGSGGFYNEQFF

SEQ ID NO: 489797 - protein, 14 aa, Homo sapiens
  CDR3 for alpha chain variable domain of TCR clone 244899 (TRAV12-1, TRAJ17)
CVVNYKAAGNKLTF

SEQ ID NO: 489798 - protein, 13 aa, Homo sapiens
  CDR3 for beta chain variable domain of TCR clone 244899 (TRBV7-2, TRBJ2-2)
CASSLAVTGELFF

SEQ ID NO: 489799 - protein, 11 aa, Homo sapiens
  CDR3 for alpha chain variable domain of TCR clone 244900 (TRAV13-1, TRAJ40)
CAVSGTYKYIF

SEQ ID NO: 489800 - protein, 13 aa, Homo sapiens
  CDR3 for beta chain variable domain of TCR clone 244900 (TRBV7-3, TRBJ1-1)
CASSQDWGAEAFF

SEQ ID NO: 489801 - protein, 13 aa, Homo sapiens
  CDR3 for alpha chain variable domain of TCR clone 244901 (TRAV35, TRAJ49)
CAGRLNTGNQFYF

SEQ ID NO: 489802 - protein, 14 aa, Homo sapiens
  CDR3 for beta chain variable domain of TCR clone 244901 (TRBV11-2, TRBJ2-5)
CASRPLAGRETQYF

SEQ ID NO: 489803 - protein, 13 aa, Homo sapiens
  CDR3 for alpha chain variable domain of TCR clone 244902 (TRAV8-3, TRAJ6)
CAVGSGGSYIPTF

SEQ ID NO: 489804 - protein, 21 aa, Homo sapiens
  CDR3 for beta chain variable domain of TCR clone 244902 (TRBV11-2, TRBJ1-1)
LRTRPCISVPAAPNGVTEAFF

SEQ ID NO: 489805 - protein, 15 aa, Homo sapiens
  CDR3 for alpha chain variable domain of TCR clone 244903 (TRAV29/DV5, TRAJ57)
CAASLLRGGSEKLVC

SEQ ID NO: 489806 - protein, 15 aa, Homo sapiens
  CDR3 for beta chain variable domain of TCR clone 244903 (TRBV5-1, TRBJ1-3)
CASSLEGGSGNTIYF

SEQ ID NO: 489807 - protein, 14 aa, Homo sapiens
  CDR3 for alpha chain variable domain of TCR clone 244904 (TRAV12-3, TRAJ29)
CAMILLSGNTPLVF

SEQ ID NO: 489808 - protein, 16 aa, Homo sapiens
  CDR3 for beta chain variable domain of TCR clone 244904 (TRBV28, TRBJ2-7)
CASSSGTSVRGYEQYF

SEQ ID NO: 489809 - protein, 12 aa, Homo sapiens
  CDR3 for alpha chain variable domain of TCR clone 244905 (TRAV12-3, TRAJ17)
CALTLTGNKLTF

SEQ ID NO: 489810 - protein, 15 aa, Homo sapiens
  CDR3 for beta chain variable domain of TCR clone 244905 (TRBV12-4, TRBJ2-5)
CASSPPTGLQETQYF

SEQ ID NO: 489811 - protein, 14 aa, Homo sapiens
  CDR3 for alpha chain variable domain of TCR clone 244906 (TRAV13-1, TRAJ40)
CAASMTSGTYKYIF

SEQ ID NO: 489812 - protein, 13 aa, Homo sapiens
  CDR3 for beta chain variable domain of TCR clone 244906 (TRBV4-1, TRBJ2-5)
CDSSQEVQETQYF

SEQ ID NO: 489813 - protein, 12 aa, Homo sapiens
  CDR3 for alpha chain variable domain of TCR clone 244907 (TRAV29/DV5, TRAJ49)
CAATDTGNQFYF

SEQ ID NO: 489814 - protein, 19 aa, Homo sapiens
  CDR3 for beta chain variable domain of TCR clone 244907 (TRBV25-1, TRBJ2-2)
CAILVYRVDRGRKTGKLFF

SEQ ID NO: 489815 - protein, 14 aa, Homo sapiens
  CDR3 for alpha chain variable domain of TCR clone 244908 (TRAV8-3, TRAJ47)
CAVGAQGRGNKLVF

SEQ ID NO: 489816 - protein, 17 aa, Homo sapiens
  CDR3 for beta chain variable domain of TCR clone 244908 (TRBV7-9, TRBJ2-2)
CASSLGVAGMNTGELFF

SEQ ID NO: 489817 - protein, 15 aa, Homo sapiens
  CDR3 for alpha chain variable domain of TCR clone 244909 (TRAV21, TRAJ52)
CAVRGGGTSYGKLTV

SEQ ID NO: 489818 - protein, 15 aa, Homo sapiens
  CDR3 for beta chain variable domain of TCR clone 244909 (TRBV18, TRBJ1-5)
CASSPSDRSNQPQHF

SEQ ID NO: 489819 - protein, 16 aa, Homo sapiens
  CDR3 for alpha chain variable domain of TCR clone 244910 (TRAV13-1, TRAJ17)
CAASKGVKAAGNKLTF

SEQ ID NO: 489820 - protein, 12 aa, Homo sapiens
  CDR3 for beta chain variable domain of TCR clone 244910 (TRBV29-1, TRBJ2-3)
CSVTGGADTQYF

SEQ ID NO: 489821 - protein, 15 aa, Homo sapiens
  CDR3 for alpha chain variable domain of TCR clone 244911 (TRAV21, TRAJ53)
CATVNSGGSNYKLTF

SEQ ID NO: 489822 - protein, 13 aa, Homo sapiens
  CDR3 for beta chain variable domain of TCR clone 244911 (TRBV7-7, TRBJ1-1)
CASSLGANTEAFF

SEQ ID NO: 489823 - protein, 13 aa, Homo sapiens
  CDR3 for alpha chain variable domain of TCR clone 244912 (TRAV35, TRAJ42)
CAGCPGSQGNLIF

SEQ ID NO: 489824 - protein, 13 aa, Homo sapiens
  CDR3 for beta chain variable domain of TCR clone 244912 (TRBV29-1, TRBJ2-1)
CSVEGGRVNEQFF

SEQ ID NO: 489825 - protein, 10 aa, Homo sapiens
  CDR3 for alpha chain variable domain of TCR clone 244913 (TRAV1-2, TRAJ34)
CAVNTGKLIF

SEQ ID NO: 489826 - protein, 13 aa, Homo sapiens
  CDR3 for beta chain variable domain of TCR clone 244913 (TRBV10-1, TRBJ2-1)
CASSAGPDNEQFF

SEQ ID NO: 489827 - protein, 14 aa, Homo sapiens
  CDR3 for alpha chain variable domain of TCR clone 244914 (TRAV1-2, TRAJ16)
CAVRGFSDGQKLLF

SEQ ID NO: 489828 - protein, 12 aa, Homo sapiens
  CDR3 for beta chain variable domain of TCR clone 244914 (TRBV14, TRBJ2-7)
FASSRLKGEQYF

SEQ ID NO: 489829 - protein, 16 aa, Homo sapiens
  CDR3 for alpha chain variable domain of TCR clone 244915 (TRAV30, TRAJ24)
CGTEIVDADSLGKLQF

SEQ ID NO: 489830 - protein, 14 aa, Homo sapiens
  CDR3 for beta chain variable domain of TCR clone 244915 (TRBV12-5, TRBJ2-5)
CASGSRTHQETQYF

SEQ ID NO: 489831 - protein, 15 aa, Homo sapiens
  CDR3 for alpha chain variable domain of TCR clone 244916 (TRAV12-2, TRAJ53)
CAVNGGGGSNYKLTF

SEQ ID NO: 489832 - protein, 15 aa, Homo sapiens
  CDR3 for beta chain variable domain of TCR clone 244916 (TRBV5-8, TRBJ2-3)
CASSRGLASTDTQYF

SEQ ID NO: 489833 - protein, 13 aa, Homo sapiens
  CDR3 for alpha chain variable domain of TCR clone 244917 (TRAV27, TRAJ41)
CAGEGNSGYALNF

SEQ ID NO: 489834 - protein, 14 aa, Homo sapiens
  CDR3 for beta chain variable domain of TCR clone 244917 (TRBV11-2, TRBJ2-7)
CASSVGAGAYEQYF

SEQ ID NO: 489835 - protein, 13 aa, Homo sapiens
  CDR3 for alpha chain variable domain of TCR clone 244918 (TRAV2, TRAJ40)
CAVATSGTYKSIF

SEQ ID NO: 489836 - protein, 14 aa, Homo sapiens
  CDR3 for beta chain variable domain of TCR clone 244918 (TRBV12-4, TRBJ2-5)
CASSYSGYFETQYF

SEQ ID NO: 489837 - protein, 16 aa, Homo sapiens
  CDR3 for alpha chain variable domain of TCR clone 244919 (TRAV3, TRAJ37)
CAVRGKGSGNTGKLIF

SEQ ID NO: 489838 - protein, 13 aa, Homo sapiens
  CDR3 for beta chain variable domain of TCR clone 244919 (TRBV4-2, TRBJ1-1)
CASSQAGNTEAFY

SEQ ID NO: 489839 - protein, 16 aa, Homo sapiens
  CDR3 for alpha chain variable domain of TCR clone 244920 (TRAV12-3, TRAJ53)
CAMSPGSGGRNYKLTF

SEQ ID NO: 489840 - protein, 20 aa, Homo sapiens
  CDR3 for beta chain variable domain of TCR clone 244920 (TRBV7-8, TRBJ2-2)
CASSHLFPGPTIHITGELFF

SEQ ID NO: 489841 - protein, 14 aa, Homo sapiens
  CDR3 for alpha chain variable domain of TCR clone 244921 (TRAV13-2, TRAJ17)
CAENSKAAGNKLTF

SEQ ID NO: 489842 - protein, 16 aa, Homo sapiens
  CDR3 for beta chain variable domain of TCR clone 244921 (TRBV13, TRBJ2-2)
CASSPRTGEHTGELFF

SEQ ID NO: 489843 - protein, 12 aa, Homo sapiens
  CDR3 for alpha chain variable domain of TCR clone 244922 (TRAV13-1, TRAJ53)
AASGGSNYKLTF

SEQ ID NO: 489844 - protein, 14 aa, Homo sapiens
  CDR3 for beta chain variable domain of TCR clone 244922 (TRBV19, TRBJ2-7)
CASTVQGRPYEQYF

SEQ ID NO: 489845 - protein, 12 aa, Homo sapiens
  CDR3 for alpha chain variable domain of TCR clone 244923 (TRAV3, TRAJ31)
CAAQGANARLMF

SEQ ID NO: 489846 - protein, 15 aa, Homo sapiens
  CDR3 for beta chain variable domain of TCR clone 244923 (TRBV10-2, TRBJ1-4)
CASTPIDRGNEKLFF

SEQ ID NO: 489847 - protein, 11 aa, Homo sapiens
  CDR3 for alpha chain variable domain of TCR clone 244924 (TRAV2, TRAJ33)
CAVESNYQLIW

SEQ ID NO: 489848 - protein, 17 aa, Homo sapiens
  CDR3 for beta chain variable domain of TCR clone 244924 (TRBV11-2, TRBJ2-1)
CASSLYPPGVEYNEQFS

SEQ ID NO: 489849 - protein, 14 aa, Homo sapiens
  CDR3 for alpha chain variable domain of TCR clone 244925 (TRAV17, TRAJ56)
CATVPARANSKLTF

SEQ ID NO: 489850 - protein, 13 aa, Homo sapiens
  CDR3 for beta chain variable domain of TCR clone 244925 (TRBV12-4, TRBJ2-2)
CASSITGSGELFF

SEQ ID NO: 489851 - protein, 16 aa, Homo sapiens
  CDR3 for alpha chain variable domain of TCR clone 244926 (TRAV30, TRAJ24)
CGTEIVDADSWGKFQF

SEQ ID NO: 489852 - protein, 14 aa, Homo sapiens
  CDR3 for beta chain variable domain of TCR clone 244926 (TRBV18, TRBJ1-2)
RVAIFLCANYGYTF

SEQ ID NO: 489853 - protein, 11 aa, Homo sapiens
  CDR3 for alpha chain variable domain of TCR clone 244927 (TRAV21, TRAJ34)
CAHYNTDKLIF

SEQ ID NO: 489854 - protein, 16 aa, Homo sapiens
  CDR3 for beta chain variable domain of TCR clone 244927 (TRBV7-3, TRBJ2-1)
CASSLEGYRSYNEQFF

SEQ ID NO: 489855 - protein, 14 aa, Homo sapiens
  CDR3 for alpha chain variable domain of TCR clone 244928 (TRAV2, TRAJ9)
CAVEDRSGGVNTIF

SEQ ID NO: 489856 - protein, 18 aa, Homo sapiens
  CDR3 for beta chain variable domain of TCR clone 244928 (TRBV11-2, TRBJ2-3)
CASSLGGASRGAPNTQYF

SEQ ID NO: 489857 - protein, 15 aa, Homo sapiens
  CDR3 for alpha chain variable domain of TCR clone 244929 (TRAV12-3, TRAJ6)
CAMSASTGGSYIPTF

SEQ ID NO: 489858 - protein, 16 aa, Homo sapiens
  CDR3 for beta chain variable domain of TCR clone 244929 (TRBV20-1, TRBJ1-2)
CSASMGQGVANYGDAF

SEQ ID NO: 489859 - protein, 15 aa, Homo sapiens
  CDR3 for alpha chain variable domain of TCR clone 244930 (TRAV23/DV6, TRAJ57)
CAASSTLPQGGSEKL

SEQ ID NO: 489860 - protein, 13 aa, Homo sapiens
  CDR3 for beta chain variable domain of TCR clone 244930 (TRBV15, TRBJ1-6)
CATSGGLNSPLHF

SEQ ID NO: 489861 - protein, 12 aa, Homo sapiens
  CDR3 for alpha chain variable domain of TCR clone 244931 (TRAV12-2, TRAJ10)
WGVTGGGNKPTF

SEQ ID NO: 489862 - protein, 15 aa, Homo sapiens
  CDR3 for beta chain variable domain of TCR clone 244931 (TRBV10-2, TRBJ2-6)
CASSEQGTGANVLTF

SEQ ID NO: 489863 - protein, 15 aa, Homo sapiens
  CDR3 for alpha chain variable domain of TCR clone 244932 (TRAV21, TRAJ24)
CAARSSTDSWGKLQF

SEQ ID NO: 489864 - protein, 14 aa, Homo sapiens
  CDR3 for beta chain variable domain of TCR clone 244932 (TRBV19, TRBJ2-7)
CASSIFAGTYEQYF

SEQ ID NO: 489865 - protein, 16 aa, Homo sapiens
  CDR3 for alpha chain variable domain of TCR clone 244933 (TRAV1-2, TRAJ10)
CAVRGVLTGGGNKLTF

SEQ ID NO: 489866 - protein, 14 aa, Homo sapiens
  CDR3 for beta chain variable domain of TCR clone 244933 (TRBV19, TRBJ2-7)
CASSMGQGAIEQYF

SEQ ID NO: 489867 - protein, 12 aa, Homo sapiens
  CDR3 for alpha chain variable domain of TCR clone 244934 (TRAV17, TRAJ45)
CAQDGGADGLTF

SEQ ID NO: 489868 - protein, 14 aa, Homo sapiens
  CDR3 for beta chain variable domain of TCR clone 244934 (TRBV7-9, TRBJ2-3)
CASSLEDGTDTQYF

SEQ ID NO: 489869 - protein, 14 aa, Homo sapiens
  CDR3 for alpha chain variable domain of TCR clone 244935 (TRAV8-4, TRAJ9)
CAVRINTGGFKTIF

SEQ ID NO: 489870 - protein, 15 aa, Homo sapiens
  CDR3 for beta chain variable domain of TCR clone 244935 (TRBV10-2, TRBJ2-6)
CSSSEQGTGANVLTF

SEQ ID NO: 489871 - protein, 13 aa, Homo sapiens
  CDR3 for alpha chain variable domain of TCR clone 244936 (TRAV26-1, TRAJ34)
CIVRPWMTDKLIF

SEQ ID NO: 489872 - protein, 14 aa, Homo sapiens
  CDR3 for beta chain variable domain of TCR clone 244936 (TRBV7-2, TRBJ2-7)
CASRSQGAAYEQYF

SEQ ID NO: 489873 - protein, 13 aa, Homo sapiens
  CDR3 for alpha chain variable domain of TCR clone 244937 (TRAV21, TRAJ57)
CAVTQGGSEKLFF

SEQ ID NO: 489874 - protein, 16 aa, Homo sapiens
  CDR3 for beta chain variable domain of TCR clone 244937 (TRBV29-1, TRBJ2-7)
CSVEDAEDGTAYEQYF

SEQ ID NO: 489875 - protein, 11 aa, Homo sapiens
  CDR3 for alpha chain variable domain of TCR clone 244938 (TRAV12-1, TRAJ30)
CVVNGRDKIIF

SEQ ID NO: 489876 - protein, 12 aa, Homo sapiens
  CDR3 for beta chain variable domain of TCR clone 244938 (TRBV27, TRBJ2-2)
CASKLFTGELFL

SEQ ID NO: 489877 - protein, 14 aa, Homo sapiens
  CDR3 for alpha chain variable domain of TCR clone 244939 (TRAV2, TRAJ37)
CAVDFTSNTGKLIF

SEQ ID NO: 489878 - protein, 12 aa, Homo sapiens
  CDR3 for beta chain variable domain of TCR clone 244939 (TRBV6-1, TRBJ2-5)
CASSEGRETQYF

SEQ ID NO: 489879 - protein, 12 aa, Homo sapiens
  CDR3 for alpha chain variable domain of TCR clone 244940 (TRAV8-3, TRAJ26)
CAGDNYGQNFVF

SEQ ID NO: 489880 - protein, 17 aa, Homo sapiens
  CDR3 for beta chain variable domain of TCR clone 244940 (TRBV25-1, TRBJ2-1)
CASSAYGQGRGVYEQFF

SEQ ID NO: 489881 - protein, 14 aa, Homo sapiens
  CDR3 for alpha chain variable domain of TCR clone 244941 (TRAV1-2, TRAJ8)
CAVREDTGFQKLVF

SEQ ID NO: 489882 - protein, 12 aa, Homo sapiens
  CDR3 for beta chain variable domain of TCR clone 244941 (TRBV27, TRBJ2-2)
CASKLFAGELFF

SEQ ID NO: 489883 - protein, 14 aa, Homo sapiens
  CDR3 for alpha chain variable domain of TCR clone 244942 (TRAV35, TRAJ33)
CAGSSQDSNYQLIC

SEQ ID NO: 489884 - protein, 13 aa, Homo sapiens
  CDR3 for beta chain variable domain of TCR clone 244942 (TRBV23-1, TRBJ2-5)
PERVLLIQETQYF

SEQ ID NO: 489885 - protein, 14 aa, Homo sapiens
  CDR3 for alpha chain variable domain of TCR clone 244943 (TRAV8-6, TRAJ53)
CAALVLGSNYKLTS

SEQ ID NO: 489886 - protein, 15 aa, Homo sapiens
  CDR3 for beta chain variable domain of TCR clone 244943 (TRBV20-1, TRBJ2-3)
CSAEPLAGHGDTQYF

SEQ ID NO: 489887 - protein, 12 aa, Homo sapiens
  CDR3 for alpha chain variable domain of TCR clone 244944 (TRAV12-1, TRAJ34)
CVVAGATDKLIF

SEQ ID NO: 489888 - protein, 20 aa, Homo sapiens
  CDR3 for beta chain variable domain of TCR clone 244944 (TRBV11-2, TRBJ2-2)
LRTRPCISVPAASLPGSCFF

SEQ ID NO: 489889 - protein, 14 aa, Homo sapiens
  CDR3 for alpha chain variable domain of TCR clone 244945 (TRAV1-2, TRAJ8)
CAVREDTGFQKLVF

SEQ ID NO: 489890 - protein, 12 aa, Homo sapiens
  CDR3 for beta chain variable domain of TCR clone 244945 (TRBV24-1, TRBJ2-7)
CATSDPGYEQYF

SEQ ID NO: 489891 - protein, 14 aa, Homo sapiens
  CDR3 for alpha chain variable domain of TCR clone 244946 (TRAV1-2, TRAJ16)
CAVRSASDGQKLLF

SEQ ID NO: 489892 - protein, 17 aa, Homo sapiens
  CDR3 for beta chain variable domain of TCR clone 244946 (TRBV7-3, TRBJ2-3)
CASSIMKRIRGADTQYF

SEQ ID NO: 489893 - protein, 13 aa, Homo sapiens
  CDR3 for alpha chain variable domain of TCR clone 244947 (TRAV16, TRAJ54)
CALKVRGAQKVVF

SEQ ID NO: 489894 - protein, 13 aa, Homo sapiens
  CDR3 for beta chain variable domain of TCR clone 244947 (TRBV20-1, TRBJ1-1)
CSARGGGNTEAFF

SEQ ID NO: 489895 - protein, 16 aa, Homo sapiens
  CDR3 for alpha chain variable domain of TCR clone 244948 (TRAV30, TRAJ24)
CGTEIVDADSCGKFQF

SEQ ID NO: 489896 - protein, 16 aa, Homo sapiens
  CDR3 for beta chain variable domain of TCR clone 244948 (TRBV19, TRBJ2-3)
CASSPGAASRTDTQYF

SEQ ID NO: 489897 - protein, 14 aa, Homo sapiens
  CDR3 for alpha chain variable domain of TCR clone 244949 (TRAV1-2, TRAJ8)
CAVREDTGFQKLVF

SEQ ID NO: 489898 - protein, 16 aa, Homo sapiens
  CDR3 for beta chain variable domain of TCR clone 244949 (TRBV6-1, TRBJ1-2)
CASSGAWQGRSHGYTF

SEQ ID NO: 489899 - protein, 15 aa, Homo sapiens
  CDR3 for alpha chain variable domain of TCR clone 244950 (TRAV26-1, TRAJ44)
CIARVPFGTASKLTF

SEQ ID NO: 489900 - protein, 15 aa, Homo sapiens
  CDR3 for beta chain variable domain of TCR clone 244950 (TRBV20-1, TRBJ1-1)
CSASRGVTGNTEAVF

SEQ ID NO: 489901 - protein, 13 aa, Homo sapiens
  CDR3 for alpha chain variable domain of TCR clone 244951 (TRAV23/DV6, TRAJ27)
CAASNPMQANQPL

SEQ ID NO: 489902 - protein, 14 aa, Homo sapiens
  CDR3 for beta chain variable domain of TCR clone 244951 (TRBV25-1, TRBJ1-6)
CASSLSADISPLHF

SEQ ID NO: 489903 - protein, 14 aa, Homo sapiens
  CDR3 for alpha chain variable domain of TCR clone 244952 (TRAV8-3, TRAJ13)
CAVGARGGYQKVTF

SEQ ID NO: 489904 - protein, 16 aa, Homo sapiens
  CDR3 for beta chain variable domain of TCR clone 244952 (TRBV27, TRBJ2-7)
CASSLGSETGPYEQYF

SEQ ID NO: 489905 - protein, 17 aa, Homo sapiens
  CDR3 for alpha chain variable domain of TCR clone 244953 (TRAV22, TRAJ53)
CAVEFSNSGGSNYKLTF

SEQ ID NO: 489906 - protein, 14 aa, Homo sapiens
  CDR3 for beta chain variable domain of TCR clone 244953 (TRBV2, TRBJ1-2)
CASSEGGRNYGYTF

SEQ ID NO: 489907 - protein, 12 aa, Homo sapiens
  CDR3 for alpha chain variable domain of TCR clone 244954 (TRAV36/DV7, TRAJ54)
CAVVRGAQKLVF

SEQ ID NO: 489908 - protein, 19 aa, Homo sapiens
  CDR3 for beta chain variable domain of TCR clone 244954 (TRBV7-2, TRBJ2-3)
CASSSQGWPRLAGADTQYF

SEQ ID NO: 489909 - protein, 15 aa, Homo sapiens
  CDR3 for alpha chain variable domain of TCR clone 244955 (TRAV26-1, TRAJ56)
CIVRVYNGANSKLTF

SEQ ID NO: 489910 - protein, 15 aa, Homo sapiens
  CDR3 for beta chain variable domain of TCR clone 244955 (TRBV20-1, TRBJ2-7)
CSARDPTEVGHEQYF

SEQ ID NO: 489911 - protein, 11 aa, Homo sapiens
  CDR3 for alpha chain variable domain of TCR clone 244956 (TRAV27, TRAJ45)
CAGAPEEVLTD

SEQ ID NO: 489912 - protein, 17 aa, Homo sapiens
  CDR3 for beta chain variable domain of TCR clone 244956 (TRBV11-2, TRBJ2-1)
CASSLYPPGVEYNEQFF

SEQ ID NO: 489913 - protein, 11 aa, Homo sapiens
  CDR3 for alpha chain variable domain of TCR clone 244957 (TRAV23/DV6, TRAJ49)
CAARSGNQFYF

SEQ ID NO: 489914 - protein, 13 aa, Homo sapiens
  CDR3 for beta chain variable domain of TCR clone 244957 (TRBV19, TRBJ1-5)
CASSINFNQPQHF

SEQ ID NO: 489915 - protein, 14 aa, Homo sapiens
  CDR3 for alpha chain variable domain of TCR clone 244958 (TRAV8-4, TRAJ15)
CAVILNQAGTALIF

SEQ ID NO: 489916 - protein, 19 aa, Homo sapiens
  CDR3 for beta chain variable domain of TCR clone 244958 (TRBV25-1, TRBJ2-2)
CAILVYRVDRGRKTGELFF

SEQ ID NO: 489917 - protein, 14 aa, Homo sapiens
  CDR3 for alpha chain variable domain of TCR clone 244959 (TRAV1-2, TRAJ8)
CAVREDTGFQKLVF

SEQ ID NO: 489918 - protein, 15 aa, Homo sapiens
  CDR3 for beta chain variable domain of TCR clone 244959 (TRBV7-2, TRBJ2-3)
CASSLVVRGADTQYF

SEQ ID NO: 489919 - protein, 13 aa, Homo sapiens
  CDR3 for alpha chain variable domain of TCR clone 244960 (TRAV26-1, TRAJ34)
CIVRPWITDKLVF

SEQ ID NO: 489920 - protein, 14 aa, Homo sapiens
  CDR3 for beta chain variable domain of TCR clone 244960 (TRBV7-2, TRBJ2-7)
CASRSQGAAYEQYF

SEQ ID NO: 489921 - protein, 14 aa, Homo sapiens
  CDR3 for alpha chain variable domain of TCR clone 244961 (TRAV1-2, TRAJ8)
CAVREDTGFQKLVF

SEQ ID NO: 489922 - protein, 16 aa, Homo sapiens
  CDR3 for beta chain variable domain of TCR clone 244961 (TRBV7-9, TRBJ2-1)
CASSDVAGRSYNEQFF

SEQ ID NO: 489923 - protein, 12 aa, Homo sapiens
  CDR3 for alpha chain variable domain of TCR clone 244962 (TRAV21, TRAJ20)
CAVRGNDYKLSF

SEQ ID NO: 489924 - protein, 14 aa, Homo sapiens
  CDR3 for beta chain variable domain of TCR clone 244962 (TRBV7-8, TRBJ2-7)
CASSQPQGADEQYF

SEQ ID NO: 489925 - protein, 15 aa, Homo sapiens
  CDR3 for alpha chain variable domain of TCR clone 244963 (TRAV26-1, TRAJ17)
CIVRVVKAAGNKLTF

SEQ ID NO: 489926 - protein, 13 aa, Homo sapiens
  CDR3 for beta chain variable domain of TCR clone 244963 (TRBV7-9, TRBJ1-4)
CASSLPGIEKLFF

SEQ ID NO: 489927 - protein, 13 aa, Homo sapiens
  CDR3 for alpha chain variable domain of TCR clone 244964 (TRAV12-2, TRAJ52)
CNAGGTSYGKLTF

SEQ ID NO: 489928 - protein, 13 aa, Homo sapiens
  CDR3 for beta chain variable domain of TCR clone 244964 (TRBV12-5, TRBJ2-3)
CASGDRQSDTQYF

SEQ ID NO: 489929 - protein, 17 aa, Homo sapiens
  CDR3 for alpha chain variable domain of TCR clone 244965 (TRAV3, TRAJ42)
CAVRDRDYGGSQGNLIF

SEQ ID NO: 489930 - protein, 15 aa, Homo sapiens
  CDR3 for beta chain variable domain of TCR clone 244965 (TRBV2, TRBJ2-7)
CASSEVLARSYEQYF

SEQ ID NO: 489931 - protein, 14 aa, Homo sapiens
  CDR3 for alpha chain variable domain of TCR clone 244966 (TRAV12-3, TRAJ10)
SHLPLTVGGNKLTF

SEQ ID NO: 489932 - protein, 13 aa, Homo sapiens
  CDR3 for beta chain variable domain of TCR clone 244966 (TRBV2, TRBJ1-6)
CADSGSYNSPLHF

SEQ ID NO: 489933 - protein, 16 aa, Homo sapiens
  CDR3 for alpha chain variable domain of TCR clone 244967 (TRAV27, TRAJ53)
CAAPEGSGGSNYKLQF

SEQ ID NO: 489934 - protein, 15 aa, Homo sapiens
  CDR3 for beta chain variable domain of TCR clone 244967 (TRBV20-1, TRBJ1-1)
CSASRGVTGNTEAFF

SEQ ID NO: 489935 - protein, 14 aa, Homo sapiens
  CDR3 for alpha chain variable domain of TCR clone 244968 (TRAV3, TRAJ34)
CAVRDINNTDKLIF

SEQ ID NO: 489936 - protein, 14 aa, Homo sapiens
  CDR3 for beta chain variable domain of TCR clone 244968 (TRBV7-2, TRBJ2-2)
CASSLGQNTGEVFF

SEQ ID NO: 489937 - protein, 18 aa, Homo sapiens
  CDR3 for alpha chain variable domain of TCR clone 244969 (TRAV29/DV5, TRAJ52)
CAAGFRGAGGTSYGKLTF

SEQ ID NO: 489938 - protein, 12 aa, Homo sapiens
  CDR3 for beta chain variable domain of TCR clone 244969 (TRBV19, TRBJ1-5)
CASSIGVGPQHF

SEQ ID NO: 489939 - protein, 13 aa, Homo sapiens
  CDR3 for alpha chain variable domain of TCR clone 244970 (TRAV8-3, TRAJ20)
CAVGRPNDYKRIF

SEQ ID NO: 489940 - protein, 14 aa, Homo sapiens
  CDR3 for beta chain variable domain of TCR clone 244970 (TRBV12-5, TRBJ2-5)
CASGSRTHQETQYF

SEQ ID NO: 489941 - protein, 14 aa, Homo sapiens
  CDR3 for alpha chain variable domain of TCR clone 244971 (TRAV9-2, TRAJ39)
CALYSYNEGNMHTF

SEQ ID NO: 489942 - protein, 17 aa, Homo sapiens
  CDR3 for beta chain variable domain of TCR clone 244971 (TRBV20-1, TRBJ2-2)
CSASGSGQGGLTGELFF

SEQ ID NO: 489943 - protein, 13 aa, Homo sapiens
  CDR3 for alpha chain variable domain of TCR clone 244972 (TRAV13-1, TRAJ5)
CAAEHTGRRALNF

SEQ ID NO: 489944 - protein, 13 aa, Homo sapiens
  CDR3 for beta chain variable domain of TCR clone 244972 (TRBV13, TRBJ2-1)
CASILGGRGEQFF

SEQ ID NO: 489945 - protein, 15 aa, Homo sapiens
  CDR3 for alpha chain variable domain of TCR clone 244973 (TRAV4, TRAJ31)
CCVLLPRGPDARLVF

SEQ ID NO: 489946 - protein, 15 aa, Homo sapiens
  CDR3 for beta chain variable domain of TCR clone 244973 (TRBV7-8, TRBJ1-2)
CASSLVRDGGLGYTF

SEQ ID NO: 489947 - protein, 10 aa, Homo sapiens
  CDR3 for alpha chain variable domain of TCR clone 244974 (TRAV8-4, TRAJ43)
GAMKNNDMRF

SEQ ID NO: 489948 - protein, 16 aa, Homo sapiens
  CDR3 for beta chain variable domain of TCR clone 244974 (TRBV5-7, TRBJ2-7)
CASSSPGWRTPYEQYF

SEQ ID NO: 489949 - protein, 13 aa, Homo sapiens
  CDR3 for alpha chain variable domain of TCR clone 244975 (TRAV30, TRAJ20)
CGTEDRSDYKLSF

SEQ ID NO: 489950 - protein, 14 aa, Homo sapiens
  CDR3 for beta chain variable domain of TCR clone 244975 (TRBV7-6, TRBJ2-3)
CASSLGTVTDTQYF

SEQ ID NO: 489951 - protein, 17 aa, Homo sapiens
  CDR3 for alpha chain variable domain of TCR clone 244976 (TRAV38-1, TRAJ45)
CAFMRSHSGGGADGRTF

SEQ ID NO: 489952 - protein, 15 aa, Homo sapiens
  CDR3 for beta chain variable domain of TCR clone 244976 (TRBV7-2, TRBJ2-3)
CASSLVVRGPDTQYF

SEQ ID NO: 489953 - protein, 16 aa, Homo sapiens
  CDR3 for alpha chain variable domain of TCR clone 244977 (TRAV23/DV6, TRAJ9)
CAASIGGNTGGFKTIF

SEQ ID NO: 489954 - protein, 14 aa, Homo sapiens
  CDR3 for beta chain variable domain of TCR clone 244977 (TRBV4-1, TRBJ2-2)
CASSQAVTTGELFF

SEQ ID NO: 489955 - protein, 15 aa, Homo sapiens
  CDR3 for alpha chain variable domain of TCR clone 244978 (TRAV16, TRAJ42)
CALRRGGGSQGNLIF

SEQ ID NO: 489956 - protein, 14 aa, Homo sapiens
  CDR3 for beta chain variable domain of TCR clone 244978 (TRBV7-9, TRBJ1-6)
CASSVMTDYSPLHF

SEQ ID NO: 489957 - protein, 13 aa, Homo sapiens
  CDR3 for alpha chain variable domain of TCR clone 244979 (TRAV27, TRAJ42)
CAGARGSQGDLIF

SEQ ID NO: 489958 - protein, 14 aa, Homo sapiens
  CDR3 for beta chain variable domain of TCR clone 244979 (TRBV20-1, TRBJ1-1)
CSAQTRIGGTEAFF

SEQ ID NO: 489959 - protein, 14 aa, Homo sapiens
  CDR3 for alpha chain variable domain of TCR clone 244980 (TRAV21, TRAJ35)
RAVMPIGFGNVLHC

SEQ ID NO: 489960 - protein, 12 aa, Homo sapiens
  CDR3 for beta chain variable domain of TCR clone 244980 (TRBV7-9, TRBJ2-7)
CASSIEREEQYF

SEQ ID NO: 489961 - protein, 16 aa, Homo sapiens
  CDR3 for alpha chain variable domain of TCR clone 244981 (TRAV4, TRAJ22)
CLVGDLYSGSARQLTC

SEQ ID NO: 489962 - protein, 16 aa, Homo sapiens
  CDR3 for beta chain variable domain of TCR clone 244981 (TRBV7-9, TRBJ2-1)
CASSDVAGGSYNEQFF

SEQ ID NO: 489963 - protein, 14 aa, Homo sapiens
  CDR3 for alpha chain variable domain of TCR clone 244982 (TRAV1-2, TRAJ16)
CAVNRISDGQKLLF

SEQ ID NO: 489964 - protein, 16 aa, Homo sapiens
  CDR3 for beta chain variable domain of TCR clone 244982 (TRBV19, TRBJ2-1)
CASSEILAGDGNEQFF

SEQ ID NO: 489965 - protein, 10 aa, Homo sapiens
  CDR3 for alpha chain variable domain of TCR clone 244983 (TRAV12-3, TRAJ49)
CAMNDDQFYF

SEQ ID NO: 489966 - protein, 16 aa, Homo sapiens
  CDR3 for beta chain variable domain of TCR clone 244983 (TRBV4-3, TRBJ2-1)
CASSPALDSGVNEQFF

SEQ ID NO: 489967 - protein, 15 aa, Homo sapiens
  CDR3 for alpha chain variable domain of TCR clone 244984 (TRAV21, TRAJ53)
CATLNSGGSNYKLTF

SEQ ID NO: 489968 - protein, 15 aa, Homo sapiens
  CDR3 for beta chain variable domain of TCR clone 244984 (TRBV18, TRBJ2-1)
CASSPPSASYNEQSF

SEQ ID NO: 489969 - protein, 15 aa, Homo sapiens
  CDR3 for alpha chain variable domain of TCR clone 244985 (TRAV8-4, TRAJ37)
CAVTYGSSNTGKLIF

SEQ ID NO: 489970 - protein, 16 aa, Homo sapiens
  CDR3 for beta chain variable domain of TCR clone 244985 (TRBV20-1, TRBJ2-1)
CSARDLKQGMNNEQFF

SEQ ID NO: 489971 - protein, 15 aa, Homo sapiens
  CDR3 for alpha chain variable domain of TCR clone 244986 (TRAV3, TRAJ42)
CAVRGGTGSQGNLIF

SEQ ID NO: 489972 - protein, 14 aa, Homo sapiens
  CDR3 for beta chain variable domain of TCR clone 244986 (TRBV19, TRBJ1-2)
CASSALFARDVYTF

SEQ ID NO: 489973 - protein, 11 aa, Homo sapiens
  CDR3 for alpha chain variable domain of TCR clone 244987 (TRAV13-1, TRAJ6)
CATLVSYIPTF

SEQ ID NO: 489974 - protein, 13 aa, Homo sapiens
  CDR3 for beta chain variable domain of TCR clone 244987 (TRBV6-6, TRBJ2-1)
CASSLHQGDEQFF

SEQ ID NO: 489975 - protein, 14 aa, Homo sapiens
  CDR3 for alpha chain variable domain of TCR clone 244988 (TRAV12-2, TRAJ17)
CAVLFKAAGNKLTF

SEQ ID NO: 489976 - protein, 12 aa, Homo sapiens
  CDR3 for beta chain variable domain of TCR clone 244988 (TRBV11-2, TRBJ2-2)
CACSLGGGELFF

SEQ ID NO: 489977 - protein, 12 aa, Homo sapiens
  CDR3 for alpha chain variable domain of TCR clone 244989 (TRAV5, TRAJ27)
CAEITNAGTSTF

SEQ ID NO: 489978 - protein, 14 aa, Homo sapiens
  CDR3 for beta chain variable domain of TCR clone 244989 (TRBV12-5, TRBJ2-5)
CASGSRTHQETQYF

SEQ ID NO: 489979 - protein, 15 aa, Homo sapiens
  CDR3 for alpha chain variable domain of TCR clone 244990 (TRAV2, TRAJ15)
CAVEDRNQAGTALIF

SEQ ID NO: 489980 - protein, 13 aa, Homo sapiens
  CDR3 for beta chain variable domain of TCR clone 244990 (TRBV10-2, TRBJ2-1)
CTSGASGDAKQFF

SEQ ID NO: 489981 - protein, 14 aa, Homo sapiens
  CDR3 for alpha chain variable domain of TCR clone 244991 (TRAV13-1, TRAJ3)
FAASKSSSASMIIF

SEQ ID NO: 489982 - protein, 16 aa, Homo sapiens
  CDR3 for beta chain variable domain of TCR clone 244991 (TRBV7-3, TRBJ2-2)
CASSLKRGTLSGELFF

SEQ ID NO: 489983 - protein, 11 aa, Homo sapiens
  CDR3 for alpha chain variable domain of TCR clone 244992 (TRAV2, TRAJ13)
CASGGYQKVTF

SEQ ID NO: 489984 - protein, 13 aa, Homo sapiens
  CDR3 for beta chain variable domain of TCR clone 244992 (TRBV20-1, TRBJ1-1)
CSARVGGNTEALF

SEQ ID NO: 489985 - protein, 14 aa, Homo sapiens
  CDR3 for alpha chain variable domain of TCR clone 244993 (TRAV16, TRAJ31)
CSKWPRGDNARLMF

SEQ ID NO: 489986 - protein, 16 aa, Homo sapiens
  CDR3 for beta chain variable domain of TCR clone 244993 (TRBV28, TRBJ2-7)
CASSLFFETGGPEQYF

SEQ ID NO: 489987 - protein, 13 aa, Homo sapiens
  CDR3 for alpha chain variable domain of TCR clone 244994 (TRAV25, TRAJ26)
CAGTDNYGQNFVF

SEQ ID NO: 489988 - protein, 17 aa, Homo sapiens
  CDR3 for beta chain variable domain of TCR clone 244994 (TRBV7-8, TRBJ2-6)
CASSAGTGGAGANVLTF

SEQ ID NO: 489989 - protein, 13 aa, Homo sapiens
  CDR3 for alpha chain variable domain of TCR clone 244995 (TRAV12-2, TRAJ18)
CAVRGSTLGKLYF

SEQ ID NO: 489990 - protein, 18 aa, Homo sapiens
  CDR3 for beta chain variable domain of TCR clone 244995 (TRBV27, TRBJ2-3)
CASSLSGTSGRGTDTQYF

SEQ ID NO: 489991 - protein, 12 aa, Homo sapiens
  CDR3 for alpha chain variable domain of TCR clone 244996 (TRAV23/DV6, TRAJ26)
CAARRSGQNFVF

SEQ ID NO: 489992 - protein, 13 aa, Homo sapiens
  CDR3 for beta chain variable domain of TCR clone 244996 (TRBV2, TRBJ2-7)
CASSVGGSGEQYF

SEQ ID NO: 489993 - protein, 14 aa, Homo sapiens
  CDR3 for alpha chain variable domain of TCR clone 244997 (TRAV23/DV6, TRAJ6)
CAASRSGGSYIPTF

SEQ ID NO: 489994 - protein, 15 aa, Homo sapiens
  CDR3 for beta chain variable domain of TCR clone 244997 (TRBV2, TRBJ2-1)
CASSELAGSYNEQFF

SEQ ID NO: 489995 - protein, 14 aa, Homo sapiens
  CDR3 for alpha chain variable domain of TCR clone 244998 (TRAV1-2, TRAJ8)
CAVREDTGFQKLVF

SEQ ID NO: 489996 - protein, 15 aa, Homo sapiens
  CDR3 for beta chain variable domain of TCR clone 244998 (TRBV7-2, TRBJ2-2)
CASRTKWGKKGELFF

SEQ ID NO: 489997 - protein, 15 aa, Homo sapiens
  CDR3 for alpha chain variable domain of TCR clone 244999 (TRAV2, TRAJ24)
CAVVRLKNSWGKLQF

SEQ ID NO: 489998 - protein, 16 aa, Homo sapiens
  CDR3 for beta chain variable domain of TCR clone 244999 (TRBV7-7, TRBJ2-3)
CASSAGTSGSTDTQYF

SEQ ID NO: 489999 - protein, 13 aa, Homo sapiens
  CDR3 for alpha chain variable domain of TCR clone 245000 (TRAV8-1, TRAJ41)
CAVNPGSGYALNF

SEQ ID NO: 490000 - protein, 11 aa, Homo sapiens
  CDR3 for beta chain variable domain of TCR clone 245000 (TRBV11-2, TRBJ2-2)
CASSLPGELFF

SEQ ID NO: 490001 - protein, 16 aa, Homo sapiens
  CDR3 for alpha chain variable domain of TCR clone 245001 (TRAV20, TRAJ10)
CAVLRGLTGGGNKLTF

SEQ ID NO: 490002 - protein, 14 aa, Homo sapiens
  CDR3 for beta chain variable domain of TCR clone 245001 (TRBV20-1, TRBJ1-1)
CSAQTRIGGTEAFF

SEQ ID NO: 490003 - protein, 13 aa, Homo sapiens
  CDR3 for alpha chain variable domain of TCR clone 245002 (TRAV8-3, TRAJ47)
CAVGARRGNKLVF

SEQ ID NO: 490004 - protein, 13 aa, Homo sapiens
  CDR3 for beta chain variable domain of TCR clone 245002 (TRBV19, TRBJ2-2)
CASSIWSTGELFF

SEQ ID NO: 490005 - protein, 14 aa, Homo sapiens
  CDR3 for alpha chain variable domain of TCR clone 245003 (TRAV12-2, TRAJ17)
CAVLFKAAGNKLTF

SEQ ID NO: 490006 - protein, 14 aa, Homo sapiens
  CDR3 for beta chain variable domain of TCR clone 245003 (TRBV7-3, TRBJ1-1)
CASSLKGGNTEAVF

SEQ ID NO: 490007 - protein, 13 aa, Homo sapiens
  CDR3 for alpha chain variable domain of TCR clone 245004 (TRAV16, TRAJ31)
CALSAHNNARLMF

SEQ ID NO: 490008 - protein, 17 aa, Homo sapiens
  CDR3 for beta chain variable domain of TCR clone 245004 (TRBV12-4, TRBJ2-1)
CASGPGLAGGRINEQFF

SEQ ID NO: 490009 - protein, 13 aa, Homo sapiens
  CDR3 for alpha chain variable domain of TCR clone 245005 (TRAV27, TRAJ23)
CAGVLPKGGKLIF

SEQ ID NO: 490010 - protein, 14 aa, Homo sapiens
  CDR3 for beta chain variable domain of TCR clone 245005 (TRBV5-8, TRBJ2-3)
CASSLSPSTDSQYF

SEQ ID NO: 490011 - protein, 15 aa, Homo sapiens
  CDR3 for alpha chain variable domain of TCR clone 245006 (TRAV17, TRAJ6)
CATDLPSGGSYIPTF

SEQ ID NO: 490012 - protein, 16 aa, Homo sapiens
  CDR3 for beta chain variable domain of TCR clone 245006 (TRBV4-1, TRBJ2-7)
CASSQDPTGYSYEQSF

SEQ ID NO: 490013 - protein, 15 aa, Homo sapiens
  CDR3 for alpha chain variable domain of TCR clone 245007 (TRAV3, TRAJ22)
CAVRDRGGSARQLPF

SEQ ID NO: 490014 - protein, 17 aa, Homo sapiens
  CDR3 for beta chain variable domain of TCR clone 245007 (TRBV13, TRBJ2-3)
CASSLSRVAGGRNTQYF

SEQ ID NO: 490015 - protein, 13 aa, Homo sapiens
  CDR3 for alpha chain variable domain of TCR clone 245008 (TRAV3, TRAJ5)
CAVRVLGRRALTF

SEQ ID NO: 490016 - protein, 15 aa, Homo sapiens
  CDR3 for beta chain variable domain of TCR clone 245008 (TRBV4-1, TRBJ1-4)
CASSDTGGTNEKLFF

SEQ ID NO: 490017 - protein, 12 aa, Homo sapiens
  CDR3 for alpha chain variable domain of TCR clone 245009 (TRAV2, TRAJ31)
CAVEDNNAKLMF

SEQ ID NO: 490018 - protein, 14 aa, Homo sapiens
  CDR3 for beta chain variable domain of TCR clone 245009 (TRBV28, TRBJ1-5)
CASSRTGLNQPQHF

SEQ ID NO: 490019 - protein, 12 aa, Homo sapiens
  CDR3 for alpha chain variable domain of TCR clone 245010 (TRAV13-1, TRAJ9)
CASHTGGFKNIF

SEQ ID NO: 490020 - protein, 18 aa, Homo sapiens
  CDR3 for beta chain variable domain of TCR clone 245010 (TRBV11-2, TRBJ2-3)
CASSLGGASRGAPNTQYF

SEQ ID NO: 490021 - protein, 14 aa, Homo sapiens
  CDR3 for alpha chain variable domain of TCR clone 245011 (TRAV4, TRAJ6)
CLVGEAGGSYIPTF

SEQ ID NO: 490022 - protein, 15 aa, Homo sapiens
  CDR3 for beta chain variable domain of TCR clone 245011 (TRBV9, TRBJ2-1)
CASSLAGSSYNEQFV

SEQ ID NO: 490023 - protein, 15 aa, Homo sapiens
  CDR3 for alpha chain variable domain of TCR clone 245012 (TRAV17, TRAJ57)
CATGPSQGGSEKLVF

SEQ ID NO: 490024 - protein, 13 aa, Homo sapiens
  CDR3 for beta chain variable domain of TCR clone 245012 (TRBV20-1, TRBJ2-7)
CSARPSTNYEQYF

SEQ ID NO: 490025 - protein, 14 aa, Homo sapiens
  CDR3 for alpha chain variable domain of TCR clone 245013 (TRAV12-2, TRAJ53)
CAMKGGGSNYKLTF

SEQ ID NO: 490026 - protein, 14 aa, Homo sapiens
  CDR3 for beta chain variable domain of TCR clone 245013 (TRBV25-1, TRBJ1-1)
CASTHLGGNTEAFF

SEQ ID NO: 490027 - protein, 11 aa, Homo sapiens
  CDR3 for alpha chain variable domain of TCR clone 245014 (TRAV1-1, TRAJ23)
CAARQGGTLIF

SEQ ID NO: 490028 - protein, 20 aa, Homo sapiens
  CDR3 for beta chain variable domain of TCR clone 245014 (TRBV7-8, TRBJ2-2)
CASSHLFPGPTIHTTGELFF

SEQ ID NO: 490029 - protein, 13 aa, Homo sapiens
  CDR3 for alpha chain variable domain of TCR clone 245015 (TRAV8-6, TRAJ21)
CAVSPSSLNKFYF

SEQ ID NO: 490030 - protein, 14 aa, Homo sapiens
  CDR3 for beta chain variable domain of TCR clone 245015 (TRBV7-9, TRBJ2-5)
RASSLDTARETQYF

SEQ ID NO: 490031 - protein, 18 aa, Homo sapiens
  CDR3 for alpha chain variable domain of TCR clone 245016 (TRAV21, TRAJ13)
CAVPRSFCGLPESYLCNW

SEQ ID NO: 490032 - protein, 14 aa, Homo sapiens
  CDR3 for beta chain variable domain of TCR clone 245016 (TRBV20-1, TRBJ2-7)
CSAKDRKGAYEQYF

SEQ ID NO: 490033 - protein, 16 aa, Homo sapiens
  CDR3 for alpha chain variable domain of TCR clone 245017 (TRAV26-1, TRAJ37)
CIVRGDGSGNTGKLIF

SEQ ID NO: 490034 - protein, 14 aa, Homo sapiens
  CDR3 for beta chain variable domain of TCR clone 245017 (TRBV11-2, TRBJ2-5)
CGSSRTGGIETQYF

SEQ ID NO: 490035 - protein, 13 aa, Homo sapiens
  CDR3 for alpha chain variable domain of TCR clone 245018 (TRAV1-2, TRAJ20)
CAVRDGNDYKLSF

SEQ ID NO: 490036 - protein, 14 aa, Homo sapiens
  CDR3 for beta chain variable domain of TCR clone 245018 (TRBV7-2, TRBJ2-7)
CASSPKTSFYEQYF

SEQ ID NO: 490037 - protein, 14 aa, Homo sapiens
  CDR3 for alpha chain variable domain of TCR clone 245019 (TRAV26-2, TRAJ31)
CILIPGNNNARHMF

SEQ ID NO: 490038 - protein, 16 aa, Homo sapiens
  CDR3 for beta chain variable domain of TCR clone 245019 (TRBV7-3, TRBJ2-1)
CASSLVSGSSNNEQFF

SEQ ID NO: 490039 - protein, 12 aa, Homo sapiens
  CDR3 for alpha chain variable domain of TCR clone 245020 (TRAV12-1, TRAJ40)
CVVYSGTYKYIF

SEQ ID NO: 490040 - protein, 18 aa, Homo sapiens
  CDR3 for beta chain variable domain of TCR clone 245020 (TRBV11-2, TRBJ2-3)
CACSLGGASRGAPKTQYF

SEQ ID NO: 490041 - protein, 13 aa, Homo sapiens
  CDR3 for alpha chain variable domain of TCR clone 245021 (TRAV26-2, TRAJ43)
CILRAVNNNDMRF

SEQ ID NO: 490042 - protein, 14 aa, Homo sapiens
  CDR3 for beta chain variable domain of TCR clone 245021 (TRBV20-1, TRBJ1-1)
CSAQTRIGGTEAFF

SEQ ID NO: 490043 - protein, 16 aa, Homo sapiens
  CDR3 for alpha chain variable domain of TCR clone 245022 (TRAV3, TRAJ37)
CAVRPHSSGTTGKLIF

SEQ ID NO: 490044 - protein, 16 aa, Homo sapiens
  CDR3 for beta chain variable domain of TCR clone 245022 (TRBV9, TRBJ1-2)
CASSVEEKVSPYGYTF

SEQ ID NO: 490045 - protein, 14 aa, Homo sapiens
  CDR3 for alpha chain variable domain of TCR clone 245023 (TRAV8-3, TRAJ39)
CAVGANNAGNMLTF

SEQ ID NO: 490046 - protein, 16 aa, Homo sapiens
  CDR3 for beta chain variable domain of TCR clone 245023 (TRBV6-1, TRBJ2-5)
CASSENLDRGAETQYF

SEQ ID NO: 490047 - protein, 16 aa, Homo sapiens
  CDR3 for alpha chain variable domain of TCR clone 245024 (TRAV26-1, TRAJ52)
CIVSNAGGTSYGKLSF

SEQ ID NO: 490048 - protein, 16 aa, Homo sapiens
  CDR3 for beta chain variable domain of TCR clone 245024 (TRBV5-1, TRBJ2-1)
CASSLEGRGLYNEQFF

SEQ ID NO: 490049 - protein, 18 aa, Homo sapiens
  CDR3 for alpha chain variable domain of TCR clone 245025 (TRAV13-1, TRAJ52)
CAASKRSAGGTSYGKLTF

SEQ ID NO: 490050 - protein, 13 aa, Homo sapiens
  CDR3 for beta chain variable domain of TCR clone 245025 (TRBV20-1, TRBJ1-1)
CSARGGGKTEAFF

SEQ ID NO: 490051 - protein, 14 aa, Homo sapiens
  CDR3 for alpha chain variable domain of TCR clone 245026 (TRAV13-1, TRAJ44)
CAAKATGTASKLTF

SEQ ID NO: 490052 - protein, 17 aa, Homo sapiens
  CDR3 for beta chain variable domain of TCR clone 245026 (TRBV28, TRBJ2-3)
CASRNPSYGFSTDTQYF

SEQ ID NO: 490053 - protein, 16 aa, Homo sapiens
  CDR3 for alpha chain variable domain of TCR clone 245027 (TRAV16, TRAJ4)
CALSRMFSGGYNKLIF

SEQ ID NO: 490054 - protein, 14 aa, Homo sapiens
  CDR3 for beta chain variable domain of TCR clone 245027 (TRBV25-1, TRBJ2-1)
CASSPRGPYNEQFF

SEQ ID NO: 490055 - protein, 17 aa, Homo sapiens
  CDR3 for alpha chain variable domain of TCR clone 245028 (TRAV13-1, TRAJ31)
CAPRDRLLFGYVTQLVV

SEQ ID NO: 490056 - protein, 13 aa, Homo sapiens
  CDR3 for beta chain variable domain of TCR clone 245028 (TRBV4-1, TRBJ2-1)
CASSQAGGDEQFF

SEQ ID NO: 490057 - protein, 14 aa, Homo sapiens
  CDR3 for alpha chain variable domain of TCR clone 245029 (TRAV1-2, TRAJ8)
CAVREDTGFQELVF

SEQ ID NO: 490058 - protein, 14 aa, Homo sapiens
  CDR3 for beta chain variable domain of TCR clone 245029 (TRBV7-2, TRBJ2-7)
CASRSQGAAYEQYF

SEQ ID NO: 490059 - protein, 14 aa, Homo sapiens
  CDR3 for alpha chain variable domain of TCR clone 245030 (TRAV38-1, TRAJ45)
CASHSGGGADGLTF

SEQ ID NO: 490060 - protein, 20 aa, Homo sapiens
  CDR3 for beta chain variable domain of TCR clone 245030 (TRBV28, TRBJ2-1)
CASTPIGRSPGLAGGNEQFF

SEQ ID NO: 490061 - protein, 16 aa, Homo sapiens
  CDR3 for alpha chain variable domain of TCR clone 245031 (TRAV3, TRAJ37)
CAVRGRGSGNTGKLIF

SEQ ID NO: 490062 - protein, 14 aa, Homo sapiens
  CDR3 for beta chain variable domain of TCR clone 245031 (TRBV18, TRBJ2-5)
CASSPGVSQETQYF

SEQ ID NO: 490063 - protein, 18 aa, Homo sapiens
  CDR3 for alpha chain variable domain of TCR clone 245032 (TRAV21, TRAJ52)
CAVRPSPAGGTSYGRLTS

SEQ ID NO: 490064 - protein, 17 aa, Homo sapiens
  CDR3 for beta chain variable domain of TCR clone 245032 (TRBV13, TRBJ2-3)
CASRLSRVAGGRNTQYF

SEQ ID NO: 490065 - protein, 13 aa, Homo sapiens
  CDR3 for alpha chain variable domain of TCR clone 245033 (TRAV17, TRAJ5)
CALRGTGRRALTF

SEQ ID NO: 490066 - protein, 15 aa, Homo sapiens
  CDR3 for beta chain variable domain of TCR clone 245033 (TRBV6-5, TRBJ1-2)
CASSYSPGQGNGYTF

SEQ ID NO: 490067 - protein, 14 aa, Homo sapiens
  CDR3 for alpha chain variable domain of TCR clone 245034 (TRAV1-1, TRAJ27)
CAVIYNTNAGKSTL

SEQ ID NO: 490068 - protein, 14 aa, Homo sapiens
  CDR3 for beta chain variable domain of TCR clone 245034 (TRBV6-5, TRBJ1-2)
CASSYDGTGGGYAF

SEQ ID NO: 490069 - protein, 15 aa, Homo sapiens
  CDR3 for alpha chain variable domain of TCR clone 245035 (TRAV13-2, TRAJ58)
CVTAQKETSGSRMTF

SEQ ID NO: 490070 - protein, 14 aa, Homo sapiens
  CDR3 for beta chain variable domain of TCR clone 245035 (TRBV7-2, TRBJ2-3)
CASRRGLAADTQYF

SEQ ID NO: 490071 - protein, 14 aa, Homo sapiens
  CDR3 for alpha chain variable domain of TCR clone 245036 (TRAV12-3, TRAJ10)
CAMTLTGGGNKLTF

SEQ ID NO: 490072 - protein, 19 aa, Homo sapiens
  CDR3 for beta chain variable domain of TCR clone 245036 (TRBV25-1, TRBJ2-2)
CAILVYRVDRGRKTGELFF

SEQ ID NO: 490073 - protein, 12 aa, Homo sapiens
  CDR3 for alpha chain variable domain of TCR clone 245037 (TRAV8-1, TRAJ26)
CAVNSYGQNFVL

SEQ ID NO: 490074 - protein, 15 aa, Homo sapiens
  CDR3 for beta chain variable domain of TCR clone 245037 (TRBV20-1, TRBJ1-1)
CSASWDRFLNTEAFF

SEQ ID NO: 490075 - protein, 15 aa, Homo sapiens
  CDR3 for alpha chain variable domain of TCR clone 245038 (TRAV26-2, TRAJ39)
CSLRGNNNAGNMLTF

SEQ ID NO: 490076 - protein, 12 aa, Homo sapiens
  CDR3 for beta chain variable domain of TCR clone 245038 (TRBV28, TRBJ2-3)
CASSLYRDTQYF

SEQ ID NO: 490077 - protein, 16 aa, Homo sapiens
  CDR3 for alpha chain variable domain of TCR clone 245039 (TRAV14/DV4, TRAJ15)
CAMREGPAQAGTALIF

SEQ ID NO: 490078 - protein, 12 aa, Homo sapiens
  CDR3 for beta chain variable domain of TCR clone 245039 (TRBV28, TRBJ2-6)
CAIQAGANVLSF

SEQ ID NO: 490079 - protein, 16 aa, Homo sapiens
  CDR3 for alpha chain variable domain of TCR clone 245040 (TRAV23/DV6, TRAJ21)
CAASSGGGTTSPNFTL

SEQ ID NO: 490080 - protein, 11 aa, Homo sapiens
  CDR3 for beta chain variable domain of TCR clone 245040 (TRBV7-8, TRBJ2-7)
CASSLSLEQYF

SEQ ID NO: 490081 - protein, 10 aa, Homo sapiens
  CDR3 for alpha chain variable domain of TCR clone 245041 (TRAV23/DV6, TRAJ57)
CAASSTLSQG

SEQ ID NO: 490082 - protein, 13 aa, Homo sapiens
  CDR3 for beta chain variable domain of TCR clone 245041 (TRBV5-7, TRBJ2-3)
CASGLGRTDTQYF

SEQ ID NO: 490083 - protein, 15 aa, Homo sapiens
  CDR3 for alpha chain variable domain of TCR clone 245042 (TRAV20, TRAJ53)
CAVQASGGSNYKLTF

SEQ ID NO: 490084 - protein, 12 aa, Homo sapiens
  CDR3 for beta chain variable domain of TCR clone 245042 (TRBV11-2, TRBJ2-2)
CASSLGGGELFF

SEQ ID NO: 490085 - protein, 13 aa, Homo sapiens
  CDR3 for alpha chain variable domain of TCR clone 245043 (TRAV27, TRAJ45)
CRSSGGGADGLTF

SEQ ID NO: 490086 - protein, 12 aa, Homo sapiens
  CDR3 for beta chain variable domain of TCR clone 245043 (TRBV7-8, TRBJ2-7)
CASNLGDREQYF

SEQ ID NO: 490087 - protein, 14 aa, Homo sapiens
  CDR3 for alpha chain variable domain of TCR clone 245044 (TRAV1-2, TRAJ16)
CAVNRFSDGQKLLF

SEQ ID NO: 490088 - protein, 15 aa, Homo sapiens
  CDR3 for beta chain variable domain of TCR clone 245044 (TRBV10-3, TRBJ1-1)
CAISDRGGMNTEAFF

SEQ ID NO: 490089 - protein, 13 aa, Homo sapiens
  CDR3 for alpha chain variable domain of TCR clone 245045 (TRAV17, TRAJ26)
CATVDNYGQNFVF

SEQ ID NO: 490090 - protein, 16 aa, Homo sapiens
  CDR3 for beta chain variable domain of TCR clone 245045 (TRBV2, TRBJ2-1)
CARSVEGSLSYNEQFF

SEQ ID NO: 490091 - protein, 11 aa, Homo sapiens
  CDR3 for alpha chain variable domain of TCR clone 245046 (TRAV21, TRAJ34)
CAVTNTDKLIF

SEQ ID NO: 490092 - protein, 14 aa, Homo sapiens
  CDR3 for beta chain variable domain of TCR clone 245046 (TRBV4-2, TRBJ1-2)
CASSQDRREGGYTF

SEQ ID NO: 490093 - protein, 11 aa, Homo sapiens
  CDR3 for alpha chain variable domain of TCR clone 245047 (TRAV26-1, TRAJ37)
CIVRVGRKLIF

SEQ ID NO: 490094 - protein, 16 aa, Homo sapiens
  CDR3 for beta chain variable domain of TCR clone 245047 (TRBV7-3, TRBJ2-2)
CASSVKRGTLSGELFF

SEQ ID NO: 490095 - protein, 12 aa, Homo sapiens
  CDR3 for alpha chain variable domain of TCR clone 245048 (TRAV9-2, TRAJ26)
CALYNYGQNFVF

SEQ ID NO: 490096 - protein, 13 aa, Homo sapiens
  CDR3 for beta chain variable domain of TCR clone 245048 (TRBV27, TRBJ2-7)
CASSFVSSYEQYF

SEQ ID NO: 490097 - protein, 14 aa, Homo sapiens
  CDR3 for alpha chain variable domain of TCR clone 245049 (TRAV1-2, TRAJ16)
CAVNRFSDRQKLLF

SEQ ID NO: 490098 - protein, 12 aa, Homo sapiens
  CDR3 for beta chain variable domain of TCR clone 245049 (TRBV11-2, TRBJ2-2)
CASSLGGGELFF

SEQ ID NO: 490099 - protein, 13 aa, Homo sapiens
  CDR3 for alpha chain variable domain of TCR clone 245050 (TRAV2, TRAJ40)
CAVVTSGTDKYIF

SEQ ID NO: 490100 - protein, 13 aa, Homo sapiens
  CDR3 for beta chain variable domain of TCR clone 245050 (TRBV7-9, TRBJ2-5)
CASLPSGRETQYF

SEQ ID NO: 490101 - protein, 14 aa, Homo sapiens
  CDR3 for alpha chain variable domain of TCR clone 245051 (TRAV12-2, TRAJ45)
CAVYSGGGADGLTF

SEQ ID NO: 490102 - protein, 19 aa, Homo sapiens
  CDR3 for beta chain variable domain of TCR clone 245051 (TRBV25-1, TRBJ2-2)
CAILVYRVDRGRKTGELFF

SEQ ID NO: 490103 - protein, 13 aa, Homo sapiens
  CDR3 for alpha chain variable domain of TCR clone 245052 (TRAV29/DV5, TRAJ31)
CAASRNNNARLML

SEQ ID NO: 490104 - protein, 12 aa, Homo sapiens
  CDR3 for beta chain variable domain of TCR clone 245052 (TRBV14, TRBJ2-7)
CASSLYKDEQYF

SEQ ID NO: 490105 - protein, 12 aa, Homo sapiens
  CDR3 for alpha chain variable domain of TCR clone 245053 (TRAV16, TRAJ49)
CALNEGGNQFYF

SEQ ID NO: 490106 - protein, 15 aa, Homo sapiens
  CDR3 for beta chain variable domain of TCR clone 245053 (TRBV11-2, TRBJ1-1)
CASSLGKRGNTEAFF

SEQ ID NO: 490107 - protein, 11 aa, Homo sapiens
  CDR3 for alpha chain variable domain of TCR clone 245054 (TRAV2, TRAJ33)
CAVESNYQLIW

SEQ ID NO: 490108 - protein, 17 aa, Homo sapiens
  CDR3 for beta chain variable domain of TCR clone 245054 (TRBV15, TRBJ1-2)
CATSGREIDVVNYGYTF

SEQ ID NO: 490109 - protein, 23 aa, Homo sapiens
  CDR3 for alpha chain variable domain of TCR clone 245055 (TRAV1-2, TRAJ26)
CAVRDLITMVRILSLVPEPDCPF

SEQ ID NO: 490110 - protein, 16 aa, Homo sapiens
  CDR3 for beta chain variable domain of TCR clone 245055 (TRBV11-2, TRBJ2-1)
CASSLLLLSSYNEQFF

SEQ ID NO: 490111 - protein, 15 aa, Homo sapiens
  CDR3 for alpha chain variable domain of TCR clone 245056 (TRAV3, TRAJ27)
CAVRDPLTNAGKSTS

SEQ ID NO: 490112 - protein, 15 aa, Homo sapiens
  CDR3 for beta chain variable domain of TCR clone 245056 (TRBV28, TRBJ2-1)
CASSIIAGGRSEQFF

SEQ ID NO: 490113 - protein, 14 aa, Homo sapiens
  CDR3 for alpha chain variable domain of TCR clone 245057 (TRAV35, TRAJ33)
CAGSSQDSNYQLIW

SEQ ID NO: 490114 - protein, 14 aa, Homo sapiens
  CDR3 for beta chain variable domain of TCR clone 245057 (TRBV25-1, TRBJ1-1)
CASTHLGGNTEAFF

SEQ ID NO: 490115 - protein, 16 aa, Homo sapiens
  CDR3 for alpha chain variable domain of TCR clone 245058 (TRAV8-3, TRAJ13)
CAVGAYPSGGYQKVTF

SEQ ID NO: 490116 - protein, 12 aa, Homo sapiens
  CDR3 for beta chain variable domain of TCR clone 245058 (TRBV7-2, TRBJ2-3)
CASSLEQGIQYF

SEQ ID NO: 490117 - protein, 16 aa, Homo sapiens
  CDR3 for alpha chain variable domain of TCR clone 245059 (TRAV3, TRAJ40)
CAVRDRIASGTYKYIF

SEQ ID NO: 490118 - protein, 16 aa, Homo sapiens
  CDR3 for beta chain variable domain of TCR clone 245059 (TRBV6-1, TRBJ1-2)
CASSEANSIINYGYSF

SEQ ID NO: 490119 - protein, 17 aa, Homo sapiens
  CDR3 for alpha chain variable domain of TCR clone 245060 (TRAV3, TRAJ42)
CAVRDRYYGGSQGNLIF

SEQ ID NO: 490120 - protein, 14 aa, Homo sapiens
  CDR3 for beta chain variable domain of TCR clone 245060 (TRBV19, TRBJ2-5)
CARSMTGQQETQYF

SEQ ID NO: 490121 - protein, 11 aa, Homo sapiens
  CDR3 for alpha chain variable domain of TCR clone 245061 (TRAV21, TRAJ34)
CAVTNTDKLFF

SEQ ID NO: 490122 - protein, 16 aa, Homo sapiens
  CDR3 for beta chain variable domain of TCR clone 245061 (TRBV18, TRBJ1-1)
CASSPGVGGRGGEAFF

SEQ ID NO: 490123 - protein, 13 aa, Homo sapiens
  CDR3 for alpha chain variable domain of TCR clone 245062 (TRAV12-2, TRAJ10)
CAVPTGGGNKLTF

SEQ ID NO: 490124 - protein, 14 aa, Homo sapiens
  CDR3 for beta chain variable domain of TCR clone 245062 (TRBV20-1, TRBJ1-1)
CSAQTRIGGTEAFF

SEQ ID NO: 490125 - protein, 13 aa, Homo sapiens
  CDR3 for alpha chain variable domain of TCR clone 245063 (TRAV12-2, TRAJ20)
CAVYPSNDYKLSF

SEQ ID NO: 490126 - protein, 15 aa, Homo sapiens
  CDR3 for beta chain variable domain of TCR clone 245063 (TRBV6-1, TRBJ2-5)
CASSEGWGIQETQYL

SEQ ID NO: 490127 - protein, 16 aa, Homo sapiens
  CDR3 for alpha chain variable domain of TCR clone 245064 (TRAV30, TRAJ24)
CGTEIVDADSWGKFQF

SEQ ID NO: 490128 - protein, 14 aa, Homo sapiens
  CDR3 for beta chain variable domain of TCR clone 245064 (TRBV12-5, TRBJ2-5)
CASGSRTEQETQYF

SEQ ID NO: 490129 - protein, 13 aa, Homo sapiens
  CDR3 for alpha chain variable domain of TCR clone 245065 (TRAV2, TRAJ15)
CAVASQAGTALIF

SEQ ID NO: 490130 - protein, 14 aa, Homo sapiens
  CDR3 for beta chain variable domain of TCR clone 245065 (TRBV5-1, TRBJ2-7)
CASGRGESLYEQYF

SEQ ID NO: 490131 - protein, 16 aa, Homo sapiens
  CDR3 for alpha chain variable domain of TCR clone 245066 (TRAV23/DV6, TRAJ57)
CAASSTLSQGVSENLL

SEQ ID NO: 490132 - protein, 14 aa, Homo sapiens
  CDR3 for beta chain variable domain of TCR clone 245066 (TRBV25-1, TRBJ1-1)
CASTHLGGNTEAFF

SEQ ID NO: 490133 - protein, 11 aa, Homo sapiens
  CDR3 for alpha chain variable domain of TCR clone 245067 (TRAV8-3, TRAJ18)
CAVGGRQRLNH

SEQ ID NO: 490134 - protein, 12 aa, Homo sapiens
  CDR3 for beta chain variable domain of TCR clone 245067 (TRBV28, TRBJ2-6)
CAIQAGANVLTF

SEQ ID NO: 490135 - protein, 16 aa, Homo sapiens
  CDR3 for alpha chain variable domain of TCR clone 245068 (TRAV21, TRAJ45)
CAVSWGSGGVADGLTF

SEQ ID NO: 490136 - protein, 14 aa, Homo sapiens
  CDR3 for beta chain variable domain of TCR clone 245068 (TRBV4-2, TRBJ1-2)
CASSPGGSNYGYTF

SEQ ID NO: 490137 - protein, 13 aa, Homo sapiens
  CDR3 for alpha chain variable domain of TCR clone 245069 (TRAV21, TRAJ20)
CAVGLRVDYKLSF

SEQ ID NO: 490138 - protein, 16 aa, Homo sapiens
  CDR3 for beta chain variable domain of TCR clone 245069 (TRBV20-1, TRBJ1-5)
CSAELPGQQTNQPQHF

SEQ ID NO: 490139 - protein, 14 aa, Homo sapiens
  CDR3 for alpha chain variable domain of TCR clone 245070 (TRAV38-1, TRAJ45)
CASHSGGGADGLTF

SEQ ID NO: 490140 - protein, 13 aa, Homo sapiens
  CDR3 for beta chain variable domain of TCR clone 245070 (TRBV4-1, TRBJ2-1)
CASSQAGGDEQFF

SEQ ID NO: 490141 - protein, 14 aa, Homo sapiens
  CDR3 for alpha chain variable domain of TCR clone 245071 (TRAV12-3, TRAJ10)
SHLPLTGGGNKLTF

SEQ ID NO: 490142 - protein, 14 aa, Homo sapiens
  CDR3 for beta chain variable domain of TCR clone 245071 (TRBV7-2, TRBJ2-2)
CASSLNSNTGVLFF

SEQ ID NO: 490143 - protein, 16 aa, Homo sapiens
  CDR3 for alpha chain variable domain of TCR clone 245072 (TRAV3, TRAJ37)
CAVRGKGSGNTGKLIF

SEQ ID NO: 490144 - protein, 15 aa, Homo sapiens
  CDR3 for beta chain variable domain of TCR clone 245072 (TRBV7-9, TRBJ1-5)
CASSQGHHPNQPQHF

SEQ ID NO: 490145 - protein, 14 aa, Homo sapiens
  CDR3 for alpha chain variable domain of TCR clone 245073 (TRAV38-1, TRAJ29)
CAFITPSGNTPLVF

SEQ ID NO: 490146 - protein, 14 aa, Homo sapiens
  CDR3 for beta chain variable domain of TCR clone 245073 (TRBV18, TRBJ2-7)
CPSSPRGGAYEQYF

SEQ ID NO: 490147 - protein, 12 aa, Homo sapiens
  CDR3 for alpha chain variable domain of TCR clone 245074 (TRAV12-3, TRAJ17)
RAMTLTGNKLTF

SEQ ID NO: 490148 - protein, 11 aa, Homo sapiens
  CDR3 for beta chain variable domain of TCR clone 245074 (TRBV11-2, TRBJ1-1)
CASSINTGAFF

SEQ ID NO: 490149 - protein, 15 aa, Homo sapiens
  CDR3 for alpha chain variable domain of TCR clone 245075 (TRAV21, TRAJ53)
CATLNSGGSNYKLTF

SEQ ID NO: 490150 - protein, 17 aa, Homo sapiens
  CDR3 for beta chain variable domain of TCR clone 245075 (TRBV4-1, TRBJ2-3)
CASSKGYVSGGTDTQYF

SEQ ID NO: 490151 - protein, 12 aa, Homo sapiens
  CDR3 for alpha chain variable domain of TCR clone 245076 (TRAV12-2, TRAJ36)
CAAPRGANNLFF

SEQ ID NO: 490152 - protein, 15 aa, Homo sapiens
  CDR3 for beta chain variable domain of TCR clone 245076 (TRBV11-2, TRBJ1-3)
CASSLDGTVGTTIYF

SEQ ID NO: 490153 - protein, 14 aa, Homo sapiens
  CDR3 for alpha chain variable domain of TCR clone 245077 (TRAV8-2, TRAJ4)
CVVSPSGGYNKLIF

SEQ ID NO: 490154 - protein, 15 aa, Homo sapiens
  CDR3 for beta chain variable domain of TCR clone 245077 (TRBV2, TRBJ2-1)
CASNELAGSYNEQFF

SEQ ID NO: 490155 - protein, 10 aa, Homo sapiens
  CDR3 for alpha chain variable domain of TCR clone 245078 (TRAV23/DV6, TRAJ43)
CAAAVAALEQ

SEQ ID NO: 490156 - protein, 14 aa, Homo sapiens
  CDR3 for beta chain variable domain of TCR clone 245078 (TRBV4-2, TRBJ2-7)
CASSQGQTAYEQYF

SEQ ID NO: 490157 - protein, 14 aa, Homo sapiens
  CDR3 for alpha chain variable domain of TCR clone 245079 (TRAV12-3, TRAJ9)
CAMSPNTGGFKTIF

SEQ ID NO: 490158 - protein, 12 aa, Homo sapiens
  CDR3 for beta chain variable domain of TCR clone 245079 (TRBV19, TRBJ1-5)
CACSIAQQSQHF

SEQ ID NO: 490159 - protein, 12 aa, Homo sapiens
  CDR3 for alpha chain variable domain of TCR clone 245080 (TRAV3, TRAJ20)
CAVRDADYKLSF

SEQ ID NO: 490160 - protein, 13 aa, Homo sapiens
  CDR3 for beta chain variable domain of TCR clone 245080 (TRBV9, TRBJ2-1)
CASSVGQGGEQFF

SEQ ID NO: 490161 - protein, 12 aa, Homo sapiens
  CDR3 for alpha chain variable domain of TCR clone 245081 (TRAV26-2, TRAJ48)
CILRKGNEKLTF

SEQ ID NO: 490162 - protein, 17 aa, Homo sapiens
  CDR3 for beta chain variable domain of TCR clone 245081 (TRBV7-3, TRBJ2-3)
RASSLMKRMRGADTQYF

SEQ ID NO: 490163 - protein, 14 aa, Homo sapiens
  CDR3 for alpha chain variable domain of TCR clone 245082 (TRAV9-2, TRAJ39)
CALYIYNAGNMLTF

SEQ ID NO: 490164 - protein, 13 aa, Homo sapiens
  CDR3 for beta chain variable domain of TCR clone 245082 (TRBV20-1, TRBJ2-3)
CSASRQAADTQYF

SEQ ID NO: 490165 - protein, 11 aa, Homo sapiens
  CDR3 for alpha chain variable domain of TCR clone 245083 (TRAV27, TRAJ49)
CAGGSGNQFYF

SEQ ID NO: 490166 - protein, 15 aa, Homo sapiens
  CDR3 for beta chain variable domain of TCR clone 245083 (TRBV12-4, TRBJ2-1)
CASSLLATGNNEQFF

SEQ ID NO: 490167 - protein, 16 aa, Homo sapiens
  CDR3 for alpha chain variable domain of TCR clone 245084 (TRAV23/DV6, TRAJ57)
CSKLYLSQGGSEKLVF

SEQ ID NO: 490168 - protein, 14 aa, Homo sapiens
  CDR3 for beta chain variable domain of TCR clone 245084 (TRBV25-1, TRBJ1-1)
CASTHQGGNTEAFF

SEQ ID NO: 490169 - protein, 15 aa, Homo sapiens
  CDR3 for alpha chain variable domain of TCR clone 245085 (TRAV21, TRAJ24)
CAARSSTDSWGQLQF

SEQ ID NO: 490170 - protein, 15 aa, Homo sapiens
  CDR3 for beta chain variable domain of TCR clone 245085 (TRBV19, TRBJ1-1)
CASTSGQIQNTEAFF

SEQ ID NO: 490171 - protein, 15 aa, Homo sapiens
  CDR3 for alpha chain variable domain of TCR clone 245086 (TRAV27, TRAJ38)
CAARRNAGNNRKLIW

SEQ ID NO: 490172 - protein, 17 aa, Homo sapiens
  CDR3 for beta chain variable domain of TCR clone 245086 (TRBV13, TRBJ2-3)
CASSLSRVAGWRNTQYF

SEQ ID NO: 490173 - protein, 14 aa, Homo sapiens
  CDR3 for alpha chain variable domain of TCR clone 245087 (TRAV12-3, TRAJ10)
SHLPLTGGVNKLTF

SEQ ID NO: 490174 - protein, 18 aa, Homo sapiens
  CDR3 for beta chain variable domain of TCR clone 245087 (TRBV11-2, TRBJ2-3)
CASSLGGASRGAPNTQYF

SEQ ID NO: 490175 - protein, 15 aa, Homo sapiens
  CDR3 for alpha chain variable domain of TCR clone 245088 (TRAV14/DV4, TRAJ10)
CAMRELTGGGNKLTF

SEQ ID NO: 490176 - protein, 15 aa, Homo sapiens
  CDR3 for beta chain variable domain of TCR clone 245088 (TRBV7-9, TRBJ1-6)
CASSSPGRGNSPLHF

SEQ ID NO: 490177 - protein, 13 aa, Homo sapiens
  CDR3 for alpha chain variable domain of TCR clone 245089 (TRAV2, TRAJ15)
CAVASQPGTALIF

SEQ ID NO: 490178 - protein, 13 aa, Homo sapiens
  CDR3 for beta chain variable domain of TCR clone 245089 (TRBV11-2, TRBJ2-1)
CASSLDLVNEQFF

SEQ ID NO: 490179 - protein, 13 aa, Homo sapiens
  CDR3 for alpha chain variable domain of TCR clone 245090 (TRAV26-2, TRAJ57)
CILSRGGSEKMVF

SEQ ID NO: 490180 - protein, 16 aa, Homo sapiens
  CDR3 for beta chain variable domain of TCR clone 245090 (TRBV18, TRBJ1-5)
CASSSRTGGGNQPQHF

SEQ ID NO: 490181 - protein, 12 aa, Homo sapiens
  CDR3 for alpha chain variable domain of TCR clone 245091 (TRAV22, TRAJ22)
CAPGGSARQLTF

SEQ ID NO: 490182 - protein, 13 aa, Homo sapiens
  CDR3 for beta chain variable domain of TCR clone 245091 (TRBV15, TRBJ1-6)
SATSGGLNSPLHF

SEQ ID NO: 490183 - protein, 15 aa, Homo sapiens
  CDR3 for alpha chain variable domain of TCR clone 245092 (TRAV14/DV4, TRAJ33)
CAMRVGRDSNYQLIW

SEQ ID NO: 490184 - protein, 15 aa, Homo sapiens
  CDR3 for beta chain variable domain of TCR clone 245092 (TRBV5-5, TRBJ1-5)
CASSSTPGSNQPQHF

SEQ ID NO: 490185 - protein, 14 aa, Homo sapiens
  CDR3 for alpha chain variable domain of TCR clone 245093 (TRAV17, TRAJ57)
CATDTQGGSEKLVF

SEQ ID NO: 490186 - protein, 18 aa, Homo sapiens
  CDR3 for beta chain variable domain of TCR clone 245093 (TRBV6-6, TRBJ1-3)
CASSYSKWDSISVNTIYF

SEQ ID NO: 490187 - protein, 14 aa, Homo sapiens
  CDR3 for alpha chain variable domain of TCR clone 245094 (TRAV12-2, TRAJ11)
CAVEGGLGYSTLTF

SEQ ID NO: 490188 - protein, 16 aa, Homo sapiens
  CDR3 for beta chain variable domain of TCR clone 245094 (TRBV6-1, TRBJ1-2)
CASSGAWQGRSHGYTF

SEQ ID NO: 490189 - protein, 15 aa, Homo sapiens
  CDR3 for alpha chain variable domain of TCR clone 245095 (TRAV1-2, TRAJ15)
CAVEVMGSAGTALIF

SEQ ID NO: 490190 - protein, 13 aa, Homo sapiens
  CDR3 for beta chain variable domain of TCR clone 245095 (TRBV4-2, TRBJ1-1)
CASSQAGNTEAFF

SEQ ID NO: 490191 - protein, 16 aa, Homo sapiens
  CDR3 for alpha chain variable domain of TCR clone 245096 (TRAV30, TRAJ28)
CGTVTPRRAGSYQLTF

SEQ ID NO: 490192 - protein, 16 aa, Homo sapiens
  CDR3 for beta chain variable domain of TCR clone 245096 (TRBV29-1, TRBJ2-7)
CSVEVVGTSGSYEQYF

SEQ ID NO: 490193 - protein, 13 aa, Homo sapiens
  CDR3 for alpha chain variable domain of TCR clone 245097 (TRAV12-3, TRAJ13)
CAMTSGGYQKVTF

SEQ ID NO: 490194 - protein, 13 aa, Homo sapiens
  CDR3 for beta chain variable domain of TCR clone 245097 (TRBV7-9, TRBJ1-2)
CASSLKQNYGVTF

SEQ ID NO: 490195 - protein, 17 aa, Homo sapiens
  CDR3 for alpha chain variable domain of TCR clone 245098 (TRAV3, TRAJ42)
CAVRDRDHGGSQGNLIF

SEQ ID NO: 490196 - protein, 18 aa, Homo sapiens
  CDR3 for beta chain variable domain of TCR clone 245098 (TRBV20-1, TRBJ2-3)
CSASGLAGGPRTTDTQYF

SEQ ID NO: 490197 - protein, 11 aa, Homo sapiens
  CDR3 for alpha chain variable domain of TCR clone 245099 (TRAV2, TRAJ20)
CAVLNDYKPSF

SEQ ID NO: 490198 - protein, 16 aa, Homo sapiens
  CDR3 for beta chain variable domain of TCR clone 245099 (TRBV11-1, TRBJ2-2)
CASSAEGLKNTGELFF

SEQ ID NO: 490199 - protein, 14 aa, Homo sapiens
  CDR3 for alpha chain variable domain of TCR clone 245100 (TRAV8-2, TRAJ4)
CVVIPSGGFNKLIF

SEQ ID NO: 490200 - protein, 15 aa, Homo sapiens
  CDR3 for beta chain variable domain of TCR clone 245100 (TRBV4-1, TRBJ1-4)
CASSDTGGTNEKLFF

SEQ ID NO: 490201 - protein, 12 aa, Homo sapiens
  CDR3 for alpha chain variable domain of TCR clone 245101 (TRAV29/DV5, TRAJ43)
CAAPYNNNDMRV

SEQ ID NO: 490202 - protein, 17 aa, Homo sapiens
  CDR3 for beta chain variable domain of TCR clone 245101 (TRBV19, TRBJ2-6)
CASSTGQVFSGANVLTF

SEQ ID NO: 490203 - protein, 15 aa, Homo sapiens
  CDR3 for alpha chain variable domain of TCR clone 245102 (TRAV1-2, TRAJ30)
CAVRPHGNRDDKIIF

SEQ ID NO: 490204 - protein, 13 aa, Homo sapiens
  CDR3 for beta chain variable domain of TCR clone 245102 (TRBV6-3, TRBJ2-7)
CASSFSGGYEQYF

SEQ ID NO: 490205 - protein, 12 aa, Homo sapiens
  CDR3 for alpha chain variable domain of TCR clone 245103 (TRAV30, TRAJ39)
CGRGNAGNMLTF

SEQ ID NO: 490206 - protein, 12 aa, Homo sapiens
  CDR3 for beta chain variable domain of TCR clone 245103 (TRBV7-9, TRBJ1-1)
CASSLVRGEAFF

SEQ ID NO: 490207 - protein, 11 aa, Homo sapiens
  CDR3 for alpha chain variable domain of TCR clone 245104 (TRAV12-1, TRAJ41)
GASNSGYALNF

SEQ ID NO: 490208 - protein, 15 aa, Homo sapiens
  CDR3 for beta chain variable domain of TCR clone 245104 (TRBV7-2, TRBJ1-5)
CASSSTRVDNQPQHF

SEQ ID NO: 490209 - protein, 16 aa, Homo sapiens
  CDR3 for alpha chain variable domain of TCR clone 245105 (TRAV8-3, TRAJ13)
CAVGAYPSGGYQKVTF

SEQ ID NO: 490210 - protein, 11 aa, Homo sapiens
  CDR3 for beta chain variable domain of TCR clone 245105 (TRBV11-2, TRBJ2-2)
CASSLPGELFF

SEQ ID NO: 490211 - protein, 14 aa, Homo sapiens
  CDR3 for alpha chain variable domain of TCR clone 245106 (TRAV8-1, TRAJ5)
CAVRTDTGRRALTF

SEQ ID NO: 490212 - protein, 13 aa, Homo sapiens
  CDR3 for beta chain variable domain of TCR clone 245106 (TRBV11-3, TRBJ1-2)
CASSLPGDVGYTF

SEQ ID NO: 490213 - protein, 14 aa, Homo sapiens
  CDR3 for alpha chain variable domain of TCR clone 245107 (TRAV1-2, TRAJ16)
CAVNRFSDGQKLLF

SEQ ID NO: 490214 - protein, 16 aa, Homo sapiens
  CDR3 for beta chain variable domain of TCR clone 245107 (TRBV12-4, TRBJ1-2)
CASSTTATGKTRGYTF

SEQ ID NO: 490215 - protein, 16 aa, Homo sapiens
  CDR3 for alpha chain variable domain of TCR clone 245108 (TRAV8-3, TRAJ13)
CAVGAYPSGGYQKVAF

SEQ ID NO: 490216 - protein, 15 aa, Homo sapiens
  CDR3 for beta chain variable domain of TCR clone 245108 (TRBV19, TRBJ1-5)
CASSIVWADNQPQHF

SEQ ID NO: 490217 - protein, 15 aa, Homo sapiens
  CDR3 for alpha chain variable domain of TCR clone 245109 (TRAV21, TRAJ53)
CATLNSGGSNYKLTF

SEQ ID NO: 490218 - protein, 16 aa, Homo sapiens
  CDR3 for beta chain variable domain of TCR clone 245109 (TRBV5-1, TRBJ1-1)
CASSSGGNSLNTEAFF

SEQ ID NO: 490219 - protein, 14 aa, Homo sapiens
  CDR3 for alpha chain variable domain of TCR clone 245110 (TRAV25, TRAJ6)
CAGRESGGSYIPTF

SEQ ID NO: 490220 - protein, 16 aa, Homo sapiens
  CDR3 for beta chain variable domain of TCR clone 245110 (TRBV24-1, TRBJ2-3)
CATSDPGTGATDTQYF

SEQ ID NO: 490221 - protein, 13 aa, Homo sapiens
  CDR3 for alpha chain variable domain of TCR clone 245111 (TRAV27, TRAJ45)
CRSSGGGADGTTF

SEQ ID NO: 490222 - protein, 17 aa, Homo sapiens
  CDR3 for beta chain variable domain of TCR clone 245111 (TRBV11-2, TRBJ2-1)
CASSLYPPGVEYNEQFF

SEQ ID NO: 490223 - protein, 17 aa, Homo sapiens
  CDR3 for alpha chain variable domain of TCR clone 245112 (TRAV3, TRAJ42)
CAVRDRDYGGSQGNLIF

SEQ ID NO: 490224 - protein, 14 aa, Homo sapiens
  CDR3 for beta chain variable domain of TCR clone 245112 (TRBV3-1, TRBJ2-7)
CASSPKTSFYEQYF

SEQ ID NO: 490225 - protein, 17 aa, Homo sapiens
  CDR3 for alpha chain variable domain of TCR clone 245113 (TRAV2, TRAJ36)
CAVEDRGNWGKQPLLWD

SEQ ID NO: 490226 - protein, 14 aa, Homo sapiens
  CDR3 for beta chain variable domain of TCR clone 245113 (TRBV7-9, TRBJ2-5)
CASSLDTAQETLYF

SEQ ID NO: 490227 - protein, 14 aa, Homo sapiens
  CDR3 for alpha chain variable domain of TCR clone 245114 (TRAV26-1, TRAJ26)
CIVRATFLGQNFVF

SEQ ID NO: 490228 - protein, 16 aa, Homo sapiens
  CDR3 for beta chain variable domain of TCR clone 245114 (TRBV24-1, TRBJ2-3)
CATSDPGTGATDTQYF

SEQ ID NO: 490229 - protein, 12 aa, Homo sapiens
  CDR3 for alpha chain variable domain of TCR clone 245115 (TRAV8-6, TRAJ11)
CAVSSVYSTLTF

SEQ ID NO: 490230 - protein, 11 aa, Homo sapiens
  CDR3 for beta chain variable domain of TCR clone 245115 (TRBV20-1, TRBJ1-5)
CSAQGDQPQHF

SEQ ID NO: 490231 - protein, 15 aa, Homo sapiens
  CDR3 for alpha chain variable domain of TCR clone 245116 (TRAV23/DV6, TRAJ37)
CAAGEGSSNTAKLIL

SEQ ID NO: 490232 - protein, 17 aa, Homo sapiens
  CDR3 for beta chain variable domain of TCR clone 245116 (TRBV20-1, TRBJ2-7)
CSATRAGGVAGVEEQYF

SEQ ID NO: 490233 - protein, 17 aa, Homo sapiens
  CDR3 for alpha chain variable domain of TCR clone 245117 (TRAV3, TRAJ28)
CAVREVYSGAGSYQLTF

SEQ ID NO: 490234 - protein, 17 aa, Homo sapiens
  CDR3 for beta chain variable domain of TCR clone 245117 (TRBV20-1, TRBJ2-1)
CSVSSSGLAGSYNEQFF

SEQ ID NO: 490235 - protein, 10 aa, Homo sapiens
  CDR3 for alpha chain variable domain of TCR clone 245118 (TRAV26-2, TRAJ49)
RLNTGNQFYF

SEQ ID NO: 490236 - protein, 16 aa, Homo sapiens
  CDR3 for beta chain variable domain of TCR clone 245118 (TRBV12-4, TRBJ2-5)
CASSFFVRGRQETQYF

SEQ ID NO: 490237 - protein, 12 aa, Homo sapiens
  CDR3 for alpha chain variable domain of TCR clone 245119 (TRAV12-3, TRAJ17)
CAMTLTGNKLTF

SEQ ID NO: 490238 - protein, 14 aa, Homo sapiens
  CDR3 for beta chain variable domain of TCR clone 245119 (TRBV27, TRBJ2-5)
CASSSLKGWETQYF

SEQ ID NO: 490239 - protein, 13 aa, Homo sapiens
  CDR3 for alpha chain variable domain of TCR clone 245120 (TRAV1-2, TRAJ9)
CAALNTGGFKTIY

SEQ ID NO: 490240 - protein, 12 aa, Homo sapiens
  CDR3 for beta chain variable domain of TCR clone 245120 (TRBV11-3, TRBJ1-1)
CASSHRQGEAFF

SEQ ID NO: 490241 - protein, 14 aa, Homo sapiens
  CDR3 for alpha chain variable domain of TCR clone 245121 (TRAV1-2, TRAJ16)
CAVNRFSDGQTLLF

SEQ ID NO: 490242 - protein, 11 aa, Homo sapiens
  CDR3 for beta chain variable domain of TCR clone 245121 (TRBV11-2, TRBJ2-2)
CASSLPGELFF

SEQ ID NO: 490243 - protein, 13 aa, Homo sapiens
  CDR3 for alpha chain variable domain of TCR clone 245122 (TRAV21, TRAJ20)
CAVGLRVDYKLSF

SEQ ID NO: 490244 - protein, 18 aa, Homo sapiens
  CDR3 for beta chain variable domain of TCR clone 245122 (TRBV7-6, TRBJ2-1)
CASSPRTSGMSSDNEQFF

SEQ ID NO: 490245 - protein, 15 aa, Homo sapiens
  CDR3 for alpha chain variable domain of TCR clone 245123 (TRAV29/DV5, TRAJ29)
CAASERSAGNTPLVV

SEQ ID NO: 490246 - protein, 17 aa, Homo sapiens
  CDR3 for beta chain variable domain of TCR clone 245123 (TRBV4-1, TRBJ1-4)
CASSQEGPRGVEEKLFF

SEQ ID NO: 490247 - protein, 15 aa, Homo sapiens
  CDR3 for alpha chain variable domain of TCR clone 245124 (TRAV3, TRAJ36)
CAVRASQTGANNLFF

SEQ ID NO: 490248 - protein, 12 aa, Homo sapiens
  CDR3 for beta chain variable domain of TCR clone 245124 (TRBV5-5, TRBJ2-5)
CASSYFGETQYF

SEQ ID NO: 490249 - protein, 14 aa, Homo sapiens
  CDR3 for alpha chain variable domain of TCR clone 245125 (TRAV1-2, TRAJ8)
CAVREDTGFQKRVF

SEQ ID NO: 490250 - protein, 13 aa, Homo sapiens
  CDR3 for beta chain variable domain of TCR clone 245125 (TRBV10-3, TRBJ1-2)
CAISERDSYGYTF

SEQ ID NO: 490251 - protein, 15 aa, Homo sapiens
  CDR3 for alpha chain variable domain of TCR clone 245126 (TRAV21, TRAJ53)
CATLNSGGCNYKLTF

SEQ ID NO: 490252 - protein, 14 aa, Homo sapiens
  CDR3 for beta chain variable domain of TCR clone 245126 (TRBV7-2, TRBJ2-7)
CASSLPPGQGPQYF

SEQ ID NO: 490253 - protein, 12 aa, Homo sapiens
  CDR3 for alpha chain variable domain of TCR clone 245127 (TRAV23/DV6, TRAJ33)
CSAEDSNYQLIW

SEQ ID NO: 490254 - protein, 14 aa, Homo sapiens
  CDR3 for beta chain variable domain of TCR clone 245127 (TRBV18, TRBJ1-5)
CASSRQQRNQPQHF

SEQ ID NO: 490255 - protein, 18 aa, Homo sapiens
  CDR3 for alpha chain variable domain of TCR clone 245128 (TRAV13-1, TRAJ52)
CAAKNPNAGGTSHGKLTF

SEQ ID NO: 490256 - protein, 15 aa, Homo sapiens
  CDR3 for beta chain variable domain of TCR clone 245128 (TRBV6-1, TRBJ2-3)
CASSERGGITDTQCF

SEQ ID NO: 490257 - protein, 16 aa, Homo sapiens
  CDR3 for alpha chain variable domain of TCR clone 245129 (TRAV3, TRAJ37)
CAVRVRGSGNTGKLIF

SEQ ID NO: 490258 - protein, 14 aa, Homo sapiens
  CDR3 for beta chain variable domain of TCR clone 245129 (TRBV2, TRBJ2-1)
CASSEARQGVSEFF

SEQ ID NO: 490259 - protein, 16 aa, Homo sapiens
  CDR3 for alpha chain variable domain of TCR clone 245130 (TRAV8-6, TRAJ4)
CAVSPTFSGGYNKLIF

SEQ ID NO: 490260 - protein, 13 aa, Homo sapiens
  CDR3 for beta chain variable domain of TCR clone 245130 (TRBV19, TRBJ2-7)
CASSIDRTYEQYF

SEQ ID NO: 490261 - protein, 18 aa, Homo sapiens
  CDR3 for alpha chain variable domain of TCR clone 245131 (TRAV13-1, TRAJ52)
CAAKNTNAGGTSYGNLTF

SEQ ID NO: 490262 - protein, 14 aa, Homo sapiens
  CDR3 for beta chain variable domain of TCR clone 245131 (TRBV7-8, TRBJ2-3)
CASSLEAGTDTQYF

SEQ ID NO: 490263 - protein, 12 aa, Homo sapiens
  CDR3 for alpha chain variable domain of TCR clone 245132 (TRAV3, TRAJ20)
CAVRDGDYKLSF

SEQ ID NO: 490264 - protein, 13 aa, Homo sapiens
  CDR3 for beta chain variable domain of TCR clone 245132 (TRBV9, TRBJ2-1)
CASSVGQGGEQVF

SEQ ID NO: 490265 - protein, 16 aa, Homo sapiens
  CDR3 for alpha chain variable domain of TCR clone 245133 (TRAV3, TRAJ10)
CAVRGMRAGGGNKLNF

SEQ ID NO: 490266 - protein, 13 aa, Homo sapiens
  CDR3 for beta chain variable domain of TCR clone 245133 (TRBV27, TRBJ1-1)
CASSLSIGAEAFF

SEQ ID NO: 490267 - protein, 12 aa, Homo sapiens
  CDR3 for alpha chain variable domain of TCR clone 245134 (TRAV13-1, TRAJ49)
CAASIRSNQFYF

SEQ ID NO: 490268 - protein, 13 aa, Homo sapiens
  CDR3 for beta chain variable domain of TCR clone 245134 (TRBV7-9, TRBJ1-2)
CASSLKQNYGYTF

SEQ ID NO: 490269 - protein, 12 aa, Homo sapiens
  CDR3 for alpha chain variable domain of TCR clone 245135 (TRAV16, TRAJ10)
CSRTGGGNKLTF

SEQ ID NO: 490270 - protein, 14 aa, Homo sapiens
  CDR3 for beta chain variable domain of TCR clone 245135 (TRBV18, TRBJ2-3)
CASSRDRGTDTQYF

SEQ ID NO: 490271 - protein, 15 aa, Homo sapiens
  CDR3 for alpha chain variable domain of TCR clone 245136 (TRAV13-1, TRAJ43)
CAVTPELVGNNDMRF

SEQ ID NO: 490272 - protein, 15 aa, Homo sapiens
  CDR3 for beta chain variable domain of TCR clone 245136 (TRBV10-2, TRBJ2-6)
CASSEQGTGANVLSF

SEQ ID NO: 490273 - protein, 17 aa, Homo sapiens
  CDR3 for alpha chain variable domain of TCR clone 245137 (TRAV3, TRAJ6)
CDVRDGPRAGGSYIPTF

SEQ ID NO: 490274 - protein, 14 aa, Homo sapiens
  CDR3 for beta chain variable domain of TCR clone 245137 (TRBV7-2, TRBJ2-7)
RASSPKTSFYEQYF

SEQ ID NO: 490275 - protein, 13 aa, Homo sapiens
  CDR3 for alpha chain variable domain of TCR clone 245138 (TRAV2, TRAJ40)
CAVVTSGTYKYIF

SEQ ID NO: 490276 - protein, 13 aa, Homo sapiens
  CDR3 for beta chain variable domain of TCR clone 245138 (TRBV7-6, TRBJ2-3)
CASSLRSDNTQYF

SEQ ID NO: 490277 - protein, 14 aa, Homo sapiens
  CDR3 for alpha chain variable domain of TCR clone 245139 (TRAV12-3, TRAJ10)
CAMSGTGGGNKLTF

SEQ ID NO: 490278 - protein, 13 aa, Homo sapiens
  CDR3 for beta chain variable domain of TCR clone 245139 (TRBV12-5, TRBJ2-3)
CACGDRQSDTQYF

SEQ ID NO: 490279 - protein, 10 aa, Homo sapiens
  CDR3 for alpha chain variable domain of TCR clone 245140 (TRAV13-2, TRAJ49)
CAATGNQFYF

SEQ ID NO: 490280 - protein, 13 aa, Homo sapiens
  CDR3 for beta chain variable domain of TCR clone 245140 (TRBV10-3, TRBJ1-2)
CAISERDSYGYTF

SEQ ID NO: 490281 - protein, 12 aa, Homo sapiens
  CDR3 for alpha chain variable domain of TCR clone 245141 (TRAV27, TRAJ33)
CAGDGSNYQLIW

SEQ ID NO: 490282 - protein, 15 aa, Homo sapiens
  CDR3 for beta chain variable domain of TCR clone 245141 (TRBV6-5, TRBJ2-7)
CASSYSTSGNYEHYF

SEQ ID NO: 490283 - protein, 14 aa, Homo sapiens
  CDR3 for alpha chain variable domain of TCR clone 245142 (TRAV3, TRAJ21)
CAVRDPYNFKKFYF

SEQ ID NO: 490284 - protein, 19 aa, Homo sapiens
  CDR3 for beta chain variable domain of TCR clone 245142 (TRBV19, TRBJ2-5)
CASSIGQVTDFFLGETQYF

SEQ ID NO: 490285 - protein, 13 aa, Homo sapiens
  CDR3 for alpha chain variable domain of TCR clone 245143 (TRAV12-3, TRAJ30)
CAMSAKWDDKIIF

SEQ ID NO: 490286 - protein, 14 aa, Homo sapiens
  CDR3 for beta chain variable domain of TCR clone 245143 (TRBV9, TRBJ2-7)
CASSVGVGSYEQYF

SEQ ID NO: 490287 - protein, 13 aa, Homo sapiens
  CDR3 for alpha chain variable domain of TCR clone 245144 (TRAV12-3, TRAJ13)
CAMTSGGYRKVTF

SEQ ID NO: 490288 - protein, 13 aa, Homo sapiens
  CDR3 for beta chain variable domain of TCR clone 245144 (TRBV20-1, TRBJ2-2)
CSALSGGAGELFF

SEQ ID NO: 490289 - protein, 14 aa, Homo sapiens
  CDR3 for alpha chain variable domain of TCR clone 245145 (TRAV38-2/DV8, TRAJ29)
CAYRSRSGSTPLVF

SEQ ID NO: 490290 - protein, 17 aa, Homo sapiens
  CDR3 for beta chain variable domain of TCR clone 245145 (TRBV6-1, TRBJ1-2)
CASSGTHSQRGNYGYTF

SEQ ID NO: 490291 - protein, 14 aa, Homo sapiens
  CDR3 for alpha chain variable domain of TCR clone 245146 (TRAV3, TRAJ7)
CAVREEEREQQTRF

SEQ ID NO: 490292 - protein, 14 aa, Homo sapiens
  CDR3 for beta chain variable domain of TCR clone 245146 (TRBV18, TRBJ2-7)
CASSPRGGAYEQNF

SEQ ID NO: 490293 - protein, 14 aa, Homo sapiens
  CDR3 for alpha chain variable domain of TCR clone 245147 (TRAV1-2, TRAJ10)
CAVRVTGGGNKLTF

SEQ ID NO: 490294 - protein, 14 aa, Homo sapiens
  CDR3 for beta chain variable domain of TCR clone 245147 (TRBV19, TRBJ1-2)
CASSLQGQAYGYTF

SEQ ID NO: 490295 - protein, 14 aa, Homo sapiens
  CDR3 for alpha chain variable domain of TCR clone 245148 (TRAV13-2, TRAJ17)
CAENSKAAGNKLTF

SEQ ID NO: 490296 - protein, 15 aa, Homo sapiens
  CDR3 for beta chain variable domain of TCR clone 245148 (TRBV7-9, TRBJ1-6)
CASSSPGRGNSPLHF

SEQ ID NO: 490297 - protein, 13 aa, Homo sapiens
  CDR3 for alpha chain variable domain of TCR clone 245149 (TRAV16, TRAJ58)
CALRWASGSRLTF

SEQ ID NO: 490298 - protein, 12 aa, Homo sapiens
  CDR3 for beta chain variable domain of TCR clone 245149 (TRBV28, TRBJ2-7)
CASSFSSYEQYF

SEQ ID NO: 490299 - protein, 13 aa, Homo sapiens
  CDR3 for alpha chain variable domain of TCR clone 245150 (TRAV13-2, TRAJ48)
CAEMDFGNEKLTF

SEQ ID NO: 490300 - protein, 13 aa, Homo sapiens
  CDR3 for beta chain variable domain of TCR clone 245150 (TRBV7-9, TRBJ1-2)
CASSLKQNYGHTF

SEQ ID NO: 490301 - protein, 15 aa, Homo sapiens
  CDR3 for alpha chain variable domain of TCR clone 245151 (TRAV27, TRAJ38)
CAARSNAGNNRKLSW

SEQ ID NO: 490302 - protein, 13 aa, Homo sapiens
  CDR3 for beta chain variable domain of TCR clone 245151 (TRBV12-5, TRBJ2-3)
CASGDRQSDTQYF

SEQ ID NO: 490303 - protein, 14 aa, Homo sapiens
  CDR3 for alpha chain variable domain of TCR clone 245152 (TRAV35, TRAJ46)
CAGPQKSSGDKLTF

SEQ ID NO: 490304 - protein, 17 aa, Homo sapiens
  CDR3 for beta chain variable domain of TCR clone 245152 (TRBV28, TRBJ2-3)
CASSPTPAGGRVDTQYF

SEQ ID NO: 490305 - protein, 15 aa, Homo sapiens
  CDR3 for alpha chain variable domain of TCR clone 245153 (TRAV3, TRAJ3)
CAVRDRDSSAYKIIF

SEQ ID NO: 490306 - protein, 18 aa, Homo sapiens
  CDR3 for beta chain variable domain of TCR clone 245153 (TRBV25-1, TRBJ1-2)
CASSGLQNGQGLIFGYTF

SEQ ID NO: 490307 - protein, 13 aa, Homo sapiens
  CDR3 for alpha chain variable domain of TCR clone 245154 (TRAV38-1, TRAJ42)
CARWGGSQGNLIF

SEQ ID NO: 490308 - protein, 16 aa, Homo sapiens
  CDR3 for beta chain variable domain of TCR clone 245154 (TRBV7-8, TRBJ2-4)
CASSAERTLAKNIQYF

SEQ ID NO: 490309 - protein, 14 aa, Homo sapiens
  CDR3 for alpha chain variable domain of TCR clone 245155 (TRAV26-1, TRAJ26)
CIVRATFLGQNFVF

SEQ ID NO: 490310 - protein, 16 aa, Homo sapiens
  CDR3 for beta chain variable domain of TCR clone 245155 (TRBV12-4, TRBJ2-7)
CASRSTGTGQSYEQYF

SEQ ID NO: 490311 - protein, 12 aa, Homo sapiens
  CDR3 for alpha chain variable domain of TCR clone 245156 (TRAV13-1, TRAJ21)
CAAEEGFNKFYF

SEQ ID NO: 490312 - protein, 18 aa, Homo sapiens
  CDR3 for beta chain variable domain of TCR clone 245156 (TRBV20-1, TRBJ2-3)
CSASGLAGGPGTTDTQYF

SEQ ID NO: 490313 - protein, 13 aa, Homo sapiens
  CDR3 for alpha chain variable domain of TCR clone 245157 (TRAV21, TRAJ15)
CAVANQAGTARIF

SEQ ID NO: 490314 - protein, 14 aa, Homo sapiens
  CDR3 for beta chain variable domain of TCR clone 245157 (TRBV27, TRBJ2-2)
CASSLGAATGELFF

SEQ ID NO: 490315 - protein, 13 aa, Homo sapiens
  CDR3 for alpha chain variable domain of TCR clone 245158 (TRAV12-3, TRAJ7)
CAMNPYGNNRLAF

SEQ ID NO: 490316 - protein, 16 aa, Homo sapiens
  CDR3 for beta chain variable domain of TCR clone 245158 (TRBV20-1, TRBJ1-4)
CSARPYGGELNEKLFF

SEQ ID NO: 490317 - protein, 14 aa, Homo sapiens
  CDR3 for alpha chain variable domain of TCR clone 245159 (TRAV34, TRAJ44)
CGADGTGTASKLTF

SEQ ID NO: 490318 - protein, 16 aa, Homo sapiens
  CDR3 for beta chain variable domain of TCR clone 245159 (TRBV11-2, TRBJ2-5)
CASSGQGYSPQETQYF

SEQ ID NO: 490319 - protein, 11 aa, Homo sapiens
  CDR3 for alpha chain variable domain of TCR clone 245160 (TRAV3, TRAJ21)
CAVGNFNKFYF

SEQ ID NO: 490320 - protein, 16 aa, Homo sapiens
  CDR3 for beta chain variable domain of TCR clone 245160 (TRBV19, TRBJ2-1)
CANSRRDRAPTMSSSS

SEQ ID NO: 490321 - protein, 12 aa, Homo sapiens
  CDR3 for alpha chain variable domain of TCR clone 245161 (TRAV3, TRAJ20)
CAVRDGDYKLSF

SEQ ID NO: 490322 - protein, 14 aa, Homo sapiens
  CDR3 for beta chain variable domain of TCR clone 245161 (TRBV7-2, TRBJ2-5)
CASSPRGSSETQYF

SEQ ID NO: 490323 - protein, 14 aa, Homo sapiens
  CDR3 for alpha chain variable domain of TCR clone 245162 (TRAV13-1, TRAJ48)
CAASTDFGNEKLTF

SEQ ID NO: 490324 - protein, 14 aa, Homo sapiens
  CDR3 for beta chain variable domain of TCR clone 245162 (TRBV10-3, TRBJ2-5)
CATKGGNNQDTQYF

SEQ ID NO: 490325 - protein, 15 aa, Homo sapiens
  CDR3 for alpha chain variable domain of TCR clone 245163 (TRAV14/DV4, TRAJ12)
CAMREERDSSYKLIF

SEQ ID NO: 490326 - protein, 15 aa, Homo sapiens
  CDR3 for beta chain variable domain of TCR clone 245163 (TRBV6-6, TRBJ2-7)
CASSYSYGGSYEQYF

SEQ ID NO: 490327 - protein, 14 aa, Homo sapiens
  CDR3 for alpha chain variable domain of TCR clone 245164 (TRAV12-2, TRAJ45)
CAVNIGGGADGLTF

SEQ ID NO: 490328 - protein, 12 aa, Homo sapiens
  CDR3 for beta chain variable domain of TCR clone 245164 (TRBV7-3, TRBJ2-1)
CASSLGFNEQFF

SEQ ID NO: 490329 - protein, 13 aa, Homo sapiens
  CDR3 for alpha chain variable domain of TCR clone 245165 (TRAV3, TRAJ40)
CAVSGSGAYKYIF

SEQ ID NO: 490330 - protein, 19 aa, Homo sapiens
  CDR3 for beta chain variable domain of TCR clone 245165 (TRBV19, TRBJ2-5)
CASSIGQVTDFFLGETQYF

SEQ ID NO: 490331 - protein, 14 aa, Homo sapiens
  CDR3 for alpha chain variable domain of TCR clone 245166 (TRAV35, TRAJ33)
CAGSSQDSNYQLIW

SEQ ID NO: 490332 - protein, 14 aa, Homo sapiens
  CDR3 for beta chain variable domain of TCR clone 245166 (TRBV7-6, TRBJ2-3)
CASSLGTVTDTQYF

SEQ ID NO: 490333 - protein, 14 aa, Homo sapiens
  CDR3 for alpha chain variable domain of TCR clone 245167 (TRAV1-2, TRAJ8)
CAVREDTGFQKLVF

SEQ ID NO: 490334 - protein, 16 aa, Homo sapiens
  CDR3 for beta chain variable domain of TCR clone 245167 (TRBV12-4, TRBJ1-5)
CASSRPVGGTNQPQHF

SEQ ID NO: 490335 - protein, 16 aa, Homo sapiens
  CDR3 for alpha chain variable domain of TCR clone 245168 (TRAV38-1, TRAJ32)
CAFMKGGGGATNKRIF

SEQ ID NO: 490336 - protein, 15 aa, Homo sapiens
  CDR3 for beta chain variable domain of TCR clone 245168 (TRBV11-3, TRBJ2-3)
CASSLGRQGVNTQYF

SEQ ID NO: 490337 - protein, 15 aa, Homo sapiens
  CDR3 for alpha chain variable domain of TCR clone 245169 (TRAV2, TRAJ37)
CAVVVRSGNTGNLIF

SEQ ID NO: 490338 - protein, 14 aa, Homo sapiens
  CDR3 for beta chain variable domain of TCR clone 245169 (TRBV19, TRBJ2-7)
CASSMGQGAIEQYF

SEQ ID NO: 490339 - protein, 16 aa, Homo sapiens
  CDR3 for alpha chain variable domain of TCR clone 245170 (TRAV30, TRAJ24)
CGTETVDADSWGKFQF

SEQ ID NO: 490340 - protein, 12 aa, Homo sapiens
  CDR3 for beta chain variable domain of TCR clone 245170 (TRBV7-9, TRBJ1-1)
CASSLVRGEAFF

SEQ ID NO: 490341 - protein, 10 aa, Homo sapiens
  CDR3 for alpha chain variable domain of TCR clone 245171 (TRAV13-1, TRAJ7)
LIGGNNRLAF

SEQ ID NO: 490342 - protein, 16 aa, Homo sapiens
  CDR3 for beta chain variable domain of TCR clone 245171 (TRBV19, TRBJ2-1)
CASSKAGPSSYNEQFF

SEQ ID NO: 490343 - protein, 14 aa, Homo sapiens
  CDR3 for alpha chain variable domain of TCR clone 245172 (TRAV17, TRAJ54)
CATDANPGAQKLVF

SEQ ID NO: 490344 - protein, 12 aa, Homo sapiens
  CDR3 for beta chain variable domain of TCR clone 245172 (TRBV6-3, TRBJ2-1)
CASSGSYNEQFF

SEQ ID NO: 490345 - protein, 13 aa, Homo sapiens
  CDR3 for alpha chain variable domain of TCR clone 245173 (TRAV21, TRAJ57)
CAVTQGGSEKLVF

SEQ ID NO: 490346 - protein, 14 aa, Homo sapiens
  CDR3 for beta chain variable domain of TCR clone 245173 (TRBV7-2, TRBJ2-5)
CASSLSGGGETQYF

SEQ ID NO: 490347 - protein, 16 aa, Homo sapiens
  CDR3 for alpha chain variable domain of TCR clone 245174 (TRAV3, TRAJ37)
CAVRPHGSGNNGKLIF

SEQ ID NO: 490348 - protein, 16 aa, Homo sapiens
  CDR3 for beta chain variable domain of TCR clone 245174 (TRBV9, TRBJ1-2)
CASSVEEKVSPYGYTF

SEQ ID NO: 490349 - protein, 15 aa, Homo sapiens
  CDR3 for alpha chain variable domain of TCR clone 245175 (TRAV29/DV5, TRAJ29)
CAASERSSGNTPLVF

SEQ ID NO: 490350 - protein, 13 aa, Homo sapiens
  CDR3 for beta chain variable domain of TCR clone 245175 (TRBV11-2, TRBJ2-7)
CASSGTRPYEQYF

SEQ ID NO: 490351 - protein, 14 aa, Homo sapiens
  CDR3 for alpha chain variable domain of TCR clone 245176 (TRAV12-1, TRAJ13)
CVVIDSGGYQKITF

SEQ ID NO: 490352 - protein, 15 aa, Homo sapiens
  CDR3 for beta chain variable domain of TCR clone 245176 (TRBV5-5, TRBJ1-5)
CASSSTPGSNQPQHF

SEQ ID NO: 490353 - protein, 19 aa, Homo sapiens
  CDR3 for alpha chain variable domain of TCR clone 245177 (TRAV16, )
CALSGDIQNTEPAVYQLRD

SEQ ID NO: 490354 - protein, 16 aa, Homo sapiens
  CDR3 for beta chain variable domain of TCR clone 245177 (TRBV12-5, TRBJ2-5)
CASGPRTSGNQETQYF

SEQ ID NO: 490355 - protein, 14 aa, Homo sapiens
  CDR3 for alpha chain variable domain of TCR clone 245178 (TRAV1-2, TRAJ16)
CAVNRFSDGQKRLF

SEQ ID NO: 490356 - protein, 14 aa, Homo sapiens
  CDR3 for beta chain variable domain of TCR clone 245178 (TRBV19, TRBJ2-7)
CASSVDSESYEQYF

SEQ ID NO: 490357 - protein, 15 aa, Homo sapiens
  CDR3 for alpha chain variable domain of TCR clone 245179 (TRAV17, TRAJ45)
CATAYSGGGADGLTF

SEQ ID NO: 490358 - protein, 17 aa, Homo sapiens
  CDR3 for beta chain variable domain of TCR clone 245179 (TRBV5-1, TRBJ1-5)
CASSLVGREEGNQTQHF

SEQ ID NO: 490359 - protein, 15 aa, Homo sapiens
  CDR3 for alpha chain variable domain of TCR clone 245180 (TRAV27, TRAJ38)
CAARRNAGNNRKLIW

SEQ ID NO: 490360 - protein, 11 aa, Homo sapiens
  CDR3 for beta chain variable domain of TCR clone 245180 (TRBV12-4, TRBJ2-2)
CAGSSAGELFF

SEQ ID NO: 490361 - protein, 12 aa, Homo sapiens
  CDR3 for alpha chain variable domain of TCR clone 245181 (TRAV21, TRAJ11)
CAAISGYSTLTF

SEQ ID NO: 490362 - protein, 14 aa, Homo sapiens
  CDR3 for beta chain variable domain of TCR clone 245181 (TRBV20-1, TRBJ2-7)
CSAPGLAGVGEQYF

SEQ ID NO: 490363 - protein, 14 aa, Homo sapiens
  CDR3 for alpha chain variable domain of TCR clone 245182 (TRAV17, TRAJ57)
CATDPQGGSEKLVF

SEQ ID NO: 490364 - protein, 16 aa, Homo sapiens
  CDR3 for beta chain variable domain of TCR clone 245182 (TRBV2, TRBJ2-1)
CASSANPRDWQAEQFF

SEQ ID NO: 490365 - protein, 13 aa, Homo sapiens
  CDR3 for alpha chain variable domain of TCR clone 245183 (TRAV8-6, TRAJ49)
CAVITNTGNQFYF

SEQ ID NO: 490366 - protein, 17 aa, Homo sapiens
  CDR3 for beta chain variable domain of TCR clone 245183 (TRBV15, TRBJ1-5)
CATSRAPPGTRNQTQHF

SEQ ID NO: 490367 - protein, 14 aa, Homo sapiens
  CDR3 for alpha chain variable domain of TCR clone 245184 (TRAV23/DV6, TRAJ24)
CAASLSDSWGKLQF

SEQ ID NO: 490368 - protein, 19 aa, Homo sapiens
  CDR3 for beta chain variable domain of TCR clone 245184 (TRBV25-1, TRBJ2-2)
CAILVYRVDRGRKTGELFF

SEQ ID NO: 490369 - protein, 15 aa, Homo sapiens
  CDR3 for alpha chain variable domain of TCR clone 245185 (TRAV8-1, TRAJ6)
CAVNANPGGSYIPTF

SEQ ID NO: 490370 - protein, 12 aa, Homo sapiens
  CDR3 for beta chain variable domain of TCR clone 245185 (TRBV5-7, TRBJ2-7)
CASSGQGGEQYF

SEQ ID NO: 490371 - protein, 14 aa, Homo sapiens
  CDR3 for alpha chain variable domain of TCR clone 245186 (TRAV2, TRAJ3)
CAFRPYSSASKIIF

SEQ ID NO: 490372 - protein, 17 aa, Homo sapiens
  CDR3 for beta chain variable domain of TCR clone 245186 (TRBV7-6, TRBJ2-5)
CASSSPQAGDPSETQYF

SEQ ID NO: 490373 - protein, 12 aa, Homo sapiens
  CDR3 for alpha chain variable domain of TCR clone 245187 (TRAV26-1, TRAJ13)
CIVSRGDQKVTF

SEQ ID NO: 490374 - protein, 16 aa, Homo sapiens
  CDR3 for beta chain variable domain of TCR clone 245187 (TRBV27, TRBJ2-1)
CASSLSKGFGLDEQFF

SEQ ID NO: 490375 - protein, 12 aa, Homo sapiens
  CDR3 for alpha chain variable domain of TCR clone 245188 (TRAV21, TRAJ11)
CAATSGYSPLTF

SEQ ID NO: 490376 - protein, 15 aa, Homo sapiens
  CDR3 for beta chain variable domain of TCR clone 245188 (TRBV20-1, TRBJ2-7)
CSARDRVSGMDEQYF

SEQ ID NO: 490377 - protein, 13 aa, Homo sapiens
  CDR3 for alpha chain variable domain of TCR clone 245189 (TRAV12-3, TRAJ9)
CAMSADGDFKTIF

SEQ ID NO: 490378 - protein, 14 aa, Homo sapiens
  CDR3 for beta chain variable domain of TCR clone 245189 (TRBV6-1, TRBJ2-7)
CASSERVNPYEQYF

SEQ ID NO: 490379 - protein, 15 aa, Homo sapiens
  CDR3 for alpha chain variable domain of TCR clone 245190 (TRAV12-3, TRAJ49)
CAMAVTPNTGNQFFF

SEQ ID NO: 490380 - protein, 18 aa, Homo sapiens
  CDR3 for beta chain variable domain of TCR clone 245190 (TRBV4-1, TRBJ1-5)
CASSQAPRGQGLNQPQHF

SEQ ID NO: 490381 - protein, 18 aa, Homo sapiens
  CDR3 for alpha chain variable domain of TCR clone 245191 (TRAV8-4, TRAJ52)
CAVTRANAGGTSYRKLTV

SEQ ID NO: 490382 - protein, 20 aa, Homo sapiens
  CDR3 for beta chain variable domain of TCR clone 245191 (TRBV19, TRBJ2-1)
CASSISRTVTSTRLNNEQFL

SEQ ID NO: 490383 - protein, 12 aa, Homo sapiens
  CDR3 for alpha chain variable domain of TCR clone 245192 (TRAV12-3, TRAJ21)
CAMFNNFSKFYF

SEQ ID NO: 490384 - protein, 16 aa, Homo sapiens
  CDR3 for beta chain variable domain of TCR clone 245192 (TRBV7-9, TRBJ1-2)
CASSLAPLRAAYGYTV

SEQ ID NO: 490385 - protein, 13 aa, Homo sapiens
  CDR3 for alpha chain variable domain of TCR clone 245193 (TRAV8-3, TRAJ36)
CAVGATGANNLFF

SEQ ID NO: 490386 - protein, 18 aa, Homo sapiens
  CDR3 for beta chain variable domain of TCR clone 245193 (TRBV11-2, TRBJ2-3)
CASSLGGASRGAPNTQYF

SEQ ID NO: 490387 - protein, 12 aa, Homo sapiens
  CDR3 for alpha chain variable domain of TCR clone 245194 (TRAV35, TRAJ31)
CAAVSNNARLMF

SEQ ID NO: 490388 - protein, 14 aa, Homo sapiens
  CDR3 for beta chain variable domain of TCR clone 245194 (TRBV2, TRBJ2-2)
GARSLFGGNGELFF

SEQ ID NO: 490389 - protein, 11 aa, Homo sapiens
  CDR3 for alpha chain variable domain of TCR clone 245195 (TRAV21, TRAJ34)
CAHYNTDKLIF

SEQ ID NO: 490390 - protein, 15 aa, Homo sapiens
  CDR3 for beta chain variable domain of TCR clone 245195 (TRBV7-2, TRBJ1-2)
CASSLVSGGDYGYTF

SEQ ID NO: 490391 - protein, 14 aa, Homo sapiens
  CDR3 for alpha chain variable domain of TCR clone 245196 (TRAV1-2, TRAJ16)
CAVNRFSDGQKLLF

SEQ ID NO: 490392 - protein, 23 aa, Homo sapiens
  CDR3 for beta chain variable domain of TCR clone 245196 (TRBV7-8, TRBJ2-3)
CASRNSGTSGKNWLAQIRSILAQ

SEQ ID NO: 490393 - protein, 15 aa, Homo sapiens
  CDR3 for alpha chain variable domain of TCR clone 245197 (TRAV8-3, TRAJ45)
CASSYSGGAADGLTF

SEQ ID NO: 490394 - protein, 13 aa, Homo sapiens
  CDR3 for beta chain variable domain of TCR clone 245197 (TRBV10-3, TRBJ2-7)
CASKLAVNYEQYF

SEQ ID NO: 490395 - protein, 15 aa, Homo sapiens
  CDR3 for alpha chain variable domain of TCR clone 245198 (TRAV21, TRAJ53)
CATLNSGGSNYKLTF

SEQ ID NO: 490396 - protein, 15 aa, Homo sapiens
  CDR3 for beta chain variable domain of TCR clone 245198 (TRBV4-2, TRBJ2-5)
CASSLSGQGEETQYF

SEQ ID NO: 490397 - protein, 19 aa, Homo sapiens
  CDR3 for alpha chain variable domain of TCR clone 245199 (TRAV13-1, TRAJ52)
CAASPYQNAGGTRYGKLTF

SEQ ID NO: 490398 - protein, 14 aa, Homo sapiens
  CDR3 for beta chain variable domain of TCR clone 245199 (TRBV19, TRBJ2-7)
RASTVQGRPYEQYF

SEQ ID NO: 490399 - protein, 12 aa, Homo sapiens
  CDR3 for alpha chain variable domain of TCR clone 245200 (TRAV12-1, TRAJ20)
CVVNPDDYKLSF

SEQ ID NO: 490400 - protein, 15 aa, Homo sapiens
  CDR3 for beta chain variable domain of TCR clone 245200 (TRBV3-1, TRBJ1-1)
CASSRLNPPNTEAFF

SEQ ID NO: 490401 - protein, 16 aa, Homo sapiens
  CDR3 for alpha chain variable domain of TCR clone 245201 (TRAV12-2, TRAJ45)
CAVNMYAGGGADGLTF

SEQ ID NO: 490402 - protein, 17 aa, Homo sapiens
  CDR3 for beta chain variable domain of TCR clone 245201 (TRBV6-3, TRBJ2-2)
CASSYRGRDFYTGELFF

SEQ ID NO: 490403 - protein, 17 aa, Homo sapiens
  CDR3 for alpha chain variable domain of TCR clone 245202 (TRAV3, TRAJ6)
CAARDGPRAGGSYIPTF

SEQ ID NO: 490404 - protein, 20 aa, Homo sapiens
  CDR3 for beta chain variable domain of TCR clone 245202 (TRBV28, TRBJ2-1)
CASTPIGRAPGLAGGNEQFF

SEQ ID NO: 490405 - protein, 14 aa, Homo sapiens
  CDR3 for alpha chain variable domain of TCR clone 245203 (TRAV13-1, TRAJ24)
CAASRTDSWGKLQF

SEQ ID NO: 490406 - protein, 16 aa, Homo sapiens
  CDR3 for beta chain variable domain of TCR clone 245203 (TRBV20-1, TRBJ1-4)
CSAPGQGLLTNEKLFF

SEQ ID NO: 490407 - protein, 13 aa, Homo sapiens
  CDR3 for alpha chain variable domain of TCR clone 245204 (TRAV12-2, TRAJ12)
CAVNWDSSYKLIF

SEQ ID NO: 490408 - protein, 15 aa, Homo sapiens
  CDR3 for beta chain variable domain of TCR clone 245204 (TRBV5-7, TRBJ2-3)
CASSPGLATTDTQYF

SEQ ID NO: 490409 - protein, 16 aa, Homo sapiens
  CDR3 for alpha chain variable domain of TCR clone 245205 (TRAV12-2, TRAJ32)
CAVNLGQGGATNKHIF

SEQ ID NO: 490410 - protein, 15 aa, Homo sapiens
  CDR3 for beta chain variable domain of TCR clone 245205 (TRBV20-1, TRBJ2-7)
CSARGPLAGGREQYF

SEQ ID NO: 490411 - protein, 11 aa, Homo sapiens
  CDR3 for alpha chain variable domain of TCR clone 245206 (TRAV8-1, TRAJ8)
CAMTGFQKLVF

SEQ ID NO: 490412 - protein, 13 aa, Homo sapiens
  CDR3 for beta chain variable domain of TCR clone 245206 (TRBV7-3, TRBJ2-5)
CASSFRGGETQYF

SEQ ID NO: 490413 - protein, 12 aa, Homo sapiens
  CDR3 for alpha chain variable domain of TCR clone 245207 (TRAV3, TRAJ20)
CAVRDPDYKLSF

SEQ ID NO: 490414 - protein, 13 aa, Homo sapiens
  CDR3 for beta chain variable domain of TCR clone 245207 (TRBV28, TRBJ1-2)
CAGRDRGNYGYTF

SEQ ID NO: 490415 - protein, 12 aa, Homo sapiens
  CDR3 for alpha chain variable domain of TCR clone 245208 (TRAV8-3, TRAJ26)
CAGDNYGQNFFF

SEQ ID NO: 490416 - protein, 13 aa, Homo sapiens
  CDR3 for beta chain variable domain of TCR clone 245208 (TRBV7-9, TRBJ1-1)
CASSLSGETEAFF

SEQ ID NO: 490417 - protein, 13 aa, Homo sapiens
  CDR3 for alpha chain variable domain of TCR clone 245209 (TRAV21, TRAJ57)
CAVTQGGSEKLVF

SEQ ID NO: 490418 - protein, 15 aa, Homo sapiens
  CDR3 for beta chain variable domain of TCR clone 245209 (TRBV28, TRBJ1-4)
CASSLGTGTKEKLFF

SEQ ID NO: 490419 - protein, 14 aa, Homo sapiens
  CDR3 for alpha chain variable domain of TCR clone 245210 (TRAV35, TRAJ50)
CAGHRKTSSDKLIF

SEQ ID NO: 490420 - protein, 13 aa, Homo sapiens
  CDR3 for beta chain variable domain of TCR clone 245210 (TRBV7-7, TRBJ2-3)
CASSLSRADTQYF

SEQ ID NO: 490421 - protein, 11 aa, Homo sapiens
  CDR3 for alpha chain variable domain of TCR clone 245211 (TRAV12-1, TRAJ8)
CVVTGFQKLVF

SEQ ID NO: 490422 - protein, 19 aa, Homo sapiens
  CDR3 for beta chain variable domain of TCR clone 245211 (TRBV12-4, TRBJ2-1)
CASTLAFDPRDKEANEQFF

SEQ ID NO: 490423 - protein, 16 aa, Homo sapiens
  CDR3 for alpha chain variable domain of TCR clone 245212 (TRAV1-2, TRAJ10)
CAVRGVLTGGGNKLTF

SEQ ID NO: 490424 - protein, 15 aa, Homo sapiens
  CDR3 for beta chain variable domain of TCR clone 245212 (TRBV7-2, TRBJ2-1)
CASSLVLAGGNEQFF

SEQ ID NO: 490425 - protein, 13 aa, Homo sapiens
  CDR3 for alpha chain variable domain of TCR clone 245213 (TRAV12-3, TRAJ9)
CAMRNTGGFKTIF

SEQ ID NO: 490426 - protein, 12 aa, Homo sapiens
  CDR3 for beta chain variable domain of TCR clone 245213 (TRBV14, TRBJ2-4)
CASRNLKSIQYF

SEQ ID NO: 490427 - protein, 15 aa, Homo sapiens
  CDR3 for alpha chain variable domain of TCR clone 245214 (TRAV1-2, TRAJ28)
CAVQYSAAGSYQLTF

SEQ ID NO: 490428 - protein, 15 aa, Homo sapiens
  CDR3 for beta chain variable domain of TCR clone 245214 (TRBV7-9, TRBJ1-5)
CASSQGHQPNQPQHF

SEQ ID NO: 490429 - protein, 15 aa, Homo sapiens
  CDR3 for alpha chain variable domain of TCR clone 245215 (TRAV27, TRAJ42)
CAGGNYGGSQGNLIF

SEQ ID NO: 490430 - protein, 15 aa, Homo sapiens
  CDR3 for beta chain variable domain of TCR clone 245215 (TRBV5-4, TRBJ2-1)
CASSPTSGGDVGQFF

SEQ ID NO: 490431 - protein, 11 aa, Homo sapiens
  CDR3 for alpha chain variable domain of TCR clone 245216 (TRAV12-3, TRAJ49)
CAANTGNQFYF

SEQ ID NO: 490432 - protein, 16 aa, Homo sapiens
  CDR3 for beta chain variable domain of TCR clone 245216 (TRBV7-9, TRBJ2-3)
CASSPWREGGTDTQYF

SEQ ID NO: 490433 - protein, 13 aa, Homo sapiens
  CDR3 for alpha chain variable domain of TCR clone 245217 (TRAV27, TRAJ45)
CRSSGGGADGLTF

SEQ ID NO: 490434 - protein, 17 aa, Homo sapiens
  CDR3 for beta chain variable domain of TCR clone 245217 (TRBV11-2, TRBJ2-1)
WASSLSPPGVEYNEQFF

SEQ ID NO: 490435 - protein, 15 aa, Homo sapiens
  CDR3 for alpha chain variable domain of TCR clone 245218 (TRAV12-2, TRAJ53)
CAVNGGGGINYKLTF

SEQ ID NO: 490436 - protein, 17 aa, Homo sapiens
  CDR3 for beta chain variable domain of TCR clone 245218 (TRBV7-3, TRBJ2-3)
RASSLMKRMRGAATQYF

SEQ ID NO: 490437 - protein, 12 aa, Homo sapiens
  CDR3 for alpha chain variable domain of TCR clone 245219 (TRAV22, TRAJ29)
CAPPSGNTPLVS

SEQ ID NO: 490438 - protein, 14 aa, Homo sapiens
  CDR3 for beta chain variable domain of TCR clone 245219 (TRBV11-2, TRBJ2-7)
CASSLGAGAYEQYF

SEQ ID NO: 490439 - protein, 16 aa, Homo sapiens
  CDR3 for alpha chain variable domain of TCR clone 245220 (TRAV23/DV6, TRAJ9)
CAASIWGNTGGFKTIF

SEQ ID NO: 490440 - protein, 12 aa, Homo sapiens
  CDR3 for beta chain variable domain of TCR clone 245220 (TRBV11-2, TRBJ2-1)
CASSVQREGQFF

SEQ ID NO: 490441 - protein, 14 aa, Homo sapiens
  CDR3 for alpha chain variable domain of TCR clone 245221 (TRAV1-2, TRAJ29)
CAVRELTSATPLVF

SEQ ID NO: 490442 - protein, 13 aa, Homo sapiens
  CDR3 for beta chain variable domain of TCR clone 245221 (TRBV10-3, TRBJ2-7)
CASKLAVNYEQYF

SEQ ID NO: 490443 - protein, 15 aa, Homo sapiens
  CDR3 for alpha chain variable domain of TCR clone 245222 (TRAV12-2, TRAJ43)
CAFDMRFGAWTRLTV

SEQ ID NO: 490444 - protein, 18 aa, Homo sapiens
  CDR3 for beta chain variable domain of TCR clone 245222 (TRBV20-1, TRBJ2-3)
CSASGLAGGPGTTDTQYF

SEQ ID NO: 490445 - protein, 13 aa, Homo sapiens
  CDR3 for alpha chain variable domain of TCR clone 245223 (TRAV26-2, TRAJ43)
CILRAVNNNDMRF

SEQ ID NO: 490446 - protein, 12 aa, Homo sapiens
  CDR3 for beta chain variable domain of TCR clone 245223 (TRBV5-1, TRBJ1-1)
CASSFGNTEAFF

SEQ ID NO: 490447 - protein, 13 aa, Homo sapiens
  CDR3 for alpha chain variable domain of TCR clone 245224 (TRAV8-1, TRAJ36)
CAVNSPTGANKLF

SEQ ID NO: 490448 - protein, 15 aa, Homo sapiens
  CDR3 for beta chain variable domain of TCR clone 245224 (TRBV7-2, TRBJ2-3)
CASSLEQGGTDTQYF

SEQ ID NO: 490449 - protein, 12 aa, Homo sapiens
  CDR3 for alpha chain variable domain of TCR clone 245225 (TRAV17, TRAJ12)
CATLRSSYKLIF

SEQ ID NO: 490450 - protein, 16 aa, Homo sapiens
  CDR3 for beta chain variable domain of TCR clone 245225 (TRBV18, TRBJ2-7)
CASSPSTSGRNHEQYF

SEQ ID NO: 490451 - protein, 15 aa, Homo sapiens
  CDR3 for alpha chain variable domain of TCR clone 245226 (TRAV35, TRAJ52)
CARPRGGTSYGKLTF

SEQ ID NO: 490452 - protein, 14 aa, Homo sapiens
  CDR3 for beta chain variable domain of TCR clone 245226 (TRBV20-1, TRBJ2-7)
CSAWTALSSYEQYF

SEQ ID NO: 490453 - protein, 16 aa, Homo sapiens
  CDR3 for alpha chain variable domain of TCR clone 245227 (TRAV12-2, TRAJ10)
CAVNRVLTGGGNKLTF

SEQ ID NO: 490454 - protein, 15 aa, Homo sapiens
  CDR3 for beta chain variable domain of TCR clone 245227 (TRBV7-9, TRBJ1-5)
CASSQGHQPNQPQHF

SEQ ID NO: 490455 - protein, 17 aa, Homo sapiens
  CDR3 for alpha chain variable domain of TCR clone 245228 (TRAV3, TRAJ12)
CAVRDGGRRDSSYKLIF

SEQ ID NO: 490456 - protein, 14 aa, Homo sapiens
  CDR3 for beta chain variable domain of TCR clone 245228 (TRBV19, TRBJ2-1)
CASPTFVLSGEQFF

SEQ ID NO: 490457 - protein, 12 aa, Homo sapiens
  CDR3 for alpha chain variable domain of TCR clone 245229 (TRAV13-1, TRAJ49)
CAAPNTGNQFYF

SEQ ID NO: 490458 - protein, 17 aa, Homo sapiens
  CDR3 for beta chain variable domain of TCR clone 245229 (TRBV25-1, TRBJ2-7)
CASSYARVVFSSYEQYF

SEQ ID NO: 490459 - protein, 17 aa, Homo sapiens
  CDR3 for alpha chain variable domain of TCR clone 245230 (TRAV26-2, TRAJ42)
CILRDESYGGSQGNLIF

SEQ ID NO: 490460 - protein, 15 aa, Homo sapiens
  CDR3 for beta chain variable domain of TCR clone 245230 (TRBV6-6, TRBJ2-7)
CASSYSYGGSCEQYF

SEQ ID NO: 490461 - protein, 13 aa, Homo sapiens
  CDR3 for alpha chain variable domain of TCR clone 245231 (TRAV13-1, TRAJ39)
CAASIWAGNMLTF

SEQ ID NO: 490462 - protein, 12 aa, Homo sapiens
  CDR3 for beta chain variable domain of TCR clone 245231 (TRBV5-1, TRBJ2-7)
CASSLDSYEQYF

SEQ ID NO: 490463 - protein, 11 aa, Homo sapiens
  CDR3 for alpha chain variable domain of TCR clone 245232 (TRAV23/DV6, TRAJ49)
CAVAPVTSSIL

SEQ ID NO: 490464 - protein, 13 aa, Homo sapiens
  CDR3 for beta chain variable domain of TCR clone 245232 (TRBV6-1, TRBJ1-1)
CASSRQGNIEAFF

SEQ ID NO: 490465 - protein, 13 aa, Homo sapiens
  CDR3 for alpha chain variable domain of TCR clone 245233 (TRAV12-1, TRAJ16)
CVVNGQDGQKLLF

SEQ ID NO: 490466 - protein, 13 aa, Homo sapiens
  CDR3 for beta chain variable domain of TCR clone 245233 (TRBV2, TRBJ1-1)
CARNPTGGLHAFF

SEQ ID NO: 490467 - protein, 15 aa, Homo sapiens
  CDR3 for alpha chain variable domain of TCR clone 245234 (TRAV3, TRAJ22)
CAVRGRGGSARQLTF

SEQ ID NO: 490468 - protein, 12 aa, Homo sapiens
  CDR3 for beta chain variable domain of TCR clone 245234 (TRBV7-8, TRBJ2-1)
CASSLGHNEQFF

SEQ ID NO: 490469 - protein, 14 aa, Homo sapiens
  CDR3 for alpha chain variable domain of TCR clone 245235 (TRAV1-2, TRAJ16)
CAVNRFSDGQKVLF

SEQ ID NO: 490470 - protein, 12 aa, Homo sapiens
  CDR3 for beta chain variable domain of TCR clone 245235 (TRBV6-5, TRBJ2-5)
CASSEGSETQYF

SEQ ID NO: 490471 - protein, 12 aa, Homo sapiens
  CDR3 for alpha chain variable domain of TCR clone 245236 (TRAV8-3, TRAJ26)
CAGDNYGQNFVF

SEQ ID NO: 490472 - protein, 13 aa, Homo sapiens
  CDR3 for beta chain variable domain of TCR clone 245236 (TRBV3-1, TRBJ2-2)
CASLARGSGELFF

SEQ ID NO: 490473 - protein, 15 aa, Homo sapiens
  CDR3 for alpha chain variable domain of TCR clone 245237 (TRAV26-1, TRAJ29)
CIVTVEGSGNTPLVF

SEQ ID NO: 490474 - protein, 14 aa, Homo sapiens
  CDR3 for beta chain variable domain of TCR clone 245237 (TRBV18, TRBJ2-5)
CASSPGASQETQYF

SEQ ID NO: 490475 - protein, 10 aa, Homo sapiens
  CDR3 for alpha chain variable domain of TCR clone 245238 (TRAV21, TRAJ34)
CAADTDKLIF

SEQ ID NO: 490476 - protein, 14 aa, Homo sapiens
  CDR3 for beta chain variable domain of TCR clone 245238 (TRBV5-4, TRBJ1-2)
CASSSSGSYGGYTS

SEQ ID NO: 490477 - protein, 14 aa, Homo sapiens
  CDR3 for alpha chain variable domain of TCR clone 245239 (TRAV1-2, TRAJ16)
CAVNRFSDGQKLLF

SEQ ID NO: 490478 - protein, 13 aa, Homo sapiens
  CDR3 for beta chain variable domain of TCR clone 245239 (TRBV7-9, TRBJ2-1)
CASSSSNFNEQFF

SEQ ID NO: 490479 - protein, 14 aa, Homo sapiens
  CDR3 for alpha chain variable domain of TCR clone 245240 (TRAV14/DV4, TRAJ54)
CAMREAPGAQKRVF

SEQ ID NO: 490480 - protein, 15 aa, Homo sapiens
  CDR3 for beta chain variable domain of TCR clone 245240 (TRBV7-2, TRBJ2-2)
CASRRPGQNTGELFF

SEQ ID NO: 490481 - protein, 12 aa, Homo sapiens
  CDR3 for alpha chain variable domain of TCR clone 245241 (TRAV12-3, TRAJ17)
CAMTLTGNKLTF

SEQ ID NO: 490482 - protein, 15 aa, Homo sapiens
  CDR3 for beta chain variable domain of TCR clone 245241 (TRBV20-1, TRBJ2-7)
CSDRDRVSGMDEQSF

SEQ ID NO: 490483 - protein, 14 aa, Homo sapiens
  CDR3 for alpha chain variable domain of TCR clone 245242 (TRAV10, TRAJ29)
CVVSANSGNTPLVF

SEQ ID NO: 490484 - protein, 14 aa, Homo sapiens
  CDR3 for beta chain variable domain of TCR clone 245242 (TRBV2, TRBJ2-1)
CASRAYGIYNEQFF

SEQ ID NO: 490485 - protein, 14 aa, Homo sapiens
  CDR3 for alpha chain variable domain of TCR clone 245243 (TRAV8-1, TRAJ4)
CAVPFSGGYNKLIF

SEQ ID NO: 490486 - protein, 13 aa, Homo sapiens
  CDR3 for beta chain variable domain of TCR clone 245243 (TRBV7-9, TRBJ2-7)
CASSFAGAYEQYF

SEQ ID NO: 490487 - protein, 12 aa, Homo sapiens
  CDR3 for alpha chain variable domain of TCR clone 245244 (TRAV21, TRAJ11)
CAATSGYSTLSF

SEQ ID NO: 490488 - protein, 14 aa, Homo sapiens
  CDR3 for beta chain variable domain of TCR clone 245244 (TRBV20-1, TRBJ2-7)
CSAPELAGVGEQYF

SEQ ID NO: 490489 - protein, 17 aa, Homo sapiens
  CDR3 for alpha chain variable domain of TCR clone 245245 (TRAV4, TRAJ18)
CLVGERSVGSTLGRLYF

SEQ ID NO: 490490 - protein, 14 aa, Homo sapiens
  CDR3 for beta chain variable domain of TCR clone 245245 (TRBV7-8, TRBJ1-2)
CASSPDSLSYGYTF

SEQ ID NO: 490491 - protein, 14 aa, Homo sapiens
  CDR3 for alpha chain variable domain of TCR clone 245246 (TRAV1-2, TRAJ16)
CAVNRFSDGKKLLF

SEQ ID NO: 490492 - protein, 15 aa, Homo sapiens
  CDR3 for beta chain variable domain of TCR clone 245246 (TRBV7-9, TRBJ1-4)
CASSARTGGNEKLFF

SEQ ID NO: 490493 - protein, 13 aa, Homo sapiens
  CDR3 for alpha chain variable domain of TCR clone 245247 (TRAV39, TRAJ17)
CAAQFTAGNTLTF

SEQ ID NO: 490494 - protein, 14 aa, Homo sapiens
  CDR3 for beta chain variable domain of TCR clone 245247 (TRBV27, TRBJ2-5)
CASSSLKGWETQYF

SEQ ID NO: 490495 - protein, 15 aa, Homo sapiens
  CDR3 for alpha chain variable domain of TCR clone 245248 (TRAV8-2, TRAJ40)
CVVLGTTSGTYKYIF

SEQ ID NO: 490496 - protein, 14 aa, Homo sapiens
  CDR3 for beta chain variable domain of TCR clone 245248 (TRBV28, TRBJ2-7)
CASKPGPDLYEQYF

SEQ ID NO: 490497 - protein, 17 aa, Homo sapiens
  CDR3 for alpha chain variable domain of TCR clone 245249 (TRAV3, TRAJ7)
CAVRDMSPLEGTTDSLL

SEQ ID NO: 490498 - protein, 17 aa, Homo sapiens
  CDR3 for beta chain variable domain of TCR clone 245249 (TRBV15, TRBJ1-2)
CATSGREIDVVYYGYTF

SEQ ID NO: 490499 - protein, 12 aa, Homo sapiens
  CDR3 for alpha chain variable domain of TCR clone 245250 (TRAV3, TRAJ43)
CAVRDNNNDMRF

SEQ ID NO: 490500 - protein, 14 aa, Homo sapiens
  CDR3 for beta chain variable domain of TCR clone 245250 (TRBV6-1, TRBJ1-3)
CASVQGGGGNTIYF

SEQ ID NO: 490501 - protein, 14 aa, Homo sapiens
  CDR3 for alpha chain variable domain of TCR clone 245251 (TRAV12-1, TRAJ12)
CVVNDRDSGYKLIF

SEQ ID NO: 490502 - protein, 14 aa, Homo sapiens
  CDR3 for beta chain variable domain of TCR clone 245251 (TRBV12-5, TRBJ2-5)
CASGSRTHQETQYF

SEQ ID NO: 490503 - protein, 11 aa, Homo sapiens
  CDR3 for alpha chain variable domain of TCR clone 245252 (TRAV3, TRAJ21)
CAVGNLNKFYF

SEQ ID NO: 490504 - protein, 16 aa, Homo sapiens
  CDR3 for beta chain variable domain of TCR clone 245252 (TRBV19, TRBJ2-1)
CASSEAGPSSYNEQFF

SEQ ID NO: 490505 - protein, 10 aa, Homo sapiens
  CDR3 for alpha chain variable domain of TCR clone 245253 (TRAV17, TRAJ35)
CATAEGGIGF

SEQ ID NO: 490506 - protein, 16 aa, Homo sapiens
  CDR3 for beta chain variable domain of TCR clone 245253 (TRBV6-5, TRBJ2-7)
CASSSDPTSGFYERYF

SEQ ID NO: 490507 - protein, 13 aa, Homo sapiens
  CDR3 for alpha chain variable domain of TCR clone 245254 (TRAV12-3, TRAJ54)
CTMTLQGAQKLVF

SEQ ID NO: 490508 - protein, 14 aa, Homo sapiens
  CDR3 for beta chain variable domain of TCR clone 245254 (TRBV4-1, TRBJ2-2)
CASSQAVNTGELFF

SEQ ID NO: 490509 - protein, 18 aa, Homo sapiens
  CDR3 for alpha chain variable domain of TCR clone 245255 (TRAV12-3, TRAJ52)
CAMSVGGAGGTSYGKLTF

SEQ ID NO: 490510 - protein, 15 aa, Homo sapiens
  CDR3 for beta chain variable domain of TCR clone 245255 (TRBV27, TRBJ1-6)
CASSFDRGLGSDLHF

SEQ ID NO: 490511 - protein, 13 aa, Homo sapiens
  CDR3 for alpha chain variable domain of TCR clone 245256 (TRAV8-3, TRAJ28)
CAVGAVGSYQLTF

SEQ ID NO: 490512 - protein, 13 aa, Homo sapiens
  CDR3 for beta chain variable domain of TCR clone 245256 (TRBV29-1, TRBJ2-1)
CSVEGGRVSEQFF

SEQ ID NO: 490513 - protein, 12 aa, Homo sapiens
  CDR3 for alpha chain variable domain of TCR clone 245257 (TRAV20, TRAJ56)
CAVPGANSKLTF

SEQ ID NO: 490514 - protein, 14 aa, Homo sapiens
  CDR3 for beta chain variable domain of TCR clone 245257 (TRBV20-1, TRBJ2-5)
CSALVPGYQETQYF

SEQ ID NO: 490515 - protein, 16 aa, Homo sapiens
  CDR3 for alpha chain variable domain of TCR clone 245258 (TRAV12-2, TRAJ32)
CAVNLGQGGATNKLIF

SEQ ID NO: 490516 - protein, 15 aa, Homo sapiens
  CDR3 for beta chain variable domain of TCR clone 245258 (TRBV20-1, TRBJ2-7)
CSARGPLAGGRQQYF

SEQ ID NO: 490517 - protein, 11 aa, Homo sapiens
  CDR3 for alpha chain variable domain of TCR clone 245259 (TRAV3, TRAJ21)
CAVGNFNNFYF

SEQ ID NO: 490518 - protein, 16 aa, Homo sapiens
  CDR3 for beta chain variable domain of TCR clone 245259 (TRBV7-6, TRBJ2-1)
CASSAPGPSSYNEQFF

SEQ ID NO: 490519 - protein, 16 aa, Homo sapiens
  CDR3 for alpha chain variable domain of TCR clone 245260 (TRAV4, TRAJ9)
CLVGDPNRPGGFKTIF

SEQ ID NO: 490520 - protein, 14 aa, Homo sapiens
  CDR3 for beta chain variable domain of TCR clone 245260 (TRBV20-1, TRBJ1-1)
RSAQTRIGGTEAFF

SEQ ID NO: 490521 - protein, 15 aa, Homo sapiens
  CDR3 for alpha chain variable domain of TCR clone 245261 (TRAV8-6, TRAJ6)
CAVSGESGGSYIPTF

SEQ ID NO: 490522 - protein, 14 aa, Homo sapiens
  CDR3 for beta chain variable domain of TCR clone 245261 (TRBV9, TRBJ2-4)
CASSPSGTSGFQNF

SEQ ID NO: 490523 - protein, 15 aa, Homo sapiens
  CDR3 for alpha chain variable domain of TCR clone 245262 (TRAV3, TRAJ22)
CAVRDRGGSARQLTF

SEQ ID NO: 490524 - protein, 15 aa, Homo sapiens
  CDR3 for beta chain variable domain of TCR clone 245262 (TRBV7-3, TRBJ2-2)
CASSETGQGPGELFF

SEQ ID NO: 490525 - protein, 11 aa, Homo sapiens
  CDR3 for alpha chain variable domain of TCR clone 245263 (TRAV2, TRAJ33)
CAVESNYQLIW

SEQ ID NO: 490526 - protein, 13 aa, Homo sapiens
  CDR3 for beta chain variable domain of TCR clone 245263 (TRBV10-3, TRBJ2-3)
CAIRDTGADTQYF

SEQ ID NO: 490527 - protein, 15 aa, Homo sapiens
  CDR3 for alpha chain variable domain of TCR clone 245264 (TRAV17, TRAJ57)
SATGPSQGGSEKLVF

SEQ ID NO: 490528 - protein, 16 aa, Homo sapiens
  CDR3 for beta chain variable domain of TCR clone 245264 (TRBV12-4, TRBJ1-5)
CASSRPVGGSNQPQHF

SEQ ID NO: 490529 - protein, 21 aa, Homo sapiens
  CDR3 for alpha chain variable domain of TCR clone 245265 (TRAV8-3, TRAJ6)
CAVGGEEATYLHLEEEPALLF

SEQ ID NO: 490530 - protein, 17 aa, Homo sapiens
  CDR3 for beta chain variable domain of TCR clone 245265 (TRBV7-2, TRBJ2-3)
CASSLAGGLTGTAGQYF

SEQ ID NO: 490531 - protein, 12 aa, Homo sapiens
  CDR3 for alpha chain variable domain of TCR clone 245266 (TRAV17, TRAJ20)
CATDSNDYKLSF

SEQ ID NO: 490532 - protein, 17 aa, Homo sapiens
  CDR3 for beta chain variable domain of TCR clone 245266 (TRBV11-1, TRBJ2-7)
CASSLTGSFGLDYEQYF

SEQ ID NO: 490533 - protein, 18 aa, Homo sapiens
  CDR3 for alpha chain variable domain of TCR clone 245267 (TRAV21, TRAJ52)
CAVRPSPAGGTSYGKLTF

SEQ ID NO: 490534 - protein, 16 aa, Homo sapiens
  CDR3 for beta chain variable domain of TCR clone 245267 (TRBV13, TRBJ2-3)
CQQPLQGSGGENTQYF

SEQ ID NO: 490535 - protein, 15 aa, Homo sapiens
  CDR3 for alpha chain variable domain of TCR clone 245268 (TRAV12-2, TRAJ53)
CAVNTGGGSNYKLTF

SEQ ID NO: 490536 - protein, 13 aa, Homo sapiens
  CDR3 for beta chain variable domain of TCR clone 245268 (TRBV15, TRBJ1-6)
CATSGGLNSPLHF

SEQ ID NO: 490537 - protein, 13 aa, Homo sapiens
  CDR3 for alpha chain variable domain of TCR clone 245269 (TRAV12-3, TRAJ5)
CAMRPTGRRALTF

SEQ ID NO: 490538 - protein, 15 aa, Homo sapiens
  CDR3 for beta chain variable domain of TCR clone 245269 (TRBV19, TRBJ2-7)
CASSIGGGLVNEQYF

SEQ ID NO: 490539 - protein, 12 aa, Homo sapiens
  CDR3 for alpha chain variable domain of TCR clone 245270 (TRAV1-2, TRAJ33)
CAALDSNYQLIL

SEQ ID NO: 490540 - protein, 13 aa, Homo sapiens
  CDR3 for beta chain variable domain of TCR clone 245270 (TRBV7-2, TRBJ2-7)
CASSFGQEKEQYF

SEQ ID NO: 490541 - protein, 14 aa, Homo sapiens
  CDR3 for alpha chain variable domain of TCR clone 245271 (TRAV13-1, TRAJ39)
CAASKNNAGNMLTF

SEQ ID NO: 490542 - protein, 15 aa, Homo sapiens
  CDR3 for beta chain variable domain of TCR clone 245271 (TRBV7-9, TRBJ1-6)
CASSSPGRGNSPLHC

SEQ ID NO: 490543 - protein, 15 aa, Homo sapiens
  CDR3 for alpha chain variable domain of TCR clone 245272 (TRAV26-1, TRAJ29)
CIVRVEGSGNTPLVL

SEQ ID NO: 490544 - protein, 14 aa, Homo sapiens
  CDR3 for beta chain variable domain of TCR clone 245272 (TRBV18, TRBJ2-5)
CASPPGVSQETQYF

SEQ ID NO: 490545 - protein, 12 aa, Homo sapiens
  CDR3 for alpha chain variable domain of TCR clone 245273 (TRAV2, TRAJ33)
CAVPDSNYQLIW

SEQ ID NO: 490546 - protein, 17 aa, Homo sapiens
  CDR3 for beta chain variable domain of TCR clone 245273 (TRBV6-5, TRBJ2-3)
CASSYGTSLYKADTQYF

SEQ ID NO: 490547 - protein, 14 aa, Homo sapiens
  CDR3 for alpha chain variable domain of TCR clone 245274 (TRAV29/DV5, TRAJ52)
CAATDGTSYGKLKF

SEQ ID NO: 490548 - protein, 17 aa, Homo sapiens
  CDR3 for beta chain variable domain of TCR clone 245274 (TRBV7-8, TRBJ2-6)
CASSAGTGGAGANVLTF

SEQ ID NO: 490549 - protein, 15 aa, Homo sapiens
  CDR3 for alpha chain variable domain of TCR clone 245275 (TRAV13-1, TRAJ17)
CAASIERAAGNKLTF

SEQ ID NO: 490550 - protein, 14 aa, Homo sapiens
  CDR3 for beta chain variable domain of TCR clone 245275 (TRBV25-1, TRBJ1-1)
CASTHLGGNTEAFF

SEQ ID NO: 490551 - protein, 15 aa, Homo sapiens
  CDR3 for alpha chain variable domain of TCR clone 245276 (TRAV3, TRAJ6)
CAVRDFVGGSYIPTF

SEQ ID NO: 490552 - protein, 15 aa, Homo sapiens
  CDR3 for beta chain variable domain of TCR clone 245276 (TRBV7-9, TRBJ1-4)
CASSRTGGFNEKLFF

SEQ ID NO: 490553 - protein, 16 aa, Homo sapiens
  CDR3 for alpha chain variable domain of TCR clone 245277 (TRAV27, TRAJ48)
TAAQPGDTGLYLSLTF

SEQ ID NO: 490554 - protein, 13 aa, Homo sapiens
  CDR3 for beta chain variable domain of TCR clone 245277 (TRBV7-2, TRBJ2-5)
CASSQTSVETQYF

SEQ ID NO: 490555 - protein, 13 aa, Homo sapiens
  CDR3 for alpha chain variable domain of TCR clone 245278 (TRAV3, TRAJ21)
CAVREPDFNKFYF

SEQ ID NO: 490556 - protein, 13 aa, Homo sapiens
  CDR3 for beta chain variable domain of TCR clone 245278 (TRBV9, TRBJ2-1)
CASSRSGGNEQFF

SEQ ID NO: 490557 - protein, 15 aa, Homo sapiens
  CDR3 for alpha chain variable domain of TCR clone 245279 (TRAV12-3, TRAJ49)
CAMAVTPNTGNQFYF

SEQ ID NO: 490558 - protein, 18 aa, Homo sapiens
  CDR3 for beta chain variable domain of TCR clone 245279 (TRBV4-1, TRBJ1-5)
CASSQDPRGQGLNQPQHF

SEQ ID NO: 490559 - protein, 11 aa, Homo sapiens
  CDR3 for alpha chain variable domain of TCR clone 245280 (TRAV3, TRAJ49)
CAPITGNQFYF

SEQ ID NO: 490560 - protein, 16 aa, Homo sapiens
  CDR3 for beta chain variable domain of TCR clone 245280 (TRBV5-1, TRBJ2-3)
CASSVFPMSSTDTQYL

SEQ ID NO: 490561 - protein, 14 aa, Homo sapiens
  CDR3 for alpha chain variable domain of TCR clone 245281 (TRAV26-1, TRAJ29)
CIVRGTSGNTPLVF

SEQ ID NO: 490562 - protein, 15 aa, Homo sapiens
  CDR3 for beta chain variable domain of TCR clone 245281 (TRBV9, TRBJ2-1)
CASSVAVAGAVEQFF

SEQ ID NO: 490563 - protein, 14 aa, Homo sapiens
  CDR3 for alpha chain variable domain of TCR clone 245282 (TRAV12-2, TRAJ40)
CAVKIPSGTYKYIF

SEQ ID NO: 490564 - protein, 17 aa, Homo sapiens
  CDR3 for beta chain variable domain of TCR clone 245282 (TRBV7-8, TRBJ2-6)
RASSAGTGGAGANVLTF

SEQ ID NO: 490565 - protein, 12 aa, Homo sapiens
  CDR3 for alpha chain variable domain of TCR clone 245283 (TRAV13-1, TRAJ21)
CAAKEGFNKFYF

SEQ ID NO: 490566 - protein, 17 aa, Homo sapiens
  CDR3 for beta chain variable domain of TCR clone 245283 (TRBV20-1, TRBJ2-1)
CSASSSGLAGSYNQQFF

SEQ ID NO: 490567 - protein, 12 aa, Homo sapiens
  CDR3 for alpha chain variable domain of TCR clone 245284 (TRAV13-1, TRAJ3)
CAATGVQQCFQD

SEQ ID NO: 490568 - protein, 14 aa, Homo sapiens
  CDR3 for beta chain variable domain of TCR clone 245284 (TRBV7-3, TRBJ2-1)
CASSLAGGTNEQFF

SEQ ID NO: 490569 - protein, 13 aa, Homo sapiens
  CDR3 for alpha chain variable domain of TCR clone 245285 (TRAV13-1, TRAJ6)
RARGSGGSYIPTF

SEQ ID NO: 490570 - protein, 17 aa, Homo sapiens
  CDR3 for beta chain variable domain of TCR clone 245285 (TRBV7-8, TRBJ2-1)
CASSPPTGTLAYNEQLF

SEQ ID NO: 490571 - protein, 13 aa, Homo sapiens
  CDR3 for alpha chain variable domain of TCR clone 245286 (TRAV2, TRAJ40)
CAVVTSGTYKYIF

SEQ ID NO: 490572 - protein, 16 aa, Homo sapiens
  CDR3 for beta chain variable domain of TCR clone 245286 (TRBV19, TRBJ2-1)
CASSKVGPSSYNEQFF

SEQ ID NO: 490573 - protein, 16 aa, Homo sapiens
  CDR3 for alpha chain variable domain of TCR clone 245287 (TRAV30, TRAJ24)
CGTEIVDADSWGKFQV

SEQ ID NO: 490574 - protein, 13 aa, Homo sapiens
  CDR3 for beta chain variable domain of TCR clone 245287 (TRBV11-3, TRBJ2-7)
CASSFEVGYEQYF

SEQ ID NO: 490575 - protein, 14 aa, Homo sapiens
  CDR3 for alpha chain variable domain of TCR clone 245288 (TRAV13-1, TRAJ3)
CAAAGYSSASKIIF

SEQ ID NO: 490576 - protein, 14 aa, Homo sapiens
  CDR3 for beta chain variable domain of TCR clone 245288 (TRBV19, TRBJ2-5)
CASSSSGIQETQYF

SEQ ID NO: 490577 - protein, 13 aa, Homo sapiens
  CDR3 for alpha chain variable domain of TCR clone 245289 (TRAV21, TRAJ37)
CAVSSGNTGKLIF

SEQ ID NO: 490578 - protein, 17 aa, Homo sapiens
  CDR3 for beta chain variable domain of TCR clone 245289 (TRBV5-1, TRBJ2-5)
CASSLLGLAANQETRYF

SEQ ID NO: 490579 - protein, 17 aa, Homo sapiens
  CDR3 for alpha chain variable domain of TCR clone 245290 (TRAV4, )
CLVVIQNPDPAVYQLRD

SEQ ID NO: 490580 - protein, 16 aa, Homo sapiens
  CDR3 for beta chain variable domain of TCR clone 245290 (TRBV28, TRBJ1-1)
CASSLSGTGWNTEAFF

SEQ ID NO: 490581 - protein, 13 aa, Homo sapiens
  CDR3 for alpha chain variable domain of TCR clone 245291 (TRAV1-1, TRAJ23)
CAVVANQGGKLTF

SEQ ID NO: 490582 - protein, 16 aa, Homo sapiens
  CDR3 for beta chain variable domain of TCR clone 245291 (TRBV5-5, TRBJ1-2)
CASSPTWGRGLYGYTF

SEQ ID NO: 490583 - protein, 13 aa, Homo sapiens
  CDR3 for alpha chain variable domain of TCR clone 245292 (TRAV2, TRAJ21)
CAVEYLNFNKFYF

SEQ ID NO: 490584 - protein, 15 aa, Homo sapiens
  CDR3 for beta chain variable domain of TCR clone 245292 (TRBV28, TRBJ2-5)
CASSPGQGSIETQYF

SEQ ID NO: 490585 - protein, 14 aa, Homo sapiens
  CDR3 for alpha chain variable domain of TCR clone 245293 (TRAV12-1, TRAJ34)
CGEPASYNTDKLIF

SEQ ID NO: 490586 - protein, 14 aa, Homo sapiens
  CDR3 for beta chain variable domain of TCR clone 245293 (TRBV12-5, TRBJ2-5)
CASGSRTHQETQYF

SEQ ID NO: 490587 - protein, 17 aa, Homo sapiens
  CDR3 for alpha chain variable domain of TCR clone 245294 (TRAV26-2, TRAJ42)
CILRDVGYGGSQGNLIF

SEQ ID NO: 490588 - protein, 16 aa, Homo sapiens
  CDR3 for beta chain variable domain of TCR clone 245294 (TRBV12-4, TRBJ2-7)
CASSLIGGAGTYEQYF

SEQ ID NO: 490589 - protein, 13 aa, Homo sapiens
  CDR3 for alpha chain variable domain of TCR clone 245295 (TRAV21, TRAJ27)
CAARPGNAGKSTF

SEQ ID NO: 490590 - protein, 14 aa, Homo sapiens
  CDR3 for beta chain variable domain of TCR clone 245295 (TRBV7-3, TRBJ1-1)
CASSPTGGVSEAFF

SEQ ID NO: 490591 - protein, 10 aa, Homo sapiens
  CDR3 for alpha chain variable domain of TCR clone 245296 (TRAV26-1, TRAJ40)
CIAVTYKYIF

SEQ ID NO: 490592 - protein, 15 aa, Homo sapiens
  CDR3 for beta chain variable domain of TCR clone 245296 (TRBV19, TRBJ2-1)
CASSSPGVPLDEQFF

SEQ ID NO: 490593 - protein, 14 aa, Homo sapiens
  CDR3 for alpha chain variable domain of TCR clone 245297 (TRAV1-2, TRAJ16)
CAVNRFSEGQKLLF

SEQ ID NO: 490594 - protein, 12 aa, Homo sapiens
  CDR3 for beta chain variable domain of TCR clone 245297 (TRBV7-6, TRBJ2-7)
CASSLADSEQYF

SEQ ID NO: 490595 - protein, 13 aa, Homo sapiens
  CDR3 for alpha chain variable domain of TCR clone 245298 (TRAV26-1, TRAJ30)
CIVRVESNDKIIF

SEQ ID NO: 490596 - protein, 15 aa, Homo sapiens
  CDR3 for beta chain variable domain of TCR clone 245298 (TRBV7-3, TRBJ2-1)
CASSPTGGGEVEQFF

SEQ ID NO: 490597 - protein, 13 aa, Homo sapiens
  CDR3 for alpha chain variable domain of TCR clone 245299 (TRAV21, TRAJ27)
CAARPANAGRSTF

SEQ ID NO: 490598 - protein, 14 aa, Homo sapiens
  CDR3 for beta chain variable domain of TCR clone 245299 (TRBV7-6, TRBJ2-3)
CASSLGTVTDTQYF

SEQ ID NO: 490599 - protein, 11 aa, Homo sapiens
  CDR3 for alpha chain variable domain of TCR clone 245300 (TRAV3, TRAJ21)
CAVGNFNKFYF

SEQ ID NO: 490600 - protein, 15 aa, Homo sapiens
  CDR3 for beta chain variable domain of TCR clone 245300 (TRBV19, TRBJ1-1)
CASRETGGVNTEAFF

SEQ ID NO: 490601 - protein, 14 aa, Homo sapiens
  CDR3 for alpha chain variable domain of TCR clone 245301 (TRAV13-2, TRAJ11)
CAETGHSGFSTLTF

SEQ ID NO: 490602 - protein, 11 aa, Homo sapiens
  CDR3 for beta chain variable domain of TCR clone 245301 (TRBV10-3, TRBJ2-7)
CAISEGLEQYF

SEQ ID NO: 490603 - protein, 13 aa, Homo sapiens
  CDR3 for alpha chain variable domain of TCR clone 245302 (TRAV2, TRAJ15)
CAVASQAGTALIF

SEQ ID NO: 490604 - protein, 16 aa, Homo sapiens
  CDR3 for beta chain variable domain of TCR clone 245302 (TRBV12-4, TRBJ2-2)
CASSSQVGGPGGELFF

SEQ ID NO: 490605 - protein, 16 aa, Homo sapiens
  CDR3 for alpha chain variable domain of TCR clone 245303 (TRAV27, TRAJ13)
CAGAKSDSGGYQKVTF

SEQ ID NO: 490606 - protein, 13 aa, Homo sapiens
  CDR3 for beta chain variable domain of TCR clone 245303 (TRBV11-2, TRBJ2-7)
CASSGTRPYEQYF

SEQ ID NO: 490607 - protein, 14 aa, Homo sapiens
  CDR3 for alpha chain variable domain of TCR clone 245304 (TRAV35, TRAJ33)
CAGSSQHSNYQLIC

SEQ ID NO: 490608 - protein, 15 aa, Homo sapiens
  CDR3 for beta chain variable domain of TCR clone 245304 (TRBV20-1, TRBJ2-7)
CSAESGTSGAYEQYF

SEQ ID NO: 490609 - protein, 11 aa, Homo sapiens
  CDR3 for alpha chain variable domain of TCR clone 245305 (TRAV35, TRAJ30)
CAGPGDDKIIF

SEQ ID NO: 490610 - protein, 13 aa, Homo sapiens
  CDR3 for beta chain variable domain of TCR clone 245305 (TRBV12-4, TRBJ2-5)
CASRLAVQETQYF

SEQ ID NO: 490611 - protein, 12 aa, Homo sapiens
  CDR3 for alpha chain variable domain of TCR clone 245306 (TRAV12-1, TRAJ40)
CVVYSGTCKYIF

SEQ ID NO: 490612 - protein, 18 aa, Homo sapiens
  CDR3 for beta chain variable domain of TCR clone 245306 (TRBV11-2, TRBJ2-3)
CASSLVGASRGAPNTQYF

SEQ ID NO: 490613 - protein, 12 aa, Homo sapiens
  CDR3 for alpha chain variable domain of TCR clone 245307 (TRAV1-1, TRAJ39)
CAVPVVGNMLTF

SEQ ID NO: 490614 - protein, 13 aa, Homo sapiens
  CDR3 for beta chain variable domain of TCR clone 245307 (TRBV7-9, TRBJ2-1)
CTSSSSNFNEQFF

SEQ ID NO: 490615 - protein, 14 aa, Homo sapiens
  CDR3 for alpha chain variable domain of TCR clone 245308 (TRAV1-2, TRAJ16)
CAVNRFSDSQKLLF

SEQ ID NO: 490616 - protein, 16 aa, Homo sapiens
  CDR3 for beta chain variable domain of TCR clone 245308 (TRBV18, TRBJ1-4)
CASSLQTVATNEKLFF

SEQ ID NO: 490617 - protein, 16 aa, Homo sapiens
  CDR3 for alpha chain variable domain of TCR clone 245309 (TRAV26-1, TRAJ53)
CIVRVARGGSNYKLKF

SEQ ID NO: 490618 - protein, 12 aa, Homo sapiens
  CDR3 for beta chain variable domain of TCR clone 245309 (TRBV7-9, TRBJ1-5)
CASSPQGQPQHF

SEQ ID NO: 490619 - protein, 12 aa, Homo sapiens
  CDR3 for alpha chain variable domain of TCR clone 245310 (TRAV13-1, TRAJ17)
YAARTAGNKLTF

SEQ ID NO: 490620 - protein, 15 aa, Homo sapiens
  CDR3 for beta chain variable domain of TCR clone 245310 (TRBV7-6, TRBJ1-1)
CASSPQGGANTEAFF

SEQ ID NO: 490621 - protein, 11 aa, Homo sapiens
  CDR3 for alpha chain variable domain of TCR clone 245311 (TRAV23/DV6, TRAJ49)
CAARAGNPFYF

SEQ ID NO: 490622 - protein, 13 aa, Homo sapiens
  CDR3 for beta chain variable domain of TCR clone 245311 (TRBV19, TRBJ1-5)
CASSINFNQPQHF

SEQ ID NO: 490623 - protein, 17 aa, Homo sapiens
  CDR3 for alpha chain variable domain of TCR clone 245312 (TRAV12-3, TRAJ6)
CAMSARGGAGGSYIPTF

SEQ ID NO: 490624 - protein, 19 aa, Homo sapiens
  CDR3 for beta chain variable domain of TCR clone 245312 (TRBV25-1, TRBJ2-2)
CAILVYRVDRGRKTGELFF

SEQ ID NO: 490625 - protein, 13 aa, Homo sapiens
  CDR3 for alpha chain variable domain of TCR clone 245313 (TRAV12-1, TRAJ7)
CVVNMRGTNRLAF

SEQ ID NO: 490626 - protein, 15 aa, Homo sapiens
  CDR3 for beta chain variable domain of TCR clone 245313 (TRBV27, TRBJ2-3)
CASSLGLAATDTQYF

SEQ ID NO: 490627 - protein, 12 aa, Homo sapiens
  CDR3 for alpha chain variable domain of TCR clone 245314 (TRAV13-2, TRAJ23)
CAERHRGGKLIF

SEQ ID NO: 490628 - protein, 14 aa, Homo sapiens
  CDR3 for beta chain variable domain of TCR clone 245314 (TRBV24-1, TRBJ1-1)
CATSIARGDTEAFF

SEQ ID NO: 490629 - protein, 13 aa, Homo sapiens
  CDR3 for alpha chain variable domain of TCR clone 245315 (TRAV12-2, TRAJ15)
CAVFNQAGTALIF

SEQ ID NO: 490630 - protein, 15 aa, Homo sapiens
  CDR3 for beta chain variable domain of TCR clone 245315 (TRBV7-8, TRBJ1-5)
CASSRGGGADQLQHF

SEQ ID NO: 490631 - protein, 14 aa, Homo sapiens
  CDR3 for alpha chain variable domain of TCR clone 245316 (TRAV23/DV6, TRAJ4)
CAANLSGGYNKLIF

SEQ ID NO: 490632 - protein, 12 aa, Homo sapiens
  CDR3 for beta chain variable domain of TCR clone 245316 (TRBV12-4, TRBJ2-7)
CASSLGGYEQYF

SEQ ID NO: 490633 - protein, 13 aa, Homo sapiens
  CDR3 for alpha chain variable domain of TCR clone 245317 (TRAV8-6, TRAJ33)
CAVSEGSNYQLIL

SEQ ID NO: 490634 - protein, 17 aa, Homo sapiens
  CDR3 for beta chain variable domain of TCR clone 245317 (TRBV28, TRBJ2-5)
CASSTPEGDALQETQYF

SEQ ID NO: 490635 - protein, 16 aa, Homo sapiens
  CDR3 for alpha chain variable domain of TCR clone 245318 (TRAV16, TRAJ42)
CALSGLLGGSQGNLIF

SEQ ID NO: 490636 - protein, 15 aa, Homo sapiens
  CDR3 for beta chain variable domain of TCR clone 245318 (TRBV5-1, TRBJ2-1)
CASRPGGLAGNEQFF

SEQ ID NO: 490637 - protein, 13 aa, Homo sapiens
  CDR3 for alpha chain variable domain of TCR clone 245319 (TRAV16, TRAJ22)
CSNRGGSARQLTF

SEQ ID NO: 490638 - protein, 16 aa, Homo sapiens
  CDR3 for beta chain variable domain of TCR clone 245319 (TRBV5-4, TRBJ2-3)
CASQQPGAGGADTQYF

SEQ ID NO: 490639 - protein, 13 aa, Homo sapiens
  CDR3 for alpha chain variable domain of TCR clone 245320 (TRAV13-1, TRAJ5)
CAARVTGRRVLTF

SEQ ID NO: 490640 - protein, 13 aa, Homo sapiens
  CDR3 for beta chain variable domain of TCR clone 245320 (TRBV7-6, TRBJ1-2)
CASSLVADYGYTF

SEQ ID NO: 490641 - protein, 13 aa, Homo sapiens
  CDR3 for alpha chain variable domain of TCR clone 245321 (TRAV35, TRAJ36)
CAGPRIGANNLFF

SEQ ID NO: 490642 - protein, 15 aa, Homo sapiens
  CDR3 for beta chain variable domain of TCR clone 245321 (TRBV6-3, TRBJ2-7)
CASSSPGTVFYEQYF

SEQ ID NO: 490643 - protein, 14 aa, Homo sapiens
  CDR3 for alpha chain variable domain of TCR clone 245322 (TRAV35, TRAJ22)
CAGLRPGSARQLTF

SEQ ID NO: 490644 - protein, 13 aa, Homo sapiens
  CDR3 for beta chain variable domain of TCR clone 245322 (TRBV7-2, TRBJ2-2)
CASSLAVTGELFF

SEQ ID NO: 490645 - protein, 12 aa, Homo sapiens
  CDR3 for alpha chain variable domain of TCR clone 245323 (TRAV14/DV4, TRAJ9)
CVMNPGGFKTIF

SEQ ID NO: 490646 - protein, 16 aa, Homo sapiens
  CDR3 for beta chain variable domain of TCR clone 245323 (TRBV28, TRBJ2-5)
CASSFSPAGGWETQYF

SEQ ID NO: 490647 - protein, 13 aa, Homo sapiens
  CDR3 for alpha chain variable domain of TCR clone 245324 (TRAV3, TRAJ16)
CAVRDRNRQKLLF

SEQ ID NO: 490648 - protein, 15 aa, Homo sapiens
  CDR3 for beta chain variable domain of TCR clone 245324 (TRBV5-1, TRBJ2-1)
CASSPPRAPYNEQFF

SEQ ID NO: 490649 - protein, 14 aa, Homo sapiens
  CDR3 for alpha chain variable domain of TCR clone 245325 (TRAV35, TRAJ22)
CAGLRPGSARQLTF

SEQ ID NO: 490650 - protein, 15 aa, Homo sapiens
  CDR3 for beta chain variable domain of TCR clone 245325 (TRBV10-3, TRBJ2-3)
CAISLTSGGTDTQYF

SEQ ID NO: 490651 - protein, 14 aa, Homo sapiens
  CDR3 for alpha chain variable domain of TCR clone 245326 (TRAV8-1, TRAJ5)
CAVRTDTGRRALTF

SEQ ID NO: 490652 - protein, 16 aa, Homo sapiens
  CDR3 for beta chain variable domain of TCR clone 245326 (TRBV19, TRBJ2-1)
CASSIQGGGSYNEQFF

SEQ ID NO: 490653 - protein, 11 aa, Homo sapiens
  CDR3 for alpha chain variable domain of TCR clone 245327 (TRAV21, TRAJ20)
CAVRDDYKLSF

SEQ ID NO: 490654 - protein, 13 aa, Homo sapiens
  CDR3 for beta chain variable domain of TCR clone 245327 (TRBV7-9, TRBJ2-7)
CASSAGLQYEQYF

SEQ ID NO: 490655 - protein, 10 aa, Homo sapiens
  CDR3 for alpha chain variable domain of TCR clone 245328 (TRAV23/DV6, TRAJ31)
CARGGARLMF

SEQ ID NO: 490656 - protein, 14 aa, Homo sapiens
  CDR3 for beta chain variable domain of TCR clone 245328 (TRBV7-8, TRBJ1-2)
CASSLDSLSYGYTF

SEQ ID NO: 490657 - protein, 12 aa, Homo sapiens
  CDR3 for alpha chain variable domain of TCR clone 245329 (TRAV20, TRAJ37)
CALPSNTGKLIF

SEQ ID NO: 490658 - protein, 15 aa, Homo sapiens
  CDR3 for beta chain variable domain of TCR clone 245329 (TRBV19, TRBJ1-1)
CASTSGQIQNTEAFF

SEQ ID NO: 490659 - protein, 20 aa, Homo sapiens
  CDR3 for alpha chain variable domain of TCR clone 245330 (TRAV25, TRAJ33)
TATQTTDVGTSRGSNYQIIW

SEQ ID NO: 490660 - protein, 14 aa, Homo sapiens
  CDR3 for beta chain variable domain of TCR clone 245330 (TRBV7-2, TRBJ2-5)
CASSTGGELKTQYF

SEQ ID NO: 490661 - protein, 14 aa, Homo sapiens
  CDR3 for alpha chain variable domain of TCR clone 245331 (TRAV26-1, TRAJ38)
CIADNAGNNRKLSW

SEQ ID NO: 490662 - protein, 14 aa, Homo sapiens
  CDR3 for beta chain variable domain of TCR clone 245331 (TRBV19, TRBJ2-7)
CASSMGQGAIEQYF

SEQ ID NO: 490663 - protein, 12 aa, Homo sapiens
  CDR3 for alpha chain variable domain of TCR clone 245332 (TRAV30, TRAJ43)
CGTEERGNDMRF

SEQ ID NO: 490664 - protein, 13 aa, Homo sapiens
  CDR3 for beta chain variable domain of TCR clone 245332 (TRBV7-9, TRBJ2-3)
CASSPGSTDTQDF

SEQ ID NO: 490665 - protein, 10 aa, Homo sapiens
  CDR3 for alpha chain variable domain of TCR clone 245333 (TRAV25, TRAJ20)
CAVNDYKFSF

SEQ ID NO: 490666 - protein, 17 aa, Homo sapiens
  CDR3 for beta chain variable domain of TCR clone 245333 (TRBV5-4, TRBJ2-1)
CASSSAGGRGHYNEQFF

SEQ ID NO: 490667 - protein, 12 aa, Homo sapiens
  CDR3 for alpha chain variable domain of TCR clone 245334 (TRAV3, TRAJ20)
CAVRDPDYKLSF

SEQ ID NO: 490668 - protein, 13 aa, Homo sapiens
  CDR3 for beta chain variable domain of TCR clone 245334 (TRBV9, TRBJ2-1)
CASSVGQGGEQFV

SEQ ID NO: 490669 - protein, 15 aa, Homo sapiens
  CDR3 for alpha chain variable domain of TCR clone 245335 (TRAV21, TRAJ53)
CATLNSGGSNYKLTF

SEQ ID NO: 490670 - protein, 14 aa, Homo sapiens
  CDR3 for beta chain variable domain of TCR clone 245335 (TRBV11-2, TRBJ2-7)
CASSLGAGAYEQYF

SEQ ID NO: 490671 - protein, 17 aa, Homo sapiens
  CDR3 for alpha chain variable domain of TCR clone 245336 (TRAV26-1, TRAJ37)
CIVRVITVSSNTGKLIF

SEQ ID NO: 490672 - protein, 14 aa, Homo sapiens
  CDR3 for beta chain variable domain of TCR clone 245336 (TRBV7-2, TRBJ2-5)
CASSPRGSSETQYF

SEQ ID NO: 490673 - protein, 14 aa, Homo sapiens
  CDR3 for alpha chain variable domain of TCR clone 245337 (TRAV3, TRAJ8)
CAALMNTGFQKLEF

SEQ ID NO: 490674 - protein, 15 aa, Homo sapiens
  CDR3 for beta chain variable domain of TCR clone 245337 (TRBV28, TRBJ2-5)
CASSLGLGNQETQYF

SEQ ID NO: 490675 - protein, 13 aa, Homo sapiens
  CDR3 for alpha chain variable domain of TCR clone 245338 (TRAV3, TRAJ21)
CAVREPDFNKFYF

SEQ ID NO: 490676 - protein, 15 aa, Homo sapiens
  CDR3 for beta chain variable domain of TCR clone 245338 (TRBV11-3, TRBJ2-3)
CASPKDGREGDTQYF

SEQ ID NO: 490677 - protein, 15 aa, Homo sapiens
  CDR3 for alpha chain variable domain of TCR clone 245339 (TRAV2, TRAJ15)
CAVEDRGQAGTALIF

SEQ ID NO: 490678 - protein, 16 aa, Homo sapiens
  CDR3 for beta chain variable domain of TCR clone 245339 (TRBV7-3, TRBJ2-1)
CASSLEGYRSYNEQFF

SEQ ID NO: 490679 - protein, 13 aa, Homo sapiens
  CDR3 for alpha chain variable domain of TCR clone 245340 (TRAV23/DV6, TRAJ58)
CAASEIGGSRLTF

SEQ ID NO: 490680 - protein, 15 aa, Homo sapiens
  CDR3 for beta chain variable domain of TCR clone 245340 (TRBV19, TRBJ1-1)
CASTSGQSQNTEAFF

SEQ ID NO: 490681 - protein, 13 aa, Homo sapiens
  CDR3 for alpha chain variable domain of TCR clone 245341 (TRAV26-2, TRAJ37)
CIHGSSNTGKLIF

SEQ ID NO: 490682 - protein, 13 aa, Homo sapiens
  CDR3 for beta chain variable domain of TCR clone 245341 (TRBV19, TRBJ1-2)
CASSVPGQDGYTF

SEQ ID NO: 490683 - protein, 14 aa, Homo sapiens
  CDR3 for alpha chain variable domain of TCR clone 245342 (TRAV23/DV6, TRAJ10)
CAASLQTGANKLTF

SEQ ID NO: 490684 - protein, 20 aa, Homo sapiens
  CDR3 for beta chain variable domain of TCR clone 245342 (TRBV7-8, TRBJ2-2)
CASSHLFPGPTIHITGELFF

SEQ ID NO: 490685 - protein, 13 aa, Homo sapiens
  CDR3 for alpha chain variable domain of TCR clone 245343 (TRAV12-1, TRAJ6)
CVVFPGGSYIPAF

SEQ ID NO: 490686 - protein, 16 aa, Homo sapiens
  CDR3 for beta chain variable domain of TCR clone 245343 (TRBV12-5, TRBJ2-5)
CASGPRTSGNQETKYF

SEQ ID NO: 490687 - protein, 14 aa, Homo sapiens
  CDR3 for alpha chain variable domain of TCR clone 245344 (TRAV17, TRAJ57)
CATDTQGGSEKLVF

SEQ ID NO: 490688 - protein, 18 aa, Homo sapiens
  CDR3 for beta chain variable domain of TCR clone 245344 (TRBV20-1, TRBJ2-3)
CSASGLAGGPGTTDTQYF

SEQ ID NO: 490689 - protein, 16 aa, Homo sapiens
  CDR3 for alpha chain variable domain of TCR clone 245345 (TRAV3, TRAJ37)
CAVRVRGSGNTGNLIF

SEQ ID NO: 490690 - protein, 16 aa, Homo sapiens
  CDR3 for beta chain variable domain of TCR clone 245345 (TRBV11-2, TRBJ2-7)
CASSPTTGGVSYEQYF

SEQ ID NO: 490691 - protein, 14 aa, Homo sapiens
  CDR3 for alpha chain variable domain of TCR clone 245346 (TRAV35, TRAJ22)
CAGLRPGSARQLTF

SEQ ID NO: 490692 - protein, 13 aa, Homo sapiens
  CDR3 for beta chain variable domain of TCR clone 245346 (TRBV20-1, TRBJ2-7)
CSATHTSGYEQYV

SEQ ID NO: 490693 - protein, 14 aa, Homo sapiens
  CDR3 for alpha chain variable domain of TCR clone 245347 (TRAV3, TRAJ6)
CAVRDWGGSYIPTY

SEQ ID NO: 490694 - protein, 15 aa, Homo sapiens
  CDR3 for beta chain variable domain of TCR clone 245347 (TRBV5-1, TRBJ2-1)
CASSPPRAPYNEQFF

SEQ ID NO: 490695 - protein, 14 aa, Homo sapiens
  CDR3 for alpha chain variable domain of TCR clone 245348 (TRAV13-1, TRAJ5)
CAAHPDTGRRALTF

SEQ ID NO: 490696 - protein, 13 aa, Homo sapiens
  CDR3 for beta chain variable domain of TCR clone 245348 (TRBV12-4, TRBJ1-1)
CASSPGTGFEAFF

SEQ ID NO: 490697 - protein, 14 aa, Homo sapiens
  CDR3 for alpha chain variable domain of TCR clone 245349 (TRAV1-2, TRAJ8)
CAVREDTGFQKLVF

SEQ ID NO: 490698 - protein, 12 aa, Homo sapiens
  CDR3 for beta chain variable domain of TCR clone 245349 (TRBV6-3, TRBJ2-7)
CASSEPGFELYF

SEQ ID NO: 490699 - protein, 16 aa, Homo sapiens
  CDR3 for alpha chain variable domain of TCR clone 245350 (TRAV12-1, TRAJ45)
CVVIRYSGGGADGLTF

SEQ ID NO: 490700 - protein, 12 aa, Homo sapiens
  CDR3 for beta chain variable domain of TCR clone 245350 (TRBV6-5, TRBJ2-2)
CASRQIIGELFL

SEQ ID NO: 490701 - protein, 15 aa, Homo sapiens
  CDR3 for alpha chain variable domain of TCR clone 245351 (TRAV21, TRAJ53)
CATLNRGGSNYKLTF

SEQ ID NO: 490702 - protein, 14 aa, Homo sapiens
  CDR3 for beta chain variable domain of TCR clone 245351 (TRBV12-4, TRBJ2-7)
CASSRQGRSYEQYF

SEQ ID NO: 490703 - protein, 14 aa, Homo sapiens
  CDR3 for alpha chain variable domain of TCR clone 245352 (TRAV8-4, TRAJ29)
CAVSAVEGTTPLVF

SEQ ID NO: 490704 - protein, 13 aa, Homo sapiens
  CDR3 for beta chain variable domain of TCR clone 245352 (TRBV12-4, TRBJ2-7)
CASSFQGRYEQYF

SEQ ID NO: 490705 - protein, 15 aa, Homo sapiens
  CDR3 for alpha chain variable domain of TCR clone 245353 (TRAV27, TRAJ38)
CAARRNAGNNRKLIW

SEQ ID NO: 490706 - protein, 15 aa, Homo sapiens
  CDR3 for beta chain variable domain of TCR clone 245353 (TRBV20-1, TRBJ2-6)
CSARDRGPGANVLTF

SEQ ID NO: 490707 - protein, 12 aa, Homo sapiens
  CDR3 for alpha chain variable domain of TCR clone 245354 (TRAV12-3, TRAJ17)
CAMTLTGNKLTF

SEQ ID NO: 490708 - protein, 16 aa, Homo sapiens
  CDR3 for beta chain variable domain of TCR clone 245354 (TRBV12-5, TRBJ2-1)
CASGLAGRDAYNEQFF

SEQ ID NO: 490709 - protein, 13 aa, Homo sapiens
  CDR3 for alpha chain variable domain of TCR clone 245355 (TRAV21, TRAJ27)
CAARPGNAGKSTF

SEQ ID NO: 490710 - protein, 14 aa, Homo sapiens
  CDR3 for beta chain variable domain of TCR clone 245355 (TRBV11-1, TRBJ2-3)
CASSLGTVTDTQYF

SEQ ID NO: 490711 - protein, 17 aa, Homo sapiens
  CDR3 for alpha chain variable domain of TCR clone 245356 (TRAV13-1, TRAJ52)
CAASSGAGGTSYGKLTF

SEQ ID NO: 490712 - protein, 11 aa, Homo sapiens
  CDR3 for beta chain variable domain of TCR clone 245356 (TRBV7-9, TRBJ2-3)
CASSGPDTQYF

SEQ ID NO: 490713 - protein, 13 aa, Homo sapiens
  CDR3 for alpha chain variable domain of TCR clone 245357 (TRAV12-2, TRAJ17)
CAVSKAAGNKLTF

SEQ ID NO: 490714 - protein, 14 aa, Homo sapiens
  CDR3 for beta chain variable domain of TCR clone 245357 (TRBV12-5, TRBJ2-5)
CASGSRTHQETQYF

SEQ ID NO: 490715 - protein, 22 aa, Homo sapiens
  CDR3 for alpha chain variable domain of TCR clone 245358 (TRAV40, )
CILGDGIPDIQNPDPAVYQLRD

SEQ ID NO: 490716 - protein, 16 aa, Homo sapiens
  CDR3 for beta chain variable domain of TCR clone 245358 (TRBV20-1, TRBJ1-5)
CSAELPGQQTNQPQHF

SEQ ID NO: 490717 - protein, 13 aa, Homo sapiens
  CDR3 for alpha chain variable domain of TCR clone 245359 (TRAV21, TRAJ36)
CAVREAGANNLFF

SEQ ID NO: 490718 - protein, 13 aa, Homo sapiens
  CDR3 for beta chain variable domain of TCR clone 245359 (TRBV2, TRBJ1-1)
CSSSVLMNTEAFF

SEQ ID NO: 490719 - protein, 13 aa, Homo sapiens
  CDR3 for alpha chain variable domain of TCR clone 245360 (TRAV13-2, TRAJ48)
CAEMDFRNEKLTF

SEQ ID NO: 490720 - protein, 15 aa, Homo sapiens
  CDR3 for beta chain variable domain of TCR clone 245360 (TRBV7-9, TRBJ1-6)
CASSSTGRVNSPLHF

SEQ ID NO: 490721 - protein, 14 aa, Homo sapiens
  CDR3 for alpha chain variable domain of TCR clone 245361 (TRAV4, TRAJ26)
CLVGPHNYGQNFVF

SEQ ID NO: 490722 - protein, 15 aa, Homo sapiens
  CDR3 for beta chain variable domain of TCR clone 245361 (TRBV20-1, TRBJ2-3)
CSARPSGFYTDTQYF

SEQ ID NO: 490723 - protein, 16 aa, Homo sapiens
  CDR3 for alpha chain variable domain of TCR clone 245362 (TRAV22, TRAJ45)
CAVERGKRGGADGLTF

SEQ ID NO: 490724 - protein, 12 aa, Homo sapiens
  CDR3 for beta chain variable domain of TCR clone 245362 (TRBV27, TRBJ1-1)
CSSLSIGAEAFF

SEQ ID NO: 490725 - protein, 18 aa, Homo sapiens
  CDR3 for alpha chain variable domain of TCR clone 245363 (TRAV26-1, TRAJ23)
FIVRVGLEVWNQGGKLIF

SEQ ID NO: 490726 - protein, 14 aa, Homo sapiens
  CDR3 for beta chain variable domain of TCR clone 245363 (TRBV7-6, TRBJ2-3)
CASSLGTVTDTQYF

SEQ ID NO: 490727 - protein, 12 aa, Homo sapiens
  CDR3 for alpha chain variable domain of TCR clone 245364 (TRAV3, TRAJ31)
CAVRDGNARLMF

SEQ ID NO: 490728 - protein, 15 aa, Homo sapiens
  CDR3 for beta chain variable domain of TCR clone 245364 (TRBV25-1, TRBJ1-4)
CASSKRIATNEKLFF

SEQ ID NO: 490729 - protein, 16 aa, Homo sapiens
  CDR3 for alpha chain variable domain of TCR clone 245365 (TRAV21, TRAJ52)
CAVTNAGGTRYGKLTF

SEQ ID NO: 490730 - protein, 11 aa, Homo sapiens
  CDR3 for beta chain variable domain of TCR clone 245365 (TRBV2, TRBJ1-1)
CASREGTEAFF

SEQ ID NO: 490731 - protein, 14 aa, Homo sapiens
  CDR3 for alpha chain variable domain of TCR clone 245366 (TRAV12-3, TRAJ9)
CAMSPNTGGFKTIF

SEQ ID NO: 490732 - protein, 12 aa, Homo sapiens
  CDR3 for beta chain variable domain of TCR clone 245366 (TRBV11-2, TRBJ2-2)
CASSLGGGELYF

SEQ ID NO: 490733 - protein, 17 aa, Homo sapiens
  CDR3 for alpha chain variable domain of TCR clone 245367 (TRAV3, TRAJ6)
CAVRDGPRAGGSYIPTF

SEQ ID NO: 490734 - protein, 18 aa, Homo sapiens
  CDR3 for beta chain variable domain of TCR clone 245367 (TRBV7-9, TRBJ2-7)
CASSLTTSGSRTWYEKYF

SEQ ID NO: 490735 - protein, 15 aa, Homo sapiens
  CDR3 for alpha chain variable domain of TCR clone 245368 (TRAV38-1, TRAJ37)
CAFIHGSGNTGKLIF

SEQ ID NO: 490736 - protein, 12 aa, Homo sapiens
  CDR3 for beta chain variable domain of TCR clone 245368 (TRBV14, TRBJ1-1)
CASSQLKGLAFF

SEQ ID NO: 490737 - protein, 13 aa, Homo sapiens
  CDR3 for alpha chain variable domain of TCR clone 245369 (TRAV20, TRAJ49)
CAVQARTGNQFYF

SEQ ID NO: 490738 - protein, 14 aa, Homo sapiens
  CDR3 for beta chain variable domain of TCR clone 245369 (TRBV5-1, TRBJ1-1)
CVSSLQGASTEAFF

SEQ ID NO: 490739 - protein, 12 aa, Homo sapiens
  CDR3 for alpha chain variable domain of TCR clone 245370 (TRAV20, TRAJ24)
CAMYNSWGKLQF

SEQ ID NO: 490740 - protein, 15 aa, Homo sapiens
  CDR3 for beta chain variable domain of TCR clone 245370 (TRBV20-1, TRBJ2-5)
CSARVPPSGRETQYF

SEQ ID NO: 490741 - protein, 12 aa, Homo sapiens
  CDR3 for alpha chain variable domain of TCR clone 245371 (TRAV8-3, TRAJ41)
CAVALSGYALDF

SEQ ID NO: 490742 - protein, 18 aa, Homo sapiens
  CDR3 for beta chain variable domain of TCR clone 245371 (TRBV20-1, TRBJ2-6)
CSAETTPTHGSGANVLTF

SEQ ID NO: 490743 - protein, 17 aa, Homo sapiens
  CDR3 for alpha chain variable domain of TCR clone 245372 (TRAV3, TRAJ6)
CAVGDGPRAGGSDIPTF

SEQ ID NO: 490744 - protein, 14 aa, Homo sapiens
  CDR3 for beta chain variable domain of TCR clone 245372 (TRBV7-2, TRBJ2-7)
CASSPKTSFYEQYF

SEQ ID NO: 490745 - protein, 12 aa, Homo sapiens
  CDR3 for alpha chain variable domain of TCR clone 245373 (TRAV13-2, TRAJ49)
CAETDTGNQFYF

SEQ ID NO: 490746 - protein, 15 aa, Homo sapiens
  CDR3 for beta chain variable domain of TCR clone 245373 (TRBV7-2, TRBJ2-1)
CASSSGLAGGNEQFF

SEQ ID NO: 490747 - protein, 12 aa, Homo sapiens
  CDR3 for alpha chain variable domain of TCR clone 245374 (TRAV29/DV5, TRAJ48)
CAANEPNEKLTF

SEQ ID NO: 490748 - protein, 13 aa, Homo sapiens
  CDR3 for beta chain variable domain of TCR clone 245374 (TRBV19, TRBJ1-2)
CASSVPGQDGYTF

SEQ ID NO: 490749 - protein, 14 aa, Homo sapiens
  CDR3 for alpha chain variable domain of TCR clone 245375 (TRAV8-4, TRAJ17)
CAVSSPAAGNKLTF

SEQ ID NO: 490750 - protein, 14 aa, Homo sapiens
  CDR3 for beta chain variable domain of TCR clone 245375 (TRBV19, TRBJ2-1)
CASPTFVLSGEQFF

SEQ ID NO: 490751 - protein, 14 aa, Homo sapiens
  CDR3 for alpha chain variable domain of TCR clone 245376 (TRAV12-2, TRAJ48)
CAVNAFIGNEKLTF

SEQ ID NO: 490752 - protein, 13 aa, Homo sapiens
  CDR3 for beta chain variable domain of TCR clone 245376 (TRBV28, TRBJ2-7)
CAGAQQGLDEQYF

SEQ ID NO: 490753 - protein, 11 aa, Homo sapiens
  CDR3 for alpha chain variable domain of TCR clone 245377 (TRAV1-2, TRAJ40)
CAVPGTYKYIF

SEQ ID NO: 490754 - protein, 16 aa, Homo sapiens
  CDR3 for beta chain variable domain of TCR clone 245377 (TRBV7-3, TRBJ2-2)
CASSLKRGTVSGELFF

SEQ ID NO: 490755 - protein, 14 aa, Homo sapiens
  CDR3 for alpha chain variable domain of TCR clone 245378 (TRAV1-2, TRAJ8)
CAVREDTGFQKLVF

SEQ ID NO: 490756 - protein, 15 aa, Homo sapiens
  CDR3 for beta chain variable domain of TCR clone 245378 (TRBV28, TRBJ1-5)
CASSLSGYSNQPQHF

SEQ ID NO: 490757 - protein, 13 aa, Homo sapiens
  CDR3 for alpha chain variable domain of TCR clone 245379 (TRAV2, TRAJ40)
CAVVTSGTYKYIF

SEQ ID NO: 490758 - protein, 14 aa, Homo sapiens
  CDR3 for beta chain variable domain of TCR clone 245379 (TRBV12-4, TRBJ1-6)
CASNLQGKGSPLHF

SEQ ID NO: 490759 - protein, 13 aa, Homo sapiens
  CDR3 for alpha chain variable domain of TCR clone 245380 (TRAV16, TRAJ26)
CITVLCLGQNFVF

SEQ ID NO: 490760 - protein, 12 aa, Homo sapiens
  CDR3 for beta chain variable domain of TCR clone 245380 (TRBV11-2, TRBJ2-1)
CASSPGNNEQCF

SEQ ID NO: 490761 - protein, 14 aa, Homo sapiens
  CDR3 for alpha chain variable domain of TCR clone 245381 (TRAV8-1, TRAJ5)
CAVRTDTGRRALSF

SEQ ID NO: 490762 - protein, 17 aa, Homo sapiens
  CDR3 for beta chain variable domain of TCR clone 245381 (TRBV13, TRBJ2-3)
CASSLSRVAGGRNTQYF

SEQ ID NO: 490763 - protein, 13 aa, Homo sapiens
  CDR3 for alpha chain variable domain of TCR clone 245382 (TRAV21, TRAJ57)
CAVTQGGSEKLVF

SEQ ID NO: 490764 - protein, 12 aa, Homo sapiens
  CDR3 for beta chain variable domain of TCR clone 245382 (TRBV29-1, TRBJ1-3)
CSTRDSGNTIYF

SEQ ID NO: 490765 - protein, 14 aa, Homo sapiens
  CDR3 for alpha chain variable domain of TCR clone 245383 (TRAV12-2, TRAJ5)
CAVHRSTGRRALTF

SEQ ID NO: 490766 - protein, 15 aa, Homo sapiens
  CDR3 for beta chain variable domain of TCR clone 245383 (TRBV15, TRBJ1-5)
CATSREQGGNQPQHF

SEQ ID NO: 490767 - protein, 16 aa, Homo sapiens
  CDR3 for alpha chain variable domain of TCR clone 245384 (TRAV26-1, TRAJ37)
CIVRGEGSGNTGKRIF

SEQ ID NO: 490768 - protein, 17 aa, Homo sapiens
  CDR3 for beta chain variable domain of TCR clone 245384 (TRBV4-1, TRBJ2-7)
CASSRDPLGVRGGEQYF

SEQ ID NO: 490769 - protein, 13 aa, Homo sapiens
  CDR3 for alpha chain variable domain of TCR clone 245385 (TRAV17, TRAJ9)
CATDYTGGFKTIF

SEQ ID NO: 490770 - protein, 14 aa, Homo sapiens
  CDR3 for beta chain variable domain of TCR clone 245385 (TRBV18, TRBJ1-5)
CASSPGNSNQPQHF

SEQ ID NO: 490771 - protein, 23 aa, Homo sapiens
  CDR3 for alpha chain variable domain of TCR clone 245386 (TRAV26-1, TRAJ38)
CIADNAGNNHNQNPDLAVYQLRD

SEQ ID NO: 490772 - protein, 13 aa, Homo sapiens
  CDR3 for beta chain variable domain of TCR clone 245386 (TRBV20-1, TRBJ1-1)
CSARGGGNTEAFF

SEQ ID NO: 490773 - protein, 17 aa, Homo sapiens
  CDR3 for alpha chain variable domain of TCR clone 245387 (TRAV26-1, TRAJ37)
CIVRIITVSSNTGKLIF

SEQ ID NO: 490774 - protein, 11 aa, Homo sapiens
  CDR3 for beta chain variable domain of TCR clone 245387 (TRBV29-1, TRBJ2-5)
CSEDRTGTQYF

SEQ ID NO: 490775 - protein, 15 aa, Homo sapiens
  CDR3 for alpha chain variable domain of TCR clone 245388 (TRAV8-3, TRAJ20)
LSTSVLWVQTTKLSF

SEQ ID NO: 490776 - protein, 16 aa, Homo sapiens
  CDR3 for beta chain variable domain of TCR clone 245388 (TRBV19, TRBJ2-2)
CASRSPGTGATGELFF

SEQ ID NO: 490777 - protein, 14 aa, Homo sapiens
  CDR3 for alpha chain variable domain of TCR clone 245389 (TRAV26-1, TRAJ38)
CIADNAGNNRKLIW

SEQ ID NO: 490778 - protein, 13 aa, Homo sapiens
  CDR3 for beta chain variable domain of TCR clone 245389 (TRBV20-1, TRBJ1-2)
CSAREPINYGYTF

SEQ ID NO: 490779 - protein, 14 aa, Homo sapiens
  CDR3 for alpha chain variable domain of TCR clone 245390 (TRAV1-1, TRAJ28)
CAAPSWAGSYQLTF

SEQ ID NO: 490780 - protein, 15 aa, Homo sapiens
  CDR3 for beta chain variable domain of TCR clone 245390 (TRBV7-2, TRBJ1-2)
CASSLVSGGDYGYTF

SEQ ID NO: 490781 - protein, 13 aa, Homo sapiens
  CDR3 for alpha chain variable domain of TCR clone 245391 (TRAV12-1, TRAJ34)
CVVTGYNTDKLIF

SEQ ID NO: 490782 - protein, 16 aa, Homo sapiens
  CDR3 for beta chain variable domain of TCR clone 245391 (TRBV28, TRBJ2-7)
CTSVPAKRGGVYEPYF

SEQ ID NO: 490783 - protein, 15 aa, Homo sapiens
  CDR3 for alpha chain variable domain of TCR clone 245392 (TRAV1-1, TRAJ24)
CALSGGTDSGGKFQF

SEQ ID NO: 490784 - protein, 16 aa, Homo sapiens
  CDR3 for beta chain variable domain of TCR clone 245392 (TRBV2, TRBJ2-7)
CASSEPWTGPSYEQYF

SEQ ID NO: 490785 - protein, 15 aa, Homo sapiens
  CDR3 for alpha chain variable domain of TCR clone 245393 (TRAV17, TRAJ57)
CATGPSQGGSEKLVF

SEQ ID NO: 490786 - protein, 15 aa, Homo sapiens
  CDR3 for beta chain variable domain of TCR clone 245393 (TRBV25-1, TRBJ1-4)
CASSPGDSTNEELFF

SEQ ID NO: 490787 - protein, 14 aa, Homo sapiens
  CDR3 for alpha chain variable domain of TCR clone 245394 (TRAV12-3, TRAJ10)
SHLPLTGGGNKLTF

SEQ ID NO: 490788 - protein, 14 aa, Homo sapiens
  CDR3 for beta chain variable domain of TCR clone 245394 (TRBV7-2, TRBJ2-7)
CASSPKTSVYEQYF

SEQ ID NO: 490789 - protein, 13 aa, Homo sapiens
  CDR3 for alpha chain variable domain of TCR clone 245395 (TRAV17, TRAJ22)
CAHHSGSARQLTF

SEQ ID NO: 490790 - protein, 15 aa, Homo sapiens
  CDR3 for beta chain variable domain of TCR clone 245395 (TRBV27, TRBJ1-4)
CASSLMVMKNCFLAV

SEQ ID NO: 490791 - protein, 13 aa, Homo sapiens
  CDR3 for alpha chain variable domain of TCR clone 245396 (TRAV12-3, TRAJ7)
CAMSASGNNRLAF

SEQ ID NO: 490792 - protein, 15 aa, Homo sapiens
  CDR3 for beta chain variable domain of TCR clone 245396 (TRBV20-1, TRBJ2-6)
CSARDRGPGANVLTF

SEQ ID NO: 490793 - protein, 13 aa, Homo sapiens
  CDR3 for alpha chain variable domain of TCR clone 245397 (TRAV12-1, TRAJ33)
CGDAPDSNCQLIW

SEQ ID NO: 490794 - protein, 12 aa, Homo sapiens
  CDR3 for beta chain variable domain of TCR clone 245397 (TRBV11-2, TRBJ2-2)
CASSLGGGELFF

SEQ ID NO: 490795 - protein, 13 aa, Homo sapiens
  CDR3 for alpha chain variable domain of TCR clone 245398 (TRAV35, TRAJ33)
CAGQLYGVYQLIW

SEQ ID NO: 490796 - protein, 14 aa, Homo sapiens
  CDR3 for beta chain variable domain of TCR clone 245398 (TRBV7-2, TRBJ1-1)
CASSLGGAGTGAFF

SEQ ID NO: 490797 - protein, 13 aa, Homo sapiens
  CDR3 for alpha chain variable domain of TCR clone 245399 (TRAV13-2, TRAJ48)
RAEMDFGNEKLTF

SEQ ID NO: 490798 - protein, 14 aa, Homo sapiens
  CDR3 for beta chain variable domain of TCR clone 245399 (TRBV20-1, TRBJ2-7)
CSAKRGRSSYEQYF

SEQ ID NO: 490799 - protein, 15 aa, Homo sapiens
  CDR3 for alpha chain variable domain of TCR clone 245400 (TRAV12-3, TRAJ49)
CAMAVTPNTGNQFYF

SEQ ID NO: 490800 - protein, 13 aa, Homo sapiens
  CDR3 for beta chain variable domain of TCR clone 245400 (TRBV7-9, TRBJ1-2)
CASSPSNFWGYTF

SEQ ID NO: 490801 - protein, 13 aa, Homo sapiens
  CDR3 for alpha chain variable domain of TCR clone 245401 (TRAV1-2, TRAJ9)
CAALNTGGFKTIF

SEQ ID NO: 490802 - protein, 13 aa, Homo sapiens
  CDR3 for beta chain variable domain of TCR clone 245401 (TRBV19, TRBJ1-2)
FASSVPGQDGYNF

SEQ ID NO: 490803 - protein, 15 aa, Homo sapiens
  CDR3 for alpha chain variable domain of TCR clone 245402 (TRAV13-2, TRAJ5)
CAENPHLTGRRALTF

SEQ ID NO: 490804 - protein, 14 aa, Homo sapiens
  CDR3 for beta chain variable domain of TCR clone 245402 (TRBV5-7, TRBJ2-7)
CASSFKGATGEQYF

SEQ ID NO: 490805 - protein, 13 aa, Homo sapiens
  CDR3 for alpha chain variable domain of TCR clone 245403 (TRAV12-3, TRAJ9)
CAMRNTGGFKTSF

SEQ ID NO: 490806 - protein, 14 aa, Homo sapiens
  CDR3 for beta chain variable domain of TCR clone 245403 (TRBV11-2, TRBJ2-7)
CASSSTGEGYEQYF

SEQ ID NO: 490807 - protein, 12 aa, Homo sapiens
  CDR3 for alpha chain variable domain of TCR clone 245404 (TRAV25, TRAJ16)
CAGLKDGQKLLF

SEQ ID NO: 490808 - protein, 13 aa, Homo sapiens
  CDR3 for beta chain variable domain of TCR clone 245404 (TRBV3-1, TRBJ1-2)
CASSQRAPGGYTF

SEQ ID NO: 490809 - protein, 15 aa, Homo sapiens
  CDR3 for alpha chain variable domain of TCR clone 245405 (TRAV21, TRAJ53)
CDTLNSGGSNYKLTF

SEQ ID NO: 490810 - protein, 15 aa, Homo sapiens
  CDR3 for beta chain variable domain of TCR clone 245405 (TRBV27, TRBJ2-1)
CASSNGGGSSNEQFF

SEQ ID NO: 490811 - protein, 14 aa, Homo sapiens
  CDR3 for alpha chain variable domain of TCR clone 245406 (TRAV8-1, TRAJ36)
CAGNSPTGANNLFL

SEQ ID NO: 490812 - protein, 15 aa, Homo sapiens
  CDR3 for beta chain variable domain of TCR clone 245406 (TRBV7-2, TRBJ2-3)
CASSLEQGGTDTQYF

SEQ ID NO: 490813 - protein, 20 aa, Homo sapiens
  CDR3 for alpha chain variable domain of TCR clone 245407 (TRAV25, TRAJ21)
TATQTTDAGTYPLSFNKFYF

SEQ ID NO: 490814 - protein, 14 aa, Homo sapiens
  CDR3 for beta chain variable domain of TCR clone 245407 (TRBV20-1, TRBJ2-7)
CSAPELAGVGEQYF

SEQ ID NO: 490815 - protein, 15 aa, Homo sapiens
  CDR3 for alpha chain variable domain of TCR clone 245408 (TRAV3, TRAJ4)
CAVRDGTGGYNKLIF

SEQ ID NO: 490816 - protein, 18 aa, Homo sapiens
  CDR3 for beta chain variable domain of TCR clone 245408 (TRBV7-9, TRBJ2-7)
CASSLTTSGSRTWYEQYF

SEQ ID NO: 490817 - protein, 14 aa, Homo sapiens
  CDR3 for alpha chain variable domain of TCR clone 245409 (TRAV12-2, TRAJ40)
CAVKIPSGTYKYIF

SEQ ID NO: 490818 - protein, 17 aa, Homo sapiens
  CDR3 for beta chain variable domain of TCR clone 245409 (TRBV6-1, TRBJ1-5)
CASSEAEFIRARQPQHF

SEQ ID NO: 490819 - protein, 13 aa, Homo sapiens
  CDR3 for alpha chain variable domain of TCR clone 245410 (TRAV16, TRAJ11)
CALMNSGYSTLTF

SEQ ID NO: 490820 - protein, 15 aa, Homo sapiens
  CDR3 for beta chain variable domain of TCR clone 245410 (TRBV7-3, TRBJ2-1)
CASSYFRGTYNEQFF

SEQ ID NO: 490821 - protein, 14 aa, Homo sapiens
  CDR3 for alpha chain variable domain of TCR clone 245411 (TRAV8-4, TRAJ13)
CAVTLSGGYQKVTF

SEQ ID NO: 490822 - protein, 16 aa, Homo sapiens
  CDR3 for beta chain variable domain of TCR clone 245411 (TRBV7-2, TRBJ1-5)
CASSWTGGPGNQPQHF

SEQ ID NO: 490823 - protein, 14 aa, Homo sapiens
  CDR3 for alpha chain variable domain of TCR clone 245412 (TRAV12-2, TRAJ11)
CAVEGGSGYSTLTF

SEQ ID NO: 490824 - protein, 13 aa, Homo sapiens
  CDR3 for beta chain variable domain of TCR clone 245412 (TRBV15, TRBJ1-6)
CATSGGLNSPLHF

SEQ ID NO: 490825 - protein, 13 aa, Homo sapiens
  CDR3 for alpha chain variable domain of TCR clone 245413 (TRAV2, TRAJ40)
CSVVTSGTYKYIF

SEQ ID NO: 490826 - protein, 14 aa, Homo sapiens
  CDR3 for beta chain variable domain of TCR clone 245413 (TRBV18, TRBJ2-5)
CASSPGVSQETQYF

SEQ ID NO: 490827 - protein, 17 aa, Homo sapiens
  CDR3 for alpha chain variable domain of TCR clone 245414 (TRAV3, TRAJ42)
CAVRDRDYGGSQGNLIF

SEQ ID NO: 490828 - protein, 16 aa, Homo sapiens
  CDR3 for beta chain variable domain of TCR clone 245414 (TRBV19, TRBJ2-3)
CASSPGAASRTDTQYF

SEQ ID NO: 490829 - protein, 10 aa, Homo sapiens
  CDR3 for alpha chain variable domain of TCR clone 245415 (TRAV3, TRAJ18)
CAVRDGRGSP

SEQ ID NO: 490830 - protein, 15 aa, Homo sapiens
  CDR3 for beta chain variable domain of TCR clone 245415 (TRBV7-9, TRBJ1-6)
CASSSPGRGNSPLHF

SEQ ID NO: 490831 - protein, 12 aa, Homo sapiens
  CDR3 for alpha chain variable domain of TCR clone 245416 (TRAV21, TRAJ23)
CAVGPQGGKLIF

SEQ ID NO: 490832 - protein, 17 aa, Homo sapiens
  CDR3 for beta chain variable domain of TCR clone 245416 (TRBV5-1, TRBJ2-2)
CASSRTSGRFSTGELFF

SEQ ID NO: 490833 - protein, 14 aa, Homo sapiens
  CDR3 for alpha chain variable domain of TCR clone 245417 (TRAV12-2, TRAJ17)
CAGLFKAAGNKLTF

SEQ ID NO: 490834 - protein, 15 aa, Homo sapiens
  CDR3 for beta chain variable domain of TCR clone 245417 (TRBV20-1, TRBJ2-7)
CSARDRVSGMDEQYF

SEQ ID NO: 490835 - protein, 14 aa, Homo sapiens
  CDR3 for alpha chain variable domain of TCR clone 245418 (TRAV35, TRAJ33)
CAGSSQDSNYQLIW

SEQ ID NO: 490836 - protein, 16 aa, Homo sapiens
  CDR3 for beta chain variable domain of TCR clone 245418 (TRBV24-1, TRBJ2-3)
CATSDPGTGATDTQYF

SEQ ID NO: 490837 - protein, 15 aa, Homo sapiens
  CDR3 for alpha chain variable domain of TCR clone 245419 (TRAV12-2, TRAJ43)
CAFDMRFGAGTRLTV

SEQ ID NO: 490838 - protein, 13 aa, Homo sapiens
  CDR3 for beta chain variable domain of TCR clone 245419 (TRBV4-2, TRBJ1-1)
CASSQAGNTEASF

SEQ ID NO: 490839 - protein, 18 aa, Homo sapiens
  CDR3 for alpha chain variable domain of TCR clone 245420 (TRAV13-1, TRAJ52)
SAASKRSAGGTSYGKLTF

SEQ ID NO: 490840 - protein, 15 aa, Homo sapiens
  CDR3 for beta chain variable domain of TCR clone 245420 (TRBV20-1, TRBJ1-1)
CSASRRVTGNTEAFF

SEQ ID NO: 490841 - protein, 18 aa, Homo sapiens
  CDR3 for alpha chain variable domain of TCR clone 245421 (TRAV12-2, )
CAVADIQNPDPAVYQLRD

SEQ ID NO: 490842 - protein, 16 aa, Homo sapiens
  CDR3 for beta chain variable domain of TCR clone 245421 (TRBV6-1, TRBJ1-2)
CASSGAWQGRSHGYTF

SEQ ID NO: 490843 - protein, 15 aa, Homo sapiens
  CDR3 for alpha chain variable domain of TCR clone 245422 (TRAV12-2, TRAJ53)
CAVNGGGGSNYKLTF

SEQ ID NO: 490844 - protein, 17 aa, Homo sapiens
  CDR3 for beta chain variable domain of TCR clone 245422 (TRBV7-3, TRBJ2-3)
RASSLMKRVRGADTQYF

SEQ ID NO: 490845 - protein, 12 aa, Homo sapiens
  CDR3 for alpha chain variable domain of TCR clone 245423 (TRAV16, TRAJ10)
CSRTGGGNKLTF

SEQ ID NO: 490846 - protein, 12 aa, Homo sapiens
  CDR3 for beta chain variable domain of TCR clone 245423 (TRBV5-7, TRBJ1-1)
CASSLGRGKAFF

SEQ ID NO: 490847 - protein, 15 aa, Homo sapiens
  CDR3 for alpha chain variable domain of TCR clone 245424 (TRAV17, TRAJ10)
CATVLLTGGGNKLTF

SEQ ID NO: 490848 - protein, 17 aa, Homo sapiens
  CDR3 for beta chain variable domain of TCR clone 245424 (TRBV11-2, TRBJ2-1)
CDSSLYPPGVEYNEQFF

SEQ ID NO: 490849 - protein, 13 aa, Homo sapiens
  CDR3 for alpha chain variable domain of TCR clone 245425 (TRAV12-2, TRAJ22)
CAVQSGSARQLTF

SEQ ID NO: 490850 - protein, 15 aa, Homo sapiens
  CDR3 for beta chain variable domain of TCR clone 245425 (TRBV19, TRBJ2-1)
CASSPPGQGPNEQFF

SEQ ID NO: 490851 - protein, 14 aa, Homo sapiens
  CDR3 for alpha chain variable domain of TCR clone 245426 (TRAV8-4, TRAJ40)
CAVIPTSGTYKYIF

SEQ ID NO: 490852 - protein, 14 aa, Homo sapiens
  CDR3 for beta chain variable domain of TCR clone 245426 (TRBV7-3, TRBJ1-1)
CASSLKGGNTEAFF

SEQ ID NO: 490853 - protein, 16 aa, Homo sapiens
  CDR3 for alpha chain variable domain of TCR clone 245427 (TRAV30, TRAJ24)
CGTEIVEADSWGKFQF

SEQ ID NO: 490854 - protein, 13 aa, Homo sapiens
  CDR3 for beta chain variable domain of TCR clone 245427 (TRBV11-2, TRBJ2-5)
CASSSTGEETQYF

SEQ ID NO: 490855 - protein, 14 aa, Homo sapiens
  CDR3 for alpha chain variable domain of TCR clone 245428 (TRAV1-2, TRAJ8)
GAVREDTGFQKLVF

SEQ ID NO: 490856 - protein, 13 aa, Homo sapiens
  CDR3 for beta chain variable domain of TCR clone 245428 (TRBV27, TRBJ2-7)
CASSLTTGYEQYF

SEQ ID NO: 490857 - protein, 14 aa, Homo sapiens
  CDR3 for alpha chain variable domain of TCR clone 245429 (TRAV1-2, TRAJ16)
CAVNRFSDGQKLLL

SEQ ID NO: 490858 - protein, 12 aa, Homo sapiens
  CDR3 for beta chain variable domain of TCR clone 245429 (TRBV2, TRBJ2-1)
CAKREGYNEQFF

SEQ ID NO: 490859 - protein, 15 aa, Homo sapiens
  CDR3 for alpha chain variable domain of TCR clone 245430 (TRAV26-1, TRAJ48)
CIARVGDFRNEKLTF

SEQ ID NO: 490860 - protein, 16 aa, Homo sapiens
  CDR3 for beta chain variable domain of TCR clone 245430 (TRBV4-1, TRBJ2-3)
CASSQRAGGLTDTQYF

SEQ ID NO: 490861 - protein, 12 aa, Homo sapiens
  CDR3 for alpha chain variable domain of TCR clone 245431 (TRAV13-1, TRAJ48)
CAANVGNEKLTF

SEQ ID NO: 490862 - protein, 13 aa, Homo sapiens
  CDR3 for beta chain variable domain of TCR clone 245431 (TRBV7-3, TRBJ1-1)
CASSQDWGAEAFF

SEQ ID NO: 490863 - protein, 13 aa, Homo sapiens
  CDR3 for alpha chain variable domain of TCR clone 245432 (TRAV1-1, TRAJ30)
CAVRSDRDDKIIF

SEQ ID NO: 490864 - protein, 20 aa, Homo sapiens
  CDR3 for beta chain variable domain of TCR clone 245432 (TRBV7-8, TRBJ2-2)
CASSHLFPGPTIHITGELFF

SEQ ID NO: 490865 - protein, 13 aa, Homo sapiens
  CDR3 for alpha chain variable domain of TCR clone 245433 (TRAV13-1, TRAJ4)
CAASIGGYNKMIF

SEQ ID NO: 490866 - protein, 16 aa, Homo sapiens
  CDR3 for beta chain variable domain of TCR clone 245433 (TRBV20-1, TRBJ2-1)
CSAPGLAGSYSDEQFF

SEQ ID NO: 490867 - protein, 14 aa, Homo sapiens
  CDR3 for alpha chain variable domain of TCR clone 245434 (TRAV8-2, TRAJ37)
CVVSIFGNTGKLIF

SEQ ID NO: 490868 - protein, 13 aa, Homo sapiens
  CDR3 for beta chain variable domain of TCR clone 245434 (TRBV7-8, TRBJ2-7)
RRVRLTEMGEQYF

SEQ ID NO: 490869 - protein, 11 aa, Homo sapiens
  CDR3 for alpha chain variable domain of TCR clone 245435 (TRAV13-2, TRAJ23)
CAESPRGKLIF

SEQ ID NO: 490870 - protein, 11 aa, Homo sapiens
  CDR3 for beta chain variable domain of TCR clone 245435 (TRBV12-4, TRBJ2-3)
CASTATDTQYF

SEQ ID NO: 490871 - protein, 17 aa, Homo sapiens
  CDR3 for alpha chain variable domain of TCR clone 245436 (TRAV4, TRAJ42)
CLVGALNHVGSQGNSLY

SEQ ID NO: 490872 - protein, 12 aa, Homo sapiens
  CDR3 for beta chain variable domain of TCR clone 245436 (TRBV20-1, TRBJ2-1)
CSAQYTYNEQFF

SEQ ID NO: 490873 - protein, 16 aa, Homo sapiens
  CDR3 for alpha chain variable domain of TCR clone 245437 (TRAV3, TRAJ37)
CAVRGKGSGNTGKLMF

SEQ ID NO: 490874 - protein, 14 aa, Homo sapiens
  CDR3 for beta chain variable domain of TCR clone 245437 (TRBV7-2, TRBJ2-7)
CASSPKTSFYEQYF

SEQ ID NO: 490875 - protein, 12 aa, Homo sapiens
  CDR3 for alpha chain variable domain of TCR clone 245438 (TRAV1-1, TRAJ20)
CAVREDDYKLSF

SEQ ID NO: 490876 - protein, 18 aa, Homo sapiens
  CDR3 for beta chain variable domain of TCR clone 245438 (TRBV20-1, TRBJ2-3)
CSTSGLAGGPGTTDTQYF

SEQ ID NO: 490877 - protein, 15 aa, Homo sapiens
  CDR3 for alpha chain variable domain of TCR clone 245439 (TRAV13-1, TRAJ10)
CAATILTGGGNNLTF

SEQ ID NO: 490878 - protein, 15 aa, Homo sapiens
  CDR3 for beta chain variable domain of TCR clone 245439 (TRBV2, TRBJ2-7)
CASTLLGSGATEQYF

SEQ ID NO: 490879 - protein, 14 aa, Homo sapiens
  CDR3 for alpha chain variable domain of TCR clone 245440 (TRAV26-1, TRAJ38)
CIADNAGKNRKLIW

SEQ ID NO: 490880 - protein, 17 aa, Homo sapiens
  CDR3 for beta chain variable domain of TCR clone 245440 (TRBV7-9, TRBJ2-3)
CASSPTVAGGPHRYAVF

SEQ ID NO: 490881 - protein, 18 aa, Homo sapiens
  CDR3 for alpha chain variable domain of TCR clone 245441 (TRAV21, TRAJ52)
CAVRPSPAGGTSYGKLTF

SEQ ID NO: 490882 - protein, 14 aa, Homo sapiens
  CDR3 for beta chain variable domain of TCR clone 245441 (TRBV2, TRBJ2-1)
CASSEALIYNEQFF

SEQ ID NO: 490883 - protein, 13 aa, Homo sapiens
  CDR3 for alpha chain variable domain of TCR clone 245442 (TRAV21, TRAJ27)
CAARPGNAGKSTF

SEQ ID NO: 490884 - protein, 16 aa, Homo sapiens
  CDR3 for beta chain variable domain of TCR clone 245442 (TRBV20-1, TRBJ1-2)
SAVPRWEGVANYGYTF

SEQ ID NO: 490885 - protein, 16 aa, Homo sapiens
  CDR3 for alpha chain variable domain of TCR clone 245443 (TRAV8-3, TRAJ8)
CAVPRDGNTGFQKLVF

SEQ ID NO: 490886 - protein, 15 aa, Homo sapiens
  CDR3 for beta chain variable domain of TCR clone 245443 (TRBV6-1, TRBJ2-6)
CASSSRPTGANVLTF

SEQ ID NO: 490887 - protein, 13 aa, Homo sapiens
  CDR3 for alpha chain variable domain of TCR clone 245444 (TRAV2, TRAJ40)
CAVVTSGTYKYIF

SEQ ID NO: 490888 - protein, 15 aa, Homo sapiens
  CDR3 for beta chain variable domain of TCR clone 245444 (TRBV20-1, TRBJ1-1)
CSASLGVTGNTEAFF

SEQ ID NO: 490889 - protein, 13 aa, Homo sapiens
  CDR3 for alpha chain variable domain of TCR clone 245445 (TRAV2, TRAJ40)
CAVVTSGTYKYIF

SEQ ID NO: 490890 - protein, 14 aa, Homo sapiens
  CDR3 for beta chain variable domain of TCR clone 245445 (TRBV19, TRBJ2-1)
CASPTFGLSGEKFL

SEQ ID NO: 490891 - protein, 12 aa, Homo sapiens
  CDR3 for alpha chain variable domain of TCR clone 245446 (TRAV27, TRAJ13)
CAGVRGYQKVTF

SEQ ID NO: 490892 - protein, 16 aa, Homo sapiens
  CDR3 for beta chain variable domain of TCR clone 245446 (TRBV28, TRBJ2-1)
CDSSSSYSGSLNEQFF

SEQ ID NO: 490893 - protein, 12 aa, Homo sapiens
  CDR3 for alpha chain variable domain of TCR clone 245447 (TRAV12-3, TRAJ16)
CAMGCRSCSLQG

SEQ ID NO: 490894 - protein, 17 aa, Homo sapiens
  CDR3 for beta chain variable domain of TCR clone 245447 (TRBV28, TRBJ2-5)
CASSTPEGDALQETQYF

SEQ ID NO: 490895 - protein, 15 aa, Homo sapiens
  CDR3 for alpha chain variable domain of TCR clone 245448 (TRAV2, TRAJ15)
CAVEDRGQAGTALIF

SEQ ID NO: 490896 - protein, 13 aa, Homo sapiens
  CDR3 for beta chain variable domain of TCR clone 245448 (TRBV12-4, TRBJ1-2)
CASSLRQGKGYTF

SEQ ID NO: 490897 - protein, 14 aa, Homo sapiens
  CDR3 for alpha chain variable domain of TCR clone 245449 (TRAV8-3, TRAJ4)
CAVGASGGYNKLIF

SEQ ID NO: 490898 - protein, 12 aa, Homo sapiens
  CDR3 for beta chain variable domain of TCR clone 245449 (TRBV24-1, TRBJ1-1)
CATLYPDTEAFF

SEQ ID NO: 490899 - protein, 12 aa, Homo sapiens
  CDR3 for alpha chain variable domain of TCR clone 245450 (TRAV27, TRAJ33)
CAGDGSNYQLIW

SEQ ID NO: 490900 - protein, 20 aa, Homo sapiens
  CDR3 for beta chain variable domain of TCR clone 245450 (TRBV28, TRBJ2-1)
CASTPIGRSPGLAGGNEQFF

SEQ ID NO: 490901 - protein, 14 aa, Homo sapiens
  CDR3 for alpha chain variable domain of TCR clone 245451 (TRAV13-1, TRAJ26)
CAASSAHYGQNFVF

SEQ ID NO: 490902 - protein, 17 aa, Homo sapiens
  CDR3 for beta chain variable domain of TCR clone 245451 (TRBV25-1, TRBJ2-5)
CASSRSGGRGGQETQYF

SEQ ID NO: 490903 - protein, 13 aa, Homo sapiens
  CDR3 for alpha chain variable domain of TCR clone 245452 (TRAV8-3, TRAJ43)
CAVVPYNNNDMRF

SEQ ID NO: 490904 - protein, 13 aa, Homo sapiens
  CDR3 for beta chain variable domain of TCR clone 245452 (TRBV7-3, TRBJ2-1)
CASSLDSYNEQFF

SEQ ID NO: 490905 - protein, 13 aa, Homo sapiens
  CDR3 for alpha chain variable domain of TCR clone 245453 (TRAV26-2, TRAJ57)
CILSRGGSEKLVF

SEQ ID NO: 490906 - protein, 13 aa, Homo sapiens
  CDR3 for beta chain variable domain of TCR clone 245453 (TRBV11-2, TRBJ2-1)
CASSLGLAGGRFF

SEQ ID NO: 490907 - protein, 15 aa, Homo sapiens
  CDR3 for alpha chain variable domain of TCR clone 245454 (TRAV17, TRAJ57)
CATGPSQGGSERLVF

SEQ ID NO: 490908 - protein, 18 aa, Homo sapiens
  CDR3 for beta chain variable domain of TCR clone 245454 (TRBV7-9, TRBJ2-7)
CASSLTTSGSRTWYEQYF

SEQ ID NO: 490909 - protein, 16 aa, Homo sapiens
  CDR3 for alpha chain variable domain of TCR clone 245455 (TRAV12-2, TRAJ40)
CAVIRGGTSGTYKYIF

SEQ ID NO: 490910 - protein, 15 aa, Homo sapiens
  CDR3 for beta chain variable domain of TCR clone 245455 (TRBV18, TRBJ2-6)
CASSPSYAGANVLTF

SEQ ID NO: 490911 - protein, 11 aa, Homo sapiens
  CDR3 for alpha chain variable domain of TCR clone 245456 (TRAV13-1, TRAJ6)
CATLGSYIPIF

SEQ ID NO: 490912 - protein, 13 aa, Homo sapiens
  CDR3 for beta chain variable domain of TCR clone 245456 (TRBV6-6, TRBJ2-1)
CASSWHQGDEQFF

SEQ ID NO: 490913 - protein, 13 aa, Homo sapiens
  CDR3 for alpha chain variable domain of TCR clone 245457 (TRAV21, TRAJ9)
CAVRRSGGFTTIF

SEQ ID NO: 490914 - protein, 20 aa, Homo sapiens
  CDR3 for beta chain variable domain of TCR clone 245457 (TRBV28, TRBJ2-1)
CASTPIGRSPGLAGGNEQFF

SEQ ID NO: 490915 - protein, 13 aa, Homo sapiens
  CDR3 for alpha chain variable domain of TCR clone 245458 (TRAV12-2, TRAJ54)
CAVNRRGAPKLVF

SEQ ID NO: 490916 - protein, 14 aa, Homo sapiens
  CDR3 for beta chain variable domain of TCR clone 245458 (TRBV2, TRBJ1-5)
CASGGVLSNQPQHF

SEQ ID NO: 490917 - protein, 16 aa, Homo sapiens
  CDR3 for alpha chain variable domain of TCR clone 245459 (TRAV35, TRAJ28)
CAGQKYSGAGSYQLTF

SEQ ID NO: 490918 - protein, 14 aa, Homo sapiens
  CDR3 for beta chain variable domain of TCR clone 245459 (TRBV7-8, TRBJ1-2)
CASSPDSLSYGYTF

SEQ ID NO: 490919 - protein, 16 aa, Homo sapiens
  CDR3 for alpha chain variable domain of TCR clone 245460 (TRAV21, TRAJ37)
CAVSPRGSSNTGKLIF

SEQ ID NO: 490920 - protein, 13 aa, Homo sapiens
  CDR3 for beta chain variable domain of TCR clone 245460 (TRBV7-9, TRBJ2-5)
CASLSPGQESQYF

SEQ ID NO: 490921 - protein, 13 aa, Homo sapiens
  CDR3 for alpha chain variable domain of TCR clone 245461 (TRAV27, TRAJ56)
CAGKPGANSKLTF

SEQ ID NO: 490922 - protein, 14 aa, Homo sapiens
  CDR3 for beta chain variable domain of TCR clone 245461 (TRBV2, TRBJ2-5)
CASKRDGTTETQYF

SEQ ID NO: 490923 - protein, 14 aa, Homo sapiens
  CDR3 for alpha chain variable domain of TCR clone 245462 (TRAV13-1, TRAJ9)
CAASALPGGFKTIF

SEQ ID NO: 490924 - protein, 13 aa, Homo sapiens
  CDR3 for beta chain variable domain of TCR clone 245462 (TRBV20-1, TRBJ1-1)
CSAGTVGNAEAFF

SEQ ID NO: 490925 - protein, 16 aa, Homo sapiens
  CDR3 for alpha chain variable domain of TCR clone 245463 (TRAV26-1, TRAJ37)
CIVRGDGSGSTGKLIF

SEQ ID NO: 490926 - protein, 15 aa, Homo sapiens
  CDR3 for beta chain variable domain of TCR clone 245463 (TRBV7-3, TRBJ2-1)
CASSPTGGGEVEQFF

SEQ ID NO: 490927 - protein, 16 aa, Homo sapiens
  CDR3 for alpha chain variable domain of TCR clone 245464 (TRAV13-1, TRAJ48)
CSKYRESHFGNEKLTF

SEQ ID NO: 490928 - protein, 17 aa, Homo sapiens
  CDR3 for beta chain variable domain of TCR clone 245464 (TRBV28, TRBJ2-1)
CASSSARQAITYNEQFF

SEQ ID NO: 490929 - protein, 15 aa, Homo sapiens
  CDR3 for alpha chain variable domain of TCR clone 245465 (TRAV13-1, TRAJ48)
CAPLGSNFGNEKLTF

SEQ ID NO: 490930 - protein, 14 aa, Homo sapiens
  CDR3 for beta chain variable domain of TCR clone 245465 (TRBV27, TRBJ2-3)
CATWTSGRPWRQYF

SEQ ID NO: 490931 - protein, 14 aa, Homo sapiens
  CDR3 for alpha chain variable domain of TCR clone 245466 (TRAV1-2, TRAJ16)
RAVNRFSDGQKLLF

SEQ ID NO: 490932 - protein, 14 aa, Homo sapiens
  CDR3 for beta chain variable domain of TCR clone 245466 (TRBV7-9, TRBJ1-2)
CASSRQGANYGYTF

SEQ ID NO: 490933 - protein, 14 aa, Homo sapiens
  CDR3 for alpha chain variable domain of TCR clone 245467 (TRAV1-2, TRAJ15)
CAVRDRQAGTALIF

SEQ ID NO: 490934 - protein, 17 aa, Homo sapiens
  CDR3 for beta chain variable domain of TCR clone 245467 (TRBV13, TRBJ2-3)
CASSLSRVAGGRNTQYF

SEQ ID NO: 490935 - protein, 13 aa, Homo sapiens
  CDR3 for alpha chain variable domain of TCR clone 245468 (TRAV3, TRAJ8)
CAVRFTGFHKLVF

SEQ ID NO: 490936 - protein, 15 aa, Homo sapiens
  CDR3 for beta chain variable domain of TCR clone 245468 (TRBV20-1, TRBJ2-7)
CSARDRVSGMDEQYF

SEQ ID NO: 490937 - protein, 13 aa, Homo sapiens
  CDR3 for alpha chain variable domain of TCR clone 245469 (TRAV21, TRAJ36)
CAVIKTGANNLFF

SEQ ID NO: 490938 - protein, 13 aa, Homo sapiens
  CDR3 for beta chain variable domain of TCR clone 245469 (TRBV29-1, TRBJ2-3)
CSATRGGIDTQYF

SEQ ID NO: 490939 - protein, 14 aa, Homo sapiens
  CDR3 for alpha chain variable domain of TCR clone 245470 (TRAV12-2, TRAJ17)
CAVLFKAAGNKLTF

SEQ ID NO: 490940 - protein, 16 aa, Homo sapiens
  CDR3 for beta chain variable domain of TCR clone 245470 (TRBV5-1, TRBJ2-3)
CASSLGLAVYTDTQYF

SEQ ID NO: 490941 - protein, 13 aa, Homo sapiens
  CDR3 for alpha chain variable domain of TCR clone 245471 (TRAV8-3, TRAJ36)
CAVGATGANNLFF

SEQ ID NO: 490942 - protein, 15 aa, Homo sapiens
  CDR3 for beta chain variable domain of TCR clone 245471 (TRBV13, TRBJ1-3)
CASSPNRGSGNTIYF

SEQ ID NO: 490943 - protein, 15 aa, Homo sapiens
  CDR3 for alpha chain variable domain of TCR clone 245472 (TRAV12-2, TRAJ53)
CAVNGGGGSNYKLTF

SEQ ID NO: 490944 - protein, 14 aa, Homo sapiens
  CDR3 for beta chain variable domain of TCR clone 245472 (TRBV7-8, TRBJ1-2)
CASSPDSLSYGYTF

SEQ ID NO: 490945 - protein, 14 aa, Homo sapiens
  CDR3 for alpha chain variable domain of TCR clone 245473 (TRAV17, TRAJ54)
CATDANQGAQKLVF

SEQ ID NO: 490946 - protein, 14 aa, Homo sapiens
  CDR3 for beta chain variable domain of TCR clone 245473 (TRBV7-8, TRBJ2-3)
CASSLEAGTDTQYF

SEQ ID NO: 490947 - protein, 14 aa, Homo sapiens
  CDR3 for alpha chain variable domain of TCR clone 245474 (TRAV8-2, TRAJ4)
CVVSPSGGYNKLIF

SEQ ID NO: 490948 - protein, 16 aa, Homo sapiens
  CDR3 for beta chain variable domain of TCR clone 245474 (TRBV19, TRBJ2-2)
CASRSPGTGATGELFF

SEQ ID NO: 490949 - protein, 14 aa, Homo sapiens
  CDR3 for alpha chain variable domain of TCR clone 245475 (TRAV12-3, TRAJ58)
CAMSTETSGSRLTF

SEQ ID NO: 490950 - protein, 11 aa, Homo sapiens
  CDR3 for beta chain variable domain of TCR clone 245475 (TRBV29-1, TRBJ2-5)
CSEDRTETQYF

SEQ ID NO: 490951 - protein, 17 aa, Homo sapiens
  CDR3 for alpha chain variable domain of TCR clone 245476 (TRAV4, TRAJ42)
CLVGVLNYGGSQGNLIF

SEQ ID NO: 490952 - protein, 12 aa, Homo sapiens
  CDR3 for beta chain variable domain of TCR clone 245476 (TRBV20-1, TRBJ2-1)
CSAQYTYNEQIF

SEQ ID NO: 490953 - protein, 10 aa, Homo sapiens
  CDR3 for alpha chain variable domain of TCR clone 245477 (TRAV23/DV6, TRAJ57)
CAASSTLSQG

SEQ ID NO: 490954 - protein, 15 aa, Homo sapiens
  CDR3 for beta chain variable domain of TCR clone 245477 (TRBV16, TRBJ1-5)
CASSQSGTADQPQHF

SEQ ID NO: 490955 - protein, 14 aa, Homo sapiens
  CDR3 for alpha chain variable domain of TCR clone 245478 (TRAV17, TRAJ54)
CATDANQGAQKLVF

SEQ ID NO: 490956 - protein, 12 aa, Homo sapiens
  CDR3 for beta chain variable domain of TCR clone 245478 (TRBV6-3, TRBJ2-1)
CASSGFYNEQFF

SEQ ID NO: 490957 - protein, 14 aa, Homo sapiens
  CDR3 for alpha chain variable domain of TCR clone 245479 (TRAV35, TRAJ13)
CAVSPSGGYQKVTF

SEQ ID NO: 490958 - protein, 13 aa, Homo sapiens
  CDR3 for beta chain variable domain of TCR clone 245479 (TRBV29-1, TRBJ1-1)
CSVGDSRNTEAFF

SEQ ID NO: 490959 - protein, 16 aa, Homo sapiens
  CDR3 for alpha chain variable domain of TCR clone 245480 (TRAV3, TRAJ42)
CAVRDIEGGSQGNLSF

SEQ ID NO: 490960 - protein, 14 aa, Homo sapiens
  CDR3 for beta chain variable domain of TCR clone 245480 (TRBV18, TRBJ1-1)
CASSPPTGRTEAFF

SEQ ID NO: 490961 - protein, 12 aa, Homo sapiens
  CDR3 for alpha chain variable domain of TCR clone 245481 (TRAV2, TRAJ33)
CAFMDSNYQLIW

SEQ ID NO: 490962 - protein, 15 aa, Homo sapiens
  CDR3 for beta chain variable domain of TCR clone 245481 (TRBV11-3, TRBJ2-7)
CASSPGPASSYEQYF

SEQ ID NO: 490963 - protein, 17 aa, Homo sapiens
  CDR3 for alpha chain variable domain of TCR clone 245482 (TRAV3, TRAJ6)
CAVRDGPRAGGNYIPTF

SEQ ID NO: 490964 - protein, 14 aa, Homo sapiens
  CDR3 for beta chain variable domain of TCR clone 245482 (TRBV14, TRBJ2-3)
CASSRKLAADTQYF

SEQ ID NO: 490965 - protein, 13 aa, Homo sapiens
  CDR3 for alpha chain variable domain of TCR clone 245483 (TRAV27, TRAJ23)
CAGVLPKGGKLIF

SEQ ID NO: 490966 - protein, 14 aa, Homo sapiens
  CDR3 for beta chain variable domain of TCR clone 245483 (TRBV5-8, TRBJ2-3)
CASSLSPSTDTHYF

SEQ ID NO: 490967 - protein, 13 aa, Homo sapiens
  CDR3 for alpha chain variable domain of TCR clone 245484 (TRAV17, TRAJ21)
CATDGGNFNKFYF

SEQ ID NO: 490968 - protein, 13 aa, Homo sapiens
  CDR3 for beta chain variable domain of TCR clone 245484 (TRBV7-2, TRBJ2-2)
CASSLAVTGELFF

SEQ ID NO: 490969 - protein, 14 aa, Homo sapiens
  CDR3 for alpha chain variable domain of TCR clone 245485 (TRAV8-2, TRAJ23)
CVVSDDNQGGKLIF

SEQ ID NO: 490970 - protein, 16 aa, Homo sapiens
  CDR3 for beta chain variable domain of TCR clone 245485 (TRBV4-2, TRBJ2-5)
CASSQELVGSQETQYF

SEQ ID NO: 490971 - protein, 15 aa, Homo sapiens
  CDR3 for alpha chain variable domain of TCR clone 245486 (TRAV8-2, TRAJ40)
CVVLGTTSGTYKYIF

SEQ ID NO: 490972 - protein, 15 aa, Homo sapiens
  CDR3 for beta chain variable domain of TCR clone 245486 (TRBV7-3, TRBJ2-1)
CQQLRGLSLLNEQFF

SEQ ID NO: 490973 - protein, 14 aa, Homo sapiens
  CDR3 for alpha chain variable domain of TCR clone 245487 (TRAV17, TRAJ45)
SVVRTGGGADGLTF

SEQ ID NO: 490974 - protein, 15 aa, Homo sapiens
  CDR3 for beta chain variable domain of TCR clone 245487 (TRBV5-7, TRBJ1-5)
CASSYGKLWDQPQHF

SEQ ID NO: 490975 - protein, 13 aa, Homo sapiens
  CDR3 for alpha chain variable domain of TCR clone 245488 (TRAV22, TRAJ29)
CAVGGSGKTPLVF

SEQ ID NO: 490976 - protein, 13 aa, Homo sapiens
  CDR3 for beta chain variable domain of TCR clone 245488 (TRBV19, TRBJ2-7)
CASRKAGGSEQYF

SEQ ID NO: 490977 - protein, 15 aa, Homo sapiens
  CDR3 for alpha chain variable domain of TCR clone 245489 (TRAV2, TRAJ37)
CAVEDGSSNTGKLIF

SEQ ID NO: 490978 - protein, 18 aa, Homo sapiens
  CDR3 for beta chain variable domain of TCR clone 245489 (TRBV4-1, TRBJ1-5)
CASSHDPRGQGLNQPQHF

SEQ ID NO: 490979 - protein, 16 aa, Homo sapiens
  CDR3 for alpha chain variable domain of TCR clone 245490 (TRAV30, TRAJ32)
CGTESSYGGATNKLIF

SEQ ID NO: 490980 - protein, 13 aa, Homo sapiens
  CDR3 for beta chain variable domain of TCR clone 245490 (TRBV20-1, TRBJ2-7)
CSATHTSGYEQYF

SEQ ID NO: 490981 - protein, 16 aa, Homo sapiens
  CDR3 for alpha chain variable domain of TCR clone 245491 (TRAV3, TRAJ28)
CAVLPRSGAGSYQLTF

SEQ ID NO: 490982 - protein, 14 aa, Homo sapiens
  CDR3 for beta chain variable domain of TCR clone 245491 (TRBV11-2, TRBJ1-2)
CASSLYRGNYGYTF

SEQ ID NO: 490983 - protein, 16 aa, Homo sapiens
  CDR3 for alpha chain variable domain of TCR clone 245492 (TRAV12-3, TRAJ53)
CAMSPGSGGSNYKLTF

SEQ ID NO: 490984 - protein, 13 aa, Homo sapiens
  CDR3 for beta chain variable domain of TCR clone 245492 (TRBV7-9, TRBJ2-3)
CASSPGGHVTQYF

SEQ ID NO: 490985 - protein, 12 aa, Homo sapiens
  CDR3 for alpha chain variable domain of TCR clone 245493 (TRAV12-3, TRAJ17)
CAMTLTGTKLTF

SEQ ID NO: 490986 - protein, 20 aa, Homo sapiens
  CDR3 for beta chain variable domain of TCR clone 245493 (TRBV7-8, TRBJ2-2)
CASSHLFPGPTIHITGELFF

SEQ ID NO: 490987 - protein, 14 aa, Homo sapiens
  CDR3 for alpha chain variable domain of TCR clone 245494 (TRAV13-1, TRAJ35)
CAASKGGFGNVLHC

SEQ ID NO: 490988 - protein, 15 aa, Homo sapiens
  CDR3 for beta chain variable domain of TCR clone 245494 (TRBV4-1, TRBJ1-5)
RQQPGGHTTNQPQHF

SEQ ID NO: 490989 - protein, 11 aa, Homo sapiens
  CDR3 for alpha chain variable domain of TCR clone 245495 (TRAV12-1, TRAJ26)
CVVAYGQNFVF

SEQ ID NO: 490990 - protein, 14 aa, Homo sapiens
  CDR3 for beta chain variable domain of TCR clone 245495 (TRBV7-9, TRBJ2-1)
CASSPRDSLYEQFF

SEQ ID NO: 490991 - protein, 18 aa, Homo sapiens
  CDR3 for alpha chain variable domain of TCR clone 245496 (TRAV36/DV7, TRAJ13)
CLWFWGSGENGGYQKVTF

SEQ ID NO: 490992 - protein, 15 aa, Homo sapiens
  CDR3 for beta chain variable domain of TCR clone 245496 (TRBV19, TRBJ2-1)
CPSSTGTSSYNEQFF

SEQ ID NO: 490993 - protein, 12 aa, Homo sapiens
  CDR3 for alpha chain variable domain of TCR clone 245497 (TRAV12-1, TRAJ31)
CVSWNNNARLMF

SEQ ID NO: 490994 - protein, 15 aa, Homo sapiens
  CDR3 for beta chain variable domain of TCR clone 245497 (TRBV7-2, TRBJ1-5)
CASSLDRGHDQPQHF

SEQ ID NO: 490995 - protein, 15 aa, Homo sapiens
  CDR3 for alpha chain variable domain of TCR clone 245498 (TRAV13-1, TRAJ48)
CAPLGSNFGNEKLTF

SEQ ID NO: 490996 - protein, 15 aa, Homo sapiens
  CDR3 for beta chain variable domain of TCR clone 245498 (TRBV10-3, TRBJ2-2)
CAISPGRTNTGELFF

SEQ ID NO: 490997 - protein, 16 aa, Homo sapiens
  CDR3 for alpha chain variable domain of TCR clone 245499 (TRAV1-2, TRAJ10)
CAVRDQGGGGGNKLTF

SEQ ID NO: 490998 - protein, 15 aa, Homo sapiens
  CDR3 for beta chain variable domain of TCR clone 245499 (TRBV2, TRBJ2-1)
CASSEEREGDNEQFF

SEQ ID NO: 490999 - protein, 19 aa, Homo sapiens
  CDR3 for alpha chain variable domain of TCR clone 245500 (TRAV13-1, TRAJ52)
CAASPHQNAGGTSYGKLTF

SEQ ID NO: 491000 - protein, 13 aa, Homo sapiens
  CDR3 for beta chain variable domain of TCR clone 245500 (TRBV29-1, TRBJ2-5)
CSATTSGGETQYF

SEQ ID NO: 491001 - protein, 15 aa, Homo sapiens
  CDR3 for alpha chain variable domain of TCR clone 245501 (TRAV17, TRAJ57)
CAKGPSQGGSEKLVF

SEQ ID NO: 491002 - protein, 16 aa, Homo sapiens
  CDR3 for beta chain variable domain of TCR clone 245501 (TRBV4-3, TRBJ2-2)
CASSHLQGSGTGELFF

SEQ ID NO: 491003 - protein, 14 aa, Homo sapiens
  CDR3 for alpha chain variable domain of TCR clone 245502 (TRAV12-3, TRAJ10)
SHLPLTGGGKKLTF

SEQ ID NO: 491004 - protein, 15 aa, Homo sapiens
  CDR3 for beta chain variable domain of TCR clone 245502 (TRBV25-1, TRBJ2-4)
CASSETESAKNIQYF

SEQ ID NO: 491005 - protein, 17 aa, Homo sapiens
  CDR3 for alpha chain variable domain of TCR clone 245503 (TRAV3, TRAJ6)
CAVRGGPRAGGSYKPTF

SEQ ID NO: 491006 - protein, 14 aa, Homo sapiens
  CDR3 for beta chain variable domain of TCR clone 245503 (TRBV7-2, TRBJ2-7)
CASSPKTSFYEQYF

SEQ ID NO: 491007 - protein, 13 aa, Homo sapiens
  CDR3 for alpha chain variable domain of TCR clone 245504 (TRAV12-3, TRAJ6)
CAMIPGGSYIPTF

SEQ ID NO: 491008 - protein, 14 aa, Homo sapiens
  CDR3 for beta chain variable domain of TCR clone 245504 (TRBV7-2, TRBJ2-7)
CASSIYPGRDEQYF

SEQ ID NO: 491009 - protein, 15 aa, Homo sapiens
  CDR3 for alpha chain variable domain of TCR clone 245505 (TRAV27, TRAJ38)
CAARRNAGNNRKLIL

SEQ ID NO: 491010 - protein, 14 aa, Homo sapiens
  CDR3 for beta chain variable domain of TCR clone 245505 (TRBV6-1, TRBJ2-1)
CASSLGLAGLWEFF

SEQ ID NO: 491011 - protein, 14 aa, Homo sapiens
  CDR3 for alpha chain variable domain of TCR clone 245506 (TRAV16, TRAJ40)
CALHESYYLRNLQI

SEQ ID NO: 491012 - protein, 16 aa, Homo sapiens
  CDR3 for beta chain variable domain of TCR clone 245506 (TRBV7-3, TRBJ2-2)
CASSLWDTTNTGELFF

SEQ ID NO: 491013 - protein, 13 aa, Homo sapiens
  CDR3 for alpha chain variable domain of TCR clone 245507 (TRAV21, TRAJ26)
CAVLDNYGQNFVF

SEQ ID NO: 491014 - protein, 16 aa, Homo sapiens
  CDR3 for beta chain variable domain of TCR clone 245507 (TRBV29-1, TRBJ2-2)
CIVETRASGNTGELFF

SEQ ID NO: 491015 - protein, 17 aa, Homo sapiens
  CDR3 for alpha chain variable domain of TCR clone 245508 (TRAV1-2, TRAJ37)
CAVRDFMALATQANYSL

SEQ ID NO: 491016 - protein, 14 aa, Homo sapiens
  CDR3 for beta chain variable domain of TCR clone 245508 (TRBV2, TRBJ2-5)
CASSEVLAQETQYF

SEQ ID NO: 491017 - protein, 13 aa, Homo sapiens
  CDR3 for alpha chain variable domain of TCR clone 245509 (TRAV13-1, TRAJ15)
CAALYQAGTALIF

SEQ ID NO: 491018 - protein, 16 aa, Homo sapiens
  CDR3 for beta chain variable domain of TCR clone 245509 (TRBV5-1, TRBJ2-2)
CASSSRTGGRTGELFF

SEQ ID NO: 491019 - protein, 17 aa, Homo sapiens
  CDR3 for alpha chain variable domain of TCR clone 245510 (TRAV3, TRAJ6)
CAVRDGPRAGGSYIPTF

SEQ ID NO: 491020 - protein, 14 aa, Homo sapiens
  CDR3 for beta chain variable domain of TCR clone 245510 (TRBV6-5, TRBJ1-2)
CASSREAPSYGYTF

SEQ ID NO: 491021 - protein, 11 aa, Homo sapiens
  CDR3 for alpha chain variable domain of TCR clone 245511 (TRAV12-1, TRAJ30)
CVVNGQDKIIF

SEQ ID NO: 491022 - protein, 12 aa, Homo sapiens
  CDR3 for beta chain variable domain of TCR clone 245511 (TRBV27, TRBJ2-2)
CASKLFTRELFF

SEQ ID NO: 491023 - protein, 16 aa, Homo sapiens
  CDR3 for alpha chain variable domain of TCR clone 245512 (TRAV36/DV7, TRAJ30)
CAVETYGLDRDDKIIF

SEQ ID NO: 491024 - protein, 13 aa, Homo sapiens
  CDR3 for beta chain variable domain of TCR clone 245512 (TRBV7-2, TRBJ2-2)
CASSSVRAGELFF

SEQ ID NO: 491025 - protein, 13 aa, Homo sapiens
  CDR3 for alpha chain variable domain of TCR clone 245513 (TRAV1-2, TRAJ9)
CAALNTGGFKTIF

SEQ ID NO: 491026 - protein, 13 aa, Homo sapiens
  CDR3 for beta chain variable domain of TCR clone 245513 (TRBV19, TRBJ1-2)
CASSVPGQDSYTV

SEQ ID NO: 491027 - protein, 11 aa, Homo sapiens
  CDR3 for alpha chain variable domain of TCR clone 245514 (TRAV12-3, TRAJ43)
CAMSVSNDMRF

SEQ ID NO: 491028 - protein, 12 aa, Homo sapiens
  CDR3 for beta chain variable domain of TCR clone 245514 (TRBV5-1, TRBJ2-1)
CASIGGYNEQFF

SEQ ID NO: 491029 - protein, 14 aa, Homo sapiens
  CDR3 for alpha chain variable domain of TCR clone 245515 (TRAV26-1, TRAJ39)
CIVRGSGAGNMVTF

SEQ ID NO: 491030 - protein, 15 aa, Homo sapiens
  CDR3 for beta chain variable domain of TCR clone 245515 (TRBV7-9, TRBJ1-5)
CASSQGHQPNQPQHF

SEQ ID NO: 491031 - protein, 18 aa, Homo sapiens
  CDR3 for alpha chain variable domain of TCR clone 245516 (TRAV16, TRAJ52)
CALSGVDAGGTSYGKLTF

SEQ ID NO: 491032 - protein, 14 aa, Homo sapiens
  CDR3 for beta chain variable domain of TCR clone 245516 (TRBV12-5, TRBJ2-5)
CASGSRTHQETQYF

SEQ ID NO: 491033 - protein, 13 aa, Homo sapiens
  CDR3 for alpha chain variable domain of TCR clone 245517 (TRAV16, TRAJ31)
CALSAHNNARLML

SEQ ID NO: 491034 - protein, 14 aa, Homo sapiens
  CDR3 for beta chain variable domain of TCR clone 245517 (TRBV7-2, TRBJ2-5)
CASSFTQGQETQYF

SEQ ID NO: 491035 - protein, 12 aa, Homo sapiens
  CDR3 for alpha chain variable domain of TCR clone 245518 (TRAV17, TRAJ57)
CATDARSEKLVF

SEQ ID NO: 491036 - protein, 14 aa, Homo sapiens
  CDR3 for beta chain variable domain of TCR clone 245518 (TRBV11-3, TRBJ2-7)
CASSPDRNTYEQYF

SEQ ID NO: 491037 - protein, 16 aa, Homo sapiens
  CDR3 for alpha chain variable domain of TCR clone 245519 (TRAV21, TRAJ37)
CAVRTAGPSNTGKLIF

SEQ ID NO: 491038 - protein, 13 aa, Homo sapiens
  CDR3 for beta chain variable domain of TCR clone 245519 (TRBV7-9, TRBJ2-5)
CASLPSVRETQYF

SEQ ID NO: 491039 - protein, 12 aa, Homo sapiens
  CDR3 for alpha chain variable domain of TCR clone 245520 (TRAV21, TRAJ11)
CAATSGYSPPTF

SEQ ID NO: 491040 - protein, 14 aa, Homo sapiens
  CDR3 for beta chain variable domain of TCR clone 245520 (TRBV20-1, TRBJ2-7)
CSAPELAGVGEQYF

SEQ ID NO: 491041 - protein, 15 aa, Homo sapiens
  CDR3 for alpha chain variable domain of TCR clone 245521 (TRAV23/DV6, TRAJ32)
CAASKMGGATNKLIF

SEQ ID NO: 491042 - protein, 14 aa, Homo sapiens
  CDR3 for beta chain variable domain of TCR clone 245521 (TRBV12-5, TRBJ2-5)
CASGSRTHQETQYF

SEQ ID NO: 491043 - protein, 13 aa, Homo sapiens
  CDR3 for alpha chain variable domain of TCR clone 245522 (TRAV12-2, TRAJ20)
CAVYPSNDYKLSF

SEQ ID NO: 491044 - protein, 15 aa, Homo sapiens
  CDR3 for beta chain variable domain of TCR clone 245522 (TRBV27, TRBJ2-5)
CASSLYPQGGETQYF

SEQ ID NO: 491045 - protein, 12 aa, Homo sapiens
  CDR3 for alpha chain variable domain of TCR clone 245523 (TRAV25, TRAJ29)
CAGPRGNTPLVF

SEQ ID NO: 491046 - protein, 13 aa, Homo sapiens
  CDR3 for beta chain variable domain of TCR clone 245523 (TRBV20-1, TRBJ1-1)
CSARGGGNTEAFF

SEQ ID NO: 491047 - protein, 13 aa, Homo sapiens
  CDR3 for alpha chain variable domain of TCR clone 245524 (TRAV17, TRAJ26)
CATVDNYGQNFVF

SEQ ID NO: 491048 - protein, 16 aa, Homo sapiens
  CDR3 for beta chain variable domain of TCR clone 245524 (TRBV4-2, TRBJ2-3)
CASSQELAGDTDTQYF

SEQ ID NO: 491049 - protein, 12 aa, Homo sapiens
  CDR3 for alpha chain variable domain of TCR clone 245525 (TRAV12-3, TRAJ42)
CAPGGSQGNLIF

SEQ ID NO: 491050 - protein, 14 aa, Homo sapiens
  CDR3 for beta chain variable domain of TCR clone 245525 (TRBV18, TRBJ2-5)
CASSPGVSQETQYF

SEQ ID NO: 491051 - protein, 14 aa, Homo sapiens
  CDR3 for alpha chain variable domain of TCR clone 245526 (TRAV6, TRAJ6)
CALPTSGGSYIPTF

SEQ ID NO: 491052 - protein, 13 aa, Homo sapiens
  CDR3 for beta chain variable domain of TCR clone 245526 (TRBV19, TRBJ1-2)
CASSVPGQDGYTF

SEQ ID NO: 491053 - protein, 17 aa, Homo sapiens
  CDR3 for alpha chain variable domain of TCR clone 245527 (TRAV3, TRAJ6)
CAVRDGPRAGGSYIPTF

SEQ ID NO: 491054 - protein, 15 aa, Homo sapiens
  CDR3 for beta chain variable domain of TCR clone 245527 (TRBV5-8, TRBJ2-2)
RASSLDRGATGELFF

SEQ ID NO: 491055 - protein, 12 aa, Homo sapiens
  CDR3 for alpha chain variable domain of TCR clone 245528 (TRAV13-2, TRAJ23)
CAERHRGGKLIF

SEQ ID NO: 491056 - protein, 15 aa, Homo sapiens
  CDR3 for beta chain variable domain of TCR clone 245528 (TRBV27, TRBJ2-7)
CASSTAGTGSYEQYF

SEQ ID NO: 491057 - protein, 13 aa, Homo sapiens
  CDR3 for alpha chain variable domain of TCR clone 245529 (TRAV21, TRAJ27)
CAARPGNAGKSTF

SEQ ID NO: 491058 - protein, 16 aa, Homo sapiens
  CDR3 for beta chain variable domain of TCR clone 245529 (TRBV7-7, TRBJ2-1)
CASSLASGTSYNEQFF

SEQ ID NO: 491059 - protein, 16 aa, Homo sapiens
  CDR3 for alpha chain variable domain of TCR clone 245530 (TRAV12-2, TRAJ10)
CAVNRVLTGEETNSPF

SEQ ID NO: 491060 - protein, 12 aa, Homo sapiens
  CDR3 for beta chain variable domain of TCR clone 245530 (TRBV28, TRBJ2-7)
CASSFSSYEQYF

SEQ ID NO: 491061 - protein, 18 aa, Homo sapiens
  CDR3 for alpha chain variable domain of TCR clone 245531 (TRAV12-1, TRAJ15)
CVVSPAGQPGRNCSDLVE

SEQ ID NO: 491062 - protein, 13 aa, Homo sapiens
  CDR3 for beta chain variable domain of TCR clone 245531 (TRBV7-2, TRBJ2-4)
CASSREHANIQYF

SEQ ID NO: 491063 - protein, 18 aa, Homo sapiens
  CDR3 for alpha chain variable domain of TCR clone 245532 (TRAV13-1, TRAJ52)
CAASKRSAGGTSYGKLTF

SEQ ID NO: 491064 - protein, 14 aa, Homo sapiens
  CDR3 for beta chain variable domain of TCR clone 245532 (TRBV7-2, TRBJ2-7)
CASSPKTSCYEQYF

SEQ ID NO: 491065 - protein, 14 aa, Homo sapiens
  CDR3 for alpha chain variable domain of TCR clone 245533 (TRAV1-2, TRAJ8)
CAVREDTGFQKLVF

SEQ ID NO: 491066 - protein, 15 aa, Homo sapiens
  CDR3 for beta chain variable domain of TCR clone 245533 (TRBV11-2, TRBJ2-1)
CASSSSTISYNEQFF

SEQ ID NO: 491067 - protein, 16 aa, Homo sapiens
  CDR3 for alpha chain variable domain of TCR clone 245534 (TRAV1-2, TRAJ10)
CAVRGVLTGGGNKLTF

SEQ ID NO: 491068 - protein, 20 aa, Homo sapiens
  CDR3 for beta chain variable domain of TCR clone 245534 (TRBV7-8, TRBJ2-2)
CASSDLFPGPTIHITGELFF

SEQ ID NO: 491069 - protein, 13 aa, Homo sapiens
  CDR3 for alpha chain variable domain of TCR clone 245535 (TRAV3, TRAJ21)
CAVATSTNFTLYL

SEQ ID NO: 491070 - protein, 16 aa, Homo sapiens
  CDR3 for beta chain variable domain of TCR clone 245535 (TRBV19, TRBJ2-1)
CASSKAGPSSYNEQFF

SEQ ID NO: 491071 - protein, 14 aa, Homo sapiens
  CDR3 for alpha chain variable domain of TCR clone 245536 (TRAV12-3, TRAJ10)
SHLPLTGGGNKLTF

SEQ ID NO: 491072 - protein, 19 aa, Homo sapiens
  CDR3 for beta chain variable domain of TCR clone 245536 (TRBV11-3, TRBJ2-2)
CASSTRPGAKTTNTGELFF

SEQ ID NO: 491073 - protein, 15 aa, Homo sapiens
  CDR3 for alpha chain variable domain of TCR clone 245537 (TRAV3, TRAJ5)
CAVRDRKTGRRAPTL

SEQ ID NO: 491074 - protein, 15 aa, Homo sapiens
  CDR3 for beta chain variable domain of TCR clone 245537 (TRBV7-8, TRBJ2-1)
CASSLADSLYNEQFF

SEQ ID NO: 491075 - protein, 17 aa, Homo sapiens
  CDR3 for alpha chain variable domain of TCR clone 245538 (TRAV3, TRAJ12)
CAVRDGGRMDSSYKLIF

SEQ ID NO: 491076 - protein, 13 aa, Homo sapiens
  CDR3 for beta chain variable domain of TCR clone 245538 (TRBV10-2, TRBJ2-7)
CASGASGGYEQYF

SEQ ID NO: 491077 - protein, 14 aa, Homo sapiens
  CDR3 for alpha chain variable domain of TCR clone 245539 (TRAV25, TRAJ22)
CAVRSSGSARQLTF

SEQ ID NO: 491078 - protein, 19 aa, Homo sapiens
  CDR3 for beta chain variable domain of TCR clone 245539 (TRBV4-2, TRBJ1-1)
CISVPAAPLPVGQHTEAFF

SEQ ID NO: 491079 - protein, 14 aa, Homo sapiens
  CDR3 for alpha chain variable domain of TCR clone 245540 (TRAV12-2, TRAJ13)
CAVKKTGGYQKVTF

SEQ ID NO: 491080 - protein, 15 aa, Homo sapiens
  CDR3 for beta chain variable domain of TCR clone 245540 (TRBV12-4, TRBJ1-1)
CASSSSGTGNTEALF

SEQ ID NO: 491081 - protein, 13 aa, Homo sapiens
  CDR3 for alpha chain variable domain of TCR clone 245541 (TRAV12-1, TRAJ16)
CVVNTRNGQKLLF

SEQ ID NO: 491082 - protein, 17 aa, Homo sapiens
  CDR3 for beta chain variable domain of TCR clone 245541 (TRBV4-1, TRBJ2-3)
CASSQGYVSGGTDTQYF

SEQ ID NO: 491083 - protein, 10 aa, Homo sapiens
  CDR3 for alpha chain variable domain of TCR clone 245542 (TRAV12-2, TRAJ27)
CGANAGKSTF

SEQ ID NO: 491084 - protein, 12 aa, Homo sapiens
  CDR3 for beta chain variable domain of TCR clone 245542 (TRBV28, TRBJ2-3)
CASSLYRDTQYF

SEQ ID NO: 491085 - protein, 15 aa, Homo sapiens
  CDR3 for alpha chain variable domain of TCR clone 245543 (TRAV36/DV7, TRAJ54)
CAVAKPVQGAQKLVF

SEQ ID NO: 491086 - protein, 14 aa, Homo sapiens
  CDR3 for beta chain variable domain of TCR clone 245543 (TRBV4-3, TRBJ2-2)
CASSQGHVTGELFF

SEQ ID NO: 491087 - protein, 15 aa, Homo sapiens
  CDR3 for alpha chain variable domain of TCR clone 245544 (TRAV12-2, TRAJ53)
RAVNGGGGSNYKLTF

SEQ ID NO: 491088 - protein, 16 aa, Homo sapiens
  CDR3 for beta chain variable domain of TCR clone 245544 (TRBV4-1, TRBJ1-2)
CASSQDAGQVLYGYTF

SEQ ID NO: 491089 - protein, 13 aa, Homo sapiens
  CDR3 for alpha chain variable domain of TCR clone 245545 (TRAV14/DV4, TRAJ23)
CAMREVKGGKLIF

SEQ ID NO: 491090 - protein, 15 aa, Homo sapiens
  CDR3 for beta chain variable domain of TCR clone 245545 (TRBV6-3, TRBJ2-1)
CSSSYASDSYNEQFF

SEQ ID NO: 491091 - protein, 16 aa, Homo sapiens
  CDR3 for alpha chain variable domain of TCR clone 245546 (TRAV30, TRAJ24)
CGTEIVDADSWGQFQF

SEQ ID NO: 491092 - protein, 12 aa, Homo sapiens
  CDR3 for beta chain variable domain of TCR clone 245546 (TRBV29-1, TRBJ2-3)
CSVTGGADTQYF

SEQ ID NO: 491093 - protein, 10 aa, Homo sapiens
  CDR3 for alpha chain variable domain of TCR clone 245547 (TRAV26-1, TRAJ22)
CILSLNFFWF

SEQ ID NO: 491094 - protein, 14 aa, Homo sapiens
  CDR3 for beta chain variable domain of TCR clone 245547 (TRBV6-5, TRBJ2-7)
CASSRTDRGYEQYS

SEQ ID NO: 491095 - protein, 15 aa, Homo sapiens
  CDR3 for alpha chain variable domain of TCR clone 245548 (TRAV8-4, TRAJ47)
CAVSDPEEYGNKLVF

SEQ ID NO: 491096 - protein, 13 aa, Homo sapiens
  CDR3 for beta chain variable domain of TCR clone 245548 (TRBV12-5, TRBJ2-3)
CASGDRQSDTQYF

SEQ ID NO: 491097 - protein, 13 aa, Homo sapiens
  CDR3 for alpha chain variable domain of TCR clone 245549 (TRAV12-2, TRAJ47)
CAGFMEYGNKLVF

SEQ ID NO: 491098 - protein, 14 aa, Homo sapiens
  CDR3 for beta chain variable domain of TCR clone 245549 (TRBV4-1, TRBJ1-5)
CASSQGPTNQPQHF

SEQ ID NO: 491099 - protein, 16 aa, Homo sapiens
  CDR3 for alpha chain variable domain of TCR clone 245550 (TRAV12-3, TRAJ50)
CAMRDPMKTSYDKVIF

SEQ ID NO: 491100 - protein, 15 aa, Homo sapiens
  CDR3 for beta chain variable domain of TCR clone 245550 (TRBV11-2, TRBJ1-3)
CASSLDGTVGNTIYF

SEQ ID NO: 491101 - protein, 14 aa, Homo sapiens
  CDR3 for alpha chain variable domain of TCR clone 245551 (TRAV12-1, TRAJ8)
CVVNSNTGFQKPVF

SEQ ID NO: 491102 - protein, 16 aa, Homo sapiens
  CDR3 for beta chain variable domain of TCR clone 245551 (TRBV20-1, TRBJ2-2)
CSARDDRVGLTGELFF

SEQ ID NO: 491103 - protein, 15 aa, Homo sapiens
  CDR3 for alpha chain variable domain of TCR clone 245552 (TRAV13-1, TRAJ4)
CAASLISGGYNKLIL

SEQ ID NO: 491104 - protein, 15 aa, Homo sapiens
  CDR3 for beta chain variable domain of TCR clone 245552 (TRBV28, TRBJ2-3)
CASTPRGENTDTQYF

SEQ ID NO: 491105 - protein, 12 aa, Homo sapiens
  CDR3 for alpha chain variable domain of TCR clone 245553 (TRAV38-1, TRAJ32)
CAPLGATNKLIF

SEQ ID NO: 491106 - protein, 16 aa, Homo sapiens
  CDR3 for beta chain variable domain of TCR clone 245553 (TRBV13, TRBJ2-3)
CQQPLQGSGGRNTQYF

SEQ ID NO: 491107 - protein, 10 aa, Homo sapiens
  CDR3 for alpha chain variable domain of TCR clone 245554 (TRAV36/DV7, TRAJ48)
CAVGNEKLTF

SEQ ID NO: 491108 - protein, 14 aa, Homo sapiens
  CDR3 for beta chain variable domain of TCR clone 245554 (TRBV18, TRBJ2-7)
CASSPRGGAYEQYF

SEQ ID NO: 491109 - protein, 14 aa, Homo sapiens
  CDR3 for alpha chain variable domain of TCR clone 245555 (TRAV12-3, TRAJ58)
CAMSTETSGSRWTF

SEQ ID NO: 491110 - protein, 13 aa, Homo sapiens
  CDR3 for beta chain variable domain of TCR clone 245555 (TRBV27, TRBJ2-3)
CASSWGRTDTQYF

SEQ ID NO: 491111 - protein, 13 aa, Homo sapiens
  CDR3 for alpha chain variable domain of TCR clone 245556 (TRAV26-1, TRAJ38)
CIADNGNNRKLIW

SEQ ID NO: 491112 - protein, 13 aa, Homo sapiens
  CDR3 for beta chain variable domain of TCR clone 245556 (TRBV20-1, TRBJ1-1)
CSARGGGNTEAFF

SEQ ID NO: 491113 - protein, 15 aa, Homo sapiens
  CDR3 for alpha chain variable domain of TCR clone 245557 (TRAV12-3, TRAJ6)
CAMSATIGGSYIPTF

SEQ ID NO: 491114 - protein, 13 aa, Homo sapiens
  CDR3 for beta chain variable domain of TCR clone 245557 (TRBV20-1, TRBJ1-2)
CSASMGQGVANYG

SEQ ID NO: 491115 - protein, 18 aa, Homo sapiens
  CDR3 for alpha chain variable domain of TCR clone 245558 (TRAV21, TRAJ52)
CAVRPSPAGGTSYGKLTF

SEQ ID NO: 491116 - protein, 17 aa, Homo sapiens
  CDR3 for beta chain variable domain of TCR clone 245558 (TRBV13, TRBJ2-3)
CASSLPRVGGGGEYAVF

SEQ ID NO: 491117 - protein, 15 aa, Homo sapiens
  CDR3 for alpha chain variable domain of TCR clone 245559 (TRAV3, TRAJ29)
CAVRALLSGNTPLVF

SEQ ID NO: 491118 - protein, 15 aa, Homo sapiens
  CDR3 for beta chain variable domain of TCR clone 245559 (TRBV28, TRBJ1-1)
CASRIKGGLNTEAFF

SEQ ID NO: 491119 - protein, 14 aa, Homo sapiens
  CDR3 for alpha chain variable domain of TCR clone 245560 (TRAV17, TRAJ4)
CATAPLGGYNKLIF

SEQ ID NO: 491120 - protein, 11 aa, Homo sapiens
  CDR3 for beta chain variable domain of TCR clone 245560 (TRBV6-3, TRBJ2-3)
CATGQADTQYF

SEQ ID NO: 491121 - protein, 14 aa, Homo sapiens
  CDR3 for alpha chain variable domain of TCR clone 245561 (TRAV1-2, TRAJ16)
CAVNRFSDGQKLLF

SEQ ID NO: 491122 - protein, 15 aa, Homo sapiens
  CDR3 for beta chain variable domain of TCR clone 245561 (TRBV7-9, TRBJ1-6)
CASSSAGRGNSPLHY

SEQ ID NO: 491123 - protein, 10 aa, Homo sapiens
  CDR3 for alpha chain variable domain of TCR clone 245562 (TRAV12-2, TRAJ22)
CAVNETQLTF

SEQ ID NO: 491124 - protein, 14 aa, Homo sapiens
  CDR3 for beta chain variable domain of TCR clone 245562 (TRBV4-2, TRBJ2-1)
CASGLDRAYNEQFF

SEQ ID NO: 491125 - protein, 15 aa, Homo sapiens
  CDR3 for alpha chain variable domain of TCR clone 245563 (TRAV17, TRAJ23)
CATYAEDNQGGKLSF

SEQ ID NO: 491126 - protein, 12 aa, Homo sapiens
  CDR3 for beta chain variable domain of TCR clone 245563 (TRBV2, TRBJ2-1)
CAKREGYNEQFF

SEQ ID NO: 491127 - protein, 11 aa, Homo sapiens
  CDR3 for alpha chain variable domain of TCR clone 245564 (TRAV21, TRAJ31)
CAVRNNARLMF

SEQ ID NO: 491128 - protein, 13 aa, Homo sapiens
  CDR3 for beta chain variable domain of TCR clone 245564 (TRBV19, TRBJ1-5)
CASSMRGYQPQHF

SEQ ID NO: 491129 - protein, 12 aa, Homo sapiens
  CDR3 for alpha chain variable domain of TCR clone 245565 (TRAV12-2, TRAJ30)
CAVRNRDDRIIF

SEQ ID NO: 491130 - protein, 13 aa, Homo sapiens
  CDR3 for beta chain variable domain of TCR clone 245565 (TRBV7-8, TRBJ2-7)
CASSLTGGREQYF

SEQ ID NO: 491131 - protein, 13 aa, Homo sapiens
  CDR3 for alpha chain variable domain of TCR clone 245566 (TRAV13-1, TRAJ11)
CAAVLAGYSTLTF

SEQ ID NO: 491132 - protein, 17 aa, Homo sapiens
  CDR3 for beta chain variable domain of TCR clone 245566 (TRBV25-1, TRBJ2-7)
CSSSDARVVFSSYEQYF

SEQ ID NO: 491133 - protein, 11 aa, Homo sapiens
  CDR3 for alpha chain variable domain of TCR clone 245567 (TRAV17, TRAJ53)
CATGSNYKLTF

SEQ ID NO: 491134 - protein, 17 aa, Homo sapiens
  CDR3 for beta chain variable domain of TCR clone 245567 (TRBV11-2, TRBJ2-1)
CASSLYPPGVEYNEQFF

SEQ ID NO: 491135 - protein, 12 aa, Homo sapiens
  CDR3 for alpha chain variable domain of TCR clone 245568 (TRAV29/DV5, TRAJ41)
CAASDSGYALNF

SEQ ID NO: 491136 - protein, 13 aa, Homo sapiens
  CDR3 for beta chain variable domain of TCR clone 245568 (TRBV20-1, TRBJ1-1)
CSARGGGNTEAFF

SEQ ID NO: 491137 - protein, 15 aa, Homo sapiens
  CDR3 for alpha chain variable domain of TCR clone 245569 (TRAV12-3, TRAJ6)
CAMSATTGGSYIPTF

SEQ ID NO: 491138 - protein, 15 aa, Homo sapiens
  CDR3 for beta chain variable domain of TCR clone 245569 (TRBV6-5, TRBJ2-7)
CASSYSTSGNYEQYF

SEQ ID NO: 491139 - protein, 14 aa, Homo sapiens
  CDR3 for alpha chain variable domain of TCR clone 245570 (TRAV1-2, TRAJ8)
CAVREDTGFQKLVF

SEQ ID NO: 491140 - protein, 16 aa, Homo sapiens
  CDR3 for beta chain variable domain of TCR clone 245570 (TRBV4-2, TRBJ1-1)
CASRPLDGGGDTEAFF

SEQ ID NO: 491141 - protein, 12 aa, Homo sapiens
  CDR3 for alpha chain variable domain of TCR clone 245571 (TRAV12-1, TRAJ34)
CVATFNTDKLIF

SEQ ID NO: 491142 - protein, 14 aa, Homo sapiens
  CDR3 for beta chain variable domain of TCR clone 245571 (TRBV19, TRBJ1-1)
CASLRTGLNTEAFF

SEQ ID NO: 491143 - protein, 14 aa, Homo sapiens
  CDR3 for alpha chain variable domain of TCR clone 245572 (TRAV8-3, TRAJ9)
CAVVYNTGGFKTIF

SEQ ID NO: 491144 - protein, 13 aa, Homo sapiens
  CDR3 for beta chain variable domain of TCR clone 245572 (TRBV7-3, TRBJ2-2)
CSSSGGYTGELFF

SEQ ID NO: 491145 - protein, 14 aa, Homo sapiens
  CDR3 for alpha chain variable domain of TCR clone 245573 (TRAV8-6, TRAJ53)
CAVSDIGSNYKLPF

SEQ ID NO: 491146 - protein, 12 aa, Homo sapiens
  CDR3 for beta chain variable domain of TCR clone 245573 (TRBV11-2, TRBJ2-2)
CASSLGGGELFF

SEQ ID NO: 491147 - protein, 18 aa, Homo sapiens
  CDR3 for alpha chain variable domain of TCR clone 245574 (TRAV21, TRAJ52)
CAVRPSPAGGTSYGQLTF

SEQ ID NO: 491148 - protein, 14 aa, Homo sapiens
  CDR3 for beta chain variable domain of TCR clone 245574 (TRBV4-1, TRBJ2-2)
CASSQAVNTGELSF

SEQ ID NO: 491149 - protein, 16 aa, Homo sapiens
  CDR3 for alpha chain variable domain of TCR clone 245575 (TRAV30, TRAJ24)
CGTEIVHADSWGKFQF

SEQ ID NO: 491150 - protein, 12 aa, Homo sapiens
  CDR3 for beta chain variable domain of TCR clone 245575 (TRBV12-4, TRBJ2-3)
CASSSTTDTQHF

SEQ ID NO: 491151 - protein, 15 aa, Homo sapiens
  CDR3 for alpha chain variable domain of TCR clone 245576 (TRAV3, TRAJ7)
CALRDKDNGNNRLAF

SEQ ID NO: 491152 - protein, 19 aa, Homo sapiens
  CDR3 for beta chain variable domain of TCR clone 245576 (TRBV5-8, TRBJ2-3)
CASSFLGTSGSHRTDTQYF

SEQ ID NO: 491153 - protein, 15 aa, Homo sapiens
  CDR3 for alpha chain variable domain of TCR clone 245577 (TRAV2, TRAJ15)
CAVEDREQAGTALIF

SEQ ID NO: 491154 - protein, 14 aa, Homo sapiens
  CDR3 for beta chain variable domain of TCR clone 245577 (TRBV11-2, TRBJ2-7)
RASSLGAGAYEQYF

SEQ ID NO: 491155 - protein, 16 aa, Homo sapiens
  CDR3 for alpha chain variable domain of TCR clone 245578 (TRAV21, TRAJ37)
CAVRPRGSCNTGKLIF

SEQ ID NO: 491156 - protein, 13 aa, Homo sapiens
  CDR3 for beta chain variable domain of TCR clone 245578 (TRBV20-1, TRBJ2-2)
CSALSGGAGELFF

SEQ ID NO: 491157 - protein, 12 aa, Homo sapiens
  CDR3 for alpha chain variable domain of TCR clone 245579 (TRAV20, TRAJ4)
CSASGRYNKLIF

SEQ ID NO: 491158 - protein, 13 aa, Homo sapiens
  CDR3 for beta chain variable domain of TCR clone 245579 (TRBV9, TRBJ2-1)
CASSPSGGNEQFF

SEQ ID NO: 491159 - protein, 12 aa, Homo sapiens
  CDR3 for alpha chain variable domain of TCR clone 245580 (TRAV17, TRAJ53)
CAGGGSNYKPTF

SEQ ID NO: 491160 - protein, 16 aa, Homo sapiens
  CDR3 for beta chain variable domain of TCR clone 245580 (TRBV11-2, TRBJ2-3)
CASSFQGRGALDTQYF

SEQ ID NO: 491161 - protein, 14 aa, Homo sapiens
  CDR3 for alpha chain variable domain of TCR clone 245581 (TRAV8-6, TRAJ39)
CAVSERDAGNMLTL

SEQ ID NO: 491162 - protein, 15 aa, Homo sapiens
  CDR3 for beta chain variable domain of TCR clone 245581 (TRBV6-1, TRBJ2-7)
CASSVQRGVYYEQYF

SEQ ID NO: 491163 - protein, 18 aa, Homo sapiens
  CDR3 for alpha chain variable domain of TCR clone 245582 (TRAV1-2, TRAJ18)
CVVRDMGDRGSTLGRLYF

SEQ ID NO: 491164 - protein, 16 aa, Homo sapiens
  CDR3 for beta chain variable domain of TCR clone 245582 (TRBV29-1, TRBJ1-2)
CSVEANRDIANYGYTF

SEQ ID NO: 491165 - protein, 19 aa, Homo sapiens
  CDR3 for alpha chain variable domain of TCR clone 245583 (TRAV8-4, TRAJ3)
CAVTGENLVQQCFHDNLCI

SEQ ID NO: 491166 - protein, 16 aa, Homo sapiens
  CDR3 for beta chain variable domain of TCR clone 245583 (TRBV4-2, TRBJ1-1)
CASSQAGFGMNTEAFF

SEQ ID NO: 491167 - protein, 12 aa, Homo sapiens
  CDR3 for alpha chain variable domain of TCR clone 245584 (TRAV2, TRAJ9)
CAVGAGGFKTIF

SEQ ID NO: 491168 - protein, 14 aa, Homo sapiens
  CDR3 for beta chain variable domain of TCR clone 245584 (TRBV18, TRBJ2-7)
CASSPRGGAYEQYF

SEQ ID NO: 491169 - protein, 13 aa, Homo sapiens
  CDR3 for alpha chain variable domain of TCR clone 245585 (TRAV8-3, TRAJ28)
CAVGAVGSYQLTF

SEQ ID NO: 491170 - protein, 13 aa, Homo sapiens
  CDR3 for beta chain variable domain of TCR clone 245585 (TRBV20-1, TRBJ1-1)
CSARGGGNTEAFF

SEQ ID NO: 491171 - protein, 15 aa, Homo sapiens
  CDR3 for alpha chain variable domain of TCR clone 245586 (TRAV20, TRAJ53)
CAVQASGGSNYKLKF

SEQ ID NO: 491172 - protein, 12 aa, Homo sapiens
  CDR3 for beta chain variable domain of TCR clone 245586 (TRBV7-8, TRBJ2-7)
CASSLGDREQYF

SEQ ID NO: 491173 - protein, 15 aa, Homo sapiens
  CDR3 for alpha chain variable domain of TCR clone 245587 (TRAV34, TRAJ38)
CGADFTPGTNRKLLW

SEQ ID NO: 491174 - protein, 16 aa, Homo sapiens
  CDR3 for beta chain variable domain of TCR clone 245587 (TRBV12-5, TRBJ2-5)
CASGPRNSGNQETQYF

SEQ ID NO: 491175 - protein, 17 aa, Homo sapiens
  CDR3 for alpha chain variable domain of TCR clone 245588 (TRAV26-2, TRAJ42)
CILRDVGYGGSQGNLIF

SEQ ID NO: 491176 - protein, 16 aa, Homo sapiens
  CDR3 for beta chain variable domain of TCR clone 245588 (TRBV12-4, TRBJ2-7)
CASSMIGGTGTYEQYF

SEQ ID NO: 491177 - protein, 13 aa, Homo sapiens
  CDR3 for alpha chain variable domain of TCR clone 245589 (TRAV1-2, TRAJ9)
CAVLNTGGFKTIF

SEQ ID NO: 491178 - protein, 15 aa, Homo sapiens
  CDR3 for beta chain variable domain of TCR clone 245589 (TRBV7-3, TRBJ2-2)
CASSETGQGTGELFF

SEQ ID NO: 491179 - protein, 12 aa, Homo sapiens
  CDR3 for alpha chain variable domain of TCR clone 245590 (TRAV13-2, TRAJ23)
CAERHRGGKLIC

SEQ ID NO: 491180 - protein, 19 aa, Homo sapiens
  CDR3 for beta chain variable domain of TCR clone 245590 (TRBV19, TRBJ2-5)
CASSIGQVTDFFLGETQYF

SEQ ID NO: 491181 - protein, 15 aa, Homo sapiens
  CDR3 for alpha chain variable domain of TCR clone 245591 (TRAV3, TRAJ22)
CAVRGRGGSARQLTF

SEQ ID NO: 491182 - protein, 17 aa, Homo sapiens
  CDR3 for beta chain variable domain of TCR clone 245591 (TRBV11-2, TRBJ2-1)
CASSLYPPGVEYNEQFF

SEQ ID NO: 491183 - protein, 13 aa, Homo sapiens
  CDR3 for alpha chain variable domain of TCR clone 245592 (TRAV12-3, TRAJ13)
CAMGTGGYQKVTF

SEQ ID NO: 491184 - protein, 14 aa, Homo sapiens
  CDR3 for beta chain variable domain of TCR clone 245592 (TRBV7-2, TRBJ2-5)
CASSTRGGLKTQYF

SEQ ID NO: 491185 - protein, 16 aa, Homo sapiens
  CDR3 for alpha chain variable domain of TCR clone 245593 (TRAV30, TRAJ24)
CGTEIVDADSWGKFQF

SEQ ID NO: 491186 - protein, 14 aa, Homo sapiens
  CDR3 for beta chain variable domain of TCR clone 245593 (TRBV7-8, TRBJ2-3)
CASSSEAGTDTQYF

SEQ ID NO: 491187 - protein, 13 aa, Homo sapiens
  CDR3 for alpha chain variable domain of TCR clone 245594 (TRAV13-2, TRAJ48)
CAAMDFGNEKLTF

SEQ ID NO: 491188 - protein, 13 aa, Homo sapiens
  CDR3 for beta chain variable domain of TCR clone 245594 (TRBV13, TRBJ2-5)
CASSPEVGETQYF

SEQ ID NO: 491189 - protein, 14 aa, Homo sapiens
  CDR3 for alpha chain variable domain of TCR clone 245595 (TRAV1-2, TRAJ8)
CAVREDTGFQKLVF

SEQ ID NO: 491190 - protein, 15 aa, Homo sapiens
  CDR3 for beta chain variable domain of TCR clone 245595 (TRBV20-1, TRBJ1-1)
CSASRGVTGNAETFF

SEQ ID NO: 491191 - protein, 13 aa, Homo sapiens
  CDR3 for alpha chain variable domain of TCR clone 245596 (TRAV36/DV7, TRAJ49)
CAGDSNTGNQFYF

SEQ ID NO: 491192 - protein, 15 aa, Homo sapiens
  CDR3 for beta chain variable domain of TCR clone 245596 (TRBV6-1, TRBJ2-3)
CASSERGGITDTQYF

SEQ ID NO: 491193 - protein, 13 aa, Homo sapiens
  CDR3 for alpha chain variable domain of TCR clone 245597 (TRAV3, TRAJ21)
CAMREPDFNKSYF

SEQ ID NO: 491194 - protein, 13 aa, Homo sapiens
  CDR3 for beta chain variable domain of TCR clone 245597 (TRBV9, TRBJ2-1)
CASSPSGGNEQFF

SEQ ID NO: 491195 - protein, 15 aa, Homo sapiens
  CDR3 for alpha chain variable domain of TCR clone 245598 (TRAV26-1, TRAJ29)
CIVRVEGSGNTPLVF

SEQ ID NO: 491196 - protein, 16 aa, Homo sapiens
  CDR3 for beta chain variable domain of TCR clone 245598 (TRBV28, TRBJ2-7)
CASSLFFETGGPEQYF

SEQ ID NO: 491197 - protein, 23 aa, Homo sapiens
  CDR3 for alpha chain variable domain of TCR clone 245599 (TRAV26-1, TRAJ38)
CIADNAGNNHIQNPDPAVYQLRD

SEQ ID NO: 491198 - protein, 15 aa, Homo sapiens
  CDR3 for beta chain variable domain of TCR clone 245599 (TRBV27, TRBJ2-1)
RASSNGGGSSNEQFF

SEQ ID NO: 491199 - protein, 14 aa, Homo sapiens
  CDR3 for alpha chain variable domain of TCR clone 245600 (TRAV8-2, TRAJ11)
WVVSEKSGYSNLTF

SEQ ID NO: 491200 - protein, 16 aa, Homo sapiens
  CDR3 for beta chain variable domain of TCR clone 245600 (TRBV28, TRBJ2-1)
CASSSPEYPRDNEQFF

SEQ ID NO: 491201 - protein, 14 aa, Homo sapiens
  CDR3 for alpha chain variable domain of TCR clone 245601 (TRAV12-3, TRAJ29)
CAMILLSGNTPLVF

SEQ ID NO: 491202 - protein, 16 aa, Homo sapiens
  CDR3 for beta chain variable domain of TCR clone 245601 (TRBV19, TRBJ2-1)
CASSKAGPSSYNEQFF

SEQ ID NO: 491203 - protein, 13 aa, Homo sapiens
  CDR3 for alpha chain variable domain of TCR clone 245602 (TRAV17, TRAJ22)
CANHSGSARQLTF

SEQ ID NO: 491204 - protein, 13 aa, Homo sapiens
  CDR3 for beta chain variable domain of TCR clone 245602 (TRBV27, TRBJ1-4)
CASSLMGDEKLFF

SEQ ID NO: 491205 - protein, 11 aa, Homo sapiens
  CDR3 for alpha chain variable domain of TCR clone 245603 (TRAV2, TRAJ33)
CAVDSNYQLIW

SEQ ID NO: 491206 - protein, 14 aa, Homo sapiens
  CDR3 for beta chain variable domain of TCR clone 245603 (TRBV7-8, TRBJ2-7)
CASSLRGSSYEQYF

SEQ ID NO: 491207 - protein, 14 aa, Homo sapiens
  CDR3 for alpha chain variable domain of TCR clone 245604 (TRAV38-1, TRAJ45)
CASHSGGGADGLTF

SEQ ID NO: 491208 - protein, 13 aa, Homo sapiens
  CDR3 for beta chain variable domain of TCR clone 245604 (TRBV12-5, TRBJ2-3)
CASGDRQSDTQYF

SEQ ID NO: 491209 - protein, 15 aa, Homo sapiens
  CDR3 for alpha chain variable domain of TCR clone 245605 (TRAV17, TRAJ52)
CATEAGGTSYGKLNF

SEQ ID NO: 491210 - protein, 14 aa, Homo sapiens
  CDR3 for beta chain variable domain of TCR clone 245605 (TRBV28, TRBJ1-5)
CASSLGVLVKPQHF

SEQ ID NO: 491211 - protein, 11 aa, Homo sapiens
  CDR3 for alpha chain variable domain of TCR clone 245606 (TRAV3, TRAJ21)
RAVGNFNKFYF

SEQ ID NO: 491212 - protein, 15 aa, Homo sapiens
  CDR3 for beta chain variable domain of TCR clone 245606 (TRBV19, TRBJ1-2)
CASSVGQVLNYGYTF

SEQ ID NO: 491213 - protein, 13 aa, Homo sapiens
  CDR3 for alpha chain variable domain of TCR clone 245607 (TRAV12-3, TRAJ33)
CAMSVNSNYQLIW

SEQ ID NO: 491214 - protein, 13 aa, Homo sapiens
  CDR3 for beta chain variable domain of TCR clone 245607 (TRBV7-2, TRBJ2-5)
CASSQTSVETQYF

SEQ ID NO: 491215 - protein, 12 aa, Homo sapiens
  CDR3 for alpha chain variable domain of TCR clone 245608 (TRAV2, TRAJ29)
CAVDSGNTPLVF

SEQ ID NO: 491216 - protein, 15 aa, Homo sapiens
  CDR3 for beta chain variable domain of TCR clone 245608 (TRBV27, TRBJ2-1)
CASSNGGGSSNEQFF

SEQ ID NO: 491217 - protein, 15 aa, Homo sapiens
  CDR3 for alpha chain variable domain of TCR clone 245609 (TRAV3, TRAJ42)
CAVRGGTGSQGNLIF

SEQ ID NO: 491218 - protein, 14 aa, Homo sapiens
  CDR3 for beta chain variable domain of TCR clone 245609 (TRBV19, TRBJ1-2)
CASSSLFARDVYSF

SEQ ID NO: 491219 - protein, 12 aa, Homo sapiens
  CDR3 for alpha chain variable domain of TCR clone 245610 (TRAV3, TRAJ7)
CADLLWEQQTRF

SEQ ID NO: 491220 - protein, 13 aa, Homo sapiens
  CDR3 for beta chain variable domain of TCR clone 245610 (TRBV7-3, TRBJ2-5)
RASSFRGGETQYF

SEQ ID NO: 491221 - protein, 16 aa, Homo sapiens
  CDR3 for alpha chain variable domain of TCR clone 245611 (TRAV8-4, TRAJ27)
CAVKEGGFTNAGKSTL

SEQ ID NO: 491222 - protein, 13 aa, Homo sapiens
  CDR3 for beta chain variable domain of TCR clone 245611 (TRBV10-3, TRBJ2-7)
CASKLAVNYEHYF

SEQ ID NO: 491223 - protein, 14 aa, Homo sapiens
  CDR3 for alpha chain variable domain of TCR clone 245612 (TRAV12-2, TRAJ13)
CAVKKTGGYQKVTF

SEQ ID NO: 491224 - protein, 15 aa, Homo sapiens
  CDR3 for beta chain variable domain of TCR clone 245612 (TRBV12-4, TRBJ2-5)
CASSPSTGLQETQYF

SEQ ID NO: 491225 - protein, 18 aa, Homo sapiens
  CDR3 for alpha chain variable domain of TCR clone 245613 (TRAV21, TRAJ52)
CAVRPSPAGGASYGKLTF

SEQ ID NO: 491226 - protein, 17 aa, Homo sapiens
  CDR3 for beta chain variable domain of TCR clone 245613 (TRBV13, TRBJ2-3)
CASSLSRVAGGRNTKYF

SEQ ID NO: 491227 - protein, 12 aa, Homo sapiens
  CDR3 for alpha chain variable domain of TCR clone 245614 (TRAV13-1, TRAJ21)
CAAKEGFNKFYF

SEQ ID NO: 491228 - protein, 16 aa, Homo sapiens
  CDR3 for beta chain variable domain of TCR clone 245614 (TRBV7-7, TRBJ2-1)
CASSLASGTSYNEQFF

SEQ ID NO: 491229 - protein, 13 aa, Homo sapiens
  CDR3 for alpha chain variable domain of TCR clone 245615 (TRAV3, TRAJ40)
CAVVTSGTYKYIF

SEQ ID NO: 491230 - protein, 15 aa, Homo sapiens
  CDR3 for beta chain variable domain of TCR clone 245615 (TRBV11-3, TRBJ2-3)
CASLKDGREGDTQYF

SEQ ID NO: 491231 - protein, 16 aa, Homo sapiens
  CDR3 for alpha chain variable domain of TCR clone 245616 (TRAV3, TRAJ10)
CAVRGVLTGGGNKLTF

SEQ ID NO: 491232 - protein, 12 aa, Homo sapiens
  CDR3 for beta chain variable domain of TCR clone 245616 (TRBV7-8, TRBJ2-7)
CASSLGDREQYF

SEQ ID NO: 491233 - protein, 14 aa, Homo sapiens
  CDR3 for alpha chain variable domain of TCR clone 245617 (TRAV26-1, TRAJ34)
CIVRVAYSTVKLIF

SEQ ID NO: 491234 - protein, 15 aa, Homo sapiens
  CDR3 for beta chain variable domain of TCR clone 245617 (TRBV20-1, TRBJ2-7)
CSARVPAAYFYEQYF

SEQ ID NO: 491235 - protein, 13 aa, Homo sapiens
  CDR3 for alpha chain variable domain of TCR clone 245618 (TRAV9-2, TRAJ49)
CALIQIGGNQFYF

SEQ ID NO: 491236 - protein, 13 aa, Homo sapiens
  CDR3 for beta chain variable domain of TCR clone 245618 (TRBV20-1, TRBJ1-1)
CSVRGGGNTEAFF

SEQ ID NO: 491237 - protein, 13 aa, Homo sapiens
  CDR3 for alpha chain variable domain of TCR clone 245619 (TRAV36/DV7, TRAJ29)
CAVEPSGNTPLVF

SEQ ID NO: 491238 - protein, 11 aa, Homo sapiens
  CDR3 for beta chain variable domain of TCR clone 245619 (TRBV19, TRBJ2-7)
CASGNAYEQYF

SEQ ID NO: 491239 - protein, 14 aa, Homo sapiens
  CDR3 for alpha chain variable domain of TCR clone 245620 (TRAV23/DV6, TRAJ22)
CAADPSCSARQLTF

SEQ ID NO: 491240 - protein, 14 aa, Homo sapiens
  CDR3 for beta chain variable domain of TCR clone 245620 (TRBV5-1, TRBJ2-7)
CASSLWGAQDEQYF

SEQ ID NO: 491241 - protein, 15 aa, Homo sapiens
  CDR3 for alpha chain variable domain of TCR clone 245621 (TRAV3, TRAJ5)
CDVRDLDAGRRALTF

SEQ ID NO: 491242 - protein, 13 aa, Homo sapiens
  CDR3 for beta chain variable domain of TCR clone 245621 (TRBV12-4, TRBJ2-7)
CASSPTEAYEQYF

SEQ ID NO: 491243 - protein, 16 aa, Homo sapiens
  CDR3 for alpha chain variable domain of TCR clone 245622 (TRAV12-3, TRAJ53)
CAMSPGSGGSKYKLTF

SEQ ID NO: 491244 - protein, 12 aa, Homo sapiens
  CDR3 for beta chain variable domain of TCR clone 245622 (TRBV7-8, TRBJ2-7)
CASGLGDREQYF

SEQ ID NO: 491245 - protein, 15 aa, Homo sapiens
  CDR3 for alpha chain variable domain of TCR clone 245623 (TRAV12-1, TRAJ44)
CGVFVNTGTASKLNF

SEQ ID NO: 491246 - protein, 17 aa, Homo sapiens
  CDR3 for beta chain variable domain of TCR clone 245623 (TRBV7-8, TRBJ2-6)
YASSAGTGGAGANVLTF

SEQ ID NO: 491247 - protein, 11 aa, Homo sapiens
  CDR3 for alpha chain variable domain of TCR clone 245624 (TRAV3, TRAJ21)
CAVGNFNKFYF

SEQ ID NO: 491248 - protein, 16 aa, Homo sapiens
  CDR3 for beta chain variable domain of TCR clone 245624 (TRBV5-1, TRBJ2-1)
CASSPWTSGEYNEQFF

SEQ ID NO: 491249 - protein, 13 aa, Homo sapiens
  CDR3 for alpha chain variable domain of TCR clone 245625 (TRAV21, TRAJ27)
CAARPGNAGKSTF

SEQ ID NO: 491250 - protein, 14 aa, Homo sapiens
  CDR3 for beta chain variable domain of TCR clone 245625 (TRBV7-6, TRBJ2-3)
CACSLGTFTDTQYF

SEQ ID NO: 491251 - protein, 15 aa, Homo sapiens
  CDR3 for alpha chain variable domain of TCR clone 245626 (TRAV8-2, TRAJ24)
WVVSDRTDSWGKLQF

SEQ ID NO: 491252 - protein, 11 aa, Homo sapiens
  CDR3 for beta chain variable domain of TCR clone 245626 (TRBV20-1, TRBJ1-2)
CSVQGAGGYTF

SEQ ID NO: 491253 - protein, 14 aa, Homo sapiens
  CDR3 for alpha chain variable domain of TCR clone 245627 (TRAV2, TRAJ37)
CAVDFTSNTGKLIF

SEQ ID NO: 491254 - protein, 14 aa, Homo sapiens
  CDR3 for beta chain variable domain of TCR clone 245627 (TRBV5-1, TRBJ2-5)
CASSLGGSQETQYF

SEQ ID NO: 491255 - protein, 16 aa, Homo sapiens
  CDR3 for alpha chain variable domain of TCR clone 245628 (TRAV16, TRAJ4)
CITVLPFSGGYNKLIF

SEQ ID NO: 491256 - protein, 16 aa, Homo sapiens
  CDR3 for beta chain variable domain of TCR clone 245628 (TRBV19, TRBJ2-7)
CASSMGQGGSSSTSGR

SEQ ID NO: 491257 - protein, 18 aa, Homo sapiens
  CDR3 for alpha chain variable domain of TCR clone 245629 (TRAV20, TRAJ4)
CAVQPYYMFSGGYNKLIF

SEQ ID NO: 491258 - protein, 13 aa, Homo sapiens
  CDR3 for beta chain variable domain of TCR clone 245629 (TRBV19, TRBJ2-3)
CATWDKITDTQYC

SEQ ID NO: 491259 - protein, 17 aa, Homo sapiens
  CDR3 for alpha chain variable domain of TCR clone 245630 (TRAV3, TRAJ6)
CAVRDGPRAGGSYILPF

SEQ ID NO: 491260 - protein, 20 aa, Homo sapiens
  CDR3 for beta chain variable domain of TCR clone 245630 (TRBV28, TRBJ2-1)
CASTPIGRSPGLAGGNEQFF

SEQ ID NO: 491261 - protein, 13 aa, Homo sapiens
  CDR3 for alpha chain variable domain of TCR clone 245631 (TRAV24, TRAJ23)
CASFLVQGGKLIF

SEQ ID NO: 491262 - protein, 12 aa, Homo sapiens
  CDR3 for beta chain variable domain of TCR clone 245631 (TRBV28, TRBJ2-7)
CASSLLSYEQYF

SEQ ID NO: 491263 - protein, 15 aa, Homo sapiens
  CDR3 for alpha chain variable domain of TCR clone 245632 (TRAV26-2, TRAJ50)
CILRDEETSYAKGIF

SEQ ID NO: 491264 - protein, 14 aa, Homo sapiens
  CDR3 for beta chain variable domain of TCR clone 245632 (TRBV23-1, TRBJ2-7)
CASSPTVTSSTSGR

SEQ ID NO: 491265 - protein, 11 aa, Homo sapiens
  CDR3 for alpha chain variable domain of TCR clone 245633 (TRAV2, TRAJ33)
CAVESNYQLIW

SEQ ID NO: 491266 - protein, 13 aa, Homo sapiens
  CDR3 for beta chain variable domain of TCR clone 245633 (TRBV10-3, TRBJ1-2)
CAISERDSYGYTF

SEQ ID NO: 491267 - protein, 14 aa, Homo sapiens
  CDR3 for alpha chain variable domain of TCR clone 245634 (TRAV12-2, TRAJ13)
CAVKNTAGYQKVTF

SEQ ID NO: 491268 - protein, 17 aa, Homo sapiens
  CDR3 for beta chain variable domain of TCR clone 245634 (TRBV15, TRBJ2-4)
CATSRDNPQTGLDIQYF

SEQ ID NO: 491269 - protein, 10 aa, Homo sapiens
  CDR3 for alpha chain variable domain of TCR clone 245635 (TRAV23/DV6, TRAJ57)
CAASSTLSQG

SEQ ID NO: 491270 - protein, 15 aa, Homo sapiens
  CDR3 for beta chain variable domain of TCR clone 245635 (TRBV13, TRBJ1-2)
CASSLGRQPGYGYTF

SEQ ID NO: 491271 - protein, 11 aa, Homo sapiens
  CDR3 for alpha chain variable domain of TCR clone 245636 (TRAV17, TRAJ9)
CGFTGGFKTIF

SEQ ID NO: 491272 - protein, 14 aa, Homo sapiens
  CDR3 for beta chain variable domain of TCR clone 245636 (TRBV7-9, TRBJ2-2)
CASSLVQDTGKLFF

SEQ ID NO: 491273 - protein, 18 aa, Homo sapiens
  CDR3 for alpha chain variable domain of TCR clone 245637 (TRAV21, TRAJ52)
CAVRPSPAGGTSYGKLTF

SEQ ID NO: 491274 - protein, 18 aa, Homo sapiens
  CDR3 for beta chain variable domain of TCR clone 245637 (TRBV11-2, TRBJ2-3)
CASSLGGASRGAPNAQYF

SEQ ID NO: 491275 - protein, 18 aa, Homo sapiens
  CDR3 for alpha chain variable domain of TCR clone 245638 (TRAV21, TRAJ52)
CAVRPSPAGGTSNGKLTF

SEQ ID NO: 491276 - protein, 16 aa, Homo sapiens
  CDR3 for beta chain variable domain of TCR clone 245638 (TRBV7-3, TRBJ2-1)
CASSLEGYRSYNEQFF

SEQ ID NO: 491277 - protein, 20 aa, Homo sapiens
  CDR3 for alpha chain variable domain of TCR clone 245639 (TRAV26-1, TRAJ53)
CCVLLHRQSRDGGSNYKLTF

SEQ ID NO: 491278 - protein, 12 aa, Homo sapiens
  CDR3 for beta chain variable domain of TCR clone 245639 (TRBV7-9, TRBJ1-5)
CASSSQGQPQHF

SEQ ID NO: 491279 - protein, 15 aa, Homo sapiens
  CDR3 for alpha chain variable domain of TCR clone 245640 (TRAV21, TRAJ22)
CAVRLFFWFCKATDL

SEQ ID NO: 491280 - protein, 13 aa, Homo sapiens
  CDR3 for beta chain variable domain of TCR clone 245640 (TRBV4-2, TRBJ1-1)
CASSQAGNTEAFF

SEQ ID NO: 491281 - protein, 15 aa, Homo sapiens
  CDR3 for alpha chain variable domain of TCR clone 245641 (TRAV9-2, TRAJ8)
CALRGLNTGFQKLVF

SEQ ID NO: 491282 - protein, 20 aa, Homo sapiens
  CDR3 for beta chain variable domain of TCR clone 245641 (TRBV7-8, TRBJ2-2)
CASSHLFPGPTIHITGELFF

SEQ ID NO: 491283 - protein, 13 aa, Homo sapiens
  CDR3 for alpha chain variable domain of TCR clone 245642 (TRAV38-1, TRAJ42)
CARWGGSQGYLIF

SEQ ID NO: 491284 - protein, 17 aa, Homo sapiens
  CDR3 for beta chain variable domain of TCR clone 245642 (TRBV20-1, TRBJ2-1)
CSARDPLAGVWDNEQFF

SEQ ID NO: 491285 - protein, 16 aa, Homo sapiens
  CDR3 for alpha chain variable domain of TCR clone 245643 (TRAV3, TRAJ37)
CAVRGKGSGNTGKLIF

SEQ ID NO: 491286 - protein, 12 aa, Homo sapiens
  CDR3 for beta chain variable domain of TCR clone 245643 (TRBV6-3, TRBJ2-1)
CASSGSYNEQFF

SEQ ID NO: 491287 - protein, 15 aa, Homo sapiens
  CDR3 for alpha chain variable domain of TCR clone 245644 (TRAV25, TRAJ52)
CAGTSGGTSYGKLTF

SEQ ID NO: 491288 - protein, 16 aa, Homo sapiens
  CDR3 for beta chain variable domain of TCR clone 245644 (TRBV11-2, TRBJ2-7)
CASSPLAGGPRYEQYF

SEQ ID NO: 491289 - protein, 23 aa, Homo sapiens
  CDR3 for alpha chain variable domain of TCR clone 245645 (TRAV26-1, TRAJ38)
CIADNAGNNHIQNPNPAVYQLRD

SEQ ID NO: 491290 - protein, 12 aa, Homo sapiens
  CDR3 for beta chain variable domain of TCR clone 245645 (TRBV11-2, TRBJ2-2)
CASSLGGGELFF

SEQ ID NO: 491291 - protein, 12 aa, Homo sapiens
  CDR3 for alpha chain variable domain of TCR clone 245646 (TRAV2, TRAJ34)
CAVERNTDKPIF

SEQ ID NO: 491292 - protein, 20 aa, Homo sapiens
  CDR3 for beta chain variable domain of TCR clone 245646 (TRBV7-2, TRBJ2-5)
CASSFLRGGGRDPVLRARHA

SEQ ID NO: 491293 - protein, 12 aa, Homo sapiens
  CDR3 for alpha chain variable domain of TCR clone 245647 (TRAV21, TRAJ13)
PGPSGGYQKVTF

SEQ ID NO: 491294 - protein, 13 aa, Homo sapiens
  CDR3 for beta chain variable domain of TCR clone 245647 (TRBV4-2, TRBJ1-1)
CASSQAGNTEASF

SEQ ID NO: 491295 - protein, 14 aa, Homo sapiens
  CDR3 for alpha chain variable domain of TCR clone 245648 (TRAV12-2, TRAJ15)
CAPHTGQAGTALIF

SEQ ID NO: 491296 - protein, 14 aa, Homo sapiens
  CDR3 for beta chain variable domain of TCR clone 245648 (TRBV18, TRBJ2-7)
CASSPRGGAYEQYF

SEQ ID NO: 491297 - protein, 14 aa, Homo sapiens
  CDR3 for alpha chain variable domain of TCR clone 245649 (TRAV1-2, TRAJ8)
CAVREDTGFQKLVF

SEQ ID NO: 491298 - protein, 17 aa, Homo sapiens
  CDR3 for beta chain variable domain of TCR clone 245649 (TRBV13, TRBJ2-3)
CASNLSRVAGGRNTQYF

SEQ ID NO: 491299 - protein, 12 aa, Homo sapiens
  CDR3 for alpha chain variable domain of TCR clone 245650 (TRAV8-6, TRAJ43)
CAVSNNNNDMRF

SEQ ID NO: 491300 - protein, 16 aa, Homo sapiens
  CDR3 for beta chain variable domain of TCR clone 245650 (TRBV7-3, TRBJ2-2)
CASSLKRGTLSGELFF

SEQ ID NO: 491301 - protein, 16 aa, Homo sapiens
  CDR3 for alpha chain variable domain of TCR clone 245651 (TRAV3, TRAJ10)
CAVRDMRAGGGNKLTI

SEQ ID NO: 491302 - protein, 12 aa, Homo sapiens
  CDR3 for beta chain variable domain of TCR clone 245651 (TRBV7-9, TRBJ1-1)
CASILVRGEAFF

SEQ ID NO: 491303 - protein, 13 aa, Homo sapiens
  CDR3 for alpha chain variable domain of TCR clone 245652 (TRAV25, TRAJ10)
CAGRTGGGNKLTF

SEQ ID NO: 491304 - protein, 12 aa, Homo sapiens
  CDR3 for beta chain variable domain of TCR clone 245652 (TRBV2, TRBJ2-1)
CASSERFREQFF

SEQ ID NO: 491305 - protein, 13 aa, Homo sapiens
  CDR3 for alpha chain variable domain of TCR clone 245653 (TRAV13-2, TRAJ43)
CAASLSNNNDMRF

SEQ ID NO: 491306 - protein, 15 aa, Homo sapiens
  CDR3 for beta chain variable domain of TCR clone 245653 (TRBV5-1, TRBJ2-1)
CASSQAGYWWNEQFF

SEQ ID NO: 491307 - protein, 18 aa, Homo sapiens
  CDR3 for alpha chain variable domain of TCR clone 245654 (TRAV21, TRAJ52)
CAVRPSPAGGTSYGKLTF

SEQ ID NO: 491308 - protein, 13 aa, Homo sapiens
  CDR3 for beta chain variable domain of TCR clone 245654 (TRBV29-1, TRBJ2-2)
CSVYREDTEELFF

SEQ ID NO: 491309 - protein, 14 aa, Homo sapiens
  CDR3 for alpha chain variable domain of TCR clone 245655 (TRAV1-1, TRAJ33)
CAVRPKDSNYQLIW

SEQ ID NO: 491310 - protein, 15 aa, Homo sapiens
  CDR3 for beta chain variable domain of TCR clone 245655 (TRBV20-1, TRBJ2-1)
CSARSPGGPGNEQSF

SEQ ID NO: 491311 - protein, 15 aa, Homo sapiens
  CDR3 for alpha chain variable domain of TCR clone 245656 (TRAV26-1, TRAJ15)
CIVRDDNQAGTALIF

SEQ ID NO: 491312 - protein, 13 aa, Homo sapiens
  CDR3 for beta chain variable domain of TCR clone 245656 (TRBV10-3, TRBJ2-7)
CAISEAGPYEQYF

SEQ ID NO: 491313 - protein, 16 aa, Homo sapiens
  CDR3 for alpha chain variable domain of TCR clone 245657 (TRAV26-1, TRAJ32)
CIVRTNYGGATNKLIF

SEQ ID NO: 491314 - protein, 16 aa, Homo sapiens
  CDR3 for beta chain variable domain of TCR clone 245657 (TRBV11-2, TRBJ2-1)
CASSCGGRFVYNEQFF

SEQ ID NO: 491315 - protein, 13 aa, Homo sapiens
  CDR3 for alpha chain variable domain of TCR clone 245658 (TRAV20, TRAJ40)
CAVPFSGTYKYIF

SEQ ID NO: 491316 - protein, 13 aa, Homo sapiens
  CDR3 for beta chain variable domain of TCR clone 245658 (TRBV15, TRBJ2-5)
CATSQIGEETQCF

SEQ ID NO: 491317 - protein, 14 aa, Homo sapiens
  CDR3 for alpha chain variable domain of TCR clone 245659 (TRAV4, TRAJ17)
CLVGDPLVGNKLTF

SEQ ID NO: 491318 - protein, 20 aa, Homo sapiens
  CDR3 for beta chain variable domain of TCR clone 245659 (TRBV20-1, TRBJ2-1)
CSARPDSVAGGPSYYNEQFF

SEQ ID NO: 491319 - protein, 14 aa, Homo sapiens
  CDR3 for alpha chain variable domain of TCR clone 245660 (TRAV21, TRAJ35)
CAVMPIGFGNFLHC

SEQ ID NO: 491320 - protein, 12 aa, Homo sapiens
  CDR3 for beta chain variable domain of TCR clone 245660 (TRBV7-9, TRBJ2-7)
CASSIKREEQYF

SEQ ID NO: 491321 - protein, 16 aa, Homo sapiens
  CDR3 for alpha chain variable domain of TCR clone 245661 (TRAV30, TRAJ24)
CGTEIVDADSWGKFQF

SEQ ID NO: 491322 - protein, 17 aa, Homo sapiens
  CDR3 for beta chain variable domain of TCR clone 245661 (TRBV11-2, TRBJ2-1)
CASSLYPPGVKYNEQFF

SEQ ID NO: 491323 - protein, 18 aa, Homo sapiens
  CDR3 for alpha chain variable domain of TCR clone 245662 (TRAV13-1, TRAJ52)
CAAKNPNAGGTSYGKLTF

SEQ ID NO: 491324 - protein, 15 aa, Homo sapiens
  CDR3 for beta chain variable domain of TCR clone 245662 (TRBV6-1, TRBJ2-3)
CASSERGGIPDTQYF

SEQ ID NO: 491325 - protein, 16 aa, Homo sapiens
  CDR3 for alpha chain variable domain of TCR clone 245663 (TRAV41, TRAJ53)
CAVRFGSGGSNYKLTF

SEQ ID NO: 491326 - protein, 16 aa, Homo sapiens
  CDR3 for beta chain variable domain of TCR clone 245663 (TRBV7-3, TRBJ2-2)
CASSLKRGTLSGELFF

SEQ ID NO: 491327 - protein, 16 aa, Homo sapiens
  CDR3 for alpha chain variable domain of TCR clone 245664 (TRAV4, TRAJ18)
CLGERSVGSTLGRLYF

SEQ ID NO: 491328 - protein, 14 aa, Homo sapiens
  CDR3 for beta chain variable domain of TCR clone 245664 (TRBV6-5, TRBJ1-2)
CASSYDGTGGGYTF

SEQ ID NO: 491329 - protein, 11 aa, Homo sapiens
  CDR3 for alpha chain variable domain of TCR clone 245665 (TRAV35, TRAJ30)
CAPGGDDKIIF

SEQ ID NO: 491330 - protein, 14 aa, Homo sapiens
  CDR3 for beta chain variable domain of TCR clone 245665 (TRBV11-2, TRBJ2-7)
CASSSGAGAYEQYF

SEQ ID NO: 491331 - protein, 11 aa, Homo sapiens
  CDR3 for alpha chain variable domain of TCR clone 245666 (TRAV12-3, TRAJ17)
CAMTLRQQANF

SEQ ID NO: 491332 - protein, 14 aa, Homo sapiens
  CDR3 for beta chain variable domain of TCR clone 245666 (TRBV7-3, TRBJ2-1)
CASSLAGGTNEQFF

SEQ ID NO: 491333 - protein, 14 aa, Homo sapiens
  CDR3 for alpha chain variable domain of TCR clone 245667 (TRAV2, TRAJ9)
CAVEDRGGGFKTIF

SEQ ID NO: 491334 - protein, 14 aa, Homo sapiens
  CDR3 for beta chain variable domain of TCR clone 245667 (TRBV4-1, TRBJ2-2)
CASSQAVNTGELFF

SEQ ID NO: 491335 - protein, 12 aa, Homo sapiens
  CDR3 for alpha chain variable domain of TCR clone 245668 (TRAV12-3, TRAJ17)
CAMTLTGNKLTF

SEQ ID NO: 491336 - protein, 15 aa, Homo sapiens
  CDR3 for beta chain variable domain of TCR clone 245668 (TRBV7-9, TRBJ1-6)
CASSSPGRGNSPLHC

SEQ ID NO: 491337 - protein, 20 aa, Homo sapiens
  CDR3 for alpha chain variable domain of TCR clone 245669 (TRAV1-1, TRAJ4)
CLLLLRCEGFLSGGYNKLIF

SEQ ID NO: 491338 - protein, 15 aa, Homo sapiens
  CDR3 for beta chain variable domain of TCR clone 245669 (TRBV7-2, TRBJ1-2)
CASSPRAGWNYGYTF

SEQ ID NO: 491339 - protein, 16 aa, Homo sapiens
  CDR3 for alpha chain variable domain of TCR clone 245670 (TRAV30, TRAJ24)
CGTEIVDADSWGKFQF

SEQ ID NO: 491340 - protein, 20 aa, Homo sapiens
  CDR3 for beta chain variable domain of TCR clone 245670 (TRBV7-8, TRBJ2-2)
CAISHLFPGPTIHITGELFF

SEQ ID NO: 491341 - protein, 15 aa, Homo sapiens
  CDR3 for alpha chain variable domain of TCR clone 245671 (TRAV25, TRAJ52)
CAGRPGSTSYGKLTF

SEQ ID NO: 491342 - protein, 16 aa, Homo sapiens
  CDR3 for beta chain variable domain of TCR clone 245671 (TRBV12-4, TRBJ1-5)
CASSSGPRGSNQPQHF

SEQ ID NO: 491343 - protein, 15 aa, Homo sapiens
  CDR3 for alpha chain variable domain of TCR clone 245672 (TRAV8-4, TRAJ48)
CAVSAAYFGNEKLTF

SEQ ID NO: 491344 - protein, 12 aa, Homo sapiens
  CDR3 for beta chain variable domain of TCR clone 245672 (TRBV29-1, TRBJ2-3)
CSVTGGADTQYF

SEQ ID NO: 491345 - protein, 13 aa, Homo sapiens
  CDR3 for alpha chain variable domain of TCR clone 245673 (TRAV1-2, TRAJ9)
CAALNTEGFKSIF

SEQ ID NO: 491346 - protein, 13 aa, Homo sapiens
  CDR3 for beta chain variable domain of TCR clone 245673 (TRBV19, TRBJ1-2)
CASSVPGQDGYTF

SEQ ID NO: 491347 - protein, 14 aa, Homo sapiens
  CDR3 for alpha chain variable domain of TCR clone 245674 (TRAV26-1, TRAJ21)
FIFRVGHNFNKFYF

SEQ ID NO: 491348 - protein, 15 aa, Homo sapiens
  CDR3 for beta chain variable domain of TCR clone 245674 (TRBV4-3, TRBJ2-1)
CASSQGLAGSNEQFF

SEQ ID NO: 491349 - protein, 15 aa, Homo sapiens
  CDR3 for alpha chain variable domain of TCR clone 245675 (TRAV26-1, TRAJ29)
CIVSVEGSGNTPLVF

SEQ ID NO: 491350 - protein, 15 aa, Homo sapiens
  CDR3 for beta chain variable domain of TCR clone 245675 (TRBV28, TRBJ2-5)
CASSPGQGSIETQYF

SEQ ID NO: 491351 - protein, 14 aa, Homo sapiens
  CDR3 for alpha chain variable domain of TCR clone 245676 (TRAV12-3, TRAJ42)
CAMNYGGSQGNLIF

SEQ ID NO: 491352 - protein, 14 aa, Homo sapiens
  CDR3 for beta chain variable domain of TCR clone 245676 (TRBV7-9, TRBJ2-3)
CQKRLNSSADTQYF

SEQ ID NO: 491353 - protein, 14 aa, Homo sapiens
  CDR3 for alpha chain variable domain of TCR clone 245677 (TRAV17, TRAJ17)
CATDHRAAGNKLTF

SEQ ID NO: 491354 - protein, 13 aa, Homo sapiens
  CDR3 for beta chain variable domain of TCR clone 245677 (TRBV4-1, TRBJ2-5)
CASSQEVQETQYF

SEQ ID NO: 491355 - protein, 15 aa, Homo sapiens
  CDR3 for alpha chain variable domain of TCR clone 245678 (TRAV22, TRAJ24)
CAVPLSTDSWGKLQV

SEQ ID NO: 491356 - protein, 16 aa, Homo sapiens
  CDR3 for beta chain variable domain of TCR clone 245678 (TRBV28, TRBJ2-7)
CASSFPDRRLTYEQYF

SEQ ID NO: 491357 - protein, 12 aa, Homo sapiens
  CDR3 for alpha chain variable domain of TCR clone 245679 (TRAV13-1, TRAJ9)
CAPDTGGFKTIF

SEQ ID NO: 491358 - protein, 13 aa, Homo sapiens
  CDR3 for beta chain variable domain of TCR clone 245679 (TRBV12-4, TRBJ2-2)
CASSLLSGGELFF

SEQ ID NO: 491359 - protein, 13 aa, Homo sapiens
  CDR3 for alpha chain variable domain of TCR clone 245680 (TRAV41, TRAJ48)
SVPVNFGNEKLTF

SEQ ID NO: 491360 - protein, 16 aa, Homo sapiens
  CDR3 for beta chain variable domain of TCR clone 245680 (TRBV12-5, TRBJ2-5)
CASGPRTSGSQETQYF

SEQ ID NO: 491361 - protein, 15 aa, Homo sapiens
  CDR3 for alpha chain variable domain of TCR clone 245681 (TRAV26-1, TRAJ29)
CIVRVEGSGNTPLVF

SEQ ID NO: 491362 - protein, 15 aa, Homo sapiens
  CDR3 for beta chain variable domain of TCR clone 245681 (TRBV5-1, TRBJ1-5)
CASSAAAGGDQPQHF

SEQ ID NO: 491363 - protein, 16 aa, Homo sapiens
  CDR3 for alpha chain variable domain of TCR clone 245682 (TRAV3, TRAJ37)
CAVRVSGSGNIGKLIL

SEQ ID NO: 491364 - protein, 16 aa, Homo sapiens
  CDR3 for beta chain variable domain of TCR clone 245682 (TRBV11-2, TRBJ2-7)
CASSPTTGGVSYEQYF

SEQ ID NO: 491365 - protein, 15 aa, Homo sapiens
  CDR3 for alpha chain variable domain of TCR clone 245683 (TRAV26-1, TRAJ28)
CIVRVAGAGCYQLTF

SEQ ID NO: 491366 - protein, 19 aa, Homo sapiens
  CDR3 for beta chain variable domain of TCR clone 245683 (TRBV7-3, TRBJ2-7)
CASSLTGVAGGWPSYEQYF

SEQ ID NO: 491367 - protein, 15 aa, Homo sapiens
  CDR3 for alpha chain variable domain of TCR clone 245684 (TRAV2, TRAJ28)
CAVPYSGAGSYQLTF

SEQ ID NO: 491368 - protein, 17 aa, Homo sapiens
  CDR3 for beta chain variable domain of TCR clone 245684 (TRBV20-1, TRBJ2-4)
CRARDWARGGRENIQYF

SEQ ID NO: 491369 - protein, 14 aa, Homo sapiens
  CDR3 for alpha chain variable domain of TCR clone 245685 (TRAV20, TRAJ22)
CAVALGGPARQLTF

SEQ ID NO: 491370 - protein, 15 aa, Homo sapiens
  CDR3 for beta chain variable domain of TCR clone 245685 (TRBV7-2, TRBJ1-1)
CASSFAGDRDTEAFF

SEQ ID NO: 491371 - protein, 14 aa, Homo sapiens
  CDR3 for alpha chain variable domain of TCR clone 245686 (TRAV12-1, TRAJ16)
CVVNGPDGQAALCK

SEQ ID NO: 491372 - protein, 13 aa, Homo sapiens
  CDR3 for beta chain variable domain of TCR clone 245686 (TRBV2, TRBJ1-1)
CARNPTGGFHAFF

SEQ ID NO: 491373 - protein, 14 aa, Homo sapiens
  CDR3 for alpha chain variable domain of TCR clone 245687 (TRAV30, TRAJ26)
CGTEIVSHGQNFVF

SEQ ID NO: 491374 - protein, 13 aa, Homo sapiens
  CDR3 for beta chain variable domain of TCR clone 245687 (TRBV7-3, TRBJ1-1)
CASSQDWGAEAFF

SEQ ID NO: 491375 - protein, 11 aa, Homo sapiens
  CDR3 for alpha chain variable domain of TCR clone 245688 (TRAV2, TRAJ13)
CASGGYQKVTF

SEQ ID NO: 491376 - protein, 16 aa, Homo sapiens
  CDR3 for beta chain variable domain of TCR clone 245688 (TRBV4-1, TRBJ2-7)
CASSPVAGGTSSTSGR

SEQ ID NO: 491377 - protein, 14 aa, Homo sapiens
  CDR3 for alpha chain variable domain of TCR clone 245689 (TRAV27, TRAJ17)
CRSTIRAAGNKLTF

SEQ ID NO: 491378 - protein, 16 aa, Homo sapiens
  CDR3 for beta chain variable domain of TCR clone 245689 (TRBV5-7, TRBJ2-5)
CASTLARAGGRETQYF

SEQ ID NO: 491379 - protein, 12 aa, Homo sapiens
  CDR3 for alpha chain variable domain of TCR clone 245690 (TRAV21, TRAJ31)
CAVWGNNARLMF

SEQ ID NO: 491380 - protein, 16 aa, Homo sapiens
  CDR3 for beta chain variable domain of TCR clone 245690 (TRBV27, TRBJ2-5)
CASSDGTGGQKETQYF

SEQ ID NO: 491381 - protein, 17 aa, Homo sapiens
  CDR3 for alpha chain variable domain of TCR clone 245691 (TRAV3, TRAJ42)
CAVRDRDYGGSYGNLIF

SEQ ID NO: 491382 - protein, 15 aa, Homo sapiens
  CDR3 for beta chain variable domain of TCR clone 245691 (TRBV6-6, TRBJ2-7)
CASSYSYGGSYEQYF

SEQ ID NO: 491383 - protein, 15 aa, Homo sapiens
  CDR3 for alpha chain variable domain of TCR clone 245692 (TRAV12-2, TRAJ53)
CAVNGGGGSNYKLTF

SEQ ID NO: 491384 - protein, 17 aa, Homo sapiens
  CDR3 for beta chain variable domain of TCR clone 245692 (TRBV7-3, TRBJ2-3)
RASSLMKRMRGADTHSF

SEQ ID NO: 491385 - protein, 18 aa, Homo sapiens
  CDR3 for alpha chain variable domain of TCR clone 245693 (TRAV17, TRAJ45)
CATSLDLYSGGGADGLTF

SEQ ID NO: 491386 - protein, 13 aa, Homo sapiens
  CDR3 for beta chain variable domain of TCR clone 245693 (TRBV10-3, TRBJ2-7)
CASKLAVNYEQHF

SEQ ID NO: 491387 - protein, 13 aa, Homo sapiens
  CDR3 for alpha chain variable domain of TCR clone 245694 (TRAV20, TRAJ56)
CAVQAGANSKLTF

SEQ ID NO: 491388 - protein, 14 aa, Homo sapiens
  CDR3 for beta chain variable domain of TCR clone 245694 (TRBV28, TRBJ1-1)
CASSPRTRWAESFF

SEQ ID NO: 491389 - protein, 14 aa, Homo sapiens
  CDR3 for alpha chain variable domain of TCR clone 245695 (TRAV8-3, TRAJ17)
CCGCGKAAGNTLTF

SEQ ID NO: 491390 - protein, 14 aa, Homo sapiens
  CDR3 for beta chain variable domain of TCR clone 245695 (TRBV4-2, TRBJ1-2)
CASSQVGQNYGYTF

SEQ ID NO: 491391 - protein, 11 aa, Homo sapiens
  CDR3 for alpha chain variable domain of TCR clone 245696 (TRAV1-2, TRAJ40)
CAVPGTYKYVF

SEQ ID NO: 491392 - protein, 15 aa, Homo sapiens
  CDR3 for beta chain variable domain of TCR clone 245696 (TRBV25-1, TRBJ1-4)
CASSPGDSTNEKLFF

SEQ ID NO: 491393 - protein, 17 aa, Homo sapiens
  CDR3 for alpha chain variable domain of TCR clone 245697 (TRAV3, TRAJ6)
CAVRDGPRAGGSYIPTF

SEQ ID NO: 491394 - protein, 16 aa, Homo sapiens
  CDR3 for beta chain variable domain of TCR clone 245697 (TRBV7-8, TRBJ2-6)
CQQRRDRGAGANVLTF

SEQ ID NO: 491395 - protein, 14 aa, Homo sapiens
  CDR3 for alpha chain variable domain of TCR clone 245698 (TRAV1-2, TRAJ8)
CAVREDTGFPKLVF

SEQ ID NO: 491396 - protein, 12 aa, Homo sapiens
  CDR3 for beta chain variable domain of TCR clone 245698 (TRBV6-3, TRBJ2-7)
CASSRQGYEQYF

SEQ ID NO: 491397 - protein, 14 aa, Homo sapiens
  CDR3 for alpha chain variable domain of TCR clone 245699 (TRAV26-2, TRAJ32)
CILFRGGATNKLIF

SEQ ID NO: 491398 - protein, 13 aa, Homo sapiens
  CDR3 for beta chain variable domain of TCR clone 245699 (TRBV7-9, TRBJ1-2)
CASSVKQNYGYTF

SEQ ID NO: 491399 - protein, 14 aa, Homo sapiens
  CDR3 for alpha chain variable domain of TCR clone 245700 (TRAV29/DV5, TRAJ49)
CAASAQNTGNQFYF

SEQ ID NO: 491400 - protein, 15 aa, Homo sapiens
  CDR3 for beta chain variable domain of TCR clone 245700 (TRBV7-9, TRBJ1-5)
CASSLAGGGRQPQHF

SEQ ID NO: 491401 - protein, 12 aa, Homo sapiens
  CDR3 for alpha chain variable domain of TCR clone 245701 (TRAV12-3, TRAJ17)
CAMTLTGNKLTF

SEQ ID NO: 491402 - protein, 16 aa, Homo sapiens
  CDR3 for beta chain variable domain of TCR clone 245701 (TRBV7-3, TRBJ2-1)
CASSLEGYLSYNEQFF

SEQ ID NO: 491403 - protein, 12 aa, Homo sapiens
  CDR3 for alpha chain variable domain of TCR clone 245702 (TRAV12-2, TRAJ21)
CAVDRNFNKFYF

SEQ ID NO: 491404 - protein, 14 aa, Homo sapiens
  CDR3 for beta chain variable domain of TCR clone 245702 (TRBV12-4, TRBJ2-3)
CASSLSGATDTQYF

SEQ ID NO: 491405 - protein, 14 aa, Homo sapiens
  CDR3 for alpha chain variable domain of TCR clone 245703 (TRAV38-1, TRAJ30)
CALMPMNRDDKIIF

SEQ ID NO: 491406 - protein, 15 aa, Homo sapiens
  CDR3 for beta chain variable domain of TCR clone 245703 (TRBV7-9, TRBJ2-7)
CASSLDPQGPYEQYF

SEQ ID NO: 491407 - protein, 11 aa, Homo sapiens
  CDR3 for alpha chain variable domain of TCR clone 245704 (TRAV12-2, TRAJ21)
CAVEGFNNFYF

SEQ ID NO: 491408 - protein, 15 aa, Homo sapiens
  CDR3 for beta chain variable domain of TCR clone 245704 (TRBV20-1, TRBJ1-5)
CSASRRGDLGQPQHF

SEQ ID NO: 491409 - protein, 13 aa, Homo sapiens
  CDR3 for alpha chain variable domain of TCR clone 245705 (TRAV21, TRAJ15)
CAVRNQAGTALIF

SEQ ID NO: 491410 - protein, 13 aa, Homo sapiens
  CDR3 for beta chain variable domain of TCR clone 245705 (TRBV4-1, TRBJ2-2)
CASSQENTGELFF

SEQ ID NO: 491411 - protein, 15 aa, Homo sapiens
  CDR3 for alpha chain variable domain of TCR clone 245706 (TRAV26-1, TRAJ29)
CIVRVEGQGNTHLVF

SEQ ID NO: 491412 - protein, 15 aa, Homo sapiens
  CDR3 for beta chain variable domain of TCR clone 245706 (TRBV7-9, TRBJ1-5)
CASSQGHQPNQPQHF

SEQ ID NO: 491413 - protein, 16 aa, Homo sapiens
  CDR3 for alpha chain variable domain of TCR clone 245707 (TRAV20, TRAJ4)
CAVAAPFSGGYNKLIF

SEQ ID NO: 491414 - protein, 13 aa, Homo sapiens
  CDR3 for beta chain variable domain of TCR clone 245707 (TRBV10-3, TRBJ2-7)
CASKLAVNYEQYF

SEQ ID NO: 491415 - protein, 16 aa, Homo sapiens
  CDR3 for alpha chain variable domain of TCR clone 245708 (TRAV16, TRAJ52)
CALSAAGGTSDGKLTF

SEQ ID NO: 491416 - protein, 14 aa, Homo sapiens
  CDR3 for beta chain variable domain of TCR clone 245708 (TRBV19, TRBJ2-1)
CASPTFVLSGEQFF

SEQ ID NO: 491417 - protein, 15 aa, Homo sapiens
  CDR3 for alpha chain variable domain of TCR clone 245709 (TRAV12-2, TRAJ43)
CAFDLRFGAGTRLTV

SEQ ID NO: 491418 - protein, 15 aa, Homo sapiens
  CDR3 for beta chain variable domain of TCR clone 245709 (TRBV20-1, TRBJ2-7)
CSARDRVSGMDEQYF

SEQ ID NO: 491419 - protein, 15 aa, Homo sapiens
  CDR3 for alpha chain variable domain of TCR clone 245710 (TRAV8-3, TRAJ27)
CAVGPSKTNAGKSTF

SEQ ID NO: 491420 - protein, 15 aa, Homo sapiens
  CDR3 for beta chain variable domain of TCR clone 245710 (TRBV5-1, TRBJ2-3)
CASRNQAGSTDTQYF

SEQ ID NO: 491421 - protein, 10 aa, Homo sapiens
  CDR3 for alpha chain variable domain of TCR clone 245711 (TRAV1-2, TRAJ20)
CAVTDYKLSF

SEQ ID NO: 491422 - protein, 17 aa, Homo sapiens
  CDR3 for beta chain variable domain of TCR clone 245711 (TRBV4-3, TRBJ2-1)
CASSQFSSGRASGEQFF

SEQ ID NO: 491423 - protein, 11 aa, Homo sapiens
  CDR3 for alpha chain variable domain of TCR clone 245712 (TRAV2, TRAJ33)
CAVESNYQLIW

SEQ ID NO: 491424 - protein, 15 aa, Homo sapiens
  CDR3 for beta chain variable domain of TCR clone 245712 (TRBV19, TRBJ1-1)
CASTSGQIQNTEACF

SEQ ID NO: 491425 - protein, 17 aa, Homo sapiens
  CDR3 for alpha chain variable domain of TCR clone 245713 (TRAV13-1, )
CAANIQNPDPAVYQLRD

SEQ ID NO: 491426 - protein, 14 aa, Homo sapiens
  CDR3 for beta chain variable domain of TCR clone 245713 (TRBV19, TRBJ2-7)
CASSIGPNSDEQYF

SEQ ID NO: 491427 - protein, 14 aa, Homo sapiens
  CDR3 for alpha chain variable domain of TCR clone 245714 (TRAV1-2, TRAJ8)
CAVREDPGFQKLVF

SEQ ID NO: 491428 - protein, 15 aa, Homo sapiens
  CDR3 for beta chain variable domain of TCR clone 245714 (TRBV11-3, TRBJ2-1)
CASSLGDSSHNEQFF

SEQ ID NO: 491429 - protein, 12 aa, Homo sapiens
  CDR3 for alpha chain variable domain of TCR clone 245715 (TRAV21, TRAJ29)
CAVTSGNTPLVF

SEQ ID NO: 491430 - protein, 17 aa, Homo sapiens
  CDR3 for beta chain variable domain of TCR clone 245715 (TRBV11-2, TRBJ2-1)
CASSLYPPGVEYNEQFF

SEQ ID NO: 491431 - protein, 13 aa, Homo sapiens
  CDR3 for alpha chain variable domain of TCR clone 245716 (TRAV21, TRAJ57)
CAVTQGGSEKLVF

SEQ ID NO: 491432 - protein, 16 aa, Homo sapiens
  CDR3 for beta chain variable domain of TCR clone 245716 (TRBV28, TRBJ2-1)
CASSPPEYPRDNEQFF

SEQ ID NO: 491433 - protein, 13 aa, Homo sapiens
  CDR3 for alpha chain variable domain of TCR clone 245717 (TRAV39, TRAJ48)
CAAVNFGNEKLTF

SEQ ID NO: 491434 - protein, 15 aa, Homo sapiens
  CDR3 for beta chain variable domain of TCR clone 245717 (TRBV7-2, TRBJ2-1)
CASSSGLAGGNEQFF

SEQ ID NO: 491435 - protein, 12 aa, Homo sapiens
  CDR3 for alpha chain variable domain of TCR clone 245718 (TRAV17, TRAJ20)
CATYSNDYKLSF

SEQ ID NO: 491436 - protein, 11 aa, Homo sapiens
  CDR3 for beta chain variable domain of TCR clone 245718 (TRBV4-1, TRBJ2-2)
CASDHTGELFF

SEQ ID NO: 491437 - protein, 12 aa, Homo sapiens
  CDR3 for alpha chain variable domain of TCR clone 245719 (TRAV2, TRAJ31)
CAVEDNNARLMF

SEQ ID NO: 491438 - protein, 14 aa, Homo sapiens
  CDR3 for beta chain variable domain of TCR clone 245719 (TRBV19, TRBJ2-7)
CASSMGQGAIEQYF

SEQ ID NO: 491439 - protein, 12 aa, Homo sapiens
  CDR3 for alpha chain variable domain of TCR clone 245720 (TRAV8-3, TRAJ20)
CAVGANDYKLSF

SEQ ID NO: 491440 - protein, 16 aa, Homo sapiens
  CDR3 for beta chain variable domain of TCR clone 245720 (TRBV19, TRBJ2-2)
CASRSPGTGASGELFS

SEQ ID NO: 491441 - protein, 13 aa, Homo sapiens
  CDR3 for alpha chain variable domain of TCR clone 245721 (TRAV21, TRAJ45)
CAVMGGGADGLTF

SEQ ID NO: 491442 - protein, 16 aa, Homo sapiens
  CDR3 for beta chain variable domain of TCR clone 245721 (TRBV27, TRBJ2-1)
CASSSLTSGSGNEQFF

SEQ ID NO: 491443 - protein, 15 aa, Homo sapiens
  CDR3 for alpha chain variable domain of TCR clone 245722 (TRAV21, TRAJ24)
CAARSSTDSWGKLQF

SEQ ID NO: 491444 - protein, 19 aa, Homo sapiens
  CDR3 for beta chain variable domain of TCR clone 245722 (TRBV14, TRBJ2-1)
CASSQDRLWEAPEYNEQFF

SEQ ID NO: 491445 - protein, 13 aa, Homo sapiens
  CDR3 for alpha chain variable domain of TCR clone 245723 (TRAV21, TRAJ57)
CAVTQGGSEKLVF

SEQ ID NO: 491446 - protein, 16 aa, Homo sapiens
  CDR3 for beta chain variable domain of TCR clone 245723 (TRBV29-1, TRBJ2-7)
CSVEDAENGTAYEQYF

SEQ ID NO: 491447 - protein, 17 aa, Homo sapiens
  CDR3 for alpha chain variable domain of TCR clone 245724 (TRAV38-2/DV8, TRAJ28)
CAYRFAYSGAGSYQLTF

SEQ ID NO: 491448 - protein, 17 aa, Homo sapiens
  CDR3 for beta chain variable domain of TCR clone 245724 (TRBV4-3, TRBJ2-2)
CASSQGTSARSPGELFF

SEQ ID NO: 491449 - protein, 12 aa, Homo sapiens
  CDR3 for alpha chain variable domain of TCR clone 245725 (TRAV22, TRAJ29)
CATPSGNTPLVF

SEQ ID NO: 491450 - protein, 14 aa, Homo sapiens
  CDR3 for beta chain variable domain of TCR clone 245725 (TRBV11-2, TRBJ2-7)
CASSLGAGAYEQYF

SEQ ID NO: 491451 - protein, 14 aa, Homo sapiens
  CDR3 for alpha chain variable domain of TCR clone 245726 (TRAV26-1, TRAJ38)
CIADNAGNNRKLIW

SEQ ID NO: 491452 - protein, 14 aa, Homo sapiens
  CDR3 for beta chain variable domain of TCR clone 245726 (TRBV20-1, TRBJ1-3)
CSASPTGAGNTIYF

SEQ ID NO: 491453 - protein, 15 aa, Homo sapiens
  CDR3 for alpha chain variable domain of TCR clone 245727 (TRAV21, TRAJ52)
CAVRGGGTSYGKLTF

SEQ ID NO: 491454 - protein, 12 aa, Homo sapiens
  CDR3 for beta chain variable domain of TCR clone 245727 (TRBV7-9, TRBJ2-1)
CASSKNLDEQFF

SEQ ID NO: 491455 - protein, 14 aa, Homo sapiens
  CDR3 for alpha chain variable domain of TCR clone 245728 (TRAV38-1, TRAJ40)
CALRPTSGTYKYIF

SEQ ID NO: 491456 - protein, 12 aa, Homo sapiens
  CDR3 for beta chain variable domain of TCR clone 245728 (TRBV11-2, TRBJ2-1)
CASSPGNNEQFL

SEQ ID NO: 491457 - protein, 14 aa, Homo sapiens
  CDR3 for alpha chain variable domain of TCR clone 245729 (TRAV12-2, TRAJ17)
CAVLFKAAGNKPTF

SEQ ID NO: 491458 - protein, 15 aa, Homo sapiens
  CDR3 for beta chain variable domain of TCR clone 245729 (TRBV20-1, TRBJ2-7)
CSARDRVSGMDEQYF

SEQ ID NO: 491459 - protein, 11 aa, Homo sapiens
  CDR3 for alpha chain variable domain of TCR clone 245730 (TRAV4, TRAJ31)
CLVGLNTRLMF

SEQ ID NO: 491460 - protein, 16 aa, Homo sapiens
  CDR3 for beta chain variable domain of TCR clone 245730 (TRBV15, TRBJ2-6)
CATSVNGGFLANVLTF

SEQ ID NO: 491461 - protein, 11 aa, Homo sapiens
  CDR3 for alpha chain variable domain of TCR clone 245731 (TRAV23/DV6, TRAJ58)
CAARLLRGETI

SEQ ID NO: 491462 - protein, 14 aa, Homo sapiens
  CDR3 for beta chain variable domain of TCR clone 245731 (TRBV7-2, TRBJ2-7)
CASRSQGAAYEQYF

SEQ ID NO: 491463 - protein, 13 aa, Homo sapiens
  CDR3 for alpha chain variable domain of TCR clone 245732 (TRAV27, TRAJ3)
ASLRGSSASKIIF

SEQ ID NO: 491464 - protein, 15 aa, Homo sapiens
  CDR3 for beta chain variable domain of TCR clone 245732 (TRBV10-2, TRBJ2-6)
CASSEQGTGANVLTF

SEQ ID NO: 491465 - protein, 13 aa, Homo sapiens
  CDR3 for alpha chain variable domain of TCR clone 245733 (TRAV21, TRAJ27)
CAALNTNAGKSTF

SEQ ID NO: 491466 - protein, 12 aa, Homo sapiens
  CDR3 for beta chain variable domain of TCR clone 245733 (TRBV7-2, TRBJ1-5)
CASSLWSQPQHF

SEQ ID NO: 491467 - protein, 11 aa, Homo sapiens
  CDR3 for alpha chain variable domain of TCR clone 245734 (TRAV3, TRAJ21)
CAVGNFNKFYF

SEQ ID NO: 491468 - protein, 16 aa, Homo sapiens
  CDR3 for beta chain variable domain of TCR clone 245734 (TRBV19, TRBJ2-1)
CASSKAGPSSYDAQFF

SEQ ID NO: 491469 - protein, 13 aa, Homo sapiens
  CDR3 for alpha chain variable domain of TCR clone 245735 (TRAV2, TRAJ40)
CAVVTSGTYKYIF

SEQ ID NO: 491470 - protein, 13 aa, Homo sapiens
  CDR3 for beta chain variable domain of TCR clone 245735 (TRBV27, TRBJ2-1)
CASSSGSYNEQFF

SEQ ID NO: 491471 - protein, 16 aa, Homo sapiens
  CDR3 for alpha chain variable domain of TCR clone 245736 (TRAV3, TRAJ37)
CAVRGKGSGNTGKLIF

SEQ ID NO: 491472 - protein, 16 aa, Homo sapiens
  CDR3 for beta chain variable domain of TCR clone 245736 (TRBV12-5, TRBJ2-5)
CASGPRTSGSQGTQYF

SEQ ID NO: 491473 - protein, 13 aa, Homo sapiens
  CDR3 for alpha chain variable domain of TCR clone 245737 (TRAV12-2, TRAJ39)
CAVNNNAGNMLTF

SEQ ID NO: 491474 - protein, 16 aa, Homo sapiens
  CDR3 for beta chain variable domain of TCR clone 245737 (TRBV7-2, TRBJ1-3)
CASSSGRVLSGNTIYF

SEQ ID NO: 491475 - protein, 18 aa, Homo sapiens
  CDR3 for alpha chain variable domain of TCR clone 245738 (TRAV13-1, TRAJ52)
CAASKRSAGGTSYGKLTF

SEQ ID NO: 491476 - protein, 14 aa, Homo sapiens
  CDR3 for beta chain variable domain of TCR clone 245738 (TRBV19, TRBJ2-1)
CASPTFVLSGQQFF

SEQ ID NO: 491477 - protein, 15 aa, Homo sapiens
  CDR3 for alpha chain variable domain of TCR clone 245739 (TRAV8-3, TRAJ11)
CAVGLLNSGYSTLTF

SEQ ID NO: 491478 - protein, 13 aa, Homo sapiens
  CDR3 for beta chain variable domain of TCR clone 245739 (TRBV27, TRBJ2-1)
CASRTLGVGEQFF

SEQ ID NO: 491479 - protein, 15 aa, Homo sapiens
  CDR3 for alpha chain variable domain of TCR clone 245740 (TRAV17, TRAJ52)
CATEAGGTSYGKLTF

SEQ ID NO: 491480 - protein, 13 aa, Homo sapiens
  CDR3 for beta chain variable domain of TCR clone 245740 (TRBV19, TRBJ1-2)
CASSVPGQDGYTF

SEQ ID NO: 491481 - protein, 12 aa, Homo sapiens
  CDR3 for alpha chain variable domain of TCR clone 245741 (TRAV12-3, TRAJ3)
CAIDSSASKIIF

SEQ ID NO: 491482 - protein, 17 aa, Homo sapiens
  CDR3 for beta chain variable domain of TCR clone 245741 (TRBV7-9, TRBJ2-3)
CASSLEEAGAYPDTEYF

SEQ ID NO: 491483 - protein, 14 aa, Homo sapiens
  CDR3 for alpha chain variable domain of TCR clone 245742 (TRAV12-2, TRAJ36)
CAVNPPTGANNLFF

SEQ ID NO: 491484 - protein, 12 aa, Homo sapiens
  CDR3 for beta chain variable domain of TCR clone 245742 (TRBV29-1, TRBJ2-3)
CSVTGGADTQYF

SEQ ID NO: 491485 - protein, 15 aa, Homo sapiens
  CDR3 for alpha chain variable domain of TCR clone 245743 (TRAV12-2, TRAJ50)
CAVNGLETSYDKVIF

SEQ ID NO: 491486 - protein, 16 aa, Homo sapiens
  CDR3 for beta chain variable domain of TCR clone 245743 (TRBV5-4, TRBJ2-3)
CASQQPGAGGAGTQYF

SEQ ID NO: 491487 - protein, 13 aa, Homo sapiens
  CDR3 for alpha chain variable domain of TCR clone 245744 (TRAV26-2, TRAJ43)
CILRAVNNNDIRF

SEQ ID NO: 491488 - protein, 15 aa, Homo sapiens
  CDR3 for beta chain variable domain of TCR clone 245744 (TRBV7-2, TRBJ2-1)
CVSTHGTGIYNEQFF

SEQ ID NO: 491489 - protein, 16 aa, Homo sapiens
  CDR3 for alpha chain variable domain of TCR clone 245745 (TRAV12-3, TRAJ53)
CAMSPGSGGSNYKLTF

SEQ ID NO: 491490 - protein, 11 aa, Homo sapiens
  CDR3 for beta chain variable domain of TCR clone 245745 (TRBV3-1, TRBJ2-4)
CASSRSDIQYF

SEQ ID NO: 491491 - protein, 18 aa, Homo sapiens
  CDR3 for alpha chain variable domain of TCR clone 245746 (TRAV21, TRAJ52)
CAVRPSPAGGTSYGKLTF

SEQ ID NO: 491492 - protein, 15 aa, Homo sapiens
  CDR3 for beta chain variable domain of TCR clone 245746 (TRBV18, TRBJ2-2)
CQLTPSGVNTGELFF

SEQ ID NO: 491493 - protein, 15 aa, Homo sapiens
  CDR3 for alpha chain variable domain of TCR clone 245747 (TRAV35, TRAJ58)
CAGRRQETSGSRLTF

SEQ ID NO: 491494 - protein, 13 aa, Homo sapiens
  CDR3 for beta chain variable domain of TCR clone 245747 (TRBV6-5, TRBJ1-1)
CASSYREDRKAFF

SEQ ID NO: 491495 - protein, 14 aa, Homo sapiens
  CDR3 for alpha chain variable domain of TCR clone 245748 (TRAV8-6, TRAJ52)
CAVIGGTSYGKLTF

SEQ ID NO: 491496 - protein, 15 aa, Homo sapiens
  CDR3 for beta chain variable domain of TCR clone 245748 (TRBV9, TRBJ1-6)
CASSVAGTGDSPLHF

SEQ ID NO: 491497 - protein, 22 aa, Homo sapiens
  CDR3 for alpha chain variable domain of TCR clone 245749 (TRAV12-1, )
CVVLRGIPDIQNPDPAVYQLRD

SEQ ID NO: 491498 - protein, 14 aa, Homo sapiens
  CDR3 for beta chain variable domain of TCR clone 245749 (TRBV4-1, TRBJ2-2)
CASSQAVNTGELFF

SEQ ID NO: 491499 - protein, 20 aa, Homo sapiens
  CDR3 for alpha chain variable domain of TCR clone 245750 (TRAV21, TRAJ30)
CAVRRRMTRSSLEKGHDFIF

SEQ ID NO: 491500 - protein, 13 aa, Homo sapiens
  CDR3 for beta chain variable domain of TCR clone 245750 (TRBV19, TRBJ1-2)
CASSVPGQDGYTF

SEQ ID NO: 491501 - protein, 12 aa, Homo sapiens
  CDR3 for alpha chain variable domain of TCR clone 245751 (TRAV26-1, TRAJ54)
CIGGWGAQKLVF

SEQ ID NO: 491502 - protein, 14 aa, Homo sapiens
  CDR3 for beta chain variable domain of TCR clone 245751 (TRBV11-2, TRBJ1-2)
CARSSGQAGDGYTF

SEQ ID NO: 491503 - protein, 13 aa, Homo sapiens
  CDR3 for alpha chain variable domain of TCR clone 245752 (TRAV13-1, TRAJ26)
CAIVFGPGTRLSV

SEQ ID NO: 491504 - protein, 15 aa, Homo sapiens
  CDR3 for beta chain variable domain of TCR clone 245752 (TRBV12-4, TRBJ2-1)
CASRLLGRTYNEQFF

SEQ ID NO: 491505 - protein, 13 aa, Homo sapiens
  CDR3 for alpha chain variable domain of TCR clone 245753 (TRAV2, TRAJ10)
CGVETGGGNKLTF

SEQ ID NO: 491506 - protein, 14 aa, Homo sapiens
  CDR3 for beta chain variable domain of TCR clone 245753 (TRBV20-1, TRBJ2-3)
CSAGGRRGTDTQYF

SEQ ID NO: 491507 - protein, 14 aa, Homo sapiens
  CDR3 for alpha chain variable domain of TCR clone 245754 (TRAV12-2, TRAJ13)
CALKKTGGYQKVIF

SEQ ID NO: 491508 - protein, 15 aa, Homo sapiens
  CDR3 for beta chain variable domain of TCR clone 245754 (TRBV27, TRBJ2-1)
CASSNGGGSSNEQFF

SEQ ID NO: 491509 - protein, 21 aa, Homo sapiens
  CDR3 for alpha chain variable domain of TCR clone 245755 (TRAV1-1, TRAJ6)
CLLLLRCERLERTGGSYIPTF

SEQ ID NO: 491510 - protein, 14 aa, Homo sapiens
  CDR3 for beta chain variable domain of TCR clone 245755 (TRBV19, TRBJ1-6)
CASSPGGPRSPLHF

SEQ ID NO: 491511 - protein, 13 aa, Homo sapiens
  CDR3 for alpha chain variable domain of TCR clone 245756 (TRAV35, TRAJ42)
CAGFPGSQGNHIF

SEQ ID NO: 491512 - protein, 14 aa, Homo sapiens
  CDR3 for beta chain variable domain of TCR clone 245756 (TRBV4-1, TRBJ2-2)
CASSQAVNTGELFF

SEQ ID NO: 491513 - protein, 22 aa, Homo sapiens
  CDR3 for alpha chain variable domain of TCR clone 245757 (TRAV26-1, TRAJ30)
CIVRVRTEMTRSSLEKGHAFIF

SEQ ID NO: 491514 - protein, 18 aa, Homo sapiens
  CDR3 for beta chain variable domain of TCR clone 245757 (TRBV4-1, TRBJ1-5)
CASSQDPRGQGLNQPQHF

SEQ ID NO: 491515 - protein, 15 aa, Homo sapiens
  CDR3 for alpha chain variable domain of TCR clone 245758 (TRAV35, TRAJ58)
CAGRRQETSGSRLTF

SEQ ID NO: 491516 - protein, 16 aa, Homo sapiens
  CDR3 for beta chain variable domain of TCR clone 245758 (TRBV29-1, TRBJ2-6)
CSVEDITYSGANVLTF

SEQ ID NO: 491517 - protein, 13 aa, Homo sapiens
  CDR3 for alpha chain variable domain of TCR clone 245759 (TRAV12-1, TRAJ11)
CVVTRGGYSTLTF

SEQ ID NO: 491518 - protein, 13 aa, Homo sapiens
  CDR3 for beta chain variable domain of TCR clone 245759 (TRBV20-1, TRBJ1-2)
CSARDQGADGYTF

SEQ ID NO: 491519 - protein, 12 aa, Homo sapiens
  CDR3 for alpha chain variable domain of TCR clone 245760 (TRAV23/DV6, TRAJ49)
CAATYTGNQFYF

SEQ ID NO: 491520 - protein, 17 aa, Homo sapiens
  CDR3 for beta chain variable domain of TCR clone 245760 (TRBV4-1, TRBJ2-3)
CASSHVLQGGGTDTQYF

SEQ ID NO: 491521 - protein, 23 aa, Homo sapiens
  CDR3 for alpha chain variable domain of TCR clone 245761 (TRAV26-1, TRAJ38)
CIADNAGNNHIQNPDPAVYQLRD

SEQ ID NO: 491522 - protein, 17 aa, Homo sapiens
  CDR3 for beta chain variable domain of TCR clone 245761 (TRBV20-1, TRBJ1-5)
CSARDPSAQGFNQPQHF

SEQ ID NO: 491523 - protein, 14 aa, Homo sapiens
  CDR3 for alpha chain variable domain of TCR clone 245762 (TRAV2, TRAJ9)
CAVEDRSGGFKTNF

SEQ ID NO: 491524 - protein, 12 aa, Homo sapiens
  CDR3 for beta chain variable domain of TCR clone 245762 (TRBV11-2, TRBJ2-1)
CASSPGNNEQFF

SEQ ID NO: 491525 - protein, 12 aa, Homo sapiens
  CDR3 for alpha chain variable domain of TCR clone 245763 (TRAV26-1, TRAJ36)
CIVRVRADNLFF

SEQ ID NO: 491526 - protein, 13 aa, Homo sapiens
  CDR3 for beta chain variable domain of TCR clone 245763 (TRBV11-2, TRBJ2-7)
CASSRGPSETQYF

SEQ ID NO: 491527 - protein, 18 aa, Homo sapiens
  CDR3 for alpha chain variable domain of TCR clone 245764 (TRAV13-1, TRAJ52)
CAASKRSAGGTSYGELTF

SEQ ID NO: 491528 - protein, 22 aa, Homo sapiens
  CDR3 for beta chain variable domain of TCR clone 245764 (TRBV6-1, TRBJ1-3)
CASVQGGGWKHHIFWRGKLAHC

SEQ ID NO: 491529 - protein, 12 aa, Homo sapiens
  CDR3 for alpha chain variable domain of TCR clone 245765 (TRAV16, TRAJ56)
CAPTGANSKLTF

SEQ ID NO: 491530 - protein, 15 aa, Homo sapiens
  CDR3 for beta chain variable domain of TCR clone 245765 (TRBV6-1, TRBJ2-1)
CASSELRGQYNEQFF

SEQ ID NO: 491531 - protein, 15 aa, Homo sapiens
  CDR3 for alpha chain variable domain of TCR clone 245766 (TRAV10, TRAJ6)
CVVSGGSGGSYIPTF

SEQ ID NO: 491532 - protein, 17 aa, Homo sapiens
  CDR3 for beta chain variable domain of TCR clone 245766 (TRBV20-1, TRBJ2-1)
CSAPPRLAGTRYNEQFF

SEQ ID NO: 491533 - protein, 18 aa, Homo sapiens
  CDR3 for alpha chain variable domain of TCR clone 245767 (TRAV26-2, TRAJ54)
CILRDVEVGIQGAQKLGF

SEQ ID NO: 491534 - protein, 14 aa, Homo sapiens
  CDR3 for beta chain variable domain of TCR clone 245767 (TRBV11-2, TRBJ1-3)
CASSLAVPGNTIYF

SEQ ID NO: 491535 - protein, 14 aa, Homo sapiens
  CDR3 for alpha chain variable domain of TCR clone 245768 (TRAV26-1, TRAJ34)
CIVRLRYNTDKLIF

SEQ ID NO: 491536 - protein, 17 aa, Homo sapiens
  CDR3 for beta chain variable domain of TCR clone 245768 (TRBV7-8, TRBJ2-6)
CASSAGTGGAGANVLTF

SEQ ID NO: 491537 - protein, 11 aa, Homo sapiens
  CDR3 for alpha chain variable domain of TCR clone 245769 (TRAV1-1, TRAJ9)
CAVAGGFKTIF

SEQ ID NO: 491538 - protein, 17 aa, Homo sapiens
  CDR3 for beta chain variable domain of TCR clone 245769 (TRBV11-2, TRBJ2-1)
CASSLYPPGVEYNEQFF

SEQ ID NO: 491539 - protein, 15 aa, Homo sapiens
  CDR3 for alpha chain variable domain of TCR clone 245770 (TRAV21, TRAJ24)
CAARSSTDSWGKLQF

SEQ ID NO: 491540 - protein, 16 aa, Homo sapiens
  CDR3 for beta chain variable domain of TCR clone 245770 (TRBV4-1, TRBJ2-7)
CASSQEWTSGPLEQYF

SEQ ID NO: 491541 - protein, 13 aa, Homo sapiens
  CDR3 for alpha chain variable domain of TCR clone 245771 (TRAV12-2, TRAJ24)
CAVSTDSWGKLQF

SEQ ID NO: 491542 - protein, 13 aa, Homo sapiens
  CDR3 for beta chain variable domain of TCR clone 245771 (TRBV19, TRBJ2-7)
CASSMRGSYEQYF

SEQ ID NO: 491543 - protein, 14 aa, Homo sapiens
  CDR3 for alpha chain variable domain of TCR clone 245772 (TRAV17, TRAJ22)
CATDASGSARQLTF

SEQ ID NO: 491544 - protein, 13 aa, Homo sapiens
  CDR3 for beta chain variable domain of TCR clone 245772 (TRBV7-9, TRBJ1-4)
CASSQGQGWRLFF

SEQ ID NO: 491545 - protein, 18 aa, Homo sapiens
  CDR3 for alpha chain variable domain of TCR clone 245773 (TRAV13-1, TRAJ52)
CAASKRSAGGTSYGKLTF

SEQ ID NO: 491546 - protein, 16 aa, Homo sapiens
  CDR3 for beta chain variable domain of TCR clone 245773 (TRBV4-1, TRBJ2-1)
CASSPYAGGHDNEQFF

SEQ ID NO: 491547 - protein, 14 aa, Homo sapiens
  CDR3 for alpha chain variable domain of TCR clone 245774 (TRAV2, TRAJ9)
CAVEDRSGGFKTIY

SEQ ID NO: 491548 - protein, 13 aa, Homo sapiens
  CDR3 for beta chain variable domain of TCR clone 245774 (TRBV19, TRBJ1-2)
CASSVPGQDGYTF

SEQ ID NO: 491549 - protein, 15 aa, Homo sapiens
  CDR3 for alpha chain variable domain of TCR clone 245775 (TRAV2, TRAJ9)
CAVAALNTGGFKTIF

SEQ ID NO: 491550 - protein, 13 aa, Homo sapiens
  CDR3 for beta chain variable domain of TCR clone 245775 (TRBV6-1, TRBJ2-1)
CASSPDRNNEQFF

SEQ ID NO: 491551 - protein, 13 aa, Homo sapiens
  CDR3 for alpha chain variable domain of TCR clone 245776 (TRAV12-3, TRAJ16)
CAVQLSDSQKLLF

SEQ ID NO: 491552 - protein, 14 aa, Homo sapiens
  CDR3 for beta chain variable domain of TCR clone 245776 (TRBV5-1, TRBJ2-1)
CASSLDGDWNEQFF

SEQ ID NO: 491553 - protein, 15 aa, Homo sapiens
  CDR3 for alpha chain variable domain of TCR clone 245777 (TRAV12-3, TRAJ6)
CAMSAASGGSDIPTF

SEQ ID NO: 491554 - protein, 13 aa, Homo sapiens
  CDR3 for beta chain variable domain of TCR clone 245777 (TRBV20-1, TRBJ1-2)
CSASTERIYGYTF

SEQ ID NO: 491555 - protein, 13 aa, Homo sapiens
  CDR3 for alpha chain variable domain of TCR clone 245778 (TRAV27, TRAJ49)
CAPRPYTGNQFYF

SEQ ID NO: 491556 - protein, 17 aa, Homo sapiens
  CDR3 for beta chain variable domain of TCR clone 245778 (TRBV6-5, TRBJ2-1)
CASRLSGRFESYNEQFF

SEQ ID NO: 491557 - protein, 13 aa, Homo sapiens
  CDR3 for alpha chain variable domain of TCR clone 245779 (TRAV27, TRAJ36)
CAGMTGANNLFFD

SEQ ID NO: 491558 - protein, 14 aa, Homo sapiens
  CDR3 for beta chain variable domain of TCR clone 245779 (TRBV12-4, TRBJ2-3)
CASSLVPSTDTQYF

SEQ ID NO: 491559 - protein, 15 aa, Homo sapiens
  CDR3 for alpha chain variable domain of TCR clone 245780 (TRAV27, TRAJ38)
CAGRFNAGNNRKLLW

SEQ ID NO: 491560 - protein, 13 aa, Homo sapiens
  CDR3 for beta chain variable domain of TCR clone 245780 (TRBV20-1, TRBJ1-1)
CSARVGGNTEAFF

SEQ ID NO: 491561 - protein, 13 aa, Homo sapiens
  CDR3 for alpha chain variable domain of TCR clone 245781 (TRAV21, TRAJ27)
CAARPGNAGTSTL

SEQ ID NO: 491562 - protein, 14 aa, Homo sapiens
  CDR3 for beta chain variable domain of TCR clone 245781 (TRBV7-6, TRBJ2-3)
CASSLGTVTDTQYF

SEQ ID NO: 491563 - protein, 12 aa, Homo sapiens
  CDR3 for alpha chain variable domain of TCR clone 245782 (TRAV3, TRAJ20)
CAVRDPDYKLSF

SEQ ID NO: 491564 - protein, 12 aa, Homo sapiens
  CDR3 for beta chain variable domain of TCR clone 245782 (TRBV2, TRBJ2-1)
CAYGPPGNEQFF

SEQ ID NO: 491565 - protein, 15 aa, Homo sapiens
  CDR3 for alpha chain variable domain of TCR clone 245783 (TRAV2, TRAJ15)
CAVEDREQAGTALIF

SEQ ID NO: 491566 - protein, 13 aa, Homo sapiens
  CDR3 for beta chain variable domain of TCR clone 245783 (TRBV10-2, TRBJ2-3)
CASSESGDHTQNF

SEQ ID NO: 491567 - protein, 14 aa, Homo sapiens
  CDR3 for alpha chain variable domain of TCR clone 245784 (TRAV1-2, TRAJ16)
CAVNRFSDGQKLLF

SEQ ID NO: 491568 - protein, 13 aa, Homo sapiens
  CDR3 for beta chain variable domain of TCR clone 245784 (TRBV10-2, TRBJ2-7)
CDSGASGGYEQYF

SEQ ID NO: 491569 - protein, 14 aa, Homo sapiens
  CDR3 for alpha chain variable domain of TCR clone 245785 (TRAV1-2, TRAJ16)
CAVNRFSDGQKLPF

SEQ ID NO: 491570 - protein, 15 aa, Homo sapiens
  CDR3 for beta chain variable domain of TCR clone 245785 (TRBV20-1, TRBJ2-1)
CSARGIGGTYNEQFF

SEQ ID NO: 491571 - protein, 14 aa, Homo sapiens
  CDR3 for alpha chain variable domain of TCR clone 245786 (TRAV3, TRAJ27)
CAVRDDTNAGKSTF

SEQ ID NO: 491572 - protein, 15 aa, Homo sapiens
  CDR3 for beta chain variable domain of TCR clone 245786 (TRBV7-7, TRBJ2-2)
CATSKLAKNTRELFF

SEQ ID NO: 491573 - protein, 12 aa, Homo sapiens
  CDR3 for alpha chain variable domain of TCR clone 245787 (TRAV20, TRAJ39)
CAVGNAGNMLTF

SEQ ID NO: 491574 - protein, 14 aa, Homo sapiens
  CDR3 for beta chain variable domain of TCR clone 245787 (TRBV4-1, TRBJ2-3)
CASSQVGGADTQYF

SEQ ID NO: 491575 - protein, 14 aa, Homo sapiens
  CDR3 for alpha chain variable domain of TCR clone 245788 (TRAV13-1, TRAJ44)
CAAKATGTASKLTF

SEQ ID NO: 491576 - protein, 16 aa, Homo sapiens
  CDR3 for beta chain variable domain of TCR clone 245788 (TRBV7-3, TRBJ2-1)
RASSLLVGELVDEQFF

SEQ ID NO: 491577 - protein, 14 aa, Homo sapiens
  CDR3 for alpha chain variable domain of TCR clone 245789 (TRAV13-1, TRAJ35)
CAALPGGFGNVLHC

SEQ ID NO: 491578 - protein, 13 aa, Homo sapiens
  CDR3 for beta chain variable domain of TCR clone 245789 (TRBV7-3, TRBJ1-1)
CASSQDWGAEAFF

SEQ ID NO: 491579 - protein, 13 aa, Homo sapiens
  CDR3 for alpha chain variable domain of TCR clone 245790 (TRAV23/DV6, TRAJ58)
CAARLIRGSRLTL

SEQ ID NO: 491580 - protein, 13 aa, Homo sapiens
  CDR3 for beta chain variable domain of TCR clone 245790 (TRBV2, TRBJ1-6)
CADSGSYNSPLHF

SEQ ID NO: 491581 - protein, 13 aa, Homo sapiens
  CDR3 for alpha chain variable domain of TCR clone 245791 (TRAV39, TRAJ58)
CAGEETSGSRLTF

SEQ ID NO: 491582 - protein, 15 aa, Homo sapiens
  CDR3 for beta chain variable domain of TCR clone 245791 (TRBV7-9, TRBJ1-4)
CASSRTGGFNEKLFF

SEQ ID NO: 491583 - protein, 12 aa, Homo sapiens
  CDR3 for alpha chain variable domain of TCR clone 245792 (TRAV12-3, TRAJ17)
CAMTLTGNKLTF

SEQ ID NO: 491584 - protein, 15 aa, Homo sapiens
  CDR3 for beta chain variable domain of TCR clone 245792 (TRBV20-1, TRBJ2-7)
CSARDRVSGMDGKYF

SEQ ID NO: 491585 - protein, 14 aa, Homo sapiens
  CDR3 for alpha chain variable domain of TCR clone 245793 (TRAV3, TRAJ21)
CAVESQANFNKFYF

SEQ ID NO: 491586 - protein, 14 aa, Homo sapiens
  CDR3 for beta chain variable domain of TCR clone 245793 (TRBV11-2, TRBJ2-5)
CASSRTGGIETQYF

SEQ ID NO: 491587 - protein, 14 aa, Homo sapiens
  CDR3 for alpha chain variable domain of TCR clone 245794 (TRAV3, TRAJ40)
CAVRDRRGTYKYIF

SEQ ID NO: 491588 - protein, 12 aa, Homo sapiens
  CDR3 for beta chain variable domain of TCR clone 245794 (TRBV5-1, TRBJ2-7)
CASSLDSYEQYF

SEQ ID NO: 491589 - protein, 12 aa, Homo sapiens
  CDR3 for alpha chain variable domain of TCR clone 245795 (TRAV12-3, TRAJ17)
CAMTLTGNKLTF

SEQ ID NO: 491590 - protein, 15 aa, Homo sapiens
  CDR3 for beta chain variable domain of TCR clone 245795 (TRBV11-3, TRBJ2-7)
CASSPGPATSYEQYF

SEQ ID NO: 491591 - protein, 13 aa, Homo sapiens
  CDR3 for alpha chain variable domain of TCR clone 245796 (TRAV3, TRAJ26)
CAVRPTPGQNFVF

SEQ ID NO: 491592 - protein, 17 aa, Homo sapiens
  CDR3 for beta chain variable domain of TCR clone 245796 (TRBV4-2, TRBJ1-1)
CASTQFGGGSGNTEAFF

SEQ ID NO: 491593 - protein, 14 aa, Homo sapiens
  CDR3 for alpha chain variable domain of TCR clone 245797 (TRAV2, TRAJ9)
CAVEDRSGGFKTIS

SEQ ID NO: 491594 - protein, 14 aa, Homo sapiens
  CDR3 for beta chain variable domain of TCR clone 245797 (TRBV18, TRBJ1-5)
CASSRQQRNQTQHF

SEQ ID NO: 491595 - protein, 17 aa, Homo sapiens
  CDR3 for alpha chain variable domain of TCR clone 245798 (TRAV38-2/DV8, TRAJ23)
CALSRKLIFGQGTELSV

SEQ ID NO: 491596 - protein, 12 aa, Homo sapiens
  CDR3 for beta chain variable domain of TCR clone 245798 (TRBV7-8, TRBJ2-7)
CASSLGDREQYF

SEQ ID NO: 491597 - protein, 15 aa, Homo sapiens
  CDR3 for alpha chain variable domain of TCR clone 245799 (TRAV13-1, TRAJ5)
CAASKAYTGRRALTF

SEQ ID NO: 491598 - protein, 16 aa, Homo sapiens
  CDR3 for beta chain variable domain of TCR clone 245799 (TRBV7-2, TRBJ2-1)
CASSLGRTSGDNEQFF

SEQ ID NO: 491599 - protein, 12 aa, Homo sapiens
  CDR3 for alpha chain variable domain of TCR clone 245800 (TRAV26-1, TRAJ13)
CIVSRGYQKDTF

SEQ ID NO: 491600 - protein, 16 aa, Homo sapiens
  CDR3 for beta chain variable domain of TCR clone 245800 (TRBV19, TRBJ2-1)
CASSKAGPSSYNEQFF

SEQ ID NO: 491601 - protein, 12 aa, Homo sapiens
  CDR3 for alpha chain variable domain of TCR clone 245801 (TRAV10, TRAJ34)
CVVSGKHRQAPL

SEQ ID NO: 491602 - protein, 14 aa, Homo sapiens
  CDR3 for beta chain variable domain of TCR clone 245801 (TRBV19, TRBJ2-1)
CASPTFVLSGEQFF

SEQ ID NO: 491603 - protein, 14 aa, Homo sapiens
  CDR3 for alpha chain variable domain of TCR clone 245802 (TRAV16, TRAJ15)
CALSFNQAGTALIF

SEQ ID NO: 491604 - protein, 18 aa, Homo sapiens
  CDR3 for beta chain variable domain of TCR clone 245802 (TRBV11-2, TRBJ2-3)
CASSLGGASRGAPNTQYF

SEQ ID NO: 491605 - protein, 14 aa, Homo sapiens
  CDR3 for alpha chain variable domain of TCR clone 245803 (TRAV12-3, TRAJ43)
CAMSMGGAGTRLTV

SEQ ID NO: 491606 - protein, 13 aa, Homo sapiens
  CDR3 for beta chain variable domain of TCR clone 245803 (TRBV7-9, TRBJ1-2)
CASSLKQNYGYTF

SEQ ID NO: 491607 - protein, 12 aa, Homo sapiens
  CDR3 for alpha chain variable domain of TCR clone 245804 (TRAV21, TRAJ11)
CAATSGYSTLTS

SEQ ID NO: 491608 - protein, 14 aa, Homo sapiens
  CDR3 for beta chain variable domain of TCR clone 245804 (TRBV6-1, TRBJ1-3)
CASVQGGGGNTIYF

SEQ ID NO: 491609 - protein, 13 aa, Homo sapiens
  CDR3 for alpha chain variable domain of TCR clone 245805 (TRAV12-1, TRAJ34)
CVVTGYNTDKLIF

SEQ ID NO: 491610 - protein, 12 aa, Homo sapiens
  CDR3 for beta chain variable domain of TCR clone 245805 (TRBV29-1, TRBJ2-3)
CSVTGGADTQYF

SEQ ID NO: 491611 - protein, 22 aa, Homo sapiens
  CDR3 for alpha chain variable domain of TCR clone 245806 (TRAV3, TRAJ38)
CAVRDCINAGNNHIQNPDPAVY

SEQ ID NO: 491612 - protein, 19 aa, Homo sapiens
  CDR3 for beta chain variable domain of TCR clone 245806 (TRBV7-2, TRBJ2-3)
CSSSFLSRNWGGGTDTQYF

SEQ ID NO: 491613 - protein, 13 aa, Homo sapiens
  CDR3 for alpha chain variable domain of TCR clone 245807 (TRAV13-1, TRAJ21)
CAARIYNFNKFYF

SEQ ID NO: 491614 - protein, 14 aa, Homo sapiens
  CDR3 for beta chain variable domain of TCR clone 245807 (TRBV7-3, TRBJ1-1)
CASSLKGGNTEAFF

SEQ ID NO: 491615 - protein, 16 aa, Homo sapiens
  CDR3 for alpha chain variable domain of TCR clone 245808 (TRAV3, TRAJ37)
CAVRPHGSGDTGKLIF

SEQ ID NO: 491616 - protein, 17 aa, Homo sapiens
  CDR3 for beta chain variable domain of TCR clone 245808 (TRBV5-1, TRBJ2-5)
CASSPVALGQNQETQYF

SEQ ID NO: 491617 - protein, 13 aa, Homo sapiens
  CDR3 for alpha chain variable domain of TCR clone 245809 (TRAV8-6, TRAJ50)
CAVIKTSYDKVIF

SEQ ID NO: 491618 - protein, 14 aa, Homo sapiens
  CDR3 for beta chain variable domain of TCR clone 245809 (TRBV19, TRBJ2-2)
CASSTLHRSGELFF

SEQ ID NO: 491619 - protein, 15 aa, Homo sapiens
  CDR3 for alpha chain variable domain of TCR clone 245810 (TRAV2, TRAJ9)
CAVAALNTGGFKTIF

SEQ ID NO: 491620 - protein, 16 aa, Homo sapiens
  CDR3 for beta chain variable domain of TCR clone 245810 (TRBV7-6, TRBJ2-1)
CASSAPGPSSYNEQFF

SEQ ID NO: 491621 - protein, 17 aa, Homo sapiens
  CDR3 for alpha chain variable domain of TCR clone 245811 (TRAV12-2, TRAJ52)
CAVNPYAGGISYGKLTF

SEQ ID NO: 491622 - protein, 17 aa, Homo sapiens
  CDR3 for beta chain variable domain of TCR clone 245811 (TRBV7-3, TRBJ2-3)
CASSLMKRMRGADTQYF

SEQ ID NO: 491623 - protein, 15 aa, Homo sapiens
  CDR3 for alpha chain variable domain of TCR clone 245812 (TRAV13-1, TRAJ42)
CAASIAGGSQGNLIF

SEQ ID NO: 491624 - protein, 17 aa, Homo sapiens
  CDR3 for beta chain variable domain of TCR clone 245812 (TRBV3-1, TRBJ2-3)
CASSQDSPGASTDTQYF

SEQ ID NO: 491625 - protein, 12 aa, Homo sapiens
  CDR3 for alpha chain variable domain of TCR clone 245813 (TRAV13-2, TRAJ23)
CAERHRGGKLIF

SEQ ID NO: 491626 - protein, 13 aa, Homo sapiens
  CDR3 for beta chain variable domain of TCR clone 245813 (TRBV20-1, TRBJ2-2)
CSALSGGAGELLF

SEQ ID NO: 491627 - protein, 16 aa, Homo sapiens
  CDR3 for alpha chain variable domain of TCR clone 245814 (TRAV35, TRAJ28)
CAGYLYSGAGSYQLTF

SEQ ID NO: 491628 - protein, 15 aa, Homo sapiens
  CDR3 for beta chain variable domain of TCR clone 245814 (TRBV5-1, TRBJ2-1)
CASSPPRAPYNEQFF

SEQ ID NO: 491629 - protein, 12 aa, Homo sapiens
  CDR3 for alpha chain variable domain of TCR clone 245815 (TRAV1-2, TRAJ37)
CAFPGNTGKLIF

SEQ ID NO: 491630 - protein, 11 aa, Homo sapiens
  CDR3 for beta chain variable domain of TCR clone 245815 (TRBV6-3, TRBJ2-3)
CDTGQADTQYF

SEQ ID NO: 491631 - protein, 15 aa, Homo sapiens
  CDR3 for alpha chain variable domain of TCR clone 245816 (TRAV21, TRAJ53)
CATLSSGGSNYKLTF

SEQ ID NO: 491632 - protein, 15 aa, Homo sapiens
  CDR3 for beta chain variable domain of TCR clone 245816 (TRBV27, TRBJ2-1)
CASSNGGGSSNEQFF

SEQ ID NO: 491633 - protein, 13 aa, Homo sapiens
  CDR3 for alpha chain variable domain of TCR clone 245817 (TRAV21, TRAJ6)
CAGGSGGSYIPTF

SEQ ID NO: 491634 - protein, 13 aa, Homo sapiens
  CDR3 for beta chain variable domain of TCR clone 245817 (TRBV7-7, TRBJ2-3)
CASSLSRADTQYF

SEQ ID NO: 491635 - protein, 14 aa, Homo sapiens
  CDR3 for alpha chain variable domain of TCR clone 245818 (TRAV38-1, TRAJ29)
CAFITPSGNTPLVF

SEQ ID NO: 491636 - protein, 14 aa, Homo sapiens
  CDR3 for beta chain variable domain of TCR clone 245818 (TRBV18, TRBJ2-7)
CASSPRGEAYEQYF

SEQ ID NO: 491637 - protein, 13 aa, Homo sapiens
  CDR3 for alpha chain variable domain of TCR clone 245819 (TRAV13-1, TRAJ6)
GAASKGGSYIPTF

SEQ ID NO: 491638 - protein, 13 aa, Homo sapiens
  CDR3 for beta chain variable domain of TCR clone 245819 (TRBV7-9, TRBJ2-5)
CASLPSGRETQYF

SEQ ID NO: 491639 - protein, 16 aa, Homo sapiens
  CDR3 for alpha chain variable domain of TCR clone 245820 (TRAV35, TRAJ28)
CAGQKYSEAGSYQLTF

SEQ ID NO: 491640 - protein, 16 aa, Homo sapiens
  CDR3 for beta chain variable domain of TCR clone 245820 (TRBV7-3, TRBJ2-2)
CASSLKRGTLSGELFF

SEQ ID NO: 491641 - protein, 14 aa, Homo sapiens
  CDR3 for alpha chain variable domain of TCR clone 245821 (TRAV12-2, TRAJ17)
CAVLFKAAGNKLTF

SEQ ID NO: 491642 - protein, 13 aa, Homo sapiens
  CDR3 for beta chain variable domain of TCR clone 245821 (TRBV3-1, TRBJ1-1)
CASSPGVITEAFF

SEQ ID NO: 491643 - protein, 16 aa, Homo sapiens
  CDR3 for alpha chain variable domain of TCR clone 245822 (TRAV20, TRAJ10)
CAVLRGLTGGGNKLTF

SEQ ID NO: 491644 - protein, 13 aa, Homo sapiens
  CDR3 for beta chain variable domain of TCR clone 245822 (TRBV19, TRBJ2-2)
CASQEGIHGELFF

SEQ ID NO: 491645 - protein, 18 aa, Homo sapiens
  CDR3 for alpha chain variable domain of TCR clone 245823 (TRAV13-1, TRAJ52)
CAASKRSAGGTSYGKLTF

SEQ ID NO: 491646 - protein, 16 aa, Homo sapiens
  CDR3 for beta chain variable domain of TCR clone 245823 (TRBV12-5, TRBJ2-5)
CASGPRTSGSQETQYF

SEQ ID NO: 491647 - protein, 16 aa, Homo sapiens
  CDR3 for alpha chain variable domain of TCR clone 245824 (TRAV3, TRAJ37)
CAVRPHGSGNTGKLIF

SEQ ID NO: 491648 - protein, 18 aa, Homo sapiens
  CDR3 for beta chain variable domain of TCR clone 245824 (TRBV27, TRBJ2-1)
CASGNRAVGVGSKNEQFF

SEQ ID NO: 491649 - protein, 10 aa, Homo sapiens
  CDR3 for alpha chain variable domain of TCR clone 245825 (TRAV36/DV7, TRAJ48)
CAVGNEKLTF

SEQ ID NO: 491650 - protein, 16 aa, Homo sapiens
  CDR3 for beta chain variable domain of TCR clone 245825 (TRBV7-9, TRBJ1-2)
CASSISLDRGGYGYTF

SEQ ID NO: 491651 - protein, 16 aa, Homo sapiens
  CDR3 for alpha chain variable domain of TCR clone 245826 (TRAV14/DV4, TRAJ53)
CAMREGGGGSNYKMTF

SEQ ID NO: 491652 - protein, 12 aa, Homo sapiens
  CDR3 for beta chain variable domain of TCR clone 245826 (TRBV11-2, TRBJ2-2)
CTSSLGGGELFF

SEQ ID NO: 491653 - protein, 14 aa, Homo sapiens
  CDR3 for alpha chain variable domain of TCR clone 245827 (TRAV12-3, TRAJ10)
SHLPLTEGGNKLTF

SEQ ID NO: 491654 - protein, 17 aa, Homo sapiens
  CDR3 for beta chain variable domain of TCR clone 245827 (TRBV13, TRBJ2-3)
CASSLSRVAGGRNTQYF

SEQ ID NO: 491655 - protein, 15 aa, Homo sapiens
  CDR3 for alpha chain variable domain of TCR clone 245828 (TRAV12-1, TRAJ45)
CVVLTGGGGADGLTF

SEQ ID NO: 491656 - protein, 12 aa, Homo sapiens
  CDR3 for beta chain variable domain of TCR clone 245828 (TRBV12-5, TRBJ2-5)
CASGQGVETQYF

SEQ ID NO: 491657 - protein, 10 aa, Homo sapiens
  CDR3 for alpha chain variable domain of TCR clone 245829 (TRAV1-2, TRAJ20)
CAVTDYKLSF

SEQ ID NO: 491658 - protein, 15 aa, Homo sapiens
  CDR3 for beta chain variable domain of TCR clone 245829 (TRBV20-1, TRBJ2-7)
CSARDRVSGMDEQYF

SEQ ID NO: 491659 - protein, 14 aa, Homo sapiens
  CDR3 for alpha chain variable domain of TCR clone 245830 (TRAV17, TRAJ6)
CATDASGGSYIPTF

SEQ ID NO: 491660 - protein, 13 aa, Homo sapiens
  CDR3 for beta chain variable domain of TCR clone 245830 (TRBV12-4, TRBJ1-1)
CASSFGEDTEAFF

SEQ ID NO: 491661 - protein, 10 aa, Homo sapiens
  CDR3 for alpha chain variable domain of TCR clone 245831 (TRAV30, TRAJ48)
CGIGNEKLTF

SEQ ID NO: 491662 - protein, 14 aa, Homo sapiens
  CDR3 for beta chain variable domain of TCR clone 245831 (TRBV7-6, TRBJ2-3)
CASSVAVGTDTQYF

SEQ ID NO: 491663 - protein, 10 aa, Homo sapiens
  CDR3 for alpha chain variable domain of TCR clone 245832 (TRAV12-2, TRAJ48)
CAVTSEKLTF

SEQ ID NO: 491664 - protein, 17 aa, Homo sapiens
  CDR3 for beta chain variable domain of TCR clone 245832 (TRBV11-1, TRBJ2-7)
CASSVTGSFGLDYGQYF

SEQ ID NO: 491665 - protein, 12 aa, Homo sapiens
  CDR3 for alpha chain variable domain of TCR clone 245833 (TRAV26-1, TRAJ43)
CIVRPRGDDMRF

SEQ ID NO: 491666 - protein, 16 aa, Homo sapiens
  CDR3 for beta chain variable domain of TCR clone 245833 (TRBV3-1, TRBJ2-1)
CASSQVGRRSFDEQFF

SEQ ID NO: 491667 - protein, 23 aa, Homo sapiens
  CDR3 for alpha chain variable domain of TCR clone 245834 (TRAV2, TRAJ13)
CASGGYQKVPLELEQSSKSSQIS

SEQ ID NO: 491668 - protein, 15 aa, Homo sapiens
  CDR3 for beta chain variable domain of TCR clone 245834 (TRBV28, TRBJ1-3)
CASSMGWASGNTIYF

SEQ ID NO: 491669 - protein, 18 aa, Homo sapiens
  CDR3 for alpha chain variable domain of TCR clone 245835 (TRAV12-3, TRAJ52)
CAMSVGGAGGTSYGKLTF

SEQ ID NO: 491670 - protein, 15 aa, Homo sapiens
  CDR3 for beta chain variable domain of TCR clone 245835 (TRBV27, TRBJ1-6)
CASSFDRGLGSTLYF

SEQ ID NO: 491671 - protein, 16 aa, Homo sapiens
  CDR3 for alpha chain variable domain of TCR clone 245836 (TRAV3, TRAJ32)
CAVRENYGGATNKLVF

SEQ ID NO: 491672 - protein, 12 aa, Homo sapiens
  CDR3 for beta chain variable domain of TCR clone 245836 (TRBV20-1, TRBJ1-2)
CSVTPEGYSYTF

SEQ ID NO: 491673 - protein, 13 aa, Homo sapiens
  CDR3 for alpha chain variable domain of TCR clone 245837 (TRAV21, TRAJ24)
GLMTTDSWGKLQF

SEQ ID NO: 491674 - protein, 15 aa, Homo sapiens
  CDR3 for beta chain variable domain of TCR clone 245837 (TRBV2, TRBJ2-7)
CASSEGLARSYEQYF

SEQ ID NO: 491675 - protein, 14 aa, Homo sapiens
  CDR3 for alpha chain variable domain of TCR clone 245838 (TRAV1-2, TRAJ16)
CAVNRFSDCQKLLF

SEQ ID NO: 491676 - protein, 13 aa, Homo sapiens
  CDR3 for beta chain variable domain of TCR clone 245838 (TRBV27, TRBJ1-1)
CASSLSIGAQAFF

SEQ ID NO: 491677 - protein, 17 aa, Homo sapiens
  CDR3 for alpha chain variable domain of TCR clone 245839 (TRAV3, TRAJ6)
CAVRDGPRAGGSYIPTF

SEQ ID NO: 491678 - protein, 16 aa, Homo sapiens
  CDR3 for beta chain variable domain of TCR clone 245839 (TRBV24-1, TRBJ2-3)
CATSDRRQDLTDTQYF

SEQ ID NO: 491679 - protein, 18 aa, Homo sapiens
  CDR3 for alpha chain variable domain of TCR clone 245840 (TRAV21, TRAJ52)
CAVRPSQAGGTSYGNLTF

SEQ ID NO: 491680 - protein, 17 aa, Homo sapiens
  CDR3 for beta chain variable domain of TCR clone 245840 (TRBV25-1, TRBJ2-1)
CASSAYGQGRGVYEQFF

SEQ ID NO: 491681 - protein, 15 aa, Homo sapiens
  CDR3 for alpha chain variable domain of TCR clone 245841 (TRAV27, TRAJ38)
CAARRNAGNNRKLIW

SEQ ID NO: 491682 - protein, 13 aa, Homo sapiens
  CDR3 for beta chain variable domain of TCR clone 245841 (TRBV6-4, TRBJ1-5)
CASSADLNQPQHF

SEQ ID NO: 491683 - protein, 14 aa, Homo sapiens
  CDR3 for alpha chain variable domain of TCR clone 245842 (TRAV1-2, TRAJ24)
CAVLTTDRWGKFQF

SEQ ID NO: 491684 - protein, 21 aa, Homo sapiens
  CDR3 for beta chain variable domain of TCR clone 245842 (TRBV6-5, TRBJ1-3)
CASSYWEKIAQGMSSGNTIYF

SEQ ID NO: 491685 - protein, 11 aa, Homo sapiens
  CDR3 for alpha chain variable domain of TCR clone 245843 (TRAV3, TRAJ20)
CAVANDYKLSF

SEQ ID NO: 491686 - protein, 14 aa, Homo sapiens
  CDR3 for beta chain variable domain of TCR clone 245843 (TRBV12-5, TRBJ2-5)
CASGARTHQETQYF

SEQ ID NO: 491687 - protein, 15 aa, Homo sapiens
  CDR3 for alpha chain variable domain of TCR clone 245844 (TRAV8-4, TRAJ11)
WAVSRALSGYSTLTF

SEQ ID NO: 491688 - protein, 13 aa, Homo sapiens
  CDR3 for beta chain variable domain of TCR clone 245844 (TRBV10-3, TRBJ2-7)
CASKLAVNYEQYF

SEQ ID NO: 491689 - protein, 15 aa, Homo sapiens
  CDR3 for alpha chain variable domain of TCR clone 245845 (TRAV17, TRAJ23)
CATDAEDNQGGKLIF

SEQ ID NO: 491690 - protein, 15 aa, Homo sapiens
  CDR3 for beta chain variable domain of TCR clone 245845 (TRBV5-1, TRBJ2-1)
CASSPPRAPNNEQFF

SEQ ID NO: 491691 - protein, 15 aa, Homo sapiens
  CDR3 for alpha chain variable domain of TCR clone 245846 (TRAV12-1, TRAJ10)
CVVNKLTGGRNKLTF

SEQ ID NO: 491692 - protein, 17 aa, Homo sapiens
  CDR3 for beta chain variable domain of TCR clone 245846 (TRBV5-1, TRBJ1-6)
CASSPSLQGSDNSPLHF

SEQ ID NO: 491693 - protein, 11 aa, Homo sapiens
  CDR3 for alpha chain variable domain of TCR clone 245847 (TRAV3, TRAJ21)
CAVGNFNKFYF

SEQ ID NO: 491694 - protein, 17 aa, Homo sapiens
  CDR3 for beta chain variable domain of TCR clone 245847 (TRBV24-1, TRBJ2-1)
CATSEVSTSGTYNEQFF

SEQ ID NO: 491695 - protein, 13 aa, Homo sapiens
  CDR3 for alpha chain variable domain of TCR clone 245848 (TRAV3, TRAJ21)
CAVREPDFNKFYF

SEQ ID NO: 491696 - protein, 14 aa, Homo sapiens
  CDR3 for beta chain variable domain of TCR clone 245848 (TRBV7-9, TRBJ2-5)
CASSPAQDQETQYF

SEQ ID NO: 491697 - protein, 15 aa, Homo sapiens
  CDR3 for alpha chain variable domain of TCR clone 245849 (TRAV3, TRAJ40)
CAVRDVTSGAYKYIF

SEQ ID NO: 491698 - protein, 13 aa, Homo sapiens
  CDR3 for beta chain variable domain of TCR clone 245849 (TRBV7-9, TRBJ1-2)
CASSLKQNYGYTF

SEQ ID NO: 491699 - protein, 14 aa, Homo sapiens
  CDR3 for alpha chain variable domain of TCR clone 245850 (TRAV29/DV5, TRAJ32)
CAAAYGGATNKIIF

SEQ ID NO: 491700 - protein, 12 aa, Homo sapiens
  CDR3 for beta chain variable domain of TCR clone 245850 (TRBV11-2, TRBJ2-1)
CASSPGNNEQFF

SEQ ID NO: 491701 - protein, 13 aa, Homo sapiens
  CDR3 for alpha chain variable domain of TCR clone 245851 (TRAV8-4, TRAJ48)
CAVSLFGNEKLTF

SEQ ID NO: 491702 - protein, 15 aa, Homo sapiens
  CDR3 for beta chain variable domain of TCR clone 245851 (TRBV20-1, TRBJ2-7)
CSAGKGLAESYEQYF

SEQ ID NO: 491703 - protein, 14 aa, Homo sapiens
  CDR3 for alpha chain variable domain of TCR clone 245852 (TRAV12-3, TRAJ35)
CAMSLIGFGNVLHF

SEQ ID NO: 491704 - protein, 16 aa, Homo sapiens
  CDR3 for beta chain variable domain of TCR clone 245852 (TRBV27, TRBJ2-2)
CASSFRGLVRTGELFF

SEQ ID NO: 491705 - protein, 13 aa, Homo sapiens
  CDR3 for alpha chain variable domain of TCR clone 245853 (TRAV8-3, TRAJ21)
WAVGAYNFNKFYC

SEQ ID NO: 491706 - protein, 16 aa, Homo sapiens
  CDR3 for beta chain variable domain of TCR clone 245853 (TRBV19, TRBJ2-1)
CASSMGGGSSYNEQFF

SEQ ID NO: 491707 - protein, 14 aa, Homo sapiens
  CDR3 for alpha chain variable domain of TCR clone 245854 (TRAV12-2, TRAJ44)
CAVNPAGTAIKLTF

SEQ ID NO: 491708 - protein, 12 aa, Homo sapiens
  CDR3 for beta chain variable domain of TCR clone 245854 (TRBV7-8, TRBJ2-7)
CASSLGDREQYF

SEQ ID NO: 491709 - protein, 15 aa, Homo sapiens
  CDR3 for alpha chain variable domain of TCR clone 245855 (TRAV34, TRAJ36)
CGAPSRLGGANNLFF

SEQ ID NO: 491710 - protein, 16 aa, Homo sapiens
  CDR3 for beta chain variable domain of TCR clone 245855 (TRBV4-3, TRBJ2-1)
CANSYRRLGSWDEQFF

SEQ ID NO: 491711 - protein, 14 aa, Homo sapiens
  CDR3 for alpha chain variable domain of TCR clone 245856 (TRAV38-1, TRAJ45)
CAYYTGGGADGLTL

SEQ ID NO: 491712 - protein, 20 aa, Homo sapiens
  CDR3 for beta chain variable domain of TCR clone 245856 (TRBV28, TRBJ2-1)
CASTPIGRSPGLAGGNEQFF

SEQ ID NO: 491713 - protein, 12 aa, Homo sapiens
  CDR3 for alpha chain variable domain of TCR clone 245857 (TRAV3, TRAJ20)
CAVRDPDYKLSF

SEQ ID NO: 491714 - protein, 16 aa, Homo sapiens
  CDR3 for beta chain variable domain of TCR clone 245857 (TRBV2, TRBJ2-3)
CASSTSVEGVTDTQYF

SEQ ID NO: 491715 - protein, 16 aa, Homo sapiens
  CDR3 for alpha chain variable domain of TCR clone 245858 (TRAV2, TRAJ4)
CAVEDRFSGGYNKLIF

SEQ ID NO: 491716 - protein, 14 aa, Homo sapiens
  CDR3 for beta chain variable domain of TCR clone 245858 (TRBV7-2, TRBJ2-7)
CASRSQGAAYEQYF

SEQ ID NO: 491717 - protein, 14 aa, Homo sapiens
  CDR3 for alpha chain variable domain of TCR clone 245859 (TRAV9-2, TRAJ39)
CALYIYNAGNVLTF

SEQ ID NO: 491718 - protein, 16 aa, Homo sapiens
  CDR3 for beta chain variable domain of TCR clone 245859 (TRBV18, TRBJ2-2)
CASSPPRTANTRELFF

SEQ ID NO: 491719 - protein, 12 aa, Homo sapiens
  CDR3 for alpha chain variable domain of TCR clone 245860 (TRAV13-1, TRAJ36)
WRGGAGANNLFF

SEQ ID NO: 491720 - protein, 16 aa, Homo sapiens
  CDR3 for beta chain variable domain of TCR clone 245860 (TRBV7-9, TRBJ2-5)
CASRLEIGTRKETQYY

SEQ ID NO: 491721 - protein, 12 aa, Homo sapiens
  CDR3 for alpha chain variable domain of TCR clone 245861 (TRAV12-1, TRAJ40)
CVVNGETYKYIF

SEQ ID NO: 491722 - protein, 14 aa, Homo sapiens
  CDR3 for beta chain variable domain of TCR clone 245861 (TRBV7-9, TRBJ1-1)
CASSSTKGNNEAFF

SEQ ID NO: 491723 - protein, 13 aa, Homo sapiens
  CDR3 for alpha chain variable domain of TCR clone 245862 (TRAV26-1, TRAJ40)
CIVRGTVTYKYIF

SEQ ID NO: 491724 - protein, 16 aa, Homo sapiens
  CDR3 for beta chain variable domain of TCR clone 245862 (TRBV20-1, TRBJ1-1)
CSARDRTLSMNTEAFF

SEQ ID NO: 491725 - protein, 14 aa, Homo sapiens
  CDR3 for alpha chain variable domain of TCR clone 245863 (TRAV27, TRAJ22)
CAGLPSGSARQLTF

SEQ ID NO: 491726 - protein, 18 aa, Homo sapiens
  CDR3 for beta chain variable domain of TCR clone 245863 (TRBV5-5, TRBJ1-5)
CASSLRQVKGSSNQPQHF

SEQ ID NO: 491727 - protein, 13 aa, Homo sapiens
  CDR3 for alpha chain variable domain of TCR clone 245864 (TRAV3, TRAJ3)
CAVADSSASMIIF

SEQ ID NO: 491728 - protein, 16 aa, Homo sapiens
  CDR3 for beta chain variable domain of TCR clone 245864 (TRBV5-1, TRBJ2-3)
CASSLGLAVYTDTQYF

SEQ ID NO: 491729 - protein, 17 aa, Homo sapiens
  CDR3 for alpha chain variable domain of TCR clone 245865 (TRAV8-6, TRAJ8)
CAVKEGIENTGFQKLVF

SEQ ID NO: 491730 - protein, 12 aa, Homo sapiens
  CDR3 for beta chain variable domain of TCR clone 245865 (TRBV19, TRBJ1-4)
CASKDWPGGLFF

SEQ ID NO: 491731 - protein, 14 aa, Homo sapiens
  CDR3 for alpha chain variable domain of TCR clone 245866 (TRAV12-2, TRAJ44)
CAVNPAGPASKLTF

SEQ ID NO: 491732 - protein, 16 aa, Homo sapiens
  CDR3 for beta chain variable domain of TCR clone 245866 (TRBV2, TRBJ2-6)
CASSEVGGGGANVLTF

SEQ ID NO: 491733 - protein, 16 aa, Homo sapiens
  CDR3 for alpha chain variable domain of TCR clone 245867 (TRAV12-3, TRAJ53)
CALSPGRGGSNYKLTF

SEQ ID NO: 491734 - protein, 11 aa, Homo sapiens
  CDR3 for beta chain variable domain of TCR clone 245867 (TRBV29-1, TRBJ2-5)
CSEDRTGTQYF

SEQ ID NO: 491735 - protein, 13 aa, Homo sapiens
  CDR3 for alpha chain variable domain of TCR clone 245868 (TRAV21, TRAJ27)
CAARPGNAGKSTF

SEQ ID NO: 491736 - protein, 18 aa, Homo sapiens
  CDR3 for beta chain variable domain of TCR clone 245868 (TRBV20-1, TRBJ2-3)
CSASGLAGGPGTTDTQYF

SEQ ID NO: 491737 - protein, 13 aa, Homo sapiens
  CDR3 for alpha chain variable domain of TCR clone 245869 (TRAV20, TRAJ34)
CAVRSYNTDKLIF

SEQ ID NO: 491738 - protein, 15 aa, Homo sapiens
  CDR3 for beta chain variable domain of TCR clone 245869 (TRBV27, TRBJ1-3)
CASSPSPGSGNTIYF

SEQ ID NO: 491739 - protein, 12 aa, Homo sapiens
  CDR3 for alpha chain variable domain of TCR clone 245870 (TRAV27, TRAJ41)
CAGRNSGYALDF

SEQ ID NO: 491740 - protein, 15 aa, Homo sapiens
  CDR3 for beta chain variable domain of TCR clone 245870 (TRBV20-1, TRBJ1-5)
CSATSDRGLGQPQHF

SEQ ID NO: 491741 - protein, 16 aa, Homo sapiens
  CDR3 for alpha chain variable domain of TCR clone 245871 (TRAV16, TRAJ4)
CALSRMFSGGYNKLIF

SEQ ID NO: 491742 - protein, 12 aa, Homo sapiens
  CDR3 for beta chain variable domain of TCR clone 245871 (TRBV2, TRBJ2-1)
CAYGPPGNEQFF

SEQ ID NO: 491743 - protein, 16 aa, Homo sapiens
  CDR3 for alpha chain variable domain of TCR clone 245872 (TRAV17, TRAJ22)
CATGPISSGSARQLTF

SEQ ID NO: 491744 - protein, 12 aa, Homo sapiens
  CDR3 for beta chain variable domain of TCR clone 245872 (TRBV7-8, TRBJ2-7)
CASSLGDREQYF

SEQ ID NO: 491745 - protein, 14 aa, Homo sapiens
  CDR3 for alpha chain variable domain of TCR clone 245873 (TRAV12-3, TRAJ10)
SHLPLTGGGNKLTF

SEQ ID NO: 491746 - protein, 19 aa, Homo sapiens
  CDR3 for beta chain variable domain of TCR clone 245873 (TRBV11-2, TRBJ2-3)
CASSAPRAGGNPSTDTQYF

SEQ ID NO: 491747 - protein, 14 aa, Homo sapiens
  CDR3 for alpha chain variable domain of TCR clone 245874 (TRAV2, TRAJ37)
CAVDFTSNTGNLIF

SEQ ID NO: 491748 - protein, 17 aa, Homo sapiens
  CDR3 for beta chain variable domain of TCR clone 245874 (TRBV20-1, TRBJ1-1)
CSASRGVTGNTEAFLDK

SEQ ID NO: 491749 - protein, 13 aa, Homo sapiens
  CDR3 for alpha chain variable domain of TCR clone 245875 (TRAV21, TRAJ27)
CAALNTNAGKSTL

SEQ ID NO: 491750 - protein, 14 aa, Homo sapiens
  CDR3 for beta chain variable domain of TCR clone 245875 (TRBV19, TRBJ1-5)
CASSQGYSNQPQHF

SEQ ID NO: 491751 - protein, 14 aa, Homo sapiens
  CDR3 for alpha chain variable domain of TCR clone 245876 (TRAV1-2, TRAJ16)
CAVNRFSDGQKLLF

SEQ ID NO: 491752 - protein, 12 aa, Homo sapiens
  CDR3 for beta chain variable domain of TCR clone 245876 (TRBV7-9, TRBJ2-7)
CARSLEGYEQYF

SEQ ID NO: 491753 - protein, 13 aa, Homo sapiens
  CDR3 for alpha chain variable domain of TCR clone 245877 (TRAV21, TRAJ26)
CAVLDNYGQNFGF

SEQ ID NO: 491754 - protein, 16 aa, Homo sapiens
  CDR3 for beta chain variable domain of TCR clone 245877 (TRBV29-1, TRBJ2-2)
CSVETRASGNTGELFF

SEQ ID NO: 491755 - protein, 14 aa, Homo sapiens
  CDR3 for alpha chain variable domain of TCR clone 245878 (TRAV29/DV5, TRAJ48)
CAAMALFGNEKLTF

SEQ ID NO: 491756 - protein, 20 aa, Homo sapiens
  CDR3 for beta chain variable domain of TCR clone 245878 (TRBV7-2, TRBJ2-2)
CASSHLFPGPTIHITGELFF

SEQ ID NO: 491757 - protein, 12 aa, Homo sapiens
  CDR3 for alpha chain variable domain of TCR clone 245879 (TRAV12-3, TRAJ20)
CAMVRGDYKLSF

SEQ ID NO: 491758 - protein, 15 aa, Homo sapiens
  CDR3 for beta chain variable domain of TCR clone 245879 (TRBV9, TRBJ2-1)
CASSVGTGELNEQFF

SEQ ID NO: 491759 - protein, 12 aa, Homo sapiens
  CDR3 for alpha chain variable domain of TCR clone 245880 (TRAV1-1, TRAJ43)
CAPRVSSNEMRF

SEQ ID NO: 491760 - protein, 15 aa, Homo sapiens
  CDR3 for beta chain variable domain of TCR clone 245880 (TRBV5-1, TRBJ2-7)
CASSLGDFTTYEQYF

SEQ ID NO: 491761 - protein, 14 aa, Homo sapiens
  CDR3 for alpha chain variable domain of TCR clone 245881 (TRAV23/DV6, TRAJ52)
CAARDGTSYGKLTF

SEQ ID NO: 491762 - protein, 15 aa, Homo sapiens
  CDR3 for beta chain variable domain of TCR clone 245881 (TRBV12-4, TRBJ2-5)
CASSPPTGLQETQYF

SEQ ID NO: 491763 - protein, 10 aa, Homo sapiens
  CDR3 for alpha chain variable domain of TCR clone 245882 (TRAV23/DV6, TRAJ57)
CAASSTFPQG

SEQ ID NO: 491764 - protein, 14 aa, Homo sapiens
  CDR3 for beta chain variable domain of TCR clone 245882 (TRBV25-1, TRBJ1-1)
CASTHLGGNTEAFF

SEQ ID NO: 491765 - protein, 15 aa, Homo sapiens
  CDR3 for alpha chain variable domain of TCR clone 245883 (TRAV17, TRAJ35)
CATAFVIGFGNVLHC

SEQ ID NO: 491766 - protein, 14 aa, Homo sapiens
  CDR3 for beta chain variable domain of TCR clone 245883 (TRBV11-2, TRBJ2-7)
CASSLGAGAYEQYF

SEQ ID NO: 491767 - protein, 13 aa, Homo sapiens
  CDR3 for alpha chain variable domain of TCR clone 245884 (TRAV12-1, TRAJ33)
CCDAPDSNYQLIW

SEQ ID NO: 491768 - protein, 13 aa, Homo sapiens
  CDR3 for beta chain variable domain of TCR clone 245884 (TRBV7-2, TRBJ2-5)
CASSQTSVETQYF

SEQ ID NO: 491769 - protein, 14 aa, Homo sapiens
  CDR3 for alpha chain variable domain of TCR clone 245885 (TRAV16, TRAJ17)
FALSGRAAGNKLTF

SEQ ID NO: 491770 - protein, 13 aa, Homo sapiens
  CDR3 for beta chain variable domain of TCR clone 245885 (TRBV12-5, TRBJ2-3)
CASGDRQSDTQYF

SEQ ID NO: 491771 - protein, 16 aa, Homo sapiens
  CDR3 for alpha chain variable domain of TCR clone 245886 (TRAV3, TRAJ32)
CAGRENYGGATNKLIL

SEQ ID NO: 491772 - protein, 12 aa, Homo sapiens
  CDR3 for beta chain variable domain of TCR clone 245886 (TRBV20-1, TRBJ1-2)
CSVTPEGYGYTF

SEQ ID NO: 491773 - protein, 13 aa, Homo sapiens
  CDR3 for alpha chain variable domain of TCR clone 245887 (TRAV3, TRAJ27)
CAVRPLGAGKSTF

SEQ ID NO: 491774 - protein, 14 aa, Homo sapiens
  CDR3 for beta chain variable domain of TCR clone 245887 (TRBV7-2, TRBJ2-2)
CASRGQGAAGELFF

SEQ ID NO: 491775 - protein, 15 aa, Homo sapiens
  CDR3 for alpha chain variable domain of TCR clone 245888 (TRAV21, TRAJ24)
CAARSSTDSWGKLQF

SEQ ID NO: 491776 - protein, 16 aa, Homo sapiens
  CDR3 for beta chain variable domain of TCR clone 245888 (TRBV4-2, TRBJ1-1)
CASSQAGFGMNTEAFF

SEQ ID NO: 491777 - protein, 15 aa, Homo sapiens
  CDR3 for alpha chain variable domain of TCR clone 245889 (TRAV26-1, TRAJ29)
CIVRVEGSGNTPLAF

SEQ ID NO: 491778 - protein, 15 aa, Homo sapiens
  CDR3 for beta chain variable domain of TCR clone 245889 (TRBV7-9, TRBJ1-5)
CASSQGRQPNQPQHF

SEQ ID NO: 491779 - protein, 14 aa, Homo sapiens
  CDR3 for alpha chain variable domain of TCR clone 245890 (TRAV23/DV6, TRAJ53)
CAARSGGSNYKLTL

SEQ ID NO: 491780 - protein, 14 aa, Homo sapiens
  CDR3 for beta chain variable domain of TCR clone 245890 (TRBV27, TRBJ1-1)
CASSPQGKRAEAFF

SEQ ID NO: 491781 - protein, 16 aa, Homo sapiens
  CDR3 for alpha chain variable domain of TCR clone 245891 (TRAV3, TRAJ37)
CAVRVRVSGNTGKLIF

SEQ ID NO: 491782 - protein, 11 aa, Homo sapiens
  CDR3 for beta chain variable domain of TCR clone 245891 (TRBV11-2, TRBJ2-2)
CASSLPGELFF

SEQ ID NO: 491783 - protein, 13 aa, Homo sapiens
  CDR3 for alpha chain variable domain of TCR clone 245892 (TRAV1-2, TRAJ9)
CAALNTGGFKPIF

SEQ ID NO: 491784 - protein, 20 aa, Homo sapiens
  CDR3 for beta chain variable domain of TCR clone 245892 (TRBV28, TRBJ2-1)
CASTPIGRSPGLAGGNEQFF

SEQ ID NO: 491785 - protein, 13 aa, Homo sapiens
  CDR3 for alpha chain variable domain of TCR clone 245893 (TRAV1-2, TRAJ13)
CAVNSGGYQKVTF

SEQ ID NO: 491786 - protein, 14 aa, Homo sapiens
  CDR3 for beta chain variable domain of TCR clone 245893 (TRBV4-1, TRBJ1-5)
CASSPKGDNQPRHF

SEQ ID NO: 491787 - protein, 15 aa, Homo sapiens
  CDR3 for alpha chain variable domain of TCR clone 245894 (TRAV16, TRAJ16)
CALQGGGSDGQKLLF

SEQ ID NO: 491788 - protein, 17 aa, Homo sapiens
  CDR3 for beta chain variable domain of TCR clone 245894 (TRBV28, TRBJ2-5)
CASSTPEGDALQETQYF

SEQ ID NO: 491789 - protein, 13 aa, Homo sapiens
  CDR3 for alpha chain variable domain of TCR clone 245895 (TRAV8-3, TRAJ6)
CAVEKGGSYIPPF

SEQ ID NO: 491790 - protein, 15 aa, Homo sapiens
  CDR3 for beta chain variable domain of TCR clone 245895 (TRBV28, TRBJ2-5)
CASSADRGRGETQYF

SEQ ID NO: 491791 - protein, 14 aa, Homo sapiens
  CDR3 for alpha chain variable domain of TCR clone 245896 (TRAV12-3, TRAJ54)
CAMRIIQGAQQMVF

SEQ ID NO: 491792 - protein, 16 aa, Homo sapiens
  CDR3 for beta chain variable domain of TCR clone 245896 (TRBV28, TRBJ2-1)
CASRVPASGRIGEQFF

SEQ ID NO: 491793 - protein, 23 aa, Homo sapiens
  CDR3 for alpha chain variable domain of TCR clone 245897 (TRAV1-1, TRAJ11)
LLQELQMKDSASYFCAGYSTLTF

SEQ ID NO: 491794 - protein, 13 aa, Homo sapiens
  CDR3 for beta chain variable domain of TCR clone 245897 (TRBV15, TRBJ1-6)
CATSGGLNSPLHF

SEQ ID NO: 491795 - protein, 14 aa, Homo sapiens
  CDR3 for alpha chain variable domain of TCR clone 245898 (TRAV9-2, TRAJ6)
CALSDPGGSYIPTV

SEQ ID NO: 491796 - protein, 16 aa, Homo sapiens
  CDR3 for beta chain variable domain of TCR clone 245898 (TRBV19, TRBJ2-2)
CASRSPGTGATGELFF

SEQ ID NO: 491797 - protein, 14 aa, Homo sapiens
  CDR3 for alpha chain variable domain of TCR clone 245899 (TRAV35, TRAJ41)
CAGQASVRRNALNF

SEQ ID NO: 491798 - protein, 14 aa, Homo sapiens
  CDR3 for beta chain variable domain of TCR clone 245899 (TRBV20-1, TRBJ1-2)
CSASGQGAVYGYTF

SEQ ID NO: 491799 - protein, 10 aa, Homo sapiens
  CDR3 for alpha chain variable domain of TCR clone 245900 (TRAV12-1, TRAJ37)
ARGNTGELIF

SEQ ID NO: 491800 - protein, 15 aa, Homo sapiens
  CDR3 for beta chain variable domain of TCR clone 245900 (TRBV7-2, TRBJ2-3)
CAGSLEQGGTDTQYF

SEQ ID NO: 491801 - protein, 16 aa, Homo sapiens
  CDR3 for alpha chain variable domain of TCR clone 245901 (TRAV27, TRAJ13)
CAGAKSDSWGYQKGTF

SEQ ID NO: 491802 - protein, 15 aa, Homo sapiens
  CDR3 for beta chain variable domain of TCR clone 245901 (TRBV29-1, TRBJ2-1)
CSVGRHALFYNEQFF

SEQ ID NO: 491803 - protein, 13 aa, Homo sapiens
  CDR3 for alpha chain variable domain of TCR clone 245902 (TRAV17, TRAJ39)
CATYYGAGNMLTF

SEQ ID NO: 491804 - protein, 13 aa, Homo sapiens
  CDR3 for beta chain variable domain of TCR clone 245902 (TRBV20-1, TRBJ1-1)
CSARGGGNTEAFF

SEQ ID NO: 491805 - protein, 13 aa, Homo sapiens
  CDR3 for alpha chain variable domain of TCR clone 245903 (TRAV2, TRAJ40)
CALVTSGTYKYIF

SEQ ID NO: 491806 - protein, 15 aa, Homo sapiens
  CDR3 for beta chain variable domain of TCR clone 245903 (TRBV4-1, TRBJ1-2)
CASSQGQGAAYGYTF

SEQ ID NO: 491807 - protein, 14 aa, Homo sapiens
  CDR3 for alpha chain variable domain of TCR clone 245904 (TRAV1-2, TRAJ16)
CAVNRFSDGQKLLF

SEQ ID NO: 491808 - protein, 16 aa, Homo sapiens
  CDR3 for beta chain variable domain of TCR clone 245904 (TRBV9)
CASRGGGRWWAPLRGV

SEQ ID NO: 491809 - protein, 14 aa, Homo sapiens
  CDR3 for alpha chain variable domain of TCR clone 245905 (TRAV3, TRAJ36)
CAVRDGTGANNLFC

SEQ ID NO: 491810 - protein, 16 aa, Homo sapiens
  CDR3 for beta chain variable domain of TCR clone 245905 (TRBV7-3, TRBJ2-5)
CASIQPGGSVQETQYF

SEQ ID NO: 491811 - protein, 13 aa, Homo sapiens
  CDR3 for alpha chain variable domain of TCR clone 245906 (TRAV20, TRAJ20)
CAVRDFNDYKLSF

SEQ ID NO: 491812 - protein, 12 aa, Homo sapiens
  CDR3 for beta chain variable domain of TCR clone 245906 (TRBV9, TRBJ2-1)
CASSITYNEQFV

SEQ ID NO: 491813 - protein, 15 aa, Homo sapiens
  CDR3 for alpha chain variable domain of TCR clone 245907 (TRAV12-2, TRAJ43)
CAFDMRFGAGTRLTV

SEQ ID NO: 491814 - protein, 17 aa, Homo sapiens
  CDR3 for beta chain variable domain of TCR clone 245907 (TRBV6-3, TRBJ2-2)
CASSYAGQGINTGELFF

SEQ ID NO: 491815 - protein, 16 aa, Homo sapiens
  CDR3 for alpha chain variable domain of TCR clone 245908 (TRAV23/DV6, )
CADIQNPDPAVYQLRD

SEQ ID NO: 491816 - protein, 13 aa, Homo sapiens
  CDR3 for beta chain variable domain of TCR clone 245908 (TRBV28, TRBJ2-7)
FASRSSGVYEQYF

SEQ ID NO: 491817 - protein, 14 aa, Homo sapiens
  CDR3 for alpha chain variable domain of TCR clone 245909 (TRAV8-4, TRAJ9)
CAVRIATGGFKTIF

SEQ ID NO: 491818 - protein, 14 aa, Homo sapiens
  CDR3 for beta chain variable domain of TCR clone 245909 (TRBV5-1, TRBJ1-1)
CASSLQGASTEAFF

SEQ ID NO: 491819 - protein, 16 aa, Homo sapiens
  CDR3 for alpha chain variable domain of TCR clone 245910 (TRAV12-2, TRAJ10)
CAVNRVLTGGGNKLTC

SEQ ID NO: 491820 - protein, 13 aa, Homo sapiens
  CDR3 for beta chain variable domain of TCR clone 245910 (TRBV29-1, TRBJ2-7)
CSVKRGGNYEQYF

SEQ ID NO: 491821 - protein, 14 aa, Homo sapiens
  CDR3 for alpha chain variable domain of TCR clone 245911 (TRAV12-3, TRAJ10)
SHLPLTGGGNKLTF

SEQ ID NO: 491822 - protein, 13 aa, Homo sapiens
  CDR3 for beta chain variable domain of TCR clone 245911 (TRBV12-4, TRBJ2-5)
CASRLAVQETQYF

SEQ ID NO: 491823 - protein, 14 aa, Homo sapiens
  CDR3 for alpha chain variable domain of TCR clone 245912 (TRAV12-1, TRAJ33)
CVVNMPDSNYQLIW

SEQ ID NO: 491824 - protein, 13 aa, Homo sapiens
  CDR3 for beta chain variable domain of TCR clone 245912 (TRBV27, TRBJ1-4)
CASSLMGDEKLFF

SEQ ID NO: 491825 - protein, 11 aa, Homo sapiens
  CDR3 for alpha chain variable domain of TCR clone 245913 (TRAV3, TRAJ21)
CAVGNFNKFYF

SEQ ID NO: 491826 - protein, 13 aa, Homo sapiens
  CDR3 for beta chain variable domain of TCR clone 245913 (TRBV12-5, TRBJ2-3)
CSSGDRQSDTQYF

SEQ ID NO: 491827 - protein, 17 aa, Homo sapiens
  CDR3 for alpha chain variable domain of TCR clone 245914 (TRAV3, TRAJ42)
CAVRDRDYVGSQGNLTF

SEQ ID NO: 491828 - protein, 15 aa, Homo sapiens
  CDR3 for beta chain variable domain of TCR clone 245914 (TRBV6-6, TRBJ2-7)
CASSYSYGGSYEQYF

SEQ ID NO: 491829 - protein, 16 aa, Homo sapiens
  CDR3 for alpha chain variable domain of TCR clone 245915 (TRAV30, TRAJ24)
CGTEIVDADSWGKFQF

SEQ ID NO: 491830 - protein, 15 aa, Homo sapiens
  CDR3 for beta chain variable domain of TCR clone 245915 (TRBV27, TRBJ2-1)
CASINGGGSSNEQFF

SEQ ID NO: 491831 - protein, 15 aa, Homo sapiens
  CDR3 for alpha chain variable domain of TCR clone 245916 (TRAV27, TRAJ33)
CAGADIMDSNYQLIW

SEQ ID NO: 491832 - protein, 20 aa, Homo sapiens
  CDR3 for beta chain variable domain of TCR clone 245916 (TRBV28, TRBJ2-1)
CASTPIGRSPGLAGGNEQFF

SEQ ID NO: 491833 - protein, 13 aa, Homo sapiens
  CDR3 for alpha chain variable domain of TCR clone 245917 (TRAV20, TRAJ21)
CAVEGYNFNKFYF

SEQ ID NO: 491834 - protein, 16 aa, Homo sapiens
  CDR3 for beta chain variable domain of TCR clone 245917 (TRBV7-2, TRBJ1-2)
CAGSSNQDRRGHGYTF

SEQ ID NO: 491835 - protein, 19 aa, Homo sapiens
  CDR3 for alpha chain variable domain of TCR clone 245918 (TRAV3, TRAJ6)
CAVRDRDPSRSGGRYIPTF

SEQ ID NO: 491836 - protein, 15 aa, Homo sapiens
  CDR3 for beta chain variable domain of TCR clone 245918 (TRBV18, TRBJ2-7)
CASSPTFMDSYEQYF

SEQ ID NO: 491837 - protein, 12 aa, Homo sapiens
  CDR3 for alpha chain variable domain of TCR clone 245919 (TRAV8-3, TRAJ40)
CAVTSGTYKFIF

SEQ ID NO: 491838 - protein, 14 aa, Homo sapiens
  CDR3 for beta chain variable domain of TCR clone 245919 (TRBV12-4, TRBJ2-3)
CASSGQGSTDTQYF

SEQ ID NO: 491839 - protein, 14 aa, Homo sapiens
  CDR3 for alpha chain variable domain of TCR clone 245920 (TRAV27, TRAJ23)
CAGLSYNQGGKLIF

SEQ ID NO: 491840 - protein, 14 aa, Homo sapiens
  CDR3 for beta chain variable domain of TCR clone 245920 (TRBV7-8, TRBJ2-5)
CASSEVLAQETQYF

SEQ ID NO: 491841 - protein, 11 aa, Homo sapiens
  CDR3 for alpha chain variable domain of TCR clone 245921 (TRAV3, TRAJ21)
CAVGNFNKFYF

SEQ ID NO: 491842 - protein, 15 aa, Homo sapiens
  CDR3 for beta chain variable domain of TCR clone 245921 (TRBV19, TRBJ2-5)
CASSQLHGAGETQYF

SEQ ID NO: 491843 - protein, 17 aa, Homo sapiens
  CDR3 for alpha chain variable domain of TCR clone 245922 (TRAV13-1, )
CAANIQNPDPAVYQLRD

SEQ ID NO: 491844 - protein, 14 aa, Homo sapiens
  CDR3 for beta chain variable domain of TCR clone 245922 (TRBV19, TRBJ2-7)
CASSIGPNSYGQYF

SEQ ID NO: 491845 - protein, 15 aa, Homo sapiens
  CDR3 for alpha chain variable domain of TCR clone 245923 (TRAV8-3, TRAJ27)
CAVGPSKTNASKSTF

SEQ ID NO: 491846 - protein, 15 aa, Homo sapiens
  CDR3 for beta chain variable domain of TCR clone 245923 (TRBV27, TRBJ2-1)
CASSNGGGSSNEQFF

SEQ ID NO: 491847 - protein, 14 aa, Homo sapiens
  CDR3 for alpha chain variable domain of TCR clone 245924 (TRAV25, TRAJ45)
CARESGGGADGLTF

SEQ ID NO: 491848 - protein, 15 aa, Homo sapiens
  CDR3 for beta chain variable domain of TCR clone 245924 (TRBV5-1, TRBJ2-1)
CASSPPRAPYNEQFF

SEQ ID NO: 491849 - protein, 17 aa, Homo sapiens
  CDR3 for alpha chain variable domain of TCR clone 245925 (TRAV12-2, TRAJ36)
CAVKDNLFFGTGTRLTV

SEQ ID NO: 491850 - protein, 15 aa, Homo sapiens
  CDR3 for beta chain variable domain of TCR clone 245925 (TRBV28, TRBJ2-2)
CASTVAGATTGELFF

SEQ ID NO: 491851 - protein, 13 aa, Homo sapiens
  CDR3 for alpha chain variable domain of TCR clone 245926 (TRAV26-2, TRAJ57)
CNLSRGGSEKLVF

SEQ ID NO: 491852 - protein, 16 aa, Homo sapiens
  CDR3 for beta chain variable domain of TCR clone 245926 (TRBV18, TRBJ1-5)
CASSPRTGGGNQPQHF

SEQ ID NO: 491853 - protein, 12 aa, Homo sapiens
  CDR3 for alpha chain variable domain of TCR clone 245927 (TRAV27, TRAJ9)
CAGESGGFKTIF

SEQ ID NO: 491854 - protein, 14 aa, Homo sapiens
  CDR3 for beta chain variable domain of TCR clone 245927 (TRBV19, TRBJ2-1)
CASSMGSGRRSSSS

SEQ ID NO: 491855 - protein, 14 aa, Homo sapiens
  CDR3 for alpha chain variable domain of TCR clone 245928 (TRAV8-1, TRAJ39)
CAVNASNTGNMLTF

SEQ ID NO: 491856 - protein, 13 aa, Homo sapiens
  CDR3 for beta chain variable domain of TCR clone 245928 (TRBV12-4, TRBJ2-5)
CASSPGTEETQYF

SEQ ID NO: 491857 - protein, 12 aa, Homo sapiens
  CDR3 for alpha chain variable domain of TCR clone 245929 (TRAV8-3, TRAJ41)
CAVAVSGYALNF

SEQ ID NO: 491858 - protein, 17 aa, Homo sapiens
  CDR3 for beta chain variable domain of TCR clone 245929 (TRBV7-3, TRBJ2-2)
CASSLSGTSGGTGELFF

SEQ ID NO: 491859 - protein, 13 aa, Homo sapiens
  CDR3 for alpha chain variable domain of TCR clone 245930 (TRAV24, TRAJ53)
CAFGGGSNYKLTF

SEQ ID NO: 491860 - protein, 15 aa, Homo sapiens
  CDR3 for beta chain variable domain of TCR clone 245930 (TRBV4-1, TRBJ1-4)
CASSQTGGQAEKLFS

SEQ ID NO: 491861 - protein, 16 aa, Homo sapiens
  CDR3 for alpha chain variable domain of TCR clone 245931 (TRAV14/DV4, TRAJ45)
CAMREGERGGADGLTF

SEQ ID NO: 491862 - protein, 14 aa, Homo sapiens
  CDR3 for beta chain variable domain of TCR clone 245931 (TRBV7-8, TRBJ2-3)
CASSLEAGTDTQYF

SEQ ID NO: 491863 - protein, 14 aa, Homo sapiens
  CDR3 for alpha chain variable domain of TCR clone 245932 (TRAV17, TRAJ45)
CATASGGGADGPTF

SEQ ID NO: 491864 - protein, 13 aa, Homo sapiens
  CDR3 for beta chain variable domain of TCR clone 245932 (TRBV15, TRBJ2-7)
CATSTTGHYEQYF

SEQ ID NO: 491865 - protein, 14 aa, Homo sapiens
  CDR3 for alpha chain variable domain of TCR clone 245933 (TRAV1-2, TRAJ8)
CAVREDTGFQKLVF

SEQ ID NO: 491866 - protein, 12 aa, Homo sapiens
  CDR3 for beta chain variable domain of TCR clone 245933 (TRBV5-5, TRBJ1-2)
CASSALNYGYTF

SEQ ID NO: 491867 - protein, 12 aa, Homo sapiens
  CDR3 for alpha chain variable domain of TCR clone 245934 (TRAV21, TRAJ27)
CAANTNAGKSTF

SEQ ID NO: 491868 - protein, 15 aa, Homo sapiens
  CDR3 for beta chain variable domain of TCR clone 245934 (TRBV29-1, TRBJ1-4)
CSVVCIGDINEKLFF

SEQ ID NO: 491869 - protein, 11 aa, Homo sapiens
  CDR3 for alpha chain variable domain of TCR clone 245935 (TRAV8-3, TRAJ15)
CAVGPATALIF

SEQ ID NO: 491870 - protein, 18 aa, Homo sapiens
  CDR3 for beta chain variable domain of TCR clone 245935 (TRBV18, TRBJ2-3)
CASSYTSGAAGGTDTQYF

SEQ ID NO: 491871 - protein, 12 aa, Homo sapiens
  CDR3 for alpha chain variable domain of TCR clone 245936 (TRAV13-1, TRAJ9)
CASHTGGFKTIF

SEQ ID NO: 491872 - protein, 13 aa, Homo sapiens
  CDR3 for beta chain variable domain of TCR clone 245936 (TRBV12-4, TRBJ1-2)
CASNSGSKDGYTF

SEQ ID NO: 491873 - protein, 13 aa, Homo sapiens
  CDR3 for alpha chain variable domain of TCR clone 245937 (TRAV12-1, TRAJ33)
CGDAPDSNYQLIW

SEQ ID NO: 491874 - protein, 14 aa, Homo sapiens
  CDR3 for beta chain variable domain of TCR clone 245937 (TRBV7-9, TRBJ2-1)
CASSPRDSLYEQFF

SEQ ID NO: 491875 - protein, 13 aa, Homo sapiens
  CDR3 for alpha chain variable domain of TCR clone 245938 (TRAV9-2, TRAJ4)
CALISGGYNKLIF

SEQ ID NO: 491876 - protein, 13 aa, Homo sapiens
  CDR3 for beta chain variable domain of TCR clone 245938 (TRBV12-4, TRBJ2-7)
CASSPTETYEQYF

SEQ ID NO: 491877 - protein, 17 aa, Homo sapiens
  CDR3 for alpha chain variable domain of TCR clone 245939 (TRAV8-6, TRAJ58)
CAVRSWVGETSGPRLTF

SEQ ID NO: 491878 - protein, 14 aa, Homo sapiens
  CDR3 for beta chain variable domain of TCR clone 245939 (TRBV4-2, TRBJ2-1)
CASGLDRAYNEQFF

SEQ ID NO: 491879 - protein, 16 aa, Homo sapiens
  CDR3 for alpha chain variable domain of TCR clone 245940 (TRAV30, TRAJ24)
CGTEIVDADSCVKFQF

SEQ ID NO: 491880 - protein, 14 aa, Homo sapiens
  CDR3 for beta chain variable domain of TCR clone 245940 (TRBV12-5, TRBJ2-5)
CASGSRTHQETQYF

SEQ ID NO: 491881 - protein, 14 aa, Homo sapiens
  CDR3 for alpha chain variable domain of TCR clone 245941 (TRAV4, TRAJ17)
CLVGLKAAGNKLNF

SEQ ID NO: 491882 - protein, 12 aa, Homo sapiens
  CDR3 for beta chain variable domain of TCR clone 245941 (TRBV7-9, TRBJ2-2)
CASSLDTGELFF

SEQ ID NO: 491883 - protein, 15 aa, Homo sapiens
  CDR3 for alpha chain variable domain of TCR clone 245942 (TRAV27, TRAJ38)
CAARRNAGNNRKLYW

SEQ ID NO: 491884 - protein, 13 aa, Homo sapiens
  CDR3 for beta chain variable domain of TCR clone 245942 (TRBV12-5, TRBJ2-3)
CASGDRQSDTQYF

SEQ ID NO: 491885 - protein, 14 aa, Homo sapiens
  CDR3 for alpha chain variable domain of TCR clone 245943 (TRAV1-2, TRAJ16)
CAVNRFSDGKKLLF

SEQ ID NO: 491886 - protein, 14 aa, Homo sapiens
  CDR3 for beta chain variable domain of TCR clone 245943 (TRBV7-9, TRBJ2-1)
CASSPRDSLYEQFF

SEQ ID NO: 491887 - protein, 12 aa, Homo sapiens
  CDR3 for alpha chain variable domain of TCR clone 245944 (TRAV13-1, TRAJ49)
CAASIRSDQFYF

SEQ ID NO: 491888 - protein, 14 aa, Homo sapiens
  CDR3 for beta chain variable domain of TCR clone 245944 (TRBV7-2, TRBJ2-1)
CASSPGLAGNEQFF

SEQ ID NO: 491889 - protein, 14 aa, Homo sapiens
  CDR3 for alpha chain variable domain of TCR clone 245945 (TRAV8-4, TRAJ9)
CAVMINTGGFKTIF

SEQ ID NO: 491890 - protein, 15 aa, Homo sapiens
  CDR3 for beta chain variable domain of TCR clone 245945 (TRBV10-2, TRBJ2-6)
CASSEEGTGANVLTF

SEQ ID NO: 491891 - protein, 12 aa, Homo sapiens
  CDR3 for alpha chain variable domain of TCR clone 245946 (TRAV4, TRAJ26)
CLVGDYGQNFVF

SEQ ID NO: 491892 - protein, 16 aa, Homo sapiens
  CDR3 for beta chain variable domain of TCR clone 245946 (TRBV7-2, TRBJ1-2)
CASRSNQDRRGDGYTF

SEQ ID NO: 491893 - protein, 14 aa, Homo sapiens
  CDR3 for alpha chain variable domain of TCR clone 245947 (TRAV26-1, TRAJ45)
CIEVTGGGADGLTF

SEQ ID NO: 491894 - protein, 13 aa, Homo sapiens
  CDR3 for beta chain variable domain of TCR clone 245947 (TRBV14, TRBJ2-7)
CASSQDRRYEQYF

SEQ ID NO: 491895 - protein, 14 aa, Homo sapiens
  CDR3 for alpha chain variable domain of TCR clone 245948 (TRAV1-2, TRAJ8)
CAVREDTGFLKLLF

SEQ ID NO: 491896 - protein, 15 aa, Homo sapiens
  CDR3 for beta chain variable domain of TCR clone 245948 (TRBV6-3, TRBJ2-7)
CASSSPGTVFYEQYF

SEQ ID NO: 491897 - protein, 11 aa, Homo sapiens
  CDR3 for alpha chain variable domain of TCR clone 245949 (TRAV3, TRAJ21)
CAVGNFNKFYF

SEQ ID NO: 491898 - protein, 16 aa, Homo sapiens
  CDR3 for beta chain variable domain of TCR clone 245949 (TRBV19, TRBJ2-1)
CASSKVVPSSYNEQFF

SEQ ID NO: 491899 - protein, 16 aa, Homo sapiens
  CDR3 for alpha chain variable domain of TCR clone 245950 (TRAV25, )
CADIQNPDPAVYQLRD

SEQ ID NO: 491900 - protein, 16 aa, Homo sapiens
  CDR3 for beta chain variable domain of TCR clone 245950 (TRBV29-1, TRBJ2-7)
CSVEDAEDGTAYEQYF

SEQ ID NO: 491901 - protein, 14 aa, Homo sapiens
  CDR3 for alpha chain variable domain of TCR clone 245951 (TRAV8-4, TRAJ27)
CAVSKGTNAGKSTF

SEQ ID NO: 491902 - protein, 16 aa, Homo sapiens
  CDR3 for beta chain variable domain of TCR clone 245951 (TRBV2, TRBJ2-7)
CARSSTRRGSSYEQYF

SEQ ID NO: 491903 - protein, 17 aa, Homo sapiens
  CDR3 for alpha chain variable domain of TCR clone 245952 (TRAV3, TRAJ12)
CAVSDGGRMDSSYKLIF

SEQ ID NO: 491904 - protein, 13 aa, Homo sapiens
  CDR3 for beta chain variable domain of TCR clone 245952 (TRBV20-1, TRBJ1-1)
CSAPLGGGAEAFF

SEQ ID NO: 491905 - protein, 14 aa, Homo sapiens
  CDR3 for alpha chain variable domain of TCR clone 245953 (TRAV13-1, TRAJ20)
CAARPGSNDYKLIF

SEQ ID NO: 491906 - protein, 12 aa, Homo sapiens
  CDR3 for beta chain variable domain of TCR clone 245953 (TRBV7-8, TRBJ2-7)
CASSLGDREQYF

SEQ ID NO: 491907 - protein, 16 aa, Homo sapiens
  CDR3 for alpha chain variable domain of TCR clone 245954 (TRAV4, TRAJ9)
CLVGDPNRPGGFKTIF

SEQ ID NO: 491908 - protein, 16 aa, Homo sapiens
  CDR3 for beta chain variable domain of TCR clone 245954 (TRBV28, TRBJ1-4)
SASSPPYRGRSEKLFF

SEQ ID NO: 491909 - protein, 16 aa, Homo sapiens
  CDR3 for alpha chain variable domain of TCR clone 245955 (TRAV3, TRAJ37)
CAVRGKGSGNTGKLIF

SEQ ID NO: 491910 - protein, 15 aa, Homo sapiens
  CDR3 for beta chain variable domain of TCR clone 245955 (TRBV7-9, TRBJ2-2)
CASRPLDTSPGELFF

SEQ ID NO: 491911 - protein, 12 aa, Homo sapiens
  CDR3 for alpha chain variable domain of TCR clone 245956 (TRAV12-3, TRAJ17)
CAMTLTGNKLTF

SEQ ID NO: 491912 - protein, 15 aa, Homo sapiens
  CDR3 for beta chain variable domain of TCR clone 245956 (TRBV11-2, TRBJ1-1)
CASSSRSSLLLSLDK

SEQ ID NO: 491913 - protein, 14 aa, Homo sapiens
  CDR3 for alpha chain variable domain of TCR clone 245957 (TRAV1-2, TRAJ8)
CAVREDTGFQRLVF

SEQ ID NO: 491914 - protein, 15 aa, Homo sapiens
  CDR3 for beta chain variable domain of TCR clone 245957 (TRBV13, TRBJ2-1)
CASSLLSGLNNEQFF

SEQ ID NO: 491915 - protein, 15 aa, Homo sapiens
  CDR3 for alpha chain variable domain of TCR clone 245958 (TRAV21, TRAJ52)
CAVRGGGTSYGKLTF

SEQ ID NO: 491916 - protein, 14 aa, Homo sapiens
  CDR3 for beta chain variable domain of TCR clone 245958 (TRBV18, TRBJ2-5)
CASSPPGHQETQYF

SEQ ID NO: 491917 - protein, 14 aa, Homo sapiens
  CDR3 for alpha chain variable domain of TCR clone 245959 (TRAV26-1, TRAJ39)
CIVRGSRAGNMLTF

SEQ ID NO: 491918 - protein, 12 aa, Homo sapiens
  CDR3 for beta chain variable domain of TCR clone 245959 (TRBV5-7, TRBJ1-1)
CASSLGRGKAFF

SEQ ID NO: 491919 - protein, 15 aa, Homo sapiens
  CDR3 for alpha chain variable domain of TCR clone 245960 (TRAV21, TRAJ53)
CATLNSGGSNYKLTF

SEQ ID NO: 491920 - protein, 16 aa, Homo sapiens
  CDR3 for beta chain variable domain of TCR clone 245960 (TRBV19, TRBJ1-5)
CASSTWTGGGNQPQYF

SEQ ID NO: 491921 - protein, 18 aa, Homo sapiens
  CDR3 for alpha chain variable domain of TCR clone 245961 (TRAV21, TRAJ52)
CAVRPSPAGGTSYGKPTF

SEQ ID NO: 491922 - protein, 15 aa, Homo sapiens
  CDR3 for beta chain variable domain of TCR clone 245961 (TRBV20-1, TRBJ2-7)
CSARKGLAESYEQYF

SEQ ID NO: 491923 - protein, 14 aa, Homo sapiens
  CDR3 for alpha chain variable domain of TCR clone 245962 (TRAV35, TRAJ50)
CAGHRKTSYDKVIF

SEQ ID NO: 491924 - protein, 17 aa, Homo sapiens
  CDR3 for beta chain variable domain of TCR clone 245962 (TRBV7-8, TRBJ2-6)
CASSAGTGGAGANDLTF

SEQ ID NO: 491925 - protein, 14 aa, Homo sapiens
  CDR3 for alpha chain variable domain of TCR clone 245963 (TRAV1-2, TRAJ16)
CAVNRFSDGQKLLF

SEQ ID NO: 491926 - protein, 13 aa, Homo sapiens
  CDR3 for beta chain variable domain of TCR clone 245963 (TRBV7-9, TRBJ1-1)
CASSRRDTRRSFF

SEQ ID NO: 491927 - protein, 14 aa, Homo sapiens
  CDR3 for alpha chain variable domain of TCR clone 245964 (TRAV20, TRAJ56)
CAVQFGVANSKLTF

SEQ ID NO: 491928 - protein, 13 aa, Homo sapiens
  CDR3 for beta chain variable domain of TCR clone 245964 (TRBV19, TRBJ1-2)
CASSVPGQDGYTF

SEQ ID NO: 491929 - protein, 12 aa, Homo sapiens
  CDR3 for alpha chain variable domain of TCR clone 245965 (TRAV8-3, TRAJ20)
CAVGANDYKLSF

SEQ ID NO: 491930 - protein, 15 aa, Homo sapiens
  CDR3 for beta chain variable domain of TCR clone 245965 (TRBV20-1, TRBJ2-2)
CSAIPGHSNTGELFF

SEQ ID NO: 491931 - protein, 16 aa, Homo sapiens
  CDR3 for alpha chain variable domain of TCR clone 245966 (TRAV1-2, TRAJ10)
CAVRGVLTGGGNKPPF

SEQ ID NO: 491932 - protein, 15 aa, Homo sapiens
  CDR3 for beta chain variable domain of TCR clone 245966 (TRBV29-1, TRBJ2-1)
CSVGRHALFYNEQFF

SEQ ID NO: 491933 - protein, 14 aa, Homo sapiens
  CDR3 for alpha chain variable domain of TCR clone 245967 (TRAV1-2, TRAJ16)
CAVNRFSDGQKLLF

SEQ ID NO: 491934 - protein, 15 aa, Homo sapiens
  CDR3 for beta chain variable domain of TCR clone 245967 (TRBV27, TRBJ2-1)
CASSNGEGPPMSSSS

SEQ ID NO: 491935 - protein, 14 aa, Homo sapiens
  CDR3 for alpha chain variable domain of TCR clone 245968 (TRAV21, TRAJ3)
CAVTGYSSASKIIF

SEQ ID NO: 491936 - protein, 15 aa, Homo sapiens
  CDR3 for beta chain variable domain of TCR clone 245968 (TRBV7-3, TRBJ2-3)
CASSLTAGETDTQYF

SEQ ID NO: 491937 - protein, 14 aa, Homo sapiens
  CDR3 for alpha chain variable domain of TCR clone 245969 (TRAV10, TRAJ48)
CVGVFHFGNEKLTF

SEQ ID NO: 491938 - protein, 14 aa, Homo sapiens
  CDR3 for beta chain variable domain of TCR clone 245969 (TRBV19, TRBJ2-1)
CASPTFVLSGEQFF

SEQ ID NO: 491939 - protein, 16 aa, Homo sapiens
  CDR3 for alpha chain variable domain of TCR clone 245970 (TRAV30, TRAJ24)
CGTEIVDADSWGKFRF

SEQ ID NO: 491940 - protein, 16 aa, Homo sapiens
  CDR3 for beta chain variable domain of TCR clone 245970 (TRBV3-1, TRBJ2-5)
CASSQDWASGQETQYF

SEQ ID NO: 491941 - protein, 15 aa, Homo sapiens
  CDR3 for alpha chain variable domain of TCR clone 245971 (TRAV17, TRAJ4)
CATGTWSGGYNKLIF

SEQ ID NO: 491942 - protein, 14 aa, Homo sapiens
  CDR3 for beta chain variable domain of TCR clone 245971 (TRBV7-8, TRBJ2-7)
CASSVGQGAYEQYF

SEQ ID NO: 491943 - protein, 12 aa, Homo sapiens
  CDR3 for alpha chain variable domain of TCR clone 245972 (TRAV12-3, TRAJ17)
CAMTLTGNKLTF

SEQ ID NO: 491944 - protein, 20 aa, Homo sapiens
  CDR3 for beta chain variable domain of TCR clone 245972 (TRBV7-8, TRBJ2-2)
CASSHLFPGPTIHITVELFF

SEQ ID NO: 491945 - protein, 13 aa, Homo sapiens
  CDR3 for alpha chain variable domain of TCR clone 245973 (TRAV21, TRAJ45)
CAVMGGGADGLTF

SEQ ID NO: 491946 - protein, 12 aa, Homo sapiens
  CDR3 for beta chain variable domain of TCR clone 245973 (TRBV28, TRBJ2-6)
CAIQAGANVLTF

SEQ ID NO: 491947 - protein, 13 aa, Homo sapiens
  CDR3 for alpha chain variable domain of TCR clone 245974 (TRAV36/DV7, TRAJ33)
CAVDMDSNYQLIW

SEQ ID NO: 491948 - protein, 16 aa, Homo sapiens
  CDR3 for beta chain variable domain of TCR clone 245974 (TRBV15, TRBJ2-3)
CATRLSGGRATDTQYF

SEQ ID NO: 491949 - protein, 16 aa, Homo sapiens
  CDR3 for alpha chain variable domain of TCR clone 245975 (TRAV12-3, TRAJ53)
CAMSPGGGGSNYKLTF

SEQ ID NO: 491950 - protein, 15 aa, Homo sapiens
  CDR3 for beta chain variable domain of TCR clone 245975 (TRBV27, TRBJ2-1)
CASSNGGGSSNEQFF

SEQ ID NO: 491951 - protein, 11 aa, Homo sapiens
  CDR3 for alpha chain variable domain of TCR clone 245976 (TRAV3, TRAJ21)
CAVGNFNKFYF

SEQ ID NO: 491952 - protein, 18 aa, Homo sapiens
  CDR3 for beta chain variable domain of TCR clone 245976 (TRBV4-1, TRBJ1-4)
CASSPRTGGAWTNEKLFF

SEQ ID NO: 491953 - protein, 15 aa, Homo sapiens
  CDR3 for alpha chain variable domain of TCR clone 245977 (TRAV8-2, TRAJ15)
CVVTMGNQAGTALIF

SEQ ID NO: 491954 - protein, 11 aa, Homo sapiens
  CDR3 for beta chain variable domain of TCR clone 245977 (TRBV29-1, TRBJ2-5)
CSEDRTGTQYF

SEQ ID NO: 491955 - protein, 17 aa, Homo sapiens
  CDR3 for alpha chain variable domain of TCR clone 245978 (TRAV2, TRAJ22)
ILQVREADAAEQRQLTF

SEQ ID NO: 491956 - protein, 16 aa, Homo sapiens
  CDR3 for beta chain variable domain of TCR clone 245978 (TRBV2, TRBJ2-5)
CASSETQGVGEETQDF

SEQ ID NO: 491957 - protein, 21 aa, Homo sapiens
  CDR3 for alpha chain variable domain of TCR clone 245979 (TRAV26-1, TRAJ38)
CIADNAGNNHIQNPDTAVYQL

SEQ ID NO: 491958 - protein, 13 aa, Homo sapiens
  CDR3 for beta chain variable domain of TCR clone 245979 (TRBV20-1, TRBJ1-1)
CSARGGGNTEAFF

SEQ ID NO: 491959 - protein, 14 aa, Homo sapiens
  CDR3 for alpha chain variable domain of TCR clone 245980 (TRAV1-2, TRAJ16)
CAVNRFSDGQKLLF

SEQ ID NO: 491960 - protein, 15 aa, Homo sapiens
  CDR3 for beta chain variable domain of TCR clone 245980 (TRBV10-2, TRBJ2-6)
CASSEQGTGVNVLTF

SEQ ID NO: 491961 - protein, 12 aa, Homo sapiens
  CDR3 for alpha chain variable domain of TCR clone 245981 (TRAV8-3, TRAJ26)
CAGDNYGQNFVF

SEQ ID NO: 491962 - protein, 11 aa, Homo sapiens
  CDR3 for beta chain variable domain of TCR clone 245981 (TRBV29-1, TRBJ2-5)
CSEDRTGTQVF

SEQ ID NO: 491963 - protein, 17 aa, Homo sapiens
  CDR3 for alpha chain variable domain of TCR clone 245982 (TRAV12-2, TRAJ53)
CAPLPDSQEGSNYKLKF

SEQ ID NO: 491964 - protein, 12 aa, Homo sapiens
  CDR3 for beta chain variable domain of TCR clone 245982 (TRBV11-2, TRBJ2-2)
CASSLGGGELFF

SEQ ID NO: 491965 - protein, 14 aa, Homo sapiens
  CDR3 for alpha chain variable domain of TCR clone 245983 (TRAV1-1, TRAJ30)
CAVRSLNRDDKIIF

SEQ ID NO: 491966 - protein, 14 aa, Homo sapiens
  CDR3 for beta chain variable domain of TCR clone 245983 (TRBV7-3, TRBJ2-1)
CASSLAGGTNEQFF

SEQ ID NO: 491967 - protein, 10 aa, Homo sapiens
  CDR3 for alpha chain variable domain of TCR clone 245984 (TRAV23/DV6, TRAJ57)
CAASSTLSQG

SEQ ID NO: 491968 - protein, 15 aa, Homo sapiens
  CDR3 for beta chain variable domain of TCR clone 245984 (TRBV20-1, TRBJ1-1)
CSASRGVTGNTEAFF

SEQ ID NO: 491969 - protein, 12 aa, Homo sapiens
  CDR3 for alpha chain variable domain of TCR clone 245985 (TRAV26-1, TRAJ26)
CIVFIYGQNFVF

SEQ ID NO: 491970 - protein, 17 aa, Homo sapiens
  CDR3 for beta chain variable domain of TCR clone 245985 (TRBV20-1, TRBJ2-1)
CSASSSGLAGSYNEQFF

SEQ ID NO: 491971 - protein, 12 aa, Homo sapiens
  CDR3 for alpha chain variable domain of TCR clone 245986 (TRAV12-2, TRAJ4)
GWPEGGYNKLFF

SEQ ID NO: 491972 - protein, 16 aa, Homo sapiens
  CDR3 for beta chain variable domain of TCR clone 245986 (TRBV6-1, TRBJ2-5)
CASSETLDRGAETQYF

SEQ ID NO: 491973 - protein, 16 aa, Homo sapiens
  CDR3 for alpha chain variable domain of TCR clone 245987 (TRAV17, TRAJ28)
CASYAYSGAGSYQLTF

SEQ ID NO: 491974 - protein, 15 aa, Homo sapiens
  CDR3 for beta chain variable domain of TCR clone 245987 (TRBV4-2, TRBJ2-1)
CASSPSGGLYNVQFF

SEQ ID NO: 491975 - protein, 14 aa, Homo sapiens
  CDR3 for alpha chain variable domain of TCR clone 245988 (TRAV20, TRAJ9)
CAVQASTGGFKTIF

SEQ ID NO: 491976 - protein, 14 aa, Homo sapiens
  CDR3 for beta chain variable domain of TCR clone 245988 (TRBV12-5, TRBJ1-6)
CASRVGQSNSPLHF

SEQ ID NO: 491977 - protein, 11 aa, Homo sapiens
  CDR3 for alpha chain variable domain of TCR clone 245989 (TRAV30, TRAJ23)
CGTENAGKLIF

SEQ ID NO: 491978 - protein, 16 aa, Homo sapiens
  CDR3 for beta chain variable domain of TCR clone 245989 (TRBV7-2, TRBJ2-7)
CASTSQAASGGYEQYF

SEQ ID NO: 491979 - protein, 12 aa, Homo sapiens
  CDR3 for alpha chain variable domain of TCR clone 245990 (TRAV1-1, TRAJ23)
CAVTNQGGKIIF

SEQ ID NO: 491980 - protein, 13 aa, Homo sapiens
  CDR3 for beta chain variable domain of TCR clone 245990 (TRBV11-3, TRBJ1-1)
CASTGSLNTEAFF

SEQ ID NO: 491981 - protein, 14 aa, Homo sapiens
  CDR3 for alpha chain variable domain of TCR clone 245991 (TRAV20, TRAJ10)
CAVRVEGGGNKLTF

SEQ ID NO: 491982 - protein, 18 aa, Homo sapiens
  CDR3 for beta chain variable domain of TCR clone 245991 (TRBV24-1, TRBJ2-1)
SATSDLMFLGRGVHEQFF

SEQ ID NO: 491983 - protein, 12 aa, Homo sapiens
  CDR3 for alpha chain variable domain of TCR clone 245992 (TRAV23/DV6, TRAJ3)
CAARAPQQCFQY

SEQ ID NO: 491984 - protein, 17 aa, Homo sapiens
  CDR3 for beta chain variable domain of TCR clone 245992 (TRBV7-9, TRBJ2-3)
CASSPTVAGDLTDTQYF

SEQ ID NO: 491985 - protein, 16 aa, Homo sapiens
  CDR3 for alpha chain variable domain of TCR clone 245993 (TRAV3, TRAJ3)
CAVRDRAKSSASKIIF

SEQ ID NO: 491986 - protein, 16 aa, Homo sapiens
  CDR3 for beta chain variable domain of TCR clone 245993 (TRBV20-1, TRBJ2-4)
CIATSLAELAKNIQYF

SEQ ID NO: 491987 - protein, 15 aa, Homo sapiens
  CDR3 for alpha chain variable domain of TCR clone 245994 (TRAV34, TRAJ38)
CGADFTPGNNRKLIW

SEQ ID NO: 491988 - protein, 13 aa, Homo sapiens
  CDR3 for beta chain variable domain of TCR clone 245994 (TRBV25-1, TRBJ1-1)
CQHPPGGNTEAFF

SEQ ID NO: 491989 - protein, 14 aa, Homo sapiens
  CDR3 for alpha chain variable domain of TCR clone 245995 (TRAV8-3, TRAJ13)
CAVGARGGYQKVTC

SEQ ID NO: 491990 - protein, 16 aa, Homo sapiens
  CDR3 for beta chain variable domain of TCR clone 245995 (TRBV27, TRBJ2-7)
CASSLGSGTGPYEQYF

SEQ ID NO: 491991 - protein, 15 aa, Homo sapiens
  CDR3 for alpha chain variable domain of TCR clone 245996 (TRAV1-1, TRAJ4)
CAVRAFSGGYNKLIF

SEQ ID NO: 491992 - protein, 16 aa, Homo sapiens
  CDR3 for beta chain variable domain of TCR clone 245996 (TRBV7-2, TRBJ2-6)
CAILSGVSSGANVLTV

SEQ ID NO: 491993 - protein, 15 aa, Homo sapiens
  CDR3 for alpha chain variable domain of TCR clone 245997 (TRAV8-3, TRAJ40)
CAAPSLGSGTYRSIF

SEQ ID NO: 491994 - protein, 16 aa, Homo sapiens
  CDR3 for beta chain variable domain of TCR clone 245997 (TRBV7-3, TRBJ2-3)
CASSLSGYRPEDTQYF

SEQ ID NO: 491995 - protein, 13 aa, Homo sapiens
  CDR3 for alpha chain variable domain of TCR clone 245998 (TRAV27, TRAJ49)
CAPRPYTGTQFCF

SEQ ID NO: 491996 - protein, 16 aa, Homo sapiens
  CDR3 for beta chain variable domain of TCR clone 245998 (TRBV4-1, TRBJ1-2)
CASSQDAGQVLYGYTF

SEQ ID NO: 491997 - protein, 12 aa, Homo sapiens
  CDR3 for alpha chain variable domain of TCR clone 245999 (TRAV21, TRAJ33)
CAVQDSDYQLIW

SEQ ID NO: 491998 - protein, 14 aa, Homo sapiens
  CDR3 for beta chain variable domain of TCR clone 245999 (TRBV28, TRBJ2-1)
CASSPGERGNEQFF

SEQ ID NO: 491999 - protein, 14 aa, Homo sapiens
  CDR3 for alpha chain variable domain of TCR clone 246000 (TRAV1-2, TRAJ8)
CAVREDTGFQKLVF

SEQ ID NO: 492000 - protein, 15 aa, Homo sapiens
  CDR3 for beta chain variable domain of TCR clone 246000 (TRBV20-1, TRBJ2-7)
CSARDRVSGVDEQYF

SEQ ID NO: 492001 - protein, 14 aa, Homo sapiens
  CDR3 for alpha chain variable domain of TCR clone 246001 (TRAV9-2, TRAJ39)
CALYISNAGNMLTF

SEQ ID NO: 492002 - protein, 14 aa, Homo sapiens
  CDR3 for beta chain variable domain of TCR clone 246001 (TRBV10-2, TRBJ2-1)
CASSEGTSEDEQFF

SEQ ID NO: 492003 - protein, 13 aa, Homo sapiens
  CDR3 for alpha chain variable domain of TCR clone 246002 (TRAV8-3, TRAJ28)
CAVGAVGSYQLTF

SEQ ID NO: 492004 - protein, 11 aa, Homo sapiens
  CDR3 for beta chain variable domain of TCR clone 246002 (TRBV23-1, TRBJ2-7)
SSSGTGLEQYF

SEQ ID NO: 492005 - protein, 15 aa, Homo sapiens
  CDR3 for alpha chain variable domain of TCR clone 246003 (TRAV8-3, TRAJ45)
CASSYSGGGADGPTF

SEQ ID NO: 492006 - protein, 13 aa, Homo sapiens
  CDR3 for beta chain variable domain of TCR clone 246003 (TRBV10-3, TRBJ2-7)
CASKLAVNYEQYV

SEQ ID NO: 492007 - protein, 13 aa, Homo sapiens
  CDR3 for alpha chain variable domain of TCR clone 246004 (TRAV17, TRAJ26)
CATVDNYGQNFVF

SEQ ID NO: 492008 - protein, 14 aa, Homo sapiens
  CDR3 for beta chain variable domain of TCR clone 246004 (TRBV7-2, TRBJ1-1)
CASSFLAGTTEAFF

SEQ ID NO: 492009 - protein, 12 aa, Homo sapiens
  CDR3 for alpha chain variable domain of TCR clone 246005 (TRAV1-2, TRAJ29)
CAVPSGNTPLVF

SEQ ID NO: 492010 - protein, 13 aa, Homo sapiens
  CDR3 for beta chain variable domain of TCR clone 246005 (TRBV11-2, TRBJ1-3)
CASSLEPVNAIYF

SEQ ID NO: 492011 - protein, 13 aa, Homo sapiens
  CDR3 for alpha chain variable domain of TCR clone 246006 (TRAV35, TRAJ22)
CAGLSGSARQPTF

SEQ ID NO: 492012 - protein, 16 aa, Homo sapiens
  CDR3 for beta chain variable domain of TCR clone 246006 (TRBV7-9, TRBJ2-1)
CASSLVLTGQGNEQFF

SEQ ID NO: 492013 - protein, 15 aa, Homo sapiens
  CDR3 for alpha chain variable domain of TCR clone 246007 (TRAV13-1, TRAJ5)
CALSPIDTGRRALTF

SEQ ID NO: 492014 - protein, 18 aa, Homo sapiens
  CDR3 for beta chain variable domain of TCR clone 246007 (TRBV4-1, TRBJ2-2)
CASSFRTSGGEGPGELFF

SEQ ID NO: 492015 - protein, 13 aa, Homo sapiens
  CDR3 for alpha chain variable domain of TCR clone 246008 (TRAV13-1, TRAJ39)
CAASIWAGNMLTF

SEQ ID NO: 492016 - protein, 17 aa, Homo sapiens
  CDR3 for beta chain variable domain of TCR clone 246008 (TRBV11-2, TRBJ2-1)
CASSLYPPGVEYNEQFF

SEQ ID NO: 492017 - protein, 13 aa, Homo sapiens
  CDR3 for alpha chain variable domain of TCR clone 246009 (TRAV4, TRAJ23)
CLVGGNQGGKLIF

SEQ ID NO: 492018 - protein, 17 aa, Homo sapiens
  CDR3 for beta chain variable domain of TCR clone 246009 (TRBV25-1, TRBJ2-7)
CQPQQPPRTGVTYEQYF

SEQ ID NO: 492019 - protein, 11 aa, Homo sapiens
  CDR3 for alpha chain variable domain of TCR clone 246010 (TRAV3, TRAJ21)
CAMGNFNKFYF

SEQ ID NO: 492020 - protein, 16 aa, Homo sapiens
  CDR3 for beta chain variable domain of TCR clone 246010 (TRBV19, TRBJ2-1)
CASSKAAPSSYNEQFF

SEQ ID NO: 492021 - protein, 17 aa, Homo sapiens
  CDR3 for alpha chain variable domain of TCR clone 246011 (TRAV20, TRAJ42)
CAVQSWGYGGSQGNLIF

SEQ ID NO: 492022 - protein, 16 aa, Homo sapiens
  CDR3 for beta chain variable domain of TCR clone 246011 (TRBV29-1, TRBJ2-5)
CSVEGLAGDYQETQYF

SEQ ID NO: 492023 - protein, 13 aa, Homo sapiens
  CDR3 for alpha chain variable domain of TCR clone 246012 (TRAV8-3, TRAJ43)
CAVVPYNNNDMCF

SEQ ID NO: 492024 - protein, 17 aa, Homo sapiens
  CDR3 for beta chain variable domain of TCR clone 246012 (TRBV7-7, TRBJ1-1)
CASIGDRPNLGVTEAFF

SEQ ID NO: 492025 - protein, 13 aa, Homo sapiens
  CDR3 for alpha chain variable domain of TCR clone 246013 (TRAV26-2, TRAJ43)
CILRAVNNNDMRF

SEQ ID NO: 492026 - protein, 17 aa, Homo sapiens
  CDR3 for beta chain variable domain of TCR clone 246013 (TRBV28, TRBJ2-5)
CASSRQGGLAGAETQYF

SEQ ID NO: 492027 - protein, 13 aa, Homo sapiens
  CDR3 for alpha chain variable domain of TCR clone 246014 (TRAV22, TRAJ44)
CALNPGTASKLTF

SEQ ID NO: 492028 - protein, 15 aa, Homo sapiens
  CDR3 for beta chain variable domain of TCR clone 246014 (TRBV2, TRBJ2-1)
CATQARLVMIGEQFF

SEQ ID NO: 492029 - protein, 13 aa, Homo sapiens
  CDR3 for alpha chain variable domain of TCR clone 246015 (TRAV17, TRAJ20)
CAPLGVDDSKLSF

SEQ ID NO: 492030 - protein, 12 aa, Homo sapiens
  CDR3 for beta chain variable domain of TCR clone 246015 (TRBV29-1, TRBJ2-3)
CSVTGGADTQYF

SEQ ID NO: 492031 - protein, 15 aa, Homo sapiens
  CDR3 for alpha chain variable domain of TCR clone 246016 (TRAV27, TRAJ28)
CAGAYSGAGSYQLTF

SEQ ID NO: 492032 - protein, 15 aa, Homo sapiens
  CDR3 for beta chain variable domain of TCR clone 246016 (TRBV11-2, TRBJ2-1)
CASSKNRGLIYEQFF

SEQ ID NO: 492033 - protein, 14 aa, Homo sapiens
  CDR3 for alpha chain variable domain of TCR clone 246017 (TRAV8-2, TRAJ4)
CVVSPSGGYNKLIF

SEQ ID NO: 492034 - protein, 16 aa, Homo sapiens
  CDR3 for beta chain variable domain of TCR clone 246017 (TRBV7-8, TRBJ2-4)
CASSAERTLAKNIQYF

SEQ ID NO: 492035 - protein, 15 aa, Homo sapiens
  CDR3 for alpha chain variable domain of TCR clone 246018 (TRAV3, TRAJ3)
CAVRDGHSSASKIII

SEQ ID NO: 492036 - protein, 17 aa, Homo sapiens
  CDR3 for beta chain variable domain of TCR clone 246018 (TRBV25-1, TRBJ2-7)
CASSDARVVFSSYEQYF

SEQ ID NO: 492037 - protein, 12 aa, Homo sapiens
  CDR3 for alpha chain variable domain of TCR clone 246019 (TRAV13-2, TRAJ23)
CAERHRGGKLIF

SEQ ID NO: 492038 - protein, 15 aa, Homo sapiens
  CDR3 for beta chain variable domain of TCR clone 246019 (TRBV6-3, TRBJ2-7)
CASSSPGTVFYEQYV

SEQ ID NO: 492039 - protein, 14 aa, Homo sapiens
  CDR3 for alpha chain variable domain of TCR clone 246020 (TRAV23/DV6, TRAJ8)
CAASKNTGFQKLVF

SEQ ID NO: 492040 - protein, 16 aa, Homo sapiens
  CDR3 for beta chain variable domain of TCR clone 246020 (TRBV4-1, TRBJ2-6)
CASSQVGHPGANVLTF

SEQ ID NO: 492041 - protein, 18 aa, Homo sapiens
  CDR3 for alpha chain variable domain of TCR clone 246021 (TRAV26-1, TRAJ37)
CIVRVDMHGSSNTGKRIF

SEQ ID NO: 492042 - protein, 15 aa, Homo sapiens
  CDR3 for beta chain variable domain of TCR clone 246021 (TRBV20-1, TRBJ2-7)
CSARVLASPLYEQYC

SEQ ID NO: 492043 - protein, 10 aa, Homo sapiens
  CDR3 for alpha chain variable domain of TCR clone 246022 (TRAV26-1, TRAJ22)
CIVSFNFFWF

SEQ ID NO: 492044 - protein, 15 aa, Homo sapiens
  CDR3 for beta chain variable domain of TCR clone 246022 (TRBV4-2, TRBJ1-2)
CASSQRTGGRDGYTF

SEQ ID NO: 492045 - protein, 13 aa, Homo sapiens
  CDR3 for alpha chain variable domain of TCR clone 246023 (TRAV3, TRAJ30)
CAVRDRGDDKIIF

SEQ ID NO: 492046 - protein, 14 aa, Homo sapiens
  CDR3 for beta chain variable domain of TCR clone 246023 (TRBV25-1, TRBJ1-1)
CASTHLGGNTEAFF

SEQ ID NO: 492047 - protein, 13 aa, Homo sapiens
  CDR3 for alpha chain variable domain of TCR clone 246024 (TRAV26-1, TRAJ41)
CIVRINSGYAFNF

SEQ ID NO: 492048 - protein, 13 aa, Homo sapiens
  CDR3 for beta chain variable domain of TCR clone 246024 (TRBV20-1, TRBJ1-5)
CSATAAGGQPQHF

SEQ ID NO: 492049 - protein, 14 aa, Homo sapiens
  CDR3 for alpha chain variable domain of TCR clone 246025 (TRAV38-1, TRAJ40)
CALRPTSGTYKYIF

SEQ ID NO: 492050 - protein, 17 aa, Homo sapiens
  CDR3 for beta chain variable domain of TCR clone 246025 (TRBV18, TRBJ1-5)
CASSPTMGQGTNQPQHF

SEQ ID NO: 492051 - protein, 10 aa, Homo sapiens
  CDR3 for alpha chain variable domain of TCR clone 246026 (TRAV23/DV6, TRAJ57)
CAASPTLSQG

SEQ ID NO: 492052 - protein, 14 aa, Homo sapiens
  CDR3 for beta chain variable domain of TCR clone 246026 (TRBV7-8, TRBJ2-1)
CASSSQGAYNEQFF

SEQ ID NO: 492053 - protein, 11 aa, Homo sapiens
  CDR3 for alpha chain variable domain of TCR clone 246027 (TRAV21, TRAJ34)
CAVTNTDKPIF

SEQ ID NO: 492054 - protein, 12 aa, Homo sapiens
  CDR3 for beta chain variable domain of TCR clone 246027 (TRBV7-9, TRBJ1-1)
CVSSLVRGEAFF

SEQ ID NO: 492055 - protein, 14 aa, Homo sapiens
  CDR3 for alpha chain variable domain of TCR clone 246028 (TRAV13-1, TRAJ44)
CAAKATGTASKLTF

SEQ ID NO: 492056 - protein, 22 aa, Homo sapiens
  CDR3 for beta chain variable domain of TCR clone 246028 (TRBV19, TRBJ2-1)
CASSVRDRVTGTSGRIYNDQFF

SEQ ID NO: 492057 - protein, 11 aa, Homo sapiens
  CDR3 for alpha chain variable domain of TCR clone 246029 (TRAV2, TRAJ33)
CAVESNYQLIW

SEQ ID NO: 492058 - protein, 15 aa, Homo sapiens
  CDR3 for beta chain variable domain of TCR clone 246029 (TRBV19, TRBJ1-1)
CAGTSGQIQNTEALF

SEQ ID NO: 492059 - protein, 15 aa, Homo sapiens
  CDR3 for alpha chain variable domain of TCR clone 246030 (TRAV12-2, TRAJ22)
CAVNGASGSERQLTF

SEQ ID NO: 492060 - protein, 15 aa, Homo sapiens
  CDR3 for beta chain variable domain of TCR clone 246030 (TRBV18, TRBJ2-2)
CASSPPVGFTGELFF

SEQ ID NO: 492061 - protein, 13 aa, Homo sapiens
  CDR3 for alpha chain variable domain of TCR clone 246031 (TRAV12-2, TRAJ12)
CAVNEDSSYKLIF

SEQ ID NO: 492062 - protein, 14 aa, Homo sapiens
  CDR3 for beta chain variable domain of TCR clone 246031 (TRBV19, TRBJ2-1)
CASPTFVLSGEQFF

SEQ ID NO: 492063 - protein, 15 aa, Homo sapiens
  CDR3 for alpha chain variable domain of TCR clone 246032 (TRAV35, TRAJ40)
CAGQLGTSRTYKYIF

SEQ ID NO: 492064 - protein, 14 aa, Homo sapiens
  CDR3 for beta chain variable domain of TCR clone 246032 (TRBV7-3, TRBJ2-1)
CASSLAGGTNEKFF

SEQ ID NO: 492065 - protein, 12 aa, Homo sapiens
  CDR3 for alpha chain variable domain of TCR clone 246033 (TRAV10, TRAJ43)
CVVIRVGNDMRF

SEQ ID NO: 492066 - protein, 15 aa, Homo sapiens
  CDR3 for beta chain variable domain of TCR clone 246033 (TRBV2, TRBJ2-7)
CASSEGLARSYEQYF

SEQ ID NO: 492067 - protein, 15 aa, Homo sapiens
  CDR3 for alpha chain variable domain of TCR clone 246034 (TRAV25, TRAJ53)
CPTSNSGGSNYKLTF

SEQ ID NO: 492068 - protein, 14 aa, Homo sapiens
  CDR3 for beta chain variable domain of TCR clone 246034 (TRBV11-2, TRBJ2-3)
CASSKLARTDTQYF

SEQ ID NO: 492069 - protein, 12 aa, Homo sapiens
  CDR3 for alpha chain variable domain of TCR clone 246035 (TRAV12-3, TRAJ17)
CAMTLTGNKLTF

SEQ ID NO: 492070 - protein, 11 aa, Homo sapiens
  CDR3 for beta chain variable domain of TCR clone 246035 (TRBV7-8, TRBJ2-7)
CASSLSHEQYF

SEQ ID NO: 492071 - protein, 12 aa, Homo sapiens
  CDR3 for alpha chain variable domain of TCR clone 246036 (TRAV12-3, TRAJ17)
CAMSLTGNKLTF

SEQ ID NO: 492072 - protein, 13 aa, Homo sapiens
  CDR3 for beta chain variable domain of TCR clone 246036 (TRBV10-3, TRBJ2-7)
CASKLAVNYEQYF

SEQ ID NO: 492073 - protein, 13 aa, Homo sapiens
  CDR3 for alpha chain variable domain of TCR clone 246037 (TRAV21, TRAJ36)
CAVIKTGANNLFF

SEQ ID NO: 492074 - protein, 13 aa, Homo sapiens
  CDR3 for beta chain variable domain of TCR clone 246037 (TRBV29-1, TRBJ2-3)
CSARRGGRDTQYF

SEQ ID NO: 492075 - protein, 13 aa, Homo sapiens
  CDR3 for alpha chain variable domain of TCR clone 246038 (TRAV9-2, TRAJ39)
CALQNNAGNMLTF

SEQ ID NO: 492076 - protein, 14 aa, Homo sapiens
  CDR3 for beta chain variable domain of TCR clone 246038 (TRBV11-2, TRBJ2-3)
CASSRLARTDTQYF

SEQ ID NO: 492077 - protein, 17 aa, Homo sapiens
  CDR3 for alpha chain variable domain of TCR clone 246039 (TRAV3, TRAJ37)
CAVRDMRTPGNTGKLIF

SEQ ID NO: 492078 - protein, 14 aa, Homo sapiens
  CDR3 for beta chain variable domain of TCR clone 246039 (TRBV7-2, TRBJ1-5)
CASSPRGGPQPQHF

SEQ ID NO: 492079 - protein, 13 aa, Homo sapiens
  CDR3 for alpha chain variable domain of TCR clone 246040 (TRAV2, TRAJ40)
CAVVTSGTYKYIF

SEQ ID NO: 492080 - protein, 12 aa, Homo sapiens
  CDR3 for beta chain variable domain of TCR clone 246040 (TRBV3-1, TRBJ2-3)
CASSQNRDTQYF

SEQ ID NO: 492081 - protein, 13 aa, Homo sapiens
  CDR3 for alpha chain variable domain of TCR clone 246041 (TRAV13-1, TRAJ4)
CAASIGGYNKLIF

SEQ ID NO: 492082 - protein, 16 aa, Homo sapiens
  CDR3 for beta chain variable domain of TCR clone 246041 (TRBV20-1, TRBJ2-1)
CSAPGLAGSYSDEQFC

SEQ ID NO: 492083 - protein, 13 aa, Homo sapiens
  CDR3 for alpha chain variable domain of TCR clone 246042 (TRAV12-3, TRAJ44)
CARTTGTASKLTF

SEQ ID NO: 492084 - protein, 15 aa, Homo sapiens
  CDR3 for beta chain variable domain of TCR clone 246042 (TRBV29-1, TRBJ1-2)
CSGLDVRGSNYGYTF

SEQ ID NO: 492085 - protein, 15 aa, Homo sapiens
  CDR3 for alpha chain variable domain of TCR clone 246043 (TRAV4, TRAJ42)
CLVGGYGGSQGNIIF

SEQ ID NO: 492086 - protein, 16 aa, Homo sapiens
  CDR3 for beta chain variable domain of TCR clone 246043 (TRBV27, TRBJ1-1)
CASSTRTGGVGTEAFF

SEQ ID NO: 492087 - protein, 15 aa, Homo sapiens
  CDR3 for alpha chain variable domain of TCR clone 246044 (TRAV8-3, TRAJ40)
CAAPSLGSGTYKYIF

SEQ ID NO: 492088 - protein, 12 aa, Homo sapiens
  CDR3 for beta chain variable domain of TCR clone 246044 (TRBV5-1, TRBJ1-2)
CASSQDTYGYTF

SEQ ID NO: 492089 - protein, 11 aa, Homo sapiens
  CDR3 for alpha chain variable domain of TCR clone 246045 (TRAV21, TRAJ34)
CAVTNTDKLIF

SEQ ID NO: 492090 - protein, 15 aa, Homo sapiens
  CDR3 for beta chain variable domain of TCR clone 246045 (TRBV3-1, TRBJ2-2)
CASSQDWTRAGELFF

SEQ ID NO: 492091 - protein, 18 aa, Homo sapiens
  CDR3 for alpha chain variable domain of TCR clone 246046 (TRAV12-3, TRAJ52)
CAMSVGGAGGTSYGKLTC

SEQ ID NO: 492092 - protein, 14 aa, Homo sapiens
  CDR3 for beta chain variable domain of TCR clone 246046 (TRBV7-2, TRBJ2-7)
CASRSQGAAYEQYF

SEQ ID NO: 492093 - protein, 15 aa, Homo sapiens
  CDR3 for alpha chain variable domain of TCR clone 246047 (TRAV17, TRAJ45)
CATAYSGGGADGLTF

SEQ ID NO: 492094 - protein, 18 aa, Homo sapiens
  CDR3 for beta chain variable domain of TCR clone 246047 (TRBV12-4, TRBJ2-2)
CASSFKSAGGPVTGELFF

SEQ ID NO: 492095 - protein, 14 aa, Homo sapiens
  CDR3 for alpha chain variable domain of TCR clone 246048 (TRAV10, TRAJ34)
CVVSRGGDTDKRIF

SEQ ID NO: 492096 - protein, 17 aa, Homo sapiens
  CDR3 for beta chain variable domain of TCR clone 246048 (TRBV6-3, TRBJ2-3)
CASRRPLGGGSTDTQYF

SEQ ID NO: 492097 - protein, 11 aa, Homo sapiens
  CDR3 for alpha chain variable domain of TCR clone 246049 (TRAV1-1, TRAJ23)
CAVRQGGKLIF

SEQ ID NO: 492098 - protein, 14 aa, Homo sapiens
  CDR3 for beta chain variable domain of TCR clone 246049 (TRBV4-1, TRBJ2-5)
CASSQYRDQETQYF

SEQ ID NO: 492099 - protein, 11 aa, Homo sapiens
  CDR3 for alpha chain variable domain of TCR clone 246050 (TRAV21, TRAJ11)
CAVNGYSTLTF

SEQ ID NO: 492100 - protein, 13 aa, Homo sapiens
  CDR3 for beta chain variable domain of TCR clone 246050 (TRBV19, TRBJ1-1)
CASSIGSDAFLDK

SEQ ID NO: 492101 - protein, 14 aa, Homo sapiens
  CDR3 for alpha chain variable domain of TCR clone 246051 (TRAV1-2, TRAJ16)
CAVNRFSDGQNLLF

SEQ ID NO: 492102 - protein, 14 aa, Homo sapiens
  CDR3 for beta chain variable domain of TCR clone 246051 (TRBV25-1, TRBJ1-1)
CASTHLGGNTEAFF

SEQ ID NO: 492103 - protein, 14 aa, Homo sapiens
  CDR3 for alpha chain variable domain of TCR clone 246052 (TRAV12-1, TRAJ17)
CVVNYKAAGNKLTL

SEQ ID NO: 492104 - protein, 14 aa, Homo sapiens
  CDR3 for beta chain variable domain of TCR clone 246052 (TRBV28, TRBJ2-1)
CASSPSTGYNEQFF

SEQ ID NO: 492105 - protein, 18 aa, Homo sapiens
  CDR3 for alpha chain variable domain of TCR clone 246053 (TRAV1-2, TRAJ10)
CAVRALTPVTGGGNKLTF

SEQ ID NO: 492106 - protein, 14 aa, Homo sapiens
  CDR3 for beta chain variable domain of TCR clone 246053 (TRBV4-1, TRBJ1-1)
CASSHQGNGNEAFF

SEQ ID NO: 492107 - protein, 15 aa, Homo sapiens
  CDR3 for alpha chain variable domain of TCR clone 246054 (TRAV38-1, TRAJ57)
CAFMDSQCGSEKLVF

SEQ ID NO: 492108 - protein, 16 aa, Homo sapiens
  CDR3 for beta chain variable domain of TCR clone 246054 (TRBV10-3, TRBJ2-1)
CAIPGGGRGDYNEQFF

SEQ ID NO: 492109 - protein, 12 aa, Homo sapiens
  CDR3 for alpha chain variable domain of TCR clone 246055 (TRAV21, TRAJ33)
CAKMDSNYQLIW

SEQ ID NO: 492110 - protein, 14 aa, Homo sapiens
  CDR3 for beta chain variable domain of TCR clone 246055 (TRBV25-1, TRBJ1-1)
CASTHLGGSTEAFF

SEQ ID NO: 492111 - protein, 12 aa, Homo sapiens
  CDR3 for alpha chain variable domain of TCR clone 246056 (TRAV1-2, TRAJ8)
CAVRTGFQKLVF

SEQ ID NO: 492112 - protein, 14 aa, Homo sapiens
  CDR3 for beta chain variable domain of TCR clone 246056 (TRBV7-3, TRBJ1-1)
CASSLKGGNTEAFF

SEQ ID NO: 492113 - protein, 14 aa, Homo sapiens
  CDR3 for alpha chain variable domain of TCR clone 246057 (TRAV23/DV6, TRAJ37)
CVASTSSNTGKLIF

SEQ ID NO: 492114 - protein, 15 aa, Homo sapiens
  CDR3 for beta chain variable domain of TCR clone 246057 (TRBV7-9, TRBJ2-7)
CASSPGGGLTYEQYF

SEQ ID NO: 492115 - protein, 11 aa, Homo sapiens
  CDR3 for alpha chain variable domain of TCR clone 246058 (TRAV23/DV6, TRAJ58)
CAARLLRGETS

SEQ ID NO: 492116 - protein, 15 aa, Homo sapiens
  CDR3 for beta chain variable domain of TCR clone 246058 (TRBV7-9, TRBJ1-4)
CASSATGGNNEKLFF

SEQ ID NO: 492117 - protein, 13 aa, Homo sapiens
  CDR3 for alpha chain variable domain of TCR clone 246059 (TRAV12-1, TRAJ31)
CVVIPNNNARLMF

SEQ ID NO: 492118 - protein, 15 aa, Homo sapiens
  CDR3 for beta chain variable domain of TCR clone 246059 (TRBV19, TRBJ1-2)
CASNLGGETPYCYTF

SEQ ID NO: 492119 - protein, 14 aa, Homo sapiens
  CDR3 for alpha chain variable domain of TCR clone 246060 (TRAV12-1, TRAJ17)
CVVNYKAAGNKLTF

SEQ ID NO: 492120 - protein, 17 aa, Homo sapiens
  CDR3 for beta chain variable domain of TCR clone 246060 (TRBV18, TRBJ2-2)
CASSPSDPWQNTGELFF

SEQ ID NO: 492121 - protein, 13 aa, Homo sapiens
  CDR3 for alpha chain variable domain of TCR clone 246061 (TRAV21, TRAJ15)
CAVANQAGTALIF

SEQ ID NO: 492122 - protein, 15 aa, Homo sapiens
  CDR3 for beta chain variable domain of TCR clone 246061 (TRBV27, TRBJ2-7)
RASSLGSSVSPEQYF

SEQ ID NO: 492123 - protein, 13 aa, Homo sapiens
  CDR3 for alpha chain variable domain of TCR clone 246062 (TRAV20, TRAJ40)
CAVRTSGTYKYIF

SEQ ID NO: 492124 - protein, 16 aa, Homo sapiens
  CDR3 for beta chain variable domain of TCR clone 246062 (TRBV20-1, TRBJ2-3)
CSAVRDRGPIADTQYF

SEQ ID NO: 492125 - protein, 13 aa, Homo sapiens
  CDR3 for alpha chain variable domain of TCR clone 246063 (TRAV12-3, TRAJ33)
CAMSLNSNYQLIW

SEQ ID NO: 492126 - protein, 15 aa, Homo sapiens
  CDR3 for beta chain variable domain of TCR clone 246063 (TRBV20-1, TRBJ2-7)
CSAEYGTSGAYEQYF

SEQ ID NO: 492127 - protein, 14 aa, Homo sapiens
  CDR3 for alpha chain variable domain of TCR clone 246064 (TRAV38-1, TRAJ29)
CAFITPSGKTPLVF

SEQ ID NO: 492128 - protein, 15 aa, Homo sapiens
  CDR3 for beta chain variable domain of TCR clone 246064 (TRBV5-1, TRBJ2-1)
CASSPPRAPYNEQFF

SEQ ID NO: 492129 - protein, 15 aa, Homo sapiens
  CDR3 for alpha chain variable domain of TCR clone 246065 (TRAV2, TRAJ15)
CAVEDREQAGTALIF

SEQ ID NO: 492130 - protein, 17 aa, Homo sapiens
  CDR3 for beta chain variable domain of TCR clone 246065 (TRBV7-3, TRBJ2-3)
RASSLMKRMRGADTQYF

SEQ ID NO: 492131 - protein, 14 aa, Homo sapiens
  CDR3 for alpha chain variable domain of TCR clone 246066 (TRAV35, TRAJ44)
CAGRPSRTASKLTF

SEQ ID NO: 492132 - protein, 14 aa, Homo sapiens
  CDR3 for beta chain variable domain of TCR clone 246066 (TRBV7-2, TRBJ1-3)
CASSRGGAGNTIYF

SEQ ID NO: 492133 - protein, 13 aa, Homo sapiens
  CDR3 for alpha chain variable domain of TCR clone 246067 (TRAV8-1, TRAJ28)
CAVSGAGSYQCTF

SEQ ID NO: 492134 - protein, 14 aa, Homo sapiens
  CDR3 for beta chain variable domain of TCR clone 246067 (TRBV7-2, TRBJ2-2)
CASRGQGAAGELFF

SEQ ID NO: 492135 - protein, 14 aa, Homo sapiens
  CDR3 for alpha chain variable domain of TCR clone 246068 (TRAV12-1, TRAJ5)
CVVNERTGRRALTF

SEQ ID NO: 492136 - protein, 16 aa, Homo sapiens
  CDR3 for beta chain variable domain of TCR clone 246068 (TRBV4-2, TRBJ2-3)
CASSQELAGDTDTQYF

SEQ ID NO: 492137 - protein, 14 aa, Homo sapiens
  CDR3 for alpha chain variable domain of TCR clone 246069 (TRAV25, TRAJ35)
CARRMEGFGNVLHC

SEQ ID NO: 492138 - protein, 15 aa, Homo sapiens
  CDR3 for beta chain variable domain of TCR clone 246069 (TRBV9, TRBJ2-1)
CASSLAGSSYNDQFF

SEQ ID NO: 492139 - protein, 15 aa, Homo sapiens
  CDR3 for alpha chain variable domain of TCR clone 246070 (TRAV17, TRAJ35)
CATAFVIGFGNVLHV

SEQ ID NO: 492140 - protein, 15 aa, Homo sapiens
  CDR3 for beta chain variable domain of TCR clone 246070 (TRBV7-9, TRBJ2-7)
CASSLALAEAYEQYF

SEQ ID NO: 492141 - protein, 14 aa, Homo sapiens
  CDR3 for alpha chain variable domain of TCR clone 246071 (TRAV1-2, TRAJ16)
CAVNRFSGGQKPLF

SEQ ID NO: 492142 - protein, 13 aa, Homo sapiens
  CDR3 for beta chain variable domain of TCR clone 246071 (TRBV20-1, TRBJ1-1)
CSAPLGGGTEAFF

SEQ ID NO: 492143 - protein, 15 aa, Homo sapiens
  CDR3 for alpha chain variable domain of TCR clone 246072 (TRAV26-1, TRAJ22)
CIVRVSFWFCKATDL

SEQ ID NO: 492144 - protein, 13 aa, Homo sapiens
  CDR3 for beta chain variable domain of TCR clone 246072 (TRBV7-9, TRBJ2-2)
CASSLDPTGELFF

SEQ ID NO: 492145 - protein, 11 aa, Homo sapiens
  CDR3 for alpha chain variable domain of TCR clone 246073 (TRAV3, TRAJ21)
CAVGNFNKLYF

SEQ ID NO: 492146 - protein, 17 aa, Homo sapiens
  CDR3 for beta chain variable domain of TCR clone 246073 (TRBV24-1, TRBJ2-1)
CATSDVSTSGTYNEQFL

SEQ ID NO: 492147 - protein, 11 aa, Homo sapiens
  CDR3 for alpha chain variable domain of TCR clone 246074 (TRAV2, TRAJ13)
CASGGYQKVTF

SEQ ID NO: 492148 - protein, 14 aa, Homo sapiens
  CDR3 for beta chain variable domain of TCR clone 246074 (TRBV7-9, TRBJ2-2)
CASSGPADTGELFF

SEQ ID NO: 492149 - protein, 11 aa, Homo sapiens
  CDR3 for alpha chain variable domain of TCR clone 246075 (TRAV3, TRAJ21)
CAVGNFTKFYF

SEQ ID NO: 492150 - protein, 12 aa, Homo sapiens
  CDR3 for beta chain variable domain of TCR clone 246075 (TRBV7-8, TRBJ2-7)
CASSLGDREQYF

SEQ ID NO: 492151 - protein, 14 aa, Homo sapiens
  CDR3 for alpha chain variable domain of TCR clone 246076 (TRAV13-1, TRAJ44)
CAAKATGTASKLTF

SEQ ID NO: 492152 - protein, 15 aa, Homo sapiens
  CDR3 for beta chain variable domain of TCR clone 246076 (TRBV7-8, TRBJ2-1)
CASSLHGGPYNEQFF

SEQ ID NO: 492153 - protein, 18 aa, Homo sapiens
  CDR3 for alpha chain variable domain of TCR clone 246077 (TRAV21, TRAJ52)
CAVRPSPAGGTSYGKLTF

SEQ ID NO: 492154 - protein, 16 aa, Homo sapiens
  CDR3 for beta chain variable domain of TCR clone 246077 (TRBV2, TRBJ2-1)
CASSDSPGQPYNEQFF

SEQ ID NO: 492155 - protein, 18 aa, Homo sapiens
  CDR3 for alpha chain variable domain of TCR clone 246078 (TRAV17, TRAJ28)
CATDPPRGSGAGSYQLTF

SEQ ID NO: 492156 - protein, 14 aa, Homo sapiens
  CDR3 for beta chain variable domain of TCR clone 246078 (TRBV13, TRBJ2-5)
CASRLDYPQETQYF

SEQ ID NO: 492157 - protein, 16 aa, Homo sapiens
  CDR3 for alpha chain variable domain of TCR clone 246079 (TRAV8-3, TRAJ10)
CAVGPGVTGGGNKLTF

SEQ ID NO: 492158 - protein, 13 aa, Homo sapiens
  CDR3 for beta chain variable domain of TCR clone 246079 (TRBV18, TRBJ1-1)
CASSPGPAGEAFF

SEQ ID NO: 492159 - protein, 12 aa, Homo sapiens
  CDR3 for alpha chain variable domain of TCR clone 246080 (TRAV26-2, TRAJ21)
CILKGNFNKFYL

SEQ ID NO: 492160 - protein, 14 aa, Homo sapiens
  CDR3 for beta chain variable domain of TCR clone 246080 (TRBV12-4, TRBJ1-1)
CASSLGTGGTEAFF

SEQ ID NO: 492161 - protein, 16 aa, Homo sapiens
  CDR3 for alpha chain variable domain of TCR clone 246081 (TRAV12-1, TRAJ42)
CVVTPYYGGSQGNLIF

SEQ ID NO: 492162 - protein, 14 aa, Homo sapiens
  CDR3 for beta chain variable domain of TCR clone 246081 (TRBV20-1, TRBJ1-3)
CSASPTGAGNTIYF

SEQ ID NO: 492163 - protein, 13 aa, Homo sapiens
  CDR3 for alpha chain variable domain of TCR clone 246082 (TRAV21, TRAJ27)
CAARPGNAGKSPF

SEQ ID NO: 492164 - protein, 13 aa, Homo sapiens
  CDR3 for beta chain variable domain of TCR clone 246082 (TRBV7-3, TRBJ2-7)
CASSQAGGYEQYF

SEQ ID NO: 492165 - protein, 12 aa, Homo sapiens
  CDR3 for alpha chain variable domain of TCR clone 246083 (TRAV13-1, TRAJ5)
CAAKAGRRALTF

SEQ ID NO: 492166 - protein, 13 aa, Homo sapiens
  CDR3 for beta chain variable domain of TCR clone 246083 (TRBV7-9, TRBJ1-2)
CASSLKQNNGYTF

SEQ ID NO: 492167 - protein, 13 aa, Homo sapiens
  CDR3 for alpha chain variable domain of TCR clone 246084 (TRAV17, TRAJ5)
CAPMDTGRRALTF

SEQ ID NO: 492168 - protein, 13 aa, Homo sapiens
  CDR3 for beta chain variable domain of TCR clone 246084 (TRBV19, TRBJ2-7)
CASSTSGSYEQYF

SEQ ID NO: 492169 - protein, 13 aa, Homo sapiens
  CDR3 for alpha chain variable domain of TCR clone 246085 (TRAV8-3, TRAJ48)
CCGCNFGNEKLTF

SEQ ID NO: 492170 - protein, 12 aa, Homo sapiens
  CDR3 for beta chain variable domain of TCR clone 246085 (TRBV7-2, TRBJ2-5)
CASSHYQETQYF

SEQ ID NO: 492171 - protein, 14 aa, Homo sapiens
  CDR3 for alpha chain variable domain of TCR clone 246086 (TRAV12-2, TRAJ17)
CAENIKAAGNKLTF

SEQ ID NO: 492172 - protein, 16 aa, Homo sapiens
  CDR3 for beta chain variable domain of TCR clone 246086 (TRBV20-1, TRBJ2-6)
CSASSQGYDGANVLTF

SEQ ID NO: 492173 - protein, 16 aa, Homo sapiens
  CDR3 for alpha chain variable domain of TCR clone 246087 (TRAV2, TRAJ6)
CAVPWGPSGGSYIPTF

SEQ ID NO: 492174 - protein, 14 aa, Homo sapiens
  CDR3 for beta chain variable domain of TCR clone 246087 (TRBV2, TRBJ2-1)
CASSEQMRESEQFF

SEQ ID NO: 492175 - protein, 12 aa, Homo sapiens
  CDR3 for alpha chain variable domain of TCR clone 246088 (TRAV12-3, TRAJ17)
CAMPLTGNKLTF

SEQ ID NO: 492176 - protein, 14 aa, Homo sapiens
  CDR3 for beta chain variable domain of TCR clone 246088 (TRBV4-1, TRBJ2-7)
CASSQDREHGEQYF

SEQ ID NO: 492177 - protein, 13 aa, Homo sapiens
  CDR3 for alpha chain variable domain of TCR clone 246089 (TRAV12-1, TRAJ49)
CVVTPFTGNPFYF

SEQ ID NO: 492178 - protein, 13 aa, Homo sapiens
  CDR3 for beta chain variable domain of TCR clone 246089 (TRBV20-1, TRBJ1-1)
CSARGGANTEAFF

SEQ ID NO: 492179 - protein, 15 aa, Homo sapiens
  CDR3 for alpha chain variable domain of TCR clone 246090 (TRAV12-2, TRAJ53)
CAVNGGGGSNYKLTF

SEQ ID NO: 492180 - protein, 14 aa, Homo sapiens
  CDR3 for beta chain variable domain of TCR clone 246090 (TRBV18, TRBJ2-7)
CASSPRGGAYERYF

SEQ ID NO: 492181 - protein, 17 aa, Homo sapiens
  CDR3 for alpha chain variable domain of TCR clone 246091 (TRAV16, TRAJ58)
CITVLSNGETSGSRLTY

SEQ ID NO: 492182 - protein, 17 aa, Homo sapiens
  CDR3 for beta chain variable domain of TCR clone 246091 (TRBV18, TRBJ2-1)
CASSKGLSGGADNEQFF

SEQ ID NO: 492183 - protein, 13 aa, Homo sapiens
  CDR3 for alpha chain variable domain of TCR clone 246092 (TRAV27, TRAJ45)
CRSSGGGADVLTF

SEQ ID NO: 492184 - protein, 13 aa, Homo sapiens
  CDR3 for beta chain variable domain of TCR clone 246092 (TRBV7-7, TRBJ2-5)
CASSRSGQETQYF

SEQ ID NO: 492185 - protein, 14 aa, Homo sapiens
  CDR3 for alpha chain variable domain of TCR clone 246093 (TRAV12-2, TRAJ45)
CAVNIGGGAGGLTF

SEQ ID NO: 492186 - protein, 11 aa, Homo sapiens
  CDR3 for beta chain variable domain of TCR clone 246093 (TRBV12-4, TRBJ2-2)
CASSSAGELFF

SEQ ID NO: 492187 - protein, 12 aa, Homo sapiens
  CDR3 for alpha chain variable domain of TCR clone 246094 (TRAV25, TRAJ5)
CAGGGGRRALTF

SEQ ID NO: 492188 - protein, 16 aa, Homo sapiens
  CDR3 for beta chain variable domain of TCR clone 246094 (TRBV7-2, TRBJ2-5)
CASSSKWLSGQETQYF

SEQ ID NO: 492189 - protein, 14 aa, Homo sapiens
  CDR3 for alpha chain variable domain of TCR clone 246095 (TRAV21, TRAJ28)
RAVGSGAGSYQLTF

SEQ ID NO: 492190 - protein, 14 aa, Homo sapiens
  CDR3 for beta chain variable domain of TCR clone 246095 (TRBV18, TRBJ1-4)
CASSPGPNGEKLFF

SEQ ID NO: 492191 - protein, 14 aa, Homo sapiens
  CDR3 for alpha chain variable domain of TCR clone 246096 (TRAV38-2/DV8, TRAJ29)
CAYSSRSGNTPLVF

SEQ ID NO: 492192 - protein, 17 aa, Homo sapiens
  CDR3 for beta chain variable domain of TCR clone 246096 (TRBV6-1, TRBJ1-2)
CASSGTHSQRGNYGYTF

SEQ ID NO: 492193 - protein, 15 aa, Homo sapiens
  CDR3 for alpha chain variable domain of TCR clone 246097 (TRAV17, TRAJ22)
CATGAPSGSARQLTF

SEQ ID NO: 492194 - protein, 16 aa, Homo sapiens
  CDR3 for beta chain variable domain of TCR clone 246097 (TRBV10-3, TRBJ2-7)
CAISADFADRPYEQYF

SEQ ID NO: 492195 - protein, 13 aa, Homo sapiens
  CDR3 for alpha chain variable domain of TCR clone 246098 (TRAV4, TRAJ22)
CLGGSGSARHLTF

SEQ ID NO: 492196 - protein, 15 aa, Homo sapiens
  CDR3 for beta chain variable domain of TCR clone 246098 (TRBV7-9, TRBJ1-6)
CASSSPGRGNSPIHF

SEQ ID NO: 492197 - protein, 20 aa, Homo sapiens
  CDR3 for alpha chain variable domain of TCR clone 246099 (TRAV1-2, TRAJ8)
CAVREDRLSETCIWNWHPTS

SEQ ID NO: 492198 - protein, 14 aa, Homo sapiens
  CDR3 for beta chain variable domain of TCR clone 246099 (TRBV29-1, TRBJ2-5)
CSVDTSGSGETQYF

SEQ ID NO: 492199 - protein, 11 aa, Homo sapiens
  CDR3 for alpha chain variable domain of TCR clone 246100 (TRAV13-1, TRAJ39)
CASHAGNMLTF

SEQ ID NO: 492200 - protein, 19 aa, Homo sapiens
  CDR3 for beta chain variable domain of TCR clone 246100 (TRBV19, TRBJ2-5)
CASSIGQVTDFFLGETQYF

SEQ ID NO: 492201 - protein, 15 aa, Homo sapiens
  CDR3 for alpha chain variable domain of TCR clone 246101 (TRAV26-1, TRAJ29)
CIVRVERSGNTPLVF

SEQ ID NO: 492202 - protein, 13 aa, Homo sapiens
  CDR3 for beta chain variable domain of TCR clone 246101 (TRBV4-2, TRBJ1-1)
CASSQAGNTEAFF

SEQ ID NO: 492203 - protein, 11 aa, Homo sapiens
  CDR3 for alpha chain variable domain of TCR clone 246102 (TRAV1-1, TRAJ23)
CAVRQGGKLIF

SEQ ID NO: 492204 - protein, 16 aa, Homo sapiens
  CDR3 for beta chain variable domain of TCR clone 246102 (TRBV6-1, TRBJ1-2)
CASSEANSIINYGYTF

SEQ ID NO: 492205 - protein, 11 aa, Homo sapiens
  CDR3 for alpha chain variable domain of TCR clone 246103 (TRAV12-1, TRAJ34)
CVVNKGSELIF

SEQ ID NO: 492206 - protein, 12 aa, Homo sapiens
  CDR3 for beta chain variable domain of TCR clone 246103 (TRBV2, TRBJ2-1)
CTYGPPGNEQFF

SEQ ID NO: 492207 - protein, 16 aa, Homo sapiens
  CDR3 for alpha chain variable domain of TCR clone 246104 (TRAV3, TRAJ10)
CAVRDMNAGGGNKLTF

SEQ ID NO: 492208 - protein, 16 aa, Homo sapiens
  CDR3 for beta chain variable domain of TCR clone 246104 (TRBV28, TRBJ2-7)
CASSPWVATGDLSQYF

SEQ ID NO: 492209 - protein, 15 aa, Homo sapiens
  CDR3 for alpha chain variable domain of TCR clone 246105 (TRAV13-1, TRAJ44)
CAASRNTGTASKLTF

SEQ ID NO: 492210 - protein, 13 aa, Homo sapiens
  CDR3 for beta chain variable domain of TCR clone 246105 (TRBV7-8, TRBJ2-7)
CASSLTGGREQYF

SEQ ID NO: 492211 - protein, 14 aa, Homo sapiens
  CDR3 for alpha chain variable domain of TCR clone 246106 (TRAV13-2, TRAJ26)
CAENLGNYGQNFVF

SEQ ID NO: 492212 - protein, 16 aa, Homo sapiens
  CDR3 for beta chain variable domain of TCR clone 246106 (TRBV19, TRBJ1-3)
CASNRGNSGNTIYLER

SEQ ID NO: 492213 - protein, 11 aa, Homo sapiens
  CDR3 for alpha chain variable domain of TCR clone 246107 (TRAV3, TRAJ21)
CAVGNFKNFYF

SEQ ID NO: 492214 - protein, 16 aa, Homo sapiens
  CDR3 for beta chain variable domain of TCR clone 246107 (TRBV19, TRBJ2-1)
CASSKAGPSSYNEQFF

SEQ ID NO: 492215 - protein, 15 aa, Homo sapiens
  CDR3 for alpha chain variable domain of TCR clone 246108 (TRAV23/DV6, TRAJ30)
CAASSQESRDDKIIF

SEQ ID NO: 492216 - protein, 11 aa, Homo sapiens
  CDR3 for beta chain variable domain of TCR clone 246108 (TRBV7-9, TRBJ2-3)
CASSYTDTQYF

SEQ ID NO: 492217 - protein, 16 aa, Homo sapiens
  CDR3 for alpha chain variable domain of TCR clone 246109 (TRAV1-2, TRAJ10)
CAVRGVLTGGGNKLTF

SEQ ID NO: 492218 - protein, 16 aa, Homo sapiens
  CDR3 for beta chain variable domain of TCR clone 246109 (TRBV29-1, TRBJ2-7)
CSVEVVGTSVSYEQYF

SEQ ID NO: 492219 - protein, 10 aa, Homo sapiens
  CDR3 for alpha chain variable domain of TCR clone 246110 (TRAV23/DV6, TRAJ18)
CAARYRGSTP

SEQ ID NO: 492220 - protein, 13 aa, Homo sapiens
  CDR3 for beta chain variable domain of TCR clone 246110 (TRBV7-2, TRBJ2-7)
CASSSPSGSEQYF

SEQ ID NO: 492221 - protein, 12 aa, Homo sapiens
  CDR3 for alpha chain variable domain of TCR clone 246111 (TRAV12-1, TRAJ20)
CVVNPDDYKLSF

SEQ ID NO: 492222 - protein, 14 aa, Homo sapiens
  CDR3 for beta chain variable domain of TCR clone 246111 (TRBV11-3, TRBJ2-1)
CARSATTSGSIQFF

SEQ ID NO: 492223 - protein, 11 aa, Homo sapiens
  CDR3 for alpha chain variable domain of TCR clone 246112 (TRAV3, TRAJ21)
CAVGNFNKLYF

SEQ ID NO: 492224 - protein, 16 aa, Homo sapiens
  CDR3 for beta chain variable domain of TCR clone 246112 (TRBV19, TRBJ2-1)
CASSKAGPSSYKEQFF

SEQ ID NO: 492225 - protein, 18 aa, Homo sapiens
  CDR3 for alpha chain variable domain of TCR clone 246113 (TRAV13-1, TRAJ52)
CAAKNPNAVGTSYGKLTF

SEQ ID NO: 492226 - protein, 14 aa, Homo sapiens
  CDR3 for beta chain variable domain of TCR clone 246113 (TRBV7-2, TRBJ2-7)
CASSPKTSFYEQYF

SEQ ID NO: 492227 - protein, 15 aa, Homo sapiens
  CDR3 for alpha chain variable domain of TCR clone 246114 (TRAV17, TRAJ57)
CATDWTPGGSEKLGF

SEQ ID NO: 492228 - protein, 15 aa, Homo sapiens
  CDR3 for beta chain variable domain of TCR clone 246114 (TRBV27, TRBJ2-1)
CASSLAGGPFNEQFF

SEQ ID NO: 492229 - protein, 10 aa, Homo sapiens
  CDR3 for alpha chain variable domain of TCR clone 246115 (TRAV23/DV6, TRAJ57)
CAASSTLSQG

SEQ ID NO: 492230 - protein, 17 aa, Homo sapiens
  CDR3 for beta chain variable domain of TCR clone 246115 (TRBV10-3, TRBJ2-6)
CAISGSTAPSGANVLTF

SEQ ID NO: 492231 - protein, 15 aa, Homo sapiens
  CDR3 for alpha chain variable domain of TCR clone 246116 (TRAV23/DV6, TRAJ18)
CAARYRGSTLGRLNF

SEQ ID NO: 492232 - protein, 15 aa, Homo sapiens
  CDR3 for beta chain variable domain of TCR clone 246116 (TRBV7-8, TRBJ2-1)
CASSLTDSLYNEQFF

SEQ ID NO: 492233 - protein, 13 aa, Homo sapiens
  CDR3 for alpha chain variable domain of TCR clone 246117 (TRAV3, TRAJ27)
CAVRPLGAGKSTF

SEQ ID NO: 492234 - protein, 11 aa, Homo sapiens
  CDR3 for beta chain variable domain of TCR clone 246117 (TRBV7-9, TRBJ2-5)
CASSLGETQYF

SEQ ID NO: 492235 - protein, 15 aa, Homo sapiens
  CDR3 for alpha chain variable domain of TCR clone 246118 (TRAV3, TRAJ24)
CAGGMTTDSWGKFQF

SEQ ID NO: 492236 - protein, 14 aa, Homo sapiens
  CDR3 for beta chain variable domain of TCR clone 246118 (TRBV4-1, TRBJ2-2)
CASRRGRDSGELFF

SEQ ID NO: 492237 - protein, 12 aa, Homo sapiens
  CDR3 for alpha chain variable domain of TCR clone 246119 (TRAV27, TRAJ41)
CAGRNSGYALNF

SEQ ID NO: 492238 - protein, 13 aa, Homo sapiens
  CDR3 for beta chain variable domain of TCR clone 246119 (TRBV12-4, TRBJ1-1)
CASSPGTGFEALF

SEQ ID NO: 492239 - protein, 13 aa, Homo sapiens
  CDR3 for alpha chain variable domain of TCR clone 246120 (TRAV3, TRAJ41)
CAVSSNSGYALNF

SEQ ID NO: 492240 - protein, 16 aa, Homo sapiens
  CDR3 for beta chain variable domain of TCR clone 246120 (TRBV5-1, TRBJ2-3)
CASSLGLAVYTDTQYF

SEQ ID NO: 492241 - protein, 13 aa, Homo sapiens
  CDR3 for alpha chain variable domain of TCR clone 246121 (TRAV27, TRAJ22)
CALPSGSARQLTF

SEQ ID NO: 492242 - protein, 13 aa, Homo sapiens
  CDR3 for beta chain variable domain of TCR clone 246121 (TRBV7-2, TRBJ2-7)
CASSSPSGSEQYF

SEQ ID NO: 492243 - protein, 13 aa, Homo sapiens
  CDR3 for alpha chain variable domain of TCR clone 246122 (TRAV12-2, TRAJ37)
CAGGSGNTGKLIF

SEQ ID NO: 492244 - protein, 16 aa, Homo sapiens
  CDR3 for beta chain variable domain of TCR clone 246122 (TRBV28, TRBJ2-1)
CASSLGGSGSYNEQFF

SEQ ID NO: 492245 - protein, 13 aa, Homo sapiens
  CDR3 for alpha chain variable domain of TCR clone 246123 (TRAV1-2, TRAJ15)
CAVTDQAGTALIF

SEQ ID NO: 492246 - protein, 12 aa, Homo sapiens
  CDR3 for beta chain variable domain of TCR clone 246123 (TRBV11-2, TRBJ2-2)
CASSLPTGELFF

SEQ ID NO: 492247 - protein, 14 aa, Homo sapiens
  CDR3 for alpha chain variable domain of TCR clone 246124 (TRAV2, TRAJ3)
CAVDRYSSASKLIF

SEQ ID NO: 492248 - protein, 16 aa, Homo sapiens
  CDR3 for beta chain variable domain of TCR clone 246124 (TRBV20-1, TRBJ1-5)
CSAELPGQQTNQPQHF

SEQ ID NO: 492249 - protein, 16 aa, Homo sapiens
  CDR3 for alpha chain variable domain of TCR clone 246125 (TRAV12-3, TRAJ53)
CAMSPGSGGSDYKLTF

SEQ ID NO: 492250 - protein, 11 aa, Homo sapiens
  CDR3 for beta chain variable domain of TCR clone 246125 (TRBV29-1, TRBJ2-5)
RSEDRTGTQYF

SEQ ID NO: 492251 - protein, 13 aa, Homo sapiens
  CDR3 for alpha chain variable domain of TCR clone 246126 (TRAV2, TRAJ12)
CAVVADSSYKLIF

SEQ ID NO: 492252 - protein, 13 aa, Homo sapiens
  CDR3 for beta chain variable domain of TCR clone 246126 (TRBV20-1, TRBJ2-1)
CSARSSPRDEQFF

SEQ ID NO: 492253 - protein, 17 aa, Homo sapiens
  CDR3 for alpha chain variable domain of TCR clone 246127 (TRAV3, TRAJ6)
CAVRDGPRAGGSYIPTF

SEQ ID NO: 492254 - protein, 14 aa, Homo sapiens
  CDR3 for beta chain variable domain of TCR clone 246127 (TRBV12-4, TRBJ2-1)
CASSWGHSVDEQFF

SEQ ID NO: 492255 - protein, 21 aa, Homo sapiens
  CDR3 for alpha chain variable domain of TCR clone 246128 (TRAV1-1, TRAJ6)
CLLLLRCERLERTGGSYIPTF

SEQ ID NO: 492256 - protein, 13 aa, Homo sapiens
  CDR3 for beta chain variable domain of TCR clone 246128 (TRBV10-2, TRBJ2-7)
CASGASVGYEQYF

SEQ ID NO: 492257 - protein, 11 aa, Homo sapiens
  CDR3 for alpha chain variable domain of TCR clone 246129 (TRAV26-1, TRAJ37)
CIVRVGRKLIF

SEQ ID NO: 492258 - protein, 13 aa, Homo sapiens
  CDR3 for beta chain variable domain of TCR clone 246129 (TRBV28, TRBJ2-5)
CASSFAGGETQYF

SEQ ID NO: 492259 - protein, 15 aa, Homo sapiens
  CDR3 for alpha chain variable domain of TCR clone 246130 (TRAV25, TRAJ53)
CAATGGGGSNYKLTF

SEQ ID NO: 492260 - protein, 13 aa, Homo sapiens
  CDR3 for beta chain variable domain of TCR clone 246130 (TRBV7-3, TRBJ2-3)
CASSSWSTETQYF

SEQ ID NO: 492261 - protein, 15 aa, Homo sapiens
  CDR3 for alpha chain variable domain of TCR clone 246131 (TRAV23/DV6, TRAJ18)
CAARYRGSTLGSLYF

SEQ ID NO: 492262 - protein, 13 aa, Homo sapiens
  CDR3 for beta chain variable domain of TCR clone 246131 (TRBV7-2, TRBJ2-7)
CASSSPSGGEQYF

SEQ ID NO: 492263 - protein, 13 aa, Homo sapiens
  CDR3 for alpha chain variable domain of TCR clone 246132 (TRAV21, TRAJ27)
CAASPGNAGNSTF

SEQ ID NO: 492264 - protein, 16 aa, Homo sapiens
  CDR3 for beta chain variable domain of TCR clone 246132 (TRBV20-1, TRBJ1-2)
CSASMGQGVANYGYTF

SEQ ID NO: 492265 - protein, 12 aa, Homo sapiens
  CDR3 for alpha chain variable domain of TCR clone 246133 (TRAV12-2, TRAJ8)
CAVNTGFQKLVF

SEQ ID NO: 492266 - protein, 16 aa, Homo sapiens
  CDR3 for beta chain variable domain of TCR clone 246133 (TRBV2, TRBJ2-5)
CASSETQGVGEETQYF

SEQ ID NO: 492267 - protein, 18 aa, Homo sapiens
  CDR3 for alpha chain variable domain of TCR clone 246134 (TRAV13-1, TRAJ52)
CAASKRSAGGTISGKLTF

SEQ ID NO: 492268 - protein, 13 aa, Homo sapiens
  CDR3 for beta chain variable domain of TCR clone 246134 (TRBV12-4, TRBJ1-2)
CASSLRQGKGYTF

SEQ ID NO: 492269 - protein, 15 aa, Homo sapiens
  CDR3 for alpha chain variable domain of TCR clone 246135 (TRAV12-3, TRAJ6)
CAMSATSGGSYIPTF

SEQ ID NO: 492270 - protein, 15 aa, Homo sapiens
  CDR3 for beta chain variable domain of TCR clone 246135 (TRBV11-3, TRBJ2-3)
CASLKDGREGDTQYF

SEQ ID NO: 492271 - protein, 13 aa, Homo sapiens
  CDR3 for alpha chain variable domain of TCR clone 246136 (TRAV21, TRAJ27)
CAASPGNAGKSTF

SEQ ID NO: 492272 - protein, 14 aa, Homo sapiens
  CDR3 for beta chain variable domain of TCR clone 246136 (TRBV7-9, TRBJ2-5)
CASSLDTAQETQYF

SEQ ID NO: 492273 - protein, 16 aa, Homo sapiens
  CDR3 for alpha chain variable domain of TCR clone 246137 (TRAV30, TRAJ24)
CGTEIVDADSWGKFQF

SEQ ID NO: 492274 - protein, 14 aa, Homo sapiens
  CDR3 for beta chain variable domain of TCR clone 246137 (TRBV11-2, TRBJ2-7)
CASSLVPGGDEQYF

SEQ ID NO: 492275 - protein, 16 aa, Homo sapiens
  CDR3 for alpha chain variable domain of TCR clone 246138 (TRAV12-2, TRAJ45)
CAVNRGSGGGADGLTF

SEQ ID NO: 492276 - protein, 13 aa, Homo sapiens
  CDR3 for beta chain variable domain of TCR clone 246138 (TRBV4-1, TRBJ2-7)
CASSQGQAYEQYF

SEQ ID NO: 492277 - protein, 11 aa, Homo sapiens
  CDR3 for alpha chain variable domain of TCR clone 246139 (TRAV1-2, TRAJ34)
CAGYNTDKLIF

SEQ ID NO: 492278 - protein, 13 aa, Homo sapiens
  CDR3 for beta chain variable domain of TCR clone 246139 (TRBV11-2, TRBJ1-1)
CASSLGNGAEDFF

SEQ ID NO: 492279 - protein, 11 aa, Homo sapiens
  CDR3 for alpha chain variable domain of TCR clone 246140 (TRAV4, TRAJ21)
CLIYNFNKFYF

SEQ ID NO: 492280 - protein, 12 aa, Homo sapiens
  CDR3 for beta chain variable domain of TCR clone 246140 (TRBV12-5, TRBJ2-5)
CASGQGVETQYF

SEQ ID NO: 492281 - protein, 14 aa, Homo sapiens
  CDR3 for alpha chain variable domain of TCR clone 246141 (TRAV2, TRAJ9)
CAVEDRSVGFKTIF

SEQ ID NO: 492282 - protein, 13 aa, Homo sapiens
  CDR3 for beta chain variable domain of TCR clone 246141 (TRBV12-4, TRBJ1-5)
CASSPDRAQPQHF

SEQ ID NO: 492283 - protein, 15 aa, Homo sapiens
  CDR3 for alpha chain variable domain of TCR clone 246142 (TRAV8-3, TRAJ27)
CAVGPSKTNAGKSTF

SEQ ID NO: 492284 - protein, 14 aa, Homo sapiens
  CDR3 for beta chain variable domain of TCR clone 246142 (TRBV29-1, TRBJ1-4)
CSVLPDSTNENLFF

SEQ ID NO: 492285 - protein, 10 aa, Homo sapiens
  CDR3 for alpha chain variable domain of TCR clone 246143 (TRAV25, TRAJ17)
CQAAGNKLTF

SEQ ID NO: 492286 - protein, 13 aa, Homo sapiens
  CDR3 for beta chain variable domain of TCR clone 246143 (TRBV6-5, TRBJ2-2)
CASSLPGVGELFF

SEQ ID NO: 492287 - protein, 14 aa, Homo sapiens
  CDR3 for alpha chain variable domain of TCR clone 246144 (TRAV23/DV6, TRAJ57)
CAAALKGGSEKLVF

SEQ ID NO: 492288 - protein, 12 aa, Homo sapiens
  CDR3 for beta chain variable domain of TCR clone 246144 (TRBV11-2, TRBJ2-2)
CASSLGGGELFF

SEQ ID NO: 492289 - protein, 13 aa, Homo sapiens
  CDR3 for alpha chain variable domain of TCR clone 246145 (TRAV25, TRAJ26)
CAGMDNYGQNFVF

SEQ ID NO: 492290 - protein, 15 aa, Homo sapiens
  CDR3 for beta chain variable domain of TCR clone 246145 (TRBV7-2, TRBJ2-7)
CASNLKGALTYEQYF

SEQ ID NO: 492291 - protein, 13 aa, Homo sapiens
  CDR3 for alpha chain variable domain of TCR clone 246146 (TRAV8-3, TRAJ36)
CAVGATGSDNLFF

SEQ ID NO: 492292 - protein, 17 aa, Homo sapiens
  CDR3 for beta chain variable domain of TCR clone 246146 (TRBV4-2, TRBJ1-1)
CASTQFGGGSGNTEAFF

SEQ ID NO: 492293 - protein, 15 aa, Homo sapiens
  CDR3 for alpha chain variable domain of TCR clone 246147 (TRAV29/DV5, TRAJ24)
CASSGATDSWGKFQF

SEQ ID NO: 492294 - protein, 15 aa, Homo sapiens
  CDR3 for beta chain variable domain of TCR clone 246147 (TRBV4-1, TRBJ2-1)
CASSQDPGNYNEQFF

SEQ ID NO: 492295 - protein, 13 aa, Homo sapiens
  CDR3 for alpha chain variable domain of TCR clone 246148 (TRAV13-1, TRAJ5)
CAAEHTCRRALTF

SEQ ID NO: 492296 - protein, 15 aa, Homo sapiens
  CDR3 for beta chain variable domain of TCR clone 246148 (TRBV7-3, TRBJ2-2)
CASSETGQGTGELFF

SEQ ID NO: 492297 - protein, 14 aa, Homo sapiens
  CDR3 for alpha chain variable domain of TCR clone 246149 (TRAV1-2, TRAJ16)
CAVNRFSDGQKRLF

SEQ ID NO: 492298 - protein, 14 aa, Homo sapiens
  CDR3 for beta chain variable domain of TCR clone 246149 (TRBV20-1, TRBJ2-7)
CSARRSGSSHEQYF

SEQ ID NO: 492299 - protein, 12 aa, Homo sapiens
  CDR3 for alpha chain variable domain of TCR clone 246150 (TRAV30, TRAJ43)
CGTEERGNDMRF

SEQ ID NO: 492300 - protein, 15 aa, Homo sapiens
  CDR3 for beta chain variable domain of TCR clone 246150 (TRBV11-2, TRBJ2-2)
CASSLLAGGAGELFF

SEQ ID NO: 492301 - protein, 14 aa, Homo sapiens
  CDR3 for alpha chain variable domain of TCR clone 246151 (TRAV12-2, TRAJ13)
CAVKKTGVYQKVTV

SEQ ID NO: 492302 - protein, 15 aa, Homo sapiens
  CDR3 for beta chain variable domain of TCR clone 246151 (TRBV27, TRBJ2-1)
CASSNGGGSSNEQFF

SEQ ID NO: 492303 - protein, 13 aa, Homo sapiens
  CDR3 for alpha chain variable domain of TCR clone 246152 (TRAV29/DV5, TRAJ28)
CAAERAGSYQLTF

SEQ ID NO: 492304 - protein, 14 aa, Homo sapiens
  CDR3 for beta chain variable domain of TCR clone 246152 (TRBV7-2, TRBJ2-7)
CASSPKTSFYEQYF

SEQ ID NO: 492305 - protein, 14 aa, Homo sapiens
  CDR3 for alpha chain variable domain of TCR clone 246153 (TRAV13-1, TRAJ35)
FAASKGGFGNVLHC

SEQ ID NO: 492306 - protein, 13 aa, Homo sapiens
  CDR3 for beta chain variable domain of TCR clone 246153 (TRBV7-3, TRBJ1-1)
CASSQDWGAEAFF

SEQ ID NO: 492307 - protein, 10 aa, Homo sapiens
  CDR3 for alpha chain variable domain of TCR clone 246154 (TRAV12-1, TRAJ37)
CVGWAGKLIF

SEQ ID NO: 492308 - protein, 14 aa, Homo sapiens
  CDR3 for beta chain variable domain of TCR clone 246154 (TRBV19, TRBJ2-1)
CASPTFVLSGEQFF

SEQ ID NO: 492309 - protein, 11 aa, Homo sapiens
  CDR3 for alpha chain variable domain of TCR clone 246155 (TRAV12-1, TRAJ8)
CVVTGFQKLVF

SEQ ID NO: 492310 - protein, 14 aa, Homo sapiens
  CDR3 for beta chain variable domain of TCR clone 246155 (TRBV7-2, TRBJ2-7)
CASSPKTSFYEQYF

SEQ ID NO: 492311 - protein, 22 aa, Homo sapiens
  CDR3 for alpha chain variable domain of TCR clone 246156 (TRAV21, )
CAVRQDAGNNHIQNPEPAVYQL

SEQ ID NO: 492312 - protein, 16 aa, Homo sapiens
  CDR3 for beta chain variable domain of TCR clone 246156 (TRBV4-2, TRBJ1-1)
RASRPLDGGGDTEAFF

SEQ ID NO: 492313 - protein, 15 aa, Homo sapiens
  CDR3 for alpha chain variable domain of TCR clone 246157 (TRAV13-1, TRAJ57)
CAASSTQGGSEKLVF

SEQ ID NO: 492314 - protein, 13 aa, Homo sapiens
  CDR3 for beta chain variable domain of TCR clone 246157 (TRBV7-6, TRBJ1-5)
CASSQGPNRPQHF

SEQ ID NO: 492315 - protein, 11 aa, Homo sapiens
  CDR3 for alpha chain variable domain of TCR clone 246158 (TRAV3, TRAJ21)
CAVGNFNKFYF

SEQ ID NO: 492316 - protein, 15 aa, Homo sapiens
  CDR3 for beta chain variable domain of TCR clone 246158 (TRBV15, TRBJ2-2)
CATSVTGGRVGELFF

SEQ ID NO: 492317 - protein, 12 aa, Homo sapiens
  CDR3 for alpha chain variable domain of TCR clone 246159 (TRAV12-3, TRAJ17)
CAMTLTGNKLTF

SEQ ID NO: 492318 - protein, 11 aa, Homo sapiens
  CDR3 for beta chain variable domain of TCR clone 246159 (TRBV19, TRBJ2-7)
CASGNSYEQYF

SEQ ID NO: 492319 - protein, 14 aa, Homo sapiens
  CDR3 for alpha chain variable domain of TCR clone 246160 (TRAV1-2, TRAJ16)
CAVNRFPDGQKLLF

SEQ ID NO: 492320 - protein, 15 aa, Homo sapiens
  CDR3 for beta chain variable domain of TCR clone 246160 (TRBV20-1, TRBJ2-7)
CSARDRVSGMDEQYF

SEQ ID NO: 492321 - protein, 17 aa, Homo sapiens
  CDR3 for alpha chain variable domain of TCR clone 246161 (TRAV8-6, TRAJ58)
CAVSSWVGETSGSRLTF

SEQ ID NO: 492322 - protein, 13 aa, Homo sapiens
  CDR3 for beta chain variable domain of TCR clone 246161 (TRBV19, TRBJ2-7)
CASRKAGGSEQYF

SEQ ID NO: 492323 - protein, 15 aa, Homo sapiens
  CDR3 for alpha chain variable domain of TCR clone 246162 (TRAV27, TRAJ38)
CAARRNAGHKRKLIW

SEQ ID NO: 492324 - protein, 13 aa, Homo sapiens
  CDR3 for beta chain variable domain of TCR clone 246162 (TRBV12-5, TRBJ2-3)
CASGDRQSDTQYF

SEQ ID NO: 492325 - protein, 10 aa, Homo sapiens
  CDR3 for alpha chain variable domain of TCR clone 246163 (TRAV13-1, TRAJ42)
CAASLETTIL

SEQ ID NO: 492326 - protein, 17 aa, Homo sapiens
  CDR3 for beta chain variable domain of TCR clone 246163 (TRBV15, TRBJ2-3)
CATSGTTSEEGTDTQYF

SEQ ID NO: 492327 - protein, 14 aa, Homo sapiens
  CDR3 for alpha chain variable domain of TCR clone 246164 (TRAV14/DV4, TRAJ20)
CAMRERLNDYKLSF

SEQ ID NO: 492328 - protein, 11 aa, Homo sapiens
  CDR3 for beta chain variable domain of TCR clone 246164 (TRBV19, TRBJ2-1)
CASRRRYEQFF

SEQ ID NO: 492329 - protein, 15 aa, Homo sapiens
  CDR3 for alpha chain variable domain of TCR clone 246165 (TRAV17, TRAJ57)
CATCPSQGGSEKLVF

SEQ ID NO: 492330 - protein, 17 aa, Homo sapiens
  CDR3 for beta chain variable domain of TCR clone 246165 (TRBV20-1, TRBJ2-1)
CSASSSGLAGSYNEQFF

SEQ ID NO: 492331 - protein, 14 aa, Homo sapiens
  CDR3 for alpha chain variable domain of TCR clone 246166 (TRAV1-1, TRAJ27)
CAVIDNTNAGKSTF

SEQ ID NO: 492332 - protein, 12 aa, Homo sapiens
  CDR3 for beta chain variable domain of TCR clone 246166 (TRBV11-2, TRBJ2-1)
CASSPGNNEQFF

SEQ ID NO: 492333 - protein, 18 aa, Homo sapiens
  CDR3 for alpha chain variable domain of TCR clone 246167 (TRAV1-2, TRAJ18)
CAVRDMGDRGSTLGRLYF

SEQ ID NO: 492334 - protein, 14 aa, Homo sapiens
  CDR3 for beta chain variable domain of TCR clone 246167 (TRBV12-4, TRBJ1-3)
CASTLTGAGNTIYF

SEQ ID NO: 492335 - protein, 12 aa, Homo sapiens
  CDR3 for alpha chain variable domain of TCR clone 246168 (TRAV8-3, TRAJ20)
CAVDFNDYKLSF

SEQ ID NO: 492336 - protein, 14 aa, Homo sapiens
  CDR3 for beta chain variable domain of TCR clone 246168 (TRBV6-3, TRBJ2-2)
CASTYTPDTGELFF

SEQ ID NO: 492337 - protein, 12 aa, Homo sapiens
  CDR3 for alpha chain variable domain of TCR clone 246169 (TRAV12-2, TRAJ9)
CAVFTGGFKTIF

SEQ ID NO: 492338 - protein, 13 aa, Homo sapiens
  CDR3 for beta chain variable domain of TCR clone 246169 (TRBV11-2, TRBJ2-1)
CASSAEAYNEQFF

SEQ ID NO: 492339 - protein, 15 aa, Homo sapiens
  CDR3 for alpha chain variable domain of TCR clone 246170 (TRAV8-3, TRAJ27)
CAVGPSKTNAGKSTF

SEQ ID NO: 492340 - protein, 16 aa, Homo sapiens
  CDR3 for beta chain variable domain of TCR clone 246170 (TRBV5-4, TRBJ2-3)
CASQQPGAGGADTQYF

SEQ ID NO: 492341 - protein, 13 aa, Homo sapiens
  CDR3 for alpha chain variable domain of TCR clone 246171 (TRAV2, TRAJ21)
CAVEDLYFNKFYF

SEQ ID NO: 492342 - protein, 15 aa, Homo sapiens
  CDR3 for beta chain variable domain of TCR clone 246171 (TRBV28, TRBJ2-5)
CASSPGQGSIETQYF

SEQ ID NO: 492343 - protein, 13 aa, Homo sapiens
  CDR3 for alpha chain variable domain of TCR clone 246172 (TRAV29/DV5, TRAJ31)
CAASRDNNARLMF

SEQ ID NO: 492344 - protein, 15 aa, Homo sapiens
  CDR3 for beta chain variable domain of TCR clone 246172 (TRBV27, TRBJ2-1)
CASSNGGGSSNEQFF

SEQ ID NO: 492345 - protein, 13 aa, Homo sapiens
  CDR3 for alpha chain variable domain of TCR clone 246173 (TRAV8-3, TRAJ43)
CAVGTGNNNDMRF

SEQ ID NO: 492346 - protein, 14 aa, Homo sapiens
  CDR3 for beta chain variable domain of TCR clone 246173 (TRBV19, TRBJ2-1)
CASPTFVLSGEQFF

SEQ ID NO: 492347 - protein, 13 aa, Homo sapiens
  CDR3 for alpha chain variable domain of TCR clone 246174 (TRAV8-4, TRAJ49)
CAVRTLTGNQFYF

SEQ ID NO: 492348 - protein, 15 aa, Homo sapiens
  CDR3 for beta chain variable domain of TCR clone 246174 (TRBV5-8, TRBJ1-1)
CASSFSGTSLKGAFF

SEQ ID NO: 492349 - protein, 13 aa, Homo sapiens
  CDR3 for alpha chain variable domain of TCR clone 246175 (TRAV26-1, TRAJ40)
CIVRVEGTYKYII

SEQ ID NO: 492350 - protein, 15 aa, Homo sapiens
  CDR3 for beta chain variable domain of TCR clone 246175 (TRBV12-4, TRBJ1-2)
CASSLAHRDGQAYTF

SEQ ID NO: 492351 - protein, 15 aa, Homo sapiens
  CDR3 for alpha chain variable domain of TCR clone 246176 (TRAV26-2, TRAJ54)
CILRDVGQGAQKLVF

SEQ ID NO: 492352 - protein, 16 aa, Homo sapiens
  CDR3 for beta chain variable domain of TCR clone 246176 (TRBV4-2, TRBJ1-1)
CASSQAGFGMNTEAFF

SEQ ID NO: 492353 - protein, 13 aa, Homo sapiens
  CDR3 for alpha chain variable domain of TCR clone 246177 (TRAV21, TRAJ27)
CAARPGNAGKSTF

SEQ ID NO: 492354 - protein, 12 aa, Homo sapiens
  CDR3 for beta chain variable domain of TCR clone 246177 (TRBV7-6, TRBJ2-7)
CASSIKREEQYF

SEQ ID NO: 492355 - protein, 14 aa, Homo sapiens
  CDR3 for alpha chain variable domain of TCR clone 246178 (TRAV12-2, TRAJ13)
CAVKKTGGYQKVTF

SEQ ID NO: 492356 - protein, 15 aa, Homo sapiens
  CDR3 for beta chain variable domain of TCR clone 246178 (TRBV11-2, TRBJ2-2)
CASSSDKVNAGELFF

SEQ ID NO: 492357 - protein, 18 aa, Homo sapiens
  CDR3 for alpha chain variable domain of TCR clone 246179 (TRAV26-2, TRAJ54)
CILRDVEVGIQGDQKPVF

SEQ ID NO: 492358 - protein, 16 aa, Homo sapiens
  CDR3 for beta chain variable domain of TCR clone 246179 (TRBV6-1, TRBJ2-5)
CASSETLDRGAETQYF

SEQ ID NO: 492359 - protein, 13 aa, Homo sapiens
  CDR3 for alpha chain variable domain of TCR clone 246180 (TRAV21, TRAJ27)
CALRPGNAGKSTF

SEQ ID NO: 492360 - protein, 14 aa, Homo sapiens
  CDR3 for beta chain variable domain of TCR clone 246180 (TRBV7-6, TRBJ2-3)
CASSLGTVTDTQYF

SEQ ID NO: 492361 - protein, 14 aa, Homo sapiens
  CDR3 for alpha chain variable domain of TCR clone 246181 (TRAV35, TRAJ42)
CCVPFGGSQGNLIF

SEQ ID NO: 492362 - protein, 18 aa, Homo sapiens
  CDR3 for beta chain variable domain of TCR clone 246181 (TRBV13, TRBJ2-6)
CASSPMTSGGSGANVLTF

SEQ ID NO: 492363 - protein, 14 aa, Homo sapiens
  CDR3 for alpha chain variable domain of TCR clone 246182 (TRAV12-1, TRAJ22)
CLVTTSGSARQLTF

SEQ ID NO: 492364 - protein, 14 aa, Homo sapiens
  CDR3 for beta chain variable domain of TCR clone 246182 (TRBV27, TRBJ1-1)
CASSLLSGLSEAFF

SEQ ID NO: 492365 - protein, 17 aa, Homo sapiens
  CDR3 for alpha chain variable domain of TCR clone 246183 (TRAV29/DV5, TRAJ52)
CAASARAGGTSYGKLTF

SEQ ID NO: 492366 - protein, 15 aa, Homo sapiens
  CDR3 for beta chain variable domain of TCR clone 246183 (TRBV11-2, TRBJ2-1)
CASSPAGQSLNEQFF

SEQ ID NO: 492367 - protein, 14 aa, Homo sapiens
  CDR3 for alpha chain variable domain of TCR clone 246184 (TRAV26-1, TRAJ38)
CIADNPGNNRKLIW

SEQ ID NO: 492368 - protein, 13 aa, Homo sapiens
  CDR3 for beta chain variable domain of TCR clone 246184 (TRBV20-1, TRBJ1-1)
CSARGGGNTEAFF

SEQ ID NO: 492369 - protein, 13 aa, Homo sapiens
  CDR3 for alpha chain variable domain of TCR clone 246185 (TRAV20, TRAJ48)
CAVQGVGNENLTF

SEQ ID NO: 492370 - protein, 14 aa, Homo sapiens
  CDR3 for beta chain variable domain of TCR clone 246185 (TRBV27, TRBJ2-7)
CASSFRDGPYEQYF

SEQ ID NO: 492371 - protein, 12 aa, Homo sapiens
  CDR3 for alpha chain variable domain of TCR clone 246186 (TRAV12-1, TRAJ40)
CVVYSGTYKYIF

SEQ ID NO: 492372 - protein, 13 aa, Homo sapiens
  CDR3 for beta chain variable domain of TCR clone 246186 (TRBV2, TRBJ1-1)
CASRWTVNTEAVF

SEQ ID NO: 492373 - protein, 12 aa, Homo sapiens
  CDR3 for alpha chain variable domain of TCR clone 246187 (TRAV1-1, TRAJ8)
CAGGTGFQKLVF

SEQ ID NO: 492374 - protein, 15 aa, Homo sapiens
  CDR3 for beta chain variable domain of TCR clone 246187 (TRBV5-1, TRBJ2-1)
CASSPPRAPYNEQFF

SEQ ID NO: 492375 - protein, 14 aa, Homo sapiens
  CDR3 for alpha chain variable domain of TCR clone 246188 (TRAV12-3, TRAJ29)
CAMILLSGNTPLVF

SEQ ID NO: 492376 - protein, 12 aa, Homo sapiens
  CDR3 for beta chain variable domain of TCR clone 246188 (TRBV11-2, TRBJ2-2)
CASSLGGGELFF

SEQ ID NO: 492377 - protein, 13 aa, Homo sapiens
  CDR3 for alpha chain variable domain of TCR clone 246189 (TRAV12-1, TRAJ26)
CVVRRNYGQNFVF

SEQ ID NO: 492378 - protein, 13 aa, Homo sapiens
  CDR3 for beta chain variable domain of TCR clone 246189 (TRBV12-4, TRBJ1-1)
CARTPRMNTEAFF

SEQ ID NO: 492379 - protein, 17 aa, Homo sapiens
  CDR3 for alpha chain variable domain of TCR clone 246190 (TRAV12-2, TRAJ52)
CAVNPYAGGTSYGKLTF

SEQ ID NO: 492380 - protein, 12 aa, Homo sapiens
  CDR3 for beta chain variable domain of TCR clone 246190 (TRBV5-5, TRBJ2-5)
CASSLYGETQYF

SEQ ID NO: 492381 - protein, 15 aa, Homo sapiens
  CDR3 for alpha chain variable domain of TCR clone 246191 (TRAV26-1, TRAJ29)
FIVRVEGSGNTPLVF

SEQ ID NO: 492382 - protein, 15 aa, Homo sapiens
  CDR3 for beta chain variable domain of TCR clone 246191 (TRBV7-9, TRBJ1-5)
CASSQGHPPNQPQHF

SEQ ID NO: 492383 - protein, 18 aa, Homo sapiens
  CDR3 for alpha chain variable domain of TCR clone 246192 (TRAV21, TRAJ52)
CAVRPSPAGGTSYGKLTF

SEQ ID NO: 492384 - protein, 13 aa, Homo sapiens
  CDR3 for beta chain variable domain of TCR clone 246192 (TRBV19, TRBJ1-2)
CASSVPGQDGDTF

SEQ ID NO: 492385 - protein, 14 aa, Homo sapiens
  CDR3 for alpha chain variable domain of TCR clone 246193 (TRAV38-1, TRAJ45)
CTYYSGGGADGLTL

SEQ ID NO: 492386 - protein, 20 aa, Homo sapiens
  CDR3 for beta chain variable domain of TCR clone 246193 (TRBV28, TRBJ2-1)
CASTPIGRSPGLAGGNEQFF

SEQ ID NO: 492387 - protein, 14 aa, Homo sapiens
  CDR3 for alpha chain variable domain of TCR clone 246194 (TRAV23/DV6, TRAJ37)
CAASTSSNTGKLIF

SEQ ID NO: 492388 - protein, 12 aa, Homo sapiens
  CDR3 for beta chain variable domain of TCR clone 246194 (TRBV27, TRBJ2-2)
CASKRFTGELFF

SEQ ID NO: 492389 - protein, 14 aa, Homo sapiens
  CDR3 for alpha chain variable domain of TCR clone 246195 (TRAV23/DV6, TRAJ37)
CAASTSSNTGKLIF

SEQ ID NO: 492390 - protein, 15 aa, Homo sapiens
  CDR3 for beta chain variable domain of TCR clone 246195 (TRBV7-2, TRBJ2-1)
CASSLVGSSYNEQFF

SEQ ID NO: 492391 - protein, 17 aa, Homo sapiens
  CDR3 for alpha chain variable domain of TCR clone 246196 (TRAV3, TRAJ6)
CAVRDGPRAGGSYKPTF

SEQ ID NO: 492392 - protein, 14 aa, Homo sapiens
  CDR3 for beta chain variable domain of TCR clone 246196 (TRBV7-2, TRBJ2-7)
CASGPKTSFYEQYF

SEQ ID NO: 492393 - protein, 14 aa, Homo sapiens
  CDR3 for alpha chain variable domain of TCR clone 246197 (TRAV1-2, TRAJ8)
CAVREDTGFQKLVF

SEQ ID NO: 492394 - protein, 15 aa, Homo sapiens
  CDR3 for beta chain variable domain of TCR clone 246197 (TRBV5-7, TRBJ2-3)
CASSPRLATTDTQYF

SEQ ID NO: 492395 - protein, 15 aa, Homo sapiens
  CDR3 for alpha chain variable domain of TCR clone 246198 (TRAV23/DV6, TRAJ18)
CAARYRGSTLGRLNF

SEQ ID NO: 492396 - protein, 11 aa, Homo sapiens
  CDR3 for beta chain variable domain of TCR clone 246198 (TRBV29-1, TRBJ2-5)
CSEDRTGTQYF

SEQ ID NO: 492397 - protein, 16 aa, Homo sapiens
  CDR3 for alpha chain variable domain of TCR clone 246199 (TRAV30, TRAJ24)
WGTEIVDADSWGKFQF

SEQ ID NO: 492398 - protein, 13 aa, Homo sapiens
  CDR3 for beta chain variable domain of TCR clone 246199 (TRBV20-1, TRBJ2-7)
QCPELAGVGEQYF

SEQ ID NO: 492399 - protein, 13 aa, Homo sapiens
  CDR3 for alpha chain variable domain of TCR clone 246200 (TRAV22, TRAJ29)
CAVGGSGNTPLFF

SEQ ID NO: 492400 - protein, 18 aa, Homo sapiens
  CDR3 for beta chain variable domain of TCR clone 246200 (TRBV20-1, TRBJ2-6)
CSAETTPTHGSGANVLTF

SEQ ID NO: 492401 - protein, 14 aa, Homo sapiens
  CDR3 for alpha chain variable domain of TCR clone 246201 (TRAV9-2, TRAJ35)
CALRSIGFGNVLHC

SEQ ID NO: 492402 - protein, 12 aa, Homo sapiens
  CDR3 for beta chain variable domain of TCR clone 246201 (TRBV5-4, TRBJ2-5)
CASSSTRETQYF

SEQ ID NO: 492403 - protein, 15 aa, Homo sapiens
  CDR3 for alpha chain variable domain of TCR clone 246202 (TRAV13-1, TRAJ32)
CAASNVWWCYKQAHL

SEQ ID NO: 492404 - protein, 17 aa, Homo sapiens
  CDR3 for beta chain variable domain of TCR clone 246202 (TRBV15, TRBJ1-2)
CATSGREIDVVNYGYTF

SEQ ID NO: 492405 - protein, 13 aa, Homo sapiens
  CDR3 for alpha chain variable domain of TCR clone 246203 (TRAV35, TRAJ44)
CAGLSGTASKLTF

SEQ ID NO: 492406 - protein, 12 aa, Homo sapiens
  CDR3 for beta chain variable domain of TCR clone 246203 (TRBV7-9, TRBJ2-7)
CATRTDAYEQYF

SEQ ID NO: 492407 - protein, 16 aa, Homo sapiens
  CDR3 for alpha chain variable domain of TCR clone 246204 (TRAV26-1, TRAJ23)
CIVRPRFYNHGGKLIF

SEQ ID NO: 492408 - protein, 13 aa, Homo sapiens
  CDR3 for beta chain variable domain of TCR clone 246204 (TRBV20-1, TRBJ1-1)
CSARGGGNTEAFF

SEQ ID NO: 492409 - protein, 10 aa, Homo sapiens
  CDR3 for alpha chain variable domain of TCR clone 246205 (TRAV1-2, TRAJ20)
CVPNDCKLSF

SEQ ID NO: 492410 - protein, 14 aa, Homo sapiens
  CDR3 for beta chain variable domain of TCR clone 246205 (TRBV12-5, TRBJ2-5)
CASGSRTHLETQYF

SEQ ID NO: 492411 - protein, 13 aa, Homo sapiens
  CDR3 for alpha chain variable domain of TCR clone 246206 (TRAV8-4, TRAJ49)
CAVITNTGNQFYF

SEQ ID NO: 492412 - protein, 14 aa, Homo sapiens
  CDR3 for beta chain variable domain of TCR clone 246206 (TRBV19, TRBJ2-1)
CASKDPGLANGQFF

SEQ ID NO: 492413 - protein, 12 aa, Homo sapiens
  CDR3 for alpha chain variable domain of TCR clone 246207 (TRAV16, TRAJ10)
CSRTGGGNKLTF

SEQ ID NO: 492414 - protein, 13 aa, Homo sapiens
  CDR3 for beta chain variable domain of TCR clone 246207 (TRBV29-1, TRBJ2-1)
CSVEGGRVNEQFF

SEQ ID NO: 492415 - protein, 14 aa, Homo sapiens
  CDR3 for alpha chain variable domain of TCR clone 246208 (TRAV12-2, TRAJ45)
CAVNIGGGADGLTF

SEQ ID NO: 492416 - protein, 13 aa, Homo sapiens
  CDR3 for beta chain variable domain of TCR clone 246208 (TRBV7-2, TRBJ2-7)
CASSSPSGSEQYF

SEQ ID NO: 492417 - protein, 16 aa, Homo sapiens
  CDR3 for alpha chain variable domain of TCR clone 246209 (TRAV3, TRAJ23)
CAVKIGIYNQGGKLLF

SEQ ID NO: 492418 - protein, 17 aa, Homo sapiens
  CDR3 for beta chain variable domain of TCR clone 246209 (TRBV10-3, TRBJ2-6)
CAISESTAPSGANVLTF

SEQ ID NO: 492419 - protein, 15 aa, Homo sapiens
  CDR3 for alpha chain variable domain of TCR clone 246210 (TRAV12-3, TRAJ6)
FAMSATTGGSYIPTF

SEQ ID NO: 492420 - protein, 15 aa, Homo sapiens
  CDR3 for beta chain variable domain of TCR clone 246210 (TRBV20-1, TRBJ2-7)
CSARDRVSGMDEQYF

SEQ ID NO: 492421 - protein, 14 aa, Homo sapiens
  CDR3 for alpha chain variable domain of TCR clone 246211 (TRAV1-2, TRAJ16)
CAVNRFSDGQKLLF

SEQ ID NO: 492422 - protein, 16 aa, Homo sapiens
  CDR3 for beta chain variable domain of TCR clone 246211 (TRBV12-4, TRBJ2-1)
CASSAVGQGNGDEQFL

SEQ ID NO: 492423 - protein, 12 aa, Homo sapiens
  CDR3 for alpha chain variable domain of TCR clone 246212 (TRAV12-3, TRAJ17)
CATTLRGNKLTF

SEQ ID NO: 492424 - protein, 15 aa, Homo sapiens
  CDR3 for beta chain variable domain of TCR clone 246212 (TRBV20-1, TRBJ2-7)
CSARDRVSGMDEQYF

SEQ ID NO: 492425 - protein, 12 aa, Homo sapiens
  CDR3 for alpha chain variable domain of TCR clone 246213 (TRAV12-3, TRAJ17)
CAMTLTGNKLNF

SEQ ID NO: 492426 - protein, 14 aa, Homo sapiens
  CDR3 for beta chain variable domain of TCR clone 246213 (TRBV20-1, TRBJ2-1)
CSAQIGGSANEQFF

SEQ ID NO: 492427 - protein, 14 aa, Homo sapiens
  CDR3 for alpha chain variable domain of TCR clone 246214 (TRAV1-2, TRAJ16)
CAVNRFSDGQKLLF

SEQ ID NO: 492428 - protein, 14 aa, Homo sapiens
  CDR3 for beta chain variable domain of TCR clone 246214 (TRBV7-3, TRBJ1-1)
CASSRQGGDTEAFF

SEQ ID NO: 492429 - protein, 13 aa, Homo sapiens
  CDR3 for alpha chain variable domain of TCR clone 246215 (TRAV12-3, TRAJ31)
CAMSANNNARLMF

SEQ ID NO: 492430 - protein, 16 aa, Homo sapiens
  CDR3 for beta chain variable domain of TCR clone 246215 (TRBV20-1, TRBJ1-4)
CSAPGQGLLTNEKLFF

SEQ ID NO: 492431 - protein, 14 aa, Homo sapiens
  CDR3 for alpha chain variable domain of TCR clone 246216 (TRAV13-1, TRAJ22)
CAASYSGSARQLTF

SEQ ID NO: 492432 - protein, 16 aa, Homo sapiens
  CDR3 for beta chain variable domain of TCR clone 246216 (TRBV7-3, TRBJ2-3)
CASSLSGYRPEDTQYF

SEQ ID NO: 492433 - protein, 14 aa, Homo sapiens
  CDR3 for alpha chain variable domain of TCR clone 246217 (TRAV8-4, TRAJ34)
CAVSDPGDTDNLIF

SEQ ID NO: 492434 - protein, 13 aa, Homo sapiens
  CDR3 for beta chain variable domain of TCR clone 246217 (TRBV7-9, TRBJ2-5)
CASLSPGQETQYF

SEQ ID NO: 492435 - protein, 11 aa, Homo sapiens
  CDR3 for alpha chain variable domain of TCR clone 246218 (TRAV2, TRAJ13)
CASGGYQKVTF

SEQ ID NO: 492436 - protein, 18 aa, Homo sapiens
  CDR3 for beta chain variable domain of TCR clone 246218 (TRBV19, TRBJ2-6)
CASIGPTSGGSGANVMTF

SEQ ID NO: 492437 - protein, 13 aa, Homo sapiens
  CDR3 for alpha chain variable domain of TCR clone 246219 (TRAV17, TRAJ40)
CATRPSGTYKYIF

SEQ ID NO: 492438 - protein, 14 aa, Homo sapiens
  CDR3 for beta chain variable domain of TCR clone 246219 (TRBV7-6, TRBJ2-3)
CASSVAGGTDTQYF

SEQ ID NO: 492439 - protein, 15 aa, Homo sapiens
  CDR3 for alpha chain variable domain of TCR clone 246220 (TRAV13-1, TRAJ44)
CAASRGGGTASKLTF

SEQ ID NO: 492440 - protein, 20 aa, Homo sapiens
  CDR3 for beta chain variable domain of TCR clone 246220 (TRBV7-8, TRBJ2-2)
CASSHLFPGPTIHITRELFF

SEQ ID NO: 492441 - protein, 14 aa, Homo sapiens
  CDR3 for alpha chain variable domain of TCR clone 246221 (TRAV1-2, TRAJ8)
CAVREDTGFQKLVF

SEQ ID NO: 492442 - protein, 15 aa, Homo sapiens
  CDR3 for beta chain variable domain of TCR clone 246221 (TRBV7-9, TRBJ2-1)
CASSLGWGRANEQFF

SEQ ID NO: 492443 - protein, 14 aa, Homo sapiens
  CDR3 for alpha chain variable domain of TCR clone 246222 (TRAV17, TRAJ16)
CATADFSDGQKLLF

SEQ ID NO: 492444 - protein, 15 aa, Homo sapiens
  CDR3 for beta chain variable domain of TCR clone 246222 (TRBV6-6, TRBJ2-5)
CASSPGGGLEETQYF

SEQ ID NO: 492445 - protein, 14 aa, Homo sapiens
  CDR3 for alpha chain variable domain of TCR clone 246223 (TRAV12-3, TRAJ9)
CAMSPNTGGFKTIF

SEQ ID NO: 492446 - protein, 12 aa, Homo sapiens
  CDR3 for beta chain variable domain of TCR clone 246223 (TRBV11-2, TRBJ2-2)
CASSLPTGELFL

SEQ ID NO: 492447 - protein, 14 aa, Homo sapiens
  CDR3 for alpha chain variable domain of TCR clone 246224 (TRAV3, TRAJ36)
CAWRRLSGANNLFF

SEQ ID NO: 492448 - protein, 14 aa, Homo sapiens
  CDR3 for beta chain variable domain of TCR clone 246224 (TRBV25-1, TRBJ1-1)
CASTHLGGNTEAFF

SEQ ID NO: 492449 - protein, 14 aa, Homo sapiens
  CDR3 for alpha chain variable domain of TCR clone 246225 (TRAV21, TRAJ12)
CAVRNRDSSYKLIF

SEQ ID NO: 492450 - protein, 14 aa, Homo sapiens
  CDR3 for beta chain variable domain of TCR clone 246225 (TRBV7-6, TRBJ2-7)
CASSLTGTGNEQYF

SEQ ID NO: 492451 - protein, 15 aa, Homo sapiens
  CDR3 for alpha chain variable domain of TCR clone 246226 (TRAV21, TRAJ52)
CAVRGGGTSYGKLPF

SEQ ID NO: 492452 - protein, 13 aa, Homo sapiens
  CDR3 for beta chain variable domain of TCR clone 246226 (TRBV6-5, TRBJ2-5)
CATAPSPQETQYF

SEQ ID NO: 492453 - protein, 16 aa, Homo sapiens
  CDR3 for alpha chain variable domain of TCR clone 246227 (TRAV16, TRAJ4)
CALSRMFSGGYNKLIF

SEQ ID NO: 492454 - protein, 16 aa, Homo sapiens
  CDR3 for beta chain variable domain of TCR clone 246227 (TRBV24-1, TRBJ2-3)
CAANDPGTGATDTQYF

SEQ ID NO: 492455 - protein, 11 aa, Homo sapiens
  CDR3 for alpha chain variable domain of TCR clone 246228 (TRAV2, TRAJ33)
CAVESNYQLIW

SEQ ID NO: 492456 - protein, 16 aa, Homo sapiens
  CDR3 for beta chain variable domain of TCR clone 246228 (TRBV18, TRBJ2-2)
CASSSPRTANTGELFF

SEQ ID NO: 492457 - protein, 11 aa, Homo sapiens
  CDR3 for alpha chain variable domain of TCR clone 246229 (TRAV3, TRAJ21)
CAVGNFNEFYF

SEQ ID NO: 492458 - protein, 17 aa, Homo sapiens
  CDR3 for beta chain variable domain of TCR clone 246229 (TRBV24-1, TRBJ2-1)
CATSDVSTSGTYNEQFF

SEQ ID NO: 492459 - protein, 14 aa, Homo sapiens
  CDR3 for alpha chain variable domain of TCR clone 246230 (TRAV12-3, TRAJ15)
CAIIPPQAGTALIF

SEQ ID NO: 492460 - protein, 14 aa, Homo sapiens
  CDR3 for beta chain variable domain of TCR clone 246230 (TRBV20-1, TRBJ2-2)
CSARKRLETGELFF

SEQ ID NO: 492461 - protein, 12 aa, Homo sapiens
  CDR3 for alpha chain variable domain of TCR clone 246231 (TRAV36/DV7, TRAJ54)
CAVVRGAQKLVF

SEQ ID NO: 492462 - protein, 14 aa, Homo sapiens
  CDR3 for beta chain variable domain of TCR clone 246231 (TRBV7-8, TRBJ2-5)
CASSATGGQETQYF

SEQ ID NO: 492463 - protein, 11 aa, Homo sapiens
  CDR3 for alpha chain variable domain of TCR clone 246232 (TRAV12-3, TRAJ43)
CAMSVSNDLRF

SEQ ID NO: 492464 - protein, 20 aa, Homo sapiens
  CDR3 for beta chain variable domain of TCR clone 246232 (TRBV28, TRBJ2-1)
CASTPIGRSPGLAGGNEQFF

SEQ ID NO: 492465 - protein, 16 aa, Homo sapiens
  CDR3 for alpha chain variable domain of TCR clone 246233 (TRAV13-1, TRAJ48)
CAASIFGNFGNETLTF

SEQ ID NO: 492466 - protein, 12 aa, Homo sapiens
  CDR3 for beta chain variable domain of TCR clone 246233 (TRBV14, TRBJ2-4)
CASSNLKSIQYF

SEQ ID NO: 492467 - protein, 12 aa, Homo sapiens
  CDR3 for alpha chain variable domain of TCR clone 246234 (TRAV12-3, TRAJ40)
CAMSSGTYKYIF

SEQ ID NO: 492468 - protein, 15 aa, Homo sapiens
  CDR3 for beta chain variable domain of TCR clone 246234 (TRBV7-3, TRBJ2-2)
CSSSETGQGTGELFF

SEQ ID NO: 492469 - protein, 14 aa, Homo sapiens
  CDR3 for alpha chain variable domain of TCR clone 246235 (TRAV12-2, TRAJ40)
CAVKIPSGTYQYIF

SEQ ID NO: 492470 - protein, 17 aa, Homo sapiens
  CDR3 for beta chain variable domain of TCR clone 246235 (TRBV20-1, TRBJ2-1)
CSAFSGTSGSLYNEQFF

SEQ ID NO: 492471 - protein, 14 aa, Homo sapiens
  CDR3 for alpha chain variable domain of TCR clone 246236 (TRAV17, TRAJ56)
CATVPAGANSKLTF

SEQ ID NO: 492472 - protein, 13 aa, Homo sapiens
  CDR3 for beta chain variable domain of TCR clone 246236 (TRBV20-1, TRBJ1-1)
CSAGTVGNAEAFF

SEQ ID NO: 492473 - protein, 12 aa, Homo sapiens
  CDR3 for alpha chain variable domain of TCR clone 246237 (TRAV21, TRAJ49)
CAVRSTGNQFYF

SEQ ID NO: 492474 - protein, 12 aa, Homo sapiens
  CDR3 for beta chain variable domain of TCR clone 246237 (TRBV7-9, TRBJ2-7)
CATRTDAYEQYF

SEQ ID NO: 492475 - protein, 14 aa, Homo sapiens
  CDR3 for alpha chain variable domain of TCR clone 246238 (TRAV38-1, TRAJ45)
CAYYSGGGADGLTF

SEQ ID NO: 492476 - protein, 15 aa, Homo sapiens
  CDR3 for beta chain variable domain of TCR clone 246238 (TRBV15, TRGJ1)
CATSRDMGSYEKLFF

SEQ ID NO: 492477 - protein, 14 aa, Homo sapiens
  CDR3 for alpha chain variable domain of TCR clone 246239 (TRAV17, TRAJ39)
CATDPVSAGNMLTF

SEQ ID NO: 492478 - protein, 15 aa, Homo sapiens
  CDR3 for beta chain variable domain of TCR clone 246239 (TRBV13, TRBJ1-5)
CASSFGQGGVQPQHF

SEQ ID NO: 492479 - protein, 13 aa, Homo sapiens
  CDR3 for alpha chain variable domain of TCR clone 246240 (TRAV27, TRAJ24)
CAGDRDSWGKLQF

SEQ ID NO: 492480 - protein, 16 aa, Homo sapiens
  CDR3 for beta chain variable domain of TCR clone 246240 (TRBV20-1, TRBJ1-4)
CSAPGQGLLTNEKLFF

SEQ ID NO: 492481 - protein, 16 aa, Homo sapiens
  CDR3 for alpha chain variable domain of TCR clone 246241 (TRAV23/DV6, TRAJ9)
CAASIGGNPGGFKTIF

SEQ ID NO: 492482 - protein, 14 aa, Homo sapiens
  CDR3 for beta chain variable domain of TCR clone 246241 (TRBV9, TRBJ2-7)
CASSVGVGSYEQYF

SEQ ID NO: 492483 - protein, 14 aa, Homo sapiens
  CDR3 for alpha chain variable domain of TCR clone 246242 (TRAV16, TRAJ15)
CALSFNQAGTALIF

SEQ ID NO: 492484 - protein, 12 aa, Homo sapiens
  CDR3 for beta chain variable domain of TCR clone 246242 (TRBV12-4, TRBJ1-1)
CASSLVDTEAFF

SEQ ID NO: 492485 - protein, 15 aa, Homo sapiens
  CDR3 for alpha chain variable domain of TCR clone 246243 (TRAV30, TRAJ32)
CGTEILGGATNKLIF

SEQ ID NO: 492486 - protein, 15 aa, Homo sapiens
  CDR3 for beta chain variable domain of TCR clone 246243 (TRBV20-1, TRBJ2-7)
CSARDRVSGMDEQYF

SEQ ID NO: 492487 - protein, 14 aa, Homo sapiens
  CDR3 for alpha chain variable domain of TCR clone 246244 (TRAV8-1, TRAJ5)
CAVSMDTGRRALTF

SEQ ID NO: 492488 - protein, 12 aa, Homo sapiens
  CDR3 for beta chain variable domain of TCR clone 246244 (TRBV7-9, TRBJ2-7)
CASSIKREEQYF

SEQ ID NO: 492489 - protein, 15 aa, Homo sapiens
  CDR3 for alpha chain variable domain of TCR clone 246245 (TRAV1-2, TRAJ9)
CAVRDDGTGGFKTIF

SEQ ID NO: 492490 - protein, 15 aa, Homo sapiens
  CDR3 for beta chain variable domain of TCR clone 246245 (TRBV4-1, TRBJ1-4)
CASSDTGGTNEKLFF

SEQ ID NO: 492491 - protein, 12 aa, Homo sapiens
  CDR3 for alpha chain variable domain of TCR clone 246246 (TRAV3, TRAJ31)
CAVRDGNARLMF

SEQ ID NO: 492492 - protein, 18 aa, Homo sapiens
  CDR3 for beta chain variable domain of TCR clone 246246 (TRBV7-2, TRBJ2-3)
CASGLKREGSGITDTQHF

SEQ ID NO: 492493 - protein, 13 aa, Homo sapiens
  CDR3 for alpha chain variable domain of TCR clone 246247 (TRAV13-1, TRAJ11)
CAAVLAGYSTLTF

SEQ ID NO: 492494 - protein, 17 aa, Homo sapiens
  CDR3 for beta chain variable domain of TCR clone 246247 (TRBV7-9, TRBJ2-7)
CASSPTLSWGPDYEQYF

SEQ ID NO: 492495 - protein, 15 aa, Homo sapiens
  CDR3 for alpha chain variable domain of TCR clone 246248 (TRAV26-1, TRAJ29)
CIVRVEGSGNKPLVF

SEQ ID NO: 492496 - protein, 15 aa, Homo sapiens
  CDR3 for beta chain variable domain of TCR clone 246248 (TRBV7-9, TRBJ1-5)
CASNQGHQPNQPQHF

SEQ ID NO: 492497 - protein, 12 aa, Homo sapiens
  CDR3 for alpha chain variable domain of TCR clone 246249 (TRAV13-1, TRAJ21)
CAAKEGFNKFYF

SEQ ID NO: 492498 - protein, 15 aa, Homo sapiens
  CDR3 for beta chain variable domain of TCR clone 246249 (TRBV20-1, TRBJ2-7)
CSARVPAAYFYEQYF

SEQ ID NO: 492499 - protein, 11 aa, Homo sapiens
  CDR3 for alpha chain variable domain of TCR clone 246250 (TRAV35, TRAJ22)
CAGPGVGQLTF

SEQ ID NO: 492500 - protein, 15 aa, Homo sapiens
  CDR3 for beta chain variable domain of TCR clone 246250 (TRBV11-2, TRBJ1-6)
CASTLRGTGNSPRHF

SEQ ID NO: 492501 - protein, 12 aa, Homo sapiens
  CDR3 for alpha chain variable domain of TCR clone 246251 (TRAV23/DV6, TRAJ32)
CSMPGATKKLIF

SEQ ID NO: 492502 - protein, 17 aa, Homo sapiens
  CDR3 for beta chain variable domain of TCR clone 246251 (TRBV13, TRBJ2-3)
CASSSLGTSGLTDTQYF

SEQ ID NO: 492503 - protein, 15 aa, Homo sapiens
  CDR3 for alpha chain variable domain of TCR clone 246252 (TRAV10, TRAJ6)
CVVRPRTGGSYIPTF

SEQ ID NO: 492504 - protein, 14 aa, Homo sapiens
  CDR3 for beta chain variable domain of TCR clone 246252 (TRBV20-1, TRBJ2-4)
CSASGGVGENSQYF

SEQ ID NO: 492505 - protein, 15 aa, Homo sapiens
  CDR3 for alpha chain variable domain of TCR clone 246253 (TRAV26-1, TRAJ29)
CIVRVEGSGNTPLVF

SEQ ID NO: 492506 - protein, 18 aa, Homo sapiens
  CDR3 for beta chain variable domain of TCR clone 246253 (TRBV4-1, TRBJ1-5)
CASSQDPRGQGLNQPQHF

SEQ ID NO: 492507 - protein, 15 aa, Homo sapiens
  CDR3 for alpha chain variable domain of TCR clone 246254 (TRAV3, TRAJ5)
CAVRDLSTGRRALTF

SEQ ID NO: 492508 - protein, 16 aa, Homo sapiens
  CDR3 for beta chain variable domain of TCR clone 246254 (TRBV20-1, TRBJ1-4)
CSAPGQGLLTNEKLFF

SEQ ID NO: 492509 - protein, 13 aa, Homo sapiens
  CDR3 for alpha chain variable domain of TCR clone 246255 (TRAV20, TRAJ21)
CAVEGYNFNKFYF

SEQ ID NO: 492510 - protein, 14 aa, Homo sapiens
  CDR3 for beta chain variable domain of TCR clone 246255 (TRBV3-1, TRBJ2-5)
CASSQGPYQETQYF

SEQ ID NO: 492511 - protein, 12 aa, Homo sapiens
  CDR3 for alpha chain variable domain of TCR clone 246256 (TRAV26-2, TRAJ48)
CILRKGNEKLTF

SEQ ID NO: 492512 - protein, 14 aa, Homo sapiens
  CDR3 for beta chain variable domain of TCR clone 246256 (TRBV28, TRBJ2-7)
CASSTLRGRFAQYF

SEQ ID NO: 492513 - protein, 16 aa, Homo sapiens
  CDR3 for alpha chain variable domain of TCR clone 246257 (TRAV16, TRAJ21)
CACGWATTSTNFTLDL

SEQ ID NO: 492514 - protein, 15 aa, Homo sapiens
  CDR3 for beta chain variable domain of TCR clone 246257 (TRBV19, TRBJ2-1)
CASSIQATSYNEKFF

SEQ ID NO: 492515 - protein, 15 aa, Homo sapiens
  CDR3 for alpha chain variable domain of TCR clone 246258 (TRAV23/DV6, TRAJ27)
CAASKPMQANQHLVM

SEQ ID NO: 492516 - protein, 14 aa, Homo sapiens
  CDR3 for beta chain variable domain of TCR clone 246258 (TRBV5-4, TRBJ1-1)
CASSLDSRRDEAFF

SEQ ID NO: 492517 - protein, 15 aa, Homo sapiens
  CDR3 for alpha chain variable domain of TCR clone 246259 (TRAV4, TRAJ35)
CLVETRGALGMCCIA

SEQ ID NO: 492518 - protein, 13 aa, Homo sapiens
  CDR3 for beta chain variable domain of TCR clone 246259 (TRBV14, TRBJ1-1)
CASSQEAGTEAFF

SEQ ID NO: 492519 - protein, 11 aa, Homo sapiens
  CDR3 for alpha chain variable domain of TCR clone 246260 (TRAV17, TRAJ43)
CATPRSDDMRF

SEQ ID NO: 492520 - protein, 15 aa, Homo sapiens
  CDR3 for beta chain variable domain of TCR clone 246260 (TRBV11-2, TRBJ2-1)
CASSLGTSGLNEQFF

SEQ ID NO: 492521 - protein, 16 aa, Homo sapiens
  CDR3 for alpha chain variable domain of TCR clone 246261 (TRAV12-2, TRAJ32)
CAVNLGQGVATNKLIF

SEQ ID NO: 492522 - protein, 13 aa, Homo sapiens
  CDR3 for beta chain variable domain of TCR clone 246261 (TRBV9, TRBJ2-2)
CASSPRPAGELFF

SEQ ID NO: 492523 - protein, 15 aa, Homo sapiens
  CDR3 for alpha chain variable domain of TCR clone 246262 (TRAV12-2, TRAJ53)
CAVNGGGGSNYKLTF

SEQ ID NO: 492524 - protein, 17 aa, Homo sapiens
  CDR3 for beta chain variable domain of TCR clone 246262 (TRBV5-1, TRBJ2-5)
CASSLLGLAANQETQYF

SEQ ID NO: 492525 - protein, 14 aa, Homo sapiens
  CDR3 for alpha chain variable domain of TCR clone 246263 (TRAV2, TRAJ9)
CAVGDRSGGFKTIF

SEQ ID NO: 492526 - protein, 15 aa, Homo sapiens
  CDR3 for beta chain variable domain of TCR clone 246263 (TRBV28, TRBJ1-3)
CASSMGWASGNTIYF

SEQ ID NO: 492527 - protein, 16 aa, Homo sapiens
  CDR3 for alpha chain variable domain of TCR clone 246264 (TRAV1-2, TRAJ16)
CSVNRFSDGRSCSLQG

SEQ ID NO: 492528 - protein, 15 aa, Homo sapiens
  CDR3 for beta chain variable domain of TCR clone 246264 (TRBV9, TRBJ1-6)
CASSVAGTGDSPLHF

SEQ ID NO: 492529 - protein, 11 aa, Homo sapiens
  CDR3 for alpha chain variable domain of TCR clone 246265 (TRAV1-2, TRAJ40)
CAVPGTYKYIF

SEQ ID NO: 492530 - protein, 16 aa, Homo sapiens
  CDR3 for beta chain variable domain of TCR clone 246265 (TRBV29-1, TRBJ2-7)
CSVEGVGTSGCYEQYF

SEQ ID NO: 492531 - protein, 15 aa, Homo sapiens
  CDR3 for alpha chain variable domain of TCR clone 246266 (TRAV3, TRAJ22)
CAVRDRGGSARQLTF

SEQ ID NO: 492532 - protein, 13 aa, Homo sapiens
  CDR3 for beta chain variable domain of TCR clone 246266 (TRBV7-2, TRBJ2-7)
CASRTSFPWEQYF

SEQ ID NO: 492533 - protein, 13 aa, Homo sapiens
  CDR3 for alpha chain variable domain of TCR clone 246267 (TRAV8-6, TRAJ49)
CAVITNTGNQFYF

SEQ ID NO: 492534 - protein, 14 aa, Homo sapiens
  CDR3 for beta chain variable domain of TCR clone 246267 (TRBV5-1, TRBJ2-7)
CASSRGESFYEQYF

SEQ ID NO: 492535 - protein, 20 aa, Homo sapiens
  CDR3 for alpha chain variable domain of TCR clone 246268 (TRAV27, TRAJ41)
CAVRTQIPDIQNPDPALYQL

SEQ ID NO: 492536 - protein, 16 aa, Homo sapiens
  CDR3 for beta chain variable domain of TCR clone 246268 (TRBV5-1, TRBJ2-3)
CASSLGLAVYTDTQYF

SEQ ID NO: 492537 - protein, 13 aa, Homo sapiens
  CDR3 for alpha chain variable domain of TCR clone 246269 (TRAV8-3, TRAJ36)
CAVGATGANNLFF

SEQ ID NO: 492538 - protein, 15 aa, Homo sapiens
  CDR3 for beta chain variable domain of TCR clone 246269 (TRBV5-1, TRBJ2-5)
CASSLGTGEQETQYF

SEQ ID NO: 492539 - protein, 15 aa, Homo sapiens
  CDR3 for alpha chain variable domain of TCR clone 246270 (TRAV1-2, TRAJ28)
CAVPYSGAGSYQLTF

SEQ ID NO: 492540 - protein, 13 aa, Homo sapiens
  CDR3 for beta chain variable domain of TCR clone 246270 (TRBV4-2, TRBJ1-1)
CASSQAGNTEAFF

SEQ ID NO: 492541 - protein, 16 aa, Homo sapiens
  CDR3 for alpha chain variable domain of TCR clone 246271 (TRAV30, TRAJ24)
CGTEIVDADSWGKFQF

SEQ ID NO: 492542 - protein, 14 aa, Homo sapiens
  CDR3 for beta chain variable domain of TCR clone 246271 (TRBV27, TRBJ2-2)
CASSLGAATGELFF

SEQ ID NO: 492543 - protein, 12 aa, Homo sapiens
  CDR3 for alpha chain variable domain of TCR clone 246272 (TRAV38-1, TRAJ34)
CAFMKEPDKLIF

SEQ ID NO: 492544 - protein, 17 aa, Homo sapiens
  CDR3 for beta chain variable domain of TCR clone 246272 (TRBV7-8, TRBJ2-6)
CASSAGTGGAGANVLTF

SEQ ID NO: 492545 - protein, 19 aa, Homo sapiens
  CDR3 for alpha chain variable domain of TCR clone 246273 (TRAV38-1, TRAJ53)
CAFMKHGLGSGGSNYKLTF

SEQ ID NO: 492546 - protein, 13 aa, Homo sapiens
  CDR3 for beta chain variable domain of TCR clone 246273 (TRBV19, TRBJ2-7)
CASSPRQSYEQYF

SEQ ID NO: 492547 - protein, 23 aa, Homo sapiens
  CDR3 for alpha chain variable domain of TCR clone 246274 (TRAV8-3, TRAJ38)
CAVGASNAGNNHIQNPDPAVYQL

SEQ ID NO: 492548 - protein, 15 aa, Homo sapiens
  CDR3 for beta chain variable domain of TCR clone 246274 (TRBV11-3, TRBJ1-3)
CASSLYGPSGNTIYF

SEQ ID NO: 492549 - protein, 16 aa, Homo sapiens
  CDR3 for alpha chain variable domain of TCR clone 246275 (TRAV12-2, TRAJ50)
CAVGTATKASYDKVIF

SEQ ID NO: 492550 - protein, 12 aa, Homo sapiens
  CDR3 for beta chain variable domain of TCR clone 246275 (TRBV12-4, TRBJ1-5)
CASSLGRQPQHF

SEQ ID NO: 492551 - protein, 16 aa, Homo sapiens
  CDR3 for alpha chain variable domain of TCR clone 246276 (TRAV38-1, TRAJ32)
CAFMKGGGGATNKLIV

SEQ ID NO: 492552 - protein, 13 aa, Homo sapiens
  CDR3 for beta chain variable domain of TCR clone 246276 (TRBV20-1, TRBJ2-5)
CSAREAFQETQYF

SEQ ID NO: 492553 - protein, 11 aa, Homo sapiens
  CDR3 for alpha chain variable domain of TCR clone 246277 (TRAV13-1, TRAJ39)
CASHAGNMLTC

SEQ ID NO: 492554 - protein, 14 aa, Homo sapiens
  CDR3 for beta chain variable domain of TCR clone 246277 (TRBV11-2, TRBJ1-5)
CASSLDRGRQPQHF

SEQ ID NO: 492555 - protein, 14 aa, Homo sapiens
  CDR3 for alpha chain variable domain of TCR clone 246278 (TRAV12-3, TRAJ10)
SHLPLTGGGNKLTF

SEQ ID NO: 492556 - protein, 11 aa, Homo sapiens
  CDR3 for beta chain variable domain of TCR clone 246278 (TRBV12-4, TRBJ2-7)
CATPEKGEQYF

SEQ ID NO: 492557 - protein, 15 aa, Homo sapiens
  CDR3 for alpha chain variable domain of TCR clone 246279 (TRAV17, TRAJ4)
CATGTWSGGYNKLIV

SEQ ID NO: 492558 - protein, 15 aa, Homo sapiens
  CDR3 for beta chain variable domain of TCR clone 246279 (TRBV7-2, TRBJ2-7)
CASSWGQGAIYEQYF

SEQ ID NO: 492559 - protein, 15 aa, Homo sapiens
  CDR3 for alpha chain variable domain of TCR clone 246280 (TRAV12-2, TRAJ13)
CRESLGSGGYQKVTF

SEQ ID NO: 492560 - protein, 15 aa, Homo sapiens
  CDR3 for beta chain variable domain of TCR clone 246280 (TRBV6-5, TRBJ2-1)
CASRRAQLRYNEQFF

SEQ ID NO: 492561 - protein, 14 aa, Homo sapiens
  CDR3 for alpha chain variable domain of TCR clone 246281 (TRAV12-2, TRAJ13)
CAVKRTGGYQKVTF

SEQ ID NO: 492562 - protein, 16 aa, Homo sapiens
  CDR3 for beta chain variable domain of TCR clone 246281 (TRBV4-2, TRBJ2-4)
CASSQELRRAKNIQYF

SEQ ID NO: 492563 - protein, 18 aa, Homo sapiens
  CDR3 for alpha chain variable domain of TCR clone 246282 (TRAV21, TRAJ52)
CAVRPSPAGGTSYGQLTF

SEQ ID NO: 492564 - protein, 15 aa, Homo sapiens
  CDR3 for beta chain variable domain of TCR clone 246282 (TRBV7-9, TRBJ2-7)
CASSSSGLAVYEQYF

SEQ ID NO: 492565 - protein, 18 aa, Homo sapiens
  CDR3 for alpha chain variable domain of TCR clone 246283 (TRAV26-2, TRAJ54)
CILRDVEVGIQGAQKLVF

SEQ ID NO: 492566 - protein, 16 aa, Homo sapiens
  CDR3 for beta chain variable domain of TCR clone 246283 (TRBV2, TRBJ2-3)
CQHRGAPRRWTDTQYF

SEQ ID NO: 492567 - protein, 12 aa, Homo sapiens
  CDR3 for alpha chain variable domain of TCR clone 246284 (TRAV1-1, TRAJ8)
CAGGTGFQKLVF

SEQ ID NO: 492568 - protein, 13 aa, Homo sapiens
  CDR3 for beta chain variable domain of TCR clone 246284 (TRBV7-9, TRBJ1-2)
CASSLRQNYGYTF

SEQ ID NO: 492569 - protein, 15 aa, Homo sapiens
  CDR3 for alpha chain variable domain of TCR clone 246285 (TRAV13-1, TRAJ17)
CAASIERAAGNKITF

SEQ ID NO: 492570 - protein, 14 aa, Homo sapiens
  CDR3 for beta chain variable domain of TCR clone 246285 (TRBV7-9, TRBJ2-1)
CASSPRDSLYEQFF

SEQ ID NO: 492571 - protein, 13 aa, Homo sapiens
  CDR3 for alpha chain variable domain of TCR clone 246286 (TRAV26-1, TRAJ33)
CIVRVEGNYQLFW

SEQ ID NO: 492572 - protein, 16 aa, Homo sapiens
  CDR3 for beta chain variable domain of TCR clone 246286 (TRBV15, TRBJ2-7)
CATSRDRGRRRGEQYF

SEQ ID NO: 492573 - protein, 15 aa, Homo sapiens
  CDR3 for alpha chain variable domain of TCR clone 246287 (TRAV21, TRAJ38)
FAVRQDAGNNRKLIW

SEQ ID NO: 492574 - protein, 16 aa, Homo sapiens
  CDR3 for beta chain variable domain of TCR clone 246287 (TRBV4-2, TRBJ1-1)
CASRPLDGGGDTEAFF

SEQ ID NO: 492575 - protein, 11 aa, Homo sapiens
  CDR3 for alpha chain variable domain of TCR clone 246288 (TRAV21, TRAJ41)
CAVRSGYALNF

SEQ ID NO: 492576 - protein, 13 aa, Homo sapiens
  CDR3 for beta chain variable domain of TCR clone 246288 (TRBV7-9, TRBJ1-2)
CASSLKQNCGYTF

SEQ ID NO: 492577 - protein, 14 aa, Homo sapiens
  CDR3 for alpha chain variable domain of TCR clone 246289 (TRAV1-1, TRAJ28)
CAAPSGAGSYQLTF

SEQ ID NO: 492578 - protein, 14 aa, Homo sapiens
  CDR3 for beta chain variable domain of TCR clone 246289 (TRBV6-6, TRBJ2-7)
CASSDSGAGYEQYF

SEQ ID NO: 492579 - protein, 13 aa, Homo sapiens
  CDR3 for alpha chain variable domain of TCR clone 246290 (TRAV23/DV6, TRAJ20)
CATGGFHDYKLSF

SEQ ID NO: 492580 - protein, 14 aa, Homo sapiens
  CDR3 for beta chain variable domain of TCR clone 246290 (TRBV3-1, TRBJ2-7)
CASSQSGAHYEQYF

SEQ ID NO: 492581 - protein, 14 aa, Homo sapiens
  CDR3 for alpha chain variable domain of TCR clone 246291 (TRAV8-2, TRAJ11)
CVVSEKPGYSTLTF

SEQ ID NO: 492582 - protein, 16 aa, Homo sapiens
  CDR3 for beta chain variable domain of TCR clone 246291 (TRBV28, TRBJ2-1)
CARSSPEYPRDNEQFF

SEQ ID NO: 492583 - protein, 14 aa, Homo sapiens
  CDR3 for alpha chain variable domain of TCR clone 246292 (TRAV26-1, TRAJ34)
CIVRVAYKTDKLIF

SEQ ID NO: 492584 - protein, 15 aa, Homo sapiens
  CDR3 for beta chain variable domain of TCR clone 246292 (TRBV7-9, TRBJ1-4)
CASSRTGGFNEKLFF

SEQ ID NO: 492585 - protein, 15 aa, Homo sapiens
  CDR3 for alpha chain variable domain of TCR clone 246293 (TRAV13-1, TRAJ52)
CAASSPSTSYGKLTF

SEQ ID NO: 492586 - protein, 10 aa, Homo sapiens
  CDR3 for beta chain variable domain of TCR clone 246293 (TRBV23-1, TRBJ2-1)
KWSSYNEQFF

SEQ ID NO: 492587 - protein, 14 aa, Homo sapiens
  CDR3 for alpha chain variable domain of TCR clone 246294 (TRAV26-1, TRAJ38)
CIADNAGNNRKLIW

SEQ ID NO: 492588 - protein, 15 aa, Homo sapiens
  CDR3 for beta chain variable domain of TCR clone 246294 (TRBV11-2, TRBJ2-1)
CASSLGPDSYNEQFV

SEQ ID NO: 492589 - protein, 15 aa, Homo sapiens
  CDR3 for alpha chain variable domain of TCR clone 246295 (TRAV3, TRAJ17)
CAVRDTGAAGNKLTL

SEQ ID NO: 492590 - protein, 17 aa, Homo sapiens
  CDR3 for beta chain variable domain of TCR clone 246295 (TRBV11-2, TRBJ2-1)
CASSLYPPGVEYNEQFF

SEQ ID NO: 492591 - protein, 14 aa, Homo sapiens
  CDR3 for alpha chain variable domain of TCR clone 246296 (TRAV12-2, TRAJ17)
CAVLFKAAGNKLTF

SEQ ID NO: 492592 - protein, 12 aa, Homo sapiens
  CDR3 for beta chain variable domain of TCR clone 246296 (TRBV7-2, TRBJ1-5)
CASSLWSQPQHF

SEQ ID NO: 492593 - protein, 14 aa, Homo sapiens
  CDR3 for alpha chain variable domain of TCR clone 246297 (TRAV1-2, TRAJ8)
CAVREYTGFQKLVF

SEQ ID NO: 492594 - protein, 16 aa, Homo sapiens
  CDR3 for beta chain variable domain of TCR clone 246297 (TRBV15, TRBJ2-7)
CATGRDGGIPSYEQYF

SEQ ID NO: 492595 - protein, 14 aa, Homo sapiens
  CDR3 for alpha chain variable domain of TCR clone 246298 (TRAV13-2, TRAJ15)
CAENPSQAGTALIF

SEQ ID NO: 492596 - protein, 16 aa, Homo sapiens
  CDR3 for beta chain variable domain of TCR clone 246298 (TRBV12-4, TRBJ1-2)
CASSPTATGKTRGYTF

SEQ ID NO: 492597 - protein, 16 aa, Homo sapiens
  CDR3 for alpha chain variable domain of TCR clone 246299 (TRAV3, TRAJ10)
CAVRDMRAGGGNKLTF

SEQ ID NO: 492598 - protein, 11 aa, Homo sapiens
  CDR3 for beta chain variable domain of TCR clone 246299 (TRBV29-1, TRBJ2-5)
CSEDRTRNQYF

SEQ ID NO: 492599 - protein, 12 aa, Homo sapiens
  CDR3 for alpha chain variable domain of TCR clone 246300 (TRAV3, TRAJ20)
CAVRDPDYKLSF

SEQ ID NO: 492600 - protein, 15 aa, Homo sapiens
  CDR3 for beta chain variable domain of TCR clone 246300 (TRBV7-9, TRBJ1-4)
CASSRTGGFNEKLFF

SEQ ID NO: 492601 - protein, 13 aa, Homo sapiens
  CDR3 for alpha chain variable domain of TCR clone 246301 (TRAV21, TRAJ27)
CAARPGNAGKSTF

SEQ ID NO: 492602 - protein, 15 aa, Homo sapiens
  CDR3 for beta chain variable domain of TCR clone 246301 (TRBV12-4, TRBJ2-5)
CASSPLTGLQETQYF

SEQ ID NO: 492603 - protein, 16 aa, Homo sapiens
  CDR3 for alpha chain variable domain of TCR clone 246302 (TRAV23/DV6, TRAJ9)
CAASIGGNTGGFKTIF

SEQ ID NO: 492604 - protein, 14 aa, Homo sapiens
  CDR3 for beta chain variable domain of TCR clone 246302 (TRBV7-2, TRBJ2-7)
CASSPKTGFYEQYF

SEQ ID NO: 492605 - protein, 12 aa, Homo sapiens
  CDR3 for alpha chain variable domain of TCR clone 246303 (TRAV13-1, TRAJ15)
CAASQAGTAMIF

SEQ ID NO: 492606 - protein, 13 aa, Homo sapiens
  CDR3 for beta chain variable domain of TCR clone 246303 (TRBV10-3, TRBJ1-2)
CAISERDSYGYTF

SEQ ID NO: 492607 - protein, 13 aa, Homo sapiens
  CDR3 for alpha chain variable domain of TCR clone 246304 (TRAV27, TRAJ6)
CAGGTRGSYIPTF

SEQ ID NO: 492608 - protein, 13 aa, Homo sapiens
  CDR3 for beta chain variable domain of TCR clone 246304 (TRBV4-1, TRBJ2-5)
CARSLTRGETQYF

SEQ ID NO: 492609 - protein, 15 aa, Homo sapiens
  CDR3 for alpha chain variable domain of TCR clone 246305 (TRAV21, TRAJ53)
CATLNSGGSNYKLTF

SEQ ID NO: 492610 - protein, 15 aa, Homo sapiens
  CDR3 for beta chain variable domain of TCR clone 246305 (TRBV10-3, TRBJ2-3)
CAISLTSGGTDTQYF

SEQ ID NO: 492611 - protein, 13 aa, Homo sapiens
  CDR3 for alpha chain variable domain of TCR clone 246306 (TRAV30, TRAJ24)
CGTVTDSWGKLQF

SEQ ID NO: 492612 - protein, 14 aa, Homo sapiens
  CDR3 for beta chain variable domain of TCR clone 246306 (TRBV6-3, TRBJ2-2)
RASTDTPDTGELFF

SEQ ID NO: 492613 - protein, 14 aa, Homo sapiens
  CDR3 for alpha chain variable domain of TCR clone 246307 (TRAV8-1, TRAJ15)
CAVNGQQAGTALIL

SEQ ID NO: 492614 - protein, 16 aa, Homo sapiens
  CDR3 for beta chain variable domain of TCR clone 246307 (TRBV11-3, TRBJ2-5)
CASSSVVAGSTETQYF

SEQ ID NO: 492615 - protein, 14 aa, Homo sapiens
  CDR3 for alpha chain variable domain of TCR clone 246308 (TRAV17, TRAJ15)
CATALNQAGTALIF

SEQ ID NO: 492616 - protein, 16 aa, Homo sapiens
  CDR3 for beta chain variable domain of TCR clone 246308 (TRBV13, TRBJ2-7)
CASSSRESGRTYEQYF

SEQ ID NO: 492617 - protein, 17 aa, Homo sapiens
  CDR3 for alpha chain variable domain of TCR clone 246309 (TRAV3, TRAJ6)
CAVRDGPRAGGSYIPTL

SEQ ID NO: 492618 - protein, 14 aa, Homo sapiens
  CDR3 for beta chain variable domain of TCR clone 246309 (TRBV7-2, TRBJ2-7)
CTSSPKTSFYEQYF

SEQ ID NO: 492619 - protein, 14 aa, Homo sapiens
  CDR3 for alpha chain variable domain of TCR clone 246310 (TRAV1-2, TRAJ16)
CAVNRFSYGQKLLF

SEQ ID NO: 492620 - protein, 14 aa, Homo sapiens
  CDR3 for beta chain variable domain of TCR clone 246310 (TRBV7-3, TRBJ2-2)
CASSSGGYTGELFF

SEQ ID NO: 492621 - protein, 12 aa, Homo sapiens
  CDR3 for alpha chain variable domain of TCR clone 246311 (TRAV16, TRAJ9)
CALMAGGFKTIF

SEQ ID NO: 492622 - protein, 13 aa, Homo sapiens
  CDR3 for beta chain variable domain of TCR clone 246311 (TRBV4-3, TRBJ1-1)
CASSQVEGSMAFF

SEQ ID NO: 492623 - protein, 17 aa, Homo sapiens
  CDR3 for alpha chain variable domain of TCR clone 246312 (TRAV8-6, TRAJ58)
CAVSSWVGETSGTTLTF

SEQ ID NO: 492624 - protein, 14 aa, Homo sapiens
  CDR3 for beta chain variable domain of TCR clone 246312 (TRBV4-2, TRBJ2-1)
CASGLDRAYNEQFF

SEQ ID NO: 492625 - protein, 15 aa, Homo sapiens
  CDR3 for alpha chain variable domain of TCR clone 246313 (TRAV3, TRAJ27)
CAVRGFTPMQANQPW

SEQ ID NO: 492626 - protein, 12 aa, Homo sapiens
  CDR3 for beta chain variable domain of TCR clone 246313 (TRBV11-2, TRBJ2-2)
CASSLGGGELFF

SEQ ID NO: 492627 - protein, 12 aa, Homo sapiens
  CDR3 for alpha chain variable domain of TCR clone 246314 (TRAV1-2, TRAJ29)
CAVPSGNTPLVF

SEQ ID NO: 492628 - protein, 12 aa, Homo sapiens
  CDR3 for beta chain variable domain of TCR clone 246314 (TRBV12-4, TRBJ2-7)
CASSLGGYEQFF

SEQ ID NO: 492629 - protein, 15 aa, Homo sapiens
  CDR3 for alpha chain variable domain of TCR clone 246315 (TRAV2, TRAJ3)
CAVPPGYSSASKIIF

SEQ ID NO: 492630 - protein, 12 aa, Homo sapiens
  CDR3 for beta chain variable domain of TCR clone 246315 (TRBV11-2, TRBJ2-1)
CASSPGNNEQFF

SEQ ID NO: 492631 - protein, 14 aa, Homo sapiens
  CDR3 for alpha chain variable domain of TCR clone 246316 (TRAV1-2, TRAJ8)
CAMREDTGFQKLVF

SEQ ID NO: 492632 - protein, 14 aa, Homo sapiens
  CDR3 for beta chain variable domain of TCR clone 246316 (TRBV9, TRBJ2-1)
CASSVDHRGKEQFF

SEQ ID NO: 492633 - protein, 17 aa, Homo sapiens
  CDR3 for alpha chain variable domain of TCR clone 246317 (TRAV36/DV7, TRAJ52)
CAVAQRAGGTSYGKLTF

SEQ ID NO: 492634 - protein, 14 aa, Homo sapiens
  CDR3 for beta chain variable domain of TCR clone 246317 (TRBV20-1, TRBJ1-1)
CSAQTRIGGTEAVF

SEQ ID NO: 492635 - protein, 17 aa, Homo sapiens
  CDR3 for alpha chain variable domain of TCR clone 246318 (TRAV3, TRAJ42)
CAVRDRDYGGSQGNLIF

SEQ ID NO: 492636 - protein, 13 aa, Homo sapiens
  CDR3 for beta chain variable domain of TCR clone 246318 (TRBV10-3, TRBJ2-7)
CASKLAVNYKQYF

SEQ ID NO: 492637 - protein, 14 aa, Homo sapiens
  CDR3 for alpha chain variable domain of TCR clone 246319 (TRAV38-2/DV8, TRAJ49)
CAYRSPNTGNQFFF

SEQ ID NO: 492638 - protein, 14 aa, Homo sapiens
  CDR3 for beta chain variable domain of TCR clone 246319 (TRBV28, TRBJ1-1)
CAGSSEQGYTEAFF

SEQ ID NO: 492639 - protein, 14 aa, Homo sapiens
  CDR3 for alpha chain variable domain of TCR clone 246320 (TRAV1-2, TRAJ16)
CAVNRFSDGQKLLF

SEQ ID NO: 492640 - protein, 15 aa, Homo sapiens
  CDR3 for beta chain variable domain of TCR clone 246320 (TRBV7-9, TRBJ1-6)
CASSSPGRGNSPLQF

SEQ ID NO: 492641 - protein, 17 aa, Homo sapiens
  CDR3 for alpha chain variable domain of TCR clone 246321 (TRAV3, TRAJ6)
CAVRDGPRAGGSYIPPF

SEQ ID NO: 492642 - protein, 14 aa, Homo sapiens
  CDR3 for beta chain variable domain of TCR clone 246321 (TRBV5-5, TRBJ1-5)
CASSGQGVDQPQHF

SEQ ID NO: 492643 - protein, 15 aa, Homo sapiens
  CDR3 for alpha chain variable domain of TCR clone 246322 (TRAV3, TRAJ22)
CAVRDRGGSARQLTF

SEQ ID NO: 492644 - protein, 14 aa, Homo sapiens
  CDR3 for beta chain variable domain of TCR clone 246322 (TRBV2, TRBJ2-7)
CASRPPGGHYEQYF

SEQ ID NO: 492645 - protein, 14 aa, Homo sapiens
  CDR3 for alpha chain variable domain of TCR clone 246323 (TRAV3, TRAJ33)
CAVSDMGSNYQLIW

SEQ ID NO: 492646 - protein, 17 aa, Homo sapiens
  CDR3 for beta chain variable domain of TCR clone 246323 (TRBV19, TRBJ2-1)
CASSIWSAQPTHNEQFF

SEQ ID NO: 492647 - protein, 14 aa, Homo sapiens
  CDR3 for alpha chain variable domain of TCR clone 246324 (TRAV25, TRAJ27)
CAGPGNTNAGKSTF

SEQ ID NO: 492648 - protein, 16 aa, Homo sapiens
  CDR3 for beta chain variable domain of TCR clone 246324 (TRBV4-1, TRBJ2-6)
CVSSQDGGPGANVLTF

SEQ ID NO: 492649 - protein, 16 aa, Homo sapiens
  CDR3 for alpha chain variable domain of TCR clone 246325 (TRAV12-3, TRAJ53)
CAMSPGSGGSNYKLTF

SEQ ID NO: 492650 - protein, 15 aa, Homo sapiens
  CDR3 for beta chain variable domain of TCR clone 246325 (TRBV7-2, TRBJ2-7)
CASSTPGLTRGEQYF

SEQ ID NO: 492651 - protein, 14 aa, Homo sapiens
  CDR3 for alpha chain variable domain of TCR clone 246326 (TRAV8-3, TRAJ44)
CAVGLTGTASKLTF

SEQ ID NO: 492652 - protein, 15 aa, Homo sapiens
  CDR3 for beta chain variable domain of TCR clone 246326 (TRBV7-2, TRBJ2-7)
CASSLVSSGSYEQYF

SEQ ID NO: 492653 - protein, 13 aa, Homo sapiens
  CDR3 for alpha chain variable domain of TCR clone 246327 (TRAV21, TRAJ27)
CAAVPGNAGKSTF

SEQ ID NO: 492654 - protein, 15 aa, Homo sapiens
  CDR3 for beta chain variable domain of TCR clone 246327 (TRBV9, TRBJ1-6)
CASSVAGTGDSPLHF

SEQ ID NO: 492655 - protein, 13 aa, Homo sapiens
  CDR3 for alpha chain variable domain of TCR clone 246328 (TRAV13-1, TRAJ20)
CAARVSNDYKLSF

SEQ ID NO: 492656 - protein, 12 aa, Homo sapiens
  CDR3 for beta chain variable domain of TCR clone 246328 (TRBV20-1, TRBJ2-1)
CSARLGTDEQFL

SEQ ID NO: 492657 - protein, 14 aa, Homo sapiens
  CDR3 for alpha chain variable domain of TCR clone 246329 (TRAV2, TRAJ9)
CAVEDRSGGFKTIF

SEQ ID NO: 492658 - protein, 13 aa, Homo sapiens
  CDR3 for beta chain variable domain of TCR clone 246329 (TRBV20-1, TRBJ2-5)
CSARGDYQETQYF

SEQ ID NO: 492659 - protein, 12 aa, Homo sapiens
  CDR3 for alpha chain variable domain of TCR clone 246330 (TRAV36/DV7, TRAJ54)
CAVVRVAQKLVF

SEQ ID NO: 492660 - protein, 18 aa, Homo sapiens
  CDR3 for beta chain variable domain of TCR clone 246330 (TRBV20-1, TRBJ2-3)
CSASGLAGGPGTTDTQYF

SEQ ID NO: 492661 - protein, 13 aa, Homo sapiens
  CDR3 for alpha chain variable domain of TCR clone 246331 (TRAV3, TRAJ15)
CAVRDQAGTALLF

SEQ ID NO: 492662 - protein, 15 aa, Homo sapiens
  CDR3 for beta chain variable domain of TCR clone 246331 (TRBV11-1, TRBJ2-7)
CASSLNYGAAYEQYF

SEQ ID NO: 492663 - protein, 18 aa, Homo sapiens
  CDR3 for alpha chain variable domain of TCR clone 246332 (TRAV26-1, TRAJ5)
CIVRVVPPRDTGRRALTF

SEQ ID NO: 492664 - protein, 15 aa, Homo sapiens
  CDR3 for beta chain variable domain of TCR clone 246332 (TRBV7-9, TRBJ2-7)
CASSLPMGQENEQYF

SEQ ID NO: 492665 - protein, 13 aa, Homo sapiens
  CDR3 for alpha chain variable domain of TCR clone 246333 (TRAV30, TRAJ6)
CGFIDGGSYIPTF

SEQ ID NO: 492666 - protein, 13 aa, Homo sapiens
  CDR3 for beta chain variable domain of TCR clone 246333 (TRBV5-4, TRBJ2-5)
CASSPVSHETQYF

SEQ ID NO: 492667 - protein, 14 aa, Homo sapiens
  CDR3 for alpha chain variable domain of TCR clone 246334 (TRAV27, TRAJ49)
CAGRPEGTGNQIYF

SEQ ID NO: 492668 - protein, 15 aa, Homo sapiens
  CDR3 for beta chain variable domain of TCR clone 246334 (TRBV19, TRBJ2-1)
CASSIQATSYNEQFF

SEQ ID NO: 492669 - protein, 14 aa, Homo sapiens
  CDR3 for alpha chain variable domain of TCR clone 246335 (TRAV1-1, TRAJ28)
CAAPSGAGSYQLIF

SEQ ID NO: 492670 - protein, 12 aa, Homo sapiens
  CDR3 for beta chain variable domain of TCR clone 246335 (TRBV7-3, TRBJ2-1)
CASSFINNEQFF

SEQ ID NO: 492671 - protein, 12 aa, Homo sapiens
  CDR3 for alpha chain variable domain of TCR clone 246336 (TRAV17, TRAJ20)
CATQSNDYKLSF

SEQ ID NO: 492672 - protein, 18 aa, Homo sapiens
  CDR3 for beta chain variable domain of TCR clone 246336 (TRBV5-1, TRBJ1-6)
CASSVGGGYGERNSPLHF

SEQ ID NO: 492673 - protein, 14 aa, Homo sapiens
  CDR3 for alpha chain variable domain of TCR clone 246337 (TRAV12-1, TRAJ24)
CVVRSTDSWGKFHF

SEQ ID NO: 492674 - protein, 13 aa, Homo sapiens
  CDR3 for beta chain variable domain of TCR clone 246337 (TRBV2, TRBJ2-3)
CASILAGGQGQYF

SEQ ID NO: 492675 - protein, 14 aa, Homo sapiens
  CDR3 for alpha chain variable domain of TCR clone 246338 (TRAV25, TRAJ6)
CAGRESGGSYIPTY

SEQ ID NO: 492676 - protein, 13 aa, Homo sapiens
  CDR3 for beta chain variable domain of TCR clone 246338 (TRBV12-4, TRBJ2-7)
CASSLSGVYEQYF

SEQ ID NO: 492677 - protein, 14 aa, Homo sapiens
  CDR3 for alpha chain variable domain of TCR clone 246339 (TRAV2, TRAJ9)
CAVEDRSGGFKTIF

SEQ ID NO: 492678 - protein, 16 aa, Homo sapiens
  CDR3 for beta chain variable domain of TCR clone 246339 (TRBV7-3, TRBJ2-1)
CASSLEVYRSYNEQFF

SEQ ID NO: 492679 - protein, 15 aa, Homo sapiens
  CDR3 for alpha chain variable domain of TCR clone 246340 (TRAV3, TRAJ9)
CAVRARNTGGFKTIF

SEQ ID NO: 492680 - protein, 15 aa, Homo sapiens
  CDR3 for beta chain variable domain of TCR clone 246340 (TRBV7-9, TRBJ1-4)
CASSARTGGNEKLFF

SEQ ID NO: 492681 - protein, 18 aa, Homo sapiens
  CDR3 for alpha chain variable domain of TCR clone 246341 (TRAV26-1, TRAJ23)
CIVRVGLEVWNQGGKLIF

SEQ ID NO: 492682 - protein, 13 aa, Homo sapiens
  CDR3 for beta chain variable domain of TCR clone 246341 (TRBV7-3, TRBJ1-1)
CASSQDWGAEAFL

SEQ ID NO: 492683 - protein, 15 aa, Homo sapiens
  CDR3 for alpha chain variable domain of TCR clone 246342 (TRAV3, TRAJ16)
CAVRDGFSDGQKLLF

SEQ ID NO: 492684 - protein, 15 aa, Homo sapiens
  CDR3 for beta chain variable domain of TCR clone 246342 (TRBV28, TRBJ2-1)
CASSIIAGGRSEQFF

SEQ ID NO: 492685 - protein, 13 aa, Homo sapiens
  CDR3 for alpha chain variable domain of TCR clone 246343 (TRAV17, TRAJ9)
CATFLTGGFKTIF

SEQ ID NO: 492686 - protein, 16 aa, Homo sapiens
  CDR3 for beta chain variable domain of TCR clone 246343 (TRBV5-7, TRBJ1-4)
CASSPSGSLKTEKLFF

SEQ ID NO: 492687 - protein, 11 aa, Homo sapiens
  CDR3 for alpha chain variable domain of TCR clone 246344 (TRAV1-2, TRAJ31)
CAVNNNARLMF

SEQ ID NO: 492688 - protein, 14 aa, Homo sapiens
  CDR3 for beta chain variable domain of TCR clone 246344 (TRBV19, TRBJ2-1)
CASPTFVLSGEKFF

SEQ ID NO: 492689 - protein, 17 aa, Homo sapiens
  CDR3 for alpha chain variable domain of TCR clone 246345 (TRAV1-2, TRAJ9)
CLLPLCCLKYWSFKTIF

SEQ ID NO: 492690 - protein, 15 aa, Homo sapiens
  CDR3 for beta chain variable domain of TCR clone 246345 (TRBV19, TRBJ1-1)
WASTSGQIQNAEAFF

SEQ ID NO: 492691 - protein, 16 aa, Homo sapiens
  CDR3 for alpha chain variable domain of TCR clone 246346 (TRAV26-1, TRAJ28)
CIVRGYSGAGSYQLTF

SEQ ID NO: 492692 - protein, 11 aa, Homo sapiens
  CDR3 for beta chain variable domain of TCR clone 246346 (TRBV19, TRBJ1-1)
CASSIGSEAFF

SEQ ID NO: 492693 - protein, 15 aa, Homo sapiens
  CDR3 for alpha chain variable domain of TCR clone 246347 (TRAV35, TRAJ40)
CAGQLGTSGTYKYIF

SEQ ID NO: 492694 - protein, 11 aa, Homo sapiens
  CDR3 for beta chain variable domain of TCR clone 246347 (TRBV23-1, TRBJ2-7)
SSSGTWLEQYF

SEQ ID NO: 492695 - protein, 16 aa, Homo sapiens
  CDR3 for alpha chain variable domain of TCR clone 246348 (TRAV12-3, TRAJ53)
CAMSPGSGGSNYKLTF

SEQ ID NO: 492696 - protein, 15 aa, Homo sapiens
  CDR3 for beta chain variable domain of TCR clone 246348 (TRBV5-1, TRBJ2-1)
CACSPPRAPYNEQFF

SEQ ID NO: 492697 - protein, 12 aa, Homo sapiens
  CDR3 for alpha chain variable domain of TCR clone 246349 (TRAV13-2, TRAJ23)
CAERRRGGKLIF

SEQ ID NO: 492698 - protein, 12 aa, Homo sapiens
  CDR3 for beta chain variable domain of TCR clone 246349 (TRBV11-2, TRBJ2-1)
CASSPGNNEQFF

SEQ ID NO: 492699 - protein, 11 aa, Homo sapiens
  CDR3 for alpha chain variable domain of TCR clone 246350 (TRAV2, TRAJ33)
CAVDSNYQLIW

SEQ ID NO: 492700 - protein, 15 aa, Homo sapiens
  CDR3 for beta chain variable domain of TCR clone 246350 (TRBV19, TRBJ1-1)
CASTSGQIRNTEAFF

SEQ ID NO: 492701 - protein, 15 aa, Homo sapiens
  CDR3 for alpha chain variable domain of TCR clone 246351 (TRAV4, TRAJ28)
CLYAYSGAGSYQLTF

SEQ ID NO: 492702 - protein, 13 aa, Homo sapiens
  CDR3 for beta chain variable domain of TCR clone 246351 (TRBV19, TRBJ2-2)
CASSIGTSGELFF

SEQ ID NO: 492703 - protein, 14 aa, Homo sapiens
  CDR3 for alpha chain variable domain of TCR clone 246352 (TRAV35, TRAJ42)
CAGRYGGSQGNLIF

SEQ ID NO: 492704 - protein, 15 aa, Homo sapiens
  CDR3 for beta chain variable domain of TCR clone 246352 (TRBV7-2, TRBJ2-1)
CASSLGWGRANEQFF

SEQ ID NO: 492705 - protein, 11 aa, Homo sapiens
  CDR3 for alpha chain variable domain of TCR clone 246353 (TRAV35, TRAJ30)
CAGPGDDKIIF

SEQ ID NO: 492706 - protein, 14 aa, Homo sapiens
  CDR3 for beta chain variable domain of TCR clone 246353 (TRBV7-9, TRBJ2-3)
CASSPSGRAGTQYF

SEQ ID NO: 492707 - protein, 14 aa, Homo sapiens
  CDR3 for alpha chain variable domain of TCR clone 246354 (TRAV12-2, TRAJ13)
CAVKKTGGYQKVTF

SEQ ID NO: 492708 - protein, 14 aa, Homo sapiens
  CDR3 for beta chain variable domain of TCR clone 246354 (TRBV7-3, TRBJ1-1)
CASRLKGGNTEAFF

SEQ ID NO: 492709 - protein, 17 aa, Homo sapiens
  CDR3 for alpha chain variable domain of TCR clone 246355 (TRAV3, TRAJ12)
CAVRDGGRMDSSYKLIF

SEQ ID NO: 492710 - protein, 14 aa, Homo sapiens
  CDR3 for beta chain variable domain of TCR clone 246355 (TRBV7-9, TRBJ1-2)
RASSRQGANYGYTF

SEQ ID NO: 492711 - protein, 11 aa, Homo sapiens
  CDR3 for alpha chain variable domain of TCR clone 246356 (TRAV12-3, TRAJ49)
CAANTGNQFYF

SEQ ID NO: 492712 - protein, 12 aa, Homo sapiens
  CDR3 for beta chain variable domain of TCR clone 246356 (TRBV6-3, TRBJ2-7)
CASSEPGFEQYV

SEQ ID NO: 492713 - protein, 14 aa, Homo sapiens
  CDR3 for alpha chain variable domain of TCR clone 246357 (TRAV12-2, TRAJ6)
CASKWGGGSYIPTF

SEQ ID NO: 492714 - protein, 11 aa, Homo sapiens
  CDR3 for beta chain variable domain of TCR clone 246357 (TRBV29-1, TRBJ2-5)
CSEDRTGTQYF

SEQ ID NO: 492715 - protein, 15 aa, Homo sapiens
  CDR3 for alpha chain variable domain of TCR clone 246358 (TRAV12-3, TRAJ17)
CAMSPSLAAGNKLTF

SEQ ID NO: 492716 - protein, 16 aa, Homo sapiens
  CDR3 for beta chain variable domain of TCR clone 246358 (TRBV2, TRBJ2-3)
CASSTSVEGVTDTQYF

SEQ ID NO: 492717 - protein, 13 aa, Homo sapiens
  CDR3 for alpha chain variable domain of TCR clone 246359 (TRAV13-1, TRAJ28)
CAANEAGSYQLTF

SEQ ID NO: 492718 - protein, 14 aa, Homo sapiens
  CDR3 for beta chain variable domain of TCR clone 246359 (TRBV7-9, TRBJ2-7)
CASSLDRPTDEQYF

SEQ ID NO: 492719 - protein, 15 aa, Homo sapiens
  CDR3 for alpha chain variable domain of TCR clone 246360 (TRAV10, TRAJ39)
CVVSASGNAGNMLTF

SEQ ID NO: 492720 - protein, 13 aa, Homo sapiens
  CDR3 for beta chain variable domain of TCR clone 246360 (TRBV18, TRBJ2-7)
CASHSGGGYEQYF

SEQ ID NO: 492721 - protein, 12 aa, Homo sapiens
  CDR3 for alpha chain variable domain of TCR clone 246361 (TRAV13-2, TRAJ23)
CAERHRGRKLIF

SEQ ID NO: 492722 - protein, 14 aa, Homo sapiens
  CDR3 for beta chain variable domain of TCR clone 246361 (TRBV6-1, TRBJ1-3)
CASVQGGGGNTIYF

SEQ ID NO: 492723 - protein, 12 aa, Homo sapiens
  CDR3 for alpha chain variable domain of TCR clone 246362 (TRAV12-1, TRAJ40)
CVVYSGTYKYIF

SEQ ID NO: 492724 - protein, 13 aa, Homo sapiens
  CDR3 for beta chain variable domain of TCR clone 246362 (TRBV3-1, TRBJ1-1)
CASSPGVITEAFF

SEQ ID NO: 492725 - protein, 14 aa, Homo sapiens
  CDR3 for alpha chain variable domain of TCR clone 246363 (TRAV13-1, TRAJ44)
CAAKATGTASKLTF

SEQ ID NO: 492726 - protein, 18 aa, Homo sapiens
  CDR3 for beta chain variable domain of TCR clone 246363 (TRBV7-3, TRBJ2-6)
CASSFPGAGISGANVLTF

SEQ ID NO: 492727 - protein, 16 aa, Homo sapiens
  CDR3 for alpha chain variable domain of TCR clone 246364 (TRAV30, TRAJ24)
CGAEIVDADSWGKFQC

SEQ ID NO: 492728 - protein, 14 aa, Homo sapiens
  CDR3 for beta chain variable domain of TCR clone 246364 (TRBV12-5, TRBJ2-5)
CASGSRTHQETQYF

SEQ ID NO: 492729 - protein, 13 aa, Homo sapiens
  CDR3 for alpha chain variable domain of TCR clone 246365 (TRAV26-1, TRAJ54)
CIVRVKGAQKLVF

SEQ ID NO: 492730 - protein, 15 aa, Homo sapiens
  CDR3 for beta chain variable domain of TCR clone 246365 (TRBV20-1, TRBJ2-1)
CCAQPGGGPYNEQFF

SEQ ID NO: 492731 - protein, 15 aa, Homo sapiens
  CDR3 for alpha chain variable domain of TCR clone 246366 (TRAV4, TRAJ10)
CLVGDGSGGGNKLTF

SEQ ID NO: 492732 - protein, 15 aa, Homo sapiens
  CDR3 for beta chain variable domain of TCR clone 246366 (TRBV10-3, TRBJ2-3)
CAISLTSGGTDTQYF

SEQ ID NO: 492733 - protein, 15 aa, Homo sapiens
  CDR3 for alpha chain variable domain of TCR clone 246367 (TRAV20, TRAJ53)
CAVQASGGRNYQLTF

SEQ ID NO: 492734 - protein, 12 aa, Homo sapiens
  CDR3 for beta chain variable domain of TCR clone 246367 (TRBV7-8, TRBJ2-7)
CASSLGDREQYF

SEQ ID NO: 492735 - protein, 12 aa, Homo sapiens
  CDR3 for alpha chain variable domain of TCR clone 246368 (TRAV17, TRAJ30)
CVPERRDDKIIF

SEQ ID NO: 492736 - protein, 17 aa, Homo sapiens
  CDR3 for beta chain variable domain of TCR clone 246368 (TRBV4-1, TRBJ1-4)
CASSQEGPRGVEEKLFF

SEQ ID NO: 492737 - protein, 14 aa, Homo sapiens
  CDR3 for alpha chain variable domain of TCR clone 246369 (TRAV1-2, TRAJ8)
CAVREDTGFQKLVF

SEQ ID NO: 492738 - protein, 14 aa, Homo sapiens
  CDR3 for beta chain variable domain of TCR clone 246369 (TRBV3-1, TRBJ2-6)
CASSQLPGANVLTF

SEQ ID NO: 492739 - protein, 15 aa, Homo sapiens
  CDR3 for alpha chain variable domain of TCR clone 246370 (TRAV2, TRAJ9)
CAVAALNTGGFKTIF

SEQ ID NO: 492740 - protein, 13 aa, Homo sapiens
  CDR3 for beta chain variable domain of TCR clone 246370 (TRBV7-9, TRBJ2-5)
CASLSPGQETQYF

SEQ ID NO: 492741 - protein, 14 aa, Homo sapiens
  CDR3 for alpha chain variable domain of TCR clone 246371 (TRAV1-2, TRAJ8)
CAVREDTGFQILVF

SEQ ID NO: 492742 - protein, 14 aa, Homo sapiens
  CDR3 for beta chain variable domain of TCR clone 246371 (TRBV4-1, TRBJ2-2)
CASSQAVNTGELFF

SEQ ID NO: 492743 - protein, 12 aa, Homo sapiens
  CDR3 for alpha chain variable domain of TCR clone 246372 (TRAV12-3, TRAJ17)
CAMTLTGNKLTF

SEQ ID NO: 492744 - protein, 16 aa, Homo sapiens
  CDR3 for beta chain variable domain of TCR clone 246372 (TRBV7-3, TRBJ2-1)
CASSLECYRSYNEQFF

SEQ ID NO: 492745 - protein, 13 aa, Homo sapiens
  CDR3 for alpha chain variable domain of TCR clone 246373 (TRAV30, TRAJ24)
CGTVTDSWGKLQF

SEQ ID NO: 492746 - protein, 16 aa, Homo sapiens
  CDR3 for beta chain variable domain of TCR clone 246373 (TRBV7-9, TRBJ2-1)
CASSDVAGGSYNEQFF

SEQ ID NO: 492747 - protein, 14 aa, Homo sapiens
  CDR3 for alpha chain variable domain of TCR clone 246374 (TRAV38-1, TRAJ40)
CALRPTSGTYKYIF

SEQ ID NO: 492748 - protein, 15 aa, Homo sapiens
  CDR3 for beta chain variable domain of TCR clone 246374 (TRBV28, TRBJ2-5)
CASSSGRTIQETQYF

SEQ ID NO: 492749 - protein, 14 aa, Homo sapiens
  CDR3 for alpha chain variable domain of TCR clone 246375 (TRAV12-3, TRAJ10)
SHLPLTGGGNKLTF

SEQ ID NO: 492750 - protein, 17 aa, Homo sapiens
  CDR3 for beta chain variable domain of TCR clone 246375 (TRBV27, TRBJ2-6)
CASSAGTGFSGANVLTF

SEQ ID NO: 492751 - protein, 13 aa, Homo sapiens
  CDR3 for alpha chain variable domain of TCR clone 246376 (TRAV21, TRAJ20)
CAVGLRVDYKLSF

SEQ ID NO: 492752 - protein, 13 aa, Homo sapiens
  CDR3 for beta chain variable domain of TCR clone 246376 (TRBV6-1, TRBJ1-1)
CASSRQGNTGAYF

SEQ ID NO: 492753 - protein, 10 aa, Homo sapiens
  CDR3 for alpha chain variable domain of TCR clone 246377 (TRAV35, TRAJ48)
CAGTNIKLTF

SEQ ID NO: 492754 - protein, 17 aa, Homo sapiens
  CDR3 for beta chain variable domain of TCR clone 246377 (TRBV7-9, TRBJ2-3)
CASSPTVAGDLTDTQYF

SEQ ID NO: 492755 - protein, 13 aa, Homo sapiens
  CDR3 for alpha chain variable domain of TCR clone 246378 (TRAV12-3, TRAJ47)
CAMKKEYGNKLVF

SEQ ID NO: 492756 - protein, 16 aa, Homo sapiens
  CDR3 for beta chain variable domain of TCR clone 246378 (TRBV12-5, TRBJ2-5)
CASGPRTSGNQETQYF

SEQ ID NO: 492757 - protein, 12 aa, Homo sapiens
  CDR3 for alpha chain variable domain of TCR clone 246379 (TRAV1-1, TRAJ43)
CAPRVSINDMRF

SEQ ID NO: 492758 - protein, 15 aa, Homo sapiens
  CDR3 for beta chain variable domain of TCR clone 246379 (TRBV5-1, TRBJ2-7)
CASSLGDFTTYEQYF

SEQ ID NO: 492759 - protein, 16 aa, Homo sapiens
  CDR3 for alpha chain variable domain of TCR clone 246380 (TRAV35, TRAJ28)
CAGQRYSGAGSYQLTF

SEQ ID NO: 492760 - protein, 14 aa, Homo sapiens
  CDR3 for beta chain variable domain of TCR clone 246380 (TRBV19, TRBJ2-1)
CASPTFVLSGEQFF

SEQ ID NO: 492761 - protein, 14 aa, Homo sapiens
  CDR3 for alpha chain variable domain of TCR clone 246381 (TRAV1-1, TRAJ27)
CAVIYNTNAGKSTF

SEQ ID NO: 492762 - protein, 15 aa, Homo sapiens
  CDR3 for beta chain variable domain of TCR clone 246381 (TRBV18, TRBJ2-6)
CASSPSYAGANVLTF

SEQ ID NO: 492763 - protein, 14 aa, Homo sapiens
  CDR3 for alpha chain variable domain of TCR clone 246382 (TRAV34, TRAJ22)
CGADTSGSARQLTF

SEQ ID NO: 492764 - protein, 17 aa, Homo sapiens
  CDR3 for beta chain variable domain of TCR clone 246382 (TRBV24-1, TRBJ2-3)
CATSDLPSGEDTDTQYF

SEQ ID NO: 492765 - protein, 13 aa, Homo sapiens
  CDR3 for alpha chain variable domain of TCR clone 246383 (TRAV8-6, TRAJ41)
CAASENAGYALNF

SEQ ID NO: 492766 - protein, 17 aa, Homo sapiens
  CDR3 for beta chain variable domain of TCR clone 246383 (TRBV7-2, TRBJ2-3)
CASSLEARGTSTDTQYF

SEQ ID NO: 492767 - protein, 15 aa, Homo sapiens
  CDR3 for alpha chain variable domain of TCR clone 246384 (TRAV38-2/DV8, TRAJ45)
CAYWDSGGGADGLTF

SEQ ID NO: 492768 - protein, 13 aa, Homo sapiens
  CDR3 for beta chain variable domain of TCR clone 246384 (TRBV10-3, TRBJ2-7)
CASKRAVNYEQYF

SEQ ID NO: 492769 - protein, 13 aa, Homo sapiens
  CDR3 for alpha chain variable domain of TCR clone 246385 (TRAV36/DV7, TRAJ32)
CSGYGGATNKLIF

SEQ ID NO: 492770 - protein, 15 aa, Homo sapiens
  CDR3 for beta chain variable domain of TCR clone 246385 (TRBV11-3, TRBJ2-3)
CASLKDGREGDTQYF

SEQ ID NO: 492771 - protein, 14 aa, Homo sapiens
  CDR3 for alpha chain variable domain of TCR clone 246386 (TRAV17, TRAJ57)
CATDPQGGSEKLVF

SEQ ID NO: 492772 - protein, 15 aa, Homo sapiens
  CDR3 for beta chain variable domain of TCR clone 246386 (TRBV19, TRBJ1-1)
CASTSGQIQNTEAFF

SEQ ID NO: 492773 - protein, 16 aa, Homo sapiens
  CDR3 for alpha chain variable domain of TCR clone 246387 (TRAV17, TRAJ52)
CATSNAGGTSYGKPTF

SEQ ID NO: 492774 - protein, 15 aa, Homo sapiens
  CDR3 for beta chain variable domain of TCR clone 246387 (TRBV20-1, TRBJ2-7)
CSARDRVSGMDEQYF

SEQ ID NO: 492775 - protein, 17 aa, Homo sapiens
  CDR3 for alpha chain variable domain of TCR clone 246388 (TRAV3, TRAJ6)
CAVRDGPRAGGSYIPTF

SEQ ID NO: 492776 - protein, 13 aa, Homo sapiens
  CDR3 for beta chain variable domain of TCR clone 246388 (TRBV28, TRBJ1-2)
CASRQQGDYGYTF

SEQ ID NO: 492777 - protein, 14 aa, Homo sapiens
  CDR3 for alpha chain variable domain of TCR clone 246389 (TRAV1-2, TRAJ16)
CAVNRFSDGQKRLF

SEQ ID NO: 492778 - protein, 14 aa, Homo sapiens
  CDR3 for beta chain variable domain of TCR clone 246389 (TRBV7-2, TRBJ1-1)
CASSFLTGTTEAFF

SEQ ID NO: 492779 - protein, 12 aa, Homo sapiens
  CDR3 for alpha chain variable domain of TCR clone 246390 (TRAV12-3, TRAJ17)
CAMTLTGNKLTF

SEQ ID NO: 492780 - protein, 12 aa, Homo sapiens
  CDR3 for beta chain variable domain of TCR clone 246390 (TRBV29-1, TRBJ1-3)
CSTRDSGNTIYF

SEQ ID NO: 492781 - protein, 13 aa, Homo sapiens
  CDR3 for alpha chain variable domain of TCR clone 246391 (TRAV3, TRAJ35)
CGMRKSFGNVLHF

SEQ ID NO: 492782 - protein, 14 aa, Homo sapiens
  CDR3 for beta chain variable domain of TCR clone 246391 (TRBV6-5, TRBJ1-4)
CASSYRAAEEKLFF

SEQ ID NO: 492783 - protein, 16 aa, Homo sapiens
  CDR3 for alpha chain variable domain of TCR clone 246392 (TRAV3, TRAJ37)
CAVRPHGSGNTGKLIF

SEQ ID NO: 492784 - protein, 13 aa, Homo sapiens
  CDR3 for beta chain variable domain of TCR clone 246392 (TRBV7-3, TRBJ2-1)
CASSLDSYNEQFF

SEQ ID NO: 492785 - protein, 13 aa, Homo sapiens
  CDR3 for alpha chain variable domain of TCR clone 246393 (TRAV2, TRAJ40)
CAVVTSGTYKYIF

SEQ ID NO: 492786 - protein, 13 aa, Homo sapiens
  CDR3 for beta chain variable domain of TCR clone 246393 (TRBV2, TRBJ2-3)
CASILAGGQGQYF

SEQ ID NO: 492787 - protein, 16 aa, Homo sapiens
  CDR3 for alpha chain variable domain of TCR clone 246394 (TRAV3, TRAJ37)
CAVRPHGSGNTGKLIF

SEQ ID NO: 492788 - protein, 16 aa, Homo sapiens
  CDR3 for beta chain variable domain of TCR clone 246394 (TRBV7-9, TRBJ2-3)
CASSTWREVGTDTQYF

SEQ ID NO: 492789 - protein, 16 aa, Homo sapiens
  CDR3 for alpha chain variable domain of TCR clone 246395 (TRAV3, TRAJ21)
CAVRDIERGNFNKFYF

SEQ ID NO: 492790 - protein, 15 aa, Homo sapiens
  CDR3 for beta chain variable domain of TCR clone 246395 (TRBV3-1, TRBJ2-7)
CASSQVRQGAYEQYF

SEQ ID NO: 492791 - protein, 13 aa, Homo sapiens
  CDR3 for alpha chain variable domain of TCR clone 246396 (TRAV12-3, TRAJ43)
CAMIRPNNNDMRF

SEQ ID NO: 492792 - protein, 12 aa, Homo sapiens
  CDR3 for beta chain variable domain of TCR clone 246396 (TRBV11-2, TRBJ2-5)
CASSLGQETEYF

SEQ ID NO: 492793 - protein, 16 aa, Homo sapiens
  CDR3 for alpha chain variable domain of TCR clone 246397 (TRAV3, TRAJ10)
CAVRDMRAGGGNKLTL

SEQ ID NO: 492794 - protein, 15 aa, Homo sapiens
  CDR3 for beta chain variable domain of TCR clone 246397 (TRBV5-1, TRBJ2-1)
CASSPPRAPYNEQFF

SEQ ID NO: 492795 - protein, 15 aa, Homo sapiens
  CDR3 for alpha chain variable domain of TCR clone 246398 (TRAV21, TRAJ53)
CATLNSGGSNYKLTF

SEQ ID NO: 492796 - protein, 14 aa, Homo sapiens
  CDR3 for beta chain variable domain of TCR clone 246398 (TRBV15, TRBJ2-5)
CATSVGGLGETQYF

SEQ ID NO: 492797 - protein, 15 aa, Homo sapiens
  CDR3 for alpha chain variable domain of TCR clone 246399 (TRAV3, TRAJ13)
CAVRDIGGGYQKVTF

SEQ ID NO: 492798 - protein, 13 aa, Homo sapiens
  CDR3 for beta chain variable domain of TCR clone 246399 (TRBV4-2, TRBJ1-1)
CASSQAGNTEAFF

SEQ ID NO: 492799 - protein, 12 aa, Homo sapiens
  CDR3 for alpha chain variable domain of TCR clone 246400 (TRAV13-2, TRAJ23)
CAERHRGGKLIF

SEQ ID NO: 492800 - protein, 13 aa, Homo sapiens
  CDR3 for beta chain variable domain of TCR clone 246400 (TRBV7-9, TRBJ1-2)
CASSLKQNYGHTF

SEQ ID NO: 492801 - protein, 14 aa, Homo sapiens
  CDR3 for alpha chain variable domain of TCR clone 246401 (TRAV1-2, TRAJ16)
CAVNRFSDGQKLLF

SEQ ID NO: 492802 - protein, 11 aa, Homo sapiens
  CDR3 for beta chain variable domain of TCR clone 246401 (TRBV12-4, TRBJ2-3)
WASTATDTQYF

SEQ ID NO: 492803 - protein, 14 aa, Homo sapiens
  CDR3 for alpha chain variable domain of TCR clone 246402 (TRAV12-2, TRAJ13)
CAVKKTGGYQKVTF

SEQ ID NO: 492804 - protein, 15 aa, Homo sapiens
  CDR3 for beta chain variable domain of TCR clone 246402 (TRBV7-2, TRBJ2-1)
CASSSGLEGGNEQFF

SEQ ID NO: 492805 - protein, 12 aa, Homo sapiens
  CDR3 for alpha chain variable domain of TCR clone 246403 (TRAV13-2, TRAJ23)
CAERHRGGKLIF

SEQ ID NO: 492806 - protein, 13 aa, Homo sapiens
  CDR3 for beta chain variable domain of TCR clone 246403 (TRBV2, TRBJ2-7)
CASSVGGSGEQYF

SEQ ID NO: 492807 - protein, 13 aa, Homo sapiens
  CDR3 for alpha chain variable domain of TCR clone 246404 (TRAV21, TRAJ20)
CAVGLRVDYKLSF

SEQ ID NO: 492808 - protein, 14 aa, Homo sapiens
  CDR3 for beta chain variable domain of TCR clone 246404 (TRBV4-1, TRBJ2-2)
CASSQAVNTGELLF

SEQ ID NO: 492809 - protein, 12 aa, Homo sapiens
  CDR3 for alpha chain variable domain of TCR clone 246405 (TRAV16, TRAJ10)
CSRTGGGNKLTF

SEQ ID NO: 492810 - protein, 16 aa, Homo sapiens
  CDR3 for beta chain variable domain of TCR clone 246405 (TRBV13, TRBJ2-2)
CASSLGRGYGTGELFF

SEQ ID NO: 492811 - protein, 14 aa, Homo sapiens
  CDR3 for alpha chain variable domain of TCR clone 246406 (TRAV12-3, TRAJ53)
CNPTSGGSNYKLTF

SEQ ID NO: 492812 - protein, 13 aa, Homo sapiens
  CDR3 for beta chain variable domain of TCR clone 246406 (TRBV11-2, TRBJ2-5)
CASSSTGEETQYF

SEQ ID NO: 492813 - protein, 15 aa, Homo sapiens
  CDR3 for alpha chain variable domain of TCR clone 246407 (TRAV12-1, TRAJ45)
CVVLSGGGGADGLTF

SEQ ID NO: 492814 - protein, 13 aa, Homo sapiens
  CDR3 for beta chain variable domain of TCR clone 246407 (TRBV7-3, TRBJ2-2)
CASSLNVLGELFF

SEQ ID NO: 492815 - protein, 13 aa, Homo sapiens
  CDR3 for alpha chain variable domain of TCR clone 246408 (TRAV16, TRAJ9)
CALSNTGGFKTIF

SEQ ID NO: 492816 - protein, 15 aa, Homo sapiens
  CDR3 for beta chain variable domain of TCR clone 246408 (TRBV10-2, TRBJ2-6)
CASSEQGTGANVLTF

SEQ ID NO: 492817 - protein, 12 aa, Homo sapiens
  CDR3 for alpha chain variable domain of TCR clone 246409 (TRAV27, TRAJ9)
CAGESGGFKTIF

SEQ ID NO: 492818 - protein, 16 aa, Homo sapiens
  CDR3 for beta chain variable domain of TCR clone 246409 (TRBV11-2, TRBJ2-7)
CASSPTTGGVSYEQYF

SEQ ID NO: 492819 - protein, 13 aa, Homo sapiens
  CDR3 for alpha chain variable domain of TCR clone 246410 (TRAV21, TRAJ27)
CAARPGNAGKSTF

SEQ ID NO: 492820 - protein, 14 aa, Homo sapiens
  CDR3 for beta chain variable domain of TCR clone 246410 (TRBV5-4, TRBJ1-1)
CASSLDSRRGEAFF

SEQ ID NO: 492821 - protein, 10 aa, Homo sapiens
  CDR3 for alpha chain variable domain of TCR clone 246411 (TRAV1-2, TRAJ31)
CAFFDARLMF

SEQ ID NO: 492822 - protein, 17 aa, Homo sapiens
  CDR3 for beta chain variable domain of TCR clone 246411 (TRBV11-2, TRBJ2-1)
CASSLYPPGVVYNEQFF

SEQ ID NO: 492823 - protein, 13 aa, Homo sapiens
  CDR3 for alpha chain variable domain of TCR clone 246412 (TRAV8-3, TRAJ43)
CAVGPDNNNDMRF

SEQ ID NO: 492824 - protein, 12 aa, Homo sapiens
  CDR3 for beta chain variable domain of TCR clone 246412 (TRBV7-2, TRBJ1-6)
CASSLSSSPVHF

SEQ ID NO: 492825 - protein, 10 aa, Homo sapiens
  CDR3 for alpha chain variable domain of TCR clone 246413 (TRAV17, TRAJ36)
CATVAGNLFF

SEQ ID NO: 492826 - protein, 12 aa, Homo sapiens
  CDR3 for beta chain variable domain of TCR clone 246413 (TRBV11-2, TRBJ2-4)
CASSSDSGSEYF

SEQ ID NO: 492827 - protein, 13 aa, Homo sapiens
  CDR3 for alpha chain variable domain of TCR clone 246414 (TRAV21, TRAJ40)
CAVRPGRAYKYIF

SEQ ID NO: 492828 - protein, 12 aa, Homo sapiens
  CDR3 for beta chain variable domain of TCR clone 246414 (TRBV14, TRBJ2-5)
CASSQLKETQYF

SEQ ID NO: 492829 - protein, 14 aa, Homo sapiens
  CDR3 for alpha chain variable domain of TCR clone 246415 (TRAV23/DV6, TRAJ40)
CAASLTSGTYKYIL

SEQ ID NO: 492830 - protein, 13 aa, Homo sapiens
  CDR3 for beta chain variable domain of TCR clone 246415 (TRBV11-2, TRBJ2-5)
CASSSTGEETQYF

SEQ ID NO: 492831 - protein, 13 aa, Homo sapiens
  CDR3 for alpha chain variable domain of TCR clone 246416 (TRAV2, TRAJ40)
CAVVTSGTYKYIF

SEQ ID NO: 492832 - protein, 17 aa, Homo sapiens
  CDR3 for beta chain variable domain of TCR clone 246416 (TRBV11-3, TRBJ1-5)
CASSPLTGLRGNQPQHF

SEQ ID NO: 492833 - protein, 14 aa, Homo sapiens
  CDR3 for alpha chain variable domain of TCR clone 246417 (TRAV12-1, TRAJ42)
CVVIYGGSQGNLIF

SEQ ID NO: 492834 - protein, 13 aa, Homo sapiens
  CDR3 for beta chain variable domain of TCR clone 246417 (TRBV18, TRBJ2-7)
CASSPPGKETQYF

SEQ ID NO: 492835 - protein, 13 aa, Homo sapiens
  CDR3 for alpha chain variable domain of TCR clone 246418 (TRAV29/DV5, TRAJ31)
CAASRNNNARLMF

SEQ ID NO: 492836 - protein, 15 aa, Homo sapiens
  CDR3 for beta chain variable domain of TCR clone 246418 (TRBV4-1, TRBJ2-7)
CASSQQGQGFDEQYF

SEQ ID NO: 492837 - protein, 22 aa, Homo sapiens
  CDR3 for alpha chain variable domain of TCR clone 246419 (TRAV26-1, TRAJ30)
CIARVRTEMTRSSLEKGHDFIF

SEQ ID NO: 492838 - protein, 18 aa, Homo sapiens
  CDR3 for beta chain variable domain of TCR clone 246419 (TRBV4-1, TRBJ1-5)
CASSHDPRGQGLNQPQHF

SEQ ID NO: 492839 - protein, 11 aa, Homo sapiens
  CDR3 for alpha chain variable domain of TCR clone 246420 (TRAV12-2, TRAJ49)
CALQGGNQVYF

SEQ ID NO: 492840 - protein, 13 aa, Homo sapiens
  CDR3 for beta chain variable domain of TCR clone 246420 (TRBV4-1, TRBJ1-1)
CASSQLGTGEAFF

SEQ ID NO: 492841 - protein, 17 aa, Homo sapiens
  CDR3 for alpha chain variable domain of TCR clone 246421 (TRAV3, TRAJ6)
CAVRHGPRAGGSYIPTF

SEQ ID NO: 492842 - protein, 15 aa, Homo sapiens
  CDR3 for beta chain variable domain of TCR clone 246421 (TRBV5-1, TRBJ2-7)
CASSLNGGPAREQYF

SEQ ID NO: 492843 - protein, 15 aa, Homo sapiens
  CDR3 for alpha chain variable domain of TCR clone 246422 (TRAV25, TRAJ53)
CAATGGGGSNYKLTF

SEQ ID NO: 492844 - protein, 14 aa, Homo sapiens
  CDR3 for beta chain variable domain of TCR clone 246422 (TRBV11-1, TRBJ2-7)
CASSFRQGSYEQYF

SEQ ID NO: 492845 - protein, 14 aa, Homo sapiens
  CDR3 for alpha chain variable domain of TCR clone 246423 (TRAV1-2, TRAJ16)
CAVNRFSDGQKLLF

SEQ ID NO: 492846 - protein, 14 aa, Homo sapiens
  CDR3 for beta chain variable domain of TCR clone 246423 (TRBV10-2, TRBJ1-5)
CASSSTGRNQHQHF

SEQ ID NO: 492847 - protein, 14 aa, Homo sapiens
  CDR3 for alpha chain variable domain of TCR clone 246424 (TRAV3, TRAJ9)
CAVRLNTGGFKTIF

SEQ ID NO: 492848 - protein, 16 aa, Homo sapiens
  CDR3 for beta chain variable domain of TCR clone 246424 (TRBV12-5, TRBJ2-5)
CASGPRTSGNQDTQYF

SEQ ID NO: 492849 - protein, 16 aa, Homo sapiens
  CDR3 for alpha chain variable domain of TCR clone 246425 (TRAV30, TRAJ24)
CGTEIVDADSWGKFQF

SEQ ID NO: 492850 - protein, 16 aa, Homo sapiens
  CDR3 for beta chain variable domain of TCR clone 246425 (TRBV18, TRBJ2-3)
CASSPGGLASTDTQYF

SEQ ID NO: 492851 - protein, 10 aa, Homo sapiens
  CDR3 for alpha chain variable domain of TCR clone 246426 (TRAV30, TRAJ48)
CGIGNEKLTF

SEQ ID NO: 492852 - protein, 12 aa, Homo sapiens
  CDR3 for beta chain variable domain of TCR clone 246426 (TRBV7-9, TRBJ2-7)
CASSIKREEQYF

SEQ ID NO: 492853 - protein, 14 aa, Homo sapiens
  CDR3 for alpha chain variable domain of TCR clone 246427 (TRAV3, TRAJ9)
CAVRLNTGGFKTIF

SEQ ID NO: 492854 - protein, 17 aa, Homo sapiens
  CDR3 for beta chain variable domain of TCR clone 246427 (TRBV4-1, TRBJ2-7)
CASSRDPLGVRGGEQYF

SEQ ID NO: 492855 - protein, 13 aa, Homo sapiens
  CDR3 for alpha chain variable domain of TCR clone 246428 (TRAV12-2, TRAJ20)
CAVYPSNDYKLSF

SEQ ID NO: 492856 - protein, 15 aa, Homo sapiens
  CDR3 for beta chain variable domain of TCR clone 246428 (TRBV27, TRBJ2-5)
CASSLFPRGGETQFF

SEQ ID NO: 492857 - protein, 13 aa, Homo sapiens
  CDR3 for alpha chain variable domain of TCR clone 246429 (TRAV12-3, TRAJ49)
CAMTFNTGNQFYF

SEQ ID NO: 492858 - protein, 13 aa, Homo sapiens
  CDR3 for beta chain variable domain of TCR clone 246429 (TRBV7-2, TRBJ2-2)
CASSLAVTGELFF

SEQ ID NO: 492859 - protein, 14 aa, Homo sapiens
  CDR3 for alpha chain variable domain of TCR clone 246430 (TRAV1-2, TRAJ8)
CSVREDTGFRKLVL

SEQ ID NO: 492860 - protein, 14 aa, Homo sapiens
  CDR3 for beta chain variable domain of TCR clone 246430 (TRBV25-1, TRBJ1-1)
CASTHLGGNTEAFF

SEQ ID NO: 492861 - protein, 14 aa, Homo sapiens
  CDR3 for alpha chain variable domain of TCR clone 246431 (TRAV26-1, TRAJ21)
CIVRPPYNFNKFYF

SEQ ID NO: 492862 - protein, 14 aa, Homo sapiens
  CDR3 for beta chain variable domain of TCR clone 246431 (TRBV11-3, TRBJ2-1)
CASSATTSGRIQFF

SEQ ID NO: 492863 - protein, 13 aa, Homo sapiens
  CDR3 for alpha chain variable domain of TCR clone 246432 (TRAV12-3, TRAJ43)
CAMRRPNNNDMRF

SEQ ID NO: 492864 - protein, 12 aa, Homo sapiens
  CDR3 for beta chain variable domain of TCR clone 246432 (TRBV11-2, TRBJ2-5)
CASSLGQETQYF

SEQ ID NO: 492865 - protein, 15 aa, Homo sapiens
  CDR3 for alpha chain variable domain of TCR clone 246433 (TRAV12-3, TRAJ6)
CAMSATTEGSYIPTF

SEQ ID NO: 492866 - protein, 15 aa, Homo sapiens
  CDR3 for beta chain variable domain of TCR clone 246433 (TRBV7-6, TRBJ1-5)
CASSQSSGINQPQHF

SEQ ID NO: 492867 - protein, 14 aa, Homo sapiens
  CDR3 for alpha chain variable domain of TCR clone 246434 (TRAV17, TRAJ23)
CATASYNQGGKLIL

SEQ ID NO: 492868 - protein, 16 aa, Homo sapiens
  CDR3 for beta chain variable domain of TCR clone 246434 (TRBV12-4, TRBJ1-5)
CASSRPVGGSNQHQHF

SEQ ID NO: 492869 - protein, 15 aa, Homo sapiens
  CDR3 for alpha chain variable domain of TCR clone 246435 (TRAV8-3, TRAJ27)
CAVGPSKTNAGKSTF

SEQ ID NO: 492870 - protein, 16 aa, Homo sapiens
  CDR3 for beta chain variable domain of TCR clone 246435 (TRBV6-6, TRBJ2-1)
CASSLLSDSAYNEQFF

SEQ ID NO: 492871 - protein, 11 aa, Homo sapiens
  CDR3 for alpha chain variable domain of TCR clone 246436 (TRAV21, TRAJ33)
CAVYSNYQLIW

SEQ ID NO: 492872 - protein, 17 aa, Homo sapiens
  CDR3 for beta chain variable domain of TCR clone 246436 (TRBV24-1, TRBJ2-1)
CATSDVSTSGTYNEQFF

SEQ ID NO: 492873 - protein, 12 aa, Homo sapiens
  CDR3 for alpha chain variable domain of TCR clone 246437 (TRAV12-3, TRAJ17)
CAMTLTGNKQTF

SEQ ID NO: 492874 - protein, 15 aa, Homo sapiens
  CDR3 for beta chain variable domain of TCR clone 246437 (TRBV20-1, TRBJ2-7)
CSARDRVSGMDEPYF

SEQ ID NO: 492875 - protein, 13 aa, Homo sapiens
  CDR3 for alpha chain variable domain of TCR clone 246438 (TRAV12-3, TRAJ13)
CAMSSGGDQKVTF

SEQ ID NO: 492876 - protein, 13 aa, Homo sapiens
  CDR3 for beta chain variable domain of TCR clone 246438 (TRBV20-1, TRBJ1-1)
CSAPPGGHTEAFF

SEQ ID NO: 492877 - protein, 13 aa, Homo sapiens
  CDR3 for alpha chain variable domain of TCR clone 246439 (TRAV26-1, TRAJ34)
CIVRGHNTDKLIF

SEQ ID NO: 492878 - protein, 15 aa, Homo sapiens
  CDR3 for beta chain variable domain of TCR clone 246439 (TRBV4-1, TRBJ2-7)
CASSQEWGPSYEQHF

SEQ ID NO: 492879 - protein, 16 aa, Homo sapiens
  CDR3 for alpha chain variable domain of TCR clone 246440 (TRAV4, TRAJ22)
CLVGVLYSGSARQLTS

SEQ ID NO: 492880 - protein, 16 aa, Homo sapiens
  CDR3 for beta chain variable domain of TCR clone 246440 (TRBV7-9, TRBJ2-1)
CASSDVAGGSYNEQFF

SEQ ID NO: 492881 - protein, 15 aa, Homo sapiens
  CDR3 for alpha chain variable domain of TCR clone 246441 (TRAV12-3, TRAJ47)
CAMSALVEYGNKLVF

SEQ ID NO: 492882 - protein, 15 aa, Homo sapiens
  CDR3 for beta chain variable domain of TCR clone 246441 (TRBV7-2, TRBJ2-1)
CASSLVAGGYNEQFF

SEQ ID NO: 492883 - protein, 17 aa, Homo sapiens
  CDR3 for alpha chain variable domain of TCR clone 246442 (TRAV3, TRAJ38)
CAVRDCLNTGNNRKLIW

SEQ ID NO: 492884 - protein, 14 aa, Homo sapiens
  CDR3 for beta chain variable domain of TCR clone 246442 (TRBV5-5, TRBJ1-5)
CASSGQGVDQPQHF

SEQ ID NO: 492885 - protein, 13 aa, Homo sapiens
  CDR3 for alpha chain variable domain of TCR clone 246443 (TRAV17, TRAJ5)
CATGETGRRALTF

SEQ ID NO: 492886 - protein, 13 aa, Homo sapiens
  CDR3 for beta chain variable domain of TCR clone 246443 (TRBV19, TRBJ1-5)
CASSIEPVQPQHF

SEQ ID NO: 492887 - protein, 13 aa, Homo sapiens
  CDR3 for alpha chain variable domain of TCR clone 246444 (TRAV20, TRAJ37)
CAGCSSNTGKLIF

SEQ ID NO: 492888 - protein, 21 aa, Homo sapiens
  CDR3 for beta chain variable domain of TCR clone 246444 (TRBV4-2, TRBJ2-3)
HCSQKTRPCISVPAAPDTQYF

SEQ ID NO: 492889 - protein, 11 aa, Homo sapiens
  CDR3 for alpha chain variable domain of TCR clone 246445 (TRAV2, TRAJ13)
CASGGYQKVTF

SEQ ID NO: 492890 - protein, 14 aa, Homo sapiens
  CDR3 for beta chain variable domain of TCR clone 246445 (TRBV15, TRBJ2-5)
CATSIGGLGETQYF

SEQ ID NO: 492891 - protein, 14 aa, Homo sapiens
  CDR3 for alpha chain variable domain of TCR clone 246446 (TRAV9-2, TRAJ39)
CALYIYNAGNMLTF

SEQ ID NO: 492892 - protein, 13 aa, Homo sapiens
  CDR3 for beta chain variable domain of TCR clone 246446 (TRBV10-3, TRBJ1-1)
CANKQGRDTEAFF

SEQ ID NO: 492893 - protein, 15 aa, Homo sapiens
  CDR3 for alpha chain variable domain of TCR clone 246447 (TRAV16, TRAJ57)
CALSGGQGGSEKLVF

SEQ ID NO: 492894 - protein, 14 aa, Homo sapiens
  CDR3 for beta chain variable domain of TCR clone 246447 (TRBV28, TRBJ2-2)
CASTRRSGDGELFF

SEQ ID NO: 492895 - protein, 12 aa, Homo sapiens
  CDR3 for alpha chain variable domain of TCR clone 246448 (TRAV1-1, TRAJ8)
CAGGTGFQKLIF

SEQ ID NO: 492896 - protein, 15 aa, Homo sapiens
  CDR3 for beta chain variable domain of TCR clone 246448 (TRBV7-9, TRBJ1-4)
CASSRTGGFNEKLFF

SEQ ID NO: 492897 - protein, 16 aa, Homo sapiens
  CDR3 for alpha chain variable domain of TCR clone 246449 (TRAV30, TRAJ24)
CGTEIVDADSWGKFQF

SEQ ID NO: 492898 - protein, 15 aa, Homo sapiens
  CDR3 for beta chain variable domain of TCR clone 246449 (TRBV5-1, TRBJ1-1)
CASSSTTGTNTEAYF

SEQ ID NO: 492899 - protein, 14 aa, Homo sapiens
  CDR3 for alpha chain variable domain of TCR clone 246450 (TRAV1-2, TRAJ16)
CAVNRLSDGQKLLF

SEQ ID NO: 492900 - protein, 14 aa, Homo sapiens
  CDR3 for beta chain variable domain of TCR clone 246450 (TRBV7-2, TRBJ2-7)
CASSLYPGRYEQYF

SEQ ID NO: 492901 - protein, 16 aa, Homo sapiens
  CDR3 for alpha chain variable domain of TCR clone 246451 (TRAV3, TRAJ32)
CAVRDVEGGATNKLIF

SEQ ID NO: 492902 - protein, 15 aa, Homo sapiens
  CDR3 for beta chain variable domain of TCR clone 246451 (TRBV18, TRBJ2-1)
CASSPPSASYNEQFF

SEQ ID NO: 492903 - protein, 12 aa, Homo sapiens
  CDR3 for alpha chain variable domain of TCR clone 246452 (TRAV12-3, TRAJ17)
CAMTLTGNKLTF

SEQ ID NO: 492904 - protein, 15 aa, Homo sapiens
  CDR3 for beta chain variable domain of TCR clone 246452 (TRBV20-1, TRBJ2-7)
GSARDRVYGMDEQYF

SEQ ID NO: 492905 - protein, 14 aa, Homo sapiens
  CDR3 for alpha chain variable domain of TCR clone 246453 (TRAV8-4, TRAJ29)
CAVSAVEGNTPLVF

SEQ ID NO: 492906 - protein, 13 aa, Homo sapiens
  CDR3 for beta chain variable domain of TCR clone 246453 (TRBV12-4, TRBJ2-7)
RASSFQGRYEQYF

SEQ ID NO: 492907 - protein, 13 aa, Homo sapiens
  CDR3 for alpha chain variable domain of TCR clone 246454 (TRAV22, TRAJ12)
CAGRMDSSYNLIF

SEQ ID NO: 492908 - protein, 15 aa, Homo sapiens
  CDR3 for beta chain variable domain of TCR clone 246454 (TRBV10-1, TRBJ2-1)
CASSEWRGTYNEQFF

SEQ ID NO: 492909 - protein, 13 aa, Homo sapiens
  CDR3 for alpha chain variable domain of TCR clone 246455 (TRAV2, TRAJ40)
SAVVTSGTYKYIF

SEQ ID NO: 492910 - protein, 16 aa, Homo sapiens
  CDR3 for beta chain variable domain of TCR clone 246455 (TRBV29-1, TRBJ1-2)
CSVEANRDIANYGYTF

SEQ ID NO: 492911 - protein, 10 aa, Homo sapiens
  CDR3 for alpha chain variable domain of TCR clone 246456 (TRAV2, TRAJ34)
CAVVNDKLIF

SEQ ID NO: 492912 - protein, 16 aa, Homo sapiens
  CDR3 for beta chain variable domain of TCR clone 246456 (TRBV5-1, TRBJ2-3)
CTSSLGLAVYTDTQYF

SEQ ID NO: 492913 - protein, 16 aa, Homo sapiens
  CDR3 for alpha chain variable domain of TCR clone 246457 (TRAV8-6, TRAJ39)
CAVMPMNNNAGNMLTF

SEQ ID NO: 492914 - protein, 16 aa, Homo sapiens
  CDR3 for beta chain variable domain of TCR clone 246457 (TRBV15, TRBJ2-5)
CATSRYLEAAQETPYF

SEQ ID NO: 492915 - protein, 15 aa, Homo sapiens
  CDR3 for alpha chain variable domain of TCR clone 246458 (TRAV21, TRAJ40)
CAVRPQTSGTYKYIF

SEQ ID NO: 492916 - protein, 12 aa, Homo sapiens
  CDR3 for beta chain variable domain of TCR clone 246458 (TRBV29-1, TRBJ2-3)
CSVTGGADTQYF

SEQ ID NO: 492917 - protein, 14 aa, Homo sapiens
  CDR3 for alpha chain variable domain of TCR clone 246459 (TRAV3, TRAJ9)
FAVRGNTGGFKTIF

SEQ ID NO: 492918 - protein, 14 aa, Homo sapiens
  CDR3 for beta chain variable domain of TCR clone 246459 (TRBV15, TRBJ2-1)
CATSGVEDYNEQFF

SEQ ID NO: 492919 - protein, 14 aa, Homo sapiens
  CDR3 for alpha chain variable domain of TCR clone 246460 (TRAV12-2, TRAJ9)
CAVNMEGGGFTTIF

SEQ ID NO: 492920 - protein, 14 aa, Homo sapiens
  CDR3 for beta chain variable domain of TCR clone 246460 (TRBV2, TRBJ2-5)
CASSEVLAQETQYF

SEQ ID NO: 492921 - protein, 14 aa, Homo sapiens
  CDR3 for alpha chain variable domain of TCR clone 246461 (TRAV26-1, TRAJ38)
CVADNAGNNRKLSW

SEQ ID NO: 492922 - protein, 15 aa, Homo sapiens
  CDR3 for beta chain variable domain of TCR clone 246461 (TRBV7-2, TRBJ2-1)
CASSLVAGRYNEQFF

SEQ ID NO: 492923 - protein, 16 aa, Homo sapiens
  CDR3 for alpha chain variable domain of TCR clone 246462 (TRAV12-2, TRAJ32)
CAVNLGQGGATNKLIF

SEQ ID NO: 492924 - protein, 13 aa, Homo sapiens
  CDR3 for beta chain variable domain of TCR clone 246462 (TRBV20-1, TRBJ1-6)
CSASGGTYSPLHF

SEQ ID NO: 492925 - protein, 13 aa, Homo sapiens
  CDR3 for alpha chain variable domain of TCR clone 246463 (TRAV8-6, TRAJ49)
CAVITNTGNQFYF

SEQ ID NO: 492926 - protein, 14 aa, Homo sapiens
  CDR3 for beta chain variable domain of TCR clone 246463 (TRBV5-1, TRBJ2-7)
CASSRGESLCEQYF

SEQ ID NO: 492927 - protein, 12 aa, Homo sapiens
  CDR3 for alpha chain variable domain of TCR clone 246464 (TRAV12-3, TRAJ17)
CAMTLTGNKLTF

SEQ ID NO: 492928 - protein, 13 aa, Homo sapiens
  CDR3 for beta chain variable domain of TCR clone 246464 (TRBV9, TRBJ2-1)
CASSPSGGNEQFF

SEQ ID NO: 492929 - protein, 16 aa, Homo sapiens
  CDR3 for alpha chain variable domain of TCR clone 246465 (TRAV30, TRAJ24)
CGTEIGDADSWGKFQF

SEQ ID NO: 492930 - protein, 14 aa, Homo sapiens
  CDR3 for beta chain variable domain of TCR clone 246465 (TRBV12-5, TRBJ2-5)
CASGARTHQETQYF

SEQ ID NO: 492931 - protein, 14 aa, Homo sapiens
  CDR3 for alpha chain variable domain of TCR clone 246466 (TRAV12-1, TRAJ17)
CVVNYKAAGNKLTF

SEQ ID NO: 492932 - protein, 13 aa, Homo sapiens
  CDR3 for beta chain variable domain of TCR clone 246466 (TRBV20-1, TRBJ2-2)
CSASAAGTGELFF

SEQ ID NO: 492933 - protein, 15 aa, Homo sapiens
  CDR3 for alpha chain variable domain of TCR clone 246467 (TRAV3, TRAJ22)
CAVRDRGGSARRLTF

SEQ ID NO: 492934 - protein, 13 aa, Homo sapiens
  CDR3 for beta chain variable domain of TCR clone 246467 (TRBV7-3, TRBJ2-1)
CASSLDSYNEQFF

SEQ ID NO: 492935 - protein, 15 aa, Homo sapiens
  CDR3 for alpha chain variable domain of TCR clone 246468 (TRAV8-3, TRAJ11)
CAVGLLNSGYSTLTF

SEQ ID NO: 492936 - protein, 16 aa, Homo sapiens
  CDR3 for beta chain variable domain of TCR clone 246468 (TRBV7-9, TRBJ1-2)
CASSLGFSSGEDGYYF

SEQ ID NO: 492937 - protein, 16 aa, Homo sapiens
  CDR3 for alpha chain variable domain of TCR clone 246469 (TRAV30, TRAJ24)
CGTEIVDADSWGKFQF

SEQ ID NO: 492938 - protein, 17 aa, Homo sapiens
  CDR3 for beta chain variable domain of TCR clone 246469 (TRBV13, TRBJ2-3)
CASRLSRVAGGRNTQYF

SEQ ID NO: 492939 - protein, 12 aa, Homo sapiens
  CDR3 for alpha chain variable domain of TCR clone 246470 (TRAV13-1, TRAJ9)
CASHTGGFKTIF

SEQ ID NO: 492940 - protein, 18 aa, Homo sapiens
  CDR3 for beta chain variable domain of TCR clone 246470 (TRBV11-2, TRBJ2-3)
CASSLGGASQGAPNTQYF

SEQ ID NO: 492941 - protein, 15 aa, Homo sapiens
  CDR3 for alpha chain variable domain of TCR clone 246471 (TRAV26-1, TRAJ29)
RIVRVEVSGNTPLVF

SEQ ID NO: 492942 - protein, 15 aa, Homo sapiens
  CDR3 for beta chain variable domain of TCR clone 246471 (TRBV7-9, TRBJ1-5)
CASSQGHQPNQPQHF

SEQ ID NO: 492943 - protein, 16 aa, Homo sapiens
  CDR3 for alpha chain variable domain of TCR clone 246472 (TRAV26-1, )
CIDIQNPDPAVYQLRD

SEQ ID NO: 492944 - protein, 19 aa, Homo sapiens
  CDR3 for beta chain variable domain of TCR clone 246472 (TRBV19, TRBJ2-5)
CASGIGQVTDFFLGETQYF

SEQ ID NO: 492945 - protein, 18 aa, Homo sapiens
  CDR3 for alpha chain variable domain of TCR clone 246473 (TRAV21, TRAJ52)
CAVRPSPAGGTSYGKLTF

SEQ ID NO: 492946 - protein, 14 aa, Homo sapiens
  CDR3 for beta chain variable domain of TCR clone 246473 (TRBV25-1, TRBJ1-1)
CASTHLGWNTEAFF

SEQ ID NO: 492947 - protein, 17 aa, Homo sapiens
  CDR3 for alpha chain variable domain of TCR clone 246474 (TRAV17, TRAJ52)
CATDRNAGGTSYGKLTF

SEQ ID NO: 492948 - protein, 12 aa, Homo sapiens
  CDR3 for beta chain variable domain of TCR clone 246474 (TRBV5-1, TRBJ2-1)
CASIGGYNEQFF

SEQ ID NO: 492949 - protein, 12 aa, Homo sapiens
  CDR3 for alpha chain variable domain of TCR clone 246475 (TRAV1-2, TRAJ9)
CAGYTGGFKTIF

SEQ ID NO: 492950 - protein, 15 aa, Homo sapiens
  CDR3 for beta chain variable domain of TCR clone 246475 (TRBV11-2, TRBJ2-1)
CASSPAGQSPNEQFF

SEQ ID NO: 492951 - protein, 14 aa, Homo sapiens
  CDR3 for alpha chain variable domain of TCR clone 246476 (TRAV26-2, TRAJ38)
CILYNAGNNRKLIW

SEQ ID NO: 492952 - protein, 14 aa, Homo sapiens
  CDR3 for beta chain variable domain of TCR clone 246476 (TRBV11-3, TRBJ2-3)
CASLKDAGRGYAVF

SEQ ID NO: 492953 - protein, 13 aa, Homo sapiens
  CDR3 for alpha chain variable domain of TCR clone 246477 (TRAV17, TRAJ39)
CATVSNAGNMPTF

SEQ ID NO: 492954 - protein, 15 aa, Homo sapiens
  CDR3 for beta chain variable domain of TCR clone 246477 (TRBV5-1, TRBJ2-1)
CASSPPRAPYNEQFF

SEQ ID NO: 492955 - protein, 17 aa, Homo sapiens
  CDR3 for alpha chain variable domain of TCR clone 246478 (TRAV3, TRAJ6)
CAVRDGPRAGGRYIPTF

SEQ ID NO: 492956 - protein, 14 aa, Homo sapiens
  CDR3 for beta chain variable domain of TCR clone 246478 (TRBV7-2, TRBJ2-7)
CASSPKTSFYEQYF

SEQ ID NO: 492957 - protein, 14 aa, Homo sapiens
  CDR3 for alpha chain variable domain of TCR clone 246479 (TRAV16, TRAJ17)
CSLSGRAAGNKLTF

SEQ ID NO: 492958 - protein, 17 aa, Homo sapiens
  CDR3 for beta chain variable domain of TCR clone 246479 (TRBV18, TRBJ2-6)
CASSPRQGAVGANVLTF

SEQ ID NO: 492959 - protein, 14 aa, Homo sapiens
  CDR3 for alpha chain variable domain of TCR clone 246480 (TRAV26-2, TRAJ32)
CILFRGGATNKLIF

SEQ ID NO: 492960 - protein, 13 aa, Homo sapiens
  CDR3 for beta chain variable domain of TCR clone 246480 (TRBV20-1, TRBJ1-1)
CSARGGGNTEAFF

SEQ ID NO: 492961 - protein, 15 aa, Homo sapiens
  CDR3 for alpha chain variable domain of TCR clone 246481 (TRAV12-3, TRAJ6)
CAMSATTGGSYILTF

SEQ ID NO: 492962 - protein, 17 aa, Homo sapiens
  CDR3 for beta chain variable domain of TCR clone 246481 (TRBV13, TRBJ2-3)
CASSLSRVAGGRNTQYF

SEQ ID NO: 492963 - protein, 14 aa, Homo sapiens
  CDR3 for alpha chain variable domain of TCR clone 246482 (TRAV12-2, TRAJ17)
CAVLFKAAGNKLTF

SEQ ID NO: 492964 - protein, 17 aa, Homo sapiens
  CDR3 for beta chain variable domain of TCR clone 246482 (TRBV20-1, TRBJ2-2)
CSASGSGHCGLTGELFF

SEQ ID NO: 492965 - protein, 10 aa, Homo sapiens
  CDR3 for alpha chain variable domain of TCR clone 246483 (TRAV8-4, TRAJ43)
CAVSAGDMRF

SEQ ID NO: 492966 - protein, 16 aa, Homo sapiens
  CDR3 for beta chain variable domain of TCR clone 246483 (TRBV12-5, TRBJ2-5)
CASGPRTSGNQETQYF

SEQ ID NO: 492967 - protein, 14 aa, Homo sapiens
  CDR3 for alpha chain variable domain of TCR clone 246484 (TRAV12-2, TRAJ13)
CAVKKTGGYQKVTF

SEQ ID NO: 492968 - protein, 17 aa, Homo sapiens
  CDR3 for beta chain variable domain of TCR clone 246484 (TRBV15, TRBJ2-4)
CATSRDNTQTGLDIQYF

SEQ ID NO: 492969 - protein, 14 aa, Homo sapiens
  CDR3 for alpha chain variable domain of TCR clone 246485 (TRAV8-1, TRAJ48)
CAVNAGFGNEKLTF

SEQ ID NO: 492970 - protein, 18 aa, Homo sapiens
  CDR3 for beta chain variable domain of TCR clone 246485 (TRBV11-3, TRBJ2-1)
CASSSYPGGRDSYNEQFF

SEQ ID NO: 492971 - protein, 12 aa, Homo sapiens
  CDR3 for alpha chain variable domain of TCR clone 246486 (TRAV12-3, TRAJ34)
CAMGYNTDKLIF

SEQ ID NO: 492972 - protein, 15 aa, Homo sapiens
  CDR3 for beta chain variable domain of TCR clone 246486 (TRBV28, TRBJ2-1)
CASSRIAGGRSEQFF

SEQ ID NO: 492973 - protein, 13 aa, Homo sapiens
  CDR3 for alpha chain variable domain of TCR clone 246487 (TRAV21, TRAJ27)
CAARPGNPGKPTF

SEQ ID NO: 492974 - protein, 14 aa, Homo sapiens
  CDR3 for beta chain variable domain of TCR clone 246487 (TRBV7-6, TRBJ2-3)
CASSLGTVTDTQYF

SEQ ID NO: 492975 - protein, 15 aa, Homo sapiens
  CDR3 for alpha chain variable domain of TCR clone 246488 (TRAV3, TRAJ30)
CAVRDEYGRDNKIIF

SEQ ID NO: 492976 - protein, 13 aa, Homo sapiens
  CDR3 for beta chain variable domain of TCR clone 246488 (TRBV5-5, TRBJ1-2)
CASSFWRGEDYTF

SEQ ID NO: 492977 - protein, 10 aa, Homo sapiens
  CDR3 for alpha chain variable domain of TCR clone 246489 (TRAV30, TRAJ34)
CGTNPDKLIF

SEQ ID NO: 492978 - protein, 15 aa, Homo sapiens
  CDR3 for beta chain variable domain of TCR clone 246489 (TRBV20-1, TRBJ1-1)
CSASRGVTGNTEAFF

SEQ ID NO: 492979 - protein, 16 aa, Homo sapiens
  CDR3 for alpha chain variable domain of TCR clone 246490 (TRAV25, TRAJ36)
CAGRGEVRTGANNLFF

SEQ ID NO: 492980 - protein, 19 aa, Homo sapiens
  CDR3 for beta chain variable domain of TCR clone 246490 (TRBV3-1, TRBJ2-5)
CASSQDRTSGRTRRETQYF

SEQ ID NO: 492981 - protein, 15 aa, Homo sapiens
  CDR3 for alpha chain variable domain of TCR clone 246491 (TRAV8-4, TRAJ3)
CAVTGENLVQQCFQD

SEQ ID NO: 492982 - protein, 14 aa, Homo sapiens
  CDR3 for beta chain variable domain of TCR clone 246491 (TRBV5-5, TRBJ1-5)
CASSGQGVDQPQHF

SEQ ID NO: 492983 - protein, 22 aa, Homo sapiens
  CDR3 for alpha chain variable domain of TCR clone 246492 (TRAV3, TRAJ38)
CAVRDCLNAGNNHIQNPDPAVY

SEQ ID NO: 492984 - protein, 19 aa, Homo sapiens
  CDR3 for beta chain variable domain of TCR clone 246492 (TRBV7-2, TRBJ2-3)
CASSFLSRNWGGGADTQYF

SEQ ID NO: 492985 - protein, 13 aa, Homo sapiens
  CDR3 for alpha chain variable domain of TCR clone 246493 (TRAV13-1, TRAJ12)
CSKYMGSSYKLIF

SEQ ID NO: 492986 - protein, 13 aa, Homo sapiens
  CDR3 for beta chain variable domain of TCR clone 246493 (TRBV7-2, TRBJ2-2)
CASSLAVTGELFF

SEQ ID NO: 492987 - protein, 13 aa, Homo sapiens
  CDR3 for alpha chain variable domain of TCR clone 246494 (TRAV17, TRAJ26)
CATVDNYGQNFVF

SEQ ID NO: 492988 - protein, 16 aa, Homo sapiens
  CDR3 for beta chain variable domain of TCR clone 246494 (TRBV7-2, TRBJ1-1)
CASSFLQGRLKLSLDK

SEQ ID NO: 492989 - protein, 14 aa, Homo sapiens
  CDR3 for alpha chain variable domain of TCR clone 246495 (TRAV12-2, TRAJ4)
CAEDPSGGYNKLIF

SEQ ID NO: 492990 - protein, 13 aa, Homo sapiens
  CDR3 for beta chain variable domain of TCR clone 246495 (TRBV7-9, TRBJ1-2)
CASSLKQNYGDTF

SEQ ID NO: 492991 - protein, 15 aa, Homo sapiens
  CDR3 for alpha chain variable domain of TCR clone 246496 (TRAV29/DV5, TRAJ29)
CAASERSSGNTPLVF

SEQ ID NO: 492992 - protein, 16 aa, Homo sapiens
  CDR3 for beta chain variable domain of TCR clone 246496 (TRBV28, TRBJ2-5)
CASSFSPAGGWETQYF

SEQ ID NO: 492993 - protein, 15 aa, Homo sapiens
  CDR3 for alpha chain variable domain of TCR clone 246497 (TRAV26-1, TRAJ29)
CIVRVEGSGNTPRVF

SEQ ID NO: 492994 - protein, 14 aa, Homo sapiens
  CDR3 for beta chain variable domain of TCR clone 246497 (TRBV25-1, TRBJ1-1)
CASTHLGGNTEAFF

SEQ ID NO: 492995 - protein, 11 aa, Homo sapiens
  CDR3 for alpha chain variable domain of TCR clone 246498 (TRAV3, TRAJ21)
CALGNFNKFYF

SEQ ID NO: 492996 - protein, 14 aa, Homo sapiens
  CDR3 for beta chain variable domain of TCR clone 246498 (TRBV25-1, TRBJ1-1)
CASTHLGGNTEAFF

SEQ ID NO: 492997 - protein, 16 aa, Homo sapiens
  CDR3 for alpha chain variable domain of TCR clone 246499 (TRAV30, TRAJ24)
CSTEIVDADSWGKFQF

SEQ ID NO: 492998 - protein, 13 aa, Homo sapiens
  CDR3 for beta chain variable domain of TCR clone 246499 (TRBV10-3, TRBJ2-7)
CASKLAVNYEQYF

SEQ ID NO: 492999 - protein, 17 aa, Homo sapiens
  CDR3 for alpha chain variable domain of TCR clone 246500 (TRAV17, TRAJ28)
CATDPRRGGAGSYQLTF

SEQ ID NO: 493000 - protein, 16 aa, Homo sapiens
  CDR3 for beta chain variable domain of TCR clone 246500 (TRBV25-1, TRBJ1-1)
CASSGDRDRGRIETFF

SEQ ID NO: 493001 - protein, 13 aa, Homo sapiens
  CDR3 for alpha chain variable domain of TCR clone 246501 (TRAV3, TRAJ4)
CAVRDGGYNQLIF

SEQ ID NO: 493002 - protein, 14 aa, Homo sapiens
  CDR3 for beta chain variable domain of TCR clone 246501 (TRBV12-4, TRBJ1-2)
CASSSSAAGSSYTF

SEQ ID NO: 493003 - protein, 10 aa, Homo sapiens
  CDR3 for alpha chain variable domain of TCR clone 246502 (TRAV30, TRAJ16)
CGTGVQKLLF

SEQ ID NO: 493004 - protein, 14 aa, Homo sapiens
  CDR3 for beta chain variable domain of TCR clone 246502 (TRBV6-1, TRBJ1-2)
CASSTGWPPTGYTF

SEQ ID NO: 493005 - protein, 13 aa, Homo sapiens
  CDR3 for alpha chain variable domain of TCR clone 246503 (TRAV12-1, TRAJ39)
CATLNNAGNMLTF

SEQ ID NO: 493006 - protein, 17 aa, Homo sapiens
  CDR3 for beta chain variable domain of TCR clone 246503 (TRBV6-1, TRBJ2-3)
CASSEFVTGGPTDTQYF

SEQ ID NO: 493007 - protein, 17 aa, Homo sapiens
  CDR3 for alpha chain variable domain of TCR clone 246504 (TRAV3, TRAJ6)
CAVRDGPRAGGSYTPTF

SEQ ID NO: 493008 - protein, 15 aa, Homo sapiens
  CDR3 for beta chain variable domain of TCR clone 246504 (TRBV7-9, TRBJ1-6)
CASSSPGRGNSPLHF

SEQ ID NO: 493009 - protein, 12 aa, Homo sapiens
  CDR3 for alpha chain variable domain of TCR clone 246505 (TRAV12-3, TRAJ17)
CAMKLTGNKLTF

SEQ ID NO: 493010 - protein, 13 aa, Homo sapiens
  CDR3 for beta chain variable domain of TCR clone 246505 (TRBV10-3, TRBJ2-7)
CASKLAVNYEQYF

SEQ ID NO: 493011 - protein, 14 aa, Homo sapiens
  CDR3 for alpha chain variable domain of TCR clone 246506 (TRAV8-2, TRAJ37)
CVVSISGNTGKLIF

SEQ ID NO: 493012 - protein, 18 aa, Homo sapiens
  CDR3 for beta chain variable domain of TCR clone 246506 (TRBV18, TRBJ2-3)
CASSYTSGAAGGTDTQYF

SEQ ID NO: 493013 - protein, 11 aa, Homo sapiens
  CDR3 for alpha chain variable domain of TCR clone 246507 (TRAV20, TRAJ23)
CACNQGGKLII

SEQ ID NO: 493014 - protein, 16 aa, Homo sapiens
  CDR3 for beta chain variable domain of TCR clone 246507 (TRBV7-8, TRBJ2-5)
CASSFGGQPAQETKYF

SEQ ID NO: 493015 - protein, 17 aa, Homo sapiens
  CDR3 for alpha chain variable domain of TCR clone 246508 (TRAV3, TRAJ42)
CAVRDRDYGGSQGNPIF

SEQ ID NO: 493016 - protein, 17 aa, Homo sapiens
  CDR3 for beta chain variable domain of TCR clone 246508 (TRBV28, TRBJ2-5)
CASSTPEGDALQETQYF

SEQ ID NO: 493017 - protein, 14 aa, Homo sapiens
  CDR3 for alpha chain variable domain of TCR clone 246509 (TRAV8-3, TRAJ4)
CAVGAAGVYNMLIF

SEQ ID NO: 493018 - protein, 15 aa, Homo sapiens
  CDR3 for beta chain variable domain of TCR clone 246509 (TRBV6-5, TRBJ2-1)
CASSYDAGAGNEQFF

SEQ ID NO: 493019 - protein, 18 aa, Homo sapiens
  CDR3 for alpha chain variable domain of TCR clone 246510 (TRAV26-2, TRAJ45)
CILRVWGYSGGGADGLTF

SEQ ID NO: 493020 - protein, 17 aa, Homo sapiens
  CDR3 for beta chain variable domain of TCR clone 246510 (TRBV28, TRBJ2-3)
CASSPTTAGGRVDTQYF

SEQ ID NO: 493021 - protein, 15 aa, Homo sapiens
  CDR3 for alpha chain variable domain of TCR clone 246511 (TRAV21, TRAJ22)
CAVRLFFWFCKATDL

SEQ ID NO: 493022 - protein, 13 aa, Homo sapiens
  CDR3 for beta chain variable domain of TCR clone 246511 (TRBV7-9, TRBJ1-2)
CASSLKQNYGYTF

SEQ ID NO: 493023 - protein, 14 aa, Homo sapiens
  CDR3 for alpha chain variable domain of TCR clone 246512 (TRAV4, TRAJ9)
CLVGSWTGGFKTIF

SEQ ID NO: 493024 - protein, 15 aa, Homo sapiens
  CDR3 for beta chain variable domain of TCR clone 246512 (TRBV27, TRBJ2-1)
CASSNGGGSSNEQFF

SEQ ID NO: 493025 - protein, 13 aa, Homo sapiens
  CDR3 for alpha chain variable domain of TCR clone 246513 (TRAV12-3, TRAJ35)
CAMAIGFGNVLHC

SEQ ID NO: 493026 - protein, 15 aa, Homo sapiens
  CDR3 for beta chain variable domain of TCR clone 246513 (TRBV5-1, TRBJ1-3)
CASSSKTGAGNTIYF

SEQ ID NO: 493027 - protein, 16 aa, Homo sapiens
  CDR3 for alpha chain variable domain of TCR clone 246514 (TRAV12-3, TRAJ53)
CAMSPGSGGSNSKLTF

SEQ ID NO: 493028 - protein, 17 aa, Homo sapiens
  CDR3 for beta chain variable domain of TCR clone 246514 (TRBV28, TRBJ2-5)
CASSTPEGDALQETQYF

SEQ ID NO: 493029 - protein, 12 aa, Homo sapiens
  CDR3 for alpha chain variable domain of TCR clone 246515 (TRAV3, TRAJ31)
CAVRDGNARLMF

SEQ ID NO: 493030 - protein, 16 aa, Homo sapiens
  CDR3 for beta chain variable domain of TCR clone 246515 (TRBV12-4, TRBJ2-7)
CASSLIGGTGTYEQYF

SEQ ID NO: 493031 - protein, 14 aa, Homo sapiens
  CDR3 for alpha chain variable domain of TCR clone 246516 (TRAV12-1, TRAJ30)
CVPTVTNRDDKIIF

SEQ ID NO: 493032 - protein, 11 aa, Homo sapiens
  CDR3 for beta chain variable domain of TCR clone 246516 (TRBV4-1, TRBJ2-2)
CASEHTGELFF

SEQ ID NO: 493033 - protein, 15 aa, Homo sapiens
  CDR3 for alpha chain variable domain of TCR clone 246517 (TRAV21, TRAJ53)
CATLNSGGSNYKLTF

SEQ ID NO: 493034 - protein, 16 aa, Homo sapiens
  CDR3 for beta chain variable domain of TCR clone 246517 (TRBV6-1, TRBJ2-2)
CASSAFRGGDTGELFF

SEQ ID NO: 493035 - protein, 13 aa, Homo sapiens
  CDR3 for alpha chain variable domain of TCR clone 246518 (TRAV26-1, TRAJ29)
CIVRRSGNTPLVF

SEQ ID NO: 493036 - protein, 16 aa, Homo sapiens
  CDR3 for beta chain variable domain of TCR clone 246518 (TRBV2, TRBJ2-1)
CASSVGGSLSYNEQFF

SEQ ID NO: 493037 - protein, 11 aa, Homo sapiens
  CDR3 for alpha chain variable domain of TCR clone 246519 (TRAV12-1, TRAJ34)
CVVNKGREIIF

SEQ ID NO: 493038 - protein, 20 aa, Homo sapiens
  CDR3 for beta chain variable domain of TCR clone 246519 (TRBV7-8, TRBJ2-2)
CASSHLFPGPTIHITGELFF

SEQ ID NO: 493039 - protein, 12 aa, Homo sapiens
  CDR3 for alpha chain variable domain of TCR clone 246520 (TRAV8-3, TRAJ26)
CAGDNYGQNFVF

SEQ ID NO: 493040 - protein, 13 aa, Homo sapiens
  CDR3 for beta chain variable domain of TCR clone 246520 (TRBV28, TRBJ2-1)
CASRSGGLNEQFF

SEQ ID NO: 493041 - protein, 15 aa, Homo sapiens
  CDR3 for alpha chain variable domain of TCR clone 246521 (TRAV12-2, TRAJ53)
CAVNGGGGSNYKLKF

SEQ ID NO: 493042 - protein, 11 aa, Homo sapiens
  CDR3 for beta chain variable domain of TCR clone 246521 (TRBV7-8, TRBJ2-7)
CASSLSLEQYF

SEQ ID NO: 493043 - protein, 15 aa, Homo sapiens
  CDR3 for alpha chain variable domain of TCR clone 246522 (TRAV3, TRAJ3)
CAARDRDSSASKIIF

SEQ ID NO: 493044 - protein, 12 aa, Homo sapiens
  CDR3 for beta chain variable domain of TCR clone 246522 (TRBV29-1, TRBJ2-3)
CSVTGGADTQYF

SEQ ID NO: 493045 - protein, 18 aa, Homo sapiens
  CDR3 for alpha chain variable domain of TCR clone 246523 (TRAV16, TRAJ26)
CALSGSEFCLCSRNQIVR

SEQ ID NO: 493046 - protein, 12 aa, Homo sapiens
  CDR3 for beta chain variable domain of TCR clone 246523 (TRBV11-2, TRBJ2-1)
CASSPGDNEQLF

SEQ ID NO: 493047 - protein, 11 aa, Homo sapiens
  CDR3 for alpha chain variable domain of TCR clone 246524 (TRAV2, TRAJ13)
CASGGHQKVTF

SEQ ID NO: 493048 - protein, 16 aa, Homo sapiens
  CDR3 for beta chain variable domain of TCR clone 246524 (TRBV19, TRBJ2-1)
CASSKAGPSSYNEQFF

SEQ ID NO: 493049 - protein, 13 aa, Homo sapiens
  CDR3 for alpha chain variable domain of TCR clone 246525 (TRAV8-3, TRAJ20)
CAVGRPHDYKLSF

SEQ ID NO: 493050 - protein, 14 aa, Homo sapiens
  CDR3 for beta chain variable domain of TCR clone 246525 (TRBV12-5, TRBJ2-5)
CASGSRTHQETQYF

SEQ ID NO: 493051 - protein, 14 aa, Homo sapiens
  CDR3 for alpha chain variable domain of TCR clone 246526 (TRAV17, TRAJ57)
CATDPQGGSERLVF

SEQ ID NO: 493052 - protein, 18 aa, Homo sapiens
  CDR3 for beta chain variable domain of TCR clone 246526 (TRBV25-1, TRBJ2-1)
CASSESRAGGPGYNERFF

SEQ ID NO: 493053 - protein, 22 aa, Homo sapiens
  CDR3 for alpha chain variable domain of TCR clone 246527 (TRAV12-2, TRAJ32)
CSSETPSPVIQPPKSATNKLIF

SEQ ID NO: 493054 - protein, 14 aa, Homo sapiens
  CDR3 for beta chain variable domain of TCR clone 246527 (TRBV7-3, TRBJ2-1)
YASSLSGSYNEQFF

SEQ ID NO: 493055 - protein, 12 aa, Homo sapiens
  CDR3 for alpha chain variable domain of TCR clone 246528 (TRAV3, TRAJ20)
CAVRDPDYKLSF

SEQ ID NO: 493056 - protein, 11 aa, Homo sapiens
  CDR3 for beta chain variable domain of TCR clone 246528 (TRBV28, TRBJ2-5)
CASSLKETQYV

SEQ ID NO: 493057 - protein, 12 aa, Homo sapiens
  CDR3 for alpha chain variable domain of TCR clone 246529 (TRAV3, TRAJ26)
CAVRDYGQNFVF

SEQ ID NO: 493058 - protein, 16 aa, Homo sapiens
  CDR3 for beta chain variable domain of TCR clone 246529 (TRBV11-2, TRBJ1-2)
CASSPSGRGANYGYAF

SEQ ID NO: 493059 - protein, 14 aa, Homo sapiens
  CDR3 for alpha chain variable domain of TCR clone 246530 (TRAV1-2, TRAJ16)
CAVNRFSDGQKLLF

SEQ ID NO: 493060 - protein, 13 aa, Homo sapiens
  CDR3 for beta chain variable domain of TCR clone 246530 (TRBV7-2, TRBJ2-7)
CASSFGQEKEQYL

SEQ ID NO: 493061 - protein, 10 aa, Homo sapiens
  CDR3 for alpha chain variable domain of TCR clone 246531 (TRAV1-2, TRAJ23)
CAGQGGKRIF

SEQ ID NO: 493062 - protein, 14 aa, Homo sapiens
  CDR3 for beta chain variable domain of TCR clone 246531 (TRBV5-1, TRBJ1-2)
CASSLEPVNYGYTF

SEQ ID NO: 493063 - protein, 13 aa, Homo sapiens
  CDR3 for alpha chain variable domain of TCR clone 246532 (TRAV12-2, TRAJ15)
CAVFNQAGTALIF

SEQ ID NO: 493064 - protein, 14 aa, Homo sapiens
  CDR3 for beta chain variable domain of TCR clone 246532 (TRBV7-8, TRBJ2-3)
CASSLEAGTDTQYF

SEQ ID NO: 493065 - protein, 14 aa, Homo sapiens
  CDR3 for alpha chain variable domain of TCR clone 246533 (TRAV14/DV4, TRAJ54)
CAMREAPGAQKRVF

SEQ ID NO: 493066 - protein, 15 aa, Homo sapiens
  CDR3 for beta chain variable domain of TCR clone 246533 (TRBV5-1, TRBJ2-7)
CASSLNGGPAREQYF

SEQ ID NO: 493067 - protein, 13 aa, Homo sapiens
  CDR3 for alpha chain variable domain of TCR clone 246534 (TRAV2, TRAJ15)
CAVGGQAGTALIF

SEQ ID NO: 493068 - protein, 12 aa, Homo sapiens
  CDR3 for beta chain variable domain of TCR clone 246534 (TRBV6-3, TRBJ2-7)
CASSLTPYEQYF

SEQ ID NO: 493069 - protein, 16 aa, Homo sapiens
  CDR3 for alpha chain variable domain of TCR clone 246535 (TRAV17, TRAJ22)
CATDAISSVSARQLTF

SEQ ID NO: 493070 - protein, 15 aa, Homo sapiens
  CDR3 for beta chain variable domain of TCR clone 246535 (TRBV5-1, TRBJ2-1)
CASSPPRAPYNEQLF

SEQ ID NO: 493071 - protein, 14 aa, Homo sapiens
  CDR3 for alpha chain variable domain of TCR clone 246536 (TRAV29/DV5, TRAJ45)
CAASFRGGGDGLTF

SEQ ID NO: 493072 - protein, 11 aa, Homo sapiens
  CDR3 for beta chain variable domain of TCR clone 246536 (TRBV11-2, TRBJ2-2)
CASSLPGELFF

SEQ ID NO: 493073 - protein, 11 aa, Homo sapiens
  CDR3 for alpha chain variable domain of TCR clone 246537 (TRAV12-1, TRAJ31)
CVVNGDARLMF

SEQ ID NO: 493074 - protein, 14 aa, Homo sapiens
  CDR3 for beta chain variable domain of TCR clone 246537 (TRBV4-2, TRBJ2-1)
CASGLDRAYNEQFF

SEQ ID NO: 493075 - protein, 16 aa, Homo sapiens
  CDR3 for alpha chain variable domain of TCR clone 246538 (TRAV3, TRAJ21)
CAVRDIERGNFNKFYF

SEQ ID NO: 493076 - protein, 19 aa, Homo sapiens
  CDR3 for beta chain variable domain of TCR clone 246538 (TRBV25-1, TRBJ2-2)
CAILVYRVDRGRKTGELFF

SEQ ID NO: 493077 - protein, 12 aa, Homo sapiens
  CDR3 for alpha chain variable domain of TCR clone 246539 (TRAV12-1, TRAJ41)
CVVGNSGYALNF

SEQ ID NO: 493078 - protein, 12 aa, Homo sapiens
  CDR3 for beta chain variable domain of TCR clone 246539 (TRBV11-2, TRBJ2-2)
CASSLGGGELFF

SEQ ID NO: 493079 - protein, 12 aa, Homo sapiens
  CDR3 for alpha chain variable domain of TCR clone 246540 (TRAV12-3, TRAJ17)
CAMALTGNKLTF

SEQ ID NO: 493080 - protein, 15 aa, Homo sapiens
  CDR3 for beta chain variable domain of TCR clone 246540 (TRBV20-1, TRBJ2-7)
CSARDRVAGMDEQYF

SEQ ID NO: 493081 - protein, 15 aa, Homo sapiens
  CDR3 for alpha chain variable domain of TCR clone 246541 (TRAV35, TRAJ40)
CAGQLGQAGTYKYIF

SEQ ID NO: 493082 - protein, 14 aa, Homo sapiens
  CDR3 for beta chain variable domain of TCR clone 246541 (TRBV7-3, TRBJ2-1)
CASSLTGGANEQFY

SEQ ID NO: 493083 - protein, 14 aa, Homo sapiens
  CDR3 for alpha chain variable domain of TCR clone 246542 (TRAV26-1, TRAJ38)
CIVVGAGNNRKLIW

SEQ ID NO: 493084 - protein, 12 aa, Homo sapiens
  CDR3 for beta chain variable domain of TCR clone 246542 (TRBV5-1, TRBJ2-5)
GASSWDQETQYF

SEQ ID NO: 493085 - protein, 15 aa, Homo sapiens
  CDR3 for alpha chain variable domain of TCR clone 246543 (TRAV3, TRAJ13)
CAVRVYSGGYQKVTF

SEQ ID NO: 493086 - protein, 15 aa, Homo sapiens
  CDR3 for beta chain variable domain of TCR clone 246543 (TRBV28, TRBJ2-6)
CASSLAGSGANVLTF

SEQ ID NO: 493087 - protein, 13 aa, Homo sapiens
  CDR3 for alpha chain variable domain of TCR clone 246544 (TRAV26-1, TRAJ40)
CIVATSGTYKYIF

SEQ ID NO: 493088 - protein, 15 aa, Homo sapiens
  CDR3 for beta chain variable domain of TCR clone 246544 (TRBV7-2, TRBJ2-2)
CQQLIQGAEHRGAVF

SEQ ID NO: 493089 - protein, 13 aa, Homo sapiens
  CDR3 for alpha chain variable domain of TCR clone 246545 (TRAV8-4, TRAJ48)
CAVSLFGTEKLTF

SEQ ID NO: 493090 - protein, 15 aa, Homo sapiens
  CDR3 for beta chain variable domain of TCR clone 246545 (TRBV20-1, TRBJ2-7)
CSARKGLVESYEQYF

SEQ ID NO: 493091 - protein, 17 aa, Homo sapiens
  CDR3 for alpha chain variable domain of TCR clone 246546 (TRAV26-1, TRAJ57)
CIVRPRFTQGGSEKLVF

SEQ ID NO: 493092 - protein, 16 aa, Homo sapiens
  CDR3 for beta chain variable domain of TCR clone 246546 (TRBV13, TRBJ2-2)
CGGSEVFGANTGELFF

SEQ ID NO: 493093 - protein, 17 aa, Homo sapiens
  CDR3 for alpha chain variable domain of TCR clone 246547 (TRAV8-6, TRAJ4)
CAVGEKMGFGAGTRLAV

SEQ ID NO: 493094 - protein, 14 aa, Homo sapiens
  CDR3 for beta chain variable domain of TCR clone 246547 (TRBV20-1, TRBJ1-1)
CSAQTRIGGTEAFF

SEQ ID NO: 493095 - protein, 13 aa, Homo sapiens
  CDR3 for alpha chain variable domain of TCR clone 246548 (TRAV17, TRAJ5)
CALRGTGRRALTF

SEQ ID NO: 493096 - protein, 12 aa, Homo sapiens
  CDR3 for beta chain variable domain of TCR clone 246548 (TRBV5-5, TRBJ2-5)
CASSYFGETQYF

SEQ ID NO: 493097 - protein, 13 aa, Homo sapiens
  CDR3 for alpha chain variable domain of TCR clone 246549 (TRAV21, TRAJ15)
CAVRNQAGTSLIF

SEQ ID NO: 493098 - protein, 16 aa, Homo sapiens
  CDR3 for beta chain variable domain of TCR clone 246549 (TRBV20-1, TRBJ2-5)
CSPGGTSGGYMETRYF

SEQ ID NO: 493099 - protein, 17 aa, Homo sapiens
  CDR3 for alpha chain variable domain of TCR clone 246550 (TRAV4, TRAJ18)
CLVVAAGRGSTLGRLYF

SEQ ID NO: 493100 - protein, 17 aa, Homo sapiens
  CDR3 for beta chain variable domain of TCR clone 246550 (TRBV28, TRBJ2-2)
CASRLATGMGDAGELFF

SEQ ID NO: 493101 - protein, 15 aa, Homo sapiens
  CDR3 for alpha chain variable domain of TCR clone 246551 (TRAV2, TRAJ9)
CAVEDRGTGSFKTIF

SEQ ID NO: 493102 - protein, 16 aa, Homo sapiens
  CDR3 for beta chain variable domain of TCR clone 246551 (TRBV24-1, TRBJ2-3)
CATSDPGTGATDTQYF

SEQ ID NO: 493103 - protein, 16 aa, Homo sapiens
  CDR3 for alpha chain variable domain of TCR clone 246552 (TRAV8-3, TRAJ38)
CAVGASYAGNNRTLIW

SEQ ID NO: 493104 - protein, 15 aa, Homo sapiens
  CDR3 for beta chain variable domain of TCR clone 246552 (TRBV11-3, TRBJ1-3)
CASSLFGPSGNTIYF

SEQ ID NO: 493105 - protein, 13 aa, Homo sapiens
  CDR3 for alpha chain variable domain of TCR clone 246553 (TRAV12-2, TRAJ18)
CAGRGSTLGRLYF

SEQ ID NO: 493106 - protein, 14 aa, Homo sapiens
  CDR3 for beta chain variable domain of TCR clone 246553 (TRBV7-2, TRBJ2-7)
CASSPKTSFYEQYF

SEQ ID NO: 493107 - protein, 12 aa, Homo sapiens
  CDR3 for alpha chain variable domain of TCR clone 246554 (TRAV12-2, TRAJ42)
CAVGGSQGNLIF

SEQ ID NO: 493108 - protein, 17 aa, Homo sapiens
  CDR3 for beta chain variable domain of TCR clone 246554 (TRBV5-5, TRBJ1-2)
CASSLGSLDGQSEGYTF

SEQ ID NO: 493109 - protein, 14 aa, Homo sapiens
  CDR3 for alpha chain variable domain of TCR clone 246555 (TRAV1-2, TRAJ8)
CAVREDTGFQKLVF

SEQ ID NO: 493110 - protein, 13 aa, Homo sapiens
  CDR3 for beta chain variable domain of TCR clone 246555 (TRBV6-6, TRBJ1-5)
CASSTGGLQPQHF

SEQ ID NO: 493111 - protein, 10 aa, Homo sapiens
  CDR3 for alpha chain variable domain of TCR clone 246556 (TRAV30, TRAJ48)
CGIGSEKLTS

SEQ ID NO: 493112 - protein, 14 aa, Homo sapiens
  CDR3 for beta chain variable domain of TCR clone 246556 (TRBV7-6, TRBJ2-3)
CASSVAGGTDTQYF

SEQ ID NO: 493113 - protein, 12 aa, Homo sapiens
  CDR3 for alpha chain variable domain of TCR clone 246557 (TRAV12-1, TRAJ31)
CVSWNNNTRLMF

SEQ ID NO: 493114 - protein, 15 aa, Homo sapiens
  CDR3 for beta chain variable domain of TCR clone 246557 (TRBV7-2, TRBJ1-5)
CASSLDRGQDQPQHF

SEQ ID NO: 493115 - protein, 15 aa, Homo sapiens
  CDR3 for alpha chain variable domain of TCR clone 246558 (TRAV8-3, TRAJ11)
CAVGLLNSGYSTLTF

SEQ ID NO: 493116 - protein, 16 aa, Homo sapiens
  CDR3 for beta chain variable domain of TCR clone 246558 (TRBV7-9, TRBJ1-2)
CASSLGFSSGEDSYTF

SEQ ID NO: 493117 - protein, 16 aa, Homo sapiens
  CDR3 for alpha chain variable domain of TCR clone 246559 (TRAV8-3, TRAJ13)
SALGAYPSGGYQKVTF

SEQ ID NO: 493118 - protein, 15 aa, Homo sapiens
  CDR3 for beta chain variable domain of TCR clone 246559 (TRBV19, TRBJ1-5)
CASSIVWADNQPQHF

SEQ ID NO: 493119 - protein, 14 aa, Homo sapiens
  CDR3 for alpha chain variable domain of TCR clone 246560 (TRAV17, TRAJ16)
CATADFSDGQKLLF

SEQ ID NO: 493120 - protein, 18 aa, Homo sapiens
  CDR3 for beta chain variable domain of TCR clone 246560 (TRBV25-1, TRBJ2-2)
CHPSLPGGQGAQNRGAVF

SEQ ID NO: 493121 - protein, 13 aa, Homo sapiens
  CDR3 for alpha chain variable domain of TCR clone 246561 (TRAV8-3, TRAJ28)
CAVGAVGSYQLAF

SEQ ID NO: 493122 - protein, 15 aa, Homo sapiens
  CDR3 for beta chain variable domain of TCR clone 246561 (TRBV7-9, TRBJ1-5)
CAGSQGHQPNQPQHF

SEQ ID NO: 493123 - protein, 12 aa, Homo sapiens
  CDR3 for alpha chain variable domain of TCR clone 246562 (TRAV12-3, TRAJ17)
CSMTLTGNKLTL

SEQ ID NO: 493124 - protein, 15 aa, Homo sapiens
  CDR3 for beta chain variable domain of TCR clone 246562 (TRBV20-1, TRBJ2-7)
CSARDQVSGMDEQYF

SEQ ID NO: 493125 - protein, 14 aa, Homo sapiens
  CDR3 for alpha chain variable domain of TCR clone 246563 (TRAV1-2, TRAJ16)
CAVNRFSDGQKLLF

SEQ ID NO: 493126 - protein, 17 aa, Homo sapiens
  CDR3 for beta chain variable domain of TCR clone 246563 (TRBV13, TRBJ2-3)
CASSLSRVAGGRNTKYF

SEQ ID NO: 493127 - protein, 11 aa, Homo sapiens
  CDR3 for alpha chain variable domain of TCR clone 246564 (TRAV1-2, TRAJ20)
CAVSNDYKLSF

SEQ ID NO: 493128 - protein, 15 aa, Homo sapiens
  CDR3 for beta chain variable domain of TCR clone 246564 (TRBV5-1, TRBJ2-2)
CASSAQGGNTGELFF

SEQ ID NO: 493129 - protein, 12 aa, Homo sapiens
  CDR3 for alpha chain variable domain of TCR clone 246565 (TRAV12-1, TRAJ40)
CVVYSGTYKYIF

SEQ ID NO: 493130 - protein, 15 aa, Homo sapiens
  CDR3 for beta chain variable domain of TCR clone 246565 (TRBV9, TRBJ2-1)
CASSLAGSSYNEQFF

SEQ ID NO: 493131 - protein, 12 aa, Homo sapiens
  CDR3 for alpha chain variable domain of TCR clone 246566 (TRAV2, TRAJ9)
CAVGSGGFKTIF

SEQ ID NO: 493132 - protein, 12 aa, Homo sapiens
  CDR3 for beta chain variable domain of TCR clone 246566 (TRBV11-2, TRBJ2-1)
CASSPGNNEQFF

SEQ ID NO: 493133 - protein, 14 aa, Homo sapiens
  CDR3 for alpha chain variable domain of TCR clone 246567 (TRAV16, TRAJ31)
CSKWRRGDNARLMF

SEQ ID NO: 493134 - protein, 16 aa, Homo sapiens
  CDR3 for beta chain variable domain of TCR clone 246567 (TRBV27, TRBJ2-5)
CASSSQTSGFQETQYF

SEQ ID NO: 493135 - protein, 16 aa, Homo sapiens
  CDR3 for alpha chain variable domain of TCR clone 246568 (TRAV4, TRAJ22)
CLVGDLYAGSARQLSF

SEQ ID NO: 493136 - protein, 16 aa, Homo sapiens
  CDR3 for beta chain variable domain of TCR clone 246568 (TRBV7-9, TRBJ2-1)
CASSDVAGGSYNEQFF

SEQ ID NO: 493137 - protein, 12 aa, Homo sapiens
  CDR3 for alpha chain variable domain of TCR clone 246569 (TRAV13-1, TRAJ21)
CAAKEGFNKFYF

SEQ ID NO: 493138 - protein, 17 aa, Homo sapiens
  CDR3 for beta chain variable domain of TCR clone 246569 (TRBV20-1, TRBJ2-1)
CSASSSGLAGSCNEQLF

SEQ ID NO: 493139 - protein, 13 aa, Homo sapiens
  CDR3 for alpha chain variable domain of TCR clone 246570 (TRAV2, TRAJ40)
CAVVTSGTYKYIF

SEQ ID NO: 493140 - protein, 14 aa, Homo sapiens
  CDR3 for beta chain variable domain of TCR clone 246570 (TRBV19, TRBJ2-1)
RASPTFGLSGEQFF

SEQ ID NO: 493141 - protein, 22 aa, Homo sapiens
  CDR3 for alpha chain variable domain of TCR clone 246571 (TRAV26-1, TRAJ23)
CCVLLHRQSGLEVWNQGGKLIF

SEQ ID NO: 493142 - protein, 15 aa, Homo sapiens
  CDR3 for beta chain variable domain of TCR clone 246571 (TRBV7-9, TRBJ1-6)
CASSSPGRGNSPLHF

SEQ ID NO: 493143 - protein, 14 aa, Homo sapiens
  CDR3 for alpha chain variable domain of TCR clone 246572 (TRAV8-6, TRAJ12)
CAVKAAGSSYKLIF

SEQ ID NO: 493144 - protein, 15 aa, Homo sapiens
  CDR3 for beta chain variable domain of TCR clone 246572 (TRBV5-1, TRBJ2-5)
CASSLGLAEQETRYF

SEQ ID NO: 493145 - protein, 15 aa, Homo sapiens
  CDR3 for alpha chain variable domain of TCR clone 246573 (TRAV13-2, TRAJ6)
CAEKVLAGGSYIPTF

SEQ ID NO: 493146 - protein, 13 aa, Homo sapiens
  CDR3 for beta chain variable domain of TCR clone 246573 (TRBV20-1, TRBJ1-1)
CSARGGGNTEAVF

SEQ ID NO: 493147 - protein, 12 aa, Homo sapiens
  CDR3 for alpha chain variable domain of TCR clone 246574 (TRAV12-1, TRAJ9)
CVVHTGGFKTTF

SEQ ID NO: 493148 - protein, 14 aa, Homo sapiens
  CDR3 for beta chain variable domain of TCR clone 246574 (TRBV7-2, TRBJ2-7)
CASSPKTSFYEQYF

SEQ ID NO: 493149 - protein, 12 aa, Homo sapiens
  CDR3 for alpha chain variable domain of TCR clone 246575 (TRAV27, TRAJ9)
CAGESGGSKPIF

SEQ ID NO: 493150 - protein, 14 aa, Homo sapiens
  CDR3 for beta chain variable domain of TCR clone 246575 (TRBV6-1, TRBJ2-1)
CASAKDGFYNEQFF

SEQ ID NO: 493151 - protein, 14 aa, Homo sapiens
  CDR3 for alpha chain variable domain of TCR clone 246576 (TRAV2, TRAJ9)
CAVEDRCGGFKTIF

SEQ ID NO: 493152 - protein, 15 aa, Homo sapiens
  CDR3 for beta chain variable domain of TCR clone 246576 (TRBV5-7, TRBJ1-5)
CASSYGKLWDQPQHF

SEQ ID NO: 493153 - protein, 10 aa, Homo sapiens
  CDR3 for alpha chain variable domain of TCR clone 246577 (TRAV12-1, TRAJ23)
CVVSGGKLIF

SEQ ID NO: 493154 - protein, 13 aa, Homo sapiens
  CDR3 for beta chain variable domain of TCR clone 246577 (TRBV6-5, TRBJ2-1)
CASSYELSNEQFF

SEQ ID NO: 493155 - protein, 14 aa, Homo sapiens
  CDR3 for alpha chain variable domain of TCR clone 246578 (TRAV36/DV7, TRAJ45)
CPLYSGGGADGLTF

SEQ ID NO: 493156 - protein, 14 aa, Homo sapiens
  CDR3 for beta chain variable domain of TCR clone 246578 (TRBV4-1, TRBJ1-1)
CASSPRVDNTEAFF

SEQ ID NO: 493157 - protein, 14 aa, Homo sapiens
  CDR3 for alpha chain variable domain of TCR clone 246579 (TRAV1-2, TRAJ8)
CAVTEDTGFQKLVF

SEQ ID NO: 493158 - protein, 15 aa, Homo sapiens
  CDR3 for beta chain variable domain of TCR clone 246579 (TRBV6-3, TRBJ2-7)
YASSSPGTVFYEQYF

SEQ ID NO: 493159 - protein, 18 aa, Homo sapiens
  CDR3 for alpha chain variable domain of TCR clone 246580 (TRAV12-3, TRAJ52)
CAMSRTNAGGTSYGKLTF

SEQ ID NO: 493160 - protein, 17 aa, Homo sapiens
  CDR3 for beta chain variable domain of TCR clone 246580 (TRBV4-1, TRBJ2-3)
CASSQGYVSGGTDTQYF

SEQ ID NO: 493161 - protein, 22 aa, Homo sapiens
  CDR3 for alpha chain variable domain of TCR clone 246581 (TRAV4, TRAJ37)
CLVGDGRLWQHRQTNLWARDNF

SEQ ID NO: 493162 - protein, 15 aa, Homo sapiens
  CDR3 for beta chain variable domain of TCR clone 246581 (TRBV6-6, TRBJ1-1)
CASSYASGAGTEAFI

SEQ ID NO: 493163 - protein, 14 aa, Homo sapiens
  CDR3 for alpha chain variable domain of TCR clone 246582 (TRAV1-2, TRAJ8)
CAVREDTGFQKLVF

SEQ ID NO: 493164 - protein, 13 aa, Homo sapiens
  CDR3 for beta chain variable domain of TCR clone 246582 (TRBV24-1, TRBJ2-2)
CATSDWSTGEPFF

SEQ ID NO: 493165 - protein, 16 aa, Homo sapiens
  CDR3 for alpha chain variable domain of TCR clone 246583 (TRAV30, TRAJ24)
CSTEIVDADSWGKFKF

SEQ ID NO: 493166 - protein, 14 aa, Homo sapiens
  CDR3 for beta chain variable domain of TCR clone 246583 (TRBV12-5, TRBJ2-5)
CASGSRTHQETQYF

SEQ ID NO: 493167 - protein, 14 aa, Homo sapiens
  CDR3 for alpha chain variable domain of TCR clone 246584 (TRAV27, TRAJ49)
CAGRPEGTGNQCYF

SEQ ID NO: 493168 - protein, 15 aa, Homo sapiens
  CDR3 for beta chain variable domain of TCR clone 246584 (TRBV19, TRBJ2-1)
CASSIQATSYNEQFF

SEQ ID NO: 493169 - protein, 14 aa, Homo sapiens
  CDR3 for alpha chain variable domain of TCR clone 246585 (TRAV29/DV5, TRAJ38)
CIADNAGNNRKLIC

SEQ ID NO: 493170 - protein, 17 aa, Homo sapiens
  CDR3 for beta chain variable domain of TCR clone 246585 (TRBV7-9, TRBJ2-3)
CASSPTVARDLTDTQYF

SEQ ID NO: 493171 - protein, 13 aa, Homo sapiens
  CDR3 for alpha chain variable domain of TCR clone 246586 (TRAV17, TRAJ9)
CATDYTGGFKTIL

SEQ ID NO: 493172 - protein, 14 aa, Homo sapiens
  CDR3 for beta chain variable domain of TCR clone 246586 (TRBV19, TRBJ2-5)
CASSMTGQQETQYF

SEQ ID NO: 493173 - protein, 14 aa, Homo sapiens
  CDR3 for alpha chain variable domain of TCR clone 246587 (TRAV12-1, TRAJ38)
CGELKAGNNRKLIW

SEQ ID NO: 493174 - protein, 12 aa, Homo sapiens
  CDR3 for beta chain variable domain of TCR clone 246587 (TRBV24-1, TRBJ1-1)
CATLDPDTEAFF

SEQ ID NO: 493175 - protein, 13 aa, Homo sapiens
  CDR3 for alpha chain variable domain of TCR clone 246588 (TRAV21, TRAJ49)
CAVRQSTGNQFYF

SEQ ID NO: 493176 - protein, 13 aa, Homo sapiens
  CDR3 for beta chain variable domain of TCR clone 246588 (TRBV6-6, TRBJ1-5)
CASRPYQDQPQHF

SEQ ID NO: 493177 - protein, 13 aa, Homo sapiens
  CDR3 for alpha chain variable domain of TCR clone 246589 (TRAV27, TRAJ6)
CAGGTRGSYIPTF

SEQ ID NO: 493178 - protein, 13 aa, Homo sapiens
  CDR3 for beta chain variable domain of TCR clone 246589 (TRBV2, TRBJ1-2)
CASSVRGNYGYTF

SEQ ID NO: 493179 - protein, 16 aa, Homo sapiens
  CDR3 for alpha chain variable domain of TCR clone 246590 (TRAV38-2/DV8, TRAJ45)
CAYTTTSGGGADGHPF

SEQ ID NO: 493180 - protein, 16 aa, Homo sapiens
  CDR3 for beta chain variable domain of TCR clone 246590 (TRBV7-3, TRBJ2-2)
CASSLKRGTLSGELFF

SEQ ID NO: 493181 - protein, 18 aa, Homo sapiens
  CDR3 for alpha chain variable domain of TCR clone 246591 (TRAV21, TRAJ52)
CAVRPSPAGGTSYGKLTF

SEQ ID NO: 493182 - protein, 15 aa, Homo sapiens
  CDR3 for beta chain variable domain of TCR clone 246591 (TRBV7-6, TRBJ2-7)
CASSLGGAEPYEQYF

SEQ ID NO: 493183 - protein, 11 aa, Homo sapiens
  CDR3 for alpha chain variable domain of TCR clone 246592 (TRAV1-2, TRAJ20)
CAVANDYKLSF

SEQ ID NO: 493184 - protein, 12 aa, Homo sapiens
  CDR3 for beta chain variable domain of TCR clone 246592 (TRBV6-3, TRBJ2-7)
CASSEPGFEQYF

SEQ ID NO: 493185 - protein, 12 aa, Homo sapiens
  CDR3 for alpha chain variable domain of TCR clone 246593 (TRAV13-1, TRAJ21)
CAAKEGFNKFYF

SEQ ID NO: 493186 - protein, 12 aa, Homo sapiens
  CDR3 for beta chain variable domain of TCR clone 246593 (TRBV6-3, TRBJ2-1)
CASSGSYNEQLF

SEQ ID NO: 493187 - protein, 13 aa, Homo sapiens
  CDR3 for alpha chain variable domain of TCR clone 246594 (TRAV26-1, TRAJ48)
CIVANFGNEKLTF

SEQ ID NO: 493188 - protein, 15 aa, Homo sapiens
  CDR3 for beta chain variable domain of TCR clone 246594 (TRBV7-2, TRBJ2-1)
CASSSGLAGGNEQFF

SEQ ID NO: 493189 - protein, 15 aa, Homo sapiens
  CDR3 for alpha chain variable domain of TCR clone 246595 (TRAV3, TRAJ5)
CAVRDLDTGRRALTF

SEQ ID NO: 493190 - protein, 13 aa, Homo sapiens
  CDR3 for beta chain variable domain of TCR clone 246595 (TRBV13, TRBJ2-5)
CASSPEVGETQYF

SEQ ID NO: 493191 - protein, 16 aa, Homo sapiens
  CDR3 for alpha chain variable domain of TCR clone 246596 (TRAV3, TRAJ6)
CAVRDGMGGRKRHTYI

SEQ ID NO: 493192 - protein, 15 aa, Homo sapiens
  CDR3 for beta chain variable domain of TCR clone 246596 (TRBV9, TRBJ2-1)
CASSLAGSSYNEQFF

SEQ ID NO: 493193 - protein, 10 aa, Homo sapiens
  CDR3 for alpha chain variable domain of TCR clone 246597 (TRAV30, TRAJ48)
FGLGNEKLTF

SEQ ID NO: 493194 - protein, 14 aa, Homo sapiens
  CDR3 for beta chain variable domain of TCR clone 246597 (TRBV7-6, TRBJ2-3)
CASSVAGGTDTQYF

SEQ ID NO: 493195 - protein, 14 aa, Homo sapiens
  CDR3 for alpha chain variable domain of TCR clone 246598 (TRAV16, TRAJ17)
CAPRIKAAGNKLTF

SEQ ID NO: 493196 - protein, 12 aa, Homo sapiens
  CDR3 for beta chain variable domain of TCR clone 246598 (TRBV7-9, TRBJ2-7)
CASSFGSYEQYF

SEQ ID NO: 493197 - protein, 15 aa, Homo sapiens
  CDR3 for alpha chain variable domain of TCR clone 246599 (TRAV16, TRAJ4)
CALEDTSGGYNKLIF

SEQ ID NO: 493198 - protein, 13 aa, Homo sapiens
  CDR3 for beta chain variable domain of TCR clone 246599 (TRBV7-3, TRBJ2-7)
CGSSQAGGYEQYF

SEQ ID NO: 493199 - protein, 11 aa, Homo sapiens
  CDR3 for alpha chain variable domain of TCR clone 246600 (TRAV4, TRAJ23)
CLVAPGAKLIF

SEQ ID NO: 493200 - protein, 15 aa, Homo sapiens
  CDR3 for beta chain variable domain of TCR clone 246600 (TRBV7-2, TRBJ2-1)
CASSFQADEYNEQFF

SEQ ID NO: 493201 - protein, 16 aa, Homo sapiens
  CDR3 for alpha chain variable domain of TCR clone 246601 (TRAV35, TRAJ28)
CAGQRYSGAGSYQLTF

SEQ ID NO: 493202 - protein, 13 aa, Homo sapiens
  CDR3 for beta chain variable domain of TCR clone 246601 (TRBV19, TRBJ1-2)
CASSQVQVYGYTF

SEQ ID NO: 493203 - protein, 14 aa, Homo sapiens
  CDR3 for alpha chain variable domain of TCR clone 246602 (TRAV2, TRAJ9)
CAVEDRSGGFKTIF

SEQ ID NO: 493204 - protein, 11 aa, Homo sapiens
  CDR3 for beta chain variable domain of TCR clone 246602 (TRBV20-1, TRBJ2-7)
CSGRQGHEQYF

SEQ ID NO: 493205 - protein, 16 aa, Homo sapiens
  CDR3 for alpha chain variable domain of TCR clone 246603 (TRAV3, TRAJ4)
CAVRPSPSGAYNNLIF

SEQ ID NO: 493206 - protein, 12 aa, Homo sapiens
  CDR3 for beta chain variable domain of TCR clone 246603 (TRBV7-9, TRBJ2-7)
CASSQGVYEQYF

SEQ ID NO: 493207 - protein, 13 aa, Homo sapiens
  CDR3 for alpha chain variable domain of TCR clone 246604 (TRAV12-2, TRAJ52)
CAAHGTSYGKLTF

SEQ ID NO: 493208 - protein, 15 aa, Homo sapiens
  CDR3 for beta chain variable domain of TCR clone 246604 (TRBV10-3, TRBJ2-7)
CAISTFRGVKGEQYF

SEQ ID NO: 493209 - protein, 11 aa, Homo sapiens
  CDR3 for alpha chain variable domain of TCR clone 246605 (TRAV13-1, TRAJ39)
CASHAGNMLTF

SEQ ID NO: 493210 - protein, 14 aa, Homo sapiens
  CDR3 for beta chain variable domain of TCR clone 246605 (TRBV4-1, TRBJ2-2)
CASSQAVNTGELFF

SEQ ID NO: 493211 - protein, 13 aa, Homo sapiens
  CDR3 for alpha chain variable domain of TCR clone 246606 (TRAV21, TRAJ20)
CAVGLRVDYKLSF

SEQ ID NO: 493212 - protein, 14 aa, Homo sapiens
  CDR3 for beta chain variable domain of TCR clone 246606 (TRBV6-3, TRBJ1-1)
CASSYGGQHTEAFF

SEQ ID NO: 493213 - protein, 12 aa, Homo sapiens
  CDR3 for alpha chain variable domain of TCR clone 246607 (TRAV8-3, TRAJ20)
CAVGANVYKLSF

SEQ ID NO: 493214 - protein, 16 aa, Homo sapiens
  CDR3 for beta chain variable domain of TCR clone 246607 (TRBV19, TRBJ2-2)
CASLSPGTGATGELFF

SEQ ID NO: 493215 - protein, 14 aa, Homo sapiens
  CDR3 for alpha chain variable domain of TCR clone 246608 (TRAV26-1, TRAJ45)
CIEVTGGGSDGLPF

SEQ ID NO: 493216 - protein, 13 aa, Homo sapiens
  CDR3 for beta chain variable domain of TCR clone 246608 (TRBV7-6, TRBJ1-2)
CASSLVADYGYTF

SEQ ID NO: 493217 - protein, 18 aa, Homo sapiens
  CDR3 for alpha chain variable domain of TCR clone 246609 (TRAV1-2, TRAJ18)
CAVRDMGDRGSTLGRLYF

SEQ ID NO: 493218 - protein, 14 aa, Homo sapiens
  CDR3 for beta chain variable domain of TCR clone 246609 (TRBV19, TRBJ1-5)
CASRAPDSFLSQHF

SEQ ID NO: 493219 - protein, 14 aa, Homo sapiens
  CDR3 for alpha chain variable domain of TCR clone 246610 (TRAV16, TRAJ26)
CDLSSANYGQNFVF

SEQ ID NO: 493220 - protein, 12 aa, Homo sapiens
  CDR3 for beta chain variable domain of TCR clone 246610 (TRBV6-5, TRBJ2-2)
CASRTGTGELFF

SEQ ID NO: 493221 - protein, 17 aa, Homo sapiens
  CDR3 for alpha chain variable domain of TCR clone 246611 (TRAV1-2, TRAJ8)
CAVRDPDENTGFQKLGF

SEQ ID NO: 493222 - protein, 16 aa, Homo sapiens
  CDR3 for beta chain variable domain of TCR clone 246611 (TRBV7-9, TRBJ2-2)
CASSGFGGANTGELFF

SEQ ID NO: 493223 - protein, 13 aa, Homo sapiens
  CDR3 for alpha chain variable domain of TCR clone 246612 (TRAV8-3, TRAJ43)
CAVGIYNNNDMRF

SEQ ID NO: 493224 - protein, 16 aa, Homo sapiens
  CDR3 for beta chain variable domain of TCR clone 246612 (TRBV7-2, TRBJ2-5)
CVSSLVLWTKQETQYF

SEQ ID NO: 493225 - protein, 18 aa, Homo sapiens
  CDR3 for alpha chain variable domain of TCR clone 246613 (TRAV13-1, TRAJ52)
CAAKNPNAGGTSYGKLTF

SEQ ID NO: 493226 - protein, 13 aa, Homo sapiens
  CDR3 for beta chain variable domain of TCR clone 246613 (TRBV12-4, TRBJ2-7)
CASSPTETYEQYF

SEQ ID NO: 493227 - protein, 14 aa, Homo sapiens
  CDR3 for alpha chain variable domain of TCR clone 246614 (TRAV12-2, TRAJ45)
CAVNSGGGADGLTF

SEQ ID NO: 493228 - protein, 15 aa, Homo sapiens
  CDR3 for beta chain variable domain of TCR clone 246614 (TRBV7-9, TRBJ1-5)
CASSQGHQPNQPQHF

SEQ ID NO: 493229 - protein, 11 aa, Homo sapiens
  CDR3 for alpha chain variable domain of TCR clone 246615 (TRAV3, TRAJ21)
CAVGNFNKFYF

SEQ ID NO: 493230 - protein, 14 aa, Homo sapiens
  CDR3 for beta chain variable domain of TCR clone 246615 (TRBV20-1, TRBJ2-2)
CSAPDTANTGELLF

SEQ ID NO: 493231 - protein, 15 aa, Homo sapiens
  CDR3 for alpha chain variable domain of TCR clone 246616 (TRAV26-1, TRAJ15)
CIVRDANQAGTALIF

SEQ ID NO: 493232 - protein, 13 aa, Homo sapiens
  CDR3 for beta chain variable domain of TCR clone 246616 (TRBV10-3, TRBJ2-7)
CAISEAGTYEQYF

SEQ ID NO: 493233 - protein, 11 aa, Homo sapiens
  CDR3 for alpha chain variable domain of TCR clone 246617 (TRAV4, TRAJ20)
CLVGDKVPTTS

SEQ ID NO: 493234 - protein, 13 aa, Homo sapiens
  CDR3 for beta chain variable domain of TCR clone 246617 (TRBV27, TRBJ1-4)
CASSLMGDEKLFF

SEQ ID NO: 493235 - protein, 13 aa, Homo sapiens
  CDR3 for alpha chain variable domain of TCR clone 246618 (TRAV12-3, TRAJ13)
CAMGTGGYQKVTF

SEQ ID NO: 493236 - protein, 14 aa, Homo sapiens
  CDR3 for beta chain variable domain of TCR clone 246618 (TRBV7-2, TRBJ2-5)
CASSTGVELKTQYF

SEQ ID NO: 493237 - protein, 12 aa, Homo sapiens
  CDR3 for alpha chain variable domain of TCR clone 246619 (TRAV13-1, TRAJ27)
CAAHTNSGKSTF

SEQ ID NO: 493238 - protein, 15 aa, Homo sapiens
  CDR3 for beta chain variable domain of TCR clone 246619 (TRBV7-9, TRBJ1-6)
CASSSPGRGNSPLHF

SEQ ID NO: 493239 - protein, 12 aa, Homo sapiens
  CDR3 for alpha chain variable domain of TCR clone 246620 (TRAV27, TRAJ41)
CAGRNSGDALNF

SEQ ID NO: 493240 - protein, 15 aa, Homo sapiens
  CDR3 for beta chain variable domain of TCR clone 246620 (TRBV20-1, TRBJ1-5)
CSATSDRGLGQPQHF

SEQ ID NO: 493241 - protein, 11 aa, Homo sapiens
  CDR3 for alpha chain variable domain of TCR clone 246621 (TRAV21, TRAJ39)
LLVNAGNMLTF

SEQ ID NO: 493242 - protein, 12 aa, Homo sapiens
  CDR3 for beta chain variable domain of TCR clone 246621 (TRBV28, TRBJ2-3)
CASSLYRDTQYF

SEQ ID NO: 493243 - protein, 13 aa, Homo sapiens
  CDR3 for alpha chain variable domain of TCR clone 246622 (TRAV12-2, TRAJ6)
CAVNVSRKLHTYI

SEQ ID NO: 493244 - protein, 15 aa, Homo sapiens
  CDR3 for beta chain variable domain of TCR clone 246622 (TRBV5-1, TRBJ2-3)
CASSVTSGSTDTQYF

SEQ ID NO: 493245 - protein, 15 aa, Homo sapiens
  CDR3 for alpha chain variable domain of TCR clone 246623 (TRAV21, TRAJ53)
CATLNSGGSNYKLTF

SEQ ID NO: 493246 - protein, 16 aa, Homo sapiens
  CDR3 for beta chain variable domain of TCR clone 246623 (TRBV19, TRBJ1-5)
CASSTWTGGGNQTQHV

SEQ ID NO: 493247 - protein, 14 aa, Homo sapiens
  CDR3 for alpha chain variable domain of TCR clone 246624 (TRAV8-2, TRAJ37)
CVVSLTGNTGKLIF

SEQ ID NO: 493248 - protein, 16 aa, Homo sapiens
  CDR3 for beta chain variable domain of TCR clone 246624 (TRBV11-2, TRBJ1-2)
CASSLDTGGADYGYTF

SEQ ID NO: 493249 - protein, 13 aa, Homo sapiens
  CDR3 for alpha chain variable domain of TCR clone 246625 (TRAV29/DV5, TRAJ29)
CAASAAGTTPLVF

SEQ ID NO: 493250 - protein, 14 aa, Homo sapiens
  CDR3 for beta chain variable domain of TCR clone 246625 (TRBV19, TRBJ2-3)
CASSAPRGTDTQYF

SEQ ID NO: 493251 - protein, 14 aa, Homo sapiens
  CDR3 for alpha chain variable domain of TCR clone 246626 (TRAV12-2, TRAJ36)
CAVNPPTGAKNLFF

SEQ ID NO: 493252 - protein, 13 aa, Homo sapiens
  CDR3 for beta chain variable domain of TCR clone 246626 (TRBV20-1, TRBJ1-6)
CSAPTGLGSPLHF

SEQ ID NO: 493253 - protein, 15 aa, Homo sapiens
  CDR3 for alpha chain variable domain of TCR clone 246627 (TRAV26-1, TRAJ40)
CIVRVTTSGTYKYIF

SEQ ID NO: 493254 - protein, 15 aa, Homo sapiens
  CDR3 for beta chain variable domain of TCR clone 246627 (TRBV5-1, TRBJ2-7)
CASSLGDFTTYEQYF

SEQ ID NO: 493255 - protein, 16 aa, Homo sapiens
  CDR3 for alpha chain variable domain of TCR clone 246628 (TRAV8-3, TRAJ10)
CAVGPILTGGGSRLTF

SEQ ID NO: 493256 - protein, 16 aa, Homo sapiens
  CDR3 for beta chain variable domain of TCR clone 246628 (TRBV7-2, TRBJ2-5)
CASSSKWLSGQETQYF

SEQ ID NO: 493257 - protein, 15 aa, Homo sapiens
  CDR3 for alpha chain variable domain of TCR clone 246629 (TRAV30, TRAJ49)
CGTEGWAEHRQPVRF

SEQ ID NO: 493258 - protein, 15 aa, Homo sapiens
  CDR3 for beta chain variable domain of TCR clone 246629 (TRBV2, TRBJ2-1)
CASSELAGSYNEQFF

SEQ ID NO: 493259 - protein, 14 aa, Homo sapiens
  CDR3 for alpha chain variable domain of TCR clone 246630 (TRAV8-3, TRAJ13)
CAVGAQEGYQKVTF

SEQ ID NO: 493260 - protein, 15 aa, Homo sapiens
  CDR3 for beta chain variable domain of TCR clone 246630 (TRBV3-1, TRBJ1-1)
CASMMRATMNTEAFF

SEQ ID NO: 493261 - protein, 14 aa, Homo sapiens
  CDR3 for alpha chain variable domain of TCR clone 246631 (TRAV17, TRAJ15)
CATGPNQAGTALIF

SEQ ID NO: 493262 - protein, 15 aa, Homo sapiens
  CDR3 for beta chain variable domain of TCR clone 246631 (TRBV11-2, TRBJ2-2)
CASSSHRVNAGELFF

SEQ ID NO: 493263 - protein, 13 aa, Homo sapiens
  CDR3 for alpha chain variable domain of TCR clone 246632 (TRAV29/DV5, TRAJ31)
CAASRNNNARLMF

SEQ ID NO: 493264 - protein, 13 aa, Homo sapiens
  CDR3 for beta chain variable domain of TCR clone 246632 (TRBV20-1, TRBJ1-1)
CSARGGGNTEAFF

SEQ ID NO: 493265 - protein, 16 aa, Homo sapiens
  CDR3 for alpha chain variable domain of TCR clone 246633 (TRAV35, TRAJ20)
CWADPSSGFDDYKLSF

SEQ ID NO: 493266 - protein, 16 aa, Homo sapiens
  CDR3 for beta chain variable domain of TCR clone 246633 (TRBV4-3, TRBJ1-6)
CASSAQPGGEGSPLHF

SEQ ID NO: 493267 - protein, 17 aa, Homo sapiens
  CDR3 for alpha chain variable domain of TCR clone 246634 (TRAV8-6, TRAJ58)
CAVSSWVGETSGSRLTF

SEQ ID NO: 493268 - protein, 12 aa, Homo sapiens
  CDR3 for beta chain variable domain of TCR clone 246634 (TRBV28, TRBJ1-3)
CASSFPQNTIYF

SEQ ID NO: 493269 - protein, 15 aa, Homo sapiens
  CDR3 for alpha chain variable domain of TCR clone 246635 (TRAV26-1, TRAJ29)
CIVRVEGSGNTPLVF

SEQ ID NO: 493270 - protein, 16 aa, Homo sapiens
  CDR3 for beta chain variable domain of TCR clone 246635 (TRBV7-2, TRBJ2-1)
CASSLGRTSGDNEQFF

SEQ ID NO: 493271 - protein, 11 aa, Homo sapiens
  CDR3 for alpha chain variable domain of TCR clone 246636 (TRAV2, TRAJ13)
CASGGYQNVTF

SEQ ID NO: 493272 - protein, 16 aa, Homo sapiens
  CDR3 for beta chain variable domain of TCR clone 246636 (TRBV6-1, TRBJ2-5)
CASSETLDRGAEAQYF

SEQ ID NO: 493273 - protein, 11 aa, Homo sapiens
  CDR3 for alpha chain variable domain of TCR clone 246637 (TRAV21, TRAJ34)
CAHYNTDKLIF

SEQ ID NO: 493274 - protein, 13 aa, Homo sapiens
  CDR3 for beta chain variable domain of TCR clone 246637 (TRBV5-1, TRBJ1-1)
CASSADWDTEAFF

SEQ ID NO: 493275 - protein, 15 aa, Homo sapiens
  CDR3 for alpha chain variable domain of TCR clone 246638 (TRAV3, TRAJ10)
CAVRDGTGGGNKLTF

SEQ ID NO: 493276 - protein, 12 aa, Homo sapiens
  CDR3 for beta chain variable domain of TCR clone 246638 (TRBV7-2, TRBJ2-5)
CASSRYQETQYF

SEQ ID NO: 493277 - protein, 20 aa, Homo sapiens
  CDR3 for alpha chain variable domain of TCR clone 246639 (TRAV12-2, TRAJ52)
SPVIQPPARAGGTSYGKLTF

SEQ ID NO: 493278 - protein, 16 aa, Homo sapiens
  CDR3 for beta chain variable domain of TCR clone 246639 (TRBV15, TRBJ1-2)
CATSRGPRTGGSGYTF

SEQ ID NO: 493279 - protein, 10 aa, Homo sapiens
  CDR3 for alpha chain variable domain of TCR clone 246640 (TRAV12-3, TRAJ34)
CAMSADKLIF

SEQ ID NO: 493280 - protein, 15 aa, Homo sapiens
  CDR3 for beta chain variable domain of TCR clone 246640 (TRBV20-1, TRBJ2-3)
CRARRGEAITDTQYF

SEQ ID NO: 493281 - protein, 10 aa, Homo sapiens
  CDR3 for alpha chain variable domain of TCR clone 246641 (TRAV12-2, TRAJ20)
CAVYLYKLSF

SEQ ID NO: 493282 - protein, 15 aa, Homo sapiens
  CDR3 for beta chain variable domain of TCR clone 246641 (TRBV7-2, TRBJ2-1)
CASSSGLAGGNEQFF

SEQ ID NO: 493283 - protein, 23 aa, Homo sapiens
  CDR3 for alpha chain variable domain of TCR clone 246642 (TRAV26-1, TRAJ38)
CIADNAGNNHIQNPDPAVDQLRD

SEQ ID NO: 493284 - protein, 13 aa, Homo sapiens
  CDR3 for beta chain variable domain of TCR clone 246642 (TRBV20-1, TRBJ1-1)
CSARGGGSTEAFF

SEQ ID NO: 493285 - protein, 14 aa, Homo sapiens
  CDR3 for alpha chain variable domain of TCR clone 246643 (TRAV13-2, TRAJ10)
CAENITGGGNKLTF

SEQ ID NO: 493286 - protein, 15 aa, Homo sapiens
  CDR3 for beta chain variable domain of TCR clone 246643 (TRBV7-9, TRBJ1-5)
CASSQGHQPNQPQHF

SEQ ID NO: 493287 - protein, 16 aa, Homo sapiens
  CDR3 for alpha chain variable domain of TCR clone 246644 (TRAV30, TRAJ24)
CGTEIVDADSWGKFQF

SEQ ID NO: 493288 - protein, 13 aa, Homo sapiens
  CDR3 for beta chain variable domain of TCR clone 246644 (TRBV15, TRBJ1-2)
CATSMTANYGYTF

SEQ ID NO: 493289 - protein, 14 aa, Homo sapiens
  CDR3 for alpha chain variable domain of TCR clone 246645 (TRAV8-6, TRAJ36)
CAVSDWLGQTTSSF

SEQ ID NO: 493290 - protein, 15 aa, Homo sapiens
  CDR3 for beta chain variable domain of TCR clone 246645 (TRBV10-3, TRBJ2-2)
CAISVATSSTGELFF

SEQ ID NO: 493291 - protein, 15 aa, Homo sapiens
  CDR3 for alpha chain variable domain of TCR clone 246646 (TRAV26-1, TRAJ29)
CIVRVEGSGNTPLVF

SEQ ID NO: 493292 - protein, 14 aa, Homo sapiens
  CDR3 for beta chain variable domain of TCR clone 246646 (TRBV18, TRBJ2-5)
CASSPGVSQQTQYF

SEQ ID NO: 493293 - protein, 12 aa, Homo sapiens
  CDR3 for alpha chain variable domain of TCR clone 246647 (TRAV3, TRAJ26)
CAVRDYGQNFVF

SEQ ID NO: 493294 - protein, 16 aa, Homo sapiens
  CDR3 for beta chain variable domain of TCR clone 246647 (TRBV3-1, TRBJ2-5)
CASSQDWASGQETQYF

SEQ ID NO: 493295 - protein, 14 aa, Homo sapiens
  CDR3 for alpha chain variable domain of TCR clone 246648 (TRAV1-2, TRAJ8)
CAVREDTGFQKLVF

SEQ ID NO: 493296 - protein, 13 aa, Homo sapiens
  CDR3 for beta chain variable domain of TCR clone 246648 (TRBV7-9, TRBJ1-2)
CASSLKQNYGYAF

SEQ ID NO: 493297 - protein, 12 aa, Homo sapiens
  CDR3 for alpha chain variable domain of TCR clone 246649 (TRAV1-2, TRAJ7)
FAVAYGNNRLAF

SEQ ID NO: 493298 - protein, 16 aa, Homo sapiens
  CDR3 for beta chain variable domain of TCR clone 246649 (TRBV5-1, TRBJ2-7)
CASSPMTGALSYEQYF

SEQ ID NO: 493299 - protein, 14 aa, Homo sapiens
  CDR3 for alpha chain variable domain of TCR clone 246650 (TRAV8-4, TRAJ29)
CAVSETLGETHLLS

SEQ ID NO: 493300 - protein, 18 aa, Homo sapiens
  CDR3 for beta chain variable domain of TCR clone 246650 (TRBV20-1, TRBJ2-6)
CSARTLAGGPSGANVLTF

SEQ ID NO: 493301 - protein, 17 aa, Homo sapiens
  CDR3 for alpha chain variable domain of TCR clone 246651 (TRAV3, TRAJ12)
CAVRDGGRMDSSYKLIF

SEQ ID NO: 493302 - protein, 15 aa, Homo sapiens
  CDR3 for beta chain variable domain of TCR clone 246651 (TRBV5-1, TRBJ2-1)
CASSPPGAPYNEQFF

SEQ ID NO: 493303 - protein, 13 aa, Homo sapiens
  CDR3 for alpha chain variable domain of TCR clone 246652 (TRAV12-2, TRAJ37)
CAVSSGNTGKLIL

SEQ ID NO: 493304 - protein, 17 aa, Homo sapiens
  CDR3 for beta chain variable domain of TCR clone 246652 (TRBV5-1, TRBJ2-5)
CASSLLGLAANQETQYF

SEQ ID NO: 493305 - protein, 13 aa, Homo sapiens
  CDR3 for alpha chain variable domain of TCR clone 246653 (TRAV13-1, TRAJ10)
CAATAGGGNKRTF

SEQ ID NO: 493306 - protein, 12 aa, Homo sapiens
  CDR3 for beta chain variable domain of TCR clone 246653 (TRBV7-3, TRBJ2-1)
CASSFQSGPQFF

SEQ ID NO: 493307 - protein, 14 aa, Homo sapiens
  CDR3 for alpha chain variable domain of TCR clone 246654 (TRAV8-4, TRAJ9)
CAVRINTGGFKTIF

SEQ ID NO: 493308 - protein, 14 aa, Homo sapiens
  CDR3 for beta chain variable domain of TCR clone 246654 (TRBV5-7, TRBJ1-2)
CASSLVRGDYGYTF

SEQ ID NO: 493309 - protein, 14 aa, Homo sapiens
  CDR3 for alpha chain variable domain of TCR clone 246655 (TRAV1-1, TRAJ27)
CAVIYNTNAGKSTF

SEQ ID NO: 493310 - protein, 15 aa, Homo sapiens
  CDR3 for beta chain variable domain of TCR clone 246655 (TRBV7-2, TRBJ2-3)
CASSLAWAFIDTQYF

SEQ ID NO: 493311 - protein, 14 aa, Homo sapiens
  CDR3 for alpha chain variable domain of TCR clone 246656 (TRAV29/DV5, TRAJ47)
CAASEPEYGNKLVF

SEQ ID NO: 493312 - protein, 17 aa, Homo sapiens
  CDR3 for beta chain variable domain of TCR clone 246656 (TRBV11-2, TRBJ2-1)
CASSLYPPGVEYNEQFF

SEQ ID NO: 493313 - protein, 15 aa, Homo sapiens
  CDR3 for alpha chain variable domain of TCR clone 246657 (TRAV23/DV6, TRAJ18)
CAARYRGSTLGGLYF

SEQ ID NO: 493314 - protein, 13 aa, Homo sapiens
  CDR3 for beta chain variable domain of TCR clone 246657 (TRBV7-2, TRBJ2-7)
CASSSPGGSEQYF

SEQ ID NO: 493315 - protein, 10 aa, Homo sapiens
  CDR3 for alpha chain variable domain of TCR clone 246658 (TRAV23/DV6, TRAJ57)
CAASSTLSQG

SEQ ID NO: 493316 - protein, 14 aa, Homo sapiens
  CDR3 for beta chain variable domain of TCR clone 246658 (TRBV25-1, TRBJ1-1)
CASTHLAGNTEAFF

SEQ ID NO: 493317 - protein, 14 aa, Homo sapiens
  CDR3 for alpha chain variable domain of TCR clone 246659 (TRAV1-2, TRAJ27)
CAVISGTNAGKSTF

SEQ ID NO: 493318 - protein, 15 aa, Homo sapiens
  CDR3 for beta chain variable domain of TCR clone 246659 (TRBV18, TRBJ2-7)
RASSPLQGRTYEQYF

SEQ ID NO: 493319 - protein, 12 aa, Homo sapiens
  CDR3 for alpha chain variable domain of TCR clone 246660 (TRAV13-1, TRAJ15)
CAASQAGSALIF

SEQ ID NO: 493320 - protein, 14 aa, Homo sapiens
  CDR3 for beta chain variable domain of TCR clone 246660 (TRBV19, TRBJ2-2)
CASSTLHKSGELFF

SEQ ID NO: 493321 - protein, 12 aa, Homo sapiens
  CDR3 for alpha chain variable domain of TCR clone 246661 (TRAV8-3, TRAJ20)
CAVDFNDYKLSF

SEQ ID NO: 493322 - protein, 12 aa, Homo sapiens
  CDR3 for beta chain variable domain of TCR clone 246661 (TRBV29-1, TRBJ2-3)
CSVAGGADTQYF

SEQ ID NO: 493323 - protein, 13 aa, Homo sapiens
  CDR3 for alpha chain variable domain of TCR clone 246662 (TRAV8-4, TRAJ49)
CAVSAPTGHQFYF

SEQ ID NO: 493324 - protein, 15 aa, Homo sapiens
  CDR3 for beta chain variable domain of TCR clone 246662 (TRBV7-2, TRBJ1-1)
CASSLDGTGETEAFF

SEQ ID NO: 493325 - protein, 15 aa, Homo sapiens
  CDR3 for alpha chain variable domain of TCR clone 246663 (TRAV1-2, TRAJ9)
CAVRDDGTGGFKTIF

SEQ ID NO: 493326 - protein, 18 aa, Homo sapiens
  CDR3 for beta chain variable domain of TCR clone 246663 (TRBV7-2, TRBJ2-3)
CASSLKREGSGITDTQYF

SEQ ID NO: 493327 - protein, 14 aa, Homo sapiens
  CDR3 for alpha chain variable domain of TCR clone 246664 (TRAV21, TRAJ21)
CAVRPRDNFNKFYF

SEQ ID NO: 493328 - protein, 15 aa, Homo sapiens
  CDR3 for beta chain variable domain of TCR clone 246664 (TRBV6-1, TRBJ2-3)
CASSERGGLTDTQYF

SEQ ID NO: 493329 - protein, 12 aa, Homo sapiens
  CDR3 for alpha chain variable domain of TCR clone 246665 (TRAV23/DV6, TRAJ3)
CAARAPQQCFQD

SEQ ID NO: 493330 - protein, 17 aa, Homo sapiens
  CDR3 for beta chain variable domain of TCR clone 246665 (TRBV7-9, TRBJ2-3)
CASSPTVAGYLTDTQYF

SEQ ID NO: 493331 - protein, 13 aa, Homo sapiens
  CDR3 for alpha chain variable domain of TCR clone 246666 (TRAV35, TRAJ44)
CAGLSGTASKLTF

SEQ ID NO: 493332 - protein, 12 aa, Homo sapiens
  CDR3 for beta chain variable domain of TCR clone 246666 (TRBV2, TRBJ2-1)
CAYGPPGNEQFF

SEQ ID NO: 493333 - protein, 14 aa, Homo sapiens
  CDR3 for alpha chain variable domain of TCR clone 246667 (TRAV35, TRAJ22)
CAGLRPCSARQLTF

SEQ ID NO: 493334 - protein, 15 aa, Homo sapiens
  CDR3 for beta chain variable domain of TCR clone 246667 (TRBV12-4, TRBJ2-5)
CARSPPTGLQETQYF

SEQ ID NO: 493335 - protein, 15 aa, Homo sapiens
  CDR3 for alpha chain variable domain of TCR clone 246668 (TRAV20, TRAJ53)
CAVQASGGSNYKLTF

SEQ ID NO: 493336 - protein, 12 aa, Homo sapiens
  CDR3 for beta chain variable domain of TCR clone 246668 (TRBV7-8, TRBJ2-7)
CACSLGDREQYF

SEQ ID NO: 493337 - protein, 14 aa, Homo sapiens
  CDR3 for alpha chain variable domain of TCR clone 246669 (TRAV12-1, TRAJ38)
CGVHNAGNNRKLIW

SEQ ID NO: 493338 - protein, 13 aa, Homo sapiens
  CDR3 for beta chain variable domain of TCR clone 246669 (TRBV19, TRBJ2-1)
CATSRGVYNEQFF

SEQ ID NO: 493339 - protein, 15 aa, Homo sapiens
  CDR3 for alpha chain variable domain of TCR clone 246670 (TRAV3, TRAJ23)
CAVRDRGNQGGKLIF

SEQ ID NO: 493340 - protein, 15 aa, Homo sapiens
  CDR3 for beta chain variable domain of TCR clone 246670 (TRBV6-1, TRBJ2-1)
CASSELRGQYNEQFF

SEQ ID NO: 493341 - protein, 12 aa, Homo sapiens
  CDR3 for alpha chain variable domain of TCR clone 246671 (TRAV1-2, TRAJ33)
CAALDSNYQLIW

SEQ ID NO: 493342 - protein, 15 aa, Homo sapiens
  CDR3 for beta chain variable domain of TCR clone 246671 (TRBV27, TRBJ2-1)
CASSNGGGSSSEQFF

SEQ ID NO: 493343 - protein, 15 aa, Homo sapiens
  CDR3 for alpha chain variable domain of TCR clone 246672 (TRAV26-1, TRAJ29)
CIVRVEGSGNTPLVF

SEQ ID NO: 493344 - protein, 15 aa, Homo sapiens
  CDR3 for beta chain variable domain of TCR clone 246672 (TRBV7-9, TRBJ1-5)
CASSQGHQPKQPQHC

SEQ ID NO: 493345 - protein, 13 aa, Homo sapiens
  CDR3 for alpha chain variable domain of TCR clone 246673 (TRAV2, TRAJ24)
CAVKADSWGKLQF

SEQ ID NO: 493346 - protein, 14 aa, Homo sapiens
  CDR3 for beta chain variable domain of TCR clone 246673 (TRBV13, TRBJ2-5)
CASSLGRGQETQYF

SEQ ID NO: 493347 - protein, 15 aa, Homo sapiens
  CDR3 for alpha chain variable domain of TCR clone 246674 (TRAV27, TRAJ50)
CAGVGRGTSYDKVIF

SEQ ID NO: 493348 - protein, 14 aa, Homo sapiens
  CDR3 for beta chain variable domain of TCR clone 246674 (TRBV7-2, TRBJ1-1)
CASSFYDVNAEAFF

SEQ ID NO: 493349 - protein, 15 aa, Homo sapiens
  CDR3 for alpha chain variable domain of TCR clone 246675 (TRAV21, TRAJ57)
CAVIITQGGSEKLVF

SEQ ID NO: 493350 - protein, 14 aa, Homo sapiens
  CDR3 for beta chain variable domain of TCR clone 246675 (TRBV6-1, TRBJ1-3)
CASVQGGGGNTIYF

SEQ ID NO: 493351 - protein, 12 aa, Homo sapiens
  CDR3 for alpha chain variable domain of TCR clone 246676 (TRAV1-2, TRAJ24)
CSVGGSWGKFQF

SEQ ID NO: 493352 - protein, 14 aa, Homo sapiens
  CDR3 for beta chain variable domain of TCR clone 246676 (TRBV7-2, TRBJ2-7)
CASSPKTSFYEQYF

SEQ ID NO: 493353 - protein, 15 aa, Homo sapiens
  CDR3 for alpha chain variable domain of TCR clone 246677 (TRAV2, TRAJ15)
CAVEDRGQAGTALIF

SEQ ID NO: 493354 - protein, 13 aa, Homo sapiens
  CDR3 for beta chain variable domain of TCR clone 246677 (TRBV12-4, TRBJ2-5)
CASSLGGSRTQNF

SEQ ID NO: 493355 - protein, 15 aa, Homo sapiens
  CDR3 for alpha chain variable domain of TCR clone 246678 (TRAV21, TRAJ24)
CAARSSTDSWGKLQF

SEQ ID NO: 493356 - protein, 15 aa, Homo sapiens
  CDR3 for beta chain variable domain of TCR clone 246678 (TRBV19, TRBJ1-2)
CASSVGQVLNYGYTF

SEQ ID NO: 493357 - protein, 15 aa, Homo sapiens
  CDR3 for alpha chain variable domain of TCR clone 246679 (TRAV3, TRAJ29)
CAVRAPLSGNTPLVF

SEQ ID NO: 493358 - protein, 15 aa, Homo sapiens
  CDR3 for beta chain variable domain of TCR clone 246679 (TRBV20-1, TRBJ2-7)
CSARVPAAYFYEQYF

SEQ ID NO: 493359 - protein, 13 aa, Homo sapiens
  CDR3 for alpha chain variable domain of TCR clone 246680 (TRAV8-3, TRAJ6)
CAARRGGSYIPTF

SEQ ID NO: 493360 - protein, 19 aa, Homo sapiens
  CDR3 for beta chain variable domain of TCR clone 246680 (TRBV4-1, TRBJ2-3)
CASSNLAGGAIRSILARHP

SEQ ID NO: 493361 - protein, 14 aa, Homo sapiens
  CDR3 for alpha chain variable domain of TCR clone 246681 (TRAV17, TRAJ34)
CATDSLEGTDKPIF

SEQ ID NO: 493362 - protein, 12 aa, Homo sapiens
  CDR3 for beta chain variable domain of TCR clone 246681 (TRBV12-4, TRBJ2-7)
CASSLGGYEQYF

SEQ ID NO: 493363 - protein, 17 aa, Homo sapiens
  CDR3 for alpha chain variable domain of TCR clone 246682 (TRAV36/DV7, TRAJ52)
CAVAQRAGGTSYGKLTF

SEQ ID NO: 493364 - protein, 12 aa, Homo sapiens
  CDR3 for beta chain variable domain of TCR clone 246682 (TRBV11-3, TRBJ1-1)
CASSHRQGEAFF

SEQ ID NO: 493365 - protein, 13 aa, Homo sapiens
  CDR3 for alpha chain variable domain of TCR clone 246683 (TRAV2, TRAJ40)
CAVVTPGTYKYIF

SEQ ID NO: 493366 - protein, 15 aa, Homo sapiens
  CDR3 for beta chain variable domain of TCR clone 246683 (TRBV20-1, TRBJ2-7)
CSARKGLAESYEQYF

SEQ ID NO: 493367 - protein, 17 aa, Homo sapiens
  CDR3 for alpha chain variable domain of TCR clone 246684 (TRAV13-1, TRAJ52)
CAASSGAGGTSYGKLTF

SEQ ID NO: 493368 - protein, 14 aa, Homo sapiens
  CDR3 for beta chain variable domain of TCR clone 246684 (TRBV7-2, TRBJ1-1)
CASSFLTGTTEAFF

SEQ ID NO: 493369 - protein, 13 aa, Homo sapiens
  CDR3 for alpha chain variable domain of TCR clone 246685 (TRAV27, TRAJ56)
CAGKPGANSKLTF

SEQ ID NO: 493370 - protein, 18 aa, Homo sapiens
  CDR3 for beta chain variable domain of TCR clone 246685 (TRBV11-2, TRBJ2-3)
CASCLGGASRGAPNTQYF

SEQ ID NO: 493371 - protein, 15 aa, Homo sapiens
  CDR3 for alpha chain variable domain of TCR clone 246686 (TRAV35, TRAJ50)
CAGQLCKTSHDKVIF

SEQ ID NO: 493372 - protein, 12 aa, Homo sapiens
  CDR3 for beta chain variable domain of TCR clone 246686 (TRBV5-1, TRBJ2-5)
CASSLGLETQYF

SEQ ID NO: 493373 - protein, 11 aa, Homo sapiens
  CDR3 for alpha chain variable domain of TCR clone 246687 (TRAV1-2, TRAJ20)
CAVANDYKLSF

SEQ ID NO: 493374 - protein, 13 aa, Homo sapiens
  CDR3 for beta chain variable domain of TCR clone 246687 (TRBV7-6, TRBJ1-2)
CAISLVADYGYTF

SEQ ID NO: 493375 - protein, 17 aa, Homo sapiens
  CDR3 for alpha chain variable domain of TCR clone 246688 (TRAV3, TRAJ42)
CAVRDRDYGGSQGTLIF

SEQ ID NO: 493376 - protein, 14 aa, Homo sapiens
  CDR3 for beta chain variable domain of TCR clone 246688 (TRBV25-1, TRBJ1-1)
CASTHLGGNTEAFF

SEQ ID NO: 493377 - protein, 17 aa, Homo sapiens
  CDR3 for alpha chain variable domain of TCR clone 246689 (TRAV3, TRAJ6)
CAVRDGPRAGGSYIPTF

SEQ ID NO: 493378 - protein, 16 aa, Homo sapiens
  CDR3 for beta chain variable domain of TCR clone 246689 (TRBV12-3, TRBJ2-1)
CASSPGGNRWSHEQFF

SEQ ID NO: 493379 - protein, 12 aa, Homo sapiens
  CDR3 for alpha chain variable domain of TCR clone 246690 (TRAV12-3, TRAJ20)
CAMVRGDYKLSF

SEQ ID NO: 493380 - protein, 17 aa, Homo sapiens
  CDR3 for beta chain variable domain of TCR clone 246690 (TRBV7-3, TRBJ2-3)
RASSLMKRMRGADTQYF

SEQ ID NO: 493381 - protein, 13 aa, Homo sapiens
  CDR3 for alpha chain variable domain of TCR clone 246691 (TRAV17, TRAJ9)
CATGSTGGFKTIF

SEQ ID NO: 493382 - protein, 14 aa, Homo sapiens
  CDR3 for beta chain variable domain of TCR clone 246691 (TRBV7-8, TRBJ2-7)
CASTFRRGPNEQYV

SEQ ID NO: 493383 - protein, 18 aa, Homo sapiens
  CDR3 for alpha chain variable domain of TCR clone 246692 (TRAV21, TRAJ52)
CAVRPSPAGGTSYGKLTF

SEQ ID NO: 493384 - protein, 13 aa, Homo sapiens
  CDR3 for beta chain variable domain of TCR clone 246692 (TRBV29-1, TRBJ2-1)
CSVEGGKVNEQFF

SEQ ID NO: 493385 - protein, 11 aa, Homo sapiens
  CDR3 for alpha chain variable domain of TCR clone 246693 (TRAV1-1, TRAJ23)
CAVRQGGKLIF

SEQ ID NO: 493386 - protein, 16 aa, Homo sapiens
  CDR3 for beta chain variable domain of TCR clone 246693 (TRBV29-1, TRBJ2-7)
CSVEDSEDGTAYEQYF

SEQ ID NO: 493387 - protein, 19 aa, Homo sapiens
  CDR3 for alpha chain variable domain of TCR clone 246694 (TRAV3, TRAJ6)
CAVRDRNPSRSGGSYIPTF

SEQ ID NO: 493388 - protein, 15 aa, Homo sapiens
  CDR3 for beta chain variable domain of TCR clone 246694 (TRBV28, TRBJ2-5)
CASSPGQGSIETQYF

SEQ ID NO: 493389 - protein, 12 aa, Homo sapiens
  CDR3 for alpha chain variable domain of TCR clone 246695 (TRAV1-1, TRAJ39)
CAVPVVGNMLTF

SEQ ID NO: 493390 - protein, 15 aa, Homo sapiens
  CDR3 for beta chain variable domain of TCR clone 246695 (TRBV7-3, TRBJ2-2)
CACSETGQGTGELFF

SEQ ID NO: 493391 - protein, 11 aa, Homo sapiens
  CDR3 for alpha chain variable domain of TCR clone 246696 (TRAV2, TRAJ33)
CAVDSNYQLIW

SEQ ID NO: 493392 - protein, 14 aa, Homo sapiens
  CDR3 for beta chain variable domain of TCR clone 246696 (TRBV7-6, TRBJ2-3)
CASSSGTVTDTQYF

SEQ ID NO: 493393 - protein, 14 aa, Homo sapiens
  CDR3 for alpha chain variable domain of TCR clone 246697 (TRAV8-6, TRAJ13)
CAVSDREGYQKVTF

SEQ ID NO: 493394 - protein, 12 aa, Homo sapiens
  CDR3 for beta chain variable domain of TCR clone 246697 (TRBV11-2, TRBJ2-2)
CASSLGGGELFL

SEQ ID NO: 493395 - protein, 12 aa, Homo sapiens
  CDR3 for alpha chain variable domain of TCR clone 246698 (TRAV16, TRAJ12)
CAHGDSSYKLIF

SEQ ID NO: 493396 - protein, 12 aa, Homo sapiens
  CDR3 for beta chain variable domain of TCR clone 246698 (TRBV28, TRBJ2-1)
CASSRLVGGQFF

SEQ ID NO: 493397 - protein, 14 aa, Homo sapiens
  CDR3 for alpha chain variable domain of TCR clone 246699 (TRAV12-3, TRAJ54)
CAMRGIQGAQKLVF

SEQ ID NO: 493398 - protein, 13 aa, Homo sapiens
  CDR3 for beta chain variable domain of TCR clone 246699 (TRBV12-5, TRBJ2-1)
CASGLGRGNEQFF

SEQ ID NO: 493399 - protein, 15 aa, Homo sapiens
  CDR3 for alpha chain variable domain of TCR clone 246700 (TRAV8-2, TRAJ16)
CVGSDGFSDGQKLLF

SEQ ID NO: 493400 - protein, 15 aa, Homo sapiens
  CDR3 for beta chain variable domain of TCR clone 246700 (TRBV5-1, TRBJ2-4)
CASSLGGGGSYIQYF

SEQ ID NO: 493401 - protein, 16 aa, Homo sapiens
  CDR3 for alpha chain variable domain of TCR clone 246701 (TRAV3, TRAJ37)
CAVRPHGSGNTGKLIF

SEQ ID NO: 493402 - protein, 17 aa, Homo sapiens
  CDR3 for beta chain variable domain of TCR clone 246701 (TRBV5-1, TRBJ2-5)
CAGSPVALGQNQETQYF

SEQ ID NO: 493403 - protein, 15 aa, Homo sapiens
  CDR3 for alpha chain variable domain of TCR clone 246702 (TRAV8-6, TRAJ10)
CAVSSKGGGGDKLTF

SEQ ID NO: 493404 - protein, 15 aa, Homo sapiens
  CDR3 for beta chain variable domain of TCR clone 246702 (TRBV28, TRBJ1-2)
CASSSHSIANYGYTF

SEQ ID NO: 493405 - protein, 16 aa, Homo sapiens
  CDR3 for alpha chain variable domain of TCR clone 246703 (TRAV3, TRAJ10)
CAVRDMRAGGGNKLTF

SEQ ID NO: 493406 - protein, 19 aa, Homo sapiens
  CDR3 for beta chain variable domain of TCR clone 246703 (TRBV6-3, TRBJ1-2)
CASSYSKGRAGPPNYGYTF

SEQ ID NO: 493407 - protein, 14 aa, Homo sapiens
  CDR3 for alpha chain variable domain of TCR clone 246704 (TRAV4, TRAJ30)
CLVGYMNRDDKIIF

SEQ ID NO: 493408 - protein, 15 aa, Homo sapiens
  CDR3 for beta chain variable domain of TCR clone 246704 (TRBV7-2, TRBJ2-7)
CASSLSSGRTYEQYF

SEQ ID NO: 493409 - protein, 16 aa, Homo sapiens
  CDR3 for alpha chain variable domain of TCR clone 246705 (TRAV4, TRAJ22)
CLVGDLYSGSARQLTF

SEQ ID NO: 493410 - protein, 12 aa, Homo sapiens
  CDR3 for beta chain variable domain of TCR clone 246705 (TRBV7-9, TRBJ2-7)
CASSIKREEQYF

SEQ ID NO: 493411 - protein, 14 aa, Homo sapiens
  CDR3 for alpha chain variable domain of TCR clone 246706 (TRAV3, TRAJ24)
CAVILTESWGKLQF

SEQ ID NO: 493412 - protein, 12 aa, Homo sapiens
  CDR3 for beta chain variable domain of TCR clone 246706 (TRBV7-3, TRBJ1-1)
CASSHGGTEAFF

SEQ ID NO: 493413 - protein, 14 aa, Homo sapiens
  CDR3 for alpha chain variable domain of TCR clone 246707 (TRAV8-4, TRAJ5)
CAVSTDTGRRALTF

SEQ ID NO: 493414 - protein, 14 aa, Homo sapiens
  CDR3 for beta chain variable domain of TCR clone 246707 (TRBV5-1, TRBJ2-2)
CASSLGVGSGELFF

SEQ ID NO: 493415 - protein, 15 aa, Homo sapiens
  CDR3 for alpha chain variable domain of TCR clone 246708 (TRAV2, TRAJ9)
CAVAALNTGGFKTIF

SEQ ID NO: 493416 - protein, 14 aa, Homo sapiens
  CDR3 for beta chain variable domain of TCR clone 246708 (TRBV7-8, TRBJ2-5)
CDSSATGGQETQYF

SEQ ID NO: 493417 - protein, 15 aa, Homo sapiens
  CDR3 for alpha chain variable domain of TCR clone 246709 (TRAV3, TRAJ47)
CAVRDIGEYGNKLVF

SEQ ID NO: 493418 - protein, 14 aa, Homo sapiens
  CDR3 for beta chain variable domain of TCR clone 246709 (TRBV13, TRBJ2-5)
CASSLQRVGETQYF

SEQ ID NO: 493419 - protein, 14 aa, Homo sapiens
  CDR3 for alpha chain variable domain of TCR clone 246710 (TRAV38-2/DV8, TRAJ30)
CAYRSAERDDKIIF

SEQ ID NO: 493420 - protein, 16 aa, Homo sapiens
  CDR3 for beta chain variable domain of TCR clone 246710 (TRBV15, TRBJ1-3)
CATSSPIGFSGNTIYF

SEQ ID NO: 493421 - protein, 13 aa, Homo sapiens
  CDR3 for alpha chain variable domain of TCR clone 246711 (TRAV13-1, TRAJ6)
CAARRGGSDIHTF

SEQ ID NO: 493422 - protein, 13 aa, Homo sapiens
  CDR3 for beta chain variable domain of TCR clone 246711 (TRBV19, TRBJ2-7)
CASSRDRSYEQYF

SEQ ID NO: 493423 - protein, 16 aa, Homo sapiens
  CDR3 for alpha chain variable domain of TCR clone 246712 (TRAV3, TRAJ10)
CAVRDMRAGGGNKLTF

SEQ ID NO: 493424 - protein, 12 aa, Homo sapiens
  CDR3 for beta chain variable domain of TCR clone 246712 (TRBV5-7, TRBJ1-1)
CASSLGRGKAFF

SEQ ID NO: 493425 - protein, 12 aa, Homo sapiens
  CDR3 for alpha chain variable domain of TCR clone 246713 (TRAV12-3, TRAJ17)
CAMTLTGNKLTF

SEQ ID NO: 493426 - protein, 15 aa, Homo sapiens
  CDR3 for beta chain variable domain of TCR clone 246713 (TRBV10-2, TRBJ2-6)
CASSEQGTGANVLPF

SEQ ID NO: 493427 - protein, 14 aa, Homo sapiens
  CDR3 for alpha chain variable domain of TCR clone 246714 (TRAV1-2, TRAJ16)
CAVNRFSDGQKLLF

SEQ ID NO: 493428 - protein, 15 aa, Homo sapiens
  CDR3 for beta chain variable domain of TCR clone 246714 (TRBV29-1, TRBJ2-7)
CSVEFFDRGSYEQYL

SEQ ID NO: 493429 - protein, 12 aa, Homo sapiens
  CDR3 for alpha chain variable domain of TCR clone 246715 (TRAV12-2, TRAJ42)
CAVGGSQGNLLF

SEQ ID NO: 493430 - protein, 15 aa, Homo sapiens
  CDR3 for beta chain variable domain of TCR clone 246715 (TRBV9, TRBJ1-6)
CASSVAGTGDSPLHF

SEQ ID NO: 493431 - protein, 14 aa, Homo sapiens
  CDR3 for alpha chain variable domain of TCR clone 246716 (TRAV22, TRAJ40)
CAVESTSGTYEYIF

SEQ ID NO: 493432 - protein, 17 aa, Homo sapiens
  CDR3 for beta chain variable domain of TCR clone 246716 (TRBV7-9, TRBJ2-2)
CASSLGVVGMNTGELFF

SEQ ID NO: 493433 - protein, 11 aa, Homo sapiens
  CDR3 for alpha chain variable domain of TCR clone 246717 (TRAV13-1, TRAJ27)
CAAYNAGKSTF

SEQ ID NO: 493434 - protein, 15 aa, Homo sapiens
  CDR3 for beta chain variable domain of TCR clone 246717 (TRBV12-4, TRBJ2-5)
CASSPPTGLQETQYF

SEQ ID NO: 493435 - protein, 18 aa, Homo sapiens
  CDR3 for alpha chain variable domain of TCR clone 246718 (TRAV26-2, TRAJ45)
CILRVDKYSGGGADGLTF

SEQ ID NO: 493436 - protein, 14 aa, Homo sapiens
  CDR3 for beta chain variable domain of TCR clone 246718 (TRBV7-2, TRBJ2-7)
CASRSQGAAYGQYF

SEQ ID NO: 493437 - protein, 16 aa, Homo sapiens
  CDR3 for alpha chain variable domain of TCR clone 246719 (TRAV12-2, TRAJ18)
FAVTTDRGSTLGRLYF

SEQ ID NO: 493438 - protein, 14 aa, Homo sapiens
  CDR3 for beta chain variable domain of TCR clone 246719 (TRBV4-2, TRBJ1-5)
CASSQYSINQPQHF

SEQ ID NO: 493439 - protein, 14 aa, Homo sapiens
  CDR3 for alpha chain variable domain of TCR clone 246720 (TRAV12-2, TRAJ4)
CAVLIGGGYNKLIF

SEQ ID NO: 493440 - protein, 15 aa, Homo sapiens
  CDR3 for beta chain variable domain of TCR clone 246720 (TRBV3-1, TRBJ2-5)
CASSANLGGPETQYF

SEQ ID NO: 493441 - protein, 14 aa, Homo sapiens
  CDR3 for alpha chain variable domain of TCR clone 246721 (TRAV12-1, TRAJ26)
CGVKGSNYGQNFVF

SEQ ID NO: 493442 - protein, 14 aa, Homo sapiens
  CDR3 for beta chain variable domain of TCR clone 246721 (TRBV5-4, TRBJ1-1)
CASSLDSRRDEAFF

SEQ ID NO: 493443 - protein, 16 aa, Homo sapiens
  CDR3 for alpha chain variable domain of TCR clone 246722 (TRAV20, TRAJ16)
CAVQDKRFSDGQKLLF

SEQ ID NO: 493444 - protein, 15 aa, Homo sapiens
  CDR3 for beta chain variable domain of TCR clone 246722 (TRBV20-1, TRBJ2-1)
CSASPPSGGYNEQFF

SEQ ID NO: 493445 - protein, 17 aa, Homo sapiens
  CDR3 for alpha chain variable domain of TCR clone 246723 (TRAV3, TRAJ42)
CAVRGRDYGGSQGNLIF

SEQ ID NO: 493446 - protein, 17 aa, Homo sapiens
  CDR3 for beta chain variable domain of TCR clone 246723 (TRBV7-9, TRBJ2-3)
CASSPTVAGGLTDTQYF

SEQ ID NO: 493447 - protein, 12 aa, Homo sapiens
  CDR3 for alpha chain variable domain of TCR clone 246724 (TRAV8-3, TRAJ20)
CAVGANDYKLSF

SEQ ID NO: 493448 - protein, 12 aa, Homo sapiens
  CDR3 for beta chain variable domain of TCR clone 246724 (TRBV12-4, TRBJ2-7)
CASSLGGYEQYF

SEQ ID NO: 493449 - protein, 14 aa, Homo sapiens
  CDR3 for alpha chain variable domain of TCR clone 246725 (TRAV1-2, TRAJ8)
CAVREDTGFQKLVF

SEQ ID NO: 493450 - protein, 14 aa, Homo sapiens
  CDR3 for beta chain variable domain of TCR clone 246725 (TRBV12-4, TRBJ1-1)
CARRPGQGRTEAFF

SEQ ID NO: 493451 - protein, 15 aa, Homo sapiens
  CDR3 for alpha chain variable domain of TCR clone 246726 (TRAV2, TRAJ15)
CAVEDRNQAGTALIF

SEQ ID NO: 493452 - protein, 13 aa, Homo sapiens
  CDR3 for beta chain variable domain of TCR clone 246726 (TRBV10-3, TRBJ2-7)
CASKLSVNYEQYF

SEQ ID NO: 493453 - protein, 14 aa, Homo sapiens
  CDR3 for alpha chain variable domain of TCR clone 246727 (TRAV12-3, TRAJ57)
CAMSAWGGAEKLVF

SEQ ID NO: 493454 - protein, 14 aa, Homo sapiens
  CDR3 for beta chain variable domain of TCR clone 246727 (TRBV7-2, TRBJ2-7)
CASSPKTSFYEQYF

SEQ ID NO: 493455 - protein, 13 aa, Homo sapiens
  CDR3 for alpha chain variable domain of TCR clone 246728 (TRAV12-1, TRAJ33)
CGDAPDSNCQLIW

SEQ ID NO: 493456 - protein, 13 aa, Homo sapiens
  CDR3 for beta chain variable domain of TCR clone 246728 (TRBV7-9, TRBJ1-2)
CASSLKQNYGYTF

SEQ ID NO: 493457 - protein, 13 aa, Homo sapiens
  CDR3 for alpha chain variable domain of TCR clone 246729 (TRAV12-3, TRAJ9)
CAMRNTGGFKTIF

SEQ ID NO: 493458 - protein, 16 aa, Homo sapiens
  CDR3 for beta chain variable domain of TCR clone 246729 (TRBV24-1, TRBJ2-3)
CATSDPGTGATDTQYF

SEQ ID NO: 493459 - protein, 18 aa, Homo sapiens
  CDR3 for alpha chain variable domain of TCR clone 246730 (TRAV21, TRAJ52)
CAVRPSPAGGTSYGKMIF

SEQ ID NO: 493460 - protein, 17 aa, Homo sapiens
  CDR3 for beta chain variable domain of TCR clone 246730 (TRBV13, TRBJ2-3)
CASSLSRVAGGRNTQYF

SEQ ID NO: 493461 - protein, 15 aa, Homo sapiens
  CDR3 for alpha chain variable domain of TCR clone 246731 (TRAV26-1, TRAJ44)
CIVRANTGTASTLPF

SEQ ID NO: 493462 - protein, 15 aa, Homo sapiens
  CDR3 for beta chain variable domain of TCR clone 246731 (TRBV6-1, TRBJ2-4)
CASSEAVWTINIQYF

SEQ ID NO: 493463 - protein, 14 aa, Homo sapiens
  CDR3 for alpha chain variable domain of TCR clone 246732 (TRAV2, TRAJ9)
CAVEDRGGGFKTIF

SEQ ID NO: 493464 - protein, 16 aa, Homo sapiens
  CDR3 for beta chain variable domain of TCR clone 246732 (TRBV12-4, TRBJ2-5)
CASSFFVRGRQETQYF

SEQ ID NO: 493465 - protein, 15 aa, Homo sapiens
  CDR3 for alpha chain variable domain of TCR clone 246733 (TRAV26-2, TRAJ28)
CILVESGAGSYQLTF

SEQ ID NO: 493466 - protein, 16 aa, Homo sapiens
  CDR3 for beta chain variable domain of TCR clone 246733 (TRBV4-2, TRBJ1-2)
CASSQEIGGASYGYSF

SEQ ID NO: 493467 - protein, 16 aa, Homo sapiens
  CDR3 for alpha chain variable domain of TCR clone 246734 (TRAV3, TRAJ21)
CAVRDIERGNFNKFHF

SEQ ID NO: 493468 - protein, 13 aa, Homo sapiens
  CDR3 for beta chain variable domain of TCR clone 246734 (TRBV4-2, TRBJ1-1)
CASSQAGNTEAFF

SEQ ID NO: 493469 - protein, 16 aa, Homo sapiens
  CDR3 for alpha chain variable domain of TCR clone 246735 (TRAV26-1, TRAJ42)
CIVGTGYGGSQGNLIF

SEQ ID NO: 493470 - protein, 14 aa, Homo sapiens
  CDR3 for beta chain variable domain of TCR clone 246735 (TRBV25-1, TRBJ1-1)
CASTHLGGNTEAFF

SEQ ID NO: 493471 - protein, 15 aa, Homo sapiens
  CDR3 for alpha chain variable domain of TCR clone 246736 (TRAV2, TRAJ15)
CAVEDREQAGTALIF

SEQ ID NO: 493472 - protein, 18 aa, Homo sapiens
  CDR3 for beta chain variable domain of TCR clone 246736 (TRBV11-2, TRBJ2-3)
CASSLGGASRGAPNTQYF

SEQ ID NO: 493473 - protein, 17 aa, Homo sapiens
  CDR3 for alpha chain variable domain of TCR clone 246737 (TRAV12-2, TRAJ53)
CAPLTDSQVGSNYKLTF

SEQ ID NO: 493474 - protein, 12 aa, Homo sapiens
  CDR3 for beta chain variable domain of TCR clone 246737 (TRBV11-2, TRBJ2-2)
CASSLGGGELFF

SEQ ID NO: 493475 - protein, 16 aa, Homo sapiens
  CDR3 for alpha chain variable domain of TCR clone 246738 (TRAV1-2, TRAJ10)
CAVRGVLTGGGNKLTF

SEQ ID NO: 493476 - protein, 17 aa, Homo sapiens
  CDR3 for beta chain variable domain of TCR clone 246738 (TRBV28, TRBJ2-5)
CASSSPEGDALQETQYF

SEQ ID NO: 493477 - protein, 20 aa, Homo sapiens
  CDR3 for alpha chain variable domain of TCR clone 246739 (TRAV12-1, TRAJ42)
SSVIQPPTSVKGGSQGNLIF

SEQ ID NO: 493478 - protein, 15 aa, Homo sapiens
  CDR3 for beta chain variable domain of TCR clone 246739 (TRBV5-1, TRBJ2-5)
CASSFKGGDQETQYF

SEQ ID NO: 493479 - protein, 12 aa, Homo sapiens
  CDR3 for alpha chain variable domain of TCR clone 246740 (TRAV27, TRAJ33)
CAGAGSNYQLIW

SEQ ID NO: 493480 - protein, 15 aa, Homo sapiens
  CDR3 for beta chain variable domain of TCR clone 246740 (TRBV6-5, TRBJ2-7)
CASSYSTSGNYEQYF

SEQ ID NO: 493481 - protein, 14 aa, Homo sapiens
  CDR3 for alpha chain variable domain of TCR clone 246741 (TRAV3, TRAJ6)
CAVRDWGGSYIPTF

SEQ ID NO: 493482 - protein, 15 aa, Homo sapiens
  CDR3 for beta chain variable domain of TCR clone 246741 (TRBV5-1, TRBJ2-1)
CASGPPRAPYNEQFF

SEQ ID NO: 493483 - protein, 18 aa, Homo sapiens
  CDR3 for alpha chain variable domain of TCR clone 246742 (TRAV26-1, TRAJ52)
CIVRVEGAGGTSYGKLTF

SEQ ID NO: 493484 - protein, 14 aa, Homo sapiens
  CDR3 for beta chain variable domain of TCR clone 246742 (TRBV4-2, TRBJ2-3)
CASSQERGTDTQYF

SEQ ID NO: 493485 - protein, 14 aa, Homo sapiens
  CDR3 for alpha chain variable domain of TCR clone 246743 (TRAV25, TRAJ45)
CARESGGGADGLTF

SEQ ID NO: 493486 - protein, 12 aa, Homo sapiens
  CDR3 for beta chain variable domain of TCR clone 246743 (TRBV7-9, TRBJ2-7)
CASSFDSYGQYF

SEQ ID NO: 493487 - protein, 13 aa, Homo sapiens
  CDR3 for alpha chain variable domain of TCR clone 246744 (TRAV2, TRAJ12)
CAVGADSSYKLIF

SEQ ID NO: 493488 - protein, 13 aa, Homo sapiens
  CDR3 for beta chain variable domain of TCR clone 246744 (TRBV20-1, TRBJ2-1)
CSARSSPRDEQFF

SEQ ID NO: 493489 - protein, 13 aa, Homo sapiens
  CDR3 for alpha chain variable domain of TCR clone 246745 (TRAV1-2, TRAJ9)
CAVLNTGGFNTIF

SEQ ID NO: 493490 - protein, 17 aa, Homo sapiens
  CDR3 for beta chain variable domain of TCR clone 246745 (TRBV7-2, TRBJ2-3)
CASSLAGGLAGTAGQYF

SEQ ID NO: 493491 - protein, 15 aa, Homo sapiens
  CDR3 for alpha chain variable domain of TCR clone 246746 (TRAV3, TRAJ32)
CAVSSCGGATNKLIF

SEQ ID NO: 493492 - protein, 13 aa, Homo sapiens
  CDR3 for beta chain variable domain of TCR clone 246746 (TRBV20-1, TRBJ2-7)
CSARPSTNYEQYF

SEQ ID NO: 493493 - protein, 11 aa, Homo sapiens
  CDR3 for alpha chain variable domain of TCR clone 246747 (TRAV12-2, TRAJ21)
CAVEGFNKFYF

SEQ ID NO: 493494 - protein, 15 aa, Homo sapiens
  CDR3 for beta chain variable domain of TCR clone 246747 (TRBV20-1, TRBJ1-5)
CSDSRRGDLGQPQHF

SEQ ID NO: 493495 - protein, 13 aa, Homo sapiens
  CDR3 for alpha chain variable domain of TCR clone 246748 (TRAV12-1, TRAJ26)
CVVRRNYGQNFVF

SEQ ID NO: 493496 - protein, 15 aa, Homo sapiens
  CDR3 for beta chain variable domain of TCR clone 246748 (TRBV28, TRBJ2-1)
CASSIIAGGRSEQFY

SEQ ID NO: 493497 - protein, 14 aa, Homo sapiens
  CDR3 for alpha chain variable domain of TCR clone 246749 (TRAV9-2, TRAJ39)
CALYIYNAGNMLTF

SEQ ID NO: 493498 - protein, 12 aa, Homo sapiens
  CDR3 for beta chain variable domain of TCR clone 246749 (TRBV7-9, TRBJ2-7)
CASSLEGYEQYF

SEQ ID NO: 493499 - protein, 12 aa, Homo sapiens
  CDR3 for alpha chain variable domain of TCR clone 246750 (TRAV23/DV6, TRAJ49)
CAASNDGNQFYF

SEQ ID NO: 493500 - protein, 14 aa, Homo sapiens
  CDR3 for beta chain variable domain of TCR clone 246750 (TRBV18, TRBJ1-2)
CASSPARTGNGDTF

SEQ ID NO: 493501 - protein, 13 aa, Homo sapiens
  CDR3 for alpha chain variable domain of TCR clone 246751 (TRAV1-1, TRAJ29)
CAATLSGNTPLVF

SEQ ID NO: 493502 - protein, 15 aa, Homo sapiens
  CDR3 for beta chain variable domain of TCR clone 246751 (TRBV2, TRBJ2-7)
CASSEGLARSYEQYF

SEQ ID NO: 493503 - protein, 12 aa, Homo sapiens
  CDR3 for alpha chain variable domain of TCR clone 246752 (TRAV12-3, TRAJ17)
CAMTLTGNKLTF

SEQ ID NO: 493504 - protein, 14 aa, Homo sapiens
  CDR3 for beta chain variable domain of TCR clone 246752 (TRBV28, TRBJ2-7)
CASRVAGVGYEQYF

SEQ ID NO: 493505 - protein, 13 aa, Homo sapiens
  CDR3 for alpha chain variable domain of TCR clone 246753 (TRAV2, TRAJ40)
CAVVTSGTYKYIF

SEQ ID NO: 493506 - protein, 13 aa, Homo sapiens
  CDR3 for beta chain variable domain of TCR clone 246753 (TRBV11-2, TRBJ2-2)
CASSLQNTGELFF

SEQ ID NO: 493507 - protein, 15 aa, Homo sapiens
  CDR3 for alpha chain variable domain of TCR clone 246754 (TRAV8-3, TRAJ15)
CAVGAPNQAGNALIF

SEQ ID NO: 493508 - protein, 14 aa, Homo sapiens
  CDR3 for beta chain variable domain of TCR clone 246754 (TRBV20-1, TRBJ2-1)
CSPNDEASYNEQFF

SEQ ID NO: 493509 - protein, 13 aa, Homo sapiens
  CDR3 for alpha chain variable domain of TCR clone 246755 (TRAV3, TRAJ20)
CAVRDTGDYKLSF

SEQ ID NO: 493510 - protein, 15 aa, Homo sapiens
  CDR3 for beta chain variable domain of TCR clone 246755 (TRBV20-1, TRBJ2-7)
CSAESGTSGAYEQYF

SEQ ID NO: 493511 - protein, 15 aa, Homo sapiens
  CDR3 for alpha chain variable domain of TCR clone 246756 (TRAV12-1, TRAJ44)
CVVDTPQGTASKLTF

SEQ ID NO: 493512 - protein, 13 aa, Homo sapiens
  CDR3 for beta chain variable domain of TCR clone 246756 (TRBV7-9, TRBJ2-3)
CASSPGATDTQYF

SEQ ID NO: 493513 - protein, 16 aa, Homo sapiens
  CDR3 for alpha chain variable domain of TCR clone 246757 (TRAV17, TRAJ53)
CATDALSGVSNYKLTF

SEQ ID NO: 493514 - protein, 12 aa, Homo sapiens
  CDR3 for beta chain variable domain of TCR clone 246757 (TRBV5-1, TRBJ2-7)
CASSFRGYEQYF

SEQ ID NO: 493515 - protein, 14 aa, Homo sapiens
  CDR3 for alpha chain variable domain of TCR clone 246758 (TRAV21, TRAJ38)
CAVMGAGNNRKRIW

SEQ ID NO: 493516 - protein, 13 aa, Homo sapiens
  CDR3 for beta chain variable domain of TCR clone 246758 (TRBV7-3, TRBJ2-5)
CASSIGFFEAQYF

SEQ ID NO: 493517 - protein, 14 aa, Homo sapiens
  CDR3 for alpha chain variable domain of TCR clone 246759 (TRAV20, TRAJ42)
CAVQAGGSQGKLIF

SEQ ID NO: 493518 - protein, 14 aa, Homo sapiens
  CDR3 for beta chain variable domain of TCR clone 246759 (TRBV28, TRBJ1-2)
CASRIQGANYGYTF

SEQ ID NO: 493519 - protein, 15 aa, Homo sapiens
  CDR3 for alpha chain variable domain of TCR clone 246760 (TRAV38-1, TRAJ57)
CAFMDSQGGSEKLVF

SEQ ID NO: 493520 - protein, 13 aa, Homo sapiens
  CDR3 for beta chain variable domain of TCR clone 246760 (TRBV4-2, TRBJ1-1)
CASSQAGNTEAFF

SEQ ID NO: 493521 - protein, 10 aa, Homo sapiens
  CDR3 for alpha chain variable domain of TCR clone 246761 (TRAV1-2, TRAJ31)
CVSEDARLMF

SEQ ID NO: 493522 - protein, 13 aa, Homo sapiens
  CDR3 for beta chain variable domain of TCR clone 246761 (TRBV28, TRBJ2-1)
CASSLIGRDEQFF

SEQ ID NO: 493523 - protein, 13 aa, Homo sapiens
  CDR3 for alpha chain variable domain of TCR clone 246762 (TRAV17, TRAJ22)
CAHHSGSARQLTF

SEQ ID NO: 493524 - protein, 17 aa, Homo sapiens
  CDR3 for beta chain variable domain of TCR clone 246762 (TRBV4-2, TRBJ1-1)
CASTQFGGGSGNTEAFF

SEQ ID NO: 493525 - protein, 13 aa, Homo sapiens
  CDR3 for alpha chain variable domain of TCR clone 246763 (TRAV3, TRAJ21)
CAVREPDFNKFYF

SEQ ID NO: 493526 - protein, 13 aa, Homo sapiens
  CDR3 for beta chain variable domain of TCR clone 246763 (TRBV11-2, TRBJ2-2)
CASGRDREEELFF

SEQ ID NO: 493527 - protein, 13 aa, Homo sapiens
  CDR3 for alpha chain variable domain of TCR clone 246764 (TRAV29/DV5, TRAJ31)
CAASRNNNARLMF

SEQ ID NO: 493528 - protein, 15 aa, Homo sapiens
  CDR3 for beta chain variable domain of TCR clone 246764 (TRBV2, TRBJ2-1)
CASSELAGGYNEQFF

SEQ ID NO: 493529 - protein, 14 aa, Homo sapiens
  CDR3 for alpha chain variable domain of TCR clone 246765 (TRAV8-1, TRAJ5)
CAVRTDTGRRALTF

SEQ ID NO: 493530 - protein, 13 aa, Homo sapiens
  CDR3 for beta chain variable domain of TCR clone 246765 (TRBV12-5, TRBJ2-3)
CASGDRQSDTQYF

SEQ ID NO: 493531 - protein, 15 aa, Homo sapiens
  CDR3 for alpha chain variable domain of TCR clone 246766 (TRAV35, TRAJ40)
CAGQLGTSGTYKYIF

SEQ ID NO: 493532 - protein, 14 aa, Homo sapiens
  CDR3 for beta chain variable domain of TCR clone 246766 (TRBV7-2, TRBJ2-7)
CASSPRTSFYEQYF

SEQ ID NO: 493533 - protein, 17 aa, Homo sapiens
  CDR3 for alpha chain variable domain of TCR clone 246767 (TRAV8-3, TRAJ42)
CAVGNPEERRSQGNLIF

SEQ ID NO: 493534 - protein, 13 aa, Homo sapiens
  CDR3 for beta chain variable domain of TCR clone 246767 (TRBV7-2, TRBJ1-1)
CASSLARPAEAFF

SEQ ID NO: 493535 - protein, 15 aa, Homo sapiens
  CDR3 for alpha chain variable domain of TCR clone 246768 (TRAV21, TRAJ32)
CAVNSYGGATNKLIF

SEQ ID NO: 493536 - protein, 17 aa, Homo sapiens
  CDR3 for beta chain variable domain of TCR clone 246768 (TRBV7-9, TRBJ2-1)
CASSTGLAEGSYNEQFF

SEQ ID NO: 493537 - protein, 11 aa, Homo sapiens
  CDR3 for alpha chain variable domain of TCR clone 246769 (TRAV21, TRAJ34)
CAHYNTDKLIF

SEQ ID NO: 493538 - protein, 16 aa, Homo sapiens
  CDR3 for beta chain variable domain of TCR clone 246769 (TRBV10-3, TRBJ2-1)
CAIREGGRGDYNEQFF

SEQ ID NO: 493539 - protein, 14 aa, Homo sapiens
  CDR3 for alpha chain variable domain of TCR clone 246770 (TRAV23/DV6, TRAJ13)
CAAMSSGGYQKVTF

SEQ ID NO: 493540 - protein, 14 aa, Homo sapiens
  CDR3 for beta chain variable domain of TCR clone 246770 (TRBV7-9, TRBJ2-1)
CASSPRDSLYEQFF

SEQ ID NO: 493541 - protein, 15 aa, Homo sapiens
  CDR3 for alpha chain variable domain of TCR clone 246771 (TRAV3, TRAJ22)
CAVRDRGGSARQLTF

SEQ ID NO: 493542 - protein, 16 aa, Homo sapiens
  CDR3 for beta chain variable domain of TCR clone 246771 (TRBV7-3, TRBJ2-1)
CASSLEGYRSYSEQFF

SEQ ID NO: 493543 - protein, 12 aa, Homo sapiens
  CDR3 for alpha chain variable domain of TCR clone 246772 (TRAV12-2, TRAJ20)
CAVRPSDYTLSF

SEQ ID NO: 493544 - protein, 14 aa, Homo sapiens
  CDR3 for beta chain variable domain of TCR clone 246772 (TRBV6-1, TRBJ2-7)
GASNRARPDYEQYF

SEQ ID NO: 493545 - protein, 13 aa, Homo sapiens
  CDR3 for alpha chain variable domain of TCR clone 246773 (TRAV23/DV6, TRAJ10)
ASVLTGGGNNLTF

SEQ ID NO: 493546 - protein, 13 aa, Homo sapiens
  CDR3 for beta chain variable domain of TCR clone 246773 (TRBV11-1, TRBJ1-2)
CASVGSWGYGYTF

SEQ ID NO: 493547 - protein, 12 aa, Homo sapiens
  CDR3 for alpha chain variable domain of TCR clone 246774 (TRAV36/DV7, TRAJ37)
CACYGNTGKLIF

SEQ ID NO: 493548 - protein, 12 aa, Homo sapiens
  CDR3 for beta chain variable domain of TCR clone 246774 (TRBV7-8, TRBJ2-7)
CASSLGDREQYF

SEQ ID NO: 493549 - protein, 13 aa, Homo sapiens
  CDR3 for alpha chain variable domain of TCR clone 246775 (TRAV12-3, TRAJ7)
CAMSASGNNRLAF

SEQ ID NO: 493550 - protein, 13 aa, Homo sapiens
  CDR3 for beta chain variable domain of TCR clone 246775 (TRBV12-5, TRBJ2-3)
CASQNRGTDTQYF

SEQ ID NO: 493551 - protein, 15 aa, Homo sapiens
  CDR3 for alpha chain variable domain of TCR clone 246776 (TRAV3, TRAJ3)
CAVRDRDSSASKIIF

SEQ ID NO: 493552 - protein, 12 aa, Homo sapiens
  CDR3 for beta chain variable domain of TCR clone 246776 (TRBV7-9, TRBJ1-5)
CASSPQGQPQHF

SEQ ID NO: 493553 - protein, 12 aa, Homo sapiens
  CDR3 for alpha chain variable domain of TCR clone 246777 (TRAV1-2, TRAJ26)
CAVRYYGQNFVF

SEQ ID NO: 493554 - protein, 19 aa, Homo sapiens
  CDR3 for beta chain variable domain of TCR clone 246777 (TRBV25-1, TRBJ2-2)
CAILVYRVDRGRKTGELFF

SEQ ID NO: 493555 - protein, 14 aa, Homo sapiens
  CDR3 for alpha chain variable domain of TCR clone 246778 (TRAV12-1, TRAJ15)
CVVNRNQAGTALIF

SEQ ID NO: 493556 - protein, 12 aa, Homo sapiens
  CDR3 for beta chain variable domain of TCR clone 246778 (TRBV19, TRBJ2-1)
CASSRQGAEQFF

SEQ ID NO: 493557 - protein, 14 aa, Homo sapiens
  CDR3 for alpha chain variable domain of TCR clone 246779 (TRAV12-1, TRAJ12)
CVVTRMDSSYKLIF

SEQ ID NO: 493558 - protein, 15 aa, Homo sapiens
  CDR3 for beta chain variable domain of TCR clone 246779 (TRBV20-1, TRBJ2-7)
CSARDRVSGMDEQYV

SEQ ID NO: 493559 - protein, 12 aa, Homo sapiens
  CDR3 for alpha chain variable domain of TCR clone 246780 (TRAV12-3, TRAJ39)
CAMTQAGNMLTF

SEQ ID NO: 493560 - protein, 16 aa, Homo sapiens
  CDR3 for beta chain variable domain of TCR clone 246780 (TRBV5-1, TRBJ2-3)
CASSSSGAGSTDTQYF

SEQ ID NO: 493561 - protein, 13 aa, Homo sapiens
  CDR3 for alpha chain variable domain of TCR clone 246781 (TRAV2, TRAJ40)
CAVVTSGTYKYIF

SEQ ID NO: 493562 - protein, 15 aa, Homo sapiens
  CDR3 for beta chain variable domain of TCR clone 246781 (TRBV27, TRBJ1-5)
CASSLGTGFDQPQHF

SEQ ID NO: 493563 - protein, 13 aa, Homo sapiens
  CDR3 for alpha chain variable domain of TCR clone 246782 (TRAV12-1, TRAJ42)
CGGVGGSQGNLIF

SEQ ID NO: 493564 - protein, 15 aa, Homo sapiens
  CDR3 for beta chain variable domain of TCR clone 246782 (TRBV4-1, TRBJ2-3)
CASSRGQGIPDTQYF

SEQ ID NO: 493565 - protein, 15 aa, Homo sapiens
  CDR3 for alpha chain variable domain of TCR clone 246783 (TRAV3, TRAJ4)
CAVRAGTGGYNKLIF

SEQ ID NO: 493566 - protein, 13 aa, Homo sapiens
  CDR3 for beta chain variable domain of TCR clone 246783 (TRBV12-5, TRBJ1-2)
CASGVRTGNGYTF

SEQ ID NO: 493567 - protein, 12 aa, Homo sapiens
  CDR3 for alpha chain variable domain of TCR clone 246784 (TRAV13-1, TRAJ21)
CAAKEGFNKFYF

SEQ ID NO: 493568 - protein, 17 aa, Homo sapiens
  CDR3 for beta chain variable domain of TCR clone 246784 (TRBV7-3, TRBJ2-3)
CSSSLMKRRRGADTQYF

SEQ ID NO: 493569 - protein, 14 aa, Homo sapiens
  CDR3 for alpha chain variable domain of TCR clone 246785 (TRAV1-2, TRAJ8)
CAVREDTGFQKLVF

SEQ ID NO: 493570 - protein, 19 aa, Homo sapiens
  CDR3 for beta chain variable domain of TCR clone 246785 (TRBV19, TRBJ2-5)
CASSIGQVTDFFLGETQYV

SEQ ID NO: 493571 - protein, 15 aa, Homo sapiens
  CDR3 for alpha chain variable domain of TCR clone 246786 (TRAV3, TRAJ17)
CAVSPKDAAGNKLTF

SEQ ID NO: 493572 - protein, 12 aa, Homo sapiens
  CDR3 for beta chain variable domain of TCR clone 246786 (TRBV7-9, TRBJ1-6)
CASSLMTSPLHF

SEQ ID NO: 493573 - protein, 14 aa, Homo sapiens
  CDR3 for alpha chain variable domain of TCR clone 246787 (TRAV2, TRAJ29)
CAGPFQYGNTPLVF

SEQ ID NO: 493574 - protein, 14 aa, Homo sapiens
  CDR3 for beta chain variable domain of TCR clone 246787 (TRBV7-8, TRBJ2-3)
CASSLEAGTDTQYF

SEQ ID NO: 493575 - protein, 17 aa, Homo sapiens
  CDR3 for alpha chain variable domain of TCR clone 246788 (TRAV12-2, TRAJ22)
CAVNRIPFSGSARQLTF

SEQ ID NO: 493576 - protein, 13 aa, Homo sapiens
  CDR3 for beta chain variable domain of TCR clone 246788 (TRBV11-2, TRBJ2-1)
CASSLRLTHEQFF

SEQ ID NO: 493577 - protein, 16 aa, Homo sapiens
  CDR3 for alpha chain variable domain of TCR clone 246789 (TRAV30, TRAJ24)
CGTEIVDADSWGKFQF

SEQ ID NO: 493578 - protein, 13 aa, Homo sapiens
  CDR3 for beta chain variable domain of TCR clone 246789 (TRBV5-1, TRBJ1-4)
CASSLNSGEKLFF

SEQ ID NO: 493579 - protein, 13 aa, Homo sapiens
  CDR3 for alpha chain variable domain of TCR clone 246790 (TRAV8-3, TRAJ15)
CAVWIQAGTALIF

SEQ ID NO: 493580 - protein, 17 aa, Homo sapiens
  CDR3 for beta chain variable domain of TCR clone 246790 (TRBV20-1, TRBJ2-1)
CSARDPLAGVSYNEQFF

SEQ ID NO: 493581 - protein, 12 aa, Homo sapiens
  CDR3 for alpha chain variable domain of TCR clone 246791 (TRAV22, TRAJ36)
CAVGTGANNLFF

SEQ ID NO: 493582 - protein, 11 aa, Homo sapiens
  CDR3 for beta chain variable domain of TCR clone 246791 (TRBV29-1, TRBJ2-5)
CSEDRTGTQYF

SEQ ID NO: 493583 - protein, 18 aa, Homo sapiens
  CDR3 for alpha chain variable domain of TCR clone 246792 (TRAV26-2, TRAJ54)
CILRDVEVGIQGAQKLVF

SEQ ID NO: 493584 - protein, 15 aa, Homo sapiens
  CDR3 for beta chain variable domain of TCR clone 246792 (TRBV6-1, TRBJ2-5)
CGSETLDRGAETQYF

SEQ ID NO: 493585 - protein, 14 aa, Homo sapiens
  CDR3 for alpha chain variable domain of TCR clone 246793 (TRAV17, TRAJ56)
CATVPAGANSKLTF

SEQ ID NO: 493586 - protein, 12 aa, Homo sapiens
  CDR3 for beta chain variable domain of TCR clone 246793 (TRBV19, TRBJ2-7)
CASTSGTYEQYF

SEQ ID NO: 493587 - protein, 13 aa, Homo sapiens
  CDR3 for alpha chain variable domain of TCR clone 246794 (TRAV27, TRAJ8)
CSGGPTGFQKLVF

SEQ ID NO: 493588 - protein, 15 aa, Homo sapiens
  CDR3 for beta chain variable domain of TCR clone 246794 (TRBV6-1, TRBJ2-7)
CASSESMGDFYEQYF

SEQ ID NO: 493589 - protein, 15 aa, Homo sapiens
  CDR3 for alpha chain variable domain of TCR clone 246795 (TRAV3, TRAJ9)
CAVRARNTGGFKTIF

SEQ ID NO: 493590 - protein, 13 aa, Homo sapiens
  CDR3 for beta chain variable domain of TCR clone 246795 (TRBV7-2, TRBJ1-1)
CASNLKGAKVAFF

SEQ ID NO: 493591 - protein, 12 aa, Homo sapiens
  CDR3 for alpha chain variable domain of TCR clone 246796 (TRAV21, TRAJ33)
CAKMDSNYQLIW

SEQ ID NO: 493592 - protein, 16 aa, Homo sapiens
  CDR3 for beta chain variable domain of TCR clone 246796 (TRBV28, TRBJ1-5)
CASSLTGQGWNQPQHF

SEQ ID NO: 493593 - protein, 15 aa, Homo sapiens
  CDR3 for alpha chain variable domain of TCR clone 246797 (TRAV12-3, TRAJ6)
CAMSATTGGSYIPTF

SEQ ID NO: 493594 - protein, 13 aa, Homo sapiens
  CDR3 for beta chain variable domain of TCR clone 246797 (TRBV7-9, TRBJ1-2)
CASSLKQKYGYTF

SEQ ID NO: 493595 - protein, 10 aa, Homo sapiens
  CDR3 for alpha chain variable domain of TCR clone 246798 (TRAV1-2, TRAJ23)
CAGQGGKLIF

SEQ ID NO: 493596 - protein, 14 aa, Homo sapiens
  CDR3 for beta chain variable domain of TCR clone 246798 (TRBV7-6, TRBJ2-3)
CASSLGTVTDTQYF

SEQ ID NO: 493597 - protein, 18 aa, Homo sapiens
  CDR3 for alpha chain variable domain of TCR clone 246799 (TRAV13-1, TRAJ32)
CTSVQQVTDGGATNKLIF

SEQ ID NO: 493598 - protein, 15 aa, Homo sapiens
  CDR3 for beta chain variable domain of TCR clone 246799 (TRBV20-1, TRBJ2-7)
CSARDRVSGMDEQYF

SEQ ID NO: 493599 - protein, 14 aa, Homo sapiens
  CDR3 for alpha chain variable domain of TCR clone 246800 (TRAV9-2, TRAJ39)
CAPYIYNAGNMLTF

SEQ ID NO: 493600 - protein, 16 aa, Homo sapiens
  CDR3 for beta chain variable domain of TCR clone 246800 (TRBV7-3, TRBJ2-1)
CASSKPLAGGYNEQFF

SEQ ID NO: 493601 - protein, 15 aa, Homo sapiens
  CDR3 for alpha chain variable domain of TCR clone 246801 (TRAV13-1, TRAJ5)
CAASKADTGRRALTF

SEQ ID NO: 493602 - protein, 15 aa, Homo sapiens
  CDR3 for beta chain variable domain of TCR clone 246801 (TRBV19, TRBJ2-1)
CASSMGWNSNNEQFS

SEQ ID NO: 493603 - protein, 14 aa, Homo sapiens
  CDR3 for alpha chain variable domain of TCR clone 246802 (TRAV1-2, TRAJ28)
CVARSGAGSYQLTF

SEQ ID NO: 493604 - protein, 15 aa, Homo sapiens
  CDR3 for beta chain variable domain of TCR clone 246802 (TRBV6-1, TRBJ2-1)
CASSELRGQYNEQFF

SEQ ID NO: 493605 - protein, 15 aa, Homo sapiens
  CDR3 for alpha chain variable domain of TCR clone 246803 (TRAV21, TRAJ17)
CAVDEQKAAGNKLTF

SEQ ID NO: 493606 - protein, 16 aa, Homo sapiens
  CDR3 for beta chain variable domain of TCR clone 246803 (TRBV18, TRBJ2-4)
CASSPPYSGAKNIQYF

SEQ ID NO: 493607 - protein, 13 aa, Homo sapiens
  CDR3 for alpha chain variable domain of TCR clone 246804 (TRAV2, TRAJ40)
CAVVTSGTYKYIF

SEQ ID NO: 493608 - protein, 14 aa, Homo sapiens
  CDR3 for beta chain variable domain of TCR clone 246804 (TRBV11-1, TRBJ1-1)
CASSLPRGGTEAFF

SEQ ID NO: 493609 - protein, 11 aa, Homo sapiens
  CDR3 for alpha chain variable domain of TCR clone 246805 (TRAV1-1, TRAJ23)
CAVHQGGKPIF

SEQ ID NO: 493610 - protein, 20 aa, Homo sapiens
  CDR3 for beta chain variable domain of TCR clone 246805 (TRBV7-8, TRBJ2-2)
CASSHLFPGPTIHITGELFF

SEQ ID NO: 493611 - protein, 14 aa, Homo sapiens
  CDR3 for alpha chain variable domain of TCR clone 246806 (TRAV12-2, TRAJ40)
CAVKIPSGTYKYIF

SEQ ID NO: 493612 - protein, 17 aa, Homo sapiens
  CDR3 for beta chain variable domain of TCR clone 246806 (TRBV7-8, TRBJ2-6)
CASSAGTGGAGANGLTF

SEQ ID NO: 493613 - protein, 14 aa, Homo sapiens
  CDR3 for alpha chain variable domain of TCR clone 246807 (TRAV26-1, TRAJ39)
CIVRGSRAGNMLTF

SEQ ID NO: 493614 - protein, 15 aa, Homo sapiens
  CDR3 for beta chain variable domain of TCR clone 246807 (TRBV7-9, TRBJ1-5)
CASSQGHQANQTQHF

SEQ ID NO: 493615 - protein, 16 aa, Homo sapiens
  CDR3 for alpha chain variable domain of TCR clone 246808 (TRAV30, TRAJ24)
CGTELVDADSWGKFQF

SEQ ID NO: 493616 - protein, 15 aa, Homo sapiens
  CDR3 for beta chain variable domain of TCR clone 246808 (TRBV20-1, TRBJ2-4)
CSARDLTGGPNIQYF

SEQ ID NO: 493617 - protein, 12 aa, Homo sapiens
  CDR3 for alpha chain variable domain of TCR clone 246809 (TRAV26-2, TRAJ21)
CILKGHFNKFYF

SEQ ID NO: 493618 - protein, 14 aa, Homo sapiens
  CDR3 for beta chain variable domain of TCR clone 246809 (TRBV12-4, TRBJ1-1)
CASSLGTGGTEAFF

SEQ ID NO: 493619 - protein, 12 aa, Homo sapiens
  CDR3 for alpha chain variable domain of TCR clone 246810 (TRAV8-3, TRAJ20)
CAVGGGDYKLSF

SEQ ID NO: 493620 - protein, 14 aa, Homo sapiens
  CDR3 for beta chain variable domain of TCR clone 246810 (TRBV5-1, TRBJ2-7)
CASSKGESLYEQYF

SEQ ID NO: 493621 - protein, 17 aa, Homo sapiens
  CDR3 for alpha chain variable domain of TCR clone 246811 (TRAV3, TRAJ6)
CAVRDGPRAGGSYIPTF

SEQ ID NO: 493622 - protein, 14 aa, Homo sapiens
  CDR3 for beta chain variable domain of TCR clone 246811 (TRBV19, TRBJ2-7)
CASSIEASSYEQYF

SEQ ID NO: 493623 - protein, 14 aa, Homo sapiens
  CDR3 for alpha chain variable domain of TCR clone 246812 (TRAV12-2, TRAJ8)
CAVKENTGFQKLVF

SEQ ID NO: 493624 - protein, 13 aa, Homo sapiens
  CDR3 for beta chain variable domain of TCR clone 246812 (TRBV18, TRBJ1-2)
CASSASVTEGYTF

SEQ ID NO: 493625 - protein, 11 aa, Homo sapiens
  CDR3 for alpha chain variable domain of TCR clone 246813 (TRAV2, TRAJ13)
CASGVYQKVTF

SEQ ID NO: 493626 - protein, 13 aa, Homo sapiens
  CDR3 for beta chain variable domain of TCR clone 246813 (TRBV2, TRBJ1-1)
CARNPTGGFHAFF

SEQ ID NO: 493627 - protein, 15 aa, Homo sapiens
  CDR3 for alpha chain variable domain of TCR clone 246814 (TRAV13-1, TRAJ52)
CALITGGTSYGKLTF

SEQ ID NO: 493628 - protein, 14 aa, Homo sapiens
  CDR3 for beta chain variable domain of TCR clone 246814 (TRBV20-1, TRBJ2-5)
CSASDSGSGETQYF

SEQ ID NO: 493629 - protein, 13 aa, Homo sapiens
  CDR3 for alpha chain variable domain of TCR clone 246815 (TRAV12-3, TRAJ40)
CAMSDSGTYKYIF

SEQ ID NO: 493630 - protein, 22 aa, Homo sapiens
  CDR3 for beta chain variable domain of TCR clone 246815 (TRBV14, TRBJ1-5)
CASSQDGVTPYLPPIGNQHQHF

SEQ ID NO: 493631 - protein, 14 aa, Homo sapiens
  CDR3 for alpha chain variable domain of TCR clone 246816 (TRAV2, TRAJ9)
CAVEDRSGGFKTIF

SEQ ID NO: 493632 - protein, 17 aa, Homo sapiens
  CDR3 for beta chain variable domain of TCR clone 246816 (TRBV4-2, TRBJ1-1)
CASTQFGGGSGNTEAFF

SEQ ID NO: 493633 - protein, 17 aa, Homo sapiens
  CDR3 for alpha chain variable domain of TCR clone 246817 (TRAV13-1, TRAJ52)
CAASSGAGGTSYGKLTF

SEQ ID NO: 493634 - protein, 15 aa, Homo sapiens
  CDR3 for beta chain variable domain of TCR clone 246817 (TRBV2, TRBJ2-1)
CASSELAGSYKEQFF

SEQ ID NO: 493635 - protein, 14 aa, Homo sapiens
  CDR3 for alpha chain variable domain of TCR clone 246818 (TRAV1-1, TRAJ27)
CAVIYNTNAGKSTV

SEQ ID NO: 493636 - protein, 15 aa, Homo sapiens
  CDR3 for beta chain variable domain of TCR clone 246818 (TRBV7-9, TRBJ1-6)
CASSSPGRGNSPLHF

SEQ ID NO: 493637 - protein, 14 aa, Homo sapiens
  CDR3 for alpha chain variable domain of TCR clone 246819 (TRAV8-1, TRAJ24)
CAVNAADSWGKLQF

SEQ ID NO: 493638 - protein, 14 aa, Homo sapiens
  CDR3 for beta chain variable domain of TCR clone 246819 (TRBV19, TRBJ2-1)
CASPTFVLSGEQFF

SEQ ID NO: 493639 - protein, 13 aa, Homo sapiens
  CDR3 for alpha chain variable domain of TCR clone 246820 (TRAV21, TRAJ20)
CAVGLRVDYKLSF

SEQ ID NO: 493640 - protein, 16 aa, Homo sapiens
  CDR3 for beta chain variable domain of TCR clone 246820 (TRBV4-2, TRBJ1-2)
CASSQEIGGAGYGYTF

SEQ ID NO: 493641 - protein, 15 aa, Homo sapiens
  CDR3 for alpha chain variable domain of TCR clone 246821 (TRAV35, TRAJ40)
CAGQLGTSGTYKYIF

SEQ ID NO: 493642 - protein, 17 aa, Homo sapiens
  CDR3 for beta chain variable domain of TCR clone 246821 (TRBV20-1, TRBJ2-1)
CSARDPLAGVWDNEQFF

SEQ ID NO: 493643 - protein, 17 aa, Homo sapiens
  CDR3 for alpha chain variable domain of TCR clone 246822 (TRAV1-2, TRAJ8)
CAVRDPDENTGFQELVF

SEQ ID NO: 493644 - protein, 16 aa, Homo sapiens
  CDR3 for beta chain variable domain of TCR clone 246822 (TRBV7-9, TRBJ2-2)
CASSGCGGANTGELFF

SEQ ID NO: 493645 - protein, 14 aa, Homo sapiens
  CDR3 for alpha chain variable domain of TCR clone 246823 (TRAV4, TRAJ17)
CLVGDPLVGNQLTF

SEQ ID NO: 493646 - protein, 20 aa, Homo sapiens
  CDR3 for beta chain variable domain of TCR clone 246823 (TRBV20-1, TRBJ2-1)
CRARPYSVAGGPSYYNEQFF

SEQ ID NO: 493647 - protein, 14 aa, Homo sapiens
  CDR3 for alpha chain variable domain of TCR clone 246824 (TRAV9-2, TRAJ39)
CALYSYNAGNMLTF

SEQ ID NO: 493648 - protein, 12 aa, Homo sapiens
  CDR3 for beta chain variable domain of TCR clone 246824 (TRBV7-2, TRBJ2-5)
CASSQYQETQYF

SEQ ID NO: 493649 - protein, 13 aa, Homo sapiens
  CDR3 for alpha chain variable domain of TCR clone 246825 (TRAV27, TRAJ6)
CAGGTIGSYIPTF

SEQ ID NO: 493650 - protein, 16 aa, Homo sapiens
  CDR3 for beta chain variable domain of TCR clone 246825 (TRBV7-3, TRBJ2-1)
CASSKPLAGGYNEQFF

SEQ ID NO: 493651 - protein, 16 aa, Homo sapiens
  CDR3 for alpha chain variable domain of TCR clone 246826 (TRAV30, TRAJ24)
CGTEIVDADSWGRFQV

SEQ ID NO: 493652 - protein, 16 aa, Homo sapiens
  CDR3 for beta chain variable domain of TCR clone 246826 (TRBV24-1, TRBJ2-1)
CATSGVAGANYNEQFF

SEQ ID NO: 493653 - protein, 12 aa, Homo sapiens
  CDR3 for alpha chain variable domain of TCR clone 246827 (TRAV35, TRAJ33)
CAGRGSNYQLIW

SEQ ID NO: 493654 - protein, 15 aa, Homo sapiens
  CDR3 for beta chain variable domain of TCR clone 246827 (TRBV19, TRBJ1-6)
CASSTQGAVGSTLHF

SEQ ID NO: 493655 - protein, 16 aa, Homo sapiens
  CDR3 for alpha chain variable domain of TCR clone 246828 (TRAV3, TRAJ37)
CAVRVKGSGNTGKLIF

SEQ ID NO: 493656 - protein, 15 aa, Homo sapiens
  CDR3 for beta chain variable domain of TCR clone 246828 (TRBV7-3, TRBJ2-2)
CASSETGQGTGELFF

SEQ ID NO: 493657 - protein, 18 aa, Homo sapiens
  CDR3 for alpha chain variable domain of TCR clone 246829 (TRAV12-2, )
CAVEDIQNPDPAVYQLRD

SEQ ID NO: 493658 - protein, 14 aa, Homo sapiens
  CDR3 for beta chain variable domain of TCR clone 246829 (TRBV2, TRBJ2-7)
CASSVLGAAYEQYF

SEQ ID NO: 493659 - protein, 12 aa, Homo sapiens
  CDR3 for alpha chain variable domain of TCR clone 246830 (TRAV12-3, TRAJ17)
CAMTLTGNKLTF

SEQ ID NO: 493660 - protein, 15 aa, Homo sapiens
  CDR3 for beta chain variable domain of TCR clone 246830 (TRBV19, TRBJ2-1)
CASSIWGEGRNEQFF

SEQ ID NO: 493661 - protein, 12 aa, Homo sapiens
  CDR3 for alpha chain variable domain of TCR clone 246831 (TRAV27, )
CAARRNAAITIS

SEQ ID NO: 493662 - protein, 13 aa, Homo sapiens
  CDR3 for beta chain variable domain of TCR clone 246831 (TRBV12-5, TRBJ2-3)
CASGDRQSDTQYF

SEQ ID NO: 493663 - protein, 12 aa, Homo sapiens
  CDR3 for alpha chain variable domain of TCR clone 246832 (TRAV12-3, TRAJ17)
CAITLTGNKLTF

SEQ ID NO: 493664 - protein, 15 aa, Homo sapiens
  CDR3 for beta chain variable domain of TCR clone 246832 (TRBV20-1, TRBJ2-7)
CSAGDRVSGMDEQYF

SEQ ID NO: 493665 - protein, 15 aa, Homo sapiens
  CDR3 for alpha chain variable domain of TCR clone 246833 (TRAV19, TRAJ9)
CALSEARTGGFKTIF

SEQ ID NO: 493666 - protein, 17 aa, Homo sapiens
  CDR3 for beta chain variable domain of TCR clone 246833 (TRBV11-2, TRBJ2-1)
CASSLYPPGVEYNEQFF

SEQ ID NO: 493667 - protein, 13 aa, Homo sapiens
  CDR3 for alpha chain variable domain of TCR clone 246834 (TRAV29/DV5, TRAJ44)
CAASTGTASKLTF

SEQ ID NO: 493668 - protein, 13 aa, Homo sapiens
  CDR3 for beta chain variable domain of TCR clone 246834 (TRBV10-1, TRBJ1-1)
CASQGQTDTEAFF

SEQ ID NO: 493669 - protein, 16 aa, Homo sapiens
  CDR3 for alpha chain variable domain of TCR clone 246835 (TRAV3, TRAJ28)
CAVLPRSGTGSYQLTF

SEQ ID NO: 493670 - protein, 13 aa, Homo sapiens
  CDR3 for beta chain variable domain of TCR clone 246835 (TRBV12-4, TRBJ2-5)
CASRLAVQETQYF

SEQ ID NO: 493671 - protein, 16 aa, Homo sapiens
  CDR3 for alpha chain variable domain of TCR clone 246836 (TRAV8-6, TRAJ53)
CAVRENSGGSNYKLTF

SEQ ID NO: 493672 - protein, 14 aa, Homo sapiens
  CDR3 for beta chain variable domain of TCR clone 246836 (TRBV11-3, TRBJ1-6)
CASSFSGGDSPLHF

SEQ ID NO: 493673 - protein, 10 aa, Homo sapiens
  CDR3 for alpha chain variable domain of TCR clone 246837 (TRAV26-1, TRAJ22)
RSGSARHLTF

SEQ ID NO: 493674 - protein, 13 aa, Homo sapiens
  CDR3 for beta chain variable domain of TCR clone 246837 (TRBV7-9, TRBJ1-2)
CASSVKQNYGYTF

SEQ ID NO: 493675 - protein, 14 aa, Homo sapiens
  CDR3 for alpha chain variable domain of TCR clone 246838 (TRAV12-2, TRAJ17)
CAVLFKAAGNKLTF

SEQ ID NO: 493676 - protein, 14 aa, Homo sapiens
  CDR3 for beta chain variable domain of TCR clone 246838 (TRBV7-9, TRBJ1-6)
CASKPGTVNSPLHF

SEQ ID NO: 493677 - protein, 15 aa, Homo sapiens
  CDR3 for alpha chain variable domain of TCR clone 246839 (TRAV27, TRAJ38)
CAARRNAGNNRKLIW

SEQ ID NO: 493678 - protein, 22 aa, Homo sapiens
  CDR3 for beta chain variable domain of TCR clone 246839 (TRBV6-1, TRBJ1-3)
CASVQGGGWKHHVFWRGKLAHC

SEQ ID NO: 493679 - protein, 13 aa, Homo sapiens
  CDR3 for alpha chain variable domain of TCR clone 246840 (TRAV1-2, TRAJ9)
CAALNTGGFKTIF

SEQ ID NO: 493680 - protein, 18 aa, Homo sapiens
  CDR3 for beta chain variable domain of TCR clone 246840 (TRBV5-5, TRBJ1-5)
CASSLRQVKGSSNQPQHF

SEQ ID NO: 493681 - protein, 15 aa, Homo sapiens
  CDR3 for alpha chain variable domain of TCR clone 246841 (TRAV8-4, TRAJ48)
CALSAAYFGNGKLTF

SEQ ID NO: 493682 - protein, 12 aa, Homo sapiens
  CDR3 for beta chain variable domain of TCR clone 246841 (TRBV3-1, TRBJ2-5)
CASSQRGETQYF

SEQ ID NO: 493683 - protein, 16 aa, Homo sapiens
  CDR3 for alpha chain variable domain of TCR clone 246842 (TRAV3, TRAJ37)
CAVRGKGSGNTGKLIF

SEQ ID NO: 493684 - protein, 16 aa, Homo sapiens
  CDR3 for beta chain variable domain of TCR clone 246842 (TRBV12-5, TRBJ2-5)
CASGTRTSGNQETQYF

SEQ ID NO: 493685 - protein, 15 aa, Homo sapiens
  CDR3 for alpha chain variable domain of TCR clone 246843 (TRAV3, TRAJ22)
CAMRDRGGSARQLTF

SEQ ID NO: 493686 - protein, 17 aa, Homo sapiens
  CDR3 for beta chain variable domain of TCR clone 246843 (TRBV11-2, TRBJ2-1)
CASSLYPPGVEYNEQFF

SEQ ID NO: 493687 - protein, 15 aa, Homo sapiens
  CDR3 for alpha chain variable domain of TCR clone 246844 (TRAV21, TRAJ53)
CATLNSGGSNYKLTF

SEQ ID NO: 493688 - protein, 14 aa, Homo sapiens
  CDR3 for beta chain variable domain of TCR clone 246844 (TRBV19, TRBJ2-1)
CASKDPGLANEQFF

SEQ ID NO: 493689 - protein, 15 aa, Homo sapiens
  CDR3 for alpha chain variable domain of TCR clone 246845 (TRAV1-2, TRAJ8)
CAVRDRNTGFQKLVF

SEQ ID NO: 493690 - protein, 13 aa, Homo sapiens
  CDR3 for beta chain variable domain of TCR clone 246845 (TRBV5-7, TRBJ2-1)
CASSVVESVEQFF

SEQ ID NO: 493691 - protein, 11 aa, Homo sapiens
  CDR3 for alpha chain variable domain of TCR clone 246846 (TRAV35, TRAJ30)
CAGERDDKIIF

SEQ ID NO: 493692 - protein, 14 aa, Homo sapiens
  CDR3 for beta chain variable domain of TCR clone 246846 (TRBV15, TRBJ2-1)
CATSGDRGQETQYF

SEQ ID NO: 493693 - protein, 11 aa, Homo sapiens
  CDR3 for alpha chain variable domain of TCR clone 246847 (TRAV35, TRAJ30)
CAGERDDKIIF

SEQ ID NO: 493694 - protein, 14 aa, Homo sapiens
  CDR3 for beta chain variable domain of TCR clone 246847 (TRBV15, TRBJ2-7)
CATSGDRGQETQYF

SEQ ID NO: 493695 - protein, 11 aa, Homo sapiens
  CDR3 for alpha chain variable domain of TCR clone 246848 (TRAV12-1, TRAJ34)
CVVNKGRELIF

SEQ ID NO: 493696 - protein, 15 aa, Homo sapiens
  CDR3 for beta chain variable domain of TCR clone 246848 (TRBV7-2, TRBJ2-7)
CASSLKGALTYEQYF

SEQ ID NO: 493697 - protein, 12 aa, Homo sapiens
  CDR3 for alpha chain variable domain of TCR clone 246849 (TRAV12-2, TRAJ16)
CAVNLDGQKLLF

SEQ ID NO: 493698 - protein, 16 aa, Homo sapiens
  CDR3 for beta chain variable domain of TCR clone 246849 (TRBV18, TRBJ1-5)
CASSPYRVEGNQPQHF

SEQ ID NO: 493699 - protein, 11 aa, Homo sapiens
  CDR3 for alpha chain variable domain of TCR clone 246850 (TRAV12-3, TRAJ43)
CAMSVSNDMRF

SEQ ID NO: 493700 - protein, 16 aa, Homo sapiens
  CDR3 for beta chain variable domain of TCR clone 246850 (TRBV20-1, TRBJ2-1)
CSARDSLGAVHNEQFF

SEQ ID NO: 493701 - protein, 14 aa, Homo sapiens
  CDR3 for alpha chain variable domain of TCR clone 246851 (TRAV12-2, TRAJ13)
CAVKKTGGYQKVTF

SEQ ID NO: 493702 - protein, 14 aa, Homo sapiens
  CDR3 for beta chain variable domain of TCR clone 246851 (TRBV20-1, TRBJ2-1)
CSAQIGGSSNEQFF

SEQ ID NO: 493703 - protein, 15 aa, Homo sapiens
  CDR3 for alpha chain variable domain of TCR clone 246852 (TRAV13-1, TRAJ17)
CAASIERDAGNKLTF

SEQ ID NO: 493704 - protein, 14 aa, Homo sapiens
  CDR3 for beta chain variable domain of TCR clone 246852 (TRBV4-1, TRBJ2-2)
CASSQAVNTGELFF

SEQ ID NO: 493705 - protein, 18 aa, Homo sapiens
  CDR3 for alpha chain variable domain of TCR clone 246853 (TRAV21, TRAJ52)
CAVRPSPAGGTSCGKLTF

SEQ ID NO: 493706 - protein, 13 aa, Homo sapiens
  CDR3 for beta chain variable domain of TCR clone 246853 (TRBV29-1, TRBJ2-2)
CSVYREDTGELFF

SEQ ID NO: 493707 - protein, 12 aa, Homo sapiens
  CDR3 for alpha chain variable domain of TCR clone 246854 (TRAV26-1, TRAJ31)
CIVRSINARLMF

SEQ ID NO: 493708 - protein, 14 aa, Homo sapiens
  CDR3 for beta chain variable domain of TCR clone 246854 (TRBV19, TRBJ2-1)
CASPTFVLSGEQFF

SEQ ID NO: 493709 - protein, 15 aa, Homo sapiens
  CDR3 for alpha chain variable domain of TCR clone 246855 (TRAV8-3, TRAJ45)
CASSYSGGGADGLTF

SEQ ID NO: 493710 - protein, 13 aa, Homo sapiens
  CDR3 for beta chain variable domain of TCR clone 246855 (TRBV10-3, TRBJ2-7)
GASKLAVSYEQYF

SEQ ID NO: 493711 - protein, 15 aa, Homo sapiens
  CDR3 for alpha chain variable domain of TCR clone 246856 (TRAV17, TRAJ54)
CATEKMGPGAQKLVF

SEQ ID NO: 493712 - protein, 14 aa, Homo sapiens
  CDR3 for beta chain variable domain of TCR clone 246856 (TRBV7-3, TRBJ1-1)
CQQLRGQMNTEAFF

SEQ ID NO: 493713 - protein, 13 aa, Homo sapiens
  CDR3 for alpha chain variable domain of TCR clone 246857 (TRAV3, TRAJ27)
CAVRPLGAGKSTF

SEQ ID NO: 493714 - protein, 12 aa, Homo sapiens
  CDR3 for beta chain variable domain of TCR clone 246857 (TRBV7-9, TRBJ2-7)
CAARTDAYEQYV

SEQ ID NO: 493715 - protein, 19 aa, Homo sapiens
  CDR3 for alpha chain variable domain of TCR clone 246858 (TRAV16, )
CALSGDIQNPDPAVYQLRD

SEQ ID NO: 493716 - protein, 16 aa, Homo sapiens
  CDR3 for beta chain variable domain of TCR clone 246858 (TRBV12-5, TRBJ2-5)
CASGPRTSGNQENQYF

SEQ ID NO: 493717 - protein, 17 aa, Homo sapiens
  CDR3 for alpha chain variable domain of TCR clone 246859 (TRAV12-3, TRAJ6)
CAMSARGGAGGSYIPTF

SEQ ID NO: 493718 - protein, 14 aa, Homo sapiens
  CDR3 for beta chain variable domain of TCR clone 246859 (TRBV19, TRBJ2-1)
CASPTFVLSGEHFF

SEQ ID NO: 493719 - protein, 14 aa, Homo sapiens
  CDR3 for alpha chain variable domain of TCR clone 246860 (TRAV2, TRAJ9)
CAVEDRSGGFKTIF

SEQ ID NO: 493720 - protein, 13 aa, Homo sapiens
  CDR3 for beta chain variable domain of TCR clone 246860 (TRBV18, TRBJ2-5)
CASSLQGQETQYF

SEQ ID NO: 493721 - protein, 16 aa, Homo sapiens
  CDR3 for alpha chain variable domain of TCR clone 246861 (TRAV3, TRAJ37)
CAVRPHGSGNTGKLVF

SEQ ID NO: 493722 - protein, 13 aa, Homo sapiens
  CDR3 for beta chain variable domain of TCR clone 246861 (TRBV2, TRBJ1-5)
CASGTGGYQPQHF

SEQ ID NO: 493723 - protein, 14 aa, Homo sapiens
  CDR3 for alpha chain variable domain of TCR clone 246862 (TRAV13-1, TRAJ44)
CAAKATGTARKLTF

SEQ ID NO: 493724 - protein, 12 aa, Homo sapiens
  CDR3 for beta chain variable domain of TCR clone 246862 (TRBV11-2, TRBJ2-2)
CASSLGGGELFF

SEQ ID NO: 493725 - protein, 16 aa, Homo sapiens
  CDR3 for alpha chain variable domain of TCR clone 246863 (TRAV3, TRAJ48)
CAVRVLTNFGNEKLTF

SEQ ID NO: 493726 - protein, 17 aa, Homo sapiens
  CDR3 for beta chain variable domain of TCR clone 246863 (TRBV19, TRBJ2-6)
CASSTGQVFSGANVLTF

SEQ ID NO: 493727 - protein, 13 aa, Homo sapiens
  CDR3 for alpha chain variable domain of TCR clone 246864 (TRAV27, TRAJ34)
CAGGLDNTDKLIF

SEQ ID NO: 493728 - protein, 15 aa, Homo sapiens
  CDR3 for beta chain variable domain of TCR clone 246864 (TRBV7-9, TRBJ2-2)
CASGPLDTFPGELFF

SEQ ID NO: 493729 - protein, 15 aa, Homo sapiens
  CDR3 for alpha chain variable domain of TCR clone 246865 (TRAV8-4, TRAJ3)
CAVSEPYSSASKIIF

SEQ ID NO: 493730 - protein, 15 aa, Homo sapiens
  CDR3 for beta chain variable domain of TCR clone 246865 (TRBV19, TRBJ2-7)
CASSPAGSGEALRYF

SEQ ID NO: 493731 - protein, 13 aa, Homo sapiens
  CDR3 for alpha chain variable domain of TCR clone 246866 (TRAV8-4, TRAJ47)
CAVTALYGNKPVF

SEQ ID NO: 493732 - protein, 14 aa, Homo sapiens
  CDR3 for beta chain variable domain of TCR clone 246866 (TRBV19, TRBJ2-7)
CASSIGGAVAEQYF

SEQ ID NO: 493733 - protein, 13 aa, Homo sapiens
  CDR3 for alpha chain variable domain of TCR clone 246867 (TRAV20, TRAJ49)
CAVQARTGNRFYF

SEQ ID NO: 493734 - protein, 14 aa, Homo sapiens
  CDR3 for beta chain variable domain of TCR clone 246867 (TRBV7-2, TRBJ2-7)
CASSPKTSFYEQYF

SEQ ID NO: 493735 - protein, 16 aa, Homo sapiens
  CDR3 for alpha chain variable domain of TCR clone 246868 (TRAV8-6, TRAJ58)
CCELLGRRTSGSRLTF

SEQ ID NO: 493736 - protein, 14 aa, Homo sapiens
  CDR3 for beta chain variable domain of TCR clone 246868 (TRBV4-2, TRBJ2-1)
CASGLDRAYNEQFF

SEQ ID NO: 493737 - protein, 13 aa, Homo sapiens
  CDR3 for alpha chain variable domain of TCR clone 246869 (TRAV12-3, TRAJ7)
CAMTPYENNRLAF

SEQ ID NO: 493738 - protein, 16 aa, Homo sapiens
  CDR3 for beta chain variable domain of TCR clone 246869 (TRBV20-1, TRBJ1-4)
CSARPYGGELNEKLFF

SEQ ID NO: 493739 - protein, 11 aa, Homo sapiens
  CDR3 for alpha chain variable domain of TCR clone 246870 (TRAV1-2, TRAJ40)
CAVPGTYKYIF

SEQ ID NO: 493740 - protein, 17 aa, Homo sapiens
  CDR3 for beta chain variable domain of TCR clone 246870 (TRBV23-1, TRBJ2-1)
CASSQYTAAGVVMSSSS

SEQ ID NO: 493741 - protein, 18 aa, Homo sapiens
  CDR3 for alpha chain variable domain of TCR clone 246871 (TRAV26-1, TRAJ23)
CIVRVGLEVWNQGGRRIF

SEQ ID NO: 493742 - protein, 16 aa, Homo sapiens
  CDR3 for beta chain variable domain of TCR clone 246871 (TRBV12-4, TRBJ2-5)
CASSFFVRGRQETQYF

SEQ ID NO: 493743 - protein, 12 aa, Homo sapiens
  CDR3 for alpha chain variable domain of TCR clone 246872 (TRAV2, TRAJ33)
CAFMDSNYQLIW

SEQ ID NO: 493744 - protein, 14 aa, Homo sapiens
  CDR3 for beta chain variable domain of TCR clone 246872 (TRBV19, TRBJ2-5)
CASSMTGQQETQYF

SEQ ID NO: 493745 - protein, 14 aa, Homo sapiens
  CDR3 for alpha chain variable domain of TCR clone 246873 (TRAV1-2, TRAJ27)
CAPAEYTNAGKSTF

SEQ ID NO: 493746 - protein, 18 aa, Homo sapiens
  CDR3 for beta chain variable domain of TCR clone 246873 (TRBV28, TRBJ1-2)
CASRQQQGKRGFNYGYTF

SEQ ID NO: 493747 - protein, 18 aa, Homo sapiens
  CDR3 for alpha chain variable domain of TCR clone 246874 (TRAV17, TRAJ45)
CATSLDLYSGGGADGLTF

SEQ ID NO: 493748 - protein, 14 aa, Homo sapiens
  CDR3 for beta chain variable domain of TCR clone 246874 (TRBV11-2, TRBJ2-1)
CSSKNRGLIYEQFF

SEQ ID NO: 493749 - protein, 13 aa, Homo sapiens
  CDR3 for alpha chain variable domain of TCR clone 246875 (TRAV12-1, TRAJ6)
CVVFPGGSYIPTS

SEQ ID NO: 493750 - protein, 13 aa, Homo sapiens
  CDR3 for beta chain variable domain of TCR clone 246875 (TRBV12-4, TRBJ2-7)
CASSFVPTAEQYF

SEQ ID NO: 493751 - protein, 12 aa, Homo sapiens
  CDR3 for alpha chain variable domain of TCR clone 246876 (TRAV13-1, TRAJ21)
CAAKEGFNKFYF

SEQ ID NO: 493752 - protein, 14 aa, Homo sapiens
  CDR3 for beta chain variable domain of TCR clone 246876 (TRBV5-5, TRBJ1-2)
CASSLDPYNYGYTF

SEQ ID NO: 493753 - protein, 14 aa, Homo sapiens
  CDR3 for alpha chain variable domain of TCR clone 246877 (TRAV26-1, TRAJ31)
CIALPPNNNARLMF

SEQ ID NO: 493754 - protein, 16 aa, Homo sapiens
  CDR3 for beta chain variable domain of TCR clone 246877 (TRBV10-2, TRBJ2-7)
CASSESPESSGFEQYF

SEQ ID NO: 493755 - protein, 12 aa, Homo sapiens
  CDR3 for alpha chain variable domain of TCR clone 246878 (TRAV12-2, TRAJ15)
CAVNQAGTALIF

SEQ ID NO: 493756 - protein, 13 aa, Homo sapiens
  CDR3 for beta chain variable domain of TCR clone 246878 (TRBV10-3, TRBJ2-7)
CASKLAVNYEQYF

SEQ ID NO: 493757 - protein, 16 aa, Homo sapiens
  CDR3 for alpha chain variable domain of TCR clone 246879 (TRAV17, TRAJ22)
CATDAISSGSARQLTF

SEQ ID NO: 493758 - protein, 12 aa, Homo sapiens
  CDR3 for beta chain variable domain of TCR clone 246879 (TRBV11-2, TRBJ2-2)
CASSLGGGELFF

SEQ ID NO: 493759 - protein, 11 aa, Homo sapiens
  CDR3 for alpha chain variable domain of TCR clone 246880 (TRAV2, TRAJ13)
CASGGYQKVTF

SEQ ID NO: 493760 - protein, 15 aa, Homo sapiens
  CDR3 for beta chain variable domain of TCR clone 246880 (TRBV18, TRBJ1-1)
CASSQSSWVNTEAFF

SEQ ID NO: 493761 - protein, 15 aa, Homo sapiens
  CDR3 for alpha chain variable domain of TCR clone 246881 (TRAV17, TRAJ35)
CATAFVIGFGNVLHC

SEQ ID NO: 493762 - protein, 17 aa, Homo sapiens
  CDR3 for beta chain variable domain of TCR clone 246881 (TRBV11-2, TRBJ2-1)
CASSLYPPGVEYNEQFF

SEQ ID NO: 493763 - protein, 19 aa, Homo sapiens
  CDR3 for alpha chain variable domain of TCR clone 246882 (TRAV2, TRAJ20)
ILQVREADAAVYRDCKLSF

SEQ ID NO: 493764 - protein, 15 aa, Homo sapiens
  CDR3 for beta chain variable domain of TCR clone 246882 (TRBV7-2, TRBJ1-2)
CASSPRAGWNYGYTF

SEQ ID NO: 493765 - protein, 11 aa, Homo sapiens
  CDR3 for alpha chain variable domain of TCR clone 246883 (TRAV13-2, TRAJ15)
CSHQAGTALIF

SEQ ID NO: 493766 - protein, 13 aa, Homo sapiens
  CDR3 for beta chain variable domain of TCR clone 246883 (TRBV20-1, TRBJ1-5)
CSASQQVVQPQHF

SEQ ID NO: 493767 - protein, 10 aa, Homo sapiens
  CDR3 for alpha chain variable domain of TCR clone 246884 (TRAV21, TRAJ31)
CAVDNARLMF

SEQ ID NO: 493768 - protein, 13 aa, Homo sapiens
  CDR3 for beta chain variable domain of TCR clone 246884 (TRBV4-1, TRBJ1-1)
CASSRKMNTEAYF

SEQ ID NO: 493769 - protein, 13 aa, Homo sapiens
  CDR3 for alpha chain variable domain of TCR clone 246885 (TRAV20, TRAJ21)
CAAEGYNFNKFYF

SEQ ID NO: 493770 - protein, 14 aa, Homo sapiens
  CDR3 for beta chain variable domain of TCR clone 246885 (TRBV12-5, TRBJ2-5)
CASGSRTHQETQYF

SEQ ID NO: 493771 - protein, 12 aa, Homo sapiens
  CDR3 for alpha chain variable domain of TCR clone 246886 (TRAV12-3, TRAJ17)
CAMTLTGNKLTI

SEQ ID NO: 493772 - protein, 15 aa, Homo sapiens
  CDR3 for beta chain variable domain of TCR clone 246886 (TRBV20-1, TRBJ2-7)
CSARDRVSGMDERYF

SEQ ID NO: 493773 - protein, 15 aa, Homo sapiens
  CDR3 for alpha chain variable domain of TCR clone 246887 (TRAV26-1, TRAJ29)
CIIRGEGSGNTPLVF

SEQ ID NO: 493774 - protein, 15 aa, Homo sapiens
  CDR3 for beta chain variable domain of TCR clone 246887 (TRBV7-9, TRBJ1-5)
CASSQGHQPNQPQHF

SEQ ID NO: 493775 - protein, 15 aa, Homo sapiens
  CDR3 for alpha chain variable domain of TCR clone 246888 (TRAV35, TRAJ40)
CAGQLWDSGTYKYIF

SEQ ID NO: 493776 - protein, 12 aa, Homo sapiens
  CDR3 for beta chain variable domain of TCR clone 246888 (TRBV7-8, TRBJ2-7)
CARSLAGYEQYF

SEQ ID NO: 493777 - protein, 14 aa, Homo sapiens
  CDR3 for alpha chain variable domain of TCR clone 246889 (TRAV8-4, TRAJ54)
CAVSEVLGAQKLVF

SEQ ID NO: 493778 - protein, 13 aa, Homo sapiens
  CDR3 for beta chain variable domain of TCR clone 246889 (TRBV27, TRBJ2-7)
RASSFVSSYEQYF

SEQ ID NO: 493779 - protein, 14 aa, Homo sapiens
  CDR3 for alpha chain variable domain of TCR clone 246890 (TRAV12-2, TRAJ13)
CAGKKTGGYQKVTF

SEQ ID NO: 493780 - protein, 13 aa, Homo sapiens
  CDR3 for beta chain variable domain of TCR clone 246890 (TRBV10-3, TRBJ2-7)
CASKLAVNYEQYF

SEQ ID NO: 493781 - protein, 15 aa, Homo sapiens
  CDR3 for alpha chain variable domain of TCR clone 246891 (TRAV35, TRAJ40)
CAGQLGTSGTYKYIF

SEQ ID NO: 493782 - protein, 14 aa, Homo sapiens
  CDR3 for beta chain variable domain of TCR clone 246891 (TRBV5-1, TRBJ2-7)
CASRRGESLYEQYF

SEQ ID NO: 493783 - protein, 13 aa, Homo sapiens
  CDR3 for alpha chain variable domain of TCR clone 246892 (TRAV36/DV7, TRAJ54)
CAVDIQCAQKLVF

SEQ ID NO: 493784 - protein, 14 aa, Homo sapiens
  CDR3 for beta chain variable domain of TCR clone 246892 (TRBV19, TRBJ2-7)
CASNFRDTFTGMYF

SEQ ID NO: 493785 - protein, 16 aa, Homo sapiens
  CDR3 for alpha chain variable domain of TCR clone 246893 (TRAV1-1, TRAJ29)
CAVRSTRNSGNTPLAF

SEQ ID NO: 493786 - protein, 16 aa, Homo sapiens
  CDR3 for beta chain variable domain of TCR clone 246893 (TRBV27, TRBJ1-1)
CASSSRGRTGYTEAFF

SEQ ID NO: 493787 - protein, 13 aa, Homo sapiens
  CDR3 for alpha chain variable domain of TCR clone 246894 (TRAV8-6, TRAJ24)
CAVSPSSLNKFYF

SEQ ID NO: 493788 - protein, 14 aa, Homo sapiens
  CDR3 for beta chain variable domain of TCR clone 246894 (TRBV12-5, TRBJ2-5)
CASGSRTHQETQYF

SEQ ID NO: 493789 - protein, 14 aa, Homo sapiens
  CDR3 for alpha chain variable domain of TCR clone 246895 (TRAV1-2, TRAJ16)
CAVNRFSDGQKLLF

SEQ ID NO: 493790 - protein, 15 aa, Homo sapiens
  CDR3 for beta chain variable domain of TCR clone 246895 (TRBV7-9, TRBJ1-6)
SASSSPGRGNSPLHF

SEQ ID NO: 493791 - protein, 16 aa, Homo sapiens
  CDR3 for alpha chain variable domain of TCR clone 246896 (TRAV13-1, TRAJ22)
CAAKGGRSGSARQLTL

SEQ ID NO: 493792 - protein, 15 aa, Homo sapiens
  CDR3 for beta chain variable domain of TCR clone 246896 (TRBV9, TRBJ1-6)
CASSVAGTGDSPLHF

SEQ ID NO: 493793 - protein, 14 aa, Homo sapiens
  CDR3 for alpha chain variable domain of TCR clone 246897 (TRAV9-2, TRAJ39)
CALYIYNAGNMLTF

SEQ ID NO: 493794 - protein, 16 aa, Homo sapiens
  CDR3 for beta chain variable domain of TCR clone 246897 (TRBV11-2, TRBJ2-7)
CASSPTTGGVSYEQYF

SEQ ID NO: 493795 - protein, 14 aa, Homo sapiens
  CDR3 for alpha chain variable domain of TCR clone 246898 (TRAV8-2, TRAJ4)
CVVSTSGGHNKLIF

SEQ ID NO: 493796 - protein, 15 aa, Homo sapiens
  CDR3 for beta chain variable domain of TCR clone 246898 (TRBV4-1, TRBJ1-4)
CASSDTGGTNEKLFF

SEQ ID NO: 493797 - protein, 11 aa, Homo sapiens
  CDR3 for alpha chain variable domain of TCR clone 246899 (TRAV35, TRAJ30)
CAGPGDDKIIC

SEQ ID NO: 493798 - protein, 18 aa, Homo sapiens
  CDR3 for beta chain variable domain of TCR clone 246899 (TRBV7-6, TRBJ2-1)
CASSPRTSGMSSYNEQFF

SEQ ID NO: 493799 - protein, 13 aa, Homo sapiens
  CDR3 for alpha chain variable domain of TCR clone 246900 (TRAV13-1, TRAJ6)
CARGSGGSYIPTF

SEQ ID NO: 493800 - protein, 16 aa, Homo sapiens
  CDR3 for beta chain variable domain of TCR clone 246900 (TRBV7-8, TRBJ2-1)
CQQPADGTLAYNEQFF

SEQ ID NO: 493801 - protein, 15 aa, Homo sapiens
  CDR3 for alpha chain variable domain of TCR clone 246901 (TRAV20, TRAJ53)
CAVQASGGRNYKLIF

SEQ ID NO: 493802 - protein, 14 aa, Homo sapiens
  CDR3 for beta chain variable domain of TCR clone 246901 (TRBV7-2, TRBJ1-2)
CASSQTRSTYGYTF

SEQ ID NO: 493803 - protein, 13 aa, Homo sapiens
  CDR3 for alpha chain variable domain of TCR clone 246902 (TRAV12-1, TRAJ40)
CVVPTSGTYKYIF

SEQ ID NO: 493804 - protein, 16 aa, Homo sapiens
  CDR3 for beta chain variable domain of TCR clone 246902 (TRBV7-9, TRBJ1-2)
CASSLGFSSGEDGYTS

SEQ ID NO: 493805 - protein, 11 aa, Homo sapiens
  CDR3 for alpha chain variable domain of TCR clone 246903 (TRAV23/DV6, TRAJ58)
CAARLLRGETS

SEQ ID NO: 493806 - protein, 13 aa, Homo sapiens
  CDR3 for beta chain variable domain of TCR clone 246903 (TRBV7-2, TRBJ2-7)
CASSSPSGSEQYF

SEQ ID NO: 493807 - protein, 12 aa, Homo sapiens
  CDR3 for alpha chain variable domain of TCR clone 246904 (TRAV2, TRAJ9)
CAVGAGGFKTIF

SEQ ID NO: 493808 - protein, 12 aa, Homo sapiens
  CDR3 for beta chain variable domain of TCR clone 246904 (TRBV5-1, TRBJ2-7)
CASSLDSYEQYF

SEQ ID NO: 493809 - protein, 12 aa, Homo sapiens
  CDR3 for alpha chain variable domain of TCR clone 246905 (TRAV12-2, TRAJ42)
CAVGGSQGNLIF

SEQ ID NO: 493810 - protein, 16 aa, Homo sapiens
  CDR3 for beta chain variable domain of TCR clone 246905 (TRBV7-3, TRBJ2-2)
GASSLKRGTLSGELFF

SEQ ID NO: 493811 - protein, 14 aa, Homo sapiens
  CDR3 for alpha chain variable domain of TCR clone 246906 (TRAV17, TRAJ34)
CATDSLEGTDKLIF

SEQ ID NO: 493812 - protein, 16 aa, Homo sapiens
  CDR3 for beta chain variable domain of TCR clone 246906 (TRBV7-3, TRBJ2-1)
CASSLEGYRSYNEQFF

SEQ ID NO: 493813 - protein, 15 aa, Homo sapiens
  CDR3 for alpha chain variable domain of TCR clone 246907 (TRAV12-3, TRAJ49)
CAMAVTPNTGTSSIL

SEQ ID NO: 493814 - protein, 18 aa, Homo sapiens
  CDR3 for beta chain variable domain of TCR clone 246907 (TRBV4-1, TRBJ1-5)
CASSQDPRGQGLDQPQHF

SEQ ID NO: 493815 - protein, 13 aa, Homo sapiens
  CDR3 for alpha chain variable domain of TCR clone 246908 (TRAV2, TRAJ11)
CAVEEIGYSTLTF

SEQ ID NO: 493816 - protein, 17 aa, Homo sapiens
  CDR3 for beta chain variable domain of TCR clone 246908 (TRBV7-2, TRBJ2-1)
CASSRGTSGAVGWDQFF

SEQ ID NO: 493817 - protein, 14 aa, Homo sapiens
  CDR3 for alpha chain variable domain of TCR clone 246909 (TRAV26-2, TRAJ31)
CILIPGNNNARLMF

SEQ ID NO: 493818 - protein, 16 aa, Homo sapiens
  CDR3 for beta chain variable domain of TCR clone 246909 (TRBV7-3, TRBJ2-1)
CASSLVSGSSNNEQFF

SEQ ID NO: 493819 - protein, 14 aa, Homo sapiens
  CDR3 for alpha chain variable domain of TCR clone 246910 (TRAV1-2, TRAJ16)
CAVNRFSDGQKLLF

SEQ ID NO: 493820 - protein, 14 aa, Homo sapiens
  CDR3 for beta chain variable domain of TCR clone 246910 (TRBV14, TRBJ2-1)
CASSQVRGRGEQFF

SEQ ID NO: 493821 - protein, 16 aa, Homo sapiens
  CDR3 for alpha chain variable domain of TCR clone 246911 (TRAV12-1, TRAJ42)
CVVTPYYGGSQGNLIF

SEQ ID NO: 493822 - protein, 14 aa, Homo sapiens
  CDR3 for beta chain variable domain of TCR clone 246911 (TRBV7-2, TRBJ1-1)
CASSFLTGTTEAFF

SEQ ID NO: 493823 - protein, 14 aa, Homo sapiens
  CDR3 for alpha chain variable domain of TCR clone 246912 (TRAV3, TRAJ6)
CAVRDPWGSYIPPF

SEQ ID NO: 493824 - protein, 16 aa, Homo sapiens
  CDR3 for beta chain variable domain of TCR clone 246912 (TRBV27, TRBJ2-5)
CASSLSRTAGGETQYF

SEQ ID NO: 493825 - protein, 15 aa, Homo sapiens
  CDR3 for alpha chain variable domain of TCR clone 246913 (TRAV2, TRAJ22)
CAVPSRGGSARQLTF

SEQ ID NO: 493826 - protein, 14 aa, Homo sapiens
  CDR3 for beta chain variable domain of TCR clone 246913 (TRBV11-2, TRBJ2-3)
CASSLGGGANTQYF

SEQ ID NO: 493827 - protein, 20 aa, Homo sapiens
  CDR3 for alpha chain variable domain of TCR clone 246914 (TRAV8-3, TRAJ4)
CAVGARPDFKRSCGYNKLIF

SEQ ID NO: 493828 - protein, 13 aa, Homo sapiens
  CDR3 for beta chain variable domain of TCR clone 246914 (TRBV20-1, TRBJ1-2)
CSATGIQGSGYTF

SEQ ID NO: 493829 - protein, 15 aa, Homo sapiens
  CDR3 for alpha chain variable domain of TCR clone 246915 (TRAV13-1, TRAJ16)
CAARYQMARSCSLQG

SEQ ID NO: 493830 - protein, 13 aa, Homo sapiens
  CDR3 for beta chain variable domain of TCR clone 246915 (TRBV4-1, TRBJ2-1)
CASSQAGGAEQFF

SEQ ID NO: 493831 - protein, 13 aa, Homo sapiens
  CDR3 for alpha chain variable domain of TCR clone 246916 (TRAV8-1, TRAJ28)
CAVSGAGSYQLTF

SEQ ID NO: 493832 - protein, 13 aa, Homo sapiens
  CDR3 for beta chain variable domain of TCR clone 246916 (TRBV2, TRBJ1-6)
CADSGSYNSPLHF

SEQ ID NO: 493833 - protein, 14 aa, Homo sapiens
  CDR3 for alpha chain variable domain of TCR clone 246917 (TRAV1-1, TRAJ23)
CAVSIYNQGGKLIF

SEQ ID NO: 493834 - protein, 20 aa, Homo sapiens
  CDR3 for beta chain variable domain of TCR clone 246917 (TRBV28, TRBJ2-1)
CASTPIGRSPGLAGGNEQFF

SEQ ID NO: 493835 - protein, 12 aa, Homo sapiens
  CDR3 for alpha chain variable domain of TCR clone 246918 (TRAV36/DV7, TRAJ54)
CAVVRGAQKLVF

SEQ ID NO: 493836 - protein, 14 aa, Homo sapiens
  CDR3 for beta chain variable domain of TCR clone 246918 (TRBV7-3, TRBJ1-1)
CASSLKGGTTEAFF

SEQ ID NO: 493837 - protein, 14 aa, Homo sapiens
  CDR3 for alpha chain variable domain of TCR clone 246919 (TRAV26-2, TRAJ56)
CILRATGANSKLTF

SEQ ID NO: 493838 - protein, 13 aa, Homo sapiens
  CDR3 for beta chain variable domain of TCR clone 246919 (TRBV7-9, TRBJ1-2)
CASSLKQNYGYTF

SEQ ID NO: 493839 - protein, 14 aa, Homo sapiens
  CDR3 for alpha chain variable domain of TCR clone 246920 (TRAV4, TRAJ43)
CLVGPMYNNNDKRF

SEQ ID NO: 493840 - protein, 21 aa, Homo sapiens
  CDR3 for beta chain variable domain of TCR clone 246920 (TRBV11-1, TRBJ2-1)
CASSARERLRPEGPSYNEQFF

SEQ ID NO: 493841 - protein, 15 aa, Homo sapiens
  CDR3 for alpha chain variable domain of TCR clone 246921 (TRAV8-6, TRAJ6)
CAVSVTSGGSYIPTF

SEQ ID NO: 493842 - protein, 13 aa, Homo sapiens
  CDR3 for beta chain variable domain of TCR clone 246921 (TRBV29-1, TRBJ2-1)
CSVEGGRVNEQFF

SEQ ID NO: 493843 - protein, 16 aa, Homo sapiens
  CDR3 for alpha chain variable domain of TCR clone 246922 (TRAV30, TRAJ24)
CGTEIVDADSWGKFQF

SEQ ID NO: 493844 - protein, 15 aa, Homo sapiens
  CDR3 for beta chain variable domain of TCR clone 246922 (TRBV7-2, TRBJ2-2)
CASRRTGQNTGELFF

SEQ ID NO: 493845 - protein, 15 aa, Homo sapiens
  CDR3 for alpha chain variable domain of TCR clone 246923 (TRAV21, TRAJ24)
CAARSSTGSGGKLQF

SEQ ID NO: 493846 - protein, 13 aa, Homo sapiens
  CDR3 for beta chain variable domain of TCR clone 246923 (TRBV10-3, TRBJ2-7)
CASKLAVNYEQYF

SEQ ID NO: 493847 - protein, 10 aa, Homo sapiens
  CDR3 for alpha chain variable domain of TCR clone 246924 (TRAV27, TRAJ28)
SGAGSYQLTF

SEQ ID NO: 493848 - protein, 15 aa, Homo sapiens
  CDR3 for beta chain variable domain of TCR clone 246924 (TRBV2, TRBJ2-2)
CASSRETVGTGELFF

SEQ ID NO: 493849 - protein, 13 aa, Homo sapiens
  CDR3 for alpha chain variable domain of TCR clone 246925 (TRAV6, TRAJ20)
CAVAVSNDYKLSF

SEQ ID NO: 493850 - protein, 16 aa, Homo sapiens
  CDR3 for beta chain variable domain of TCR clone 246925 (TRBV7-9, TRBJ2-1)
CASSDVAGGSYNEQFF

SEQ ID NO: 493851 - protein, 10 aa, Homo sapiens
  CDR3 for alpha chain variable domain of TCR clone 246926 (TRAV23/DV6, TRAJ57)
CAASSTLSQG

SEQ ID NO: 493852 - protein, 12 aa, Homo sapiens
  CDR3 for beta chain variable domain of TCR clone 246926 (TRBV6-3, TRBJ2-1)
CASSGSYNEQFF

SEQ ID NO: 493853 - protein, 22 aa, Homo sapiens
  CDR3 for alpha chain variable domain of TCR clone 246927 (TRAV12-1, )
CVVNAPRRIPDIQNPDPAVYQL

SEQ ID NO: 493854 - protein, 13 aa, Homo sapiens
  CDR3 for beta chain variable domain of TCR clone 246927 (TRBV27, TRBJ1-4)
CASSLMGDEKLFF

SEQ ID NO: 493855 - protein, 10 aa, Homo sapiens
  CDR3 for alpha chain variable domain of TCR clone 246928 (TRAV12-3, TRAJ49)
CAMNVDQFYF

SEQ ID NO: 493856 - protein, 13 aa, Homo sapiens
  CDR3 for beta chain variable domain of TCR clone 246928 (TRBV12-4, TRBJ1-1)
CASSPGTGFEAFF

SEQ ID NO: 493857 - protein, 14 aa, Homo sapiens
  CDR3 for alpha chain variable domain of TCR clone 246929 (TRAV8-3, TRAJ28)
CAVVPGAGSYQLTF

SEQ ID NO: 493858 - protein, 16 aa, Homo sapiens
  CDR3 for beta chain variable domain of TCR clone 246929 (TRBV7-2, TRBJ2-5)
CASSSKWLSGQETQYF

SEQ ID NO: 493859 - protein, 12 aa, Homo sapiens
  CDR3 for alpha chain variable domain of TCR clone 246930 (TRAV3, TRAJ31)
CAVRDGNARLMF

SEQ ID NO: 493860 - protein, 13 aa, Homo sapiens
  CDR3 for beta chain variable domain of TCR clone 246930 (TRBV12-4, TRBJ1-5)
CASSPDRAQPQHF

SEQ ID NO: 493861 - protein, 15 aa, Homo sapiens
  CDR3 for alpha chain variable domain of TCR clone 246931 (TRAV4, TRAJ39)
CLVGPNNNAGNMLTF

SEQ ID NO: 493862 - protein, 16 aa, Homo sapiens
  CDR3 for beta chain variable domain of TCR clone 246931 (TRBV27, TRBJ2-2)
CASSSSGVSNTGELFF

SEQ ID NO: 493863 - protein, 14 aa, Homo sapiens
  CDR3 for alpha chain variable domain of TCR clone 246932 (TRAV12-1, TRAJ23)
CVVMIYNQGGKLIF

SEQ ID NO: 493864 - protein, 14 aa, Homo sapiens
  CDR3 for beta chain variable domain of TCR clone 246932 (TRBV28, TRBJ2-2)
CASSMQGYTGELFF

SEQ ID NO: 493865 - protein, 11 aa, Homo sapiens
  CDR3 for alpha chain variable domain of TCR clone 246933 (TRAV2, TRAJ13)
CASGGYQKVTF

SEQ ID NO: 493866 - protein, 14 aa, Homo sapiens
  CDR3 for beta chain variable domain of TCR clone 246933 (TRBV5-6, TRBJ1-2)
CASSLVRGDYGYTF

SEQ ID NO: 493867 - protein, 12 aa, Homo sapiens
  CDR3 for alpha chain variable domain of TCR clone 246934 (TRAV12-2, TRAJ31)
CAVNTPAARLMF

SEQ ID NO: 493868 - protein, 15 aa, Homo sapiens
  CDR3 for beta chain variable domain of TCR clone 246934 (TRBV20-1, TRBJ2-7)
CSAESGTSGAYEQYF

SEQ ID NO: 493869 - protein, 11 aa, Homo sapiens
  CDR3 for alpha chain variable domain of TCR clone 246935 (TRAV17, TRAJ49)
CATDAGNQFYF

SEQ ID NO: 493870 - protein, 16 aa, Homo sapiens
  CDR3 for beta chain variable domain of TCR clone 246935 (TRBV7-2, TRBJ2-5)
CASSSKWLSGQETQYF

SEQ ID NO: 493871 - protein, 11 aa, Homo sapiens
  CDR3 for alpha chain variable domain of TCR clone 246936 (TRAV12-1, TRAJ34)
CVVNKGRELIF

SEQ ID NO: 493872 - protein, 16 aa, Homo sapiens
  CDR3 for beta chain variable domain of TCR clone 246936 (TRBV5-4, TRBJ2-3)
CASQQPGAGGADTHYF

SEQ ID NO: 493873 - protein, 12 aa, Homo sapiens
  CDR3 for alpha chain variable domain of TCR clone 246937 (TRAV38-1, TRAJ47)
CAFETYGNKLVF

SEQ ID NO: 493874 - protein, 15 aa, Homo sapiens
  CDR3 for beta chain variable domain of TCR clone 246937 (TRBV5-7, TRBJ2-7)
CASSGVRPVPYEQYF

SEQ ID NO: 493875 - protein, 13 aa, Homo sapiens
  CDR3 for alpha chain variable domain of TCR clone 246938 (TRAV12-2, TRAJ48)
CAVRGFGNEKLTF

SEQ ID NO: 493876 - protein, 15 aa, Homo sapiens
  CDR3 for beta chain variable domain of TCR clone 246938 (TRBV29-1, TRBJ2-5)
CSVVGIEDFAETQYS

SEQ ID NO: 493877 - protein, 11 aa, Homo sapiens
  CDR3 for alpha chain variable domain of TCR clone 246939 (TRAV23/DV6, TRAJ48)
FAPRWGEKLTF

SEQ ID NO: 493878 - protein, 13 aa, Homo sapiens
  CDR3 for beta chain variable domain of TCR clone 246939 (TRBV12-4, TRBJ2-5)
CASSPGTEETQYL

SEQ ID NO: 493879 - protein, 16 aa, Homo sapiens
  CDR3 for alpha chain variable domain of TCR clone 246940 (TRAV30, TRAJ24)
CGTEIVDADGWGKFQF

SEQ ID NO: 493880 - protein, 14 aa, Homo sapiens
  CDR3 for beta chain variable domain of TCR clone 246940 (TRBV3-1, TRBJ2-3)
CASSQEVGADTQYF

SEQ ID NO: 493881 - protein, 17 aa, Homo sapiens
  CDR3 for alpha chain variable domain of TCR clone 246941 (TRAV13-1, TRAJ52)
CAASSGAGGTSYGKLTF

SEQ ID NO: 493882 - protein, 15 aa, Homo sapiens
  CDR3 for beta chain variable domain of TCR clone 246941 (TRBV11-3, TRBJ2-7)
CASSPGPASSYEQYF

SEQ ID NO: 493883 - protein, 13 aa, Homo sapiens
  CDR3 for alpha chain variable domain of TCR clone 246942 (TRAV3, TRAJ27)
FAVRPLGAGKSTL

SEQ ID NO: 493884 - protein, 13 aa, Homo sapiens
  CDR3 for beta chain variable domain of TCR clone 246942 (TRBV7-9, TRBJ2-3)
CASSPGSTDTQYF

SEQ ID NO: 493885 - protein, 13 aa, Homo sapiens
  CDR3 for alpha chain variable domain of TCR clone 246943 (TRAV16, TRAJ58)
CALSIPSGPRLTF

SEQ ID NO: 493886 - protein, 14 aa, Homo sapiens
  CDR3 for beta chain variable domain of TCR clone 246943 (TRBV6-5, TRBJ2-7)
CASSPHRGLREQYF

SEQ ID NO: 493887 - protein, 14 aa, Homo sapiens
  CDR3 for alpha chain variable domain of TCR clone 246944 (TRAV30, TRAJ26)
CGTEIVSYGQNFVF

SEQ ID NO: 493888 - protein, 19 aa, Homo sapiens
  CDR3 for beta chain variable domain of TCR clone 246944 (TRBV3-1, TRBJ2-5)
CASSQDSPINRGRRETQYF

SEQ ID NO: 493889 - protein, 15 aa, Homo sapiens
  CDR3 for alpha chain variable domain of TCR clone 246945 (TRAV1-2, TRAJ24)
CAVRGSTDSWGKFQF

SEQ ID NO: 493890 - protein, 14 aa, Homo sapiens
  CDR3 for beta chain variable domain of TCR clone 246945 (TRBV7-3, TRBJ1-1)
CASSLKGGNTEAFF

SEQ ID NO: 493891 - protein, 15 aa, Homo sapiens
  CDR3 for alpha chain variable domain of TCR clone 246946 (TRAV4, TRAJ36)
CLVGERQTGANNLFF

SEQ ID NO: 493892 - protein, 15 aa, Homo sapiens
  CDR3 for beta chain variable domain of TCR clone 246946 (TRBV7-6, TRBJ2-1)
CASSSLAGEGNEQFF

SEQ ID NO: 493893 - protein, 15 aa, Homo sapiens
  CDR3 for alpha chain variable domain of TCR clone 246947 (TRAV21, TRAJ53)
CATLNSGGSNYKLTF

SEQ ID NO: 493894 - protein, 16 aa, Homo sapiens
  CDR3 for beta chain variable domain of TCR clone 246947 (TRBV6-1, TRBJ2-1)
CASILRQGSSYNEQFF

SEQ ID NO: 493895 - protein, 14 aa, Homo sapiens
  CDR3 for alpha chain variable domain of TCR clone 246948 (TRAV12-2, TRAJ45)
CAVNIQGKADGLTF

SEQ ID NO: 493896 - protein, 17 aa, Homo sapiens
  CDR3 for beta chain variable domain of TCR clone 246948 (TRBV11-2, TRBJ2-1)
CASSLYPPGVEYNEQFF

SEQ ID NO: 493897 - protein, 12 aa, Homo sapiens
  CDR3 for alpha chain variable domain of TCR clone 246949 (TRAV17, TRAJ28)
WDSGAGSYQLTS

SEQ ID NO: 493898 - protein, 13 aa, Homo sapiens
  CDR3 for beta chain variable domain of TCR clone 246949 (TRBV11-3, TRBJ1-1)
CASSRQPNTEAFF

SEQ ID NO: 493899 - protein, 14 aa, Homo sapiens
  CDR3 for alpha chain variable domain of TCR clone 246950 (TRAV16, TRAJ4)
TVLPFSGGYNKLIF

SEQ ID NO: 493900 - protein, 12 aa, Homo sapiens
  CDR3 for beta chain variable domain of TCR clone 246950 (TRBV7-8, TRBJ2-7)
CASSLGDREQYF

SEQ ID NO: 493901 - protein, 17 aa, Homo sapiens
  CDR3 for alpha chain variable domain of TCR clone 246951 (TRAV3, TRAJ6)
CAVRDGPRAGGSYIPTF

SEQ ID NO: 493902 - protein, 13 aa, Homo sapiens
  CDR3 for beta chain variable domain of TCR clone 246951 (TRBV20-1, TRBJ2-1)
CSAHGSSYNEQFF

SEQ ID NO: 493903 - protein, 14 aa, Homo sapiens
  CDR3 for alpha chain variable domain of TCR clone 246952 (TRAV3, TRAJ40)
CAVRDMTGTYKYIF

SEQ ID NO: 493904 - protein, 16 aa, Homo sapiens
  CDR3 for beta chain variable domain of TCR clone 246952 (TRBV4-1, TRBJ2-7)
CASSQEWTSGPLEQYF

SEQ ID NO: 493905 - protein, 10 aa, Homo sapiens
  CDR3 for alpha chain variable domain of TCR clone 246953 (TRAV5, TRAJ34)
CAEDTDKLIF

SEQ ID NO: 493906 - protein, 15 aa, Homo sapiens
  CDR3 for beta chain variable domain of TCR clone 246953 (TRBV12-4, TRBJ1-1)
CASSLAVSRGAEAFF

SEQ ID NO: 493907 - protein, 16 aa, Homo sapiens
  CDR3 for alpha chain variable domain of TCR clone 246954 (TRAV26-1, TRAJ36)
CIVRVSYQTGANNLFF

SEQ ID NO: 493908 - protein, 13 aa, Homo sapiens
  CDR3 for beta chain variable domain of TCR clone 246954 (TRBV10-3, TRBJ2-7)
CASKLAVNYEQYF

SEQ ID NO: 493909 - protein, 13 aa, Homo sapiens
  CDR3 for alpha chain variable domain of TCR clone 246955 (TRAV12-2, TRAJ10)
CAVPTGGGNKLTF

SEQ ID NO: 493910 - protein, 14 aa, Homo sapiens
  CDR3 for beta chain variable domain of TCR clone 246955 (TRBV18, TRBJ2-5)
CASSPPGHQETQYF

SEQ ID NO: 493911 - protein, 14 aa, Homo sapiens
  CDR3 for alpha chain variable domain of TCR clone 246956 (TRAV13-1, TRAJ44)
CAAKATGTASKLTF

SEQ ID NO: 493912 - protein, 16 aa, Homo sapiens
  CDR3 for beta chain variable domain of TCR clone 246956 (TRBV7-3, TRBJ2-3)
CSSLMKRMRGADTQYF

SEQ ID NO: 493913 - protein, 16 aa, Homo sapiens
  CDR3 for alpha chain variable domain of TCR clone 246957 (TRAV3, TRAJ37)
CSVRGKGSGNTGKLIF

SEQ ID NO: 493914 - protein, 13 aa, Homo sapiens
  CDR3 for beta chain variable domain of TCR clone 246957 (TRBV19, TRBJ1-2)
CASSVPGQDGYTF

SEQ ID NO: 493915 - protein, 12 aa, Homo sapiens
  CDR3 for alpha chain variable domain of TCR clone 246958 (TRAV13-1, TRAJ11)
CAGPSGYSTLTF

SEQ ID NO: 493916 - protein, 13 aa, Homo sapiens
  CDR3 for beta chain variable domain of TCR clone 246958 (TRBV12-4, TRBJ1-5)
CASSPDRAQPQHL

SEQ ID NO: 493917 - protein, 15 aa, Homo sapiens
  CDR3 for alpha chain variable domain of TCR clone 246959 (TRAV3, TRAJ5)
CAVRDLDTGRRALTF

SEQ ID NO: 493918 - protein, 14 aa, Homo sapiens
  CDR3 for beta chain variable domain of TCR clone 246959 (TRBV7-2, TRBJ2-5)
CASSFGGAQETQYF

SEQ ID NO: 493919 - protein, 16 aa, Homo sapiens
  CDR3 for alpha chain variable domain of TCR clone 246960 (TRAV13-1, TRAJ18)
CSASRMRGSTLGRLYF

SEQ ID NO: 493920 - protein, 16 aa, Homo sapiens
  CDR3 for beta chain variable domain of TCR clone 246960 (TRBV27, TRBJ1-1)
CASSSRGRTGYTEAFF

SEQ ID NO: 493921 - protein, 13 aa, Homo sapiens
  CDR3 for alpha chain variable domain of TCR clone 246961 (TRAV8-3, TRAJ43)
CAVGPDNNNDMRF

SEQ ID NO: 493922 - protein, 19 aa, Homo sapiens
  CDR3 for beta chain variable domain of TCR clone 246961 (TRBV7-2, TRBJ2-3)
CASSFLSRNWGVGTDTQYF

SEQ ID NO: 493923 - protein, 13 aa, Homo sapiens
  CDR3 for alpha chain variable domain of TCR clone 246962 (TRAV1-2, TRAJ9)
CAVLNTGGFKTIF

SEQ ID NO: 493924 - protein, 14 aa, Homo sapiens
  CDR3 for beta chain variable domain of TCR clone 246962 (TRBV20-1, TRBJ1-1)
SAVLHLGGGTEAFF

SEQ ID NO: 493925 - protein, 12 aa, Homo sapiens
  CDR3 for alpha chain variable domain of TCR clone 246963 (TRAV41, TRAJ58)
CAVETSGSRLPF

SEQ ID NO: 493926 - protein, 15 aa, Homo sapiens
  CDR3 for beta chain variable domain of TCR clone 246963 (TRBV29-1, TRBJ2-6)
CSVGDRGSGANVLTF

SEQ ID NO: 493927 - protein, 14 aa, Homo sapiens
  CDR3 for alpha chain variable domain of TCR clone 246964 (TRAV1-2, TRAJ16)
CAVNRFSDGQKLLF

SEQ ID NO: 493928 - protein, 15 aa, Homo sapiens
  CDR3 for beta chain variable domain of TCR clone 246964 (TRBV7-9, TRBJ1-6)
CASSTPGRGNSPLHF

SEQ ID NO: 493929 - protein, 12 aa, Homo sapiens
  CDR3 for alpha chain variable domain of TCR clone 246965 (TRAV12-2, TRAJ8)
CAVNPGFQKLVF

SEQ ID NO: 493930 - protein, 15 aa, Homo sapiens
  CDR3 for beta chain variable domain of TCR clone 246965 (TRBV7-8, TRBJ1-5)
CASSLERRGLEPQHF

SEQ ID NO: 493931 - protein, 16 aa, Homo sapiens
  CDR3 for alpha chain variable domain of TCR clone 246966 (TRAV13-1, TRAJ45)
CAASWESGGGADGLTF

SEQ ID NO: 493932 - protein, 14 aa, Homo sapiens
  CDR3 for beta chain variable domain of TCR clone 246966 (TRBV11-2, TRBJ2-1)
CASSPSRQGGGQFF

SEQ ID NO: 493933 - protein, 15 aa, Homo sapiens
  CDR3 for alpha chain variable domain of TCR clone 246967 (TRAV3, TRAJ22)
CAVRDRGGSARQLTF

SEQ ID NO: 493934 - protein, 14 aa, Homo sapiens
  CDR3 for beta chain variable domain of TCR clone 246967 (TRBV19, TRBJ2-1)
CASSRLASINEQFY

SEQ ID NO: 493935 - protein, 12 aa, Homo sapiens
  CDR3 for alpha chain variable domain of TCR clone 246968 (TRAV29/DV5, TRAJ49)
CAATDTGNQFYF

SEQ ID NO: 493936 - protein, 15 aa, Homo sapiens
  CDR3 for beta chain variable domain of TCR clone 246968 (TRBV6-3, TRBJ2-7)
CASSSPGTVFYEQYL

SEQ ID NO: 493937 - protein, 16 aa, Homo sapiens
  CDR3 for alpha chain variable domain of TCR clone 246969 (TRAV12-2, TRAJ18)
CAVTTDRGSTLGRLYF

SEQ ID NO: 493938 - protein, 13 aa, Homo sapiens
  CDR3 for beta chain variable domain of TCR clone 246969 (TRBV19, TRBJ1-5)
CASSIGGNQPQHF

SEQ ID NO: 493939 - protein, 11 aa, Homo sapiens
  CDR3 for alpha chain variable domain of TCR clone 246970 (TRAV1-2, TRAJ20)
CAVSNDYKLSF

SEQ ID NO: 493940 - protein, 17 aa, Homo sapiens
  CDR3 for beta chain variable domain of TCR clone 246970 (TRBV4-1, TRBJ2-7)
CASSRDPLGVRGGEQYF

SEQ ID NO: 493941 - protein, 13 aa, Homo sapiens
  CDR3 for alpha chain variable domain of TCR clone 246971 (TRAV12-3, TRAJ40)
CAMIDSGTYKYIF

SEQ ID NO: 493942 - protein, 22 aa, Homo sapiens
  CDR3 for beta chain variable domain of TCR clone 246971 (TRBV14, TRBJ1-5)
CASSQDGVTPYLPPIGNQPQHF

SEQ ID NO: 493943 - protein, 14 aa, Homo sapiens
  CDR3 for alpha chain variable domain of TCR clone 246972 (TRAV1-2, TRAJ16)
CAVNRFSDGQKLLF

SEQ ID NO: 493944 - protein, 18 aa, Homo sapiens
  CDR3 for beta chain variable domain of TCR clone 246972 (TRBV4-1, TRBJ1-4)
CASSPRTGGAWTNEKLFF

SEQ ID NO: 493945 - protein, 16 aa, Homo sapiens
  CDR3 for alpha chain variable domain of TCR clone 246973 (TRAV12-3, TRAJ45)
CAMGWGSGGGADGLTF

SEQ ID NO: 493946 - protein, 14 aa, Homo sapiens
  CDR3 for beta chain variable domain of TCR clone 246973 (TRBV7-2, TRBJ2-7)
CASSPKTSFYEQYF

SEQ ID NO: 493947 - protein, 11 aa, Homo sapiens
  CDR3 for alpha chain variable domain of TCR clone 246974 (TRAV12-2, TRAJ49)
CTVHTGNQFYF

SEQ ID NO: 493948 - protein, 15 aa, Homo sapiens
  CDR3 for beta chain variable domain of TCR clone 246974 (TRBV4-2, TRBJ1-1)
CASSQQGAGDTEAFF

SEQ ID NO: 493949 - protein, 13 aa, Homo sapiens
  CDR3 for alpha chain variable domain of TCR clone 246975 (TRAV12-2, TRAJ24)
CAVSTDSWGKFSL

SEQ ID NO: 493950 - protein, 12 aa, Homo sapiens
  CDR3 for beta chain variable domain of TCR clone 246975 (TRBV7-6, TRBJ2-7)
CASSLADSEQYF

SEQ ID NO: 493951 - protein, 14 aa, Homo sapiens
  CDR3 for alpha chain variable domain of TCR clone 246976 (TRAV3, TRAJ7)
CAVREEEREQQTRF

SEQ ID NO: 493952 - protein, 18 aa, Homo sapiens
  CDR3 for beta chain variable domain of TCR clone 246976 (TRBV12-4, TRBJ2-2)
CASSLVAGTRGRTGELFF

SEQ ID NO: 493953 - protein, 15 aa, Homo sapiens
  CDR3 for alpha chain variable domain of TCR clone 246977 (TRAV21, TRAJ53)
CATLNSGGSNYKLTF

SEQ ID NO: 493954 - protein, 13 aa, Homo sapiens
  CDR3 for beta chain variable domain of TCR clone 246977 (TRBV24-1, TRBJ1-2)
CATSGTALDGYTF

SEQ ID NO: 493955 - protein, 15 aa, Homo sapiens
  CDR3 for alpha chain variable domain of TCR clone 246978 (TRAV26-1, TRAJ29)
CIVRVEGSGNTPLVF

SEQ ID NO: 493956 - protein, 16 aa, Homo sapiens
  CDR3 for beta chain variable domain of TCR clone 246978 (TRBV3-1, TRBJ2-7)
CASSQGATGVAYEQYF

SEQ ID NO: 493957 - protein, 14 aa, Homo sapiens
  CDR3 for alpha chain variable domain of TCR clone 246979 (TRAV26-1, TRAJ34)
CIVRVAYNTDKLIF

SEQ ID NO: 493958 - protein, 16 aa, Homo sapiens
  CDR3 for beta chain variable domain of TCR clone 246979 (TRBV7-3, TRBJ2-1)
CASSLSSGGGAKEQFF

SEQ ID NO: 493959 - protein, 14 aa, Homo sapiens
  CDR3 for alpha chain variable domain of TCR clone 246980 (TRAV23/DV6, TRAJ11)
CAASLESGYSTLTF

SEQ ID NO: 493960 - protein, 13 aa, Homo sapiens
  CDR3 for beta chain variable domain of TCR clone 246980 (TRBV4-1, TRBJ2-5)
CVSSLTRGETQYF

SEQ ID NO: 493961 - protein, 16 aa, Homo sapiens
  CDR3 for alpha chain variable domain of TCR clone 246981 (TRAV12-3, TRAJ53)
CAMSPGSGGSNYKLTF

SEQ ID NO: 493962 - protein, 11 aa, Homo sapiens
  CDR3 for beta chain variable domain of TCR clone 246981 (TRBV10-1, TRBJ2-3)
CASSDSDTQYF

SEQ ID NO: 493963 - protein, 13 aa, Homo sapiens
  CDR3 for alpha chain variable domain of TCR clone 246982 (TRAV13-1, TRAJ12)
CAASPDSRYKLIF

SEQ ID NO: 493964 - protein, 16 aa, Homo sapiens
  CDR3 for beta chain variable domain of TCR clone 246982 (TRBV15, TRBJ2-1)
CATSRERLAVAYEQFF

SEQ ID NO: 493965 - protein, 13 aa, Homo sapiens
  CDR3 for alpha chain variable domain of TCR clone 246983 (TRAV26-1, TRAJ33)
CIVRVEGNYQLIW

SEQ ID NO: 493966 - protein, 16 aa, Homo sapiens
  CDR3 for beta chain variable domain of TCR clone 246983 (TRBV15, TRBJ2-7)
SATSRDRGRRRGEQYF

SEQ ID NO: 493967 - protein, 14 aa, Homo sapiens
  CDR3 for alpha chain variable domain of TCR clone 246984 (TRAV2, TRAJ9)
CAVEDRSGGFKTIF

SEQ ID NO: 493968 - protein, 19 aa, Homo sapiens
  CDR3 for beta chain variable domain of TCR clone 246984 (TRBV25-1, TRBJ2-2)
CAILVYLVDRGRKTGELFF

SEQ ID NO: 493969 - protein, 16 aa, Homo sapiens
  CDR3 for alpha chain variable domain of TCR clone 246985 (TRAV13-1, TRAJ18)
CAASRMRGSTLGRRCF

SEQ ID NO: 493970 - protein, 16 aa, Homo sapiens
  CDR3 for beta chain variable domain of TCR clone 246985 (TRBV27, TRBJ1-1)
CASSSRGRTGYTEAFF

SEQ ID NO: 493971 - protein, 15 aa, Homo sapiens
  CDR3 for alpha chain variable domain of TCR clone 246986 (TRAV8-3, TRAJ45)
CASSYSGGGADGLTF

SEQ ID NO: 493972 - protein, 17 aa, Homo sapiens
  CDR3 for beta chain variable domain of TCR clone 246986 (TRBV7-8, TRBJ1-2)
CTSSLRPLQGHLYGYTF

SEQ ID NO: 493973 - protein, 15 aa, Homo sapiens
  CDR3 for alpha chain variable domain of TCR clone 246987 (TRAV21, TRAJ53)
CATLNSGGSNYKLTF

SEQ ID NO: 493974 - protein, 13 aa, Homo sapiens
  CDR3 for beta chain variable domain of TCR clone 246987 (TRBV7-7, TRBJ2-3)
CASSLSRADTQYF

SEQ ID NO: 493975 - protein, 12 aa, Homo sapiens
  CDR3 for alpha chain variable domain of TCR clone 246988 (TRAV12-2, TRAJ31)
CAVNTPDARLMF

SEQ ID NO: 493976 - protein, 13 aa, Homo sapiens
  CDR3 for beta chain variable domain of TCR clone 246988 (TRBV7-9, TRBJ2-5)
CASLPSGRETQYF

SEQ ID NO: 493977 - protein, 15 aa, Homo sapiens
  CDR3 for alpha chain variable domain of TCR clone 246989 (TRAV12-3, TRAJ5)
CAMSSLGTGRRALTF

SEQ ID NO: 493978 - protein, 15 aa, Homo sapiens
  CDR3 for beta chain variable domain of TCR clone 246989 (TRBV19, TRBJ1-1)
CASTSGQIQNTEAFF

SEQ ID NO: 493979 - protein, 11 aa, Homo sapiens
  CDR3 for alpha chain variable domain of TCR clone 246990 (TRAV17, TRAJ39)
CATNPYNMFTF

SEQ ID NO: 493980 - protein, 13 aa, Homo sapiens
  CDR3 for beta chain variable domain of TCR clone 246990 (TRBV7-8, TRBJ2-1)
CASTRDAVDEQFF

SEQ ID NO: 493981 - protein, 15 aa, Homo sapiens
  CDR3 for alpha chain variable domain of TCR clone 246991 (TRAV20, TRAJ52)
CAVQAGGTSYGKLTF

SEQ ID NO: 493982 - protein, 16 aa, Homo sapiens
  CDR3 for beta chain variable domain of TCR clone 246991 (TRBV12-5, TRBJ2-5)
CASGPRTSGNQETQYF

SEQ ID NO: 493983 - protein, 16 aa, Homo sapiens
  CDR3 for alpha chain variable domain of TCR clone 246992 (TRAV20, TRAJ10)
CAVLRGLTGGGNKLTF

SEQ ID NO: 493984 - protein, 14 aa, Homo sapiens
  CDR3 for beta chain variable domain of TCR clone 246992 (TRBV7-2, TRBJ1-3)
CASSRLRSGNTIYF

SEQ ID NO: 493985 - protein, 14 aa, Homo sapiens
  CDR3 for alpha chain variable domain of TCR clone 246993 (TRAV1-2, TRAJ16)
CAVNRFSDGQKLLL

SEQ ID NO: 493986 - protein, 13 aa, Homo sapiens
  CDR3 for beta chain variable domain of TCR clone 246993 (TRBV4-1, TRBJ2-1)
CASSQEGGDEQFF

SEQ ID NO: 493987 - protein, 17 aa, Homo sapiens
  CDR3 for alpha chain variable domain of TCR clone 246994 (TRAV3, TRAJ6)
CAVGDGPRAGGSYIPTF

SEQ ID NO: 493988 - protein, 14 aa, Homo sapiens
  CDR3 for beta chain variable domain of TCR clone 246994 (TRBV7-2, TRBJ2-7)
CASSTKTSFYEQYF

SEQ ID NO: 493989 - protein, 15 aa, Homo sapiens
  CDR3 for alpha chain variable domain of TCR clone 246995 (TRAV21, TRAJ37)
CAVRPTLCSTGKLIF

SEQ ID NO: 493990 - protein, 16 aa, Homo sapiens
  CDR3 for beta chain variable domain of TCR clone 246995 (TRBV24-1, TRBJ2-3)
CATSDRRQDLTDTQYF

SEQ ID NO: 493991 - protein, 12 aa, Homo sapiens
  CDR3 for alpha chain variable domain of TCR clone 246996 (TRAV4, TRAJ26)
CLVGDYGQNFVF

SEQ ID NO: 493992 - protein, 14 aa, Homo sapiens
  CDR3 for beta chain variable domain of TCR clone 246996 (TRBV19, TRBJ2-1)
CASSKDRGQDEQFF

SEQ ID NO: 493993 - protein, 17 aa, Homo sapiens
  CDR3 for alpha chain variable domain of TCR clone 246997 (TRAV3, TRAJ12)
CAVRDGGRMDRSYKWIF

SEQ ID NO: 493994 - protein, 13 aa, Homo sapiens
  CDR3 for beta chain variable domain of TCR clone 246997 (TRBV20-1, TRBJ1-1)
CSAPLGGGTEAFF

SEQ ID NO: 493995 - protein, 17 aa, Homo sapiens
  CDR3 for alpha chain variable domain of TCR clone 246998 (TRAV16, TRAJ28)
FALSKRNSGAGSYQLNF

SEQ ID NO: 493996 - protein, 14 aa, Homo sapiens
  CDR3 for beta chain variable domain of TCR clone 246998 (TRBV7-3, TRBJ1-1)
CASSLGTGYAEAFF

SEQ ID NO: 493997 - protein, 13 aa, Homo sapiens
  CDR3 for alpha chain variable domain of TCR clone 246999 (TRAV8-1, TRAJ34)
CAVRPDNTDKLIF

SEQ ID NO: 493998 - protein, 15 aa, Homo sapiens
  CDR3 for beta chain variable domain of TCR clone 246999 (TRBV7-9, TRBJ1-3)
CASSLRSGSGNTIYF

SEQ ID NO: 493999 - protein, 14 aa, Homo sapiens
  CDR3 for alpha chain variable domain of TCR clone 247000 (TRAV8-6, TRAJ13)
CAVRYSGGYQKVTF

SEQ ID NO: 494000 - protein, 14 aa, Homo sapiens
  CDR3 for beta chain variable domain of TCR clone 247000 (TRBV5-1, TRBJ2-7)
CSSRWDWQFHEQYF

SEQ ID NO: 494001 - protein, 13 aa, Homo sapiens
  CDR3 for alpha chain variable domain of TCR clone 247001 (TRAV8-6, TRAJ21)
CAVSPYSLNNFYF

SEQ ID NO: 494002 - protein, 13 aa, Homo sapiens
  CDR3 for beta chain variable domain of TCR clone 247001 (TRBV29-1, TRBJ2-1)
CSVEGGRVNEQFF

SEQ ID NO: 494003 - protein, 13 aa, Homo sapiens
  CDR3 for alpha chain variable domain of TCR clone 247002 (TRAV12-1, TRAJ40)
CVVPTSGTYKYIL

SEQ ID NO: 494004 - protein, 16 aa, Homo sapiens
  CDR3 for beta chain variable domain of TCR clone 247002 (TRBV7-9, TRBJ1-2)
CASSLGFSSGEDGYTF

SEQ ID NO: 494005 - protein, 16 aa, Homo sapiens
  CDR3 for alpha chain variable domain of TCR clone 247003 (TRAV12-3, TRAJ53)
CAMSPGSGSSNYKLTF

SEQ ID NO: 494006 - protein, 11 aa, Homo sapiens
  CDR3 for beta chain variable domain of TCR clone 247003 (TRBV29-1, TRBJ2-5)
FSEDRTGTQYF

SEQ ID NO: 494007 - protein, 14 aa, Homo sapiens
  CDR3 for alpha chain variable domain of TCR clone 247004 (TRAV13-1, TRAJ44)
CAAKATGTASKLTF

SEQ ID NO: 494008 - protein, 13 aa, Homo sapiens
  CDR3 for beta chain variable domain of TCR clone 247004 (TRBV7-2, TRBJ2-2)
CASSSVRAGELFF

SEQ ID NO: 494009 - protein, 13 aa, Homo sapiens
  CDR3 for alpha chain variable domain of TCR clone 247005 (TRAV2, TRAJ40)
CAVVTSGTYKYIF

SEQ ID NO: 494010 - protein, 16 aa, Homo sapiens
  CDR3 for beta chain variable domain of TCR clone 247005 (TRBV18, TRBJ1-5)
CASSPSTGNSNQPQHF

SEQ ID NO: 494011 - protein, 14 aa, Homo sapiens
  CDR3 for alpha chain variable domain of TCR clone 247006 (TRAV12-3, TRAJ10)
SHLPLTGGGNNITF

SEQ ID NO: 494012 - protein, 14 aa, Homo sapiens
  CDR3 for beta chain variable domain of TCR clone 247006 (TRBV6-1, TRBJ1-3)
CASVQGGGGNTIYF

SEQ ID NO: 494013 - protein, 17 aa, Homo sapiens
  CDR3 for alpha chain variable domain of TCR clone 247007 (TRAV26-2, TRAJ42)
CILRDVGYGGSQGNLIF

SEQ ID NO: 494014 - protein, 16 aa, Homo sapiens
  CDR3 for beta chain variable domain of TCR clone 247007 (TRBV20-1, TRBJ2-1)
QCSPRLAGTRYNEQFF

SEQ ID NO: 494015 - protein, 13 aa, Homo sapiens
  CDR3 for alpha chain variable domain of TCR clone 247008 (TRAV30, TRAJ6)
CGFIEGGSYITTF

SEQ ID NO: 494016 - protein, 13 aa, Homo sapiens
  CDR3 for beta chain variable domain of TCR clone 247008 (TRBV5-4, TRBJ2-5)
CASSPVSQETQYF

SEQ ID NO: 494017 - protein, 15 aa, Homo sapiens
  CDR3 for alpha chain variable domain of TCR clone 247009 (TRAV12-3, TRAJ6)
CAMSATTGGSYITTF

SEQ ID NO: 494018 - protein, 15 aa, Homo sapiens
  CDR3 for beta chain variable domain of TCR clone 247009 (TRBV7-6, TRBJ1-5)
CASSQSSGINQPQHF

SEQ ID NO: 494019 - protein, 11 aa, Homo sapiens
  CDR3 for alpha chain variable domain of TCR clone 247010 (TRAV2, TRAJ13)
CASGGYQKVTF

SEQ ID NO: 494020 - protein, 15 aa, Homo sapiens
  CDR3 for beta chain variable domain of TCR clone 247010 (TRBV5-1, TRBJ2-7)
CASSLDLTSSYEQYV

SEQ ID NO: 494021 - protein, 12 aa, Homo sapiens
  CDR3 for alpha chain variable domain of TCR clone 247011 (TRAV22, TRAJ29)
CAPPSGNTPLIF

SEQ ID NO: 494022 - protein, 14 aa, Homo sapiens
  CDR3 for beta chain variable domain of TCR clone 247011 (TRBV11-2, TRBJ2-7)
CASSLGAGAYEQYF

SEQ ID NO: 494023 - protein, 14 aa, Homo sapiens
  CDR3 for alpha chain variable domain of TCR clone 247012 (TRAV3, TRAJ30)
CAVRALTRDDKIIF

SEQ ID NO: 494024 - protein, 15 aa, Homo sapiens
  CDR3 for beta chain variable domain of TCR clone 247012 (TRBV6-5, TRBJ1-2)
CASSYSQAFNYGYTF

SEQ ID NO: 494025 - protein, 14 aa, Homo sapiens
  CDR3 for alpha chain variable domain of TCR clone 247013 (TRAV12-2, TRAJ17)
CAVLFKAAGNKLTF

SEQ ID NO: 494026 - protein, 13 aa, Homo sapiens
  CDR3 for beta chain variable domain of TCR clone 247013 (TRBV20-1, TRBJ1-6)
CSAPLGVGSPLHF

SEQ ID NO: 494027 - protein, 13 aa, Homo sapiens
  CDR3 for alpha chain variable domain of TCR clone 247014 (TRAV17, TRAJ9)
CATDYTGGFKTIF

SEQ ID NO: 494028 - protein, 17 aa, Homo sapiens
  CDR3 for beta chain variable domain of TCR clone 247014 (TRBV20-1, TRBJ2-2)
CSASGSGQGGLTGELFF

SEQ ID NO: 494029 - protein, 14 aa, Homo sapiens
  CDR3 for alpha chain variable domain of TCR clone 247015 (TRAV1-2, TRAJ16)
CAVNRFSDGQKLLF

SEQ ID NO: 494030 - protein, 16 aa, Homo sapiens
  CDR3 for beta chain variable domain of TCR clone 247015 (TRBV7-8, TRBJ2-1)
CASSVGTSGAYNEQFF

SEQ ID NO: 494031 - protein, 16 aa, Homo sapiens
  CDR3 for alpha chain variable domain of TCR clone 247016 (TRAV8-3, TRAJ10)
CAVGPGVTGGGNKLTF

SEQ ID NO: 494032 - protein, 13 aa, Homo sapiens
  CDR3 for beta chain variable domain of TCR clone 247016 (TRBV18, TRBJ1-1)
CASAPGPSGEAFF

SEQ ID NO: 494033 - protein, 13 aa, Homo sapiens
  CDR3 for alpha chain variable domain of TCR clone 247017 (TRAV13-2, TRAJ48)
FAEMDFGNEKLTF

SEQ ID NO: 494034 - protein, 15 aa, Homo sapiens
  CDR3 for beta chain variable domain of TCR clone 247017 (TRBV7-3, TRBJ2-1)
CASSQRGGALIEQFF

SEQ ID NO: 494035 - protein, 15 aa, Homo sapiens
  CDR3 for alpha chain variable domain of TCR clone 247018 (TRAV27, TRAJ38)
CAARRNAGNNRKLIW

SEQ ID NO: 494036 - protein, 15 aa, Homo sapiens
  CDR3 for beta chain variable domain of TCR clone 247018 (TRBV5-7, TRBJ2-7)
CASSLGPGRGHEQYF

SEQ ID NO: 494037 - protein, 14 aa, Homo sapiens
  CDR3 for alpha chain variable domain of TCR clone 247019 (TRAV1-2, TRAJ16)
CAVNRFSDGQKLLF

SEQ ID NO: 494038 - protein, 13 aa, Homo sapiens
  CDR3 for beta chain variable domain of TCR clone 247019 (TRBV10-3, TRBJ2-7)
CASKLAVNYEQYL

SEQ ID NO: 494039 - protein, 14 aa, Homo sapiens
  CDR3 for alpha chain variable domain of TCR clone 247020 (TRAV2, TRAJ37)
CAVDFTSDTVKLIF

SEQ ID NO: 494040 - protein, 15 aa, Homo sapiens
  CDR3 for beta chain variable domain of TCR clone 247020 (TRBV20-1, TRBJ1-1)
CSASRGVTGNTEAFF

SEQ ID NO: 494041 - protein, 11 aa, Homo sapiens
  CDR3 for alpha chain variable domain of TCR clone 247021 (TRAV2, TRAJ13)
CASGGYQKVTF

SEQ ID NO: 494042 - protein, 16 aa, Homo sapiens
  CDR3 for beta chain variable domain of TCR clone 247021 (TRBV2, TRBJ2-1)
CASSVGGALSYNEQFF

SEQ ID NO: 494043 - protein, 11 aa, Homo sapiens
  CDR3 for alpha chain variable domain of TCR clone 247022 (TRAV17, TRAJ43)
CATPRSNDMRF

SEQ ID NO: 494044 - protein, 15 aa, Homo sapiens
  CDR3 for beta chain variable domain of TCR clone 247022 (TRBV11-2, TRBJ2-1)
CASSFGTSGLNEQFF

SEQ ID NO: 494045 - protein, 16 aa, Homo sapiens
  CDR3 for alpha chain variable domain of TCR clone 247023 (TRAV16, TRAJ4)
CALSRMFSGGYNKLIF

SEQ ID NO: 494046 - protein, 13 aa, Homo sapiens
  CDR3 for beta chain variable domain of TCR clone 247023 (TRBV11-2, TRBJ1-1)
CASSLGNGAEAFF

SEQ ID NO: 494047 - protein, 11 aa, Homo sapiens
  CDR3 for alpha chain variable domain of TCR clone 247024 (TRAV2, TRAJ33)
CAVESNYQLIW

SEQ ID NO: 494048 - protein, 15 aa, Homo sapiens
  CDR3 for beta chain variable domain of TCR clone 247024 (TRBV19, TRBJ1-1)
CASTSGQTQNTESFF

SEQ ID NO: 494049 - protein, 14 aa, Homo sapiens
  CDR3 for alpha chain variable domain of TCR clone 247025 (TRAV1-2, TRAJ8)
CAVREDTGFQNLVS

SEQ ID NO: 494050 - protein, 15 aa, Homo sapiens
  CDR3 for beta chain variable domain of TCR clone 247025 (TRBV6-3, TRBJ2-7)
CASSSPGTVFYEQYF

SEQ ID NO: 494051 - protein, 13 aa, Homo sapiens
  CDR3 for alpha chain variable domain of TCR clone 247026 (TRAV14/DV4, TRAJ43)
CAMREAVNNDMRF

SEQ ID NO: 494052 - protein, 16 aa, Homo sapiens
  CDR3 for beta chain variable domain of TCR clone 247026 (TRBV7-3, TRBJ2-2)
CASSLKRGTLSGELFF

SEQ ID NO: 494053 - protein, 17 aa, Homo sapiens
  CDR3 for alpha chain variable domain of TCR clone 247027 (TRAV3, TRAJ6)
CAVRDGPRAGGSYIPTF

SEQ ID NO: 494054 - protein, 13 aa, Homo sapiens
  CDR3 for beta chain variable domain of TCR clone 247027 (TRBV27, TRBJ2-1)
CASRTLGVGEQFV

SEQ ID NO: 494055 - protein, 13 aa, Homo sapiens
  CDR3 for alpha chain variable domain of TCR clone 247028 (TRAV27, TRAJ41)
CAGEGNSGYALNF

SEQ ID NO: 494056 - protein, 17 aa, Homo sapiens
  CDR3 for beta chain variable domain of TCR clone 247028 (TRBV7-2, TRBJ2-1)
CASSLYPPGVEYNEQFF

SEQ ID NO: 494057 - protein, 14 aa, Homo sapiens
  CDR3 for alpha chain variable domain of TCR clone 247029 (TRAV16, TRAJ15)
CALSFNQAGTALIF

SEQ ID NO: 494058 - protein, 16 aa, Homo sapiens
  CDR3 for beta chain variable domain of TCR clone 247029 (TRBV9, TRBJ2-7)
CASSAGPDRSSYEQYF

SEQ ID NO: 494059 - protein, 10 aa, Homo sapiens
  CDR3 for alpha chain variable domain of TCR clone 247030 (TRAV36/DV7, TRAJ48)
CAVGNEKLTF

SEQ ID NO: 494060 - protein, 12 aa, Homo sapiens
  CDR3 for beta chain variable domain of TCR clone 247030 (TRBV28, TRBJ2-6)
CAIQAGANVLTF

SEQ ID NO: 494061 - protein, 13 aa, Homo sapiens
  CDR3 for alpha chain variable domain of TCR clone 247031 (TRAV8-3, TRAJ28)
CALGAVGSYQLTF

SEQ ID NO: 494062 - protein, 16 aa, Homo sapiens
  CDR3 for beta chain variable domain of TCR clone 247031 (TRBV19, TRBJ2-1)
CASSKAGPSSYNEQFF

SEQ ID NO: 494063 - protein, 15 aa, Homo sapiens
  CDR3 for alpha chain variable domain of TCR clone 247032 (TRAV3, TRAJ22)
CAVRDRGGFARQLTF

SEQ ID NO: 494064 - protein, 12 aa, Homo sapiens
  CDR3 for beta chain variable domain of TCR clone 247032 (TRBV7-9, TRBJ1-5)
CASSPQGQPQHF

SEQ ID NO: 494065 - protein, 13 aa, Homo sapiens
  CDR3 for alpha chain variable domain of TCR clone 247033 (TRAV17, TRAJ22)
CAHHSGSARQLTF

SEQ ID NO: 494066 - protein, 16 aa, Homo sapiens
  CDR3 for beta chain variable domain of TCR clone 247033 (TRBV12-5, TRBJ2-5)
CASGPRTSGNQETQYF

SEQ ID NO: 494067 - protein, 15 aa, Homo sapiens
  CDR3 for alpha chain variable domain of TCR clone 247034 (TRAV17, TRAJ57)
CATGPSQGGPEKLVF

SEQ ID NO: 494068 - protein, 16 aa, Homo sapiens
  CDR3 for beta chain variable domain of TCR clone 247034 (TRBV12-4, TRBJ1-5)
CASSRPVGGSNQPQHC

SEQ ID NO: 494069 - protein, 11 aa, Homo sapiens
  CDR3 for alpha chain variable domain of TCR clone 247035 (TRAV21, TRAJ34)
CAHYNTDKLIF

SEQ ID NO: 494070 - protein, 15 aa, Homo sapiens
  CDR3 for beta chain variable domain of TCR clone 247035 (TRBV11-3, TRBJ2-3)
CASLKDGREGDTQYF

SEQ ID NO: 494071 - protein, 14 aa, Homo sapiens
  CDR3 for alpha chain variable domain of TCR clone 247036 (TRAV39, TRAJ57)
CAVDRKGGSEKLVF

SEQ ID NO: 494072 - protein, 13 aa, Homo sapiens
  CDR3 for beta chain variable domain of TCR clone 247036 (TRBV19, TRBJ1-2)
CASSVPGQDGYTF

SEQ ID NO: 494073 - protein, 23 aa, Homo sapiens
  CDR3 for alpha chain variable domain of TCR clone 247037 (TRAV12-2, TRAJ22)
CAVSFRVHPGPPIVSGSSRQLTF

SEQ ID NO: 494074 - protein, 13 aa, Homo sapiens
  CDR3 for beta chain variable domain of TCR clone 247037 (TRBV12-4, TRBJ1-2)
CASSLDSNYGYTF

SEQ ID NO: 494075 - protein, 15 aa, Homo sapiens
  CDR3 for alpha chain variable domain of TCR clone 247038 (TRAV17, TRAJ16)
CATALRFSAGQKLLF

SEQ ID NO: 494076 - protein, 12 aa, Homo sapiens
  CDR3 for beta chain variable domain of TCR clone 247038 (TRBV2, TRBJ2-7)
CASSDPDYEQYF

SEQ ID NO: 494077 - protein, 16 aa, Homo sapiens
  CDR3 for alpha chain variable domain of TCR clone 247039 (TRAV20, TRAJ10)
CAVLRGLTGGGNKLTF

SEQ ID NO: 494078 - protein, 14 aa, Homo sapiens
  CDR3 for beta chain variable domain of TCR clone 247039 (TRBV19, TRBJ2-7)
CASSIFAGTYEQYF

SEQ ID NO: 494079 - protein, 11 aa, Homo sapiens
  CDR3 for alpha chain variable domain of TCR clone 247040 (TRAV13-1, TRAJ8)
CAARGFQKLVF

SEQ ID NO: 494080 - protein, 16 aa, Homo sapiens
  CDR3 for beta chain variable domain of TCR clone 247040 (TRBV19, TRBJ1-5)
CASSTRGTRRNQPQHF

SEQ ID NO: 494081 - protein, 16 aa, Homo sapiens
  CDR3 for alpha chain variable domain of TCR clone 247041 (TRAV12-2, TRAJ32)
CAVNMNYGGATNKLIF

SEQ ID NO: 494082 - protein, 16 aa, Homo sapiens
  CDR3 for beta chain variable domain of TCR clone 247041 (TRBV7-8, TRBJ2-3)
CASSTEGQRETDTLYF

SEQ ID NO: 494083 - protein, 14 aa, Homo sapiens
  CDR3 for alpha chain variable domain of TCR clone 247042 (TRAV1-1, TRAJ27)
CAVIYNTNAGKSTF

SEQ ID NO: 494084 - protein, 13 aa, Homo sapiens
  CDR3 for beta chain variable domain of TCR clone 247042 (TRBV5-7, TRBJ2-1)
CASSLVESVEQFF

SEQ ID NO: 494085 - protein, 13 aa, Homo sapiens
  CDR3 for alpha chain variable domain of TCR clone 247043 (TRAV14/DV4, TRAJ4)
CAMKAGGYNKLIF

SEQ ID NO: 494086 - protein, 13 aa, Homo sapiens
  CDR3 for beta chain variable domain of TCR clone 247043 (TRBV20-1, TRBJ2-7)
CSARAGSPYEQYF

SEQ ID NO: 494087 - protein, 14 aa, Homo sapiens
  CDR3 for alpha chain variable domain of TCR clone 247044 (TRAV20, TRAJ56)
CAVQFGGANSKLTF

SEQ ID NO: 494088 - protein, 14 aa, Homo sapiens
  CDR3 for beta chain variable domain of TCR clone 247044 (TRBV20-1, TRBJ2-7)
CSAKRGRGSYEQYF

SEQ ID NO: 494089 - protein, 13 aa, Homo sapiens
  CDR3 for alpha chain variable domain of TCR clone 247045 (TRAV12-1, TRAJ26)
CVVRRNYGQNFVF

SEQ ID NO: 494090 - protein, 14 aa, Homo sapiens
  CDR3 for beta chain variable domain of TCR clone 247045 (TRBV25-1, TRBJ1-1)
CASTHLGGNTEAFF

SEQ ID NO: 494091 - protein, 14 aa, Homo sapiens
  CDR3 for alpha chain variable domain of TCR clone 247046 (TRAV12-2, TRAJ40)
CAVKIPSGTYKYLF

SEQ ID NO: 494092 - protein, 13 aa, Homo sapiens
  CDR3 for beta chain variable domain of TCR clone 247046 (TRBV4-2, TRBJ1-1)
CASSQAGNTEAFF

SEQ ID NO: 494093 - protein, 13 aa, Homo sapiens
  CDR3 for alpha chain variable domain of TCR clone 247047 (TRAV30, TRAJ24)
CGTVTDSWGKLQF

SEQ ID NO: 494094 - protein, 14 aa, Homo sapiens
  CDR3 for beta chain variable domain of TCR clone 247047 (TRBV12-4, TRBJ1-2)
CASSLPKTIYGYTF

SEQ ID NO: 494095 - protein, 15 aa, Homo sapiens
  CDR3 for alpha chain variable domain of TCR clone 247048 (TRAV17, TRAJ45)
CATAYSGGGAGGLTF

SEQ ID NO: 494096 - protein, 11 aa, Homo sapiens
  CDR3 for beta chain variable domain of TCR clone 247048 (TRBV7-8, TRBJ2-7)
CASSLSLEQYF

SEQ ID NO: 494097 - protein, 15 aa, Homo sapiens
  CDR3 for alpha chain variable domain of TCR clone 247049 (TRAV2, TRAJ24)
CAVEVLTDSWGKFQF

SEQ ID NO: 494098 - protein, 14 aa, Homo sapiens
  CDR3 for beta chain variable domain of TCR clone 247049 (TRBV7-6, TRBJ2-3)
CASSLGTVTDTQYF

SEQ ID NO: 494099 - protein, 11 aa, Homo sapiens
  CDR3 for alpha chain variable domain of TCR clone 247050 (TRAV21, TRAJ11)
CAVNGYSTLTF

SEQ ID NO: 494100 - protein, 15 aa, Homo sapiens
  CDR3 for beta chain variable domain of TCR clone 247050 (TRBV6-3, TRBJ2-7)
CASSCPGTVFYEQYF

SEQ ID NO: 494101 - protein, 16 aa, Homo sapiens
  CDR3 for alpha chain variable domain of TCR clone 247051 (TRAV3, TRAJ23)
CAVKMGIYNQGGKLIF

SEQ ID NO: 494102 - protein, 17 aa, Homo sapiens
  CDR3 for beta chain variable domain of TCR clone 247051 (TRBV10-3, TRBJ2-6)
CAISESTAPSGANVLTF

SEQ ID NO: 494103 - protein, 13 aa, Homo sapiens
  CDR3 for alpha chain variable domain of TCR clone 247052 (TRAV13-1, TRAJ42)
CAASELWRKQRTS

SEQ ID NO: 494104 - protein, 15 aa, Homo sapiens
  CDR3 for beta chain variable domain of TCR clone 247052 (TRBV20-1, TRBJ2-1)
CSASSARSSYNEQFF

SEQ ID NO: 494105 - protein, 23 aa, Homo sapiens
  CDR3 for alpha chain variable domain of TCR clone 247053 (TRAV8-4, TRAJ38)
CARLNAGNNHIQNPAPAVYQLRD

SEQ ID NO: 494106 - protein, 12 aa, Homo sapiens
  CDR3 for beta chain variable domain of TCR clone 247053 (TRBV6-1, TRBJ2-7)
CASSEPLYEQYF

SEQ ID NO: 494107 - protein, 11 aa, Homo sapiens
  CDR3 for alpha chain variable domain of TCR clone 247054 (TRAV2, TRAJ33)
CAVGSNYQLIW

SEQ ID NO: 494108 - protein, 13 aa, Homo sapiens
  CDR3 for beta chain variable domain of TCR clone 247054 (TRBV20-1, TRBJ1-1)
CSARVGGNTEAFF

SEQ ID NO: 494109 - protein, 16 aa, Homo sapiens
  CDR3 for alpha chain variable domain of TCR clone 247055 (TRAV3, TRAJ18)
CAVRDGRGSTLGRLYF

SEQ ID NO: 494110 - protein, 17 aa, Homo sapiens
  CDR3 for beta chain variable domain of TCR clone 247055 (TRBV28, TRBJ2-5)
CASSTPGGDALQETQYF

SEQ ID NO: 494111 - protein, 15 aa, Homo sapiens
  CDR3 for alpha chain variable domain of TCR clone 247056 (TRAV3, TRAJ3)
CAVRGRDSSASKIIF

SEQ ID NO: 494112 - protein, 18 aa, Homo sapiens
  CDR3 for beta chain variable domain of TCR clone 247056 (TRBV25-1, TRBJ1-2)
CASSGLQNGQGLICGYTF

SEQ ID NO: 494113 - protein, 11 aa, Homo sapiens
  CDR3 for alpha chain variable domain of TCR clone 247057 (TRAV3, TRAJ20)
CAVRPSATTTS

SEQ ID NO: 494114 - protein, 15 aa, Homo sapiens
  CDR3 for beta chain variable domain of TCR clone 247057 (TRBV19, TRBJ2-6)
CASVRRDSGANVLTF

SEQ ID NO: 494115 - protein, 16 aa, Homo sapiens
  CDR3 for alpha chain variable domain of TCR clone 247058 (TRAV29/DV5, TRAJ30)
QCTSEQQANRDDKIIF

SEQ ID NO: 494116 - protein, 13 aa, Homo sapiens
  CDR3 for beta chain variable domain of TCR clone 247058 (TRBV12-5, TRBJ2-3)
CASQNRGTDTQYF

SEQ ID NO: 494117 - protein, 16 aa, Homo sapiens
  CDR3 for alpha chain variable domain of TCR clone 247059 (TRAV30, TRAJ24)
CGTEIVDADSWGKFQF

SEQ ID NO: 494118 - protein, 13 aa, Homo sapiens
  CDR3 for beta chain variable domain of TCR clone 247059 (TRBV7-3, TRBJ1-1)
CASSQDWGAEASF

SEQ ID NO: 494119 - protein, 21 aa, Homo sapiens
  CDR3 for alpha chain variable domain of TCR clone 247060 (TRAV2, TRAJ40)
CAVVTRNLHIHLWNRHQAEVF

SEQ ID NO: 494120 - protein, 14 aa, Homo sapiens
  CDR3 for beta chain variable domain of TCR clone 247060 (TRBV19, TRBJ2-1)
CASPTFVLSGEQFF

SEQ ID NO: 494121 - protein, 14 aa, Homo sapiens
  CDR3 for alpha chain variable domain of TCR clone 247061 (TRAV13-2, TRAJ43)
CAEVPTYNNNDMRF

SEQ ID NO: 494122 - protein, 15 aa, Homo sapiens
  CDR3 for beta chain variable domain of TCR clone 247061 (TRBV7-9, TRBJ2-2)
CASGPLDTFPGEQFF

SEQ ID NO: 494123 - protein, 13 aa, Homo sapiens
  CDR3 for alpha chain variable domain of TCR clone 247062 (TRAV21, TRAJ20)
CAVGLRVDYKRSF

SEQ ID NO: 494124 - protein, 14 aa, Homo sapiens
  CDR3 for beta chain variable domain of TCR clone 247062 (TRBV4-2, TRBJ2-5)
CASSQDRGRETQYF

SEQ ID NO: 494125 - protein, 14 aa, Homo sapiens
  CDR3 for alpha chain variable domain of TCR clone 247063 (TRAV12-2, TRAJ6)
CASKWGGGSYIPTF

SEQ ID NO: 494126 - protein, 12 aa, Homo sapiens
  CDR3 for beta chain variable domain of TCR clone 247063 (TRBV19, TRBJ2-1)
CASSMQDTEQFF

SEQ ID NO: 494127 - protein, 14 aa, Homo sapiens
  CDR3 for alpha chain variable domain of TCR clone 247064 (TRAV17, TRAJ57)
CATDPQGGSEKLVF

SEQ ID NO: 494128 - protein, 12 aa, Homo sapiens
  CDR3 for beta chain variable domain of TCR clone 247064 (TRBV7-9, TRBJ1-5)
CASSPQGQPQHF

SEQ ID NO: 494129 - protein, 17 aa, Homo sapiens
  CDR3 for alpha chain variable domain of TCR clone 247065 (TRAV26-1, TRAJ49)
CIAGNQFYFGTGTSLTV

SEQ ID NO: 494130 - protein, 13 aa, Homo sapiens
  CDR3 for beta chain variable domain of TCR clone 247065 (TRBV15, TRBJ1-6)
CATSGGLNSPLHF

SEQ ID NO: 494131 - protein, 14 aa, Homo sapiens
  CDR3 for alpha chain variable domain of TCR clone 247066 (TRAV12-3, TRAJ10)
SHLPLTGGGNKLTF

SEQ ID NO: 494132 - protein, 14 aa, Homo sapiens
  CDR3 for beta chain variable domain of TCR clone 247066 (TRBV12-5, TRBJ2-5)
CASGSRTQQETQYV

SEQ ID NO: 494133 - protein, 15 aa, Homo sapiens
  CDR3 for alpha chain variable domain of TCR clone 247067 (TRAV8-2, TRAJ40)
CVVSGTTSGTYKYIF

SEQ ID NO: 494134 - protein, 16 aa, Homo sapiens
  CDR3 for beta chain variable domain of TCR clone 247067 (TRBV7-3, TRBJ2-1)
CASSLEGYRAYNEQFF

SEQ ID NO: 494135 - protein, 11 aa, Homo sapiens
  CDR3 for alpha chain variable domain of TCR clone 247068 (TRAV2, TRAJ13)
CASGGYQKVTF

SEQ ID NO: 494136 - protein, 15 aa, Homo sapiens
  CDR3 for beta chain variable domain of TCR clone 247068 (TRBV2, TRBJ1-5)
CASSVNRPSNQPQHF

SEQ ID NO: 494137 - protein, 13 aa, Homo sapiens
  CDR3 for alpha chain variable domain of TCR clone 247069 (TRAV17, TRAJ34)
CATVPYNTDKLIF

SEQ ID NO: 494138 - protein, 13 aa, Homo sapiens
  CDR3 for beta chain variable domain of TCR clone 247069 (TRBV4-2, TRBJ1-1)
CASSQAGNTEAFF

SEQ ID NO: 494139 - protein, 14 aa, Homo sapiens
  CDR3 for alpha chain variable domain of TCR clone 247070 (TRAV29/DV5, TRAJ49)
CAESLSNPGNQFYF

SEQ ID NO: 494140 - protein, 15 aa, Homo sapiens
  CDR3 for beta chain variable domain of TCR clone 247070 (TRBV20-1, TRBJ2-1)
CSARGIGGTYNEQFF

SEQ ID NO: 494141 - protein, 13 aa, Homo sapiens
  CDR3 for alpha chain variable domain of TCR clone 247071 (TRAV27, TRAJ39)
CAGDTPAGNMPTF

SEQ ID NO: 494142 - protein, 13 aa, Homo sapiens
  CDR3 for beta chain variable domain of TCR clone 247071 (TRBV4-1, TRBJ2-4)
CASSQVGIDIQYF

SEQ ID NO: 494143 - protein, 16 aa, Homo sapiens
  CDR3 for alpha chain variable domain of TCR clone 247072 (TRAV12-2, TRAJ10)
CAVNRVLTGGGNKLTF

SEQ ID NO: 494144 - protein, 12 aa, Homo sapiens
  CDR3 for beta chain variable domain of TCR clone 247072 (TRBV28, TRBJ2-7)
CASSFSSFEQYF

SEQ ID NO: 494145 - protein, 14 aa, Homo sapiens
  CDR3 for alpha chain variable domain of TCR clone 247073 (TRAV12-2, TRAJ40)
CAVKIPSGTYKYIF

SEQ ID NO: 494146 - protein, 17 aa, Homo sapiens
  CDR3 for beta chain variable domain of TCR clone 247073 (TRBV4-1, TRBJ1-4)
CASSQEGPRGVEEKLFF

SEQ ID NO: 494147 - protein, 13 aa, Homo sapiens
  CDR3 for alpha chain variable domain of TCR clone 247074 (TRAV21, TRAJ20)
CAVGLRVDYKPRF

SEQ ID NO: 494148 - protein, 15 aa, Homo sapiens
  CDR3 for beta chain variable domain of TCR clone 247074 (TRBV18, TRBJ1-1)
CASSGRTGEVTEAFF

SEQ ID NO: 494149 - protein, 15 aa, Homo sapiens
  CDR3 for alpha chain variable domain of TCR clone 247075 (TRAV12-1, TRAJ45)
CVVLSGGGGADGLTF

SEQ ID NO: 494150 - protein, 13 aa, Homo sapiens
  CDR3 for beta chain variable domain of TCR clone 247075 (TRBV11-2, TRBJ2-5)
CSSRTGGIETQYF

SEQ ID NO: 494151 - protein, 14 aa, Homo sapiens
  CDR3 for alpha chain variable domain of TCR clone 247076 (TRAV26-1, TRAJ37)
CIVPSSSNTGKLIF

SEQ ID NO: 494152 - protein, 14 aa, Homo sapiens
  CDR3 for beta chain variable domain of TCR clone 247076 (TRBV25-1, TRBJ1-1)
CASTHLGGNTEAFF

SEQ ID NO: 494153 - protein, 16 aa, Homo sapiens
  CDR3 for alpha chain variable domain of TCR clone 247077 (TRAV8-2, TRAJ48)
CVVSDVSNFGNEKLTF

SEQ ID NO: 494154 - protein, 14 aa, Homo sapiens
  CDR3 for beta chain variable domain of TCR clone 247077 (TRBV5-1, TRBJ2-7)
CASSRGESLYEQYF

SEQ ID NO: 494155 - protein, 10 aa, Homo sapiens
  CDR3 for alpha chain variable domain of TCR clone 247078 (TRAV30, TRAJ48)
CGIGNGKLTF

SEQ ID NO: 494156 - protein, 16 aa, Homo sapiens
  CDR3 for beta chain variable domain of TCR clone 247078 (TRBV27, TRBJ2-1)
SMNVEPGTSGDNEQFF

SEQ ID NO: 494157 - protein, 10 aa, Homo sapiens
  CDR3 for alpha chain variable domain of TCR clone 247079 (TRAV8-4, TRAJ43)
CAVSADDMRF

SEQ ID NO: 494158 - protein, 14 aa, Homo sapiens
  CDR3 for beta chain variable domain of TCR clone 247079 (TRBV6-1, TRBJ2-6)
CASQQGAGANVLTF

SEQ ID NO: 494159 - protein, 14 aa, Homo sapiens
  CDR3 for alpha chain variable domain of TCR clone 247080 (TRAV2, TRAJ20)
CAVEDGTNDYKLSF

SEQ ID NO: 494160 - protein, 17 aa, Homo sapiens
  CDR3 for beta chain variable domain of TCR clone 247080 (TRBV18, TRBJ1-5)
CASSPTMGQGTNQPQHF

SEQ ID NO: 494161 - protein, 12 aa, Homo sapiens
  CDR3 for alpha chain variable domain of TCR clone 247081 (TRAV13-1, TRAJ53)
AASGGSNYKLTF

SEQ ID NO: 494162 - protein, 15 aa, Homo sapiens
  CDR3 for beta chain variable domain of TCR clone 247081 (TRBV5-5, TRBJ1-5)
CASSSTPGSNQPQHF

SEQ ID NO: 494163 - protein, 12 aa, Homo sapiens
  CDR3 for alpha chain variable domain of TCR clone 247082 (TRAV12-3, TRAJ17)
CALTLTGNTLTF

SEQ ID NO: 494164 - protein, 15 aa, Homo sapiens
  CDR3 for beta chain variable domain of TCR clone 247082 (TRBV20-1, TRBJ2-7)
CSARDRVSGMDEQYF

SEQ ID NO: 494165 - protein, 15 aa, Homo sapiens
  CDR3 for alpha chain variable domain of TCR clone 247083 (TRAV2, TRAJ9)
CAVEDRGTGGFKTIF

SEQ ID NO: 494166 - protein, 17 aa, Homo sapiens
  CDR3 for beta chain variable domain of TCR clone 247083 (TRBV6-5, TRBJ2-3)
CASSYTTGTGRGDTQYF

SEQ ID NO: 494167 - protein, 16 aa, Homo sapiens
  CDR3 for alpha chain variable domain of TCR clone 247084 (TRAV30, TRAJ24)
CGTEIVDADSWGDFQF

SEQ ID NO: 494168 - protein, 14 aa, Homo sapiens
  CDR3 for beta chain variable domain of TCR clone 247084 (TRBV12-5, TRBJ2-5)
CASGSRTHQETQYF

SEQ ID NO: 494169 - protein, 12 aa, Homo sapiens
  CDR3 for alpha chain variable domain of TCR clone 247085 (TRAV21, TRAJ13)
PGPSGGYQKVTF

SEQ ID NO: 494170 - protein, 13 aa, Homo sapiens
  CDR3 for beta chain variable domain of TCR clone 247085 (TRBV6-5, TRBJ2-3)
CASRSLVTDTQYF

SEQ ID NO: 494171 - protein, 16 aa, Homo sapiens
  CDR3 for alpha chain variable domain of TCR clone 247086 (TRAV30, TRAJ24)
CGTEIVDADSWGKFQV

SEQ ID NO: 494172 - protein, 14 aa, Homo sapiens
  CDR3 for beta chain variable domain of TCR clone 247086 (TRBV12-5, TRBJ2-5)
CASGSRTHKETQYF

SEQ ID NO: 494173 - protein, 15 aa, Homo sapiens
  CDR3 for alpha chain variable domain of TCR clone 247087 (TRAV2, TRAJ15)
CAVEDRGQAGTALIF

SEQ ID NO: 494174 - protein, 14 aa, Homo sapiens
  CDR3 for beta chain variable domain of TCR clone 247087 (TRBV19, TRBJ2-1)
CASEVTGARNEQFF

SEQ ID NO: 494175 - protein, 15 aa, Homo sapiens
  CDR3 for alpha chain variable domain of TCR clone 247088 (TRAV12-3, TRAJ6)
CAMSATTGGSYIPTF

SEQ ID NO: 494176 - protein, 12 aa, Homo sapiens
  CDR3 for beta chain variable domain of TCR clone 247088 (TRBV18, TRBJ2-1)
CASSSDEDEQFF

SEQ ID NO: 494177 - protein, 12 aa, Homo sapiens
  CDR3 for alpha chain variable domain of TCR clone 247089 (TRAV36/DV7, TRAJ37)
CACYGNTGKLIF

SEQ ID NO: 494178 - protein, 14 aa, Homo sapiens
  CDR3 for beta chain variable domain of TCR clone 247089 (TRBV11-2, TRBJ2-7)
CASSSTGEGYEQYF

SEQ ID NO: 494179 - protein, 15 aa, Homo sapiens
  CDR3 for alpha chain variable domain of TCR clone 247090 (TRAV35, TRAJ23)
CAGPLGNKQGGKLIF

SEQ ID NO: 494180 - protein, 14 aa, Homo sapiens
  CDR3 for beta chain variable domain of TCR clone 247090 (TRBV7-9, TRBJ1-1)
CASTPLQSYTEAFF

SEQ ID NO: 494181 - protein, 16 aa, Homo sapiens
  CDR3 for alpha chain variable domain of TCR clone 247091 (TRAV1-2, TRAJ10)
CAVRGVLTGGGNKLTF

SEQ ID NO: 494182 - protein, 16 aa, Homo sapiens
  CDR3 for beta chain variable domain of TCR clone 247091 (TRBV4-3, TRBJ1-6)
CASSAQPGGEGSPLHF

SEQ ID NO: 494183 - protein, 12 aa, Homo sapiens
  CDR3 for alpha chain variable domain of TCR clone 247092 (TRAV12-3, TRAJ17)
CAMTLTGNKLTF

SEQ ID NO: 494184 - protein, 15 aa, Homo sapiens
  CDR3 for beta chain variable domain of TCR clone 247092 (TRBV20-1, TRBJ2-7)
CSAKDRISGMDEQYF

SEQ ID NO: 494185 - protein, 13 aa, Homo sapiens
  CDR3 for alpha chain variable domain of TCR clone 247093 (TRAV13-1, TRAJ24)
CVASDGSWGKLQF

SEQ ID NO: 494186 - protein, 13 aa, Homo sapiens
  CDR3 for beta chain variable domain of TCR clone 247093 (TRBV4-3, TRBJ2-5)
CASSQGGGETQYF

SEQ ID NO: 494187 - protein, 15 aa, Homo sapiens
  CDR3 for alpha chain variable domain of TCR clone 247094 (TRAV8-3, TRAJ41)
CAVGSNSNSGYALNF

SEQ ID NO: 494188 - protein, 17 aa, Homo sapiens
  CDR3 for beta chain variable domain of TCR clone 247094 (TRBV11-2, TRBJ2-1)
CASSLYPPGVEYNEQFF

SEQ ID NO: 494189 - protein, 16 aa, Homo sapiens
  CDR3 for alpha chain variable domain of TCR clone 247095 (TRAV21, TRAJ22)
CAVKKVSSGSARQLTF

SEQ ID NO: 494190 - protein, 11 aa, Homo sapiens
  CDR3 for beta chain variable domain of TCR clone 247095 (TRBV19, TRBJ1-1)
CASSIGSEAFF

SEQ ID NO: 494191 - protein, 15 aa, Homo sapiens
  CDR3 for alpha chain variable domain of TCR clone 247096 (TRAV20, TRAJ43)
CAVQAGKSSNNDMRF

SEQ ID NO: 494192 - protein, 14 aa, Homo sapiens
  CDR3 for beta chain variable domain of TCR clone 247096 (TRBV19, TRBJ2-1)
CASPTFVLSGEQFF

SEQ ID NO: 494193 - protein, 15 aa, Homo sapiens
  CDR3 for alpha chain variable domain of TCR clone 247097 (TRAV21, TRAJ45)
CAVSYSGGGADGLTF

SEQ ID NO: 494194 - protein, 17 aa, Homo sapiens
  CDR3 for beta chain variable domain of TCR clone 247097 (TRBV7-3, TRBJ2-3)
CASSLMKRMRGADTQYF

SEQ ID NO: 494195 - protein, 17 aa, Homo sapiens
  CDR3 for alpha chain variable domain of TCR clone 247098 (TRAV2, TRAJ36)
CAVEDRGNWGKQPLLWD

SEQ ID NO: 494196 - protein, 14 aa, Homo sapiens
  CDR3 for beta chain variable domain of TCR clone 247098 (TRBV7-9, TRBJ2-5)
CASSLDTAQETKYF

SEQ ID NO: 494197 - protein, 13 aa, Homo sapiens
  CDR3 for alpha chain variable domain of TCR clone 247099 (TRAV13-1, TRAJ39)
CAASIWAGNMLTF

SEQ ID NO: 494198 - protein, 13 aa, Homo sapiens
  CDR3 for beta chain variable domain of TCR clone 247099 (TRBV11-2, TRBJ1-3)
CASSLEPVNTTYF

SEQ ID NO: 494199 - protein, 23 aa, Homo sapiens
  CDR3 for alpha chain variable domain of TCR clone 247100 (TRAV1-1, TRAJ6)
CAVRREEATYLHLEEEPALLFIR

SEQ ID NO: 494200 - protein, 15 aa, Homo sapiens
  CDR3 for beta chain variable domain of TCR clone 247100 (TRBV6-6, TRBJ2-1)
CATRQGVSSYNEQFF

SEQ ID NO: 494201 - protein, 13 aa, Homo sapiens
  CDR3 for alpha chain variable domain of TCR clone 247101 (TRAV20, TRAJ40)
CAVRTSGTYKYIF

SEQ ID NO: 494202 - protein, 12 aa, Homo sapiens
  CDR3 for beta chain variable domain of TCR clone 247101 (TRBV2, TRBJ2-1)
GRGLPSYNEQFF

SEQ ID NO: 494203 - protein, 14 aa, Homo sapiens
  CDR3 for alpha chain variable domain of TCR clone 247102 (TRAV12-3, TRAJ29)
CAMSPYSGNTPLVF

SEQ ID NO: 494204 - protein, 14 aa, Homo sapiens
  CDR3 for beta chain variable domain of TCR clone 247102 (TRBV7-8, TRBJ2-3)
CASSLEAGTDTQYF

SEQ ID NO: 494205 - protein, 14 aa, Homo sapiens
  CDR3 for alpha chain variable domain of TCR clone 247103 (TRAV38-2/DV8, TRAJ30)
CAYMDGRGGDKIIF

SEQ ID NO: 494206 - protein, 15 aa, Homo sapiens
  CDR3 for beta chain variable domain of TCR clone 247103 (TRBV7-9, TRBJ2-2)
CASRPADRDAGELFF

SEQ ID NO: 494207 - protein, 15 aa, Homo sapiens
  CDR3 for alpha chain variable domain of TCR clone 247104 (TRAV13-1, TRAJ52)
CAATSPRTSYGKLTF

SEQ ID NO: 494208 - protein, 16 aa, Homo sapiens
  CDR3 for beta chain variable domain of TCR clone 247104 (TRBV7-3, TRBJ2-2)
CASSLRRGTLSGELFL

SEQ ID NO: 494209 - protein, 17 aa, Homo sapiens
  CDR3 for alpha chain variable domain of TCR clone 247105 (TRAV4, TRAJ42)
CLVGVLTYGGSQGNLIF

SEQ ID NO: 494210 - protein, 14 aa, Homo sapiens
  CDR3 for beta chain variable domain of TCR clone 247105 (TRBV20-1, TRBJ1-1)
CSAQTRIGGTEAFF

SEQ ID NO: 494211 - protein, 14 aa, Homo sapiens
  CDR3 for alpha chain variable domain of TCR clone 247106 (TRAV12-2, TRAJ5)
CAVNRSTGGRALTF

SEQ ID NO: 494212 - protein, 12 aa, Homo sapiens
  CDR3 for beta chain variable domain of TCR clone 247106 (TRBV19, TRBJ1-5)
CARSIAQQPQHF

SEQ ID NO: 494213 - protein, 15 aa, Homo sapiens
  CDR3 for alpha chain variable domain of TCR clone 247107 (TRAV27, TRAJ38)
CAARRNAGNNRRLIC

SEQ ID NO: 494214 - protein, 13 aa, Homo sapiens
  CDR3 for beta chain variable domain of TCR clone 247107 (TRBV7-3, TRBJ2-1)
CASSLDSYNEQFF

SEQ ID NO: 494215 - protein, 16 aa, Homo sapiens
  CDR3 for alpha chain variable domain of TCR clone 247108 (TRAV38-2/DV8, TRAJ42)
CACLMNYGGSQGNLIF

SEQ ID NO: 494216 - protein, 15 aa, Homo sapiens
  CDR3 for beta chain variable domain of TCR clone 247108 (TRBV2, TRBJ2-1)
CASSEARSAYNEQFF

SEQ ID NO: 494217 - protein, 15 aa, Homo sapiens
  CDR3 for alpha chain variable domain of TCR clone 247109 (TRAV13-1, TRAJ5)
CAASPRGHGQDSTYF

SEQ ID NO: 494218 - protein, 17 aa, Homo sapiens
  CDR3 for beta chain variable domain of TCR clone 247109 (TRBV3-1, TRBJ2-2)
CASSQFRDKVDTGELFF

SEQ ID NO: 494219 - protein, 13 aa, Homo sapiens
  CDR3 for alpha chain variable domain of TCR clone 247110 (TRAV1-2, TRAJ9)
CAVLNTGGFKTIF

SEQ ID NO: 494220 - protein, 14 aa, Homo sapiens
  CDR3 for beta chain variable domain of TCR clone 247110 (TRBV20-1, TRBJ2-3)
CSDRSGTSTDTQYF

SEQ ID NO: 494221 - protein, 13 aa, Homo sapiens
  CDR3 for alpha chain variable domain of TCR clone 247111 (TRAV12-1, TRAJ21)
CVVIGDNLNKFYF

SEQ ID NO: 494222 - protein, 14 aa, Homo sapiens
  CDR3 for beta chain variable domain of TCR clone 247111 (TRBV7-3, TRBJ2-2)
CASSLDPLTGELFF

SEQ ID NO: 494223 - protein, 12 aa, Homo sapiens
  CDR3 for alpha chain variable domain of TCR clone 247112 (TRAV16, TRAJ27)
CALNHQCRQISL

SEQ ID NO: 494224 - protein, 15 aa, Homo sapiens
  CDR3 for beta chain variable domain of TCR clone 247112 (TRBV7-2, TRBJ2-7)
CASSTPGLTRGEQYF

SEQ ID NO: 494225 - protein, 15 aa, Homo sapiens
  CDR3 for alpha chain variable domain of TCR clone 247113 (TRAV35, TRAJ44)
CWAASPGGTASKLTF

SEQ ID NO: 494226 - protein, 16 aa, Homo sapiens
  CDR3 for beta chain variable domain of TCR clone 247113 (TRBV12-5, TRBJ2-5)
CASGPRTSGNQETQYF

SEQ ID NO: 494227 - protein, 13 aa, Homo sapiens
  CDR3 for alpha chain variable domain of TCR clone 247114 (TRAV17, TRAJ5)
CAPMNTGRRALTF

SEQ ID NO: 494228 - protein, 14 aa, Homo sapiens
  CDR3 for beta chain variable domain of TCR clone 247114 (TRBV7-3, TRBJ2-1)
CASSLAGGTNEQFF

SEQ ID NO: 494229 - protein, 14 aa, Homo sapiens
  CDR3 for alpha chain variable domain of TCR clone 247115 (TRAV1-2, TRAJ8)
CAVREDTGFQKLVF

SEQ ID NO: 494230 - protein, 13 aa, Homo sapiens
  CDR3 for beta chain variable domain of TCR clone 247115 (TRBV12-4, TRBJ1-2)
CASGLRQGKGYTF

SEQ ID NO: 494231 - protein, 16 aa, Homo sapiens
  CDR3 for alpha chain variable domain of TCR clone 247116 (TRAV21, TRAJ37)
CAVRPRGSSNTGKIIF

SEQ ID NO: 494232 - protein, 13 aa, Homo sapiens
  CDR3 for beta chain variable domain of TCR clone 247116 (TRBV7-9, TRBJ2-5)
CASLSPGQETQYF

SEQ ID NO: 494233 - protein, 12 aa, Homo sapiens
  CDR3 for alpha chain variable domain of TCR clone 247117 (TRAV2, TRAJ9)
CAVVAGGFKTIF

SEQ ID NO: 494234 - protein, 14 aa, Homo sapiens
  CDR3 for beta chain variable domain of TCR clone 247117 (TRBV7-9, TRBJ2-2)
CASSGLADTGELFF

SEQ ID NO: 494235 - protein, 14 aa, Homo sapiens
  CDR3 for alpha chain variable domain of TCR clone 247118 (TRAV8-3, TRAJ9)
CAVVYNTGGFKTIF

SEQ ID NO: 494236 - protein, 16 aa, Homo sapiens
  CDR3 for beta chain variable domain of TCR clone 247118 (TRBV18, TRBJ2-7)
CASSPGRAGGAYEQYF

SEQ ID NO: 494237 - protein, 14 aa, Homo sapiens
  CDR3 for alpha chain variable domain of TCR clone 247119 (TRAV1-2, TRAJ16)
CAVNRFSDGQKLLF

SEQ ID NO: 494238 - protein, 14 aa, Homo sapiens
  CDR3 for beta chain variable domain of TCR clone 247119 (TRBV28, TRBJ2-1)
CASSLNGRNNEQFF

SEQ ID NO: 494239 - protein, 13 aa, Homo sapiens
  CDR3 for alpha chain variable domain of TCR clone 247120 (TRAV20, TRAJ21)
CAVEGYNFNKSYF

SEQ ID NO: 494240 - protein, 14 aa, Homo sapiens
  CDR3 for beta chain variable domain of TCR clone 247120 (TRBV3-1, TRBJ2-5)
CASSQGPDQETQYF

SEQ ID NO: 494241 - protein, 17 aa, Homo sapiens
  CDR3 for alpha chain variable domain of TCR clone 247121 (TRAV26-1, TRAJ53)
CIVRVDDSGGSNYKLTF

SEQ ID NO: 494242 - protein, 14 aa, Homo sapiens
  CDR3 for beta chain variable domain of TCR clone 247121 (TRBV7-9, TRBJ2-5)
CASSLAPDQETQYF

SEQ ID NO: 494243 - protein, 14 aa, Homo sapiens
  CDR3 for alpha chain variable domain of TCR clone 247122 (TRAV13-1, TRAJ9)
CAAIALTGGFKTIF

SEQ ID NO: 494244 - protein, 16 aa, Homo sapiens
  CDR3 for beta chain variable domain of TCR clone 247122 (TRBV7-8, TRBJ2-4)
CASSAERTLAKNIQYF

SEQ ID NO: 494245 - protein, 15 aa, Homo sapiens
  CDR3 for alpha chain variable domain of TCR clone 247123 (TRAV27, TRAJ45)
CRSPRSGGGADGLTF

SEQ ID NO: 494246 - protein, 12 aa, Homo sapiens
  CDR3 for beta chain variable domain of TCR clone 247123 (TRBV24-1, TRBJ2-7)
CATSDPGYEQYF

SEQ ID NO: 494247 - protein, 13 aa, Homo sapiens
  CDR3 for alpha chain variable domain of TCR clone 247124 (TRAV36/DV7, TRAJ37)
CAVFSSNTGKLIF

SEQ ID NO: 494248 - protein, 13 aa, Homo sapiens
  CDR3 for beta chain variable domain of TCR clone 247124 (TRBV7-3, TRBJ1-1)
CASSQDWGAEAFF

SEQ ID NO: 494249 - protein, 15 aa, Homo sapiens
  CDR3 for alpha chain variable domain of TCR clone 247125 (TRAV17, TRAJ45)
CATAYSGGGADGLTF

SEQ ID NO: 494250 - protein, 15 aa, Homo sapiens
  CDR3 for beta chain variable domain of TCR clone 247125 (TRBV28, TRBJ2-1)
CASSIMAGGRSEQFF

SEQ ID NO: 494251 - protein, 14 aa, Homo sapiens
  CDR3 for alpha chain variable domain of TCR clone 247126 (TRAV2, TRAJ37)
CAVEGSSNTGKLIF

SEQ ID NO: 494252 - protein, 15 aa, Homo sapiens
  CDR3 for beta chain variable domain of TCR clone 247126 (TRBV24-1, TRBJ2-4)
CATSDTRDRANIQYF

SEQ ID NO: 494253 - protein, 13 aa, Homo sapiens
  CDR3 for alpha chain variable domain of TCR clone 247127 (TRAV26-1, TRAJ33)
CIVRVEGNYQLIW

SEQ ID NO: 494254 - protein, 16 aa, Homo sapiens
  CDR3 for beta chain variable domain of TCR clone 247127 (TRBV15, TRBJ2-7)
CATSRERGRRRGEQYF

SEQ ID NO: 494255 - protein, 17 aa, Homo sapiens
  CDR3 for alpha chain variable domain of TCR clone 247128 (TRAV12-2, TRAJ52)
CAVNPYAGCTSYGKLTF

SEQ ID NO: 494256 - protein, 16 aa, Homo sapiens
  CDR3 for beta chain variable domain of TCR clone 247128 (TRBV5-5, TRBJ2-2)
CASSGRREGATGELFF

SEQ ID NO: 494257 - protein, 15 aa, Homo sapiens
  CDR3 for alpha chain variable domain of TCR clone 247129 (TRAV12-3, TRAJ6)
CAMSATTGGSYIPTF

SEQ ID NO: 494258 - protein, 14 aa, Homo sapiens
  CDR3 for beta chain variable domain of TCR clone 247129 (TRBV19, TRBJ2-1)
CASPTFVVSGEQFF

SEQ ID NO: 494259 - protein, 14 aa, Homo sapiens
  CDR3 for alpha chain variable domain of TCR clone 247130 (TRAV35, TRAJ33)
CAGSSQDSTYQLLW

SEQ ID NO: 494260 - protein, 15 aa, Homo sapiens
  CDR3 for beta chain variable domain of TCR clone 247130 (TRBV20-1, TRBJ2-7)
CSAESGTSGAYEQYF

SEQ ID NO: 494261 - protein, 12 aa, Homo sapiens
  CDR3 for alpha chain variable domain of TCR clone 247131 (TRAV13-1, TRAJ3)
CAATGVQQGFQD

SEQ ID NO: 494262 - protein, 16 aa, Homo sapiens
  CDR3 for beta chain variable domain of TCR clone 247131 (TRBV7-3, TRBJ2-2)
CASSLKRGTLSGELFF

SEQ ID NO: 494263 - protein, 13 aa, Homo sapiens
  CDR3 for alpha chain variable domain of TCR clone 247132 (TRAV1-2, TRAJ9)
CAALNTGGFKTIF

SEQ ID NO: 494264 - protein, 17 aa, Homo sapiens
  CDR3 for beta chain variable domain of TCR clone 247132 (TRBV19, TRBJ2-2)
CASSRHPGGFGTGELFF

SEQ ID NO: 494265 - protein, 12 aa, Homo sapiens
  CDR3 for alpha chain variable domain of TCR clone 247133 (TRAV3, TRAJ31)
CAAQRANARLMF

SEQ ID NO: 494266 - protein, 14 aa, Homo sapiens
  CDR3 for beta chain variable domain of TCR clone 247133 (TRBV18, TRBJ2-7)
CASSPRGGAYEQYF

SEQ ID NO: 494267 - protein, 14 aa, Homo sapiens
  CDR3 for alpha chain variable domain of TCR clone 247134 (TRAV22, TRAJ57)
CAGRTQGGSEKLVF

SEQ ID NO: 494268 - protein, 14 aa, Homo sapiens
  CDR3 for beta chain variable domain of TCR clone 247134 (TRBV19, TRBJ2-1)
CASGKSTQYNEQFF

SEQ ID NO: 494269 - protein, 15 aa, Homo sapiens
  CDR3 for alpha chain variable domain of TCR clone 247135 (TRAV23/DV6, TRAJ13)
CAAWPGGGGYQKVTF

SEQ ID NO: 494270 - protein, 17 aa, Homo sapiens
  CDR3 for beta chain variable domain of TCR clone 247135 (TRBV19, TRBJ2-7)
CASCISFYDSYPYEQYF

SEQ ID NO: 494271 - protein, 17 aa, Homo sapiens
  CDR3 for alpha chain variable domain of TCR clone 247136 (TRAV4, TRAJ18)
CLVGERSVGSTLGGLYF

SEQ ID NO: 494272 - protein, 16 aa, Homo sapiens
  CDR3 for beta chain variable domain of TCR clone 247136 (TRBV4-2, TRBJ1-1)
CASSPSPGRAAPEAFF

SEQ ID NO: 494273 - protein, 18 aa, Homo sapiens
  CDR3 for alpha chain variable domain of TCR clone 247137 (TRAV26-1, TRAJ27)
CIVRPSFNYNTNAGKSTF

SEQ ID NO: 494274 - protein, 14 aa, Homo sapiens
  CDR3 for beta chain variable domain of TCR clone 247137 (TRBV10-3, TRBJ1-6)
CAISVDGDESPLHV

SEQ ID NO: 494275 - protein, 13 aa, Homo sapiens
  CDR3 for alpha chain variable domain of TCR clone 247138 (TRAV20, TRAJ20)
SAVRDFNDYKLSF

SEQ ID NO: 494276 - protein, 12 aa, Homo sapiens
  CDR3 for beta chain variable domain of TCR clone 247138 (TRBV9, TRBJ2-1)
CASSITYNEQFF

SEQ ID NO: 494277 - protein, 16 aa, Homo sapiens
  CDR3 for alpha chain variable domain of TCR clone 247139 (TRAV30, TRAJ24)
CGTEIVDADSGGKCQF

SEQ ID NO: 494278 - protein, 14 aa, Homo sapiens
  CDR3 for beta chain variable domain of TCR clone 247139 (TRBV12-5, TRBJ2-5)
CASGSRTHQETQYF

SEQ ID NO: 494279 - protein, 14 aa, Homo sapiens
  CDR3 for alpha chain variable domain of TCR clone 247140 (TRAV13-2, TRAJ17)
GAENSKAAGNKLTF

SEQ ID NO: 494280 - protein, 11 aa, Homo sapiens
  CDR3 for beta chain variable domain of TCR clone 247140 (TRBV6-3, TRBJ2-3)
CATGQADTQYF

SEQ ID NO: 494281 - protein, 12 aa, Homo sapiens
  CDR3 for alpha chain variable domain of TCR clone 247141 (TRAV3, TRAJ7)
CAHLLWEQQTRF

SEQ ID NO: 494282 - protein, 18 aa, Homo sapiens
  CDR3 for beta chain variable domain of TCR clone 247141 (TRBV7-3, TRBJ2-5)
CASSFRGGGDPVLRARHA

SEQ ID NO: 494283 - protein, 13 aa, Homo sapiens
  CDR3 for alpha chain variable domain of TCR clone 247142 (TRAV17, TRAJ26)
CATVDNYGQNFAF

SEQ ID NO: 494284 - protein, 16 aa, Homo sapiens
  CDR3 for beta chain variable domain of TCR clone 247142 (TRBV2, TRBJ2-1)
CASSVGGSLSYNEQFF

SEQ ID NO: 494285 - protein, 16 aa, Homo sapiens
  CDR3 for alpha chain variable domain of TCR clone 247143 (TRAV3, TRAJ10)
CAVRDMRAGGGNKLTF

SEQ ID NO: 494286 - protein, 15 aa, Homo sapiens
  CDR3 for beta chain variable domain of TCR clone 247143 (TRBV6-3, TRBJ2-7)
CASSSPGTVFDEQYF

SEQ ID NO: 494287 - protein, 18 aa, Homo sapiens
  CDR3 for alpha chain variable domain of TCR clone 247144 (TRAV13-1, TRAJ52)
CAVSKRSAGGTSYGKLTF

SEQ ID NO: 494288 - protein, 13 aa, Homo sapiens
  CDR3 for beta chain variable domain of TCR clone 247144 (TRBV12-4, TRBJ1-2)
CASSLRQGKGDTF

SEQ ID NO: 494289 - protein, 13 aa, Homo sapiens
  CDR3 for alpha chain variable domain of TCR clone 247145 (TRAV20, TRAJ42)
CAVQGGSQGNLIF

SEQ ID NO: 494290 - protein, 15 aa, Homo sapiens
  CDR3 for beta chain variable domain of TCR clone 247145 (TRBV10-1, TRBJ2-1)
CASSEWRGMYNEQFF

SEQ ID NO: 494291 - protein, 13 aa, Homo sapiens
  CDR3 for alpha chain variable domain of TCR clone 247146 (TRAV13-1, TRAJ6)
RARGSGGSYIPTF

SEQ ID NO: 494292 - protein, 17 aa, Homo sapiens
  CDR3 for beta chain variable domain of TCR clone 247146 (TRBV7-8, TRBJ2-1)
CASSPPTGTLSYNEQFF

SEQ ID NO: 494293 - protein, 13 aa, Homo sapiens
  CDR3 for alpha chain variable domain of TCR clone 247147 (TRAV27, TRAJ6)
CAVASGGSYIPTF

SEQ ID NO: 494294 - protein, 14 aa, Homo sapiens
  CDR3 for beta chain variable domain of TCR clone 247147 (TRBV7-9, TRBJ2-2)
CASSLVQDTGELFF

SEQ ID NO: 494295 - protein, 14 aa, Homo sapiens
  CDR3 for alpha chain variable domain of TCR clone 247148 (TRAV2, TRAJ37)
CAVDFTSNTGKLIF

SEQ ID NO: 494296 - protein, 15 aa, Homo sapiens
  CDR3 for beta chain variable domain of TCR clone 247148 (TRBV10-3, TRBJ2-3)
CAISPTSGGTDTQYF

SEQ ID NO: 494297 - protein, 15 aa, Homo sapiens
  CDR3 for alpha chain variable domain of TCR clone 247149 (TRAV3, TRAJ22)
CAVRDRGGSARRLTF

SEQ ID NO: 494298 - protein, 15 aa, Homo sapiens
  CDR3 for beta chain variable domain of TCR clone 247149 (TRBV19, TRBJ2-5)
CASSIVRASQETQYF

SEQ ID NO: 494299 - protein, 13 aa, Homo sapiens
  CDR3 for alpha chain variable domain of TCR clone 247150 (TRAV8-3, TRAJ43)
CAVGPDNNNDMRF

SEQ ID NO: 494300 - protein, 14 aa, Homo sapiens
  CDR3 for beta chain variable domain of TCR clone 247150 (TRBV5-8, TRBJ2-7)
CASKLGQGAYEQYF

SEQ ID NO: 494301 - protein, 11 aa, Homo sapiens
  CDR3 for alpha chain variable domain of TCR clone 247151 (TRAV26-1, TRAJ37)
CIVRVGRKLIF

SEQ ID NO: 494302 - protein, 15 aa, Homo sapiens
  CDR3 for beta chain variable domain of TCR clone 247151 (TRBV20-1, TRBJ2-1)
CSASSAGSSYNEQFF

SEQ ID NO: 494303 - protein, 15 aa, Homo sapiens
  CDR3 for alpha chain variable domain of TCR clone 247152 (TRAV21, TRAJ24)
CAARSSADSWGKLQF

SEQ ID NO: 494304 - protein, 19 aa, Homo sapiens
  CDR3 for beta chain variable domain of TCR clone 247152 (TRBV14, TRBJ2-1)
CASSQDQLWEAPEYNEQFF

SEQ ID NO: 494305 - protein, 13 aa, Homo sapiens
  CDR3 for alpha chain variable domain of TCR clone 247153 (TRAV3, TRAJ20)
CCEAFCNDYKLSF

SEQ ID NO: 494306 - protein, 15 aa, Homo sapiens
  CDR3 for beta chain variable domain of TCR clone 247153 (TRBV19, TRBJ2-6)
CARVRRDSGANVLTF

SEQ ID NO: 494307 - protein, 15 aa, Homo sapiens
  CDR3 for alpha chain variable domain of TCR clone 247154 (TRAV39, TRAJ32)
CAVDMEGGAPNKLIF

SEQ ID NO: 494308 - protein, 17 aa, Homo sapiens
  CDR3 for beta chain variable domain of TCR clone 247154 (TRBV7-2, TRBJ1-4)
CASSFKAGPTTNDTLFF

SEQ ID NO: 494309 - protein, 14 aa, Homo sapiens
  CDR3 for alpha chain variable domain of TCR clone 247155 (TRAV8-3, TRAJ9)
CAVVYNTGGFKTIF

SEQ ID NO: 494310 - protein, 16 aa, Homo sapiens
  CDR3 for beta chain variable domain of TCR clone 247155 (TRBV7-9, TRBJ2-3)
CASSPWREVGTDTQYF

SEQ ID NO: 494311 - protein, 10 aa, Homo sapiens
  CDR3 for alpha chain variable domain of TCR clone 247156 (TRAV38-1, TRAJ53)
CAFMKHGLES

SEQ ID NO: 494312 - protein, 13 aa, Homo sapiens
  CDR3 for beta chain variable domain of TCR clone 247156 (TRBV19, TRBJ2-7)
CASSPRQSYEQYL

SEQ ID NO: 494313 - protein, 16 aa, Homo sapiens
  CDR3 for alpha chain variable domain of TCR clone 247157 (TRAV12-2, TRAJ40)
CAVIRGGTSGTYQYLF

SEQ ID NO: 494314 - protein, 12 aa, Homo sapiens
  CDR3 for beta chain variable domain of TCR clone 247157 (TRBV11-2, TRBJ2-2)
CASSLPTGELFF

SEQ ID NO: 494315 - protein, 16 aa, Homo sapiens
  CDR3 for alpha chain variable domain of TCR clone 247158 (TRAV14/DV4, TRAJ21)
CAMREGPENHFNKFYF

SEQ ID NO: 494316 - protein, 12 aa, Homo sapiens
  CDR3 for beta chain variable domain of TCR clone 247158 (TRBV29-1, TRBJ2-2)
CSVDKYTGELFF

SEQ ID NO: 494317 - protein, 13 aa, Homo sapiens
  CDR3 for alpha chain variable domain of TCR clone 247159 (TRAV17, TRAJ29)
CATDAFRKHTSCL

SEQ ID NO: 494318 - protein, 13 aa, Homo sapiens
  CDR3 for beta chain variable domain of TCR clone 247159 (TRBV5-7, TRBJ2-6)
CASTSSGANVLNF

SEQ ID NO: 494319 - protein, 10 aa, Homo sapiens
  CDR3 for alpha chain variable domain of TCR clone 247160 (TRAV1-2, TRAJ23)
CAGQGGKLIF

SEQ ID NO: 494320 - protein, 14 aa, Homo sapiens
  CDR3 for beta chain variable domain of TCR clone 247160 (TRBV6-1, TRBJ1-3)
CDSVQGGGGNTIYF

SEQ ID NO: 494321 - protein, 13 aa, Homo sapiens
  CDR3 for alpha chain variable domain of TCR clone 247161 (TRAV8-6, TRAJ54)
CAVSEEGAQKLVF

SEQ ID NO: 494322 - protein, 11 aa, Homo sapiens
  CDR3 for beta chain variable domain of TCR clone 247161 (TRBV13, TRBJ2-3)
CASGNADTQYF

SEQ ID NO: 494323 - protein, 14 aa, Homo sapiens
  CDR3 for alpha chain variable domain of TCR clone 247162 (TRAV1-1, TRAJ28)
CAAPSGAGSYQLTF

SEQ ID NO: 494324 - protein, 15 aa, Homo sapiens
  CDR3 for beta chain variable domain of TCR clone 247162 (TRBV7-2, TRBJ1-2)
CASSLISGGDYGYTF

SEQ ID NO: 494325 - protein, 12 aa, Homo sapiens
  CDR3 for alpha chain variable domain of TCR clone 247163 (TRAV8-3, TRAJ20)
CAVGANDYKLSF

SEQ ID NO: 494326 - protein, 15 aa, Homo sapiens
  CDR3 for beta chain variable domain of TCR clone 247163 (TRBV19, TRBJ2-1)
CASSRPGQNYNEQFF

SEQ ID NO: 494327 - protein, 13 aa, Homo sapiens
  CDR3 for alpha chain variable domain of TCR clone 247164 (TRAV8-1, TRAJ30)
CAVIMNRDDKIIF

SEQ ID NO: 494328 - protein, 15 aa, Homo sapiens
  CDR3 for beta chain variable domain of TCR clone 247164 (TRBV5-1, TRBJ2-1)
CASSPPRAPYNEQFF

SEQ ID NO: 494329 - protein, 15 aa, Homo sapiens
  CDR3 for alpha chain variable domain of TCR clone 247165 (TRAV26-1, TRAJ29)
CIVRVEGSGNKPLVF

SEQ ID NO: 494330 - protein, 13 aa, Homo sapiens
  CDR3 for beta chain variable domain of TCR clone 247165 (TRBV4-1, TRBJ1-1)
CASSRKMNTEAFF

SEQ ID NO: 494331 - protein, 17 aa, Homo sapiens
  CDR3 for alpha chain variable domain of TCR clone 247166 (TRAV3, TRAJ42)
CAVRDRDYGGSQGNLIF

SEQ ID NO: 494332 - protein, 14 aa, Homo sapiens
  CDR3 for beta chain variable domain of TCR clone 247166 (TRBV19, TRBJ2-2)
CATTGHANTGELFF

SEQ ID NO: 494333 - protein, 15 aa, Homo sapiens
  CDR3 for alpha chain variable domain of TCR clone 247167 (TRAV1-2, TRAJ15)
CAVDVMGSAGTALIF

SEQ ID NO: 494334 - protein, 14 aa, Homo sapiens
  CDR3 for beta chain variable domain of TCR clone 247167 (TRBV11-2, TRBJ2-3)
CASSRLARTDTQYF

SEQ ID NO: 494335 - protein, 12 aa, Homo sapiens
  CDR3 for alpha chain variable domain of TCR clone 247168 (TRAV12-3, TRAJ17)
CAMTLTGNKLTF

SEQ ID NO: 494336 - protein, 14 aa, Homo sapiens
  CDR3 for beta chain variable domain of TCR clone 247168 (TRBV20-1, TRBJ2-1)
CSAQIGGSADEQFF

SEQ ID NO: 494337 - protein, 12 aa, Homo sapiens
  CDR3 for alpha chain variable domain of TCR clone 247169 (TRAV30, TRAJ39)
CGRGNAGNMLTF

SEQ ID NO: 494338 - protein, 15 aa, Homo sapiens
  CDR3 for beta chain variable domain of TCR clone 247169 (TRBV5-1, TRBJ1-1)
CASSWTGRGNIEAVF

SEQ ID NO: 494339 - protein, 15 aa, Homo sapiens
  CDR3 for alpha chain variable domain of TCR clone 247170 (TRAV14/DV4, TRAJ22)
CAMSRLSGFARQLTF

SEQ ID NO: 494340 - protein, 15 aa, Homo sapiens
  CDR3 for beta chain variable domain of TCR clone 247170 (TRBV28, TRBJ2-5)
CASSFRQGALETQYF

SEQ ID NO: 494341 - protein, 12 aa, Homo sapiens
  CDR3 for alpha chain variable domain of TCR clone 247171 (TRAV21, TRAJ56)
CAVGVNRSKLTF

SEQ ID NO: 494342 - protein, 13 aa, Homo sapiens
  CDR3 for beta chain variable domain of TCR clone 247171 (TRBV6-5, TRBJ2-5)
CASSPQGGETQYF

SEQ ID NO: 494343 - protein, 15 aa, Homo sapiens
  CDR3 for alpha chain variable domain of TCR clone 247172 (TRAV38-1, TRAJ37)
CAFIHGSGNTGKLIF

SEQ ID NO: 494344 - protein, 19 aa, Homo sapiens
  CDR3 for beta chain variable domain of TCR clone 247172 (TRBV7-9, TRBJ2-7)
RGTRPCISVSSFGSYEQYF

SEQ ID NO: 494345 - protein, 14 aa, Homo sapiens
  CDR3 for alpha chain variable domain of TCR clone 247173 (TRAV8-1, TRAJ4)
CAVPFSGGYNKLLF

SEQ ID NO: 494346 - protein, 16 aa, Homo sapiens
  CDR3 for beta chain variable domain of TCR clone 247173 (TRBV6-1, TRBJ1-2)
CASSGAWQGRSHGYTC

SEQ ID NO: 494347 - protein, 11 aa, Homo sapiens
  CDR3 for alpha chain variable domain of TCR clone 247174 (TRAV27, TRAJ47)
SIVEYGNKLVF

SEQ ID NO: 494348 - protein, 19 aa, Homo sapiens
  CDR3 for beta chain variable domain of TCR clone 247174 (TRBV25-1, TRBJ2-2)
CAILVYRVDRGRKTGELFF

SEQ ID NO: 494349 - protein, 18 aa, Homo sapiens
  CDR3 for alpha chain variable domain of TCR clone 247175 (TRAV13-1, TRAJ52)
CAAKNPSAGGTSYGKLTF

SEQ ID NO: 494350 - protein, 14 aa, Homo sapiens
  CDR3 for beta chain variable domain of TCR clone 247175 (TRBV7-2, TRBJ2-7)
CASSPKTSFYEQYF

SEQ ID NO: 494351 - protein, 15 aa, Homo sapiens
  CDR3 for alpha chain variable domain of TCR clone 247176 (TRAV26-1, TRAJ42)
CIVRVNGGSQGNLIF

SEQ ID NO: 494352 - protein, 14 aa, Homo sapiens
  CDR3 for beta chain variable domain of TCR clone 247176 (TRBV19, TRBJ2-2)
CATTGHANTGELFF

SEQ ID NO: 494353 - protein, 14 aa, Homo sapiens
  CDR3 for alpha chain variable domain of TCR clone 247177 (TRAV12-2, TRAJ45)
CAVNKGAGADGLTF

SEQ ID NO: 494354 - protein, 19 aa, Homo sapiens
  CDR3 for beta chain variable domain of TCR clone 247177 (TRBV7-2, TRBJ2-3)
CASSLVLSAYISRPDTQYF

SEQ ID NO: 494355 - protein, 12 aa, Homo sapiens
  CDR3 for alpha chain variable domain of TCR clone 247178 (TRAV27, TRAJ9)
CAGESGGFKTIF

SEQ ID NO: 494356 - protein, 15 aa, Homo sapiens
  CDR3 for beta chain variable domain of TCR clone 247178 (TRBV7-9, TRBJ1-2)
CASSLDREPNYGYTF

SEQ ID NO: 494357 - protein, 13 aa, Homo sapiens
  CDR3 for alpha chain variable domain of TCR clone 247179 (TRAV12-2, TRAJ10)
CAVPTGGGNKLTF

SEQ ID NO: 494358 - protein, 14 aa, Homo sapiens
  CDR3 for beta chain variable domain of TCR clone 247179 (TRBV4-1, TRBJ2-2)
CASSQAVNTGELFF

SEQ ID NO: 494359 - protein, 15 aa, Homo sapiens
  CDR3 for alpha chain variable domain of TCR clone 247180 (TRAV38-2/DV8, TRAJ48)
CAYRSGGFGDEKLTF

SEQ ID NO: 494360 - protein, 16 aa, Homo sapiens
  CDR3 for beta chain variable domain of TCR clone 247180 (TRBV28, TRBJ2-7)
CASSPWVATGDHSQYF

SEQ ID NO: 494361 - protein, 16 aa, Homo sapiens
  CDR3 for alpha chain variable domain of TCR clone 247181 (TRAV12-3, TRAJ53)
CAMSPGSGGSNSKLTL

SEQ ID NO: 494362 - protein, 11 aa, Homo sapiens
  CDR3 for beta chain variable domain of TCR clone 247181 (TRBV29-1, TRBJ2-5)
CSEDRTGTQYF

SEQ ID NO: 494363 - protein, 12 aa, Homo sapiens
  CDR3 for alpha chain variable domain of TCR clone 247182 (TRAV29/DV5, TRAJ34)
CAARHNTDKLIF

SEQ ID NO: 494364 - protein, 15 aa, Homo sapiens
  CDR3 for beta chain variable domain of TCR clone 247182 (TRBV19, TRBJ2-4)
CASRGPRRGENIQYF

SEQ ID NO: 494365 - protein, 17 aa, Homo sapiens
  CDR3 for alpha chain variable domain of TCR clone 247183 (TRAV4, )
CLVDIQNPDPAVYQLRD

SEQ ID NO: 494366 - protein, 15 aa, Homo sapiens
  CDR3 for beta chain variable domain of TCR clone 247183 (TRBV20-1, TRBJ1-5)
CSARVGRVVSQPQHV

SEQ ID NO: 494367 - protein, 13 aa, Homo sapiens
  CDR3 for alpha chain variable domain of TCR clone 247184 (TRAV26-1, TRAJ30)
CTVRGESNDKIIF

SEQ ID NO: 494368 - protein, 15 aa, Homo sapiens
  CDR3 for beta chain variable domain of TCR clone 247184 (TRBV6-1, TRBJ2-3)
CASSERGGITDTQYF

SEQ ID NO: 494369 - protein, 12 aa, Homo sapiens
  CDR3 for alpha chain variable domain of TCR clone 247185 (TRAV12-1, TRAJ31)
CVVNRNNARLMF

SEQ ID NO: 494370 - protein, 15 aa, Homo sapiens
  CDR3 for beta chain variable domain of TCR clone 247185 (TRBV10-3, TRBJ2-3)
GAISEALSSTDTQYF

SEQ ID NO: 494371 - protein, 10 aa, Homo sapiens
  CDR3 for alpha chain variable domain of TCR clone 247186 (TRAV12-2, TRAJ52)
RSTSYGKLTF

SEQ ID NO: 494372 - protein, 15 aa, Homo sapiens
  CDR3 for beta chain variable domain of TCR clone 247186 (TRBV11-1, TRBJ2-1)
CASHTGLAGSNEQFF

SEQ ID NO: 494373 - protein, 14 aa, Homo sapiens
  CDR3 for alpha chain variable domain of TCR clone 247187 (TRAV14/DV4, TRAJ11)
CAMSSNSGYSTLTL

SEQ ID NO: 494374 - protein, 11 aa, Homo sapiens
  CDR3 for beta chain variable domain of TCR clone 247187 (TRBV7-9, TRBJ2-3)
CASSGPDTQYF

SEQ ID NO: 494375 - protein, 13 aa, Homo sapiens
  CDR3 for alpha chain variable domain of TCR clone 247188 (TRAV38-2/DV8, TRAJ34)
CAYRTWNNDKLIF

SEQ ID NO: 494376 - protein, 13 aa, Homo sapiens
  CDR3 for beta chain variable domain of TCR clone 247188 (TRBV7-2, TRBJ2-2)
CASSLAVTGELFF

SEQ ID NO: 494377 - protein, 12 aa, Homo sapiens
  CDR3 for alpha chain variable domain of TCR clone 247189 (TRAV13-2, TRAJ8)
CAPWLGFQKLVF

SEQ ID NO: 494378 - protein, 15 aa, Homo sapiens
  CDR3 for beta chain variable domain of TCR clone 247189 (TRBV12-4, TRBJ1-5)
CANTRGSGFGQPQHF

SEQ ID NO: 494379 - protein, 14 aa, Homo sapiens
  CDR3 for alpha chain variable domain of TCR clone 247190 (TRAV2, TRAJ9)
CAVEDRSGGFKTII

SEQ ID NO: 494380 - protein, 14 aa, Homo sapiens
  CDR3 for beta chain variable domain of TCR clone 247190 (TRBV28, TRBJ2-7)
CASTFYGRAHEQYF

SEQ ID NO: 494381 - protein, 12 aa, Homo sapiens
  CDR3 for alpha chain variable domain of TCR clone 247191 (TRAV16, TRAJ49)
CALNEGGNQFYF

SEQ ID NO: 494382 - protein, 14 aa, Homo sapiens
  CDR3 for beta chain variable domain of TCR clone 247191 (TRBV7-9, TRBJ2-1)
CTSRPTGLRNEQFF

SEQ ID NO: 494383 - protein, 16 aa, Homo sapiens
  CDR3 for alpha chain variable domain of TCR clone 247192 (TRAV3, TRAJ6)
RAVRDGQGRRKLHTYI

SEQ ID NO: 494384 - protein, 14 aa, Homo sapiens
  CDR3 for beta chain variable domain of TCR clone 247192 (TRBV7-2, TRBJ2-7)
CASSPKTSFYEQYF

SEQ ID NO: 494385 - protein, 18 aa, Homo sapiens
  CDR3 for alpha chain variable domain of TCR clone 247193 (TRAV26-2, TRAJ45)
CILRVDKYSGGGADGLTF

SEQ ID NO: 494386 - protein, 14 aa, Homo sapiens
  CDR3 for beta chain variable domain of TCR clone 247193 (TRBV20-1, TRBJ2-5)
CSARDGRAGETQYF

SEQ ID NO: 494387 - protein, 12 aa, Homo sapiens
  CDR3 for alpha chain variable domain of TCR clone 247194 (TRAV12-2, TRAJ42)
CAGGGSQGNLIF

SEQ ID NO: 494388 - protein, 17 aa, Homo sapiens
  CDR3 for beta chain variable domain of TCR clone 247194 (TRBV19, TRBJ2-7)
CASSISFYDSYPYEQYF

SEQ ID NO: 494389 - protein, 12 aa, Homo sapiens
  CDR3 for alpha chain variable domain of TCR clone 247195 (TRAV12-3, TRAJ17)
CAMTLTGNKLTF

SEQ ID NO: 494390 - protein, 12 aa, Homo sapiens
  CDR3 for beta chain variable domain of TCR clone 247195 (TRBV20-1, TRBJ2-5)
CSATRNQETQYF

SEQ ID NO: 494391 - protein, 14 aa, Homo sapiens
  CDR3 for alpha chain variable domain of TCR clone 247196 (TRAV25, TRAJ23)
CAGQGDNQGGKLIF

SEQ ID NO: 494392 - protein, 15 aa, Homo sapiens
  CDR3 for beta chain variable domain of TCR clone 247196 (TRBV20-1, TRBJ2-7)
CSARDRVSGMDEQYF

SEQ ID NO: 494393 - protein, 13 aa, Homo sapiens
  CDR3 for alpha chain variable domain of TCR clone 247197 (TRAV38-2/DV8, TRAJ34)
CAYRNYNTDKHIF

SEQ ID NO: 494394 - protein, 15 aa, Homo sapiens
  CDR3 for beta chain variable domain of TCR clone 247197 (TRBV20-1, TRBJ2-5)
CSAEGTGGLQETQYF

SEQ ID NO: 494395 - protein, 14 aa, Homo sapiens
  CDR3 for alpha chain variable domain of TCR clone 247198 (TRAV35, TRAJ22)
CAGHLSGSARQLTF

SEQ ID NO: 494396 - protein, 18 aa, Homo sapiens
  CDR3 for beta chain variable domain of TCR clone 247198 (TRBV7-9, TRBJ2-7)
CASSLTTSGSRTWYEQYF

SEQ ID NO: 494397 - protein, 14 aa, Homo sapiens
  CDR3 for alpha chain variable domain of TCR clone 247199 (TRAV26-1, TRAJ39)
SIVRGSRAGNMLTF

SEQ ID NO: 494398 - protein, 14 aa, Homo sapiens
  CDR3 for beta chain variable domain of TCR clone 247199 (TRBV7-9, TRBJ1-5)
CQQQGHQPNQPQHF

SEQ ID NO: 494399 - protein, 16 aa, Homo sapiens
  CDR3 for alpha chain variable domain of TCR clone 247200 (TRAV16, TRAJ42)
CARKMNYGGSQGNLIF

SEQ ID NO: 494400 - protein, 13 aa, Homo sapiens
  CDR3 for beta chain variable domain of TCR clone 247200 (TRBV20-1, TRBJ2-7)
CSASPPSSYEQYC

SEQ ID NO: 494401 - protein, 17 aa, Homo sapiens
  CDR3 for alpha chain variable domain of TCR clone 247201 (TRAV38-2/DV8, TRAJ28)
CAYRFAYSGAGSYQLTC

SEQ ID NO: 494402 - protein, 17 aa, Homo sapiens
  CDR3 for beta chain variable domain of TCR clone 247201 (TRBV4-3, TRBJ2-2)
CASSQDTSARSPGELFF

SEQ ID NO: 494403 - protein, 13 aa, Homo sapiens
  CDR3 for alpha chain variable domain of TCR clone 247202 (TRAV23/DV6, TRAJ12)
CAPRVDSSYKLIF

SEQ ID NO: 494404 - protein, 12 aa, Homo sapiens
  CDR3 for beta chain variable domain of TCR clone 247202 (TRBV7-8, TRBJ2-7)
CASSLGDREHYF

SEQ ID NO: 494405 - protein, 14 aa, Homo sapiens
  CDR3 for alpha chain variable domain of TCR clone 247203 (TRAV8-3, TRAJ27)
CAGGRNTNAGKSTF

SEQ ID NO: 494406 - protein, 16 aa, Homo sapiens
  CDR3 for beta chain variable domain of TCR clone 247203 (TRBV12-5, TRBJ2-5)
CASGPRASGNQETQYF

SEQ ID NO: 494407 - protein, 11 aa, Homo sapiens
  CDR3 for alpha chain variable domain of TCR clone 247204 (TRAV12-2, TRAJ11)
CAVNPYSTLTF

SEQ ID NO: 494408 - protein, 12 aa, Homo sapiens
  CDR3 for beta chain variable domain of TCR clone 247204 (TRBV9, TRBJ2-2)
CASSAHTGELFF

SEQ ID NO: 494409 - protein, 13 aa, Homo sapiens
  CDR3 for alpha chain variable domain of TCR clone 247205 (TRAV20, TRAJ34)
CAVRSYNTDKLIF

SEQ ID NO: 494410 - protein, 13 aa, Homo sapiens
  CDR3 for beta chain variable domain of TCR clone 247205 (TRBV12-5, TRBJ2-3)
CASGDRQSDTQYF

SEQ ID NO: 494411 - protein, 14 aa, Homo sapiens
  CDR3 for alpha chain variable domain of TCR clone 247206 (TRAV8-4, TRAJ17)
CAVSDQAAGNKLTF

SEQ ID NO: 494412 - protein, 14 aa, Homo sapiens
  CDR3 for beta chain variable domain of TCR clone 247206 (TRBV7-3, TRBJ2-2)
CASSSGGYTGELFF

SEQ ID NO: 494413 - protein, 14 aa, Homo sapiens
  CDR3 for alpha chain variable domain of TCR clone 247207 (TRAV38-1, TRAJ39)
CAFAYNNAGNMLTF

SEQ ID NO: 494414 - protein, 15 aa, Homo sapiens
  CDR3 for beta chain variable domain of TCR clone 247207 (TRBV11-3, TRBJ2-3)
CASLKDGREGDTQYF

SEQ ID NO: 494415 - protein, 15 aa, Homo sapiens
  CDR3 for alpha chain variable domain of TCR clone 247208 (TRAV2, TRAJ9)
CAVAALNTGGFKTIF

SEQ ID NO: 494416 - protein, 15 aa, Homo sapiens
  CDR3 for beta chain variable domain of TCR clone 247208 (TRBV20-1, TRBJ2-7)
CSARDRVSGMDEQYF

SEQ ID NO: 494417 - protein, 11 aa, Homo sapiens
  CDR3 for alpha chain variable domain of TCR clone 247209 (TRAV12-1, TRAJ15)
CVVNAGTALIF

SEQ ID NO: 494418 - protein, 16 aa, Homo sapiens
  CDR3 for beta chain variable domain of TCR clone 247209 (TRBV28, TRBJ2-1)
CASSSRVRDSYNEEFF

SEQ ID NO: 494419 - protein, 16 aa, Homo sapiens
  CDR3 for alpha chain variable domain of TCR clone 247210 (TRAV12-1, TRAJ53)
CVVTSVAGGSNYKLTF

SEQ ID NO: 494420 - protein, 13 aa, Homo sapiens
  CDR3 for beta chain variable domain of TCR clone 247210 (TRBV7-9, TRBJ2-3)
CASSPGSTDTQYF

SEQ ID NO: 494421 - protein, 18 aa, Homo sapiens
  CDR3 for alpha chain variable domain of TCR clone 247211 (TRAV13-1, TRAJ52)
CAAKNPNAGGTSYGKLTF

SEQ ID NO: 494422 - protein, 15 aa, Homo sapiens
  CDR3 for beta chain variable domain of TCR clone 247211 (TRBV6-1, TRBJ2-3)
CASSERGGIPGTQYF

SEQ ID NO: 494423 - protein, 12 aa, Homo sapiens
  CDR3 for alpha chain variable domain of TCR clone 247212 (TRAV12-3, TRAJ17)
CAMTLTGNTRTF

SEQ ID NO: 494424 - protein, 15 aa, Homo sapiens
  CDR3 for beta chain variable domain of TCR clone 247212 (TRBV20-1, TRBJ2-7)
CSARDRVAGMDEQYF

SEQ ID NO: 494425 - protein, 15 aa, Homo sapiens
  CDR3 for alpha chain variable domain of TCR clone 247213 (TRAV21, TRAJ24)
CAARSSTDSCGKLQF

SEQ ID NO: 494426 - protein, 13 aa, Homo sapiens
  CDR3 for beta chain variable domain of TCR clone 247213 (TRBV11-3, TRBJ2-5)
CASSSTGEETQYF

SEQ ID NO: 494427 - protein, 12 aa, Homo sapiens
  CDR3 for alpha chain variable domain of TCR clone 247214 (TRAV12-3, TRAJ20)
CAMVRGDYKLSF

SEQ ID NO: 494428 - protein, 15 aa, Homo sapiens
  CDR3 for beta chain variable domain of TCR clone 247214 (TRBV10-2, TRBJ2-6)
CASSEQGTGANVLTF

SEQ ID NO: 494429 - protein, 11 aa, Homo sapiens
  CDR3 for alpha chain variable domain of TCR clone 247215 (TRAV21, TRAJ48)
CAVYGNEKLTF

SEQ ID NO: 494430 - protein, 16 aa, Homo sapiens
  CDR3 for beta chain variable domain of TCR clone 247215 (TRBV19, TRBJ2-1)
CASSSKGTRSYNEQFF

SEQ ID NO: 494431 - protein, 14 aa, Homo sapiens
  CDR3 for alpha chain variable domain of TCR clone 247216 (TRAV20, TRAJ56)
CAVQFGVANSKLTF

SEQ ID NO: 494432 - protein, 14 aa, Homo sapiens
  CDR3 for beta chain variable domain of TCR clone 247216 (TRBV20-1, TRBJ2-7)
CSATRGRSSYEQYF

SEQ ID NO: 494433 - protein, 14 aa, Homo sapiens
  CDR3 for alpha chain variable domain of TCR clone 247217 (TRAV13-2, TRAJ29)
CAEGTFETNTPLVF

SEQ ID NO: 494434 - protein, 13 aa, Homo sapiens
  CDR3 for beta chain variable domain of TCR clone 247217 (TRBV2, TRBJ1-1)
CASNVLRNTEAFF

SEQ ID NO: 494435 - protein, 13 aa, Homo sapiens
  CDR3 for alpha chain variable domain of TCR clone 247218 (TRAV3, TRAJ21)
CAGRGPDFNKFYF

SEQ ID NO: 494436 - protein, 12 aa, Homo sapiens
  CDR3 for beta chain variable domain of TCR clone 247218 (TRBV5-1, TRBJ2-4)
LAGEWTKNIQYF

SEQ ID NO: 494437 - protein, 13 aa, Homo sapiens
  CDR3 for alpha chain variable domain of TCR clone 247219 (TRAV21, TRAJ36)
CAVIKTGANNLFF

SEQ ID NO: 494438 - protein, 13 aa, Homo sapiens
  CDR3 for beta chain variable domain of TCR clone 247219 (TRBV29-1, TRBJ2-3)
CSETRGGRDTQYF

SEQ ID NO: 494439 - protein, 13 aa, Homo sapiens
  CDR3 for alpha chain variable domain of TCR clone 247220 (TRAV12-1, TRAJ9)
CVVLNTGGFKTIF

SEQ ID NO: 494440 - protein, 14 aa, Homo sapiens
  CDR3 for beta chain variable domain of TCR clone 247220 (TRBV25-1, TRBJ1-1)
CASTHLGGNTEAFF

SEQ ID NO: 494441 - protein, 10 aa, Homo sapiens
  CDR3 for alpha chain variable domain of TCR clone 247221 (TRAV36/DV7, TRAJ49)
CALTGNQFYF

SEQ ID NO: 494442 - protein, 16 aa, Homo sapiens
  CDR3 for beta chain variable domain of TCR clone 247221 (TRBV20-1, TRBJ1-4)
CSAPGQGLLTNEKLFF

SEQ ID NO: 494443 - protein, 16 aa, Homo sapiens
  CDR3 for alpha chain variable domain of TCR clone 247222 (TRAV13-1, TRAJ18)
CAASRMRGSTLGRVYF

SEQ ID NO: 494444 - protein, 15 aa, Homo sapiens
  CDR3 for beta chain variable domain of TCR clone 247222 (TRBV29-1, TRBJ2-1)
CSVGRHALFYNEQFF

SEQ ID NO: 494445 - protein, 12 aa, Homo sapiens
  CDR3 for alpha chain variable domain of TCR clone 247223 (TRAV2, TRAJ10)
CASTGGGNKLTF

SEQ ID NO: 494446 - protein, 14 aa, Homo sapiens
  CDR3 for beta chain variable domain of TCR clone 247223 (TRBV19, TRBJ2-5)
CASSMTGQQETRYF

SEQ ID NO: 494447 - protein, 12 aa, Homo sapiens
  CDR3 for alpha chain variable domain of TCR clone 247224 (TRAV13-1, TRAJ15)
CAASQAGTALIF

SEQ ID NO: 494448 - protein, 16 aa, Homo sapiens
  CDR3 for beta chain variable domain of TCR clone 247224 (TRBV28, TRBJ1-4)
CASSPPYRGRSEKLFF

SEQ ID NO: 494449 - protein, 14 aa, Homo sapiens
  CDR3 for alpha chain variable domain of TCR clone 247225 (TRAV1-1, TRAJ23)
CAVSIYNQGGKLIF

SEQ ID NO: 494450 - protein, 16 aa, Homo sapiens
  CDR3 for beta chain variable domain of TCR clone 247225 (TRBV7-9, TRBJ1-2)
CASSLGFSSGEDGYTF

SEQ ID NO: 494451 - protein, 15 aa, Homo sapiens
  CDR3 for alpha chain variable domain of TCR clone 247226 (TRAV3, TRAJ5)
CAVRDLDTGRRALTF

SEQ ID NO: 494452 - protein, 13 aa, Homo sapiens
  CDR3 for beta chain variable domain of TCR clone 247226 (TRBV20-1, TRBJ2-5)
CSARDSKQATHYF

SEQ ID NO: 494453 - protein, 16 aa, Homo sapiens
  CDR3 for alpha chain variable domain of TCR clone 247227 (TRAV30, TRAJ24)
CGTEIVDADSWGKFQF

SEQ ID NO: 494454 - protein, 14 aa, Homo sapiens
  CDR3 for beta chain variable domain of TCR clone 247227 (TRBV5-1, TRBJ1-1)
CASSLTRRSTEAFF

SEQ ID NO: 494455 - protein, 13 aa, Homo sapiens
  CDR3 for alpha chain variable domain of TCR clone 247228 (TRAV3, TRAJ20)
CAVRSLNDYKLSF

SEQ ID NO: 494456 - protein, 13 aa, Homo sapiens
  CDR3 for beta chain variable domain of TCR clone 247228 (TRBV6-1, TRBJ2-1)
SAGMDPTNNEQFF

SEQ ID NO: 494457 - protein, 16 aa, Homo sapiens
  CDR3 for alpha chain variable domain of TCR clone 247229 (TRAV12-2, TRAJ48)
CAVNPTSNFGNEKLTF

SEQ ID NO: 494458 - protein, 14 aa, Homo sapiens
  CDR3 for beta chain variable domain of TCR clone 247229 (TRBV19, TRBJ2-1)
CASPTFVLSGEQFF

SEQ ID NO: 494459 - protein, 11 aa, Homo sapiens
  CDR3 for alpha chain variable domain of TCR clone 247230 (TRAV25, TRAJ26)
CAAHYGQNFVF

SEQ ID NO: 494460 - protein, 13 aa, Homo sapiens
  CDR3 for beta chain variable domain of TCR clone 247230 (TRBV12-4, TRBJ2-2)
CASSITGSGELFF

SEQ ID NO: 494461 - protein, 15 aa, Homo sapiens
  CDR3 for alpha chain variable domain of TCR clone 247231 (TRAV17, TRAJ16)
CATALRFSDGRKLLF

SEQ ID NO: 494462 - protein, 15 aa, Homo sapiens
  CDR3 for beta chain variable domain of TCR clone 247231 (TRBV7-9, TRBJ1-6)
CASSSPGRGNSPLHF

SEQ ID NO: 494463 - protein, 15 aa, Homo sapiens
  CDR3 for alpha chain variable domain of TCR clone 247232 (TRAV2, TRAJ20)
CAPLNSFGAGTTVTV

SEQ ID NO: 494464 - protein, 15 aa, Homo sapiens
  CDR3 for beta chain variable domain of TCR clone 247232 (TRBV9, TRBJ2-1)
CASSLAGSSYNEQFF

SEQ ID NO: 494465 - protein, 15 aa, Homo sapiens
  CDR3 for alpha chain variable domain of TCR clone 247233 (TRAV3, TRAJ5)
CAVRDLDTGRRALTF

SEQ ID NO: 494466 - protein, 18 aa, Homo sapiens
  CDR3 for beta chain variable domain of TCR clone 247233 (TRBV4-1, TRBJ1-5)
CASSQDPRGQGLNQPQHF

SEQ ID NO: 494467 - protein, 13 aa, Homo sapiens
  CDR3 for alpha chain variable domain of TCR clone 247234 (TRAV8-3, TRAJ28)
CAVGAVGSHQLTF

SEQ ID NO: 494468 - protein, 16 aa, Homo sapiens
  CDR3 for beta chain variable domain of TCR clone 247234 (TRBV7-2, TRBJ2-7)
CASRSQGRRTSSTSGR

SEQ ID NO: 494469 - protein, 13 aa, Homo sapiens
  CDR3 for alpha chain variable domain of TCR clone 247235 (TRAV29/DV5, TRAJ31)
CAVSRNNNARLMF

SEQ ID NO: 494470 - protein, 15 aa, Homo sapiens
  CDR3 for beta chain variable domain of TCR clone 247235 (TRBV6-3, TRBJ2-7)
CASSSPGTVFYEQYF

SEQ ID NO: 494471 - protein, 13 aa, Homo sapiens
  CDR3 for alpha chain variable domain of TCR clone 247236 (TRAV35, TRAJ57)
CAGSQGGSEKLVF

SEQ ID NO: 494472 - protein, 15 aa, Homo sapiens
  CDR3 for beta chain variable domain of TCR clone 247236 (TRBV5-1, TRBJ2-3)
CASSVTSGSTDTQYF

SEQ ID NO: 494473 - protein, 13 aa, Homo sapiens
  CDR3 for alpha chain variable domain of TCR clone 247237 (TRAV8-4, TRAJ34)
CAVTLYNTDKLIF

SEQ ID NO: 494474 - protein, 15 aa, Homo sapiens
  CDR3 for beta chain variable domain of TCR clone 247237 (TRBV6-3, TRBJ2-7)
CASSSPGTVFYEQYF

SEQ ID NO: 494475 - protein, 15 aa, Homo sapiens
  CDR3 for alpha chain variable domain of TCR clone 247238 (TRAV9-2, TRAJ49)
CALSPPGHTGNQFYF

SEQ ID NO: 494476 - protein, 14 aa, Homo sapiens
  CDR3 for beta chain variable domain of TCR clone 247238 (TRBV12-4, TRBJ1-1)
CASSLGTGGTEAFF

SEQ ID NO: 494477 - protein, 16 aa, Homo sapiens
  CDR3 for alpha chain variable domain of TCR clone 247239 (TRAV13-1, TRAJ28)
CAANGNSGAGSYQLTF

SEQ ID NO: 494478 - protein, 13 aa, Homo sapiens
  CDR3 for beta chain variable domain of TCR clone 247239 (TRBV27, TRBJ1-1)
CASSLSIGAEAFF

SEQ ID NO: 494479 - protein, 14 aa, Homo sapiens
  CDR3 for alpha chain variable domain of TCR clone 247240 (TRAV16, TRAJ33)
CALSAMDSNYQIIW

SEQ ID NO: 494480 - protein, 12 aa, Homo sapiens
  CDR3 for beta chain variable domain of TCR clone 247240 (TRBV5-1, TRBJ1-2)
CASSQDTYGDTF

SEQ ID NO: 494481 - protein, 13 aa, Homo sapiens
  CDR3 for alpha chain variable domain of TCR clone 247241 (TRAV38-2/DV8, TRAJ30)
CYMDGLGGDKIIF

SEQ ID NO: 494482 - protein, 15 aa, Homo sapiens
  CDR3 for beta chain variable domain of TCR clone 247241 (TRBV7-9, TRBJ2-2)
CASRPADRDTGELFF

SEQ ID NO: 494483 - protein, 18 aa, Homo sapiens
  CDR3 for alpha chain variable domain of TCR clone 247242 (TRAV21, TRAJ52)
CAVRPSPAGGNSYGNLTF

SEQ ID NO: 494484 - protein, 17 aa, Homo sapiens
  CDR3 for beta chain variable domain of TCR clone 247242 (TRBV13, TRBJ2-3)
CASSLSRVAGGRNTQYF

SEQ ID NO: 494485 - protein, 13 aa, Homo sapiens
  CDR3 for alpha chain variable domain of TCR clone 247243 (TRAV36/DV7, TRAJ57)
CAVVLGGSEKLVF

SEQ ID NO: 494486 - protein, 12 aa, Homo sapiens
  CDR3 for beta chain variable domain of TCR clone 247243 (TRBV7-2, TRBJ1-6)
CASSLSSSPLHF

SEQ ID NO: 494487 - protein, 14 aa, Homo sapiens
  CDR3 for alpha chain variable domain of TCR clone 247244 (TRAV12-2, TRAJ6)
CASKWGGGSYIPTF

SEQ ID NO: 494488 - protein, 13 aa, Homo sapiens
  CDR3 for beta chain variable domain of TCR clone 247244 (TRBV4-2, TRBJ1-1)
CASSQAGNTEAFF

SEQ ID NO: 494489 - protein, 14 aa, Homo sapiens
  CDR3 for alpha chain variable domain of TCR clone 247245 (TRAV12-1, TRAJ17)
CVVNYKAAGNKLTF

SEQ ID NO: 494490 - protein, 16 aa, Homo sapiens
  CDR3 for beta chain variable domain of TCR clone 247245 (TRBV3-1, TRBJ2-5)
CASSSQRGYAPETQYF

SEQ ID NO: 494491 - protein, 14 aa, Homo sapiens
  CDR3 for alpha chain variable domain of TCR clone 247246 (TRAV1-2, TRAJ16)
CAVNRFPDGQKLLF

SEQ ID NO: 494492 - protein, 14 aa, Homo sapiens
  CDR3 for beta chain variable domain of TCR clone 247246 (TRBV5-1, TRBJ1-1)
CASSKPGPNTEAFF

SEQ ID NO: 494493 - protein, 15 aa, Homo sapiens
  CDR3 for alpha chain variable domain of TCR clone 247247 (TRAV2, TRAJ29)
CAAGNSGKHTSCLWN

SEQ ID NO: 494494 - protein, 15 aa, Homo sapiens
  CDR3 for beta chain variable domain of TCR clone 247247 (TRBV6-3, TRBJ2-7)
CASSSPGTVFYEQYF

SEQ ID NO: 494495 - protein, 13 aa, Homo sapiens
  CDR3 for alpha chain variable domain of TCR clone 247248 (TRAV1-2, TRAJ9)
CAALNTGGFKTIF

SEQ ID NO: 494496 - protein, 14 aa, Homo sapiens
  CDR3 for beta chain variable domain of TCR clone 247248 (TRBV19, TRBJ1-4)
CASSMGRHDEKLFF

SEQ ID NO: 494497 - protein, 12 aa, Homo sapiens
  CDR3 for alpha chain variable domain of TCR clone 247249 (TRAV38-2/DV8, TRAJ21)
CAYRSNFNKFYF

SEQ ID NO: 494498 - protein, 15 aa, Homo sapiens
  CDR3 for beta chain variable domain of TCR clone 247249 (TRBV6-3, TRBJ2-7)
CASSSPGTVFYEQYF

SEQ ID NO: 494499 - protein, 13 aa, Homo sapiens
  CDR3 for alpha chain variable domain of TCR clone 247250 (TRAV21, TRAJ27)
CAQWGGNAGKSTF

SEQ ID NO: 494500 - protein, 14 aa, Homo sapiens
  CDR3 for beta chain variable domain of TCR clone 247250 (TRBV2, TRBJ2-3)
SAVGGTISTDTQYF

SEQ ID NO: 494501 - protein, 14 aa, Homo sapiens
  CDR3 for alpha chain variable domain of TCR clone 247251 (TRAV8-4, TRAJ48)
CAVSETFGNEKLTF

SEQ ID NO: 494502 - protein, 14 aa, Homo sapiens
  CDR3 for beta chain variable domain of TCR clone 247251 (TRBV13, TRBJ2-7)
CASILKGASYEQYF

SEQ ID NO: 494503 - protein, 14 aa, Homo sapiens
  CDR3 for alpha chain variable domain of TCR clone 247252 (TRAV1-2, TRAJ29)
CAVRELTSATPLVF

SEQ ID NO: 494504 - protein, 14 aa, Homo sapiens
  CDR3 for beta chain variable domain of TCR clone 247252 (TRBV3-1, TRBJ2-5)
CAISQGPDQETQYF

SEQ ID NO: 494505 - protein, 13 aa, Homo sapiens
  CDR3 for alpha chain variable domain of TCR clone 247253 (TRAV3, TRAJ27)
CAVRPLGAGKSTF

SEQ ID NO: 494506 - protein, 14 aa, Homo sapiens
  CDR3 for beta chain variable domain of TCR clone 247253 (TRBV7-7, TRBJ2-2)
CASSRDRSTGELFF

SEQ ID NO: 494507 - protein, 12 aa, Homo sapiens
  CDR3 for alpha chain variable domain of TCR clone 247254 (TRAV20, TRAJ20)
CAVRFNDYKLSF

SEQ ID NO: 494508 - protein, 14 aa, Homo sapiens
  CDR3 for beta chain variable domain of TCR clone 247254 (TRBV20-1, TRBJ2-1)
CSARIGGSANEQFF

SEQ ID NO: 494509 - protein, 16 aa, Homo sapiens
  CDR3 for alpha chain variable domain of TCR clone 247255 (TRAV30, TRAJ24)
CGTEIVDADSWGKFQF

SEQ ID NO: 494510 - protein, 13 aa, Homo sapiens
  CDR3 for beta chain variable domain of TCR clone 247255 (TRBV24-1, TRBJ1-4)
CATNNGRSEKLFF

SEQ ID NO: 494511 - protein, 11 aa, Homo sapiens
  CDR3 for alpha chain variable domain of TCR clone 247256 (TRAV17, TRAJ31)
CATDRTARLMF

SEQ ID NO: 494512 - protein, 11 aa, Homo sapiens
  CDR3 for beta chain variable domain of TCR clone 247256 (TRBV12-4, TRBJ2-3)
CASTATDTQYF

SEQ ID NO: 494513 - protein, 13 aa, Homo sapiens
  CDR3 for alpha chain variable domain of TCR clone 247257 (TRAV23/DV6, TRAJ22)
CAPWGGSARQLTF

SEQ ID NO: 494514 - protein, 14 aa, Homo sapiens
  CDR3 for beta chain variable domain of TCR clone 247257 (TRBV18, TRBJ2-7)
CASSPTSGGYEQYL

SEQ ID NO: 494515 - protein, 14 aa, Homo sapiens
  CDR3 for alpha chain variable domain of TCR clone 247258 (TRAV12-1, TRAJ17)
CVVNYKAAGNKLTF

SEQ ID NO: 494516 - protein, 12 aa, Homo sapiens
  CDR3 for beta chain variable domain of TCR clone 247258 (TRBV5-5, TRBJ2-5)
CASSYFGETQYF

SEQ ID NO: 494517 - protein, 13 aa, Homo sapiens
  CDR3 for alpha chain variable domain of TCR clone 247259 (TRAV1-2, TRAJ11)
CAVRREGYSTLTF

SEQ ID NO: 494518 - protein, 14 aa, Homo sapiens
  CDR3 for beta chain variable domain of TCR clone 247259 (TRBV19, TRBJ2-1)
CTSPTFVLSGEQFF

SEQ ID NO: 494519 - protein, 13 aa, Homo sapiens
  CDR3 for alpha chain variable domain of TCR clone 247260 (TRAV12-2, TRAJ6)
CAVNVSRKLHTYI

SEQ ID NO: 494520 - protein, 14 aa, Homo sapiens
  CDR3 for beta chain variable domain of TCR clone 247260 (TRBV11-2, TRBJ2-5)
CASSRTGGIETQYF

SEQ ID NO: 494521 - protein, 13 aa, Homo sapiens
  CDR3 for alpha chain variable domain of TCR clone 247261 (TRAV21, TRAJ57)
CAVTQGGSEKLVF

SEQ ID NO: 494522 - protein, 15 aa, Homo sapiens
  CDR3 for beta chain variable domain of TCR clone 247261 (TRBV7-2, TRBJ2-3)
CASSLAGAFIDTQYF

SEQ ID NO: 494523 - protein, 11 aa, Homo sapiens
  CDR3 for alpha chain variable domain of TCR clone 247262 (TRAV14/DV4, TRAJ9)
CAIVGGFKTIF

SEQ ID NO: 494524 - protein, 17 aa, Homo sapiens
  CDR3 for beta chain variable domain of TCR clone 247262 (TRBV20-1, TRBJ2-1)
CSAPPRLAGTRYNEQFF

SEQ ID NO: 494525 - protein, 16 aa, Homo sapiens
  CDR3 for alpha chain variable domain of TCR clone 247263 (TRAV30, TRAJ24)
CGTEIVDADSWGKFQF

SEQ ID NO: 494526 - protein, 13 aa, Homo sapiens
  CDR3 for beta chain variable domain of TCR clone 247263 (TRBV18, TRBJ1-2)
CARSASATEGYTF

SEQ ID NO: 494527 - protein, 13 aa, Homo sapiens
  CDR3 for alpha chain variable domain of TCR clone 247264 (TRAV29/DV5, TRAJ31)
CAASRNNNARLIF

SEQ ID NO: 494528 - protein, 12 aa, Homo sapiens
  CDR3 for beta chain variable domain of TCR clone 247264 (TRBV14, TRBJ2-7)
CASSLYKDEQYF

SEQ ID NO: 494529 - protein, 13 aa, Homo sapiens
  CDR3 for alpha chain variable domain of TCR clone 247265 (TRAV13-1, TRAJ5)
CAASDTGRSALTF

SEQ ID NO: 494530 - protein, 14 aa, Homo sapiens
  CDR3 for beta chain variable domain of TCR clone 247265 (TRBV19, TRBJ2-1)
CASPTFVLSGERFF

SEQ ID NO: 494531 - protein, 13 aa, Homo sapiens
  CDR3 for alpha chain variable domain of TCR clone 247266 (TRAV2, TRAJ40)
CAVVTSGTYKYIF

SEQ ID NO: 494532 - protein, 12 aa, Homo sapiens
  CDR3 for beta chain variable domain of TCR clone 247266 (TRBV6-3, TRBJ2-7)
CASSRQGYEQYF

SEQ ID NO: 494533 - protein, 16 aa, Homo sapiens
  CDR3 for alpha chain variable domain of TCR clone 247267 (TRAV3, TRAJ37)
CAVRRHGSGNTGKLIF

SEQ ID NO: 494534 - protein, 11 aa, Homo sapiens
  CDR3 for beta chain variable domain of TCR clone 247267 (TRBV10-3, TRBJ2-7)
CAISEGLEQYF

SEQ ID NO: 494535 - protein, 15 aa, Homo sapiens
  CDR3 for alpha chain variable domain of TCR clone 247268 (TRAV23/DV6, TRAJ18)
CAARYRGSTLGRLYF

SEQ ID NO: 494536 - protein, 15 aa, Homo sapiens
  CDR3 for beta chain variable domain of TCR clone 247268 (TRBV19, TRBJ2-7)
CASSPAGSGEALRYF

SEQ ID NO: 494537 - protein, 14 aa, Homo sapiens
  CDR3 for alpha chain variable domain of TCR clone 247269 (TRAV2, TRAJ37)
CAVDFTSNTGKLIF

SEQ ID NO: 494538 - protein, 14 aa, Homo sapiens
  CDR3 for beta chain variable domain of TCR clone 247269 (TRBV19, TRBJ2-2)
CASSTGQGAGELFF

SEQ ID NO: 494539 - protein, 13 aa, Homo sapiens
  CDR3 for alpha chain variable domain of TCR clone 247270 (TRAV20, TRAJ48)
CAVQGVGNEKLTF

SEQ ID NO: 494540 - protein, 19 aa, Homo sapiens
  CDR3 for beta chain variable domain of TCR clone 247270 (TRBV2, TRBJ2-2)
WASRQPGLAGGGNTGELFF

SEQ ID NO: 494541 - protein, 14 aa, Homo sapiens
  CDR3 for alpha chain variable domain of TCR clone 247271 (TRAV8-1, TRAJ15)
CAVNGQQAGTALIF

SEQ ID NO: 494542 - protein, 16 aa, Homo sapiens
  CDR3 for beta chain variable domain of TCR clone 247271 (TRBV2, TRBJ2-1)
CASRSPAGGKYNEQFF

SEQ ID NO: 494543 - protein, 11 aa, Homo sapiens
  CDR3 for alpha chain variable domain of TCR clone 247272 (TRAV2, TRAJ33)
CAVESNYQLIW

SEQ ID NO: 494544 - protein, 15 aa, Homo sapiens
  CDR3 for beta chain variable domain of TCR clone 247272 (TRBV29-1, TRBJ2-1)
CSVEAPRGSPNEQFF

SEQ ID NO: 494545 - protein, 11 aa, Homo sapiens
  CDR3 for alpha chain variable domain of TCR clone 247273 (TRAV23/DV6, TRAJ48)
CAPRWGEKLTF

SEQ ID NO: 494546 - protein, 13 aa, Homo sapiens
  CDR3 for beta chain variable domain of TCR clone 247273 (TRBV12-4, TRBJ2-7)
CASSFSQGYEQYF

SEQ ID NO: 494547 - protein, 15 aa, Homo sapiens
  CDR3 for alpha chain variable domain of TCR clone 247274 (TRAV17, TRAJ57)
CATGPSQGGSEKLVF

SEQ ID NO: 494548 - protein, 13 aa, Homo sapiens
  CDR3 for beta chain variable domain of TCR clone 247274 (TRBV15, TRBJ2-5)
CATSQIGEETQYF

SEQ ID NO: 494549 - protein, 18 aa, Homo sapiens
  CDR3 for alpha chain variable domain of TCR clone 247275 (TRAV13-1, TRAJ52)
CAAKNPNAGGTNYGKLTF

SEQ ID NO: 494550 - protein, 15 aa, Homo sapiens
  CDR3 for beta chain variable domain of TCR clone 247275 (TRBV6-1, TRBJ2-3)
CASSERGGITDTQYF

SEQ ID NO: 494551 - protein, 11 aa, Homo sapiens
  CDR3 for alpha chain variable domain of TCR clone 247276 (TRAV35, TRAJ22)
CAGPGVGQLTF

SEQ ID NO: 494552 - protein, 14 aa, Homo sapiens
  CDR3 for beta chain variable domain of TCR clone 247276 (TRBV7-8, TRBJ2-3)
CASSFPDGQDTQYF

SEQ ID NO: 494553 - protein, 13 aa, Homo sapiens
  CDR3 for alpha chain variable domain of TCR clone 247277 (TRAV12-3, TRAJ40)
CAMSARGTYKYIF

SEQ ID NO: 494554 - protein, 16 aa, Homo sapiens
  CDR3 for beta chain variable domain of TCR clone 247277 (TRBV20-1, TRBJ2-3)
CGGEAGLAGGQDTQYF

SEQ ID NO: 494555 - protein, 14 aa, Homo sapiens
  CDR3 for alpha chain variable domain of TCR clone 247278 (TRAV38-2/DV8, TRAJ30)
CAYRTLNRDDKIIF

SEQ ID NO: 494556 - protein, 15 aa, Homo sapiens
  CDR3 for beta chain variable domain of TCR clone 247278 (TRBV7-9, TRBJ1-6)
CASSSPGRGSSPLHF

SEQ ID NO: 494557 - protein, 15 aa, Homo sapiens
  CDR3 for alpha chain variable domain of TCR clone 247279 (TRAV20, TRAJ37)
CAVQARSSSTGKLIF

SEQ ID NO: 494558 - protein, 14 aa, Homo sapiens
  CDR3 for beta chain variable domain of TCR clone 247279 (TRBV19, TRBJ2-1)
CASPTFVLSGEQFF

SEQ ID NO: 494559 - protein, 23 aa, Homo sapiens
  CDR3 for alpha chain variable domain of TCR clone 247280 (TRAV26-1, TRAJ38)
CIADNAGNNHIQNPDPAVYQLRD

SEQ ID NO: 494560 - protein, 13 aa, Homo sapiens
  CDR3 for beta chain variable domain of TCR clone 247280 (TRBV20-1, TRBJ1-1)
CSARGGGNTEAFI

SEQ ID NO: 494561 - protein, 13 aa, Homo sapiens
  CDR3 for alpha chain variable domain of TCR clone 247281 (TRAV9-2, TRAJ53)
CALSGGSYYKLTF

SEQ ID NO: 494562 - protein, 17 aa, Homo sapiens
  CDR3 for beta chain variable domain of TCR clone 247281 (TRBV11-2, TRBJ2-1)
CASSLYPPGVEYNEQFF

SEQ ID NO: 494563 - protein, 17 aa, Homo sapiens
  CDR3 for alpha chain variable domain of TCR clone 247282 (TRAV8-6, TRAJ58)
CAVSSWVGETSCSRLTF

SEQ ID NO: 494564 - protein, 14 aa, Homo sapiens
  CDR3 for beta chain variable domain of TCR clone 247282 (TRBV19, TRBJ2-1)
CASPTFVLSGEQFF

SEQ ID NO: 494565 - protein, 14 aa, Homo sapiens
  CDR3 for alpha chain variable domain of TCR clone 247283 (TRAV3, TRAJ20)
CAVRDSFNDYELSF

SEQ ID NO: 494566 - protein, 15 aa, Homo sapiens
  CDR3 for beta chain variable domain of TCR clone 247283 (TRBV20-1, TRBJ2-7)
CSARDRVSGMDEQYF

SEQ ID NO: 494567 - protein, 12 aa, Homo sapiens
  CDR3 for alpha chain variable domain of TCR clone 247284 (TRAV1-1, TRAJ9)
CAVDTGGFKTIF

SEQ ID NO: 494568 - protein, 14 aa, Homo sapiens
  CDR3 for beta chain variable domain of TCR clone 247284 (TRBV15, TRBJ2-5)
CATSRGLAVETQYF

SEQ ID NO: 494569 - protein, 13 aa, Homo sapiens
  CDR3 for alpha chain variable domain of TCR clone 247285 (TRAV13-1, TRAJ49)
CAAMLYTGNQFSF

SEQ ID NO: 494570 - protein, 15 aa, Homo sapiens
  CDR3 for beta chain variable domain of TCR clone 247285 (TRBV12-4, TRBJ1-5)
CASTRGSGFGQPQHF

SEQ ID NO: 494571 - protein, 19 aa, Homo sapiens
  CDR3 for alpha chain variable domain of TCR clone 247286 (TRAV27, TRAJ53)
ASTSVQSRNSGGSNYKLTF

SEQ ID NO: 494572 - protein, 14 aa, Homo sapiens
  CDR3 for beta chain variable domain of TCR clone 247286 (TRBV11-1, TRBJ2-7)
CASTFAVPSCEQYF

SEQ ID NO: 494573 - protein, 15 aa, Homo sapiens
  CDR3 for alpha chain variable domain of TCR clone 247287 (TRAV12-1, TRAJ42)
CVVKTGGGSQGNLIF

SEQ ID NO: 494574 - protein, 15 aa, Homo sapiens
  CDR3 for beta chain variable domain of TCR clone 247287 (TRBV7-9, TRBJ1-6)
CASSSPGRGNSPLHF

SEQ ID NO: 494575 - protein, 13 aa, Homo sapiens
  CDR3 for alpha chain variable domain of TCR clone 247288 (TRAV3, TRAJ21)
CAVREPDFNKFYF

SEQ ID NO: 494576 - protein, 18 aa, Homo sapiens
  CDR3 for beta chain variable domain of TCR clone 247288 (TRBV12-4, TRBJ2-2)
CASSLVAGTRGRTGELFF

SEQ ID NO: 494577 - protein, 12 aa, Homo sapiens
  CDR3 for alpha chain variable domain of TCR clone 247289 (TRAV26-2, TRAJ21)
CILKGNFNKFYF

SEQ ID NO: 494578 - protein, 14 aa, Homo sapiens
  CDR3 for beta chain variable domain of TCR clone 247289 (TRBV7-9, TRBJ1-1)
CAATPLQSYTEAFF

SEQ ID NO: 494579 - protein, 14 aa, Homo sapiens
  CDR3 for alpha chain variable domain of TCR clone 247290 (TRAV41, TRAJ57)
CAVLLQGGSEKLVF

SEQ ID NO: 494580 - protein, 12 aa, Homo sapiens
  CDR3 for beta chain variable domain of TCR clone 247290 (TRBV10-3, TRBJ1-1)
CATMDRPPAAFF

SEQ ID NO: 494581 - protein, 12 aa, Homo sapiens
  CDR3 for alpha chain variable domain of TCR clone 247291 (TRAV4, TRAJ9)
CLVPTGGFKTIF

SEQ ID NO: 494582 - protein, 16 aa, Homo sapiens
  CDR3 for beta chain variable domain of TCR clone 247291 (TRBV10-3, TRBJ2-7)
CAISADFADRPYEQYF

SEQ ID NO: 494583 - protein, 13 aa, Homo sapiens
  CDR3 for alpha chain variable domain of TCR clone 247292 (TRAV3, TRAJ31)
CAVREGNNARLMF

SEQ ID NO: 494584 - protein, 16 aa, Homo sapiens
  CDR3 for beta chain variable domain of TCR clone 247292 (TRBV18, TRBJ1-4)
CASSPLVGDRAEKLFF

SEQ ID NO: 494585 - protein, 11 aa, Homo sapiens
  CDR3 for alpha chain variable domain of TCR clone 247293 (TRAV13-1, TRAJ43)
CAAHNNNDMRF

SEQ ID NO: 494586 - protein, 15 aa, Homo sapiens
  CDR3 for beta chain variable domain of TCR clone 247293 (TRBV5-1, TRBJ1-1)
CASSSRTGRNTEAFF

SEQ ID NO: 494587 - protein, 14 aa, Homo sapiens
  CDR3 for alpha chain variable domain of TCR clone 247294 (TRAV17, TRAJ12)
CATDREDSSYKLIF

SEQ ID NO: 494588 - protein, 16 aa, Homo sapiens
  CDR3 for beta chain variable domain of TCR clone 247294 (TRBV4-1, TRBJ2-7)
CISAPAAKNAIAEQYF

SEQ ID NO: 494589 - protein, 13 aa, Homo sapiens
  CDR3 for alpha chain variable domain of TCR clone 247295 (TRAV12-3, TRAJ58)
CAMGETSDSRLTF

SEQ ID NO: 494590 - protein, 15 aa, Homo sapiens
  CDR3 for beta chain variable domain of TCR clone 247295 (TRBV20-1, TRBJ2-5)
CSATPLTGAQETQYF

SEQ ID NO: 494591 - protein, 13 aa, Homo sapiens
  CDR3 for alpha chain variable domain of TCR clone 247296 (TRAV13-2, TRAJ13)
CAERPGGYQKVTF

SEQ ID NO: 494592 - protein, 15 aa, Homo sapiens
  CDR3 for beta chain variable domain of TCR clone 247296 (TRBV11-3, TRBJ2-7)
CASSPGPASSYEQFF

SEQ ID NO: 494593 - protein, 10 aa, Homo sapiens
  CDR3 for alpha chain variable domain of TCR clone 247297 (TRAV12-2, TRAJ22)
CAVNETQLTF

SEQ ID NO: 494594 - protein, 14 aa, Homo sapiens
  CDR3 for beta chain variable domain of TCR clone 247297 (TRBV19, TRBJ2-1)
CASPTFVLSGEQFF

SEQ ID NO: 494595 - protein, 12 aa, Homo sapiens
  CDR3 for alpha chain variable domain of TCR clone 247298 (TRAV8-3, TRAJ20)
CAVGANDYRLSF

SEQ ID NO: 494596 - protein, 16 aa, Homo sapiens
  CDR3 for beta chain variable domain of TCR clone 247298 (TRBV19, TRBJ2-2)
CASRSPGTGATGELLF

SEQ ID NO: 494597 - protein, 14 aa, Homo sapiens
  CDR3 for alpha chain variable domain of TCR clone 247299 (TRAV2, TRAJ23)
CAVASTRQGGKLIF

SEQ ID NO: 494598 - protein, 14 aa, Homo sapiens
  CDR3 for beta chain variable domain of TCR clone 247299 (TRBV7-9, TRBJ2-5)
CASSLVGGEETQYF

SEQ ID NO: 494599 - protein, 14 aa, Homo sapiens
  CDR3 for alpha chain variable domain of TCR clone 247300 (TRAV38-1, TRAJ43)
CAFMKHNNNNDMRF

SEQ ID NO: 494600 - protein, 14 aa, Homo sapiens
  CDR3 for beta chain variable domain of TCR clone 247300 (TRBV7-2, TRBJ2-3)
CASSQTGSSYTQYF

SEQ ID NO: 494601 - protein, 17 aa, Homo sapiens
  CDR3 for alpha chain variable domain of TCR clone 247301 (TRAV8-4, TRAJ53)
CAVSGPRSEGSNYKLKF

SEQ ID NO: 494602 - protein, 14 aa, Homo sapiens
  CDR3 for beta chain variable domain of TCR clone 247301 (TRBV7-3, TRBJ2-1)
CASSALAGGPEQFF

SEQ ID NO: 494603 - protein, 12 aa, Homo sapiens
  CDR3 for alpha chain variable domain of TCR clone 247302 (TRAV27, TRAJ13)
CAGVRRYQKVTF

SEQ ID NO: 494604 - protein, 16 aa, Homo sapiens
  CDR3 for beta chain variable domain of TCR clone 247302 (TRBV28, TRBJ2-1)
CASSSSYSGSLNEQFF

SEQ ID NO: 494605 - protein, 16 aa, Homo sapiens
  CDR3 for alpha chain variable domain of TCR clone 247303 (TRAV21, TRAJ58)
CAVRGDRETSGSRLAF

SEQ ID NO: 494606 - protein, 13 aa, Homo sapiens
  CDR3 for beta chain variable domain of TCR clone 247303 (TRBV19, TRBJ1-3)
CASRLSLGNTIYF

SEQ ID NO: 494607 - protein, 16 aa, Homo sapiens
  CDR3 for alpha chain variable domain of TCR clone 247304 (TRAV12-2, TRAJ45)
CAVIFLSGGGADGLTF

SEQ ID NO: 494608 - protein, 19 aa, Homo sapiens
  CDR3 for beta chain variable domain of TCR clone 247304 (TRBV28, TRBJ2-4)
CASSFQPGGPAHPKNIQYF

SEQ ID NO: 494609 - protein, 13 aa, Homo sapiens
  CDR3 for alpha chain variable domain of TCR clone 247305 (TRAV27, TRAJ3)
ASLRGSSASKIIF

SEQ ID NO: 494610 - protein, 20 aa, Homo sapiens
  CDR3 for beta chain variable domain of TCR clone 247305 (TRBV7-8, TRBJ2-2)
CASSHLFPGPTIHITGELFF

SEQ ID NO: 494611 - protein, 13 aa, Homo sapiens
  CDR3 for alpha chain variable domain of TCR clone 247306 (TRAV3, TRAJ26)
CAVRGAEGQNFVF

SEQ ID NO: 494612 - protein, 13 aa, Homo sapiens
  CDR3 for beta chain variable domain of TCR clone 247306 (TRBV7-9, TRBJ1-2)
CASSLKQNYGYTF

SEQ ID NO: 494613 - protein, 14 aa, Homo sapiens
  CDR3 for alpha chain variable domain of TCR clone 247307 (TRAV23/DV6, TRAJ22)
CAASVSGSARQLTF

SEQ ID NO: 494614 - protein, 16 aa, Homo sapiens
  CDR3 for beta chain variable domain of TCR clone 247307 (TRBV19, TRBJ2-2)
CASSFPVQGLAGELFF

SEQ ID NO: 494615 - protein, 14 aa, Homo sapiens
  CDR3 for alpha chain variable domain of TCR clone 247308 (TRAV1-2, TRAJ16)
CAVNRFSDGQKLLF

SEQ ID NO: 494616 - protein, 11 aa, Homo sapiens
  CDR3 for beta chain variable domain of TCR clone 247308 (TRBV29-1, TRBJ2-5)
CSEDRTGTLYF

SEQ ID NO: 494617 - protein, 12 aa, Homo sapiens
  CDR3 for alpha chain variable domain of TCR clone 247309 (TRAV22, TRAJ22)
CAPGGSARQLTF

SEQ ID NO: 494618 - protein, 15 aa, Homo sapiens
  CDR3 for beta chain variable domain of TCR clone 247309 (TRBV15, TRBJ1-6)
CATSGALIHPSTLGT

SEQ ID NO: 494619 - protein, 11 aa, Homo sapiens
  CDR3 for alpha chain variable domain of TCR clone 247310 (TRAV8-6, TRAJ34)
CAVWKTDKLIF

SEQ ID NO: 494620 - protein, 14 aa, Homo sapiens
  CDR3 for beta chain variable domain of TCR clone 247310 (TRBV4-1, TRBJ2-2)
CASSQAVNTGELFF

SEQ ID NO: 494621 - protein, 12 aa, Homo sapiens
  CDR3 for alpha chain variable domain of TCR clone 247311 (TRAV26-1, TRAJ36)
CIVRVRADNLFF

SEQ ID NO: 494622 - protein, 13 aa, Homo sapiens
  CDR3 for beta chain variable domain of TCR clone 247311 (TRBV11-2, TRBJ2-5)
CASSLGPSETQYF

SEQ ID NO: 494623 - protein, 14 aa, Homo sapiens
  CDR3 for alpha chain variable domain of TCR clone 247312 (TRAV9-2, TRAJ39)
CALYIYNAGNMLTF

SEQ ID NO: 494624 - protein, 13 aa, Homo sapiens
  CDR3 for beta chain variable domain of TCR clone 247312 (TRBV27, TRBJ2-7)
CASSFLSSYEQYF

SEQ ID NO: 494625 - protein, 13 aa, Homo sapiens
  CDR3 for alpha chain variable domain of TCR clone 247313 (TRAV21, TRAJ57)
CALTQGGPEKLVF

SEQ ID NO: 494626 - protein, 16 aa, Homo sapiens
  CDR3 for beta chain variable domain of TCR clone 247313 (TRBV29-1, TRBJ2-7)
CSVEDAEDGTAYEQYF

SEQ ID NO: 494627 - protein, 13 aa, Homo sapiens
  CDR3 for alpha chain variable domain of TCR clone 247314 (TRAV3, TRAJ27)
CAVRPLGAGTSTF

SEQ ID NO: 494628 - protein, 15 aa, Homo sapiens
  CDR3 for beta chain variable domain of TCR clone 247314 (TRBV20-1, TRBJ2-7)
CSARDRVSGMDEQYF

SEQ ID NO: 494629 - protein, 12 aa, Homo sapiens
  CDR3 for alpha chain variable domain of TCR clone 247315 (TRAV21, TRAJ31)
CAVWGNNARLMF

SEQ ID NO: 494630 - protein, 16 aa, Homo sapiens
  CDR3 for beta chain variable domain of TCR clone 247315 (TRBV27, TRBJ2-5)
CASSYGPGDQKETQYF

SEQ ID NO: 494631 - protein, 14 aa, Homo sapiens
  CDR3 for alpha chain variable domain of TCR clone 247316 (TRAV35, TRAJ33)
CAGSSQDSNYQLIW

SEQ ID NO: 494632 - protein, 15 aa, Homo sapiens
  CDR3 for beta chain variable domain of TCR clone 247316 (TRBV5-1, TRBJ1-4)
FAPAAWRDGNEKLFF

SEQ ID NO: 494633 - protein, 14 aa, Homo sapiens
  CDR3 for alpha chain variable domain of TCR clone 247317 (TRAV1-2, TRAJ8)
CAVREDTGFQKLVF

SEQ ID NO: 494634 - protein, 15 aa, Homo sapiens
  CDR3 for beta chain variable domain of TCR clone 247317 (TRBV28, TRBJ2-7)
CASSLLAGARSEQYF

SEQ ID NO: 494635 - protein, 20 aa, Homo sapiens
  CDR3 for alpha chain variable domain of TCR clone 247318 (TRAV12-1, TRAJ42)
SSVIQPPTSVKGGSQGNLIF

SEQ ID NO: 494636 - protein, 15 aa, Homo sapiens
  CDR3 for beta chain variable domain of TCR clone 247318 (TRBV20-1, TRBJ2-7)
CSAESGTRGAYEQYF

SEQ ID NO: 494637 - protein, 16 aa, Homo sapiens
  CDR3 for alpha chain variable domain of TCR clone 247319 (TRAV8-6, TRAJ39)
CAVMLMNNNAGNMLTF

SEQ ID NO: 494638 - protein, 16 aa, Homo sapiens
  CDR3 for beta chain variable domain of TCR clone 247319 (TRBV15, TRBJ2-5)
CATSRDLEAAQETQYF

SEQ ID NO: 494639 - protein, 12 aa, Homo sapiens
  CDR3 for alpha chain variable domain of TCR clone 247320 (TRAV2, TRAJ26)
CAGSPGRLWSEF

SEQ ID NO: 494640 - protein, 16 aa, Homo sapiens
  CDR3 for beta chain variable domain of TCR clone 247320 (TRBV13, TRBJ2-2)
CTSSPRTGEHTGELFF

SEQ ID NO: 494641 - protein, 14 aa, Homo sapiens
  CDR3 for alpha chain variable domain of TCR clone 247321 (TRAV21, TRAJ35)
CAVMPIGFGNVLHC

SEQ ID NO: 494642 - protein, 13 aa, Homo sapiens
  CDR3 for beta chain variable domain of TCR clone 247321 (TRBV19, TRBJ1-1)
CASSITGESEAFF

SEQ ID NO: 494643 - protein, 14 aa, Homo sapiens
  CDR3 for alpha chain variable domain of TCR clone 247322 (TRAV1-2, TRAJ16)
CAVNRFSDGQKLLF

SEQ ID NO: 494644 - protein, 14 aa, Homo sapiens
  CDR3 for beta chain variable domain of TCR clone 247322 (TRBV7-3, TRBJ1-1)
CASGLGTGYTEAFF

SEQ ID NO: 494645 - protein, 13 aa, Homo sapiens
  CDR3 for alpha chain variable domain of TCR clone 247323 (TRAV13-1, TRAJ39)
CAASIWAGDMLTF

SEQ ID NO: 494646 - protein, 15 aa, Homo sapiens
  CDR3 for beta chain variable domain of TCR clone 247323 (TRBV7-9, TRBJ1-1)
CASSLLEEGGTEAFF

SEQ ID NO: 494647 - protein, 12 aa, Homo sapiens
  CDR3 for alpha chain variable domain of TCR clone 247324 (TRAV21, TRAJ23)
CAVMLQGGKLNF

SEQ ID NO: 494648 - protein, 14 aa, Homo sapiens
  CDR3 for beta chain variable domain of TCR clone 247324 (TRBV7-9, TRBJ1-4)
CAITEGEANEKLFF

SEQ ID NO: 494649 - protein, 17 aa, Homo sapiens
  CDR3 for alpha chain variable domain of TCR clone 247325 (TRAV13-1, TRAJ31)
CAPRDRLMFGDGTQLVV

SEQ ID NO: 494650 - protein, 15 aa, Homo sapiens
  CDR3 for beta chain variable domain of TCR clone 247325 (TRBV5-1, TRBJ2-3)
CASSVTSGSTDTQYF

SEQ ID NO: 494651 - protein, 15 aa, Homo sapiens
  CDR3 for alpha chain variable domain of TCR clone 247326 (TRAV8-3, TRAJ45)
CAASYSGGGADGVTF

SEQ ID NO: 494652 - protein, 14 aa, Homo sapiens
  CDR3 for beta chain variable domain of TCR clone 247326 (TRBV11-2, TRBJ2-3)
CASSRLARTDTQYF

SEQ ID NO: 494653 - protein, 13 aa, Homo sapiens
  CDR3 for alpha chain variable domain of TCR clone 247327 (TRAV38-1, TRAJ48)
CAFMKQGNEKLTF

SEQ ID NO: 494654 - protein, 18 aa, Homo sapiens
  CDR3 for beta chain variable domain of TCR clone 247327 (TRBV12-4, TRBJ1-3)
CASSLSRGGAFSGNTTYF

SEQ ID NO: 494655 - protein, 16 aa, Homo sapiens
  CDR3 for alpha chain variable domain of TCR clone 247328 (TRAV26-1, TRAJ38)
CIVRVELGGNNRKMIW

SEQ ID NO: 494656 - protein, 14 aa, Homo sapiens
  CDR3 for beta chain variable domain of TCR clone 247328 (TRBV5-1, TRBJ2-3)
CASSPGLAADTQYF

SEQ ID NO: 494657 - protein, 19 aa, Homo sapiens
  CDR3 for alpha chain variable domain of TCR clone 247329 (TRAV12-1, TRAJ31)
SLLIRDSKLSDSATPRLMF

SEQ ID NO: 494658 - protein, 14 aa, Homo sapiens
  CDR3 for beta chain variable domain of TCR clone 247329 (TRBV6-3, TRBJ2-1)
CASSAGQFYNEQFF

SEQ ID NO: 494659 - protein, 16 aa, Homo sapiens
  CDR3 for alpha chain variable domain of TCR clone 247330 (TRAV17, TRAJ53)
CATDALSGGSNDKLTF

SEQ ID NO: 494660 - protein, 12 aa, Homo sapiens
  CDR3 for beta chain variable domain of TCR clone 247330 (TRBV5-1, TRBJ2-7)
CASSFRGYEQYF

SEQ ID NO: 494661 - protein, 14 aa, Homo sapiens
  CDR3 for alpha chain variable domain of TCR clone 247331 (TRAV9-2, TRAJ39)
CAHYIYNAGNMLTF

SEQ ID NO: 494662 - protein, 13 aa, Homo sapiens
  CDR3 for beta chain variable domain of TCR clone 247331 (TRBV7-2, TRBJ2-2)
CASSLAVTGELFF

SEQ ID NO: 494663 - protein, 12 aa, Homo sapiens
  CDR3 for alpha chain variable domain of TCR clone 247332 (TRAV12-2, TRAJ49)
CAVLNTGNQFYF

SEQ ID NO: 494664 - protein, 14 aa, Homo sapiens
  CDR3 for beta chain variable domain of TCR clone 247332 (TRBV5-1, TRBJ2-7)
CASSRGESLYEQYF

SEQ ID NO: 494665 - protein, 13 aa, Homo sapiens
  CDR3 for alpha chain variable domain of TCR clone 247333 (TRAV8-4, TRAJ30)
CAVNVNRDDKIIF

SEQ ID NO: 494666 - protein, 13 aa, Homo sapiens
  CDR3 for beta chain variable domain of TCR clone 247333 (TRBV3-1, TRBJ2-2)
CASLARGSGELFF

SEQ ID NO: 494667 - protein, 16 aa, Homo sapiens
  CDR3 for alpha chain variable domain of TCR clone 247334 (TRAV30, TRAJ24)
CGTEIVDAHSWGKFQF

SEQ ID NO: 494668 - protein, 16 aa, Homo sapiens
  CDR3 for beta chain variable domain of TCR clone 247334 (TRBV5-1, TRBJ2-3)
CASSLGLAVYTDTQYF

SEQ ID NO: 494669 - protein, 14 aa, Homo sapiens
  CDR3 for alpha chain variable domain of TCR clone 247335 (TRAV12-1, TRAJ17)
CVVNYKAAGNKLTF

SEQ ID NO: 494670 - protein, 16 aa, Homo sapiens
  CDR3 for beta chain variable domain of TCR clone 247335 (TRBV12-4, TRBJ2-5)
CASSFFVRGRQETQYF

SEQ ID NO: 494671 - protein, 14 aa, Homo sapiens
  CDR3 for alpha chain variable domain of TCR clone 247336 (TRAV12-3, TRAJ57)
CARALEGGSEKLVF

SEQ ID NO: 494672 - protein, 12 aa, Homo sapiens
  CDR3 for beta chain variable domain of TCR clone 247336 (TRBV11-2, TRBJ2-2)
CASSLGGGELFF

SEQ ID NO: 494673 - protein, 14 aa, Homo sapiens
  CDR3 for alpha chain variable domain of TCR clone 247337 (TRAV1-2, TRAJ16)
CAVIRFSDGQKLLF

SEQ ID NO: 494674 - protein, 13 aa, Homo sapiens
  CDR3 for beta chain variable domain of TCR clone 247337 (TRBV6-5, TRBJ1-1)
QTSVYFCALRAFF

SEQ ID NO: 494675 - protein, 16 aa, Homo sapiens
  CDR3 for alpha chain variable domain of TCR clone 247338 (TRAV3, TRAJ37)
CAVRGKGSGNTGKLIF

SEQ ID NO: 494676 - protein, 20 aa, Homo sapiens
  CDR3 for beta chain variable domain of TCR clone 247338 (TRBV7-8, TRBJ2-2)
CASSHLFPGPTIHLTGELFF

SEQ ID NO: 494677 - protein, 13 aa, Homo sapiens
  CDR3 for alpha chain variable domain of TCR clone 247339 (TRAV3, TRAJ27)
CAVRPLGAGRSPF

SEQ ID NO: 494678 - protein, 13 aa, Homo sapiens
  CDR3 for beta chain variable domain of TCR clone 247339 (TRBV7-9, TRBJ2-3)
CASSPGSTDTQYF

SEQ ID NO: 494679 - protein, 17 aa, Homo sapiens
  CDR3 for alpha chain variable domain of TCR clone 247340 (TRAV23/DV6, TRAJ57)
CAASSTLSQGGSEKLVF

SEQ ID NO: 494680 - protein, 12 aa, Homo sapiens
  CDR3 for beta chain variable domain of TCR clone 247340 (TRBV11-2, TRBJ2-2)
CASSLGGGELFF

SEQ ID NO: 494681 - protein, 15 aa, Homo sapiens
  CDR3 for alpha chain variable domain of TCR clone 247341 (TRAV8-3, TRAJ27)
CAVGPSKTNAGKSTF

SEQ ID NO: 494682 - protein, 13 aa, Homo sapiens
  CDR3 for beta chain variable domain of TCR clone 247341 (TRBV11-2, TRBJ2-5)
CASGHGAKETQYF

SEQ ID NO: 494683 - protein, 16 aa, Homo sapiens
  CDR3 for alpha chain variable domain of TCR clone 247342 (TRAV12-1, TRAJ12)
CVVNILLMDSSYKLIF

SEQ ID NO: 494684 - protein, 13 aa, Homo sapiens
  CDR3 for beta chain variable domain of TCR clone 247342 (TRBV11-2, TRBJ2-1)
CASSSEAYNEQFF

SEQ ID NO: 494685 - protein, 12 aa, Homo sapiens
  CDR3 for alpha chain variable domain of TCR clone 247343 (TRAV3, TRAJ20)
CAVRDGDYKLSF

SEQ ID NO: 494686 - protein, 18 aa, Homo sapiens
  CDR3 for beta chain variable domain of TCR clone 247343 (TRBV11-2, TRBJ2-3)
CASGLGGASRGAPNTQYF

SEQ ID NO: 494687 - protein, 16 aa, Homo sapiens
  CDR3 for alpha chain variable domain of TCR clone 247344 (TRAV12-3, TRAJ53)
CAMSPGSGGSNYKLTF

SEQ ID NO: 494688 - protein, 15 aa, Homo sapiens
  CDR3 for beta chain variable domain of TCR clone 247344 (TRBV7-8, TRBJ2-1)
CASSLAGGLYNEQFF

SEQ ID NO: 494689 - protein, 14 aa, Homo sapiens
  CDR3 for alpha chain variable domain of TCR clone 247345 (TRAV8-3, TRAJ22)
CAFVVSGSARQLTF

SEQ ID NO: 494690 - protein, 13 aa, Homo sapiens
  CDR3 for beta chain variable domain of TCR clone 247345 (TRBV4-2, TRBJ2-5)
CASSQGGWQTQYF

SEQ ID NO: 494691 - protein, 16 aa, Homo sapiens
  CDR3 for alpha chain variable domain of TCR clone 247346 (TRAV12-3, TRAJ53)
CAMSPGSGGSNYKLTF

SEQ ID NO: 494692 - protein, 12 aa, Homo sapiens
  CDR3 for beta chain variable domain of TCR clone 247346 (TRBV11-2, TRBJ2-2)
CASSLGGGEQFF

SEQ ID NO: 494693 - protein, 14 aa, Homo sapiens
  CDR3 for alpha chain variable domain of TCR clone 247347 (TRAV38-1, TRAJ27)
CAFIHNTNAGKSTF

SEQ ID NO: 494694 - protein, 14 aa, Homo sapiens
  CDR3 for beta chain variable domain of TCR clone 247347 (TRBV25-1, TRBJ1-1)
CASTHLGGNTEAFF

SEQ ID NO: 494695 - protein, 13 aa, Homo sapiens
  CDR3 for alpha chain variable domain of TCR clone 247348 (TRAV29/DV5, TRAJ44)
CAASTGTASKLTL

SEQ ID NO: 494696 - protein, 11 aa, Homo sapiens
  CDR3 for beta chain variable domain of TCR clone 247348 (TRBV12-4, TRBJ2-3)
CASTATDTQYF

SEQ ID NO: 494697 - protein, 14 aa, Homo sapiens
  CDR3 for alpha chain variable domain of TCR clone 247349 (TRAV12-2, TRAJ45)
CAGNIGGGADGPTF

SEQ ID NO: 494698 - protein, 17 aa, Homo sapiens
  CDR3 for beta chain variable domain of TCR clone 247349 (TRBV7-8, TRBJ2-6)
CASSAGTGGAGANVLTF

SEQ ID NO: 494699 - protein, 13 aa, Homo sapiens
  CDR3 for alpha chain variable domain of TCR clone 247350 (TRAV12-2, TRAJ18)
CAVRGSTLGRLYF

SEQ ID NO: 494700 - protein, 14 aa, Homo sapiens
  CDR3 for beta chain variable domain of TCR clone 247350 (TRBV20-1, TRBJ1-1)
CSAQTRIGGTEAFF

SEQ ID NO: 494701 - protein, 13 aa, Homo sapiens
  CDR3 for alpha chain variable domain of TCR clone 247351 (TRAV13-1, TRAJ24)
CAASDGSWGKLQF

SEQ ID NO: 494702 - protein, 16 aa, Homo sapiens
  CDR3 for beta chain variable domain of TCR clone 247351 (TRBV5-1, TRBJ2-2)
CASSSRTGGRTGELFF

SEQ ID NO: 494703 - protein, 13 aa, Homo sapiens
  CDR3 for alpha chain variable domain of TCR clone 247352 (TRAV12-2, TRAJ9)
CAVRWAGGFKTIF

SEQ ID NO: 494704 - protein, 15 aa, Homo sapiens
  CDR3 for beta chain variable domain of TCR clone 247352 (TRBV5-1, TRBJ1-4)
GASSLTADSDEKLFS

SEQ ID NO: 494705 - protein, 14 aa, Homo sapiens
  CDR3 for alpha chain variable domain of TCR clone 247353 (TRAV8-2, TRAJ23)
CVVSDDNQGGKLIF

SEQ ID NO: 494706 - protein, 16 aa, Homo sapiens
  CDR3 for beta chain variable domain of TCR clone 247353 (TRBV4-3, TRBJ2-5)
CASSQELVGSQETQYF

SEQ ID NO: 494707 - protein, 13 aa, Homo sapiens
  CDR3 for alpha chain variable domain of TCR clone 247354 (TRAV21, TRAJ27)
CAARPSNAGKSTF

SEQ ID NO: 494708 - protein, 20 aa, Homo sapiens
  CDR3 for beta chain variable domain of TCR clone 247354 (TRBV7-8, TRBJ2-2)
CASGHLFPGPTIHITGELFF

SEQ ID NO: 494709 - protein, 15 aa, Homo sapiens
  CDR3 for alpha chain variable domain of TCR clone 247355 (TRAV17, TRAJ16)
CATALRFSDGPKLLF

SEQ ID NO: 494710 - protein, 15 aa, Homo sapiens
  CDR3 for beta chain variable domain of TCR clone 247355 (TRBV13, TRBJ1-5)
CASSFGQGGVQPQHF

SEQ ID NO: 494711 - protein, 14 aa, Homo sapiens
  CDR3 for alpha chain variable domain of TCR clone 247356 (TRAV1-2, TRAJ8)
CAVREDTGFQKLVF

SEQ ID NO: 494712 - protein, 14 aa, Homo sapiens
  CDR3 for beta chain variable domain of TCR clone 247356 (TRBV28, TRBJ2-7)
CASSYTGWGYEQYF

SEQ ID NO: 494713 - protein, 10 aa, Homo sapiens
  CDR3 for alpha chain variable domain of TCR clone 247357 (TRAV27, TRAJ58)
SETSGSRLTF

SEQ ID NO: 494714 - protein, 14 aa, Homo sapiens
  CDR3 for beta chain variable domain of TCR clone 247357 (TRBV7-9, TRBJ2-1)
CASSPRDSLYEQFF

SEQ ID NO: 494715 - protein, 14 aa, Homo sapiens
  CDR3 for alpha chain variable domain of TCR clone 247358 (TRAV1-2, TRAJ16)
CAVNRFSDGQKLLF

SEQ ID NO: 494716 - protein, 13 aa, Homo sapiens
  CDR3 for beta chain variable domain of TCR clone 247358 (TRBV11-2, TRBJ2-1)
CARSLGLAGGRFF

SEQ ID NO: 494717 - protein, 11 aa, Homo sapiens
  CDR3 for alpha chain variable domain of TCR clone 247359 (TRAV2, TRAJ13)
CASGGYQKVTF

SEQ ID NO: 494718 - protein, 14 aa, Homo sapiens
  CDR3 for beta chain variable domain of TCR clone 247359 (TRBV13, TRBJ2-1)
CASSPRPRYNEQFF

SEQ ID NO: 494719 - protein, 14 aa, Homo sapiens
  CDR3 for alpha chain variable domain of TCR clone 247360 (TRAV21, TRAJ35)
CAVMPIGFGNVLHC

SEQ ID NO: 494720 - protein, 12 aa, Homo sapiens
  CDR3 for beta chain variable domain of TCR clone 247360 (TRBV7-9, TRBJ2-7)
CASSIKREAHYF

SEQ ID NO: 494721 - protein, 14 aa, Homo sapiens
  CDR3 for alpha chain variable domain of TCR clone 247361 (TRAV12-1, TRAJ33)
CVVNPEDSNYQLIW

SEQ ID NO: 494722 - protein, 11 aa, Homo sapiens
  CDR3 for beta chain variable domain of TCR clone 247361 (TRBV7-6, TRBJ2-1)
CASSNYGEQCF

SEQ ID NO: 494723 - protein, 15 aa, Homo sapiens
  CDR3 for alpha chain variable domain of TCR clone 247362 (TRAV2, TRAJ24)
CAVEVLTDSWGKFQF

SEQ ID NO: 494724 - protein, 16 aa, Homo sapiens
  CDR3 for beta chain variable domain of TCR clone 247362 (TRBV19, TRBJ2-1)
CASSMGSGRRSSSSGH

SEQ ID NO: 494725 - protein, 18 aa, Homo sapiens
  CDR3 for alpha chain variable domain of TCR clone 247363 (TRAV13-1, TRAJ52)
CAAKNPNAGGTSYGRPTF

SEQ ID NO: 494726 - protein, 15 aa, Homo sapiens
  CDR3 for beta chain variable domain of TCR clone 247363 (TRBV6-1, TRBJ2-3)
CASSERGGITDTQYF

SEQ ID NO: 494727 - protein, 14 aa, Homo sapiens
  CDR3 for alpha chain variable domain of TCR clone 247364 (TRAV20, TRAJ20)
CTVRRGYNDYKLSF

SEQ ID NO: 494728 - protein, 13 aa, Homo sapiens
  CDR3 for beta chain variable domain of TCR clone 247364 (TRBV19, TRBJ2-5)
CASSETAPETQYF

SEQ ID NO: 494729 - protein, 12 aa, Homo sapiens
  CDR3 for alpha chain variable domain of TCR clone 247365 (TRAV17, TRAJ12)
CATLRSSYKLIF

SEQ ID NO: 494730 - protein, 16 aa, Homo sapiens
  CDR3 for beta chain variable domain of TCR clone 247365 (TRBV28, TRBJ2-7)
CASSLFVETGGHEQYF

SEQ ID NO: 494731 - protein, 14 aa, Homo sapiens
  CDR3 for alpha chain variable domain of TCR clone 247366 (TRAV21, TRAJ28)
CAVGSGAGSYQLTF

SEQ ID NO: 494732 - protein, 11 aa, Homo sapiens
  CDR3 for beta chain variable domain of TCR clone 247366 (TRBV29-1, TRBJ2-5)
CSEDRTGTQYF

SEQ ID NO: 494733 - protein, 15 aa, Homo sapiens
  CDR3 for alpha chain variable domain of TCR clone 247367 (TRAV3, TRAJ5)
CAVRDRKTGRKALTF

SEQ ID NO: 494734 - protein, 15 aa, Homo sapiens
  CDR3 for beta chain variable domain of TCR clone 247367 (TRBV7-8, TRBJ2-1)
RASSLADSLYNEQFF

SEQ ID NO: 494735 - protein, 15 aa, Homo sapiens
  CDR3 for alpha chain variable domain of TCR clone 247368 (TRAV17, TRAJ57)
CATGLSQGGSEKLVF

SEQ ID NO: 494736 - protein, 15 aa, Homo sapiens
  CDR3 for beta chain variable domain of TCR clone 247368 (TRBV25-1, TRBJ1-4)
CASSPGDSTNEKLFF

SEQ ID NO: 494737 - protein, 10 aa, Homo sapiens
  CDR3 for alpha chain variable domain of TCR clone 247369 (TRAV38-2/DV8, TRAJ40)
CASGTYKYIF

SEQ ID NO: 494738 - protein, 14 aa, Homo sapiens
  CDR3 for beta chain variable domain of TCR clone 247369 (TRBV7-9, TRBJ2-1)
CASSPRDSLYDQFF

SEQ ID NO: 494739 - protein, 17 aa, Homo sapiens
  CDR3 for alpha chain variable domain of TCR clone 247370 (TRAV3, TRAJ6)
CALRDGPRAGGGYIPTF

SEQ ID NO: 494740 - protein, 14 aa, Homo sapiens
  CDR3 for beta chain variable domain of TCR clone 247370 (TRBV7-2, TRBJ2-7)
CASSPKTSFYEQYF

SEQ ID NO: 494741 - protein, 13 aa, Homo sapiens
  CDR3 for alpha chain variable domain of TCR clone 247371 (TRAV27, TRAJ49)
CAPRPYPSNQFYF

SEQ ID NO: 494742 - protein, 16 aa, Homo sapiens
  CDR3 for beta chain variable domain of TCR clone 247371 (TRBV4-1, TRBJ1-2)
CASSQDAGQVLYGYTF

SEQ ID NO: 494743 - protein, 12 aa, Homo sapiens
  CDR3 for alpha chain variable domain of TCR clone 247372 (TRAV17, TRAJ12)
CATLRSSYKLIF

SEQ ID NO: 494744 - protein, 14 aa, Homo sapiens
  CDR3 for beta chain variable domain of TCR clone 247372 (TRBV7-9, TRBJ2-1)
CASSLGVADNEQFF

SEQ ID NO: 494745 - protein, 15 aa, Homo sapiens
  CDR3 for alpha chain variable domain of TCR clone 247373 (TRAV23/DV6, TRAJ44)
CAARLLTGTARKLTF

SEQ ID NO: 494746 - protein, 15 aa, Homo sapiens
  CDR3 for beta chain variable domain of TCR clone 247373 (TRBV12-4, TRBJ1-5)
CASTLNRVSNQPQHF

SEQ ID NO: 494747 - protein, 14 aa, Homo sapiens
  CDR3 for alpha chain variable domain of TCR clone 247374 (TRAV16, TRAJ17)
CAPRIKAAGNKLTF

SEQ ID NO: 494748 - protein, 17 aa, Homo sapiens
  CDR3 for beta chain variable domain of TCR clone 247374 (TRBV7-2, TRBJ2-3)
CASSSYSGTRRADTHYF

SEQ ID NO: 494749 - protein, 15 aa, Homo sapiens
  CDR3 for alpha chain variable domain of TCR clone 247375 (TRAV3, TRAJ20)
CAVRDIKLSDYKLSF

SEQ ID NO: 494750 - protein, 14 aa, Homo sapiens
  CDR3 for beta chain variable domain of TCR clone 247375 (TRBV7-6, TRBJ2-3)
CASSLGTVTDTQYF

SEQ ID NO: 494751 - protein, 14 aa, Homo sapiens
  CDR3 for alpha chain variable domain of TCR clone 247376 (TRAV12-1, TRAJ17)
CVVNYKAAGNKLTF

SEQ ID NO: 494752 - protein, 14 aa, Homo sapiens
  CDR3 for beta chain variable domain of TCR clone 247376 (TRBV7-9, TRBJ1-2)
CASSLVQINYGYTF

SEQ ID NO: 494753 - protein, 14 aa, Homo sapiens
  CDR3 for alpha chain variable domain of TCR clone 247377 (TRAV4, TRAJ31)
CLVGDRDNNARLMF

SEQ ID NO: 494754 - protein, 15 aa, Homo sapiens
  CDR3 for beta chain variable domain of TCR clone 247377 (TRBV20-1, TRBJ2-7)
CSARDRVSGMDEQYF

SEQ ID NO: 494755 - protein, 12 aa, Homo sapiens
  CDR3 for alpha chain variable domain of TCR clone 247378 (TRAV17, TRAJ4)
CATDGGYNKLIF

SEQ ID NO: 494756 - protein, 13 aa, Homo sapiens
  CDR3 for beta chain variable domain of TCR clone 247378 (TRBV29-1, TRBJ2-2)
CTTTGVNTGELFF

SEQ ID NO: 494757 - protein, 11 aa, Homo sapiens
  CDR3 for alpha chain variable domain of TCR clone 247379 (TRAV21, TRAJ27)
CAVRMQANQPL

SEQ ID NO: 494758 - protein, 12 aa, Homo sapiens
  CDR3 for beta chain variable domain of TCR clone 247379 (TRBV7-9, TRBJ2-7)
CASSLEGYEQYF

SEQ ID NO: 494759 - protein, 13 aa, Homo sapiens
  CDR3 for alpha chain variable domain of TCR clone 247380 (TRAV12-2, TRAJ37)
CAGGSGNTGKLIF

SEQ ID NO: 494760 - protein, 14 aa, Homo sapiens
  CDR3 for beta chain variable domain of TCR clone 247380 (TRBV6-1, TRBJ2-6)
CASKQGAGANVLTF

SEQ ID NO: 494761 - protein, 12 aa, Homo sapiens
  CDR3 for alpha chain variable domain of TCR clone 247381 (TRAV17, TRAJ12)
CATLRSSYKLIF

SEQ ID NO: 494762 - protein, 16 aa, Homo sapiens
  CDR3 for beta chain variable domain of TCR clone 247381 (TRBV28, TRBJ2-7)
CASRLFSETGGPEQYF

SEQ ID NO: 494763 - protein, 14 aa, Homo sapiens
  CDR3 for alpha chain variable domain of TCR clone 247382 (TRAV1-2, TRAJ8)
FAVREDTGFQKLVF

SEQ ID NO: 494764 - protein, 14 aa, Homo sapiens
  CDR3 for beta chain variable domain of TCR clone 247382 (TRBV7-9, TRBJ2-3)
CASSLSTSTDTQYF

SEQ ID NO: 494765 - protein, 11 aa, Homo sapiens
  CDR3 for alpha chain variable domain of TCR clone 247383 (TRAV3, TRAJ21)
RDVGNFNKFYF

SEQ ID NO: 494766 - protein, 16 aa, Homo sapiens
  CDR3 for beta chain variable domain of TCR clone 247383 (TRBV19, TRBJ2-1)
CASSKAGPSSYNEQFF

SEQ ID NO: 494767 - protein, 18 aa, Homo sapiens
  CDR3 for alpha chain variable domain of TCR clone 247384 (TRAV3, TRAJ17)
CAVRARRGGRSGRQQANF

SEQ ID NO: 494768 - protein, 14 aa, Homo sapiens
  CDR3 for beta chain variable domain of TCR clone 247384 (TRBV4-1, TRBJ2-2)
CASSQAVNTGKLFF

SEQ ID NO: 494769 - protein, 15 aa, Homo sapiens
  CDR3 for alpha chain variable domain of TCR clone 247385 (TRAV3, TRAJ17)
CAVSPKEAAGNKLTF

SEQ ID NO: 494770 - protein, 14 aa, Homo sapiens
  CDR3 for beta chain variable domain of TCR clone 247385 (TRBV5-1, TRBJ1-1)
CASSRTTGDTEAFF

SEQ ID NO: 494771 - protein, 15 aa, Homo sapiens
  CDR3 for alpha chain variable domain of TCR clone 247386 (TRAV13-1, TRAJ44)
CAASRGGGTASKLTF

SEQ ID NO: 494772 - protein, 14 aa, Homo sapiens
  CDR3 for beta chain variable domain of TCR clone 247386 (TRBV12-5, TRBJ2-5)
CASGSRTHQETQYF

SEQ ID NO: 494773 - protein, 15 aa, Homo sapiens
  CDR3 for alpha chain variable domain of TCR clone 247387 (TRAV2, TRAJ15)
CAVEDRAQAGTALIF

SEQ ID NO: 494774 - protein, 13 aa, Homo sapiens
  CDR3 for beta chain variable domain of TCR clone 247387 (TRBV10-2, TRBJ2-3)
CASRESGDHTQYF

SEQ ID NO: 494775 - protein, 11 aa, Homo sapiens
  CDR3 for alpha chain variable domain of TCR clone 247388 (TRAV21, TRAJ11)
CAVNGYSTLTF

SEQ ID NO: 494776 - protein, 15 aa, Homo sapiens
  CDR3 for beta chain variable domain of TCR clone 247388 (TRBV24-1, TRBJ1-4)
CATSDPQGADEKLFF

SEQ ID NO: 494777 - protein, 16 aa, Homo sapiens
  CDR3 for alpha chain variable domain of TCR clone 247389 (TRAV4, TRAJ22)
CPVGDLYSGSARQLTF

SEQ ID NO: 494778 - protein, 14 aa, Homo sapiens
  CDR3 for beta chain variable domain of TCR clone 247389 (TRBV28, TRBJ2-3)
CASSWRGRADTQYF

SEQ ID NO: 494779 - protein, 12 aa, Homo sapiens
  CDR3 for alpha chain variable domain of TCR clone 247390 (TRAV8-3, TRAJ41)
CAVGALGYALNF

SEQ ID NO: 494780 - protein, 16 aa, Homo sapiens
  CDR3 for beta chain variable domain of TCR clone 247390 (TRBV7-6, TRBJ2-3)
CASRDSRGEGTDTQYF

SEQ ID NO: 494781 - protein, 15 aa, Homo sapiens
  CDR3 for alpha chain variable domain of TCR clone 247391 (TRAV34, TRAJ38)
CGADFTPGNNRNLIW

SEQ ID NO: 494782 - protein, 12 aa, Homo sapiens
  CDR3 for beta chain variable domain of TCR clone 247391 (TRBV7-9, TRBJ2-7)
CATRTDAYEQYF

SEQ ID NO: 494783 - protein, 13 aa, Homo sapiens
  CDR3 for alpha chain variable domain of TCR clone 247392 (TRAV26-1, TRAJ36)
CIVAGTGANNLFF

SEQ ID NO: 494784 - protein, 13 aa, Homo sapiens
  CDR3 for beta chain variable domain of TCR clone 247392 (TRBV6-5, TRBJ2-6)
CASSTSGPRRLDF

SEQ ID NO: 494785 - protein, 15 aa, Homo sapiens
  CDR3 for alpha chain variable domain of TCR clone 247393 (TRAV23/DV6, TRAJ33)
CAASNSGGGNYQLIW

SEQ ID NO: 494786 - protein, 11 aa, Homo sapiens
  CDR3 for beta chain variable domain of TCR clone 247393 (TRBV7-2, TRBJ2-3)
CASSSSDTQYF

SEQ ID NO: 494787 - protein, 14 aa, Homo sapiens
  CDR3 for alpha chain variable domain of TCR clone 247394 (TRAV29/DV5, TRAJ44)
CAASALGTASKLPF

SEQ ID NO: 494788 - protein, 13 aa, Homo sapiens
  CDR3 for beta chain variable domain of TCR clone 247394 (TRBV29-1, TRBJ2-7)
CSVKRGGNYEQYF

SEQ ID NO: 494789 - protein, 13 aa, Homo sapiens
  CDR3 for alpha chain variable domain of TCR clone 247395 (TRAV8-2, TRAJ11)
CVVSDLGYSTLTF

SEQ ID NO: 494790 - protein, 12 aa, Homo sapiens
  CDR3 for beta chain variable domain of TCR clone 247395 (TRBV12-4, TRBJ2-7)
CASSVGGYEQYF

SEQ ID NO: 494791 - protein, 11 aa, Homo sapiens
  CDR3 for alpha chain variable domain of TCR clone 247396 (TRAV2, TRAJ13)
CASGGYQKVTF

SEQ ID NO: 494792 - protein, 14 aa, Homo sapiens
  CDR3 for beta chain variable domain of TCR clone 247396 (TRBV6-1, TRBJ1-3)
CASVQGGGGNTIYC

SEQ ID NO: 494793 - protein, 15 aa, Homo sapiens
  CDR3 for alpha chain variable domain of TCR clone 247397 (TRAV14/DV4, TRAJ46)
CAMREKESSGDKLTF

SEQ ID NO: 494794 - protein, 13 aa, Homo sapiens
  CDR3 for beta chain variable domain of TCR clone 247397 (TRBV20-1, TRBJ2-5)
CSAREAFQETQYF

SEQ ID NO: 494795 - protein, 14 aa, Homo sapiens
  CDR3 for alpha chain variable domain of TCR clone 247398 (TRAV2, TRAJ9)
CAVADRSGGFKTIF

SEQ ID NO: 494796 - protein, 12 aa, Homo sapiens
  CDR3 for beta chain variable domain of TCR clone 247398 (TRBV12-5, TRBJ2-5)
CASGQGVETQYF

SEQ ID NO: 494797 - protein, 14 aa, Homo sapiens
  CDR3 for alpha chain variable domain of TCR clone 247399 (TRAV12-2, TRAJ24)
CAVTPADSWGKLQF

SEQ ID NO: 494798 - protein, 16 aa, Homo sapiens
  CDR3 for beta chain variable domain of TCR clone 247399 (TRBV20-1, TRBJ2-7)
CSASTSGRLSSYEQYF

SEQ ID NO: 494799 - protein, 14 aa, Homo sapiens
  CDR3 for alpha chain variable domain of TCR clone 247400 (TRAV17, TRAJ22)
CATSPSSSARQLTF

SEQ ID NO: 494800 - protein, 15 aa, Homo sapiens
  CDR3 for beta chain variable domain of TCR clone 247400 (TRBV4-1, TRBJ2-5)
CASSQWDLYQETQYF

SEQ ID NO: 494801 - protein, 13 aa, Homo sapiens
  CDR3 for alpha chain variable domain of TCR clone 247401 (TRAV8-1, TRAJ43)
CAVNLIGNNDMRF

SEQ ID NO: 494802 - protein, 14 aa, Homo sapiens
  CDR3 for beta chain variable domain of TCR clone 247401 (TRBV7-3, TRBJ2-3)
CASSPGASRDTQYF

SEQ ID NO: 494803 - protein, 14 aa, Homo sapiens
  CDR3 for alpha chain variable domain of TCR clone 247402 (TRAV12-2, TRAJ13)
CAVKKTGGYQKVTF

SEQ ID NO: 494804 - protein, 15 aa, Homo sapiens
  CDR3 for beta chain variable domain of TCR clone 247402 (TRBV20-1, TRBJ2-7)
CSAESGTSGAYEQCF

SEQ ID NO: 494805 - protein, 14 aa, Homo sapiens
  CDR3 for alpha chain variable domain of TCR clone 247403 (TRAV13-1, TRAJ3)
CAASKSSSASKIIF

SEQ ID NO: 494806 - protein, 13 aa, Homo sapiens
  CDR3 for beta chain variable domain of TCR clone 247403 (TRBV25-1, TRBJ2-5)
CASSESGRENQYF

SEQ ID NO: 494807 - protein, 16 aa, Homo sapiens
  CDR3 for alpha chain variable domain of TCR clone 247404 (TRAV16, TRAJ4)
CALSRMFSGGYNKLIF

SEQ ID NO: 494808 - protein, 16 aa, Homo sapiens
  CDR3 for beta chain variable domain of TCR clone 247404 (TRBV7-6, TRBJ2-7)
CASSGGTGALSYEQYF

SEQ ID NO: 494809 - protein, 15 aa, Homo sapiens
  CDR3 for alpha chain variable domain of TCR clone 247405 (TRAV29/DV5, TRAJ24)
CAASGATDSWGQFQF

SEQ ID NO: 494810 - protein, 13 aa, Homo sapiens
  CDR3 for beta chain variable domain of TCR clone 247405 (TRBV19, TRBJ1-2)
CASSVPGQDGYTF

SEQ ID NO: 494811 - protein, 18 aa, Homo sapiens
  CDR3 for alpha chain variable domain of TCR clone 247406 (TRAV17, TRAJ45)
CATSLDLYSGGGADGLTF

SEQ ID NO: 494812 - protein, 13 aa, Homo sapiens
  CDR3 for beta chain variable domain of TCR clone 247406 (TRBV7-3, TRBJ2-7)
CASSSGANYEQYF

SEQ ID NO: 494813 - protein, 11 aa, Homo sapiens
  CDR3 for alpha chain variable domain of TCR clone 247407 (TRAV1-1, TRAJ23)
CAVRQGGKLIF

SEQ ID NO: 494814 - protein, 20 aa, Homo sapiens
  CDR3 for beta chain variable domain of TCR clone 247407 (TRBV7-8, TRBJ2-2)
CARSHLFPGPNIHITGELFF

SEQ ID NO: 494815 - protein, 15 aa, Homo sapiens
  CDR3 for alpha chain variable domain of TCR clone 247408 (TRAV25, TRAJ10)
CAGPLLTGGGNNLTF

SEQ ID NO: 494816 - protein, 15 aa, Homo sapiens
  CDR3 for beta chain variable domain of TCR clone 247408 (TRBV12-5, TRBJ2-2)
CASGRLGGNTGELFF

SEQ ID NO: 494817 - protein, 16 aa, Homo sapiens
  CDR3 for alpha chain variable domain of TCR clone 247409 (TRAV20, TRAJ22)
CAVQASSSGSARQLTF

SEQ ID NO: 494818 - protein, 13 aa, Homo sapiens
  CDR3 for beta chain variable domain of TCR clone 247409 (TRBV7-2, TRBJ2-5)
FSSSQTSVETQYF

SEQ ID NO: 494819 - protein, 15 aa, Homo sapiens
  CDR3 for alpha chain variable domain of TCR clone 247410 (TRAV25, TRAJ53)
CPTSNSGGSNYKLTF

SEQ ID NO: 494820 - protein, 16 aa, Homo sapiens
  CDR3 for beta chain variable domain of TCR clone 247410 (TRBV20-1, TRBJ1-4)
CSAPGQGLLTNEKLFF

SEQ ID NO: 494821 - protein, 12 aa, Homo sapiens
  CDR3 for alpha chain variable domain of TCR clone 247411 (TRAV38-2/DV8, TRAJ47)
CVLMEYGNKLVF

SEQ ID NO: 494822 - protein, 14 aa, Homo sapiens
  CDR3 for beta chain variable domain of TCR clone 247411 (TRBV19, TRBJ2-1)
CASPTFVLSGEQFF

SEQ ID NO: 494823 - protein, 10 aa, Homo sapiens
  CDR3 for alpha chain variable domain of TCR clone 247412 (TRAV8-4, TRAJ43)
CAVSADDMRF

SEQ ID NO: 494824 - protein, 16 aa, Homo sapiens
  CDR3 for beta chain variable domain of TCR clone 247412 (TRBV28, TRBJ2-1)
CASRRSGRVVGNEQFF

SEQ ID NO: 494825 - protein, 14 aa, Homo sapiens
  CDR3 for alpha chain variable domain of TCR clone 247413 (TRAV12-2, TRAJ45)
CAVNIGGGADGLTF

SEQ ID NO: 494826 - protein, 12 aa, Homo sapiens
  CDR3 for beta chain variable domain of TCR clone 247413 (TRBV2, TRBJ2-1)
CAYGPPGNEQFF

SEQ ID NO: 494827 - protein, 13 aa, Homo sapiens
  CDR3 for alpha chain variable domain of TCR clone 247414 (TRAV13-1, TRAJ42)
CAASELWRKPRKS

SEQ ID NO: 494828 - protein, 15 aa, Homo sapiens
  CDR3 for beta chain variable domain of TCR clone 247414 (TRBV20-1, TRBJ2-1)
CSASAARSSYNEQFF

SEQ ID NO: 494829 - protein, 18 aa, Homo sapiens
  CDR3 for alpha chain variable domain of TCR clone 247415 (TRAV12-3, TRAJ52)
CAMSVGGAGGTSYGKLTF

SEQ ID NO: 494830 - protein, 16 aa, Homo sapiens
  CDR3 for beta chain variable domain of TCR clone 247415 (TRBV12-4, TRBJ2-7)
CASSPEGQGSSYEQYF

SEQ ID NO: 494831 - protein, 17 aa, Homo sapiens
  CDR3 for alpha chain variable domain of TCR clone 247416 (TRAV3, TRAJ6)
CAVRDGLRAGGSYIPTF

SEQ ID NO: 494832 - protein, 14 aa, Homo sapiens
  CDR3 for beta chain variable domain of TCR clone 247416 (TRBV7-2, TRBJ2-2)
CASSMGQNTGELFF

SEQ ID NO: 494833 - protein, 13 aa, Homo sapiens
  CDR3 for alpha chain variable domain of TCR clone 247417 (TRAV12-1, TRAJ49)
CVVNTNTGNQFYF

SEQ ID NO: 494834 - protein, 18 aa, Homo sapiens
  CDR3 for beta chain variable domain of TCR clone 247417 (TRBV18, TRBJ1-1)
CASSLPGAPQGAGTEAFF

SEQ ID NO: 494835 - protein, 13 aa, Homo sapiens
  CDR3 for alpha chain variable domain of TCR clone 247418 (TRAV21, TRAJ56)
CAVRLGADSKLTF

SEQ ID NO: 494836 - protein, 12 aa, Homo sapiens
  CDR3 for beta chain variable domain of TCR clone 247418 (TRBV12-4, TRBJ2-3)
CASSSTTDTQYF

SEQ ID NO: 494837 - protein, 13 aa, Homo sapiens
  CDR3 for alpha chain variable domain of TCR clone 247419 (TRAV12-1, TRAJ33)
CGDPPDSNYQLIW

SEQ ID NO: 494838 - protein, 15 aa, Homo sapiens
  CDR3 for beta chain variable domain of TCR clone 247419 (TRBV27, TRBJ2-1)
CASSNGGGSSNEQFF

SEQ ID NO: 494839 - protein, 16 aa, Homo sapiens
  CDR3 for alpha chain variable domain of TCR clone 247420 (TRAV12-2, TRAJ43)
CAGDDMRFGAGTRLTV

SEQ ID NO: 494840 - protein, 16 aa, Homo sapiens
  CDR3 for beta chain variable domain of TCR clone 247420 (TRBV2, TRBJ2-4)
CASSEAPVGEQNIQYF

SEQ ID NO: 494841 - protein, 14 aa, Homo sapiens
  CDR3 for alpha chain variable domain of TCR clone 247421 (TRAV8-1, TRAJ49)
CASSIANTGNQFYF

SEQ ID NO: 494842 - protein, 13 aa, Homo sapiens
  CDR3 for beta chain variable domain of TCR clone 247421 (TRBV11-2, TRBJ2-5)
CDSSFSSQETQYF

SEQ ID NO: 494843 - protein, 14 aa, Homo sapiens
  CDR3 for alpha chain variable domain of TCR clone 247422 (TRAV12-3, TRAJ10)
SHLPLTGGGHKLTF

SEQ ID NO: 494844 - protein, 14 aa, Homo sapiens
  CDR3 for beta chain variable domain of TCR clone 247422 (TRBV5-1, TRBJ2-3)
CASSLERDLGPQYF

SEQ ID NO: 494845 - protein, 10 aa, Homo sapiens
  CDR3 for alpha chain variable domain of TCR clone 247423 (TRAV8-4, TRAJ43)
CAVSADDMRF

SEQ ID NO: 494846 - protein, 13 aa, Homo sapiens
  CDR3 for beta chain variable domain of TCR clone 247423 (TRBV12-4, TRBJ2-5)
CAGSPGTEETQYF

SEQ ID NO: 494847 - protein, 16 aa, Homo sapiens
  CDR3 for alpha chain variable domain of TCR clone 247424 (TRAV3, TRAJ34)
CAVRVRGTPTSSSLGL

SEQ ID NO: 494848 - protein, 15 aa, Homo sapiens
  CDR3 for beta chain variable domain of TCR clone 247424 (TRBV6-3, TRBJ2-7)
CASSSPGTVFYEQYF

SEQ ID NO: 494849 - protein, 15 aa, Homo sapiens
  CDR3 for alpha chain variable domain of TCR clone 247425 (TRAV21, TRAJ40)
CAVRPQTSGTYKYIF

SEQ ID NO: 494850 - protein, 14 aa, Homo sapiens
  CDR3 for beta chain variable domain of TCR clone 247425 (TRBV12-5, TRBJ2-5)
CASGSRTHQETQYF

SEQ ID NO: 494851 - protein, 11 aa, Homo sapiens
  CDR3 for alpha chain variable domain of TCR clone 247426 (TRAV35, TRAJ34)
CWARNTDKLIF

SEQ ID NO: 494852 - protein, 14 aa, Homo sapiens
  CDR3 for beta chain variable domain of TCR clone 247426 (TRBV5-1, TRBJ2-7)
CASSRGESLYDQYF

SEQ ID NO: 494853 - protein, 13 aa, Homo sapiens
  CDR3 for alpha chain variable domain of TCR clone 247427 (TRAV12-2, TRAJ53)
CAGVGGSNYKLTF

SEQ ID NO: 494854 - protein, 12 aa, Homo sapiens
  CDR3 for beta chain variable domain of TCR clone 247427 (TRBV12-4, TRBJ2-7)
CASSLGGYEQYF

SEQ ID NO: 494855 - protein, 15 aa, Homo sapiens
  CDR3 for alpha chain variable domain of TCR clone 247428 (TRAV35, TRAJ20)
CAGQLVGSHDYKLSF

SEQ ID NO: 494856 - protein, 15 aa, Homo sapiens
  CDR3 for beta chain variable domain of TCR clone 247428 (TRBV20-1, TRBJ2-7)
CSARDRVSGMDEQYF

SEQ ID NO: 494857 - protein, 14 aa, Homo sapiens
  CDR3 for alpha chain variable domain of TCR clone 247429 (TRAV1-2, TRAJ16)
CAVKRFSDGQKLLF

SEQ ID NO: 494858 - protein, 19 aa, Homo sapiens
  CDR3 for beta chain variable domain of TCR clone 247429 (TRBV28, TRBJ2-7)
CASSYSGTSRLGWVYEQYF

SEQ ID NO: 494859 - protein, 16 aa, Homo sapiens
  CDR3 for alpha chain variable domain of TCR clone 247430 (TRAV30, TRAJ24)
CGTEIVDADSWGKFQF

SEQ ID NO: 494860 - protein, 12 aa, Homo sapiens
  CDR3 for beta chain variable domain of TCR clone 247430 (TRBV14, TRBJ2-5)
CASSQLKETRYF

SEQ ID NO: 494861 - protein, 17 aa, Homo sapiens
  CDR3 for alpha chain variable domain of TCR clone 247431 (TRAV3, TRAJ42)
CAVRDRDYGGSQGNLIF

SEQ ID NO: 494862 - protein, 14 aa, Homo sapiens
  CDR3 for beta chain variable domain of TCR clone 247431 (TRBV20-1, TRBJ2-5)
CSARDGRAGETQYF

SEQ ID NO: 494863 - protein, 13 aa, Homo sapiens
  CDR3 for alpha chain variable domain of TCR clone 247432 (TRAV27, TRAJ45)
CRSSGGGADGITF

SEQ ID NO: 494864 - protein, 13 aa, Homo sapiens
  CDR3 for beta chain variable domain of TCR clone 247432 (TRBV7-7, TRBJ2-5)
CASSRSGQETQYF

SEQ ID NO: 494865 - protein, 15 aa, Homo sapiens
  CDR3 for alpha chain variable domain of TCR clone 247433 (TRAV21, TRAJ52)
CSVRGGGTSYGKLTF

SEQ ID NO: 494866 - protein, 15 aa, Homo sapiens
  CDR3 for beta chain variable domain of TCR clone 247433 (TRBV18, TRBJ1-5)
CASSPSDRSNQTQHF

SEQ ID NO: 494867 - protein, 12 aa, Homo sapiens
  CDR3 for alpha chain variable domain of TCR clone 247434 (TRAV12-2, TRAJ4)
TAFSGGYNKLIF

SEQ ID NO: 494868 - protein, 15 aa, Homo sapiens
  CDR3 for beta chain variable domain of TCR clone 247434 (TRBV11-3, TRBJ2-3)
CASLKDGREGDTQYF

SEQ ID NO: 494869 - protein, 13 aa, Homo sapiens
  CDR3 for alpha chain variable domain of TCR clone 247435 (TRAV36/DV7, TRAJ38)
CVANAGNNRKLIW

SEQ ID NO: 494870 - protein, 14 aa, Homo sapiens
  CDR3 for beta chain variable domain of TCR clone 247435 (TRBV7-2, TRBJ2-7)
CASSLRWEVDEQYF

SEQ ID NO: 494871 - protein, 17 aa, Homo sapiens
  CDR3 for alpha chain variable domain of TCR clone 247436 (TRAV8-6, TRAJ58)
CAVSSWVGETSGSRLTF

SEQ ID NO: 494872 - protein, 13 aa, Homo sapiens
  CDR3 for beta chain variable domain of TCR clone 247436 (TRBV7-9, TRBJ1-2)
CASSLKQNYGDTF

SEQ ID NO: 494873 - protein, 17 aa, Homo sapiens
  CDR3 for alpha chain variable domain of TCR clone 247437 (TRAV26-2, TRAJ42)
CILRDVGYGGSQGNLIF

SEQ ID NO: 494874 - protein, 16 aa, Homo sapiens
  CDR3 for beta chain variable domain of TCR clone 247437 (TRBV4-2, TRBJ1-5)
CASSPGTGDSNQPQHF

SEQ ID NO: 494875 - protein, 14 aa, Homo sapiens
  CDR3 for alpha chain variable domain of TCR clone 247438 (TRAV22, TRAJ40)
CAVGRNSGTYKYIF

SEQ ID NO: 494876 - protein, 16 aa, Homo sapiens
  CDR3 for beta chain variable domain of TCR clone 247438 (TRBV7-3, TRBJ2-3)
CASSPRTFPTTDTQYF

SEQ ID NO: 494877 - protein, 13 aa, Homo sapiens
  CDR3 for alpha chain variable domain of TCR clone 247439 (TRAV20, TRAJ20)
CAVRWVRGYKLSF

SEQ ID NO: 494878 - protein, 14 aa, Homo sapiens
  CDR3 for beta chain variable domain of TCR clone 247439 (TRBV19, TRBJ2-2)
CASTVTANTGELFF

SEQ ID NO: 494879 - protein, 13 aa, Homo sapiens
  CDR3 for alpha chain variable domain of TCR clone 247440 (TRAV17, TRAJ5)
CALRGTGRRALTF

SEQ ID NO: 494880 - protein, 15 aa, Homo sapiens
  CDR3 for beta chain variable domain of TCR clone 247440 (TRBV7-9, TRBJ1-6)
CASSSPGRGNSPLHF

SEQ ID NO: 494881 - protein, 14 aa, Homo sapiens
  CDR3 for alpha chain variable domain of TCR clone 247441 (TRAV1-2, TRAJ16)
CAVNRFSDGQTLLF

SEQ ID NO: 494882 - protein, 14 aa, Homo sapiens
  CDR3 for beta chain variable domain of TCR clone 247441 (TRBV19, TRBJ2-7)
CASSVDSESYEQYF

SEQ ID NO: 494883 - protein, 14 aa, Homo sapiens
  CDR3 for alpha chain variable domain of TCR clone 247442 (TRAV16, TRAJ15)
CALSGPQAGTALIF

SEQ ID NO: 494884 - protein, 12 aa, Homo sapiens
  CDR3 for beta chain variable domain of TCR clone 247442 (TRBV18, TRBJ2-5)
CASALSKETQYF

SEQ ID NO: 494885 - protein, 13 aa, Homo sapiens
  CDR3 for alpha chain variable domain of TCR clone 247443 (TRAV1-1, TRAJ13)
CAVNSGGYPKVTF

SEQ ID NO: 494886 - protein, 12 aa, Homo sapiens
  CDR3 for beta chain variable domain of TCR clone 247443 (TRBV28, TRBJ2-1)
CASSVQINEQFF

SEQ ID NO: 494887 - protein, 11 aa, Homo sapiens
  CDR3 for alpha chain variable domain of TCR clone 247444 (TRAV2, TRAJ13)
CASGGYQKVTF

SEQ ID NO: 494888 - protein, 15 aa, Homo sapiens
  CDR3 for beta chain variable domain of TCR clone 247444 (TRBV11-2, TRBJ2-2)
CASGSDRVNAGELFF

SEQ ID NO: 494889 - protein, 13 aa, Homo sapiens
  CDR3 for alpha chain variable domain of TCR clone 247445 (TRAV35, TRAJ36)
CAGPRIGANNLFF

SEQ ID NO: 494890 - protein, 19 aa, Homo sapiens
  CDR3 for beta chain variable domain of TCR clone 247445 (TRBV27, TRBJ2-2)
CTSVPAVLAGYRTPGSCFF

SEQ ID NO: 494891 - protein, 12 aa, Homo sapiens
  CDR3 for alpha chain variable domain of TCR clone 247446 (TRAV4, TRAJ26)
CPVGDYGQNFVF

SEQ ID NO: 494892 - protein, 13 aa, Homo sapiens
  CDR3 for beta chain variable domain of TCR clone 247446 (TRBV4-2, TRBJ1-1)
CASSQAGNTEAFF

SEQ ID NO: 494893 - protein, 13 aa, Homo sapiens
  CDR3 for alpha chain variable domain of TCR clone 247447 (TRAV12-1, TRAJ33)
CGDAPDSNYQLIW

SEQ ID NO: 494894 - protein, 14 aa, Homo sapiens
  CDR3 for beta chain variable domain of TCR clone 247447 (TRBV28, TRBJ2-3)
CASSWRGRADTQYF

SEQ ID NO: 494895 - protein, 16 aa, Homo sapiens
  CDR3 for alpha chain variable domain of TCR clone 247448 (TRAV12-2, TRAJ18)
CAVTTDRGSALGRLYF

SEQ ID NO: 494896 - protein, 14 aa, Homo sapiens
  CDR3 for beta chain variable domain of TCR clone 247448 (TRBV4-2, TRBJ1-5)
CASSQDSINQPQHF

SEQ ID NO: 494897 - protein, 22 aa, Homo sapiens
  CDR3 for alpha chain variable domain of TCR clone 247449 (TRAV27, TRAJ38)
CAARRNAGNNHIQHPDPAVYQL

SEQ ID NO: 494898 - protein, 13 aa, Homo sapiens
  CDR3 for beta chain variable domain of TCR clone 247449 (TRBV12-5, TRBJ2-3)
CASGDRQSDTQYF

SEQ ID NO: 494899 - protein, 23 aa, Homo sapiens
  CDR3 for alpha chain variable domain of TCR clone 247450 (TRAV26-1, TRAJ38)
CIADNAGNNHIQNPDPAANQLRD

SEQ ID NO: 494900 - protein, 13 aa, Homo sapiens
  CDR3 for beta chain variable domain of TCR clone 247450 (TRBV20-1, TRBJ1-1)
CSARGGGNTEAFF

SEQ ID NO: 494901 - protein, 12 aa, Homo sapiens
  CDR3 for alpha chain variable domain of TCR clone 247451 (TRAV8-6, TRAJ4)
CAVSDHPNKLIF

SEQ ID NO: 494902 - protein, 13 aa, Homo sapiens
  CDR3 for beta chain variable domain of TCR clone 247451 (TRBV6-1, TRBJ1-1)
CASSRQGNTEAFF

SEQ ID NO: 494903 - protein, 13 aa, Homo sapiens
  CDR3 for alpha chain variable domain of TCR clone 247452 (TRAV17, TRAJ9)
CATGSTRGFKTIF

SEQ ID NO: 494904 - protein, 14 aa, Homo sapiens
  CDR3 for beta chain variable domain of TCR clone 247452 (TRBV7-8, TRBJ2-7)
CASTFRGGPNEQYF

SEQ ID NO: 494905 - protein, 13 aa, Homo sapiens
  CDR3 for alpha chain variable domain of TCR clone 247453 (TRAV13-1, TRAJ6)
CAARRGRSDIPNF

SEQ ID NO: 494906 - protein, 16 aa, Homo sapiens
  CDR3 for beta chain variable domain of TCR clone 247453 (TRBV7-9, TRBJ2-2)
CASSLATGVGTGELFF

SEQ ID NO: 494907 - protein, 16 aa, Homo sapiens
  CDR3 for alpha chain variable domain of TCR clone 247454 (TRAV3, TRAJ37)
CAVRGKGSGNTGKLIF

SEQ ID NO: 494908 - protein, 13 aa, Homo sapiens
  CDR3 for beta chain variable domain of TCR clone 247454 (TRBV11-2, TRBJ2-5)
CASSFSSQETQYF

SEQ ID NO: 494909 - protein, 16 aa, Homo sapiens
  CDR3 for alpha chain variable domain of TCR clone 247455 (TRAV1-2, TRAJ10)
CAVRGVLTGGGNKLTF

SEQ ID NO: 494910 - protein, 12 aa, Homo sapiens
  CDR3 for beta chain variable domain of TCR clone 247455 (TRBV7-8, TRBJ2-7)
CASSLGDREQYF

SEQ ID NO: 494911 - protein, 14 aa, Homo sapiens
  CDR3 for alpha chain variable domain of TCR clone 247456 (TRAV4, TRAJ9)
CLVGSGTGGFKTIF

SEQ ID NO: 494912 - protein, 15 aa, Homo sapiens
  CDR3 for beta chain variable domain of TCR clone 247456 (TRBV7-2, TRBJ2-1)
CASSLASSRVNEQFF

SEQ ID NO: 494913 - protein, 16 aa, Homo sapiens
  CDR3 for alpha chain variable domain of TCR clone 247457 (TRAV21, TRAJ37)
CAVRTAGSSNTGKLIS

SEQ ID NO: 494914 - protein, 13 aa, Homo sapiens
  CDR3 for beta chain variable domain of TCR clone 247457 (TRBV7-9, TRBJ2-5)
CASLPSGRETQYC

SEQ ID NO: 494915 - protein, 16 aa, Homo sapiens
  CDR3 for alpha chain variable domain of TCR clone 247458 (TRAV3, TRAJ21)
CAVRDIERGNFNKFSF

SEQ ID NO: 494916 - protein, 16 aa, Homo sapiens
  CDR3 for beta chain variable domain of TCR clone 247458 (TRBV11-3, TRBJ2-5)
CASSSVVAGSTETQYF

SEQ ID NO: 494917 - protein, 15 aa, Homo sapiens
  CDR3 for alpha chain variable domain of TCR clone 247459 (TRAV21, TRAJ53)
CATLNSGGSNYKLTL

SEQ ID NO: 494918 - protein, 12 aa, Homo sapiens
  CDR3 for beta chain variable domain of TCR clone 247459 (TRBV14, TRBJ2-4)
CASSNLKSIQYF

SEQ ID NO: 494919 - protein, 13 aa, Homo sapiens
  CDR3 for alpha chain variable domain of TCR clone 247460 (TRAV8-4, TRAJ30)
CAVSVNRDDKIIF

SEQ ID NO: 494920 - protein, 16 aa, Homo sapiens
  CDR3 for beta chain variable domain of TCR clone 247460 (TRBV19, TRBJ2-2)
CASRSPGTGATGELFF

SEQ ID NO: 494921 - protein, 13 aa, Homo sapiens
  CDR3 for alpha chain variable domain of TCR clone 247461 (TRAV12-3, TRAJ7)
CAMSASGNNRLAF

SEQ ID NO: 494922 - protein, 13 aa, Homo sapiens
  CDR3 for beta chain variable domain of TCR clone 247461 (TRBV4-2, TRBJ1-1)
CASSQAGNTEAFF

SEQ ID NO: 494923 - protein, 17 aa, Homo sapiens
  CDR3 for alpha chain variable domain of TCR clone 247462 (TRAV3, TRAJ38)
CAVRDCLNAGNNRKLIW

SEQ ID NO: 494924 - protein, 12 aa, Homo sapiens
  CDR3 for beta chain variable domain of TCR clone 247462 (TRBV11-2, TRBJ2-5)
CASSLGQETQYF

SEQ ID NO: 494925 - protein, 12 aa, Homo sapiens
  CDR3 for alpha chain variable domain of TCR clone 247463 (TRAV12-3, TRAJ20)
CAMVRGDYKLSF

SEQ ID NO: 494926 - protein, 15 aa, Homo sapiens
  CDR3 for beta chain variable domain of TCR clone 247463 (TRBV7-2, TRBJ1-2)
CASSPRAGWNYGYTF

SEQ ID NO: 494927 - protein, 12 aa, Homo sapiens
  CDR3 for alpha chain variable domain of TCR clone 247464 (TRAV12-2, TRAJ21)
CAVRYNFNKFYF

SEQ ID NO: 494928 - protein, 14 aa, Homo sapiens
  CDR3 for beta chain variable domain of TCR clone 247464 (TRBV28, TRBJ2-1)
CASIYYTAYNEQFF

SEQ ID NO: 494929 - protein, 14 aa, Homo sapiens
  CDR3 for alpha chain variable domain of TCR clone 247465 (TRAV1-2, TRAJ16)
CVVNRFSDGQKLLF

SEQ ID NO: 494930 - protein, 12 aa, Homo sapiens
  CDR3 for beta chain variable domain of TCR clone 247465 (TRBV7-9, TRBJ2-7)
CASSLEGYEQYF

SEQ ID NO: 494931 - protein, 10 aa, Homo sapiens
  CDR3 for alpha chain variable domain of TCR clone 247466 (TRAV23/DV6, TRAJ57)
CAASFTLSQG

SEQ ID NO: 494932 - protein, 14 aa, Homo sapiens
  CDR3 for beta chain variable domain of TCR clone 247466 (TRBV25-1, TRBJ1-1)
CASTHLVGNTEASF

SEQ ID NO: 494933 - protein, 16 aa, Homo sapiens
  CDR3 for alpha chain variable domain of TCR clone 247467 (TRAV3, TRAJ37)
CAVRGKGSGNPGKLIF

SEQ ID NO: 494934 - protein, 13 aa, Homo sapiens
  CDR3 for beta chain variable domain of TCR clone 247467 (TRBV7-3, TRBJ1-1)
CASSQDWGAEAFF

SEQ ID NO: 494935 - protein, 13 aa, Homo sapiens
  CDR3 for alpha chain variable domain of TCR clone 247468 (TRAV12-2, TRAJ7)
CAVSLYGNNRLAF

SEQ ID NO: 494936 - protein, 18 aa, Homo sapiens
  CDR3 for beta chain variable domain of TCR clone 247468 (TRBV4-2, TRBJ2-1)
CASSQQGIAASSYNEQFF

SEQ ID NO: 494937 - protein, 11 aa, Homo sapiens
  CDR3 for alpha chain variable domain of TCR clone 247469 (TRAV25, TRAJ43)
CAGPRNNDMRF

SEQ ID NO: 494938 - protein, 16 aa, Homo sapiens
  CDR3 for beta chain variable domain of TCR clone 247469 (TRBV19, TRBJ2-2)
CASRSPGTGATGELFF

SEQ ID NO: 494939 - protein, 12 aa, Homo sapiens
  CDR3 for alpha chain variable domain of TCR clone 247470 (TRAV27, TRAJ9)
CAGESGGFKTIF

SEQ ID NO: 494940 - protein, 14 aa, Homo sapiens
  CDR3 for beta chain variable domain of TCR clone 247470 (TRBV6-1, TRBJ2-1)
CASAKDGCYNEQFF

SEQ ID NO: 494941 - protein, 11 aa, Homo sapiens
  CDR3 for alpha chain variable domain of TCR clone 247471 (TRAV3, TRAJ21)
CSVGNCNKFYF

SEQ ID NO: 494942 - protein, 16 aa, Homo sapiens
  CDR3 for beta chain variable domain of TCR clone 247471 (TRBV19, TRBJ2-1)
CASSKAGPSSYNEQFF

SEQ ID NO: 494943 - protein, 15 aa, Homo sapiens
  CDR3 for alpha chain variable domain of TCR clone 247472 (TRAV12-2, TRAJ57)
CAVSRGQGGSEKLVF

SEQ ID NO: 494944 - protein, 15 aa, Homo sapiens
  CDR3 for beta chain variable domain of TCR clone 247472 (TRBV10-2, TRBJ2-6)
CASSEQGTGANVLTF

SEQ ID NO: 494945 - protein, 15 aa, Homo sapiens
  CDR3 for alpha chain variable domain of TCR clone 247473 (TRAV3, TRAJ4)
CAVRDGTGGYNKLNF

SEQ ID NO: 494946 - protein, 16 aa, Homo sapiens
  CDR3 for beta chain variable domain of TCR clone 247473 (TRBV27, TRBJ2-2)
CASSSSGVSNTGELFF

SEQ ID NO: 494947 - protein, 18 aa, Homo sapiens
  CDR3 for alpha chain variable domain of TCR clone 247474 (TRAV12-3, TRAJ52)
CAMSVGGAGGTSYGKLKF

SEQ ID NO: 494948 - protein, 16 aa, Homo sapiens
  CDR3 for beta chain variable domain of TCR clone 247474 (TRBV7-9, TRBJ1-2)
CASSISLDRGGYGYTF

SEQ ID NO: 494949 - protein, 14 aa, Homo sapiens
  CDR3 for alpha chain variable domain of TCR clone 247475 (TRAV1-2, TRAJ16)
CAVNRFSDGQKLLF

SEQ ID NO: 494950 - protein, 13 aa, Homo sapiens
  CDR3 for beta chain variable domain of TCR clone 247475 (TRBV7-9, TRBJ1-2)
CATSLKQNYGYTF

SEQ ID NO: 494951 - protein, 12 aa, Homo sapiens
  CDR3 for alpha chain variable domain of TCR clone 247476 (TRAV12-3, TRAJ39)
CAMTQAANMLTF

SEQ ID NO: 494952 - protein, 13 aa, Homo sapiens
  CDR3 for beta chain variable domain of TCR clone 247476 (TRBV20-1, TRBJ1-1)
CSAPEGGNTEAFF

SEQ ID NO: 494953 - protein, 12 aa, Homo sapiens
  CDR3 for alpha chain variable domain of TCR clone 247477 (TRAV3, TRAJ34)
CAGLGNTDKLIF

SEQ ID NO: 494954 - protein, 13 aa, Homo sapiens
  CDR3 for beta chain variable domain of TCR clone 247477 (TRBV19, TRBJ2-1)
CASSIGTGNEQFF

SEQ ID NO: 494955 - protein, 16 aa, Homo sapiens
  CDR3 for alpha chain variable domain of TCR clone 247478 (TRAV3, TRAJ10)
GAVRDMNAGGGNKLTF

SEQ ID NO: 494956 - protein, 16 aa, Homo sapiens
  CDR3 for beta chain variable domain of TCR clone 247478 (TRBV6-3, TRBJ1-2)
CASSYSRRASNYGYTF

SEQ ID NO: 494957 - protein, 14 aa, Homo sapiens
  CDR3 for alpha chain variable domain of TCR clone 247479 (TRAV20, TRAJ22)
CAVALGGSARKLTF

SEQ ID NO: 494958 - protein, 12 aa, Homo sapiens
  CDR3 for beta chain variable domain of TCR clone 247479 (TRBV29-1, TRBJ2-3)
CSVTGGADTQYF

SEQ ID NO: 494959 - protein, 17 aa, Homo sapiens
  CDR3 for alpha chain variable domain of TCR clone 247480 (TRAV4, TRAJ13)
CLVGDNLGVTRKLPLEL

SEQ ID NO: 494960 - protein, 20 aa, Homo sapiens
  CDR3 for beta chain variable domain of TCR clone 247480 (TRBV19, TRBJ2-1)
CASSISRTVTSTRLNNEQFF

SEQ ID NO: 494961 - protein, 12 aa, Homo sapiens
  CDR3 for alpha chain variable domain of TCR clone 247481 (TRAV39, TRAJ41)
CAGPNSGYALNF

SEQ ID NO: 494962 - protein, 15 aa, Homo sapiens
  CDR3 for beta chain variable domain of TCR clone 247481 (TRBV12-4, TRBJ2-5)
CASSPPTGLQETQYF

SEQ ID NO: 494963 - protein, 15 aa, Homo sapiens
  CDR3 for alpha chain variable domain of TCR clone 247482 (TRAV8-4, TRAJ3)
CAVTGENLVQQCFQD

SEQ ID NO: 494964 - protein, 16 aa, Homo sapiens
  CDR3 for beta chain variable domain of TCR clone 247482 (TRBV27, TRBJ2-2)
CASSFRGLVRTGELFF

SEQ ID NO: 494965 - protein, 14 aa, Homo sapiens
  CDR3 for alpha chain variable domain of TCR clone 247483 (TRAV13-1, TRAJ9)
CAASALTGGFKSIF

SEQ ID NO: 494966 - protein, 11 aa, Homo sapiens
  CDR3 for beta chain variable domain of TCR clone 247483 (TRBV29-1, TRBJ2-5)
CSEDRTGTQYF

SEQ ID NO: 494967 - protein, 13 aa, Homo sapiens
  CDR3 for alpha chain variable domain of TCR clone 247484 (TRAV27, TRAJ17)
CPGAATAGNKLTF

SEQ ID NO: 494968 - protein, 15 aa, Homo sapiens
  CDR3 for beta chain variable domain of TCR clone 247484 (TRBV5-1, TRBJ2-3)
CASRNQAGSTDTQYF

SEQ ID NO: 494969 - protein, 12 aa, Homo sapiens
  CDR3 for alpha chain variable domain of TCR clone 247485 (TRAV35, TRAJ49)
CAGWNAGNQFYF

SEQ ID NO: 494970 - protein, 16 aa, Homo sapiens
  CDR3 for beta chain variable domain of TCR clone 247485 (TRBV5-1, TRBJ2-2)
CASSLWDTTSTGELFF

SEQ ID NO: 494971 - protein, 12 aa, Homo sapiens
  CDR3 for alpha chain variable domain of TCR clone 247486 (TRAV3, TRAJ20)
CAVRDPDYKLSF

SEQ ID NO: 494972 - protein, 12 aa, Homo sapiens
  CDR3 for beta chain variable domain of TCR clone 247486 (TRBV18, TRBJ2-1)
CASSSDEDEQFF

SEQ ID NO: 494973 - protein, 14 aa, Homo sapiens
  CDR3 for alpha chain variable domain of TCR clone 247487 (TRAV29/DV5, TRAJ36)
CAARCKTGANNLFF

SEQ ID NO: 494974 - protein, 18 aa, Homo sapiens
  CDR3 for beta chain variable domain of TCR clone 247487 (TRBV12-5, TRBJ2-5)
CASGSRTHQETVLRARHA

SEQ ID NO: 494975 - protein, 14 aa, Homo sapiens
  CDR3 for alpha chain variable domain of TCR clone 247488 (TRAV4, TRAJ26)
CLVGPHNYGQNFVF

SEQ ID NO: 494976 - protein, 17 aa, Homo sapiens
  CDR3 for beta chain variable domain of TCR clone 247488 (TRBV24-1, TRBJ2-1)
CAASDVSSSGTYNEQFF

SEQ ID NO: 494977 - protein, 13 aa, Homo sapiens
  CDR3 for alpha chain variable domain of TCR clone 247489 (TRAV8-3, TRAJ43)
CAVVPYNNNDMRF

SEQ ID NO: 494978 - protein, 17 aa, Homo sapiens
  CDR3 for beta chain variable domain of TCR clone 247489 (TRBV7-7, TRBJ1-1)
CASIGDRPNPGVTEAFF

SEQ ID NO: 494979 - protein, 14 aa, Homo sapiens
  CDR3 for alpha chain variable domain of TCR clone 247490 (TRAV26-2, TRAJ28)
CITYSGAGSYQLTF

SEQ ID NO: 494980 - protein, 14 aa, Homo sapiens
  CDR3 for beta chain variable domain of TCR clone 247490 (TRBV7-2, TRBJ2-7)
CASRSQGAAYEQYF

SEQ ID NO: 494981 - protein, 14 aa, Homo sapiens
  CDR3 for alpha chain variable domain of TCR clone 247491 (TRAV13-1, TRAJ44)
CAAKATSTASKLTF

SEQ ID NO: 494982 - protein, 17 aa, Homo sapiens
  CDR3 for beta chain variable domain of TCR clone 247491 (TRBV7-3, TRBJ2-3)
CASSLMKRMRGADTQYF

SEQ ID NO: 494983 - protein, 16 aa, Homo sapiens
  CDR3 for alpha chain variable domain of TCR clone 247492 (TRAV12-3, TRAJ53)
CAMSPGSGGSNSKLTF

SEQ ID NO: 494984 - protein, 20 aa, Homo sapiens
  CDR3 for beta chain variable domain of TCR clone 247492 (TRBV7-8, TRBJ2-2)
CASSHLFPGPTIHITGELFF

SEQ ID NO: 494985 - protein, 13 aa, Homo sapiens
  CDR3 for alpha chain variable domain of TCR clone 247493 (TRAV30, TRAJ39)
CSTEKNAGNMLTF

SEQ ID NO: 494986 - protein, 12 aa, Homo sapiens
  CDR3 for beta chain variable domain of TCR clone 247493 (TRBV12-4, TRBJ2-5)
CASSSAQETQYF

SEQ ID NO: 494987 - protein, 14 aa, Homo sapiens
  CDR3 for alpha chain variable domain of TCR clone 247494 (TRAV8-1, TRAJ39)
CAVNASNAGNMLTC

SEQ ID NO: 494988 - protein, 13 aa, Homo sapiens
  CDR3 for beta chain variable domain of TCR clone 247494 (TRBV12-4, TRBJ2-5)
CASSPGTEETQYF

SEQ ID NO: 494989 - protein, 11 aa, Homo sapiens
  CDR3 for alpha chain variable domain of TCR clone 247495 (TRAV16, TRAJ20)
CALSEGFKAAL

SEQ ID NO: 494990 - protein, 16 aa, Homo sapiens
  CDR3 for beta chain variable domain of TCR clone 247495 (TRBV7-3, TRBJ2-2)
CASSLKRGTLSGELFF

SEQ ID NO: 494991 - protein, 14 aa, Homo sapiens
  CDR3 for alpha chain variable domain of TCR clone 247496 (TRAV1-2, TRAJ16)
CAVNRFLDGQKLLF

SEQ ID NO: 494992 - protein, 14 aa, Homo sapiens
  CDR3 for beta chain variable domain of TCR clone 247496 (TRBV12-4, TRBJ1-1)
CASSLGTGGTEAFF

SEQ ID NO: 494993 - protein, 16 aa, Homo sapiens
  CDR3 for alpha chain variable domain of TCR clone 247497 (TRAV16, TRAJ52)
CALSAAGGTSYGKLTF

SEQ ID NO: 494994 - protein, 15 aa, Homo sapiens
  CDR3 for beta chain variable domain of TCR clone 247497 (TRBV12-4, TRBJ1-5)
CQQPTGRGSNQPQHF

SEQ ID NO: 494995 - protein, 13 aa, Homo sapiens
  CDR3 for alpha chain variable domain of TCR clone 247498 (TRAV8-4, TRAJ47)
CAVTALYGNKLVF

SEQ ID NO: 494996 - protein, 14 aa, Homo sapiens
  CDR3 for beta chain variable domain of TCR clone 247498 (TRBV19, TRBJ2-7)
CASSTGGAVAEQYF

SEQ ID NO: 494997 - protein, 14 aa, Homo sapiens
  CDR3 for alpha chain variable domain of TCR clone 247499 (TRAV17, TRAJ34)
CATDSLEGTDKLIF

SEQ ID NO: 494998 - protein, 15 aa, Homo sapiens
  CDR3 for beta chain variable domain of TCR clone 247499 (TRBV5-1, TRBJ2-3)
CASSVTSGSTDTQYF

SEQ ID NO: 494999 - protein, 14 aa, Homo sapiens
  CDR3 for alpha chain variable domain of TCR clone 247500 (TRAV12-1, TRAJ12)
CVVTRMDSSYKLIF

SEQ ID NO: 495000 - protein, 18 aa, Homo sapiens
  CDR3 for beta chain variable domain of TCR clone 247500 (TRBV20-1, TRBJ2-6)
CSAETTPTHGSWANVLTF

SEQ ID NO: 495001 - protein, 13 aa, Homo sapiens
  CDR3 for alpha chain variable domain of TCR clone 247501 (TRAV3, TRAJ21)
CAVREPDFNTFYF

SEQ ID NO: 495002 - protein, 18 aa, Homo sapiens
  CDR3 for beta chain variable domain of TCR clone 247501 (TRBV11-2, TRBJ2-3)
CASSLGGASRGAPNTQYF

SEQ ID NO: 495003 - protein, 11 aa, Homo sapiens
  CDR3 for alpha chain variable domain of TCR clone 247502 (TRAV4, TRAJ31)
CLVGDNARLMF

SEQ ID NO: 495004 - protein, 15 aa, Homo sapiens
  CDR3 for beta chain variable domain of TCR clone 247502 (TRBV6-3, TRBJ2-7)
CASSSPGTVFYEQYF

SEQ ID NO: 495005 - protein, 13 aa, Homo sapiens
  CDR3 for alpha chain variable domain of TCR clone 247503 (TRAV17, TRAJ9)
CATDYTGGFKTIF

SEQ ID NO: 495006 - protein, 13 aa, Homo sapiens
  CDR3 for beta chain variable domain of TCR clone 247503 (TRBV7-6, TRBJ2-7)
CASSLDHTHEQYF

SEQ ID NO: 495007 - protein, 15 aa, Homo sapiens
  CDR3 for alpha chain variable domain of TCR clone 247504 (TRAV26-1, TRAJ29)
CIVRVEGSGNTPLVF

SEQ ID NO: 495008 - protein, 15 aa, Homo sapiens
  CDR3 for beta chain variable domain of TCR clone 247504 (TRBV28, TRBJ2-7)
CASSLISGGSYEQYF

SEQ ID NO: 495009 - protein, 14 aa, Homo sapiens
  CDR3 for alpha chain variable domain of TCR clone 247505 (TRAV26-1, TRAJ33)
CIVGNMDSNYQLIW

SEQ ID NO: 495010 - protein, 17 aa, Homo sapiens
  CDR3 for beta chain variable domain of TCR clone 247505 (TRBV18, TRBJ2-2)
CASSQRSGGQGPGELFF

SEQ ID NO: 495011 - protein, 18 aa, Homo sapiens
  CDR3 for alpha chain variable domain of TCR clone 247506 (TRAV26-1, TRAJ52)
CIVRVAGSGGTSYGKLTF

SEQ ID NO: 495012 - protein, 13 aa, Homo sapiens
  CDR3 for beta chain variable domain of TCR clone 247506 (TRBV7-8, TRBJ1-2)
CASSAQSYYGYTF

SEQ ID NO: 495013 - protein, 22 aa, Homo sapiens
  CDR3 for alpha chain variable domain of TCR clone 247507 (TRAV30, TRAJ30)
CGTESRLEMTRSSLEKGHDFIF

SEQ ID NO: 495014 - protein, 12 aa, Homo sapiens
  CDR3 for beta chain variable domain of TCR clone 247507 (TRBV11-2, TRBJ2-2)
CASSLGGGELFF

SEQ ID NO: 495015 - protein, 11 aa, Homo sapiens
  CDR3 for alpha chain variable domain of TCR clone 247508 (TRAV2, TRAJ33)
CAVESNYQLIW

SEQ ID NO: 495016 - protein, 12 aa, Homo sapiens
  CDR3 for beta chain variable domain of TCR clone 247508 (TRBV5-1, TRBJ2-7)
CASSDSTYEQYF

SEQ ID NO: 495017 - protein, 16 aa, Homo sapiens
  CDR3 for alpha chain variable domain of TCR clone 247509 (TRAV1-2, TRAJ10)
CAVRGVLTGGGDKPTF

SEQ ID NO: 495018 - protein, 12 aa, Homo sapiens
  CDR3 for beta chain variable domain of TCR clone 247509 (TRBV7-8, TRBJ2-7)
CASSLGDREQYF

SEQ ID NO: 495019 - protein, 10 aa, Homo sapiens
  CDR3 for alpha chain variable domain of TCR clone 247510 (TRAV36/DV7, TRAJ48)
CAVGNEKLTF

SEQ ID NO: 495020 - protein, 13 aa, Homo sapiens
  CDR3 for beta chain variable domain of TCR clone 247510 (TRBV12-4, TRBJ1-2)
CASSLRQGKGDTF

SEQ ID NO: 495021 - protein, 19 aa, Homo sapiens
  CDR3 for alpha chain variable domain of TCR clone 247511 (TRAV21, TRAJ20)
SLVTQPPTSVLPNDYKLSF

SEQ ID NO: 495022 - protein, 16 aa, Homo sapiens
  CDR3 for beta chain variable domain of TCR clone 247511 (TRBV12-5, TRBJ2-5)
CAGGPRTSGNQETQYF

SEQ ID NO: 495023 - protein, 14 aa, Homo sapiens
  CDR3 for alpha chain variable domain of TCR clone 247512 (TRAV6, TRAJ6)
CALPTSGGSSIPTF

SEQ ID NO: 495024 - protein, 17 aa, Homo sapiens
  CDR3 for beta chain variable domain of TCR clone 247512 (TRBV5-1, TRBJ2-5)
CASSPVALGQNQETQYF

SEQ ID NO: 495025 - protein, 13 aa, Homo sapiens
  CDR3 for alpha chain variable domain of TCR clone 247513 (TRAV35, TRAJ42)
CAGFPGSKGNRIF

SEQ ID NO: 495026 - protein, 13 aa, Homo sapiens
  CDR3 for beta chain variable domain of TCR clone 247513 (TRBV29-1, TRBJ2-1)
CSVEGGRVNEQFF

SEQ ID NO: 495027 - protein, 12 aa, Homo sapiens
  CDR3 for alpha chain variable domain of TCR clone 247514 (TRAV1-2, TRAJ20)
CAVRRLLYKPSF

SEQ ID NO: 495028 - protein, 12 aa, Homo sapiens
  CDR3 for beta chain variable domain of TCR clone 247514 (TRBV7-8, TRBJ2-5)
CASSPRVETQYF

SEQ ID NO: 495029 - protein, 14 aa, Homo sapiens
  CDR3 for alpha chain variable domain of TCR clone 247515 (TRAV26-2, TRAJ56)
CILRATGANSKLTF

SEQ ID NO: 495030 - protein, 17 aa, Homo sapiens
  CDR3 for beta chain variable domain of TCR clone 247515 (TRBV12-4, TRBJ2-2)
CQQNGTSGGPEHRGAVF

SEQ ID NO: 495031 - protein, 15 aa, Homo sapiens
  CDR3 for alpha chain variable domain of TCR clone 247516 (TRAV12-3, TRAJ49)
CAMAVTPNTGNQFYF

SEQ ID NO: 495032 - protein, 15 aa, Homo sapiens
  CDR3 for beta chain variable domain of TCR clone 247516 (TRBV4-1, TRBJ1-4)
CASSDTGGTNEKLFF

SEQ ID NO: 495033 - protein, 13 aa, Homo sapiens
  CDR3 for alpha chain variable domain of TCR clone 247517 (TRAV8-6, TRAJ49)
CAVITNTGNQFYF

SEQ ID NO: 495034 - protein, 17 aa, Homo sapiens
  CDR3 for beta chain variable domain of TCR clone 247517 (TRBV4-3, TRBJ2-1)
CASSQFSSGRASGEQFF

SEQ ID NO: 495035 - protein, 14 aa, Homo sapiens
  CDR3 for alpha chain variable domain of TCR clone 247518 (TRAV23/DV6, TRAJ24)
CAASLSDSWGKLQF

SEQ ID NO: 495036 - protein, 16 aa, Homo sapiens
  CDR3 for beta chain variable domain of TCR clone 247518 (TRBV7-9, TRBJ2-6)
CASSSKGPLRANVLTF

SEQ ID NO: 495037 - protein, 12 aa, Homo sapiens
  CDR3 for alpha chain variable domain of TCR clone 247519 (TRAV26-1, TRAJ17)
CISQSCRQQDNF

SEQ ID NO: 495038 - protein, 16 aa, Homo sapiens
  CDR3 for beta chain variable domain of TCR clone 247519 (TRBV28, TRBJ1-4)
CASSSRTGAANEKLFF

SEQ ID NO: 495039 - protein, 13 aa, Homo sapiens
  CDR3 for alpha chain variable domain of TCR clone 247520 (TRAV8-1, TRAJ30)
CAVIMNRDDKIIF

SEQ ID NO: 495040 - protein, 15 aa, Homo sapiens
  CDR3 for beta chain variable domain of TCR clone 247520 (TRBV2, TRBJ2-1)
CASSELAGSYNEQFF

SEQ ID NO: 495041 - protein, 14 aa, Homo sapiens
  CDR3 for alpha chain variable domain of TCR clone 247521 (TRAV1-2, TRAJ16)
CAVNWFSDGQKLLF

SEQ ID NO: 495042 - protein, 14 aa, Homo sapiens
  CDR3 for beta chain variable domain of TCR clone 247521 (TRBV7-3, TRBJ1-1)
CASSLKGGNTEAFF

SEQ ID NO: 495043 - protein, 10 aa, Homo sapiens
  CDR3 for alpha chain variable domain of TCR clone 247522 (TRAV12-2, TRAJ43)
CAVKVLSMRF

SEQ ID NO: 495044 - protein, 14 aa, Homo sapiens
  CDR3 for beta chain variable domain of TCR clone 247522 (TRBV11-2, TRBJ2-7)
CASSLGNSLYEQYV

SEQ ID NO: 495045 - protein, 15 aa, Homo sapiens
  CDR3 for alpha chain variable domain of TCR clone 247523 (TRAV12-2, TRAJ53)
SAVNGGGDSNYKLTF

SEQ ID NO: 495046 - protein, 14 aa, Homo sapiens
  CDR3 for beta chain variable domain of TCR clone 247523 (TRBV19, TRBJ2-1)
CASPTFVLSGEQFF

SEQ ID NO: 495047 - protein, 14 aa, Homo sapiens
  CDR3 for alpha chain variable domain of TCR clone 247524 (TRAV13-1, TRAJ40)
CAASMTSGTYKYIF

SEQ ID NO: 495048 - protein, 15 aa, Homo sapiens
  CDR3 for beta chain variable domain of TCR clone 247524 (TRBV7-2, TRBJ1-5)
CASSSTGVDNQPQHF

SEQ ID NO: 495049 - protein, 14 aa, Homo sapiens
  CDR3 for alpha chain variable domain of TCR clone 247525 (TRAV2, TRAJ37)
CAVDFTSNTGKLIF

SEQ ID NO: 495050 - protein, 17 aa, Homo sapiens
  CDR3 for beta chain variable domain of TCR clone 247525 (TRBV20-1, TRBJ1-1)
CSASRGVTGNTELSLDK

SEQ ID NO: 495051 - protein, 11 aa, Homo sapiens
  CDR3 for alpha chain variable domain of TCR clone 247526 (TRAV35, TRAJ12)
RRMDSSYKLIF

SEQ ID NO: 495052 - protein, 14 aa, Homo sapiens
  CDR3 for beta chain variable domain of TCR clone 247526 (TRBV7-8, TRBJ2-3)
CASSFPDGQDTQYF

SEQ ID NO: 495053 - protein, 15 aa, Homo sapiens
  CDR3 for alpha chain variable domain of TCR clone 247527 (TRAV8-2, TRAJ40)
CVVLGTTSGTYKYIF

SEQ ID NO: 495054 - protein, 16 aa, Homo sapiens
  CDR3 for beta chain variable domain of TCR clone 247527 (TRBV7-3, TRBJ2-1)
CASSLEGYRSNNEQFF

SEQ ID NO: 495055 - protein, 14 aa, Homo sapiens
  CDR3 for alpha chain variable domain of TCR clone 247528 (TRAV1-2, TRAJ16)
CAVNRFSDGQKLLF

SEQ ID NO: 495056 - protein, 17 aa, Homo sapiens
  CDR3 for beta chain variable domain of TCR clone 247528 (TRBV6-5, TRBJ2-7)
CASRPSVGEVQHYEQYF

SEQ ID NO: 495057 - protein, 12 aa, Homo sapiens
  CDR3 for alpha chain variable domain of TCR clone 247529 (TRAV12-3, TRAJ40)
CAMSSGTYKYIF

SEQ ID NO: 495058 - protein, 15 aa, Homo sapiens
  CDR3 for beta chain variable domain of TCR clone 247529 (TRBV7-3, TRBJ2-2)
CASSETGRGTGELFF

SEQ ID NO: 495059 - protein, 14 aa, Homo sapiens
  CDR3 for alpha chain variable domain of TCR clone 247530 (TRAV8-3, TRAJ4)
CAVGAAGGYNKLIF

SEQ ID NO: 495060 - protein, 13 aa, Homo sapiens
  CDR3 for beta chain variable domain of TCR clone 247530 (TRBV20-1, TRBJ1-6)
CSAPLGVGSPLHF

SEQ ID NO: 495061 - protein, 13 aa, Homo sapiens
  CDR3 for alpha chain variable domain of TCR clone 247531 (TRAV20, TRAJ34)
CAVSSYNTDKLIF

SEQ ID NO: 495062 - protein, 13 aa, Homo sapiens
  CDR3 for beta chain variable domain of TCR clone 247531 (TRBV7-9, TRBJ1-2)
CASSLKENYGYTF

SEQ ID NO: 495063 - protein, 14 aa, Homo sapiens
  CDR3 for alpha chain variable domain of TCR clone 247532 (TRAV4, TRAJ26)
CLVGPHNYGQNLVF

SEQ ID NO: 495064 - protein, 15 aa, Homo sapiens
  CDR3 for beta chain variable domain of TCR clone 247532 (TRBV2, TRBJ2-1)
CASSELAGSYNEQFF

SEQ ID NO: 495065 - protein, 14 aa, Homo sapiens
  CDR3 for alpha chain variable domain of TCR clone 247533 (TRAV27, TRAJ49)
CAGRPEGTGNQFYF

SEQ ID NO: 495066 - protein, 13 aa, Homo sapiens
  CDR3 for beta chain variable domain of TCR clone 247533 (TRBV18, TRBJ2-7)
CASQAGGGYEQYF

SEQ ID NO: 495067 - protein, 16 aa, Homo sapiens
  CDR3 for alpha chain variable domain of TCR clone 247534 (TRAV12-2, TRAJ32)
CAVNLGQGGATNKLIF

SEQ ID NO: 495068 - protein, 15 aa, Homo sapiens
  CDR3 for beta chain variable domain of TCR clone 247534 (TRBV20-1, TRBJ2-7)
CSARGRLAGGGEQYF

SEQ ID NO: 495069 - protein, 14 aa, Homo sapiens
  CDR3 for alpha chain variable domain of TCR clone 247535 (TRAV12-2, TRAJ13)
CAVKKTGGSQKVTF

SEQ ID NO: 495070 - protein, 14 aa, Homo sapiens
  CDR3 for beta chain variable domain of TCR clone 247535 (TRBV28, TRBJ2-5)
CASSLGDRAETQYF

SEQ ID NO: 495071 - protein, 17 aa, Homo sapiens
  CDR3 for alpha chain variable domain of TCR clone 247536 (TRAV3, TRAJ6)
CAVRDGPRAGGSYIPTF

SEQ ID NO: 495072 - protein, 16 aa, Homo sapiens
  CDR3 for beta chain variable domain of TCR clone 247536 (TRBV7-8, TRBJ2-3)
CASSTEGKRETDTQYF

SEQ ID NO: 495073 - protein, 15 aa, Homo sapiens
  CDR3 for alpha chain variable domain of TCR clone 247537 (TRAV3, TRAJ20)
CAVRDIKLSDYKLSF

SEQ ID NO: 495074 - protein, 15 aa, Homo sapiens
  CDR3 for beta chain variable domain of TCR clone 247537 (TRBV7-9, TRBJ1-6)
CASSSPGRGNSPHHS

SEQ ID NO: 495075 - protein, 15 aa, Homo sapiens
  CDR3 for alpha chain variable domain of TCR clone 247538 (TRAV1-2, TRAJ38)
CAVSENAGNNRKLIW

SEQ ID NO: 495076 - protein, 16 aa, Homo sapiens
  CDR3 for beta chain variable domain of TCR clone 247538 (TRBV4-1, TRBJ2-7)
CANSLTAGQATYEQYF

SEQ ID NO: 495077 - protein, 11 aa, Homo sapiens
  CDR3 for alpha chain variable domain of TCR clone 247539 (TRAV3, TRAJ13)
CAVTSYQKVTF

SEQ ID NO: 495078 - protein, 15 aa, Homo sapiens
  CDR3 for beta chain variable domain of TCR clone 247539 (TRBV7-2, TRBJ2-1)
CASSLGLAGGREQFF

SEQ ID NO: 495079 - protein, 13 aa, Homo sapiens
  CDR3 for alpha chain variable domain of TCR clone 247540 (TRAV2, TRAJ40)
CAVVTSGTYKYIF

SEQ ID NO: 495080 - protein, 15 aa, Homo sapiens
  CDR3 for beta chain variable domain of TCR clone 247540 (TRBV7-8, TRBJ2-7)
CASSLERAGSYEQYF

SEQ ID NO: 495081 - protein, 13 aa, Homo sapiens
  CDR3 for alpha chain variable domain of TCR clone 247541 (TRAV13-1, TRAJ6)
CAASKGGSYIPTF

SEQ ID NO: 495082 - protein, 15 aa, Homo sapiens
  CDR3 for beta chain variable domain of TCR clone 247541 (TRBV9, TRBJ1-6)
CASSVAGTGDSPLHF

SEQ ID NO: 495083 - protein, 13 aa, Homo sapiens
  CDR3 for alpha chain variable domain of TCR clone 247542 (TRAV13-2, TRAJ48)
CAEMDFGNEKLTF

SEQ ID NO: 495084 - protein, 12 aa, Homo sapiens
  CDR3 for beta chain variable domain of TCR clone 247542 (TRBV3-1, TRBJ2-1)
CASSQGSSGQFF

SEQ ID NO: 495085 - protein, 10 aa, Homo sapiens
  CDR3 for alpha chain variable domain of TCR clone 247543 (TRAV23/DV6, TRAJ57)
CAASSTLSQG

SEQ ID NO: 495086 - protein, 12 aa, Homo sapiens
  CDR3 for beta chain variable domain of TCR clone 247543 (TRBV11-2, TRBJ2-1)
CASSVQREGQFF

SEQ ID NO: 495087 - protein, 14 aa, Homo sapiens
  CDR3 for alpha chain variable domain of TCR clone 247544 (TRAV29/DV5, TRAJ32)
CAAAYGGATNKLIF

SEQ ID NO: 495088 - protein, 16 aa, Homo sapiens
  CDR3 for beta chain variable domain of TCR clone 247544 (TRBV12-5, TRBJ2-5)
CASGPRTSGNQETQYF

SEQ ID NO: 495089 - protein, 14 aa, Homo sapiens
  CDR3 for alpha chain variable domain of TCR clone 247545 (TRAV1-2, TRAJ12)
CAVSGTDSSYKLIS

SEQ ID NO: 495090 - protein, 15 aa, Homo sapiens
  CDR3 for beta chain variable domain of TCR clone 247545 (TRBV2, TRBJ2-4)
CASSGTNLAKNIQYF

SEQ ID NO: 495091 - protein, 16 aa, Homo sapiens
  CDR3 for alpha chain variable domain of TCR clone 247546 (TRAV8-3, TRAJ18)
CAVGARRGSTLGRLYF

SEQ ID NO: 495092 - protein, 17 aa, Homo sapiens
  CDR3 for beta chain variable domain of TCR clone 247546 (TRBV11-2, TRBJ2-1)
CASSLYPPGVEYNEQFF

SEQ ID NO: 495093 - protein, 14 aa, Homo sapiens
  CDR3 for alpha chain variable domain of TCR clone 247547 (TRAV1-2, TRAJ16)
CAVNRVSDGQKLLL

SEQ ID NO: 495094 - protein, 13 aa, Homo sapiens
  CDR3 for beta chain variable domain of TCR clone 247547 (TRBV7-9, TRBJ1-2)
CASSLKQNYGYTF

SEQ ID NO: 495095 - protein, 17 aa, Homo sapiens
  CDR3 for alpha chain variable domain of TCR clone 247548 (TRAV4, TRAJ42)
CIVGVLNYGGSQGNLIF

SEQ ID NO: 495096 - protein, 12 aa, Homo sapiens
  CDR3 for beta chain variable domain of TCR clone 247548 (TRBV20-1, TRBJ2-1)
CSAQYTYNEQFF

SEQ ID NO: 495097 - protein, 22 aa, Homo sapiens
  CDR3 for alpha chain variable domain of TCR clone 247549 (TRAV12-2, TRAJ32)
CSSETPSPVIQPPKSATNKLIF

SEQ ID NO: 495098 - protein, 13 aa, Homo sapiens
  CDR3 for beta chain variable domain of TCR clone 247549 (TRBV12-4, TRBJ1-5)
CASSPDRAQPQHF

SEQ ID NO: 495099 - protein, 13 aa, Homo sapiens
  CDR3 for alpha chain variable domain of TCR clone 247550 (TRAV27, TRAJ8)
CAGGPTGFQKLVF

SEQ ID NO: 495100 - protein, 15 aa, Homo sapiens
  CDR3 for beta chain variable domain of TCR clone 247550 (TRBV27, TRBJ2-1)
CASSNGGGSSNEQFF

SEQ ID NO: 495101 - protein, 13 aa, Homo sapiens
  CDR3 for alpha chain variable domain of TCR clone 247551 (TRAV30, TRAJ24)
CGIVTDSWGKLQF

SEQ ID NO: 495102 - protein, 14 aa, Homo sapiens
  CDR3 for beta chain variable domain of TCR clone 247551 (TRBV6-3, TRBJ2-2)
CASTYTPDTGELFF

SEQ ID NO: 495103 - protein, 13 aa, Homo sapiens
  CDR3 for alpha chain variable domain of TCR clone 247552 (TRAV13-2, TRAJ22)
CLGGISSARQLTF

SEQ ID NO: 495104 - protein, 15 aa, Homo sapiens
  CDR3 for beta chain variable domain of TCR clone 247552 (TRBV7-2, TRBJ2-3)
CASSSTGLETDTQYF

SEQ ID NO: 495105 - protein, 18 aa, Homo sapiens
  CDR3 for alpha chain variable domain of TCR clone 247553 (TRAV13-1, TRAJ52)
CAASKRSAGGTSYGKLTF

SEQ ID NO: 495106 - protein, 15 aa, Homo sapiens
  CDR3 for beta chain variable domain of TCR clone 247553 (TRBV20-1, TRBJ1-1)
CSASRGVTGKTEAFF

SEQ ID NO: 495107 - protein, 20 aa, Homo sapiens
  CDR3 for alpha chain variable domain of TCR clone 247554 (TRAV1-1, TRAJ4)
CLLLLRCEGFLSGGYNKLIF

SEQ ID NO: 495108 - protein, 16 aa, Homo sapiens
  CDR3 for beta chain variable domain of TCR clone 247554 (TRBV28, TRBJ1-4)
CASSPPYRGRSEKLYF

SEQ ID NO: 495109 - protein, 16 aa, Homo sapiens
  CDR3 for alpha chain variable domain of TCR clone 247555 (TRAV26-1, TRAJ38)
CIVRPLNAGNNRKLSW

SEQ ID NO: 495110 - protein, 13 aa, Homo sapiens
  CDR3 for beta chain variable domain of TCR clone 247555 (TRBV18, TRBJ1-1)
CASSPNGDTEAFF

SEQ ID NO: 495111 - protein, 13 aa, Homo sapiens
  CDR3 for alpha chain variable domain of TCR clone 247556 (TRAV13-1, TRAJ13)
CAASKGGYQKVTF

SEQ ID NO: 495112 - protein, 16 aa, Homo sapiens
  CDR3 for beta chain variable domain of TCR clone 247556 (TRBV18, TRBJ1-2)
CASSPPERVTTDGYTF

SEQ ID NO: 495113 - protein, 14 aa, Homo sapiens
  CDR3 for alpha chain variable domain of TCR clone 247557 (TRAV12-1, TRAJ26)
CVVKGSNYGQNFVF

SEQ ID NO: 495114 - protein, 13 aa, Homo sapiens
  CDR3 for beta chain variable domain of TCR clone 247557 (TRBV28, TRBJ2-5)
CASSFAGGETQYF

SEQ ID NO: 495115 - protein, 14 aa, Homo sapiens
  CDR3 for alpha chain variable domain of TCR clone 247558 (TRAV23/DV6, TRAJ27)
CAASRDTNAGKSTF

SEQ ID NO: 495116 - protein, 16 aa, Homo sapiens
  CDR3 for beta chain variable domain of TCR clone 247558 (TRBV12-5, TRBJ2-5)
CASGPRTSGNQETQYF

SEQ ID NO: 495117 - protein, 15 aa, Homo sapiens
  CDR3 for alpha chain variable domain of TCR clone 247559 (TRAV26-1, TRAJ37)
CIVENGSGNTGKLIF

SEQ ID NO: 495118 - protein, 14 aa, Homo sapiens
  CDR3 for beta chain variable domain of TCR clone 247559 (TRBV19, TRBJ2-1)
CASPTVVLSGEQFF

SEQ ID NO: 495119 - protein, 14 aa, Homo sapiens
  CDR3 for alpha chain variable domain of TCR clone 247560 (TRAV12-2, TRAJ13)
CAVKKTGGYQKVTF

SEQ ID NO: 495120 - protein, 17 aa, Homo sapiens
  CDR3 for beta chain variable domain of TCR clone 247560 (TRBV15, TRBJ2-4)
CATSRANPQTGLDIQYF

SEQ ID NO: 495121 - protein, 18 aa, Homo sapiens
  CDR3 for alpha chain variable domain of TCR clone 247561 (TRAV21, TRAJ52)
CAVRPSPAGGTSYGKLIF

SEQ ID NO: 495122 - protein, 17 aa, Homo sapiens
  CDR3 for beta chain variable domain of TCR clone 247561 (TRBV25-1, TRBJ2-1)
CASSAYGQGRGVYEQFF

SEQ ID NO: 495123 - protein, 14 aa, Homo sapiens
  CDR3 for alpha chain variable domain of TCR clone 247562 (TRAV1-2, TRAJ24)
CAALTTDSWGKFQF

SEQ ID NO: 495124 - protein, 15 aa, Homo sapiens
  CDR3 for beta chain variable domain of TCR clone 247562 (TRBV6-6, TRBJ2-7)
CASSYSYGGSYEQYF

SEQ ID NO: 495125 - protein, 16 aa, Homo sapiens
  CDR3 for alpha chain variable domain of TCR clone 247563 (TRAV3, TRAJ27)
CAVRDPQGTNAGKSTF

SEQ ID NO: 495126 - protein, 13 aa, Homo sapiens
  CDR3 for beta chain variable domain of TCR clone 247563 (TRBV15, TRBJ1-6)
CATSGGLNSPLHF

SEQ ID NO: 495127 - protein, 14 aa, Homo sapiens
  CDR3 for alpha chain variable domain of TCR clone 247564 (TRAV12-2, TRAJ5)
CAVSRSTGGRALTF

SEQ ID NO: 495128 - protein, 12 aa, Homo sapiens
  CDR3 for beta chain variable domain of TCR clone 247564 (TRBV19, TRBJ1-5)
CASSIAQQPQHF

SEQ ID NO: 495129 - protein, 14 aa, Homo sapiens
  CDR3 for alpha chain variable domain of TCR clone 247565 (TRAV1-2, TRAJ8)
CAVREDTGFQKLVF

SEQ ID NO: 495130 - protein, 15 aa, Homo sapiens
  CDR3 for beta chain variable domain of TCR clone 247565 (TRBV11-3, TRBJ2-3)
RASLKDGREGDTQYF

SEQ ID NO: 495131 - protein, 12 aa, Homo sapiens
  CDR3 for alpha chain variable domain of TCR clone 247566 (TRAV4, TRAJ26)
CPVGDYGQNLVF

SEQ ID NO: 495132 - protein, 16 aa, Homo sapiens
  CDR3 for beta chain variable domain of TCR clone 247566 (TRBV7-2, TRBJ1-2)
CASSSNQDRRGHGYTF

SEQ ID NO: 495133 - protein, 14 aa, Homo sapiens
  CDR3 for alpha chain variable domain of TCR clone 247567 (TRAV8-3, TRAJ39)
CAVGANNAGNMLTF

SEQ ID NO: 495134 - protein, 16 aa, Homo sapiens
  CDR3 for beta chain variable domain of TCR clone 247567 (TRBV10-3, TRBJ2-7)
CAISADFADRPYEQYF

SEQ ID NO: 495135 - protein, 14 aa, Homo sapiens
  CDR3 for alpha chain variable domain of TCR clone 247568 (TRAV8-6, TRAJ54)
CAVSPALGAKKLVF

SEQ ID NO: 495136 - protein, 15 aa, Homo sapiens
  CDR3 for beta chain variable domain of TCR clone 247568 (TRBV4-1, TRBJ1-6)
CASSAGQGYNSPLHF

SEQ ID NO: 495137 - protein, 12 aa, Homo sapiens
  CDR3 for alpha chain variable domain of TCR clone 247569 (TRAV12-3, TRAJ17)
CAMTLTGNKLTF

SEQ ID NO: 495138 - protein, 15 aa, Homo sapiens
  CDR3 for beta chain variable domain of TCR clone 247569 (TRBV20-1, TRBJ2-7)
CSARDRVPGMDEHYF

SEQ ID NO: 495139 - protein, 15 aa, Homo sapiens
  CDR3 for alpha chain variable domain of TCR clone 247570 (TRAV8-6, TRAJ32)
CAVSALWWCYKQAHL

SEQ ID NO: 495140 - protein, 13 aa, Homo sapiens
  CDR3 for beta chain variable domain of TCR clone 247570 (TRBV11-2, TRBJ2-5)
CASGHGAKDTQYF

SEQ ID NO: 495141 - protein, 14 aa, Homo sapiens
  CDR3 for alpha chain variable domain of TCR clone 247571 (TRAV39, TRAJ42)
CAVDIARSQGNLIF

SEQ ID NO: 495142 - protein, 15 aa, Homo sapiens
  CDR3 for beta chain variable domain of TCR clone 247571 (TRBV27, TRBJ2-7)
CASSLFWTGLDEQYF

SEQ ID NO: 495143 - protein, 12 aa, Homo sapiens
  CDR3 for alpha chain variable domain of TCR clone 247572 (TRAV27, TRAJ37)
CADSGSTGKLIF

SEQ ID NO: 495144 - protein, 18 aa, Homo sapiens
  CDR3 for beta chain variable domain of TCR clone 247572 (TRBV7-9, TRBJ1-1)
CASSKPWDTKGMNTEAFF

SEQ ID NO: 495145 - protein, 14 aa, Homo sapiens
  CDR3 for alpha chain variable domain of TCR clone 247573 (TRAV12-2, TRAJ40)
CAVKIPSGTYKYTF

SEQ ID NO: 495146 - protein, 13 aa, Homo sapiens
  CDR3 for beta chain variable domain of TCR clone 247573 (TRBV7-9, TRBJ1-2)
CASSLNQNYGYTF

SEQ ID NO: 495147 - protein, 15 aa, Homo sapiens
  CDR3 for alpha chain variable domain of TCR clone 247574 (TRAV39, TRAJ32)
FSVDMEGGATNKLIF

SEQ ID NO: 495148 - protein, 17 aa, Homo sapiens
  CDR3 for beta chain variable domain of TCR clone 247574 (TRBV7-2, TRBJ1-4)
CASSFKAGPTTNEKLFF

SEQ ID NO: 495149 - protein, 14 aa, Homo sapiens
  CDR3 for alpha chain variable domain of TCR clone 247575 (TRAV12-2, TRAJ40)
CAVKIPSGTYKYIF

SEQ ID NO: 495150 - protein, 17 aa, Homo sapiens
  CDR3 for beta chain variable domain of TCR clone 247575 (TRBV13, TRBJ2-3)
CASSLSKVAGGRNTQYF

SEQ ID NO: 495151 - protein, 13 aa, Homo sapiens
  CDR3 for alpha chain variable domain of TCR clone 247576 (TRAV12-3, TRAJ6)
CANPSGGSYIPTF

SEQ ID NO: 495152 - protein, 16 aa, Homo sapiens
  CDR3 for beta chain variable domain of TCR clone 247576 (TRBV28, TRBJ2-2)
CASSLEGGSNTGELFF

SEQ ID NO: 495153 - protein, 18 aa, Homo sapiens
  CDR3 for alpha chain variable domain of TCR clone 247577 (TRAV12-3, TRAJ52)
CAMSVGGAGGTSYGKLTF

SEQ ID NO: 495154 - protein, 12 aa, Homo sapiens
  CDR3 for beta chain variable domain of TCR clone 247577 (TRBV13, TRBJ2-3)
CASSLGQDTQYF

SEQ ID NO: 495155 - protein, 18 aa, Homo sapiens
  CDR3 for alpha chain variable domain of TCR clone 247578 (TRAV21, TRAJ52)
CAVSPSPAGGTSYGKLTS

SEQ ID NO: 495156 - protein, 17 aa, Homo sapiens
  CDR3 for beta chain variable domain of TCR clone 247578 (TRBV13, TRBJ2-3)
CASSLSRVAGGRNTQYF

SEQ ID NO: 495157 - protein, 15 aa, Homo sapiens
  CDR3 for alpha chain variable domain of TCR clone 247579 (TRAV8-3, TRAJ15)
CAVGAPNQAGTALIF

SEQ ID NO: 495158 - protein, 13 aa, Homo sapiens
  CDR3 for beta chain variable domain of TCR clone 247579 (TRBV7-3, TRBJ2-7)
CASSQAGGYEQYF

SEQ ID NO: 495159 - protein, 15 aa, Homo sapiens
  CDR3 for alpha chain variable domain of TCR clone 247580 (TRAV10, TRAJ6)
CVVRSRTGGSYIPTF

SEQ ID NO: 495160 - protein, 14 aa, Homo sapiens
  CDR3 for beta chain variable domain of TCR clone 247580 (TRBV20-1, TRBJ2-4)
CSASGRVGENIQYF

SEQ ID NO: 495161 - protein, 14 aa, Homo sapiens
  CDR3 for alpha chain variable domain of TCR clone 247581 (TRAV3, TRAJ34)
CAVRAPGNTDKLIF

SEQ ID NO: 495162 - protein, 15 aa, Homo sapiens
  CDR3 for beta chain variable domain of TCR clone 247581 (TRBV27, TRBJ1-4)
CASSNRRGFNEKLFF

SEQ ID NO: 495163 - protein, 12 aa, Homo sapiens
  CDR3 for alpha chain variable domain of TCR clone 247582 (TRAV2, TRAJ40)
CCGTSGTYKYIF

SEQ ID NO: 495164 - protein, 13 aa, Homo sapiens
  CDR3 for beta chain variable domain of TCR clone 247582 (TRBV7-2, TRBJ2-2)
CASSLAVTGELFF

SEQ ID NO: 495165 - protein, 12 aa, Homo sapiens
  CDR3 for alpha chain variable domain of TCR clone 247583 (TRAV21, TRAJ33)
CAKMDSNYQLIW

SEQ ID NO: 495166 - protein, 17 aa, Homo sapiens
  CDR3 for beta chain variable domain of TCR clone 247583 (TRBV20-1, TRBJ2-2)
CSASGSGQGGLPGELFF

SEQ ID NO: 495167 - protein, 14 aa, Homo sapiens
  CDR3 for alpha chain variable domain of TCR clone 247584 (TRAV1-2, TRAJ16)
CAVNRFSDGQKLLC

SEQ ID NO: 495168 - protein, 15 aa, Homo sapiens
  CDR3 for beta chain variable domain of TCR clone 247584 (TRBV6-5, TRBJ2-7)
CASSASGRWSYEQYF

SEQ ID NO: 495169 - protein, 10 aa, Homo sapiens
  CDR3 for alpha chain variable domain of TCR clone 247585 (TRAV12-2, TRAJ22)
CAVNETQLTF

SEQ ID NO: 495170 - protein, 13 aa, Homo sapiens
  CDR3 for beta chain variable domain of TCR clone 247585 (TRBV25-1, TRBJ2-6)
CASRGPGANVLTF

SEQ ID NO: 495171 - protein, 14 aa, Homo sapiens
  CDR3 for alpha chain variable domain of TCR clone 247586 (TRAV35, TRAJ22)
CAGLRPGSARQLTF

SEQ ID NO: 495172 - protein, 13 aa, Homo sapiens
  CDR3 for beta chain variable domain of TCR clone 247586 (TRBV12-4, TRBJ1-1)
CASSPGTGFEAFS

SEQ ID NO: 495173 - protein, 12 aa, Homo sapiens
  CDR3 for alpha chain variable domain of TCR clone 247587 (TRAV12-3, TRAJ17)
CAMTLTGNKLTF

SEQ ID NO: 495174 - protein, 16 aa, Homo sapiens
  CDR3 for beta chain variable domain of TCR clone 247587 (TRBV7-2, TRBJ2-7)
CASSFPLAGGPLEQYF

SEQ ID NO: 495175 - protein, 14 aa, Homo sapiens
  CDR3 for alpha chain variable domain of TCR clone 247588 (TRAV13-1, TRAJ40)
CAASMTSGTYKYIF

SEQ ID NO: 495176 - protein, 15 aa, Homo sapiens
  CDR3 for beta chain variable domain of TCR clone 247588 (TRBV7-3, TRBJ2-1)
CASSPTGGGEVEQSF

SEQ ID NO: 495177 - protein, 15 aa, Homo sapiens
  CDR3 for alpha chain variable domain of TCR clone 247589 (TRAV38-1, TRAJ57)
CAFMDSQGGSEKLVF

SEQ ID NO: 495178 - protein, 16 aa, Homo sapiens
  CDR3 for beta chain variable domain of TCR clone 247589 (TRBV10-3, TRBJ2-1)
CAIRAGGRGDYNEQFF

SEQ ID NO: 495179 - protein, 15 aa, Homo sapiens
  CDR3 for alpha chain variable domain of TCR clone 247590 (TRAV38-2/DV8, TRAJ26)
CAYRSRVNYGKNFVF

SEQ ID NO: 495180 - protein, 14 aa, Homo sapiens
  CDR3 for beta chain variable domain of TCR clone 247590 (TRBV29-1, TRBJ1-3)
CSVADRVVGNTIYF

SEQ ID NO: 495181 - protein, 13 aa, Homo sapiens
  CDR3 for alpha chain variable domain of TCR clone 247591 (TRAV27, TRAJ11)
CAGGGSGYRTLTF

SEQ ID NO: 495182 - protein, 15 aa, Homo sapiens
  CDR3 for beta chain variable domain of TCR clone 247591 (TRBV5-1, TRBJ1-1)
CASSLGQGRFAEAFF

SEQ ID NO: 495183 - protein, 13 aa, Homo sapiens
  CDR3 for alpha chain variable domain of TCR clone 247592 (TRAV13-1, TRAJ21)
CAASIYNFNKFYF

SEQ ID NO: 495184 - protein, 16 aa, Homo sapiens
  CDR3 for beta chain variable domain of TCR clone 247592 (TRBV12-5, TRBJ2-5)
CASGPRTSGNQETQYF

SEQ ID NO: 495185 - protein, 14 aa, Homo sapiens
  CDR3 for alpha chain variable domain of TCR clone 247593 (TRAV12-2, TRAJ40)
CAVKIPSGTYKYIF

SEQ ID NO: 495186 - protein, 15 aa, Homo sapiens
  CDR3 for beta chain variable domain of TCR clone 247593 (TRBV7-2, TRBJ2-2)
CASSPTRGQGGELFF

SEQ ID NO: 495187 - protein, 14 aa, Homo sapiens
  CDR3 for alpha chain variable domain of TCR clone 247594 (TRAV36/DV7, TRAJ32)
CAVGHVGATNKLIF

SEQ ID NO: 495188 - protein, 15 aa, Homo sapiens
  CDR3 for beta chain variable domain of TCR clone 247594 (TRBV7-3, TRBJ2-1)
CASSLGQGPFGEQFF

SEQ ID NO: 495189 - protein, 12 aa, Homo sapiens
  CDR3 for alpha chain variable domain of TCR clone 247595 (TRAV3, TRAJ20)
CAVRDGDYKLSF

SEQ ID NO: 495190 - protein, 16 aa, Homo sapiens
  CDR3 for beta chain variable domain of TCR clone 247595 (TRBV4-2, TRBJ2-5)
CASSQDLVGSQETQYF

SEQ ID NO: 495191 - protein, 15 aa, Homo sapiens
  CDR3 for alpha chain variable domain of TCR clone 247596 (TRAV21, TRAJ10)
CAVPLLTGGGNKLTF

SEQ ID NO: 495192 - protein, 15 aa, Homo sapiens
  CDR3 for beta chain variable domain of TCR clone 247596 (TRBV7-2, TRBJ2-3)
CASSLAGAFIDTQYF

SEQ ID NO: 495193 - protein, 14 aa, Homo sapiens
  CDR3 for alpha chain variable domain of TCR clone 247597 (TRAV1-1, TRAJ30)
CAVRSLNRDDKSIF

SEQ ID NO: 495194 - protein, 15 aa, Homo sapiens
  CDR3 for beta chain variable domain of TCR clone 247597 (TRBV27, TRBJ1-4)
CASSAQQDLNEKLFF

SEQ ID NO: 495195 - protein, 12 aa, Homo sapiens
  CDR3 for alpha chain variable domain of TCR clone 247598 (TRAV21, TRAJ29)
CAVTSGNTPLVF

SEQ ID NO: 495196 - protein, 13 aa, Homo sapiens
  CDR3 for beta chain variable domain of TCR clone 247598 (TRBV7-9, TRBJ2-1)
CASRPNLSDEQFF

SEQ ID NO: 495197 - protein, 13 aa, Homo sapiens
  CDR3 for alpha chain variable domain of TCR clone 247599 (TRAV16, TRAJ39)
CALKDNAGNMLTF

SEQ ID NO: 495198 - protein, 13 aa, Homo sapiens
  CDR3 for beta chain variable domain of TCR clone 247599 (TRBV7-3, TRBJ1-1)
CASSQDWGAEAFF

SEQ ID NO: 495199 - protein, 14 aa, Homo sapiens
  CDR3 for alpha chain variable domain of TCR clone 247600 (TRAV1-2, TRAJ8)
CAVREDTGFQKLVF

SEQ ID NO: 495200 - protein, 14 aa, Homo sapiens
  CDR3 for beta chain variable domain of TCR clone 247600 (TRBV7-6, TRBJ2-3)
CASSLETVTDTQYF

SEQ ID NO: 495201 - protein, 13 aa, Homo sapiens
  CDR3 for alpha chain variable domain of TCR clone 247601 (TRAV8-6, TRAJ49)
CAVITNTGNQFYF

SEQ ID NO: 495202 - protein, 15 aa, Homo sapiens
  CDR3 for beta chain variable domain of TCR clone 247601 (TRBV4-2, TRBJ1-2)
CASSRNTGAGYGYTF

SEQ ID NO: 495203 - protein, 13 aa, Homo sapiens
  CDR3 for alpha chain variable domain of TCR clone 247602 (TRAV2, TRAJ40)
CAVVTSGTYKYIS

SEQ ID NO: 495204 - protein, 14 aa, Homo sapiens
  CDR3 for beta chain variable domain of TCR clone 247602 (TRBV19, TRBJ1-1)
CASSITGWETEAFF

SEQ ID NO: 495205 - protein, 16 aa, Homo sapiens
  CDR3 for alpha chain variable domain of TCR clone 247603 (TRAV23/DV6, TRAJ9)
CAASIGGNTGGFKTIF

SEQ ID NO: 495206 - protein, 11 aa, Homo sapiens
  CDR3 for beta chain variable domain of TCR clone 247603 (TRBV12-4, TRBJ2-3)
CASTATDTQYF

SEQ ID NO: 495207 - protein, 15 aa, Homo sapiens
  CDR3 for alpha chain variable domain of TCR clone 247604 (TRAV4, TRAJ36)
CLVGDRQTGANNLFF

SEQ ID NO: 495208 - protein, 15 aa, Homo sapiens
  CDR3 for beta chain variable domain of TCR clone 247604 (TRBV3-1, TRBJ2-2)
CASSQDWTRAGELFF

SEQ ID NO: 495209 - protein, 12 aa, Homo sapiens
  CDR3 for alpha chain variable domain of TCR clone 247605 (TRAV12-3, TRAJ17)
CAMTLTGNKLTF

SEQ ID NO: 495210 - protein, 15 aa, Homo sapiens
  CDR3 for beta chain variable domain of TCR clone 247605 (TRBV29-1, TRBJ2-6)
CGFTGGRSGANVLTF

SEQ ID NO: 495211 - protein, 14 aa, Homo sapiens
  CDR3 for alpha chain variable domain of TCR clone 247606 (TRAV1-2, TRAJ16)
CAVNRFSDGQKMLS

SEQ ID NO: 495212 - protein, 13 aa, Homo sapiens
  CDR3 for beta chain variable domain of TCR clone 247606 (TRBV11-2, TRBJ2-1)
CASSLGLAGGRFF

SEQ ID NO: 495213 - protein, 14 aa, Homo sapiens
  CDR3 for alpha chain variable domain of TCR clone 247607 (TRAV26-2, TRAJ38)
FILYNAGNNRKLIW

SEQ ID NO: 495214 - protein, 14 aa, Homo sapiens
  CDR3 for beta chain variable domain of TCR clone 247607 (TRBV19, TRBJ2-1)
CASPTFVLSGEQFF

SEQ ID NO: 495215 - protein, 13 aa, Homo sapiens
  CDR3 for alpha chain variable domain of TCR clone 247608 (TRAV20, TRAJ20)
CAVQALNDYKLSF

SEQ ID NO: 495216 - protein, 11 aa, Homo sapiens
  CDR3 for beta chain variable domain of TCR clone 247608 (TRBV29-1, TRBJ2-5)
CSEDRTGTQYF

SEQ ID NO: 495217 - protein, 14 aa, Homo sapiens
  CDR3 for alpha chain variable domain of TCR clone 247609 (TRAV8-3, TRAJ16)
CAVDRFSDGQKLLF

SEQ ID NO: 495218 - protein, 15 aa, Homo sapiens
  CDR3 for beta chain variable domain of TCR clone 247609 (TRBV7-6, TRBJ2-1)
YASSPGQGPYNEQFF

SEQ ID NO: 495219 - protein, 15 aa, Homo sapiens
  CDR3 for alpha chain variable domain of TCR clone 247610 (TRAV3, TRAJ4)
CAVRDGTGVYNKLMF

SEQ ID NO: 495220 - protein, 16 aa, Homo sapiens
  CDR3 for beta chain variable domain of TCR clone 247610 (TRBV27, TRBJ2-2)
CASSSSGVSNTGELFF

SEQ ID NO: 495221 - protein, 12 aa, Homo sapiens
  CDR3 for alpha chain variable domain of TCR clone 247611 (TRAV13-1, TRAJ20)
CSASMGDYKLSF

SEQ ID NO: 495222 - protein, 15 aa, Homo sapiens
  CDR3 for beta chain variable domain of TCR clone 247611 (TRBV11-3, TRBJ2-3)
CASNGGLDSTDTQYF

SEQ ID NO: 495223 - protein, 14 aa, Homo sapiens
  CDR3 for alpha chain variable domain of TCR clone 247612 (TRAV26-1, TRAJ44)
CIVSNTGTASKLTF

SEQ ID NO: 495224 - protein, 15 aa, Homo sapiens
  CDR3 for beta chain variable domain of TCR clone 247612 (TRBV7-8, TRBJ2-1)
CASSLADSLYNEQFF

SEQ ID NO: 495225 - protein, 11 aa, Homo sapiens
  CDR3 for alpha chain variable domain of TCR clone 247613 (TRAV12-2, TRAJ43)
CAAYNNNDMRF

SEQ ID NO: 495226 - protein, 14 aa, Homo sapiens
  CDR3 for beta chain variable domain of TCR clone 247613 (TRBV7-8, TRBJ2-3)
CASSLEAGTDTQYF

SEQ ID NO: 495227 - protein, 11 aa, Homo sapiens
  CDR3 for alpha chain variable domain of TCR clone 247614 (TRAV12-3, TRAJ27)
CAMANAGKSTF

SEQ ID NO: 495228 - protein, 15 aa, Homo sapiens
  CDR3 for beta chain variable domain of TCR clone 247614 (TRBV7-2, TRBJ2-7)
CASSTPGLTRGEQYF

SEQ ID NO: 495229 - protein, 15 aa, Homo sapiens
  CDR3 for alpha chain variable domain of TCR clone 247615 (TRAV25, TRAJ52)
CAGTSGGTSYGKLTF

SEQ ID NO: 495230 - protein, 13 aa, Homo sapiens
  CDR3 for beta chain variable domain of TCR clone 247615 (TRBV27, TRBJ1-1)
CASSLSIGAEAFF

SEQ ID NO: 495231 - protein, 14 aa, Homo sapiens
  CDR3 for alpha chain variable domain of TCR clone 247616 (TRAV1-2, TRAJ15)
CAVRDRQAGTALIF

SEQ ID NO: 495232 - protein, 17 aa, Homo sapiens
  CDR3 for beta chain variable domain of TCR clone 247616 (TRBV11-2, TRBJ2-6)
CASSQRDIFSGANVLTF

SEQ ID NO: 495233 - protein, 15 aa, Homo sapiens
  CDR3 for alpha chain variable domain of TCR clone 247617 (TRAV17, TRAJ35)
CATAFVIGFGNVLHC

SEQ ID NO: 495234 - protein, 16 aa, Homo sapiens
  CDR3 for beta chain variable domain of TCR clone 247617 (TRBV11-2, TRBJ2-7)
CASSPLAGRPGYEQYF

SEQ ID NO: 495235 - protein, 11 aa, Homo sapiens
  CDR3 for alpha chain variable domain of TCR clone 247618 (TRAV3, TRAJ21)
CAEGNFNKFYF

SEQ ID NO: 495236 - protein, 15 aa, Homo sapiens
  CDR3 for beta chain variable domain of TCR clone 247618 (TRBV12-4, TRBJ2-1)
CASSLRDAAYNEQFF

SEQ ID NO: 495237 - protein, 13 aa, Homo sapiens
  CDR3 for alpha chain variable domain of TCR clone 247619 (TRAV13-1, TRAJ6)
CARGSGGSYIPTF

SEQ ID NO: 495238 - protein, 15 aa, Homo sapiens
  CDR3 for beta chain variable domain of TCR clone 247619 (TRBV2, TRBJ2-1)
CASSELAGSYNEQFF

SEQ ID NO: 495239 - protein, 17 aa, Homo sapiens
  CDR3 for alpha chain variable domain of TCR clone 247620 (TRAV26-1, TRAJ37)
CIVRVITVSSNTGKLIF

SEQ ID NO: 495240 - protein, 18 aa, Homo sapiens
  CDR3 for beta chain variable domain of TCR clone 247620 (TRBV11-2, TRBJ2-3)
CASSLGGASRGAPNTQYF

SEQ ID NO: 495241 - protein, 13 aa, Homo sapiens
  CDR3 for alpha chain variable domain of TCR clone 247621 (TRAV23/DV6, TRAJ9)
CAASTTGGFKTIF

SEQ ID NO: 495242 - protein, 12 aa, Homo sapiens
  CDR3 for beta chain variable domain of TCR clone 247621 (TRBV11-2, TRBJ2-2)
CASSLPTGELFF

SEQ ID NO: 495243 - protein, 14 aa, Homo sapiens
  CDR3 for alpha chain variable domain of TCR clone 247622 (TRAV8-4, TRAJ22)
CAVSPQGSARQLTF

SEQ ID NO: 495244 - protein, 15 aa, Homo sapiens
  CDR3 for beta chain variable domain of TCR clone 247622 (TRBV19, TRBJ2-2)
CGSRGPGSNTGELFF

SEQ ID NO: 495245 - protein, 18 aa, Homo sapiens
  CDR3 for alpha chain variable domain of TCR clone 247623 (TRAV8-4, TRAJ53)
CCEGWRMRSGGSNYKLTF

SEQ ID NO: 495246 - protein, 19 aa, Homo sapiens
  CDR3 for beta chain variable domain of TCR clone 247623 (TRBV7-9, TRBJ2-1)
CASSHNRGALLRSYNEQFF

SEQ ID NO: 495247 - protein, 13 aa, Homo sapiens
  CDR3 for alpha chain variable domain of TCR clone 247624 (TRAV1-1, TRAJ33)
CAVRRDSNYQLIL

SEQ ID NO: 495248 - protein, 16 aa, Homo sapiens
  CDR3 for beta chain variable domain of TCR clone 247624 (TRBV6-1, TRBJ2-2)
CASSAFRGGDTGELFF

SEQ ID NO: 495249 - protein, 14 aa, Homo sapiens
  CDR3 for alpha chain variable domain of TCR clone 247625 (TRAV2, TRAJ22)
CAVEVKRAARQLTF

SEQ ID NO: 495250 - protein, 14 aa, Homo sapiens
  CDR3 for beta chain variable domain of TCR clone 247625 (TRBV19, TRBJ2-2)
CASTPGYSVGELFF

SEQ ID NO: 495251 - protein, 14 aa, Homo sapiens
  CDR3 for alpha chain variable domain of TCR clone 247626 (TRAV8-1, TRAJ22)
CAAPSSGSARQLTF

SEQ ID NO: 495252 - protein, 13 aa, Homo sapiens
  CDR3 for beta chain variable domain of TCR clone 247626 (TRBV7-9, TRBJ1-2)
CASSPSNFWGYTF

SEQ ID NO: 495253 - protein, 16 aa, Homo sapiens
  CDR3 for alpha chain variable domain of TCR clone 247627 (TRAV30, TRAJ24)
CGTEIVGADSWGKFLF

SEQ ID NO: 495254 - protein, 14 aa, Homo sapiens
  CDR3 for beta chain variable domain of TCR clone 247627 (TRBV12-5, TRBJ2-5)
CASGSRTHQETQYF

SEQ ID NO: 495255 - protein, 15 aa, Homo sapiens
  CDR3 for alpha chain variable domain of TCR clone 247628 (TRAV27, TRAJ38)
CAARRSAGNNRKLIW

SEQ ID NO: 495256 - protein, 14 aa, Homo sapiens
  CDR3 for beta chain variable domain of TCR clone 247628 (TRBV7-2, TRBJ2-7)
CASSPRDGAYEQYF

SEQ ID NO: 495257 - protein, 14 aa, Homo sapiens
  CDR3 for alpha chain variable domain of TCR clone 247629 (TRAV27, TRAJ23)
RAGLSYNQGGKLIF

SEQ ID NO: 495258 - protein, 15 aa, Homo sapiens
  CDR3 for beta chain variable domain of TCR clone 247629 (TRBV19, TRBJ2-2)
CASSLNRGVTGELFF

SEQ ID NO: 495259 - protein, 14 aa, Homo sapiens
  CDR3 for alpha chain variable domain of TCR clone 247630 (TRAV20, TRAJ18)
CAVGRGSTLGRLYF

SEQ ID NO: 495260 - protein, 14 aa, Homo sapiens
  CDR3 for beta chain variable domain of TCR clone 247630 (TRBV28, TRBJ2-5)
CASTQVTGVNMQYF

SEQ ID NO: 495261 - protein, 17 aa, Homo sapiens
  CDR3 for alpha chain variable domain of TCR clone 247631 (TRAV38-2/DV8, TRAJ28)
CAFLTLYSGAGSYQLTF

SEQ ID NO: 495262 - protein, 14 aa, Homo sapiens
  CDR3 for beta chain variable domain of TCR clone 247631 (TRBV7-2, TRBJ2-5)
CASSSSGGGETQYF

SEQ ID NO: 495263 - protein, 14 aa, Homo sapiens
  CDR3 for alpha chain variable domain of TCR clone 247632 (TRAV1-2, TRAJ16)
CAVNRFSDGRKLLF

SEQ ID NO: 495264 - protein, 14 aa, Homo sapiens
  CDR3 for beta chain variable domain of TCR clone 247632 (TRBV13, TRBJ2-5)
CAGSLGRGQETQYF

SEQ ID NO: 495265 - protein, 10 aa, Homo sapiens
  CDR3 for alpha chain variable domain of TCR clone 247633 (TRAV12-1, TRAJ37)
ARGTTGELIF

SEQ ID NO: 495266 - protein, 15 aa, Homo sapiens
  CDR3 for beta chain variable domain of TCR clone 247633 (TRBV7-2, TRBJ2-3)
CASSLEQGGTDTQYF

SEQ ID NO: 495267 - protein, 14 aa, Homo sapiens
  CDR3 for alpha chain variable domain of TCR clone 247634 (TRAV12-2, TRAJ40)
CAVKIPSGTYKYIF

SEQ ID NO: 495268 - protein, 17 aa, Homo sapiens
  CDR3 for beta chain variable domain of TCR clone 247634 (TRBV20-1, TRBJ2-1)
CSAFSGTSGYLYNEQFF

SEQ ID NO: 495269 - protein, 13 aa, Homo sapiens
  CDR3 for alpha chain variable domain of TCR clone 247635 (TRAV21, TRAJ15)
CAVRNQAGTALIL

SEQ ID NO: 495270 - protein, 16 aa, Homo sapiens
  CDR3 for beta chain variable domain of TCR clone 247635 (TRBV13, TRBJ2-2)
CASSPRTGEHTGELFF

SEQ ID NO: 495271 - protein, 13 aa, Homo sapiens
  CDR3 for alpha chain variable domain of TCR clone 247636 (TRAV12-1, TRAJ26)
CVVRRNYGQNFVF

SEQ ID NO: 495272 - protein, 15 aa, Homo sapiens
  CDR3 for beta chain variable domain of TCR clone 247636 (TRBV28, TRBJ2-1)
CASSIIAVGRSEQFF

SEQ ID NO: 495273 - protein, 12 aa, Homo sapiens
  CDR3 for alpha chain variable domain of TCR clone 247637 (TRAV8-3, TRAJ20)
CAVDFNDYKLSF

SEQ ID NO: 495274 - protein, 12 aa, Homo sapiens
  CDR3 for beta chain variable domain of TCR clone 247637 (TRBV7-9, TRBJ2-7)
CASSFGSYEQYF

SEQ ID NO: 495275 - protein, 14 aa, Homo sapiens
  CDR3 for alpha chain variable domain of TCR clone 247638 (TRAV13-1, TRAJ44)
CAAKATGTASKLTF

SEQ ID NO: 495276 - protein, 22 aa, Homo sapiens
  CDR3 for beta chain variable domain of TCR clone 247638 (TRBV19, TRBJ2-1)
CSSSVRDMVTGTSGRIYNEQFF

SEQ ID NO: 495277 - protein, 14 aa, Homo sapiens
  CDR3 for alpha chain variable domain of TCR clone 247639 (TRAV12-1, TRAJ12)
CVVNGRDSSYKLIF

SEQ ID NO: 495278 - protein, 13 aa, Homo sapiens
  CDR3 for beta chain variable domain of TCR clone 247639 (TRBV24-1, TRBJ2-2)
CATSDWSTGELFF

SEQ ID NO: 495279 - protein, 13 aa, Homo sapiens
  CDR3 for alpha chain variable domain of TCR clone 247640 (TRAV12-3, TRAJ33)
CAMSVNSNYQLIW

SEQ ID NO: 495280 - protein, 15 aa, Homo sapiens
  CDR3 for beta chain variable domain of TCR clone 247640 (TRBV7-9, TRBJ1-2)
CASSLDREPNYGYTF

SEQ ID NO: 495281 - protein, 14 aa, Homo sapiens
  CDR3 for alpha chain variable domain of TCR clone 247641 (TRAV26-1, TRAJ38)
CIAVNAGNNRKLIW

SEQ ID NO: 495282 - protein, 15 aa, Homo sapiens
  CDR3 for beta chain variable domain of TCR clone 247641 (TRBV20-1, TRBJ2-7)
CSARDRVSGMDEQYF

SEQ ID NO: 495283 - protein, 14 aa, Homo sapiens
  CDR3 for alpha chain variable domain of TCR clone 247642 (TRAV12-2, TRAJ17)
CAVLFKAAGNKLTF

SEQ ID NO: 495284 - protein, 14 aa, Homo sapiens
  CDR3 for beta chain variable domain of TCR clone 247642 (TRBV15, TRBJ1-2)
CATSRDCDRVGYTF

SEQ ID NO: 495285 - protein, 15 aa, Homo sapiens
  CDR3 for alpha chain variable domain of TCR clone 247643 (TRAV8-3, TRAJ45)
RAASYSGGGADGLTF

SEQ ID NO: 495286 - protein, 13 aa, Homo sapiens
  CDR3 for beta chain variable domain of TCR clone 247643 (TRBV10-3, TRBJ2-7)
CASKLAVNYEQYF

SEQ ID NO: 495287 - protein, 13 aa, Homo sapiens
  CDR3 for alpha chain variable domain of TCR clone 247644 (TRAV12-1, TRAJ26)
SATYLYYGQNFVF

SEQ ID NO: 495288 - protein, 15 aa, Homo sapiens
  CDR3 for beta chain variable domain of TCR clone 247644 (TRBV5-1, TRBJ2-6)
CASSLDPSGANVRTF

SEQ ID NO: 495289 - protein, 13 aa, Homo sapiens
  CDR3 for alpha chain variable domain of TCR clone 247645 (TRAV21, TRAJ27)
CAARPGNAGKSTF

SEQ ID NO: 495290 - protein, 12 aa, Homo sapiens
  CDR3 for beta chain variable domain of TCR clone 247645 (TRBV7-9, TRBJ2-7)
CASSRSGYEQYF

SEQ ID NO: 495291 - protein, 14 aa, Homo sapiens
  CDR3 for alpha chain variable domain of TCR clone 247646 (TRAV35, TRAJ39)
CAGQLGNAGNMLTF

SEQ ID NO: 495292 - protein, 18 aa, Homo sapiens
  CDR3 for beta chain variable domain of TCR clone 247646 (TRBV11-2, TRBJ2-3)
CASSLGGASRGAPNTQYF

SEQ ID NO: 495293 - protein, 13 aa, Homo sapiens
  CDR3 for alpha chain variable domain of TCR clone 247647 (TRAV8-3, TRAJ43)
CAVVPYNNNDMRF

SEQ ID NO: 495294 - protein, 14 aa, Homo sapiens
  CDR3 for beta chain variable domain of TCR clone 247647 (TRBV4-2, TRBJ2-1)
CASSLDRAYNEQFF

SEQ ID NO: 495295 - protein, 12 aa, Homo sapiens
  CDR3 for alpha chain variable domain of TCR clone 247648 (TRAV21, TRAJ33)
CAKMDSNYQLIW

SEQ ID NO: 495296 - protein, 18 aa, Homo sapiens
  CDR3 for beta chain variable domain of TCR clone 247648 (TRBV15, TRBJ2-3)
CATSRDGARGWDTDTQHF

SEQ ID NO: 495297 - protein, 15 aa, Homo sapiens
  CDR3 for alpha chain variable domain of TCR clone 247649 (TRAV16, TRAJ16)
CSKWPGHRDGQTLLF

SEQ ID NO: 495298 - protein, 14 aa, Homo sapiens
  CDR3 for beta chain variable domain of TCR clone 247649 (TRBV7-9, TRBJ2-4)
CASTTGGAKNIQYF

SEQ ID NO: 495299 - protein, 11 aa, Homo sapiens
  CDR3 for alpha chain variable domain of TCR clone 247650 (TRAV3, TRAJ21)
CAVGNCNKFYF

SEQ ID NO: 495300 - protein, 14 aa, Homo sapiens
  CDR3 for beta chain variable domain of TCR clone 247650 (TRBV19, TRBJ2-1)
CASPTFVLSGEQFF

SEQ ID NO: 495301 - protein, 11 aa, Homo sapiens
  CDR3 for alpha chain variable domain of TCR clone 247651 (TRAV12-3, TRAJ16)
LTGGDGQKLLF

SEQ ID NO: 495302 - protein, 13 aa, Homo sapiens
  CDR3 for beta chain variable domain of TCR clone 247651 (TRBV12-4, TRBJ1-4)
CARAMGHNEKLFF

SEQ ID NO: 495303 - protein, 14 aa, Homo sapiens
  CDR3 for alpha chain variable domain of TCR clone 247652 (TRAV20, TRAJ32)
CCGRYGRATNKLIF

SEQ ID NO: 495304 - protein, 16 aa, Homo sapiens
  CDR3 for beta chain variable domain of TCR clone 247652 (TRBV19, TRBJ2-2)
CASRSPGTGATGELFF

SEQ ID NO: 495305 - protein, 13 aa, Homo sapiens
  CDR3 for alpha chain variable domain of TCR clone 247653 (TRAV26-1, TRAJ31)
CIVRVDGNARLMF

SEQ ID NO: 495306 - protein, 17 aa, Homo sapiens
  CDR3 for beta chain variable domain of TCR clone 247653 (TRBV11-2, TRBJ2-1)
CASSLYPPGVEYNEQCF

SEQ ID NO: 495307 - protein, 16 aa, Homo sapiens
  CDR3 for alpha chain variable domain of TCR clone 247654 (TRAV12-3, TRAJ53)
CAMSPGRGGSNLKLTF

SEQ ID NO: 495308 - protein, 11 aa, Homo sapiens
  CDR3 for beta chain variable domain of TCR clone 247654 (TRBV29-1, TRBJ2-5)
CSEDRTGTQYF

SEQ ID NO: 495309 - protein, 16 aa, Homo sapiens
  CDR3 for alpha chain variable domain of TCR clone 247655 (TRAV27, TRAJ13)
CAGAKSDSGGYQKVTF

SEQ ID NO: 495310 - protein, 15 aa, Homo sapiens
  CDR3 for beta chain variable domain of TCR clone 247655 (TRBV29-1, TRBJ2-1)
CSVGRHGLFYNEQFF

SEQ ID NO: 495311 - protein, 13 aa, Homo sapiens
  CDR3 for alpha chain variable domain of TCR clone 247656 (TRAV8-6, TRAJ49)
CAVITNTGNQFYF

SEQ ID NO: 495312 - protein, 14 aa, Homo sapiens
  CDR3 for beta chain variable domain of TCR clone 247656 (TRBV5-1, TRBJ2-7)
CASSRGESLYEQCF

SEQ ID NO: 495313 - protein, 11 aa, Homo sapiens
  CDR3 for alpha chain variable domain of TCR clone 247657 (TRAV13-1, TRAJ33)
CAANSNYQLIW

SEQ ID NO: 495314 - protein, 16 aa, Homo sapiens
  CDR3 for beta chain variable domain of TCR clone 247657 (TRBV19, TRBJ2-2)
CASRSPGTGATGELFF

SEQ ID NO: 495315 - protein, 13 aa, Homo sapiens
  CDR3 for alpha chain variable domain of TCR clone 247658 (TRAV29/DV5, TRAJ31)
CAASRNNNARIMF

SEQ ID NO: 495316 - protein, 12 aa, Homo sapiens
  CDR3 for beta chain variable domain of TCR clone 247658 (TRBV14, TRBJ2-7)
CASSSLKGEQYF

SEQ ID NO: 495317 - protein, 15 aa, Homo sapiens
  CDR3 for alpha chain variable domain of TCR clone 247659 (TRAV12-2, TRAJ52)
CAAIGGGTSYGKLTF

SEQ ID NO: 495318 - protein, 13 aa, Homo sapiens
  CDR3 for beta chain variable domain of TCR clone 247659 (TRBV15, TRBJ2-7)
CATSTTGHYEQYF

SEQ ID NO: 495319 - protein, 16 aa, Homo sapiens
  CDR3 for alpha chain variable domain of TCR clone 247660 (TRAV3, TRAJ5)
CAVRNLMDTGRRARTF

SEQ ID NO: 495320 - protein, 16 aa, Homo sapiens
  CDR3 for beta chain variable domain of TCR clone 247660 (TRBV4-2, TRBJ2-7)
CASSQEGLAISYEQYF

SEQ ID NO: 495321 - protein, 17 aa, Homo sapiens
  CDR3 for alpha chain variable domain of TCR clone 247661 (TRAV16, TRAJ42)
CALSPKRYVGSQGNLIF

SEQ ID NO: 495322 - protein, 13 aa, Homo sapiens
  CDR3 for beta chain variable domain of TCR clone 247661 (TRBV19, TRBJ1-5)
CASSTRRDQPQHF

SEQ ID NO: 495323 - protein, 11 aa, Homo sapiens
  CDR3 for alpha chain variable domain of TCR clone 247662 (TRAV21, TRAJ11)
CAVNGYSTLTF

SEQ ID NO: 495324 - protein, 15 aa, Homo sapiens
  CDR3 for beta chain variable domain of TCR clone 247662 (TRBV7-2, TRBJ2-1)
CASSSGLAGGNEQFF

SEQ ID NO: 495325 - protein, 13 aa, Homo sapiens
  CDR3 for alpha chain variable domain of TCR clone 247663 (TRAV8-6, TRAJ16)
CAVSSPDGQKLLF

SEQ ID NO: 495326 - protein, 17 aa, Homo sapiens
  CDR3 for beta chain variable domain of TCR clone 247663 (TRBV24-1, TRBJ2-5)
CATSDRRLAGNQETQYF

SEQ ID NO: 495327 - protein, 12 aa, Homo sapiens
  CDR3 for alpha chain variable domain of TCR clone 247664 (TRAV13-1, TRAJ21)
CAAKEGFNKFYF

SEQ ID NO: 495328 - protein, 12 aa, Homo sapiens
  CDR3 for beta chain variable domain of TCR clone 247664 (TRBV7-6, TRBJ2-3)
CASSTGTDTQYL

SEQ ID NO: 495329 - protein, 15 aa, Homo sapiens
  CDR3 for alpha chain variable domain of TCR clone 247665 (TRAV8-3, TRAJ44)
CAVGAVAGTASKLTF

SEQ ID NO: 495330 - protein, 12 aa, Homo sapiens
  CDR3 for beta chain variable domain of TCR clone 247665 (TRBV7-8, TRBJ2-4)
CASSLGGNIQYF

SEQ ID NO: 495331 - protein, 15 aa, Homo sapiens
  CDR3 for alpha chain variable domain of TCR clone 247666 (TRAV26-2, TRAJ57)
CILRDIRCGSGKLVF

SEQ ID NO: 495332 - protein, 15 aa, Homo sapiens
  CDR3 for beta chain variable domain of TCR clone 247666 (TRBV2, TRBJ2-1)
CASDIGLAGEGEQFF

SEQ ID NO: 495333 - protein, 14 aa, Homo sapiens
  CDR3 for alpha chain variable domain of TCR clone 247667 (TRAV12-2, TRAJ17)
WAVLFKAAGNKLTF

SEQ ID NO: 495334 - protein, 13 aa, Homo sapiens
  CDR3 for beta chain variable domain of TCR clone 247667 (TRBV7-3, TRBJ1-1)
CQQLKGGNTEAFF

SEQ ID NO: 495335 - protein, 20 aa, Homo sapiens
  CDR3 for alpha chain variable domain of TCR clone 247668 (TRAV12-1, TRAJ42)
SSVIQPPTSVKGGSQGNLSF

SEQ ID NO: 495336 - protein, 18 aa, Homo sapiens
  CDR3 for beta chain variable domain of TCR clone 247668 (TRBV11-2, TRBJ2-3)
CASSLGGASRGAPNTQYF

SEQ ID NO: 495337 - protein, 12 aa, Homo sapiens
  CDR3 for alpha chain variable domain of TCR clone 247669 (TRAV25, TRAJ5)
CAGGGGSRALTF

SEQ ID NO: 495338 - protein, 15 aa, Homo sapiens
  CDR3 for beta chain variable domain of TCR clone 247669 (TRBV19, TRBJ2-4)
CASRGPRRGENIQYF

SEQ ID NO: 495339 - protein, 16 aa, Homo sapiens
  CDR3 for alpha chain variable domain of TCR clone 247670 (TRAV8-3, TRAJ8)
CAVPRDGNTGFQKLVF

SEQ ID NO: 495340 - protein, 13 aa, Homo sapiens
  CDR3 for beta chain variable domain of TCR clone 247670 (TRBV28, TRBJ2-5)
CDGVSRGEETQYF

SEQ ID NO: 495341 - protein, 13 aa, Homo sapiens
  CDR3 for alpha chain variable domain of TCR clone 247671 (TRAV38-2/DV8, TRAJ53)
CASGGGSNYKLTF

SEQ ID NO: 495342 - protein, 18 aa, Homo sapiens
  CDR3 for beta chain variable domain of TCR clone 247671 (TRBV28, TRBJ1-5)
CTSVPADSGGRYNQPQHF

SEQ ID NO: 495343 - protein, 18 aa, Homo sapiens
  CDR3 for alpha chain variable domain of TCR clone 247672 (TRAV26-2, TRAJ45)
CILRVDKYSGGGADGLTF

SEQ ID NO: 495344 - protein, 16 aa, Homo sapiens
  CDR3 for beta chain variable domain of TCR clone 247672 (TRBV5-1, TRBJ2-2)
CASSSRTGGRTGELFF

SEQ ID NO: 495345 - protein, 18 aa, Homo sapiens
  CDR3 for alpha chain variable domain of TCR clone 247673 (TRAV8-3, TRAJ21)
CAVGALPPPGGTNFTLDL

SEQ ID NO: 495346 - protein, 15 aa, Homo sapiens
  CDR3 for beta chain variable domain of TCR clone 247673 (TRBV7-8, TRBJ1-5)
CASSLERRGLEPQHF

SEQ ID NO: 495347 - protein, 15 aa, Homo sapiens
  CDR3 for alpha chain variable domain of TCR clone 247674 (TRAV26-1, TRAJ21)
CIVRFPNYNFNKFYF

SEQ ID NO: 495348 - protein, 16 aa, Homo sapiens
  CDR3 for beta chain variable domain of TCR clone 247674 (TRBV7-9, TRBJ2-3)
CASSLQGNPGTDTQYF

SEQ ID NO: 495349 - protein, 15 aa, Homo sapiens
  CDR3 for alpha chain variable domain of TCR clone 247675 (TRAV3, TRAJ5)
CAVRDLDTGRRALTF

SEQ ID NO: 495350 - protein, 16 aa, Homo sapiens
  CDR3 for beta chain variable domain of TCR clone 247675 (TRBV4-2, TRBJ2-1)
CASSQGEGRTVNEQFF

SEQ ID NO: 495351 - protein, 15 aa, Homo sapiens
  CDR3 for alpha chain variable domain of TCR clone 247676 (TRAV3, TRAJ5)
CAVRDLDTGRRALTF

SEQ ID NO: 495352 - protein, 15 aa, Homo sapiens
  CDR3 for beta chain variable domain of TCR clone 247676 (TRBV20-1, TRBJ2-1)
CSARSPAGPGNEQFF

SEQ ID NO: 495353 - protein, 15 aa, Homo sapiens
  CDR3 for alpha chain variable domain of TCR clone 247677 (TRAV8-3, TRAJ40)
CAAPSLGSGTYKYIF

SEQ ID NO: 495354 - protein, 16 aa, Homo sapiens
  CDR3 for beta chain variable domain of TCR clone 247677 (TRBV7-3, TRBJ2-3)
CASSLSDYRPEDTQYF

SEQ ID NO: 495355 - protein, 15 aa, Homo sapiens
  CDR3 for alpha chain variable domain of TCR clone 247678 (TRAV21, TRAJ53)
CATLNSGGSNYKLTF

SEQ ID NO: 495356 - protein, 17 aa, Homo sapiens
  CDR3 for beta chain variable domain of TCR clone 247678 (TRBV7-8, TRBJ2-6)
CASSAGTGGAGANVLNF

SEQ ID NO: 495357 - protein, 17 aa, Homo sapiens
  CDR3 for alpha chain variable domain of TCR clone 247679 (TRAV3, TRAJ38)
CAVRDCLNAGNNRKLIW

SEQ ID NO: 495358 - protein, 13 aa, Homo sapiens
  CDR3 for beta chain variable domain of TCR clone 247679 (TRBV20-1, TRBJ1-1)
CSARGGGNTEAFF

SEQ ID NO: 495359 - protein, 14 aa, Homo sapiens
  CDR3 for alpha chain variable domain of TCR clone 247680 (TRAV26-1, TRAJ34)
CIVRVAYNADKLIF

SEQ ID NO: 495360 - protein, 13 aa, Homo sapiens
  CDR3 for beta chain variable domain of TCR clone 247680 (TRBV4-2, TRBJ1-1)
CASSQAGNTEAFF

SEQ ID NO: 495361 - protein, 17 aa, Homo sapiens
  CDR3 for alpha chain variable domain of TCR clone 247681 (TRAV23/DV6, TRAJ58)
CAARLLRGETSGSRLTF

SEQ ID NO: 495362 - protein, 14 aa, Homo sapiens
  CDR3 for beta chain variable domain of TCR clone 247681 (TRBV12-4, TRBJ1-1)
CASSLGTGGTEAFF

SEQ ID NO: 495363 - protein, 21 aa, Homo sapiens
  CDR3 for alpha chain variable domain of TCR clone 247682 (TRAV8-3, TRAJ38)
CAVGASNAGNNHIQNPDPAVY

SEQ ID NO: 495364 - protein, 15 aa, Homo sapiens
  CDR3 for beta chain variable domain of TCR clone 247682 (TRBV11-3, TRBJ1-3)
CASSFFGPSGNTIYF

SEQ ID NO: 495365 - protein, 14 aa, Homo sapiens
  CDR3 for alpha chain variable domain of TCR clone 247683 (TRAV8-3, TRAJ44)
CSVGNTGTASKLTF

SEQ ID NO: 495366 - protein, 15 aa, Homo sapiens
  CDR3 for beta chain variable domain of TCR clone 247683 (TRBV28, TRBJ2-7)
CASSFRGQGRYEQYF

SEQ ID NO: 495367 - protein, 12 aa, Homo sapiens
  CDR3 for alpha chain variable domain of TCR clone 247684 (TRAV17, TRAJ4)
CATDGGYNKLIF

SEQ ID NO: 495368 - protein, 16 aa, Homo sapiens
  CDR3 for beta chain variable domain of TCR clone 247684 (TRBV29-1, TRBJ2-6)
CSVEDITYSGANVLTF

SEQ ID NO: 495369 - protein, 14 aa, Homo sapiens
  CDR3 for alpha chain variable domain of TCR clone 247685 (TRAV16, TRAJ17)
CAPRIKASGNKLTF

SEQ ID NO: 495370 - protein, 17 aa, Homo sapiens
  CDR3 for beta chain variable domain of TCR clone 247685 (TRBV7-2, TRBJ2-3)
CASSSYSGTRRADTQYF

SEQ ID NO: 495371 - protein, 16 aa, Homo sapiens
  CDR3 for alpha chain variable domain of TCR clone 247686 (TRAV8-4, TRAJ52)
CAVSDPGCTSYGKLTF

SEQ ID NO: 495372 - protein, 15 aa, Homo sapiens
  CDR3 for beta chain variable domain of TCR clone 247686 (TRBV12-4, TRBJ2-7)
CASSQRTSGNYEQYF

SEQ ID NO: 495373 - protein, 14 aa, Homo sapiens
  CDR3 for alpha chain variable domain of TCR clone 247687 (TRAV1-2, TRAJ16)
CAVNRFSDGQKLLF

SEQ ID NO: 495374 - protein, 17 aa, Homo sapiens
  CDR3 for beta chain variable domain of TCR clone 247687 (TRBV28, TRBJ2-5)
CASSTPEGDALQENQYF

SEQ ID NO: 495375 - protein, 14 aa, Homo sapiens
  CDR3 for alpha chain variable domain of TCR clone 247688 (TRAV8-2, TRAJ11)
CVVSEKSGYSTLTF

SEQ ID NO: 495376 - protein, 16 aa, Homo sapiens
  CDR3 for beta chain variable domain of TCR clone 247688 (TRBV28, TRBJ2-1)
CASNSPEYPRDNEQFF

SEQ ID NO: 495377 - protein, 15 aa, Homo sapiens
  CDR3 for alpha chain variable domain of TCR clone 247689 (TRAV8-4, TRAJ37)
CAVSRGSGNTGKLIF

SEQ ID NO: 495378 - protein, 17 aa, Homo sapiens
  CDR3 for beta chain variable domain of TCR clone 247689 (TRBV13, TRBJ2-3)
CASSLSRVAGGRNTQYF

SEQ ID NO: 495379 - protein, 13 aa, Homo sapiens
  CDR3 for alpha chain variable domain of TCR clone 247690 (TRAV27, TRAJ54)
CAGAGQGAQKLVF

SEQ ID NO: 495380 - protein, 15 aa, Homo sapiens
  CDR3 for beta chain variable domain of TCR clone 247690 (TRBV18, TRBJ2-6)
CASSPSYAGANVLPF

SEQ ID NO: 495381 - protein, 12 aa, Homo sapiens
  CDR3 for alpha chain variable domain of TCR clone 247691 (TRAV23/DV6, TRAJ33)
CAAEDSNYQLIW

SEQ ID NO: 495382 - protein, 14 aa, Homo sapiens
  CDR3 for beta chain variable domain of TCR clone 247691 (TRBV4-1, TRBJ2-2)
CASSQAVNTGELFF

SEQ ID NO: 495383 - protein, 14 aa, Homo sapiens
  CDR3 for alpha chain variable domain of TCR clone 247692 (TRAV13-2, TRAJ17)
WAENSKAAGNKLTF

SEQ ID NO: 495384 - protein, 11 aa, Homo sapiens
  CDR3 for beta chain variable domain of TCR clone 247692 (TRBV6-3, TRBJ2-3)
CATGQADTQYF

SEQ ID NO: 495385 - protein, 15 aa, Homo sapiens
  CDR3 for alpha chain variable domain of TCR clone 247693 (TRAV3, TRAJ20)
CAVRDIKLSDYKLSF

SEQ ID NO: 495386 - protein, 13 aa, Homo sapiens
  CDR3 for beta chain variable domain of TCR clone 247693 (TRBV20-1, TRBJ1-1)
CSARVGGNTEALF

SEQ ID NO: 495387 - protein, 16 aa, Homo sapiens
  CDR3 for alpha chain variable domain of TCR clone 247694 (TRAV12-3, TRAJ53)
CAMSVGSGGSNYKLTF

SEQ ID NO: 495388 - protein, 12 aa, Homo sapiens
  CDR3 for beta chain variable domain of TCR clone 247694 (TRBV6-3, TRBJ2-7)
CASSLTPYEQYF

SEQ ID NO: 495389 - protein, 12 aa, Homo sapiens
  CDR3 for alpha chain variable domain of TCR clone 247695 (TRAV13-1, TRAJ49)
CAASIWCNQFYF

SEQ ID NO: 495390 - protein, 14 aa, Homo sapiens
  CDR3 for beta chain variable domain of TCR clone 247695 (TRBV12-4, TRBJ1-1)
CASSLDGLNTEAFF

SEQ ID NO: 495391 - protein, 16 aa, Homo sapiens
  CDR3 for alpha chain variable domain of TCR clone 247696 (TRAV23/DV6, TRAJ9)
CAASLSPPNTGGFKIF

SEQ ID NO: 495392 - protein, 18 aa, Homo sapiens
  CDR3 for beta chain variable domain of TCR clone 247696 (TRBV4-1, TRBJ2-7)
CASSQDTGAGSGLNEQYF

SEQ ID NO: 495393 - protein, 14 aa, Homo sapiens
  CDR3 for alpha chain variable domain of TCR clone 247697 (TRAV1-2, TRAJ8)
CAGREDTGFQKLVF

SEQ ID NO: 495394 - protein, 15 aa, Homo sapiens
  CDR3 for beta chain variable domain of TCR clone 247697 (TRBV6-3, TRBJ2-7)
CASSSPGTVSYEQYF

SEQ ID NO: 495395 - protein, 15 aa, Homo sapiens
  CDR3 for alpha chain variable domain of TCR clone 247698 (TRAV3, TRAJ22)
CAVRDRGGSARQLTF

SEQ ID NO: 495396 - protein, 14 aa, Homo sapiens
  CDR3 for beta chain variable domain of TCR clone 247698 (TRBV19, TRBJ2-1)
CASSRLASINEQFV

SEQ ID NO: 495397 - protein, 15 aa, Homo sapiens
  CDR3 for alpha chain variable domain of TCR clone 247699 (TRAV3, TRAJ3)
CAVRDRDSSASTIIF

SEQ ID NO: 495398 - protein, 18 aa, Homo sapiens
  CDR3 for beta chain variable domain of TCR clone 247699 (TRBV25-1, TRBJ1-2)
GASSGLQNGQGLIFGYTF

SEQ ID NO: 495399 - protein, 14 aa, Homo sapiens
  CDR3 for alpha chain variable domain of TCR clone 247700 (TRAV8-4, TRAJ9)
LAVRINTGGFKTIF

SEQ ID NO: 495400 - protein, 15 aa, Homo sapiens
  CDR3 for beta chain variable domain of TCR clone 247700 (TRBV10-2, TRBJ2-6)
CASSEQGTGANVLTF

SEQ ID NO: 495401 - protein, 16 aa, Homo sapiens
  CDR3 for alpha chain variable domain of TCR clone 247701 (TRAV3, TRAJ37)
CAVRPHGSGNTGRLIF

SEQ ID NO: 495402 - protein, 15 aa, Homo sapiens
  CDR3 for beta chain variable domain of TCR clone 247701 (TRBV10-3, TRBJ2-3)
CAISLTSGGTDTQYF

SEQ ID NO: 495403 - protein, 12 aa, Homo sapiens
  CDR3 for alpha chain variable domain of TCR clone 247702 (TRAV21, TRAJ37)
CAVRGNTGKLTF

SEQ ID NO: 495404 - protein, 14 aa, Homo sapiens
  CDR3 for beta chain variable domain of TCR clone 247702 (TRBV19, TRBJ2-1)
CASEVTGARNEQFF

SEQ ID NO: 495405 - protein, 14 aa, Homo sapiens
  CDR3 for alpha chain variable domain of TCR clone 247703 (TRAV12-3, TRAJ10)
SATYLTGGGNKLTF

SEQ ID NO: 495406 - protein, 15 aa, Homo sapiens
  CDR3 for beta chain variable domain of TCR clone 247703 (TRBV7-3, TRBJ2-2)
CASSETGQGTGELFF

SEQ ID NO: 495407 - protein, 14 aa, Homo sapiens
  CDR3 for alpha chain variable domain of TCR clone 247704 (TRAV29/DV5, TRAJ36)
CAARRKTGANNPFF

SEQ ID NO: 495408 - protein, 17 aa, Homo sapiens
  CDR3 for beta chain variable domain of TCR clone 247704 (TRBV11-2, TRBJ2-1)
CASSLYPPGVEYNEQFF

SEQ ID NO: 495409 - protein, 23 aa, Homo sapiens
  CDR3 for alpha chain variable domain of TCR clone 247705 (TRAV8-6, TRAJ26)
CARILSLVPGPDCPCCPISRTLT

SEQ ID NO: 495410 - protein, 12 aa, Homo sapiens
  CDR3 for beta chain variable domain of TCR clone 247705 (TRBV20-1, TRBJ2-1)
CSARLGTDEQFF

SEQ ID NO: 495411 - protein, 16 aa, Homo sapiens
  CDR3 for alpha chain variable domain of TCR clone 247706 (TRAV30, TRAJ24)
CGTEIVDADSWGKFQF

SEQ ID NO: 495412 - protein, 15 aa, Homo sapiens
  CDR3 for beta chain variable domain of TCR clone 247706 (TRBV4-1, TRBJ2-3)
CASSRGQGIPDTQYF

SEQ ID NO: 495413 - protein, 17 aa, Homo sapiens
  CDR3 for alpha chain variable domain of TCR clone 247707 (TRAV16, TRAJ58)
CITVLSNGETSGSRLTF

SEQ ID NO: 495414 - protein, 17 aa, Homo sapiens
  CDR3 for beta chain variable domain of TCR clone 247707 (TRBV18, TRBJ2-1)
CASPKGLSGGADNEQFL

SEQ ID NO: 495415 - protein, 18 aa, Homo sapiens
  CDR3 for alpha chain variable domain of TCR clone 247708 (TRAV21, TRAJ53)
CAVKGGENGGGSNYKLTF

SEQ ID NO: 495416 - protein, 13 aa, Homo sapiens
  CDR3 for beta chain variable domain of TCR clone 247708 (TRBV9, TRBJ2-1)
CASSPSGGSEQFF

SEQ ID NO: 495417 - protein, 14 aa, Homo sapiens
  CDR3 for alpha chain variable domain of TCR clone 247709 (TRAV26-2, TRAJ32)
CCVGYGGATSKLIF

SEQ ID NO: 495418 - protein, 14 aa, Homo sapiens
  CDR3 for beta chain variable domain of TCR clone 247709 (TRBV4-2, TRBJ2-1)
CASGLDRAYNEQFF

SEQ ID NO: 495419 - protein, 12 aa, Homo sapiens
  CDR3 for alpha chain variable domain of TCR clone 247710 (TRAV13-1, TRAJ15)
CSASQAGTAQIF

SEQ ID NO: 495420 - protein, 14 aa, Homo sapiens
  CDR3 for beta chain variable domain of TCR clone 247710 (TRBV19, TRBJ2-1)
CASPTFVLSGEQFF

SEQ ID NO: 495421 - protein, 16 aa, Homo sapiens
  CDR3 for alpha chain variable domain of TCR clone 247711 (TRAV38-1, TRAJ32)
CAFMKGGGGATNNLIF

SEQ ID NO: 495422 - protein, 13 aa, Homo sapiens
  CDR3 for beta chain variable domain of TCR clone 247711 (TRBV20-1, TRBJ2-5)
CSAREAFQETQYF

SEQ ID NO: 495423 - protein, 14 aa, Homo sapiens
  CDR3 for alpha chain variable domain of TCR clone 247712 (TRAV12-3, TRAJ10)
SHLPLTGGGNKLTF

SEQ ID NO: 495424 - protein, 15 aa, Homo sapiens
  CDR3 for beta chain variable domain of TCR clone 247712 (TRBV10-2, TRBJ2-6)
CASSEQGTGANVLTF

SEQ ID NO: 495425 - protein, 17 aa, Homo sapiens
  CDR3 for alpha chain variable domain of TCR clone 247713 (TRAV8-6, TRAJ58)
CAVSSWVGETSGSRLTF

SEQ ID NO: 495426 - protein, 13 aa, Homo sapiens
  CDR3 for beta chain variable domain of TCR clone 247713 (TRBV4-1, TRBJ2-3)
CASSQPPTDTQYF

SEQ ID NO: 495427 - protein, 10 aa, Homo sapiens
  CDR3 for alpha chain variable domain of TCR clone 247714 (TRAV12-2, TRAJ41)
CAVTGYALNF

SEQ ID NO: 495428 - protein, 15 aa, Homo sapiens
  CDR3 for beta chain variable domain of TCR clone 247714 (TRBV4-2, TRBJ2-1)
CARSQDVGLAGEQFF

SEQ ID NO: 495429 - protein, 14 aa, Homo sapiens
  CDR3 for alpha chain variable domain of TCR clone 247715 (TRAV26-1, TRAJ6)
CIVSPVGGSYIPTF

SEQ ID NO: 495430 - protein, 16 aa, Homo sapiens
  CDR3 for beta chain variable domain of TCR clone 247715 (TRBV4-1, TRBJ2-5)
CASSSGLAGVLGTQSF

SEQ ID NO: 495431 - protein, 14 aa, Homo sapiens
  CDR3 for alpha chain variable domain of TCR clone 247716 (TRAV17, TRAJ57)
CATDPQGGSEKLVF

SEQ ID NO: 495432 - protein, 12 aa, Homo sapiens
  CDR3 for beta chain variable domain of TCR clone 247716 (TRBV5-1, TRBJ2-7)
CASSLDSYEQYF

SEQ ID NO: 495433 - protein, 12 aa, Homo sapiens
  CDR3 for alpha chain variable domain of TCR clone 247717 (TRAV12-1, TRAJ20)
CVVNPDDYKLSF

SEQ ID NO: 495434 - protein, 13 aa, Homo sapiens
  CDR3 for beta chain variable domain of TCR clone 247717 (TRBV12-4, TRBJ1-5)
CASSPDRAQPQHF

SEQ ID NO: 495435 - protein, 11 aa, Homo sapiens
  CDR3 for alpha chain variable domain of TCR clone 247718 (TRAV1-2, TRAJ40)
CAVPGTYKYIF

SEQ ID NO: 495436 - protein, 16 aa, Homo sapiens
  CDR3 for beta chain variable domain of TCR clone 247718 (TRBV29-1, TRBJ2-7)
CSVEIVGTSGSYEQYF

SEQ ID NO: 495437 - protein, 13 aa, Homo sapiens
  CDR3 for alpha chain variable domain of TCR clone 247719 (TRAV21, TRAJ15)
CAVPNQAGPALIF

SEQ ID NO: 495438 - protein, 15 aa, Homo sapiens
  CDR3 for beta chain variable domain of TCR clone 247719 (TRBV12-4, TRBJ2-7)
CASSRGLAGTYEQYF

SEQ ID NO: 495439 - protein, 16 aa, Homo sapiens
  CDR3 for alpha chain variable domain of TCR clone 247720 (TRAV23/DV6, TRAJ52)
CAARPSGGTSYGKLTF

SEQ ID NO: 495440 - protein, 13 aa, Homo sapiens
  CDR3 for beta chain variable domain of TCR clone 247720 (TRBV7-9, TRBJ1-1)
CASSLSGETEAVF

SEQ ID NO: 495441 - protein, 17 aa, Homo sapiens
  CDR3 for alpha chain variable domain of TCR clone 247721 (TRAV3, TRAJ6)
CAVRDGPRAGGSYIPTF

SEQ ID NO: 495442 - protein, 14 aa, Homo sapiens
  CDR3 for beta chain variable domain of TCR clone 247721 (TRBV7-9, TRBJ2-7)
CASSRDAVPYEQYF

SEQ ID NO: 495443 - protein, 13 aa, Homo sapiens
  CDR3 for alpha chain variable domain of TCR clone 247722 (TRAV21, TRAJ40)
CAVRPSRAYKYIF

SEQ ID NO: 495444 - protein, 15 aa, Homo sapiens
  CDR3 for beta chain variable domain of TCR clone 247722 (TRBV7-9, TRBJ1-6)
CASSSPGRGNSPLHF

SEQ ID NO: 495445 - protein, 13 aa, Homo sapiens
  CDR3 for alpha chain variable domain of TCR clone 247723 (TRAV2, TRAJ40)
CAVVTSGTYKYIF

SEQ ID NO: 495446 - protein, 19 aa, Homo sapiens
  CDR3 for beta chain variable domain of TCR clone 247723 (TRBV7-9, TRBJ2-6)
CASSLESATVLPGANVLTF

SEQ ID NO: 495447 - protein, 13 aa, Homo sapiens
  CDR3 for alpha chain variable domain of TCR clone 247724 (TRAV25, TRAJ30)
CAGRVDRDDKIIF

SEQ ID NO: 495448 - protein, 16 aa, Homo sapiens
  CDR3 for beta chain variable domain of TCR clone 247724 (TRBV20-1, TRBJ2-5)
CSARDPLAGGKETQYF

SEQ ID NO: 495449 - protein, 14 aa, Homo sapiens
  CDR3 for alpha chain variable domain of TCR clone 247725 (TRAV20, TRAJ29)
CAVQAWVGNTPLVF

SEQ ID NO: 495450 - protein, 13 aa, Homo sapiens
  CDR3 for beta chain variable domain of TCR clone 247725 (TRBV19, TRBJ1-5)
CASSIGGNQPQHF

SEQ ID NO: 495451 - protein, 14 aa, Homo sapiens
  CDR3 for alpha chain variable domain of TCR clone 247726 (TRAV2, TRAJ37)
CAVDFTSNTGKLIF

SEQ ID NO: 495452 - protein, 15 aa, Homo sapiens
  CDR3 for beta chain variable domain of TCR clone 247726 (TRBV5-1, TRBJ2-7)
CASSLNGAPAREQYF

SEQ ID NO: 495453 - protein, 12 aa, Homo sapiens
  CDR3 for alpha chain variable domain of TCR clone 247727 (TRAV12-2, TRAJ43)
CAVNVNNNDMRF

SEQ ID NO: 495454 - protein, 17 aa, Homo sapiens
  CDR3 for beta chain variable domain of TCR clone 247727 (TRBV11-2, TRBJ2-1)
CASSLCPPGVEYNEQFF

SEQ ID NO: 495455 - protein, 12 aa, Homo sapiens
  CDR3 for alpha chain variable domain of TCR clone 247728 (TRAV2, TRAJ37)
CAVTLNTGKLIF

SEQ ID NO: 495456 - protein, 15 aa, Homo sapiens
  CDR3 for beta chain variable domain of TCR clone 247728 (TRBV5-1, TRBJ2-5)
CASSFGGPPQETQYF

SEQ ID NO: 495457 - protein, 13 aa, Homo sapiens
  CDR3 for alpha chain variable domain of TCR clone 247729 (TRAV8-3, TRAJ36)
CAGGATGANNLFF

SEQ ID NO: 495458 - protein, 13 aa, Homo sapiens
  CDR3 for beta chain variable domain of TCR clone 247729 (TRBV12-4, TRBJ1-2)
CASSLRQGKGCTF

SEQ ID NO: 495459 - protein, 11 aa, Homo sapiens
  CDR3 for alpha chain variable domain of TCR clone 247730 (TRAV14/DV4, TRAJ31)
CAMRENARLMF

SEQ ID NO: 495460 - protein, 15 aa, Homo sapiens
  CDR3 for beta chain variable domain of TCR clone 247730 (TRBV19, TRBJ2-1)
CAGSLETSGYNEQFF

SEQ ID NO: 495461 - protein, 14 aa, Homo sapiens
  CDR3 for alpha chain variable domain of TCR clone 247731 (TRAV26-1, TRAJ40)
CIVRVARGTYKYIF

SEQ ID NO: 495462 - protein, 14 aa, Homo sapiens
  CDR3 for beta chain variable domain of TCR clone 247731 (TRBV7-3, TRBJ2-7)
CASSLKAESYEQYF

SEQ ID NO: 495463 - protein, 14 aa, Homo sapiens
  CDR3 for alpha chain variable domain of TCR clone 247732 (TRAV8-3, TRAJ10)
CAVGNAGGGNKLTF

SEQ ID NO: 495464 - protein, 16 aa, Homo sapiens
  CDR3 for beta chain variable domain of TCR clone 247732 (TRBV11-2, TRBJ1-2)
CASSLDTGGVDYGYTF

SEQ ID NO: 495465 - protein, 17 aa, Homo sapiens
  CDR3 for alpha chain variable domain of TCR clone 247733 (TRAV8-6, TRAJ58)
CAVSSWGGETSGSRFTF

SEQ ID NO: 495466 - protein, 14 aa, Homo sapiens
  CDR3 for beta chain variable domain of TCR clone 247733 (TRBV4-2, TRBJ2-1)
CASGLDRAYNEQFF

SEQ ID NO: 495467 - protein, 15 aa, Homo sapiens
  CDR3 for alpha chain variable domain of TCR clone 247734 (TRAV17, TRAJ16)
CATALRFSDGQKLLF

SEQ ID NO: 495468 - protein, 12 aa, Homo sapiens
  CDR3 for beta chain variable domain of TCR clone 247734 (TRBV2, TRBJ2-7)
CARSDPDYEQYF

SEQ ID NO: 495469 - protein, 18 aa, Homo sapiens
  CDR3 for alpha chain variable domain of TCR clone 247735 (TRAV12-3, TRAJ52)
CAMSVGGSGGTSFGKRKF

SEQ ID NO: 495470 - protein, 15 aa, Homo sapiens
  CDR3 for beta chain variable domain of TCR clone 247735 (TRBV27, TRBJ1-6)
CASSFDRGLGSPLHF

SEQ ID NO: 495471 - protein, 19 aa, Homo sapiens
  CDR3 for alpha chain variable domain of TCR clone 247736 (TRAV8-3, TRAJ45)
CTSVLWGSYSGGGADGLTF

SEQ ID NO: 495472 - protein, 11 aa, Homo sapiens
  CDR3 for beta chain variable domain of TCR clone 247736 (TRBV20-1, TRBJ2-5)
CSADRAETQYF

SEQ ID NO: 495473 - protein, 12 aa, Homo sapiens
  CDR3 for alpha chain variable domain of TCR clone 247737 (TRAV13-2, TRAJ23)
CVERHRGGKLIF

SEQ ID NO: 495474 - protein, 16 aa, Homo sapiens
  CDR3 for beta chain variable domain of TCR clone 247737 (TRBV20-1, TRBJ1-4)
CSAPGQGLVTNEKLFF

SEQ ID NO: 495475 - protein, 16 aa, Homo sapiens
  CDR3 for alpha chain variable domain of TCR clone 247738 (TRAV8-6, TRAJ37)
CAVSGLGSSNTGKRIF

SEQ ID NO: 495476 - protein, 15 aa, Homo sapiens
  CDR3 for beta chain variable domain of TCR clone 247738 (TRBV20-1, TRBJ1-5)
CSARSGPSMNQPQHF

SEQ ID NO: 495477 - protein, 14 aa, Homo sapiens
  CDR3 for alpha chain variable domain of TCR clone 247739 (TRAV4, TRAJ37)
CIVVVAGNTGKLIF

SEQ ID NO: 495478 - protein, 16 aa, Homo sapiens
  CDR3 for beta chain variable domain of TCR clone 247739 (TRBV19, TRBJ2-3)
CASSFYTTGIGDTQYF

SEQ ID NO: 495479 - protein, 11 aa, Homo sapiens
  CDR3 for alpha chain variable domain of TCR clone 247740 (TRAV8-4, TRAJ20)
CAVTNALTTTS

SEQ ID NO: 495480 - protein, 16 aa, Homo sapiens
  CDR3 for beta chain variable domain of TCR clone 247740 (TRBV6-1, TRBJ1-2)
CASSGAWQGRSHGYTF

SEQ ID NO: 495481 - protein, 14 aa, Homo sapiens
  CDR3 for alpha chain variable domain of TCR clone 247741 (TRAV12-2, TRAJ17)
CAVLFKAAGNKLTF

SEQ ID NO: 495482 - protein, 15 aa, Homo sapiens
  CDR3 for beta chain variable domain of TCR clone 247741 (TRBV12-5, TRBJ2-2)
CASGRLGGNTGELFF

SEQ ID NO: 495483 - protein, 14 aa, Homo sapiens
  CDR3 for alpha chain variable domain of TCR clone 247742 (TRAV4, TRAJ26)
CLAGPHNYCQNFVF

SEQ ID NO: 495484 - protein, 17 aa, Homo sapiens
  CDR3 for beta chain variable domain of TCR clone 247742 (TRBV24-1, TRBJ2-1)
CATSDVSTSGTYNEQFF

SEQ ID NO: 495485 - protein, 18 aa, Homo sapiens
  CDR3 for alpha chain variable domain of TCR clone 247743 (TRAV13-1, TRAJ52)
CAAKNPNAGGTSYGKLTF

SEQ ID NO: 495486 - protein, 12 aa, Homo sapiens
  CDR3 for beta chain variable domain of TCR clone 247743 (TRBV2, TRBJ2-7)
CASTYRTDEQYF

SEQ ID NO: 495487 - protein, 15 aa, Homo sapiens
  CDR3 for alpha chain variable domain of TCR clone 247744 (TRAV3, TRAJ13)
CAVRVYSGGYQKVTF

SEQ ID NO: 495488 - protein, 15 aa, Homo sapiens
  CDR3 for beta chain variable domain of TCR clone 247744 (TRBV5-7, TRBJ1-2)
CASSLGAAANYGYTF

SEQ ID NO: 495489 - protein, 18 aa, Homo sapiens
  CDR3 for alpha chain variable domain of TCR clone 247745 (TRAV13-1, TRAJ52)
CAASKRSPGGTSYGKLTF

SEQ ID NO: 495490 - protein, 13 aa, Homo sapiens
  CDR3 for beta chain variable domain of TCR clone 247745 (TRBV12-4, TRBJ1-2)
CASSLRQGKGYAF

SEQ ID NO: 495491 - protein, 14 aa, Homo sapiens
  CDR3 for alpha chain variable domain of TCR clone 247746 (TRAV1-2, TRAJ6)
CAMSLSGGSYIPTF

SEQ ID NO: 495492 - protein, 15 aa, Homo sapiens
  CDR3 for beta chain variable domain of TCR clone 247746 (TRBV28, TRBJ2-7)
CASSPGGRGFYEQYF

SEQ ID NO: 495493 - protein, 17 aa, Homo sapiens
  CDR3 for alpha chain variable domain of TCR clone 247747 (TRAV13-2, TRAJ5)
CAESVVIVGHGQESTYF

SEQ ID NO: 495494 - protein, 18 aa, Homo sapiens
  CDR3 for beta chain variable domain of TCR clone 247747 (TRBV4-1, TRBJ2-3)
CASSHQIAGGRSTDTQYF

SEQ ID NO: 495495 - protein, 12 aa, Homo sapiens
  CDR3 for alpha chain variable domain of TCR clone 247748 (TRAV12-1, TRAJ34)
CVAAGATDKLIF

SEQ ID NO: 495496 - protein, 12 aa, Homo sapiens
  CDR3 for beta chain variable domain of TCR clone 247748 (TRBV7-9, TRBJ1-1)
CASSVVRGEAFF

SEQ ID NO: 495497 - protein, 12 aa, Homo sapiens
  CDR3 for alpha chain variable domain of TCR clone 247749 (TRAV3, TRAJ43)
CAVRDPNNDMRF

SEQ ID NO: 495498 - protein, 15 aa, Homo sapiens
  CDR3 for beta chain variable domain of TCR clone 247749 (TRBV27, TRBJ1-5)
CARSLGTGFDQPQHF

SEQ ID NO: 495499 - protein, 17 aa, Homo sapiens
  CDR3 for alpha chain variable domain of TCR clone 247750 (TRAV3, TRAJ6)
CAVRDGPRARGSYIPTF

SEQ ID NO: 495500 - protein, 17 aa, Homo sapiens
  CDR3 for beta chain variable domain of TCR clone 247750 (TRBV11-2, TRBJ2-1)
CASSLYPPGVEYNEQFF

SEQ ID NO: 495501 - protein, 15 aa, Homo sapiens
  CDR3 for alpha chain variable domain of TCR clone 247751 (TRAV3, TRAJ29)
CAVRDINSGNTPLVF

SEQ ID NO: 495502 - protein, 16 aa, Homo sapiens
  CDR3 for beta chain variable domain of TCR clone 247751 (TRBV4-1, TRBJ2-5)
GASSQTFYGDQETQYF

SEQ ID NO: 495503 - protein, 11 aa, Homo sapiens
  CDR3 for alpha chain variable domain of TCR clone 247752 (TRAV1-2, TRAJ40)
CAVPGTYKYIF

SEQ ID NO: 495504 - protein, 18 aa, Homo sapiens
  CDR3 for beta chain variable domain of TCR clone 247752 (TRBV29-1, TRBJ2-7)
CSVEVVGTSGSYDSTSGR

SEQ ID NO: 495505 - protein, 15 aa, Homo sapiens
  CDR3 for alpha chain variable domain of TCR clone 247753 (TRAV21, TRAJ53)
CATLNSGGSNYKLTF

SEQ ID NO: 495506 - protein, 14 aa, Homo sapiens
  CDR3 for beta chain variable domain of TCR clone 247753 (TRBV12-4, TRBJ1-6)
CASNLQGKGSPLHF

SEQ ID NO: 495507 - protein, 14 aa, Homo sapiens
  CDR3 for alpha chain variable domain of TCR clone 247754 (TRAV23/DV6, TRAJ4)
CAAPSSGGYNKLIF

SEQ ID NO: 495508 - protein, 16 aa, Homo sapiens
  CDR3 for beta chain variable domain of TCR clone 247754 (TRBV19, TRBJ1-1)
CASRCGGPVTGTKAFF

SEQ ID NO: 495509 - protein, 13 aa, Homo sapiens
  CDR3 for alpha chain variable domain of TCR clone 247755 (TRAV29/DV5, TRAJ48)
CAASLFGNEKLTF

SEQ ID NO: 495510 - protein, 15 aa, Homo sapiens
  CDR3 for beta chain variable domain of TCR clone 247755 (TRBV20-1, TRBJ1-1)
CSARPGQKMNTEAFF

SEQ ID NO: 495511 - protein, 14 aa, Homo sapiens
  CDR3 for alpha chain variable domain of TCR clone 247756 (TRAV25, TRAJ35)
CARRMEGFGNVLHC

SEQ ID NO: 495512 - protein, 13 aa, Homo sapiens
  CDR3 for beta chain variable domain of TCR clone 247756 (TRBV7-2, TRBJ1-4)
CARSLAGLEKLFS

SEQ ID NO: 495513 - protein, 16 aa, Homo sapiens
  CDR3 for alpha chain variable domain of TCR clone 247757 (TRAV3, TRAJ10)
CAVRDMRAGGGNKLTF

SEQ ID NO: 495514 - protein, 17 aa, Homo sapiens
  CDR3 for beta chain variable domain of TCR clone 247757 (TRBV28, TRBJ2-5)
CASGTPEGDALQETQYF

SEQ ID NO: 495515 - protein, 16 aa, Homo sapiens
  CDR3 for alpha chain variable domain of TCR clone 247758 (TRAV3, TRAJ10)
CAVRDMRAGGGNKRTF

SEQ ID NO: 495516 - protein, 14 aa, Homo sapiens
  CDR3 for beta chain variable domain of TCR clone 247758 (TRBV19, TRBJ2-7)
CASTVQGRPYEQYF

SEQ ID NO: 495517 - protein, 14 aa, Homo sapiens
  CDR3 for alpha chain variable domain of TCR clone 247759 (TRAV21, TRAJ58)
CAVRRGRSGSRLTF

SEQ ID NO: 495518 - protein, 13 aa, Homo sapiens
  CDR3 for beta chain variable domain of TCR clone 247759 (TRBV7-2, TRBJ1-6)
GASSLKFGSPLLF

SEQ ID NO: 495519 - protein, 17 aa, Homo sapiens
  CDR3 for alpha chain variable domain of TCR clone 247760 (TRAV3, TRAJ12)
CAVRDGGRMDSSYKLIS

SEQ ID NO: 495520 - protein, 13 aa, Homo sapiens
  CDR3 for beta chain variable domain of TCR clone 247760 (TRBV15, TRBJ1-6)
CATSGGLNSPLHF

SEQ ID NO: 495521 - protein, 14 aa, Homo sapiens
  CDR3 for alpha chain variable domain of TCR clone 247761 (TRAV17, TRAJ17)
CATVVRGAGNNLTF

SEQ ID NO: 495522 - protein, 14 aa, Homo sapiens
  CDR3 for beta chain variable domain of TCR clone 247761 (TRBV12-4, TRBJ2-7)
CASSFSGADYEQYF

SEQ ID NO: 495523 - protein, 14 aa, Homo sapiens
  CDR3 for alpha chain variable domain of TCR clone 247762 (TRAV1-1, TRAJ27)
CAVIYNTNAGKSTF

SEQ ID NO: 495524 - protein, 14 aa, Homo sapiens
  CDR3 for beta chain variable domain of TCR clone 247762 (TRBV15, TRBJ2-5)
CATSMGGSGETQYF

SEQ ID NO: 495525 - protein, 14 aa, Homo sapiens
  CDR3 for alpha chain variable domain of TCR clone 247763 (TRAV13-2, TRAJ9)
CAENSFTGGFKTIF

SEQ ID NO: 495526 - protein, 14 aa, Homo sapiens
  CDR3 for beta chain variable domain of TCR clone 247763 (TRBV5-1, TRBJ2-3)
CASSRGQGGGTQYF

SEQ ID NO: 495527 - protein, 13 aa, Homo sapiens
  CDR3 for alpha chain variable domain of TCR clone 247764 (TRAV21, TRAJ57)
CAVTQGGSERPVF

SEQ ID NO: 495528 - protein, 16 aa, Homo sapiens
  CDR3 for beta chain variable domain of TCR clone 247764 (TRBV29-1, TRBJ2-7)
CSVEDAEDGTAYEQYF

SEQ ID NO: 495529 - protein, 14 aa, Homo sapiens
  CDR3 for alpha chain variable domain of TCR clone 247765 (TRAV12-2, TRAJ40)
CAVKIPSGTYKYIF

SEQ ID NO: 495530 - protein, 18 aa, Homo sapiens
  CDR3 for beta chain variable domain of TCR clone 247765 (TRBV20-1, TRBJ2-6)
CGAETTPTHGSGANVLTF

SEQ ID NO: 495531 - protein, 14 aa, Homo sapiens
  CDR3 for alpha chain variable domain of TCR clone 247766 (TRAV16, TRAJ37)
CALDISGNTGKLIF

SEQ ID NO: 495532 - protein, 17 aa, Homo sapiens
  CDR3 for beta chain variable domain of TCR clone 247766 (TRBV4-1, TRBJ1-4)
CASSQEGPRGVEEKLFF

SEQ ID NO: 495533 - protein, 14 aa, Homo sapiens
  CDR3 for alpha chain variable domain of TCR clone 247767 (TRAV12-3, TRAJ10)
SHLPLTGGGNKLTF

SEQ ID NO: 495534 - protein, 17 aa, Homo sapiens
  CDR3 for beta chain variable domain of TCR clone 247767 (TRBV28, TRBJ2-2)
CASSLATGMGDAGELFF

SEQ ID NO: 495535 - protein, 18 aa, Homo sapiens
  CDR3 for alpha chain variable domain of TCR clone 247768 (TRAV13-1, TRAJ52)
CAASKRSAGGTSYGRLTF

SEQ ID NO: 495536 - protein, 13 aa, Homo sapiens
  CDR3 for beta chain variable domain of TCR clone 247768 (TRBV7-2, TRBJ2-7)
CASSSPSGSEQYF

SEQ ID NO: 495537 - protein, 13 aa, Homo sapiens
  CDR3 for alpha chain variable domain of TCR clone 247769 (TRAV13-1, TRAJ40)
CAAISPGTYKYIF

SEQ ID NO: 495538 - protein, 15 aa, Homo sapiens
  CDR3 for beta chain variable domain of TCR clone 247769 (TRBV3-1, TRBJ1-6)
CASSVAGTGDSPLHF

SEQ ID NO: 495539 - protein, 14 aa, Homo sapiens
  CDR3 for alpha chain variable domain of TCR clone 247770 (TRAV26-1, TRAJ34)
CIVRVAYNTDKLIF

SEQ ID NO: 495540 - protein, 15 aa, Homo sapiens
  CDR3 for beta chain variable domain of TCR clone 247770 (TRBV20-1, TRBJ2-7)
CSARVPAAYFYEQSF

SEQ ID NO: 495541 - protein, 19 aa, Homo sapiens
  CDR3 for alpha chain variable domain of TCR clone 247771 (TRAV26-1, TRAJ52)
CIVRVANNAGGTSYGKLTF

SEQ ID NO: 495542 - protein, 13 aa, Homo sapiens
  CDR3 for beta chain variable domain of TCR clone 247771 (TRBV19, TRBJ2-7)
CASRKAGGSEQYF

SEQ ID NO: 495543 - protein, 13 aa, Homo sapiens
  CDR3 for alpha chain variable domain of TCR clone 247772 (TRAV8-4, TRAJ10)
CAAFTGGGNKLTF

SEQ ID NO: 495544 - protein, 15 aa, Homo sapiens
  CDR3 for beta chain variable domain of TCR clone 247772 (TRBV2, TRBJ2-3)
CASSDFEKASDTQYF

SEQ ID NO: 495545 - protein, 13 aa, Homo sapiens
  CDR3 for alpha chain variable domain of TCR clone 247773 (TRAV17, TRAJ31)
CATDENNNARLMF

SEQ ID NO: 495546 - protein, 14 aa, Homo sapiens
  CDR3 for beta chain variable domain of TCR clone 247773 (TRBV11-2, TRBJ2-1)
CARSPSRQGGGQFF

SEQ ID NO: 495547 - protein, 14 aa, Homo sapiens
  CDR3 for alpha chain variable domain of TCR clone 247774 (TRAV8-4, TRAJ9)
CAVRINTGGFKTIF

SEQ ID NO: 495548 - protein, 15 aa, Homo sapiens
  CDR3 for beta chain variable domain of TCR clone 247774 (TRBV10-2, TRBJ2-6)
CSSSEQGTGANDLAF

SEQ ID NO: 495549 - protein, 15 aa, Homo sapiens
  CDR3 for alpha chain variable domain of TCR clone 247775 (TRAV16, TRAJ16)
CALQGGGSDGEKLLV

SEQ ID NO: 495550 - protein, 15 aa, Homo sapiens
  CDR3 for beta chain variable domain of TCR clone 247775 (TRBV20-1, TRBJ2-7)
CSARDRVSGMDEQYF

SEQ ID NO: 495551 - protein, 14 aa, Homo sapiens
  CDR3 for alpha chain variable domain of TCR clone 247776 (TRAV2, TRAJ9)
CAVEDRSGGFKTIF

SEQ ID NO: 495552 - protein, 16 aa, Homo sapiens
  CDR3 for beta chain variable domain of TCR clone 247776 (TRBV6-3, TRBJ2-3)
CASSPFGVKPTDTQYF

SEQ ID NO: 495553 - protein, 15 aa, Homo sapiens
  CDR3 for alpha chain variable domain of TCR clone 247777 (TRAV8-3, TRAJ45)
CASSYSGGGADGLTF

SEQ ID NO: 495554 - protein, 16 aa, Homo sapiens
  CDR3 for beta chain variable domain of TCR clone 247777 (TRBV5-1, TRBJ2-5)
CASSLTTSLGKGTQYF

SEQ ID NO: 495555 - protein, 15 aa, Homo sapiens
  CDR3 for alpha chain variable domain of TCR clone 247778 (TRAV21, TRAJ53)
CAVRQSGGSNYKLTF

SEQ ID NO: 495556 - protein, 13 aa, Homo sapiens
  CDR3 for beta chain variable domain of TCR clone 247778 (TRBV27, TRBJ2-7)
CASSLRHRYEQYF

SEQ ID NO: 495557 - protein, 14 aa, Homo sapiens
  CDR3 for alpha chain variable domain of TCR clone 247779 (TRAV9-2, TRAJ39)
CALYIYNAGNMLTF

SEQ ID NO: 495558 - protein, 17 aa, Homo sapiens
  CDR3 for beta chain variable domain of TCR clone 247779 (TRBV20-1, TRBJ2-1)
CSAPPRLAGTRYNEQFF

SEQ ID NO: 495559 - protein, 21 aa, Homo sapiens
  CDR3 for alpha chain variable domain of TCR clone 247780 (TRAV1-2, TRAJ18)
CAVRGEAQPWGGYTLEEELSS

SEQ ID NO: 495560 - protein, 19 aa, Homo sapiens
  CDR3 for beta chain variable domain of TCR clone 247780 (TRBV6-3, TRBJ1-2)
CASSYSKGRTGPPNYGYTF

SEQ ID NO: 495561 - protein, 15 aa, Homo sapiens
  CDR3 for alpha chain variable domain of TCR clone 247781 (TRAV2, TRAJ15)
CAVEDREQAGTALIF

SEQ ID NO: 495562 - protein, 17 aa, Homo sapiens
  CDR3 for beta chain variable domain of TCR clone 247781 (TRBV7-8, TRBJ2-6)
CASSAGTGGAGANVLSF

SEQ ID NO: 495563 - protein, 13 aa, Homo sapiens
  CDR3 for alpha chain variable domain of TCR clone 247782 (TRAV2, TRAJ40)
CAVVTSGTYKYIF

SEQ ID NO: 495564 - protein, 13 aa, Homo sapiens
  CDR3 for beta chain variable domain of TCR clone 247782 (TRBV28, TRBJ2-7)
CAGAQQGLNEQYF

SEQ ID NO: 495565 - protein, 13 aa, Homo sapiens
  CDR3 for alpha chain variable domain of TCR clone 247783 (TRAV17, TRAJ9)
CATAITGCFKTIF

SEQ ID NO: 495566 - protein, 16 aa, Homo sapiens
  CDR3 for beta chain variable domain of TCR clone 247783 (TRBV15, TRBJ2-1)
CATSRNLAGGYNEQFF

SEQ ID NO: 495567 - protein, 13 aa, Homo sapiens
  CDR3 for alpha chain variable domain of TCR clone 247784 (TRAV12-2, TRAJ4)
CSGFSGGYNKLIF

SEQ ID NO: 495568 - protein, 14 aa, Homo sapiens
  CDR3 for beta chain variable domain of TCR clone 247784 (TRBV24-1, TRBJ1-1)
CATSIPRGDTEAFF

SEQ ID NO: 495569 - protein, 13 aa, Homo sapiens
  CDR3 for alpha chain variable domain of TCR clone 247785 (TRAV1-2, TRAJ9)
CAALNTGGFKTIF

SEQ ID NO: 495570 - protein, 14 aa, Homo sapiens
  CDR3 for beta chain variable domain of TCR clone 247785 (TRBV7-9, TRBJ2-4)
CASSLAMGGNIQYF

SEQ ID NO: 495571 - protein, 11 aa, Homo sapiens
  CDR3 for alpha chain variable domain of TCR clone 247786 (TRAV13-1, TRAJ8)
CAARGFPKLVF

SEQ ID NO: 495572 - protein, 16 aa, Homo sapiens
  CDR3 for beta chain variable domain of TCR clone 247786 (TRBV19, TRBJ1-5)
CASSTRGTRSNQPQHF

SEQ ID NO: 495573 - protein, 14 aa, Homo sapiens
  CDR3 for alpha chain variable domain of TCR clone 247787 (TRAV35, TRAJ33)
CSGSSQDSNYQLIW

SEQ ID NO: 495574 - protein, 15 aa, Homo sapiens
  CDR3 for beta chain variable domain of TCR clone 247787 (TRBV28, TRBJ2-5)
CASSPGQGSIETQYF

SEQ ID NO: 495575 - protein, 14 aa, Homo sapiens
  CDR3 for alpha chain variable domain of TCR clone 247788 (TRAV22, TRAJ6)
CAGVWPGGSYIPTF

SEQ ID NO: 495576 - protein, 14 aa, Homo sapiens
  CDR3 for beta chain variable domain of TCR clone 247788 (TRBV9, TRBJ2-7)
CASSVGVGSYEQYF

SEQ ID NO: 495577 - protein, 13 aa, Homo sapiens
  CDR3 for alpha chain variable domain of TCR clone 247789 (TRAV12-3, TRAJ7)
CAMSASGNNRLAF

SEQ ID NO: 495578 - protein, 14 aa, Homo sapiens
  CDR3 for beta chain variable domain of TCR clone 247789 (TRBV7-2, TRBJ2-7)
CASSPKTSFYEQYF

SEQ ID NO: 495579 - protein, 15 aa, Homo sapiens
  CDR3 for alpha chain variable domain of TCR clone 247790 (TRAV12-1, TRAJ5)
CVVNMLETGRRALTF

SEQ ID NO: 495580 - protein, 17 aa, Homo sapiens
  CDR3 for beta chain variable domain of TCR clone 247790 (TRBV7-8, TRBJ2-6)
CASSAGTGGAGANVLTF

SEQ ID NO: 495581 - protein, 13 aa, Homo sapiens
  CDR3 for alpha chain variable domain of TCR clone 247791 (TRAV22, TRAJ12)
CAGRMDSSYKFIF

SEQ ID NO: 495582 - protein, 15 aa, Homo sapiens
  CDR3 for beta chain variable domain of TCR clone 247791 (TRBV10-1, TRBJ2-1)
CASSEWRGTYNEQFF

SEQ ID NO: 495583 - protein, 15 aa, Homo sapiens
  CDR3 for alpha chain variable domain of TCR clone 247792 (TRAV8-1, TRAJ6)
CAVNAGAGGSYIPTF

SEQ ID NO: 495584 - protein, 14 aa, Homo sapiens
  CDR3 for beta chain variable domain of TCR clone 247792 (TRBV25-1, TRBJ1-6)
CASSLSADISPLYF

SEQ ID NO: 495585 - protein, 16 aa, Homo sapiens
  CDR3 for alpha chain variable domain of TCR clone 247793 (TRAV20, TRAJ10)
CAVLRGLTGGGNKLTF

SEQ ID NO: 495586 - protein, 14 aa, Homo sapiens
  CDR3 for beta chain variable domain of TCR clone 247793 (TRBV13, TRBJ2-4)
CAIIDQKHSVLRRR

SEQ ID NO: 495587 - protein, 14 aa, Homo sapiens
  CDR3 for alpha chain variable domain of TCR clone 247794 (TRAV26-2, TRAJ31)
CILIPGHNNARLMF

SEQ ID NO: 495588 - protein, 16 aa, Homo sapiens
  CDR3 for beta chain variable domain of TCR clone 247794 (TRBV7-3, TRBJ2-1)
CASSLVSGSSNNEQFF

SEQ ID NO: 495589 - protein, 14 aa, Homo sapiens
  CDR3 for alpha chain variable domain of TCR clone 247795 (TRAV1-2, TRAJ16)
CAVNRFSDGQKLLF

SEQ ID NO: 495590 - protein, 17 aa, Homo sapiens
  CDR3 for beta chain variable domain of TCR clone 247795 (TRBV11-3, TRBJ2-3)
CASSPGSSGGRTDTQYF

SEQ ID NO: 495591 - protein, 13 aa, Homo sapiens
  CDR3 for alpha chain variable domain of TCR clone 247796 (TRAV27, TRAJ36)
QAPTPAGANNLFF

SEQ ID NO: 495592 - protein, 13 aa, Homo sapiens
  CDR3 for beta chain variable domain of TCR clone 247796 (TRBV7-9, TRBJ2-3)
CASSPGSTDTQYF

SEQ ID NO: 495593 - protein, 12 aa, Homo sapiens
  CDR3 for alpha chain variable domain of TCR clone 247797 (TRAV17, TRAJ20)
CATYSNDYKLSF

SEQ ID NO: 495594 - protein, 13 aa, Homo sapiens
  CDR3 for beta chain variable domain of TCR clone 247797 (TRBV19, TRBJ2-5)
CASSIPYGETQYF

SEQ ID NO: 495595 - protein, 14 aa, Homo sapiens
  CDR3 for alpha chain variable domain of TCR clone 247798 (TRAV12-2, TRAJ17)
CAVLFKAAGNKLPF

SEQ ID NO: 495596 - protein, 14 aa, Homo sapiens
  CDR3 for beta chain variable domain of TCR clone 247798 (TRBV4-1, TRBJ2-2)
CASSQAVNTGELFF

SEQ ID NO: 495597 - protein, 18 aa, Homo sapiens
  CDR3 for alpha chain variable domain of TCR clone 247799 (TRAV13-1, TRAJ52)
CTADFPNAGGTSYGKLTF

SEQ ID NO: 495598 - protein, 14 aa, Homo sapiens
  CDR3 for beta chain variable domain of TCR clone 247799 (TRBV11-2, TRBJ2-3)
CASSLYAGRDTQYF

SEQ ID NO: 495599 - protein, 14 aa, Homo sapiens
  CDR3 for alpha chain variable domain of TCR clone 247800 (TRAV8-1, TRAJ32)
CAVKARGATNKLIF

SEQ ID NO: 495600 - protein, 14 aa, Homo sapiens
  CDR3 for beta chain variable domain of TCR clone 247800 (TRBV9, TRBJ2-7)
CASSVGVGSYEQYF

SEQ ID NO: 495601 - protein, 14 aa, Homo sapiens
  CDR3 for alpha chain variable domain of TCR clone 247801 (TRAV1-2, TRAJ8)
CAVREDTGFQKLVF

SEQ ID NO: 495602 - protein, 15 aa, Homo sapiens
  CDR3 for beta chain variable domain of TCR clone 247801 (TRBV27, TRBJ2-7)
CASSPIVTGAYEQYF

SEQ ID NO: 495603 - protein, 14 aa, Homo sapiens
  CDR3 for alpha chain variable domain of TCR clone 247802 (TRAV2, TRAJ37)
CAVDFTSNTGKLIF

SEQ ID NO: 495604 - protein, 15 aa, Homo sapiens
  CDR3 for beta chain variable domain of TCR clone 247802 (TRBV20-1, TRBJ1-1)
CSASLVVTGNTEAFF

SEQ ID NO: 495605 - protein, 15 aa, Homo sapiens
  CDR3 for alpha chain variable domain of TCR clone 247803 (TRAV27, TRAJ38)
CAGRFDAGNNRKLMW

SEQ ID NO: 495606 - protein, 13 aa, Homo sapiens
  CDR3 for beta chain variable domain of TCR clone 247803 (TRBV20-1, TRBJ2-1)
TSGALPPGNEQFF

SEQ ID NO: 495607 - protein, 13 aa, Homo sapiens
  CDR3 for alpha chain variable domain of TCR clone 247804 (TRAV39, TRAJ17)
CAAQFTAGTKLTF

SEQ ID NO: 495608 - protein, 13 aa, Homo sapiens
  CDR3 for beta chain variable domain of TCR clone 247804 (TRBV3-1, TRBJ1-5)
CAITRRDGQPQHF

SEQ ID NO: 495609 - protein, 16 aa, Homo sapiens
  CDR3 for alpha chain variable domain of TCR clone 247805 (TRAV30, TRAJ24)
CGTEIVDADSWGKFQV

SEQ ID NO: 495610 - protein, 15 aa, Homo sapiens
  CDR3 for beta chain variable domain of TCR clone 247805 (TRBV12-4, TRBJ2-7)
CASSQRTSGNYEQYF

SEQ ID NO: 495611 - protein, 15 aa, Homo sapiens
  CDR3 for alpha chain variable domain of TCR clone 247806 (TRAV8-4, TRAJ3)
CAVTGENLVQQCFQD

SEQ ID NO: 495612 - protein, 16 aa, Homo sapiens
  CDR3 for beta chain variable domain of TCR clone 247806 (TRBV4-2, TRBJ1-1)
CASSQAEFGMNTEAFF

SEQ ID NO: 495613 - protein, 15 aa, Homo sapiens
  CDR3 for alpha chain variable domain of TCR clone 247807 (TRAV29/DV5, TRAJ40)
CAASAQGSRTYKYIF

SEQ ID NO: 495614 - protein, 11 aa, Homo sapiens
  CDR3 for beta chain variable domain of TCR clone 247807 (TRBV29-1, TRBJ2-5)
CSEDRTGTQYF

SEQ ID NO: 495615 - protein, 14 aa, Homo sapiens
  CDR3 for alpha chain variable domain of TCR clone 247808 (TRAV12-2, TRAJ17)
CAVLFKAAGNKLTF

SEQ ID NO: 495616 - protein, 13 aa, Homo sapiens
  CDR3 for beta chain variable domain of TCR clone 247808 (TRBV4-1, TRBJ2-2)
CASSQENTGELFF

SEQ ID NO: 495617 - protein, 17 aa, Homo sapiens
  CDR3 for alpha chain variable domain of TCR clone 247809 (TRAV13-1, TRAJ28)
CAASPPCSGAGSYQLTF

SEQ ID NO: 495618 - protein, 14 aa, Homo sapiens
  CDR3 for beta chain variable domain of TCR clone 247809 (TRBV24-1, TRBJ1-1)
CATSIPRGDTEAFF

SEQ ID NO: 495619 - protein, 13 aa, Homo sapiens
  CDR3 for alpha chain variable domain of TCR clone 247810 (TRAV1-2, TRAJ12)
CAVSMDSSYKLIF

SEQ ID NO: 495620 - protein, 15 aa, Homo sapiens
  CDR3 for beta chain variable domain of TCR clone 247810 (TRBV19, TRBJ1-1)
CASTSGQIQNTEAFF

SEQ ID NO: 495621 - protein, 14 aa, Homo sapiens
  CDR3 for alpha chain variable domain of TCR clone 247811 (TRAV12-2, TRAJ17)
CAVLFKAAGNKLTF

SEQ ID NO: 495622 - protein, 13 aa, Homo sapiens
  CDR3 for beta chain variable domain of TCR clone 247811 (TRBV5-1, TRBJ1-2)
CASSIDRPEGYTF

SEQ ID NO: 495623 - protein, 15 aa, Homo sapiens
  CDR3 for alpha chain variable domain of TCR clone 247812 (TRAV12-3, TRAJ6)
CAMSATTGGSYIPTF

SEQ ID NO: 495624 - protein, 13 aa, Homo sapiens
  CDR3 for beta chain variable domain of TCR clone 247812 (TRBV27, TRBJ2-7)
CASSLTTGYEQYF

SEQ ID NO: 495625 - protein, 12 aa, Homo sapiens
  CDR3 for alpha chain variable domain of TCR clone 247813 (TRAV3, TRAJ39)
CAVIEWSNMLTF

SEQ ID NO: 495626 - protein, 14 aa, Homo sapiens
  CDR3 for beta chain variable domain of TCR clone 247813 (TRBV7-8, TRBJ2-3)
CASSFADGQDTQYF

SEQ ID NO: 495627 - protein, 14 aa, Homo sapiens
  CDR3 for alpha chain variable domain of TCR clone 247814 (TRAV4, TRAJ37)
CLVGDMGNTGKLIF

SEQ ID NO: 495628 - protein, 15 aa, Homo sapiens
  CDR3 for beta chain variable domain of TCR clone 247814 (TRBV6-3, TRBJ2-7)
CASSSPGTVFYEQYF

SEQ ID NO: 495629 - protein, 23 aa, Homo sapiens
  CDR3 for alpha chain variable domain of TCR clone 247815 (TRAV27, )
CAGDRAGNNHIQNPDPAVYQLTD

SEQ ID NO: 495630 - protein, 14 aa, Homo sapiens
  CDR3 for beta chain variable domain of TCR clone 247815 (TRBV7-2, TRBJ1-1)
CASSFLTGTTEAFF

SEQ ID NO: 495631 - protein, 16 aa, Homo sapiens
  CDR3 for alpha chain variable domain of TCR clone 247816 (TRAV21, TRAJ17)
CAVRPGEEAAGNKLTF

SEQ ID NO: 495632 - protein, 16 aa, Homo sapiens
  CDR3 for beta chain variable domain of TCR clone 247816 (TRBV2, TRBJ2-7)
CASSEPWTEPSYEQYF

SEQ ID NO: 495633 - protein, 23 aa, Homo sapiens
  CDR3 for alpha chain variable domain of TCR clone 247817 (TRAV30, TRAJ43)
CTLRPPSSVTQEPTSAALSDMRF

SEQ ID NO: 495634 - protein, 19 aa, Homo sapiens
  CDR3 for beta chain variable domain of TCR clone 247817 (TRBV2, TRBJ2-7)
CASSDDETSGRANDYEQYF

SEQ ID NO: 495635 - protein, 17 aa, Homo sapiens
  CDR3 for alpha chain variable domain of TCR clone 247818 (TRAV3, TRAJ6)
CAVRDGPRAGGSYLPTF

SEQ ID NO: 495636 - protein, 18 aa, Homo sapiens
  CDR3 for beta chain variable domain of TCR clone 247818 (TRBV11-2, TRBJ2-3)
CASSLGGASRGAPNTQYF

SEQ ID NO: 495637 - protein, 12 aa, Homo sapiens
  CDR3 for alpha chain variable domain of TCR clone 247819 (TRAV12-3, TRAJ17)
CAMTLTGNKLTF

SEQ ID NO: 495638 - protein, 14 aa, Homo sapiens
  CDR3 for beta chain variable domain of TCR clone 247819 (TRBV7-9, TRBJ2-3)
CASSLEQGTNTQYF

SEQ ID NO: 495639 - protein, 17 aa, Homo sapiens
  CDR3 for alpha chain variable domain of TCR clone 247820 (TRAV38-2/DV8, TRAJ56)
CAYRSEVGTGANSKLTF

SEQ ID NO: 495640 - protein, 14 aa, Homo sapiens
  CDR3 for beta chain variable domain of TCR clone 247820 (TRBV11-1, TRBJ1-1)
CASSVEHPNTEAFF

SEQ ID NO: 495641 - protein, 14 aa, Homo sapiens
  CDR3 for alpha chain variable domain of TCR clone 247821 (TRAV1-2, TRAJ8)
CAVREDTGFPKLVF

SEQ ID NO: 495642 - protein, 14 aa, Homo sapiens
  CDR3 for beta chain variable domain of TCR clone 247821 (TRBV12-5, TRBJ2-5)
CASGSRTHQETHYF

SEQ ID NO: 495643 - protein, 17 aa, Homo sapiens
  CDR3 for alpha chain variable domain of TCR clone 247822 (TRAV8-6, TRAJ52)
CAVTRNAGGTSSGKLTF

SEQ ID NO: 495644 - protein, 13 aa, Homo sapiens
  CDR3 for beta chain variable domain of TCR clone 247822 (TRBV7-9, TRBJ1-2)
CASSLKQNYGYTF

SEQ ID NO: 495645 - protein, 15 aa, Homo sapiens
  CDR3 for alpha chain variable domain of TCR clone 247823 (TRAV3, TRAJ5)
CAVRDRKTGRRALTF

SEQ ID NO: 495646 - protein, 14 aa, Homo sapiens
  CDR3 for beta chain variable domain of TCR clone 247823 (TRBV7-8, TRBJ1-5)
CASSSHGSNQPQHF

SEQ ID NO: 495647 - protein, 16 aa, Homo sapiens
  CDR3 for alpha chain variable domain of TCR clone 247824 (TRAV20, TRAJ22)
CAVQASSPGSARQLTF

SEQ ID NO: 495648 - protein, 16 aa, Homo sapiens
  CDR3 for beta chain variable domain of TCR clone 247824 (TRBV20-1, TRBJ1-5)
CSASRGTGYSNQPQHF

SEQ ID NO: 495649 - protein, 15 aa, Homo sapiens
  CDR3 for alpha chain variable domain of TCR clone 247825 (TRAV17, TRAJ23)
CATDAEDNQGGKLIF

SEQ ID NO: 495650 - protein, 14 aa, Homo sapiens
  CDR3 for beta chain variable domain of TCR clone 247825 (TRBV19, TRBJ2-7)
CASSIFAGTYEQYF

SEQ ID NO: 495651 - protein, 15 aa, Homo sapiens
  CDR3 for alpha chain variable domain of TCR clone 247826 (TRAV21, TRAJ53)
CATLNGGGSNYKLTF

SEQ ID NO: 495652 - protein, 14 aa, Homo sapiens
  CDR3 for beta chain variable domain of TCR clone 247826 (TRBV7-2, TRBJ2-7)
CASRSQGAAYEQYF

SEQ ID NO: 495653 - protein, 16 aa, Homo sapiens
  CDR3 for alpha chain variable domain of TCR clone 247827 (TRAV3, TRAJ13)
CAVRDPNSGGYQKVTF

SEQ ID NO: 495654 - protein, 13 aa, Homo sapiens
  CDR3 for beta chain variable domain of TCR clone 247827 (TRBV7-9, TRBJ2-7)
CASSLQGLYEQYF

SEQ ID NO: 495655 - protein, 13 aa, Homo sapiens
  CDR3 for alpha chain variable domain of TCR clone 247828 (TRAV21, TRAJ20)
CAGGLRVDYKLSF

SEQ ID NO: 495656 - protein, 14 aa, Homo sapiens
  CDR3 for beta chain variable domain of TCR clone 247828 (TRBV4-1, TRBJ2-2)
CASSQAVNTGELFF

SEQ ID NO: 495657 - protein, 14 aa, Homo sapiens
  CDR3 for alpha chain variable domain of TCR clone 247829 (TRAV17, TRAJ39)
CATDPVRAGHTLTF

SEQ ID NO: 495658 - protein, 15 aa, Homo sapiens
  CDR3 for beta chain variable domain of TCR clone 247829 (TRBV13, TRBJ1-5)
CASSFGQGGVQPQHF

SEQ ID NO: 495659 - protein, 13 aa, Homo sapiens
  CDR3 for alpha chain variable domain of TCR clone 247830 (TRAV27, TRAJ45)
CRSSGGVADVLTF

SEQ ID NO: 495660 - protein, 17 aa, Homo sapiens
  CDR3 for beta chain variable domain of TCR clone 247830 (TRBV11-2, TRBJ2-1)
CASSLYPPGVEYNEQFF

SEQ ID NO: 495661 - protein, 12 aa, Homo sapiens
  CDR3 for alpha chain variable domain of TCR clone 247831 (TRAV1-2, TRAJ9)
CAGYTGGFKTIF

SEQ ID NO: 495662 - protein, 14 aa, Homo sapiens
  CDR3 for beta chain variable domain of TCR clone 247831 (TRBV12-4, TRBJ2-3)
CASSLVPSTDTQYF

SEQ ID NO: 495663 - protein, 18 aa, Homo sapiens
  CDR3 for alpha chain variable domain of TCR clone 247832 (TRAV26-1, TRAJ30)
CCVLLHRQSTNRNDKIIF

SEQ ID NO: 495664 - protein, 18 aa, Homo sapiens
  CDR3 for beta chain variable domain of TCR clone 247832 (TRBV4-1, TRBJ1-5)
CASSQDPRGQGLNQPQHF

SEQ ID NO: 495665 - protein, 15 aa, Homo sapiens
  CDR3 for alpha chain variable domain of TCR clone 247833 (TRAV17, TRAJ35)
CATALVIGVGNVLHC

SEQ ID NO: 495666 - protein, 15 aa, Homo sapiens
  CDR3 for beta chain variable domain of TCR clone 247833 (TRBV7-9, TRBJ2-7)
CASSLALAEAYEQYF

SEQ ID NO: 495667 - protein, 11 aa, Homo sapiens
  CDR3 for alpha chain variable domain of TCR clone 247834 (TRAV21, TRAJ34)
CAHYNTDKLIF

SEQ ID NO: 495668 - protein, 13 aa, Homo sapiens
  CDR3 for beta chain variable domain of TCR clone 247834 (TRBV11-1, TRBJ1-2)
YASSLVADYGYTF

SEQ ID NO: 495669 - protein, 14 aa, Homo sapiens
  CDR3 for alpha chain variable domain of TCR clone 247835 (TRAV12-1, TRAJ17)
CVVNYKAAGNKLTF

SEQ ID NO: 495670 - protein, 14 aa, Homo sapiens
  CDR3 for beta chain variable domain of TCR clone 247835 (TRBV7-8, TRBJ2-3)
CARSLEAGTDTQYF

SEQ ID NO: 495671 - protein, 14 aa, Homo sapiens
  CDR3 for alpha chain variable domain of TCR clone 247836 (TRAV12-2, TRAJ41)
CAVNRANSGSALSF

SEQ ID NO: 495672 - protein, 13 aa, Homo sapiens
  CDR3 for beta chain variable domain of TCR clone 247836 (TRBV7-9, TRBJ1-2)
CASSLKQNYGYTF

SEQ ID NO: 495673 - protein, 15 aa, Homo sapiens
  CDR3 for alpha chain variable domain of TCR clone 247837 (TRAV8-3, TRAJ27)
CAVGPSKTNAGKSTF

SEQ ID NO: 495674 - protein, 13 aa, Homo sapiens
  CDR3 for beta chain variable domain of TCR clone 247837 (TRBV12-5, TRBJ1-2)
CANGVRTGNGYTF

SEQ ID NO: 495675 - protein, 15 aa, Homo sapiens
  CDR3 for alpha chain variable domain of TCR clone 247838 (TRAV1-1, TRAJ24)
CALSGGTDSWGKFQF

SEQ ID NO: 495676 - protein, 16 aa, Homo sapiens
  CDR3 for beta chain variable domain of TCR clone 247838 (TRBV2, TRBJ2-7)
CASSEPWTGPYYEQYF

SEQ ID NO: 495677 - protein, 14 aa, Homo sapiens
  CDR3 for alpha chain variable domain of TCR clone 247839 (TRAV8-3, TRAJ4)
CAVGASGGYNKLIF

SEQ ID NO: 495678 - protein, 16 aa, Homo sapiens
  CDR3 for beta chain variable domain of TCR clone 247839 (TRBV4-3, TRBJ2-2)
CASSQLQGSGTGELFF

SEQ ID NO: 495679 - protein, 12 aa, Homo sapiens
  CDR3 for alpha chain variable domain of TCR clone 247840 (TRAV13-2, TRAJ23)
CAERHRGGKLIF

SEQ ID NO: 495680 - protein, 16 aa, Homo sapiens
  CDR3 for beta chain variable domain of TCR clone 247840 (TRBV20-1, TRBJ2-7)
CSASTSWRLSSYEQYL

SEQ ID NO: 495681 - protein, 15 aa, Homo sapiens
  CDR3 for alpha chain variable domain of TCR clone 247841 (TRAV35, TRAJ40)
CAGHLWDSGTYKYIF

SEQ ID NO: 495682 - protein, 12 aa, Homo sapiens
  CDR3 for beta chain variable domain of TCR clone 247841 (TRBV7-8, TRBJ2-7)
CASSLAGYEQYF

SEQ ID NO: 495683 - protein, 11 aa, Homo sapiens
  CDR3 for alpha chain variable domain of TCR clone 247842 (TRAV13-1, TRAJ6)
CATLGSYIPTF

SEQ ID NO: 495684 - protein, 13 aa, Homo sapiens
  CDR3 for beta chain variable domain of TCR clone 247842 (TRBV6-6, TRBJ2-1)
CASSLHQGDEQLF

SEQ ID NO: 495685 - protein, 13 aa, Homo sapiens
  CDR3 for alpha chain variable domain of TCR clone 247843 (TRAV36/DV7, TRAJ41)
CAVEANSGYALNF

SEQ ID NO: 495686 - protein, 12 aa, Homo sapiens
  CDR3 for beta chain variable domain of TCR clone 247843 (TRBV28, TRBJ2-3)
CASSLYRDTQYF

SEQ ID NO: 495687 - protein, 17 aa, Homo sapiens
  CDR3 for alpha chain variable domain of TCR clone 247844 (TRAV3, TRAJ42)
CAVRDRGYGGSQGNLIF

SEQ ID NO: 495688 - protein, 14 aa, Homo sapiens
  CDR3 for beta chain variable domain of TCR clone 247844 (TRBV19, TRBJ2-1)
CASPTFVLSGEQSF

SEQ ID NO: 495689 - protein, 13 aa, Homo sapiens
  CDR3 for alpha chain variable domain of TCR clone 247845 (TRAV12-3, TRAJ40)
CAMSARGTYKYIF

SEQ ID NO: 495690 - protein, 16 aa, Homo sapiens
  CDR3 for beta chain variable domain of TCR clone 247845 (TRBV20-1, TRBJ2-3)
CSGEAGIAGGQDTQYF

SEQ ID NO: 495691 - protein, 15 aa, Homo sapiens
  CDR3 for alpha chain variable domain of TCR clone 247846 (TRAV8-1, TRAJ34)
CVVNSRTYNTDKLIF

SEQ ID NO: 495692 - protein, 18 aa, Homo sapiens
  CDR3 for beta chain variable domain of TCR clone 247846 (TRBV3-1, TRBJ1-2)
CSSSQDVIGWNGDYGYTF

SEQ ID NO: 495693 - protein, 13 aa, Homo sapiens
  CDR3 for alpha chain variable domain of TCR clone 247847 (TRAV3, TRAJ20)
CAVRPLHDYKLSF

SEQ ID NO: 495694 - protein, 12 aa, Homo sapiens
  CDR3 for beta chain variable domain of TCR clone 247847 (TRBV6-1, TRBJ2-1)
CATYGLNNEQFF

SEQ ID NO: 495695 - protein, 14 aa, Homo sapiens
  CDR3 for alpha chain variable domain of TCR clone 247848 (TRAV12-2, TRAJ5)
CAVNIRVRGKALTF

SEQ ID NO: 495696 - protein, 16 aa, Homo sapiens
  CDR3 for beta chain variable domain of TCR clone 247848 (TRBV5-1, TRBJ1-6)
CASSFTGTGGDSPLHF

SEQ ID NO: 495697 - protein, 13 aa, Homo sapiens
  CDR3 for alpha chain variable domain of TCR clone 247849 (TRAV12-3, TRAJ13)
CSMSSGGYQKVTF

SEQ ID NO: 495698 - protein, 13 aa, Homo sapiens
  CDR3 for beta chain variable domain of TCR clone 247849 (TRBV20-1, TRBJ1-1)
CSAPPGGHTEAFF

SEQ ID NO: 495699 - protein, 19 aa, Homo sapiens
  CDR3 for alpha chain variable domain of TCR clone 247850 (TRAV26-1, TRAJ52)
CIVRAHRNAGGTSYGKLTF

SEQ ID NO: 495700 - protein, 13 aa, Homo sapiens
  CDR3 for beta chain variable domain of TCR clone 247850 (TRBV7-2, TRBJ2-2)
CASSLAVTGELFF

SEQ ID NO: 495701 - protein, 14 aa, Homo sapiens
  CDR3 for alpha chain variable domain of TCR clone 247851 (TRAV16, TRAJ26)
CALSSANYGQNLGF

SEQ ID NO: 495702 - protein, 16 aa, Homo sapiens
  CDR3 for beta chain variable domain of TCR clone 247851 (TRBV20-1, TRBJ1-4)
CSAPGQGLLTNEKLFF

SEQ ID NO: 495703 - protein, 13 aa, Homo sapiens
  CDR3 for alpha chain variable domain of TCR clone 247852 (TRAV12-2, TRAJ54)
CAVKNQGAQKLVF

SEQ ID NO: 495704 - protein, 15 aa, Homo sapiens
  CDR3 for beta chain variable domain of TCR clone 247852 (TRBV20-1, TRBJ2-7)
CSARDRVSGMDEQYF

SEQ ID NO: 495705 - protein, 11 aa, Homo sapiens
  CDR3 for alpha chain variable domain of TCR clone 247853 (TRAV3, TRAJ21)
CAVGNFNKFYF

SEQ ID NO: 495706 - protein, 16 aa, Homo sapiens
  CDR3 for beta chain variable domain of TCR clone 247853 (TRBV10-3, TRBJ1-1)
CAISTGFPAMNTEAFF

SEQ ID NO: 495707 - protein, 14 aa, Homo sapiens
  CDR3 for alpha chain variable domain of TCR clone 247854 (TRAV3, TRAJ37)
CAVKESGNTGKLIF

SEQ ID NO: 495708 - protein, 15 aa, Homo sapiens
  CDR3 for beta chain variable domain of TCR clone 247854 (TRBV11-2, TRBJ2-3)
CASSQTRGRRDTQYF

SEQ ID NO: 495709 - protein, 12 aa, Homo sapiens
  CDR3 for alpha chain variable domain of TCR clone 247855 (TRAV3, TRAJ43)
CAVRDPNNDMRF

SEQ ID NO: 495710 - protein, 17 aa, Homo sapiens
  CDR3 for beta chain variable domain of TCR clone 247855 (TRBV7-8, TRBJ2-6)
CASSAGTVGAGANVLTF

SEQ ID NO: 495711 - protein, 12 aa, Homo sapiens
  CDR3 for alpha chain variable domain of TCR clone 247856 (TRAV8-2, TRAJ6)
CVVSKGSYIPTF

SEQ ID NO: 495712 - protein, 18 aa, Homo sapiens
  CDR3 for beta chain variable domain of TCR clone 247856 (TRBV4-1, TRBJ2-3)
CASSQGGANGGATDTQYF

SEQ ID NO: 495713 - protein, 13 aa, Homo sapiens
  CDR3 for alpha chain variable domain of TCR clone 247857 (TRAV26-2, TRAJ43)
CILRAVNNNDMRF

SEQ ID NO: 495714 - protein, 15 aa, Homo sapiens
  CDR3 for beta chain variable domain of TCR clone 247857 (TRBV7-2, TRBJ2-1)
CASTHGTGIYTEQFF

SEQ ID NO: 495715 - protein, 13 aa, Homo sapiens
  CDR3 for alpha chain variable domain of TCR clone 247858 (TRAV2, TRAJ15)
CAVASQAGTALIF

SEQ ID NO: 495716 - protein, 16 aa, Homo sapiens
  CDR3 for beta chain variable domain of TCR clone 247858 (TRBV20-1, TRBJ2-1)
CSALTWTSGSYNEQFF

SEQ ID NO: 495717 - protein, 14 aa, Homo sapiens
  CDR3 for alpha chain variable domain of TCR clone 247859 (TRAV26-1, TRAJ45)
CIEVTGGGADGLTF

SEQ ID NO: 495718 - protein, 16 aa, Homo sapiens
  CDR3 for beta chain variable domain of TCR clone 247859 (TRBV12-5, TRBJ2-5)
CASGPRTSGNQETQYF

SEQ ID NO: 495719 - protein, 14 aa, Homo sapiens
  CDR3 for alpha chain variable domain of TCR clone 247860 (TRAV12-2, TRAJ13)
CAVKKTGGYQKVTF

SEQ ID NO: 495720 - protein, 16 aa, Homo sapiens
  CDR3 for beta chain variable domain of TCR clone 247860 (TRBV2, TRBJ2-1)
WASRSPAGGKYNEQFF

SEQ ID NO: 495721 - protein, 19 aa, Homo sapiens
  CDR3 for alpha chain variable domain of TCR clone 247861 (TRAV1-2, TRAJ26)
CLLPLCCERPDNYGQNFVF

SEQ ID NO: 495722 - protein, 14 aa, Homo sapiens
  CDR3 for beta chain variable domain of TCR clone 247861 (TRBV12-4, TRBJ2-7)
CASSRQGRSYEQYF

SEQ ID NO: 495723 - protein, 14 aa, Homo sapiens
  CDR3 for alpha chain variable domain of TCR clone 247862 (TRAV12-1, TRAJ13)
CVVIDSGGYKKVTF

SEQ ID NO: 495724 - protein, 13 aa, Homo sapiens
  CDR3 for beta chain variable domain of TCR clone 247862 (TRBV20-1, TRBJ1-1)
CSAPPGGHTEAFF

SEQ ID NO: 495725 - protein, 17 aa, Homo sapiens
  CDR3 for alpha chain variable domain of TCR clone 247863 (TRAV3, TRAJ12)
CCERRDGTMDSSYKLIF

SEQ ID NO: 495726 - protein, 15 aa, Homo sapiens
  CDR3 for beta chain variable domain of TCR clone 247863 (TRBV5-5, TRBJ1-5)
CASSLRGGGEQPQHF

SEQ ID NO: 495727 - protein, 15 aa, Homo sapiens
  CDR3 for alpha chain variable domain of TCR clone 247864 (TRAV1-2, TRAJ28)
CAVQYSGAGSYQLTF

SEQ ID NO: 495728 - protein, 13 aa, Homo sapiens
  CDR3 for beta chain variable domain of TCR clone 247864 (TRBV20-1, TRBJ2-7)
CSAAHTSGYEQYF

SEQ ID NO: 495729 - protein, 15 aa, Homo sapiens
  CDR3 for alpha chain variable domain of TCR clone 247865 (TRAV21, TRAJ38)
CAVRQDAGNNRKLIW

SEQ ID NO: 495730 - protein, 16 aa, Homo sapiens
  CDR3 for beta chain variable domain of TCR clone 247865 (TRBV4-2, TRBJ1-1)
CASRPRDGGGDTEAFF

SEQ ID NO: 495731 - protein, 14 aa, Homo sapiens
  CDR3 for alpha chain variable domain of TCR clone 247866 (TRAV1-2, TRAJ29)
CAVRELTSATPLVF

SEQ ID NO: 495732 - protein, 15 aa, Homo sapiens
  CDR3 for beta chain variable domain of TCR clone 247866 (TRBV2, TRBJ2-3)
CASSDFEKATDTQYV

SEQ ID NO: 495733 - protein, 15 aa, Homo sapiens
  CDR3 for alpha chain variable domain of TCR clone 247867 (TRAV12-2, TRAJ43)
CAFDMRFGAGTRLTV

SEQ ID NO: 495734 - protein, 15 aa, Homo sapiens
  CDR3 for beta chain variable domain of TCR clone 247867 (TRBV19, TRBJ1-5)
CASSILTGENQPQHF

SEQ ID NO: 495735 - protein, 17 aa, Homo sapiens
  CDR3 for alpha chain variable domain of TCR clone 247868 (TRAV4, TRAJ18)
CLVGERSVGSALGRLYF

SEQ ID NO: 495736 - protein, 14 aa, Homo sapiens
  CDR3 for beta chain variable domain of TCR clone 247868 (TRBV6-5, TRBJ1-2)
CASSYDGTGGGYTF

SEQ ID NO: 495737 - protein, 17 aa, Homo sapiens
  CDR3 for alpha chain variable domain of TCR clone 247869 (TRAV4, TRAJ28)
CLVGDRARGLGVTNSLS

SEQ ID NO: 495738 - protein, 14 aa, Homo sapiens
  CDR3 for beta chain variable domain of TCR clone 247869 (TRBV4-1, TRBJ2-7)
CASSPVAGGDEQYF

SEQ ID NO: 495739 - protein, 11 aa, Homo sapiens
  CDR3 for alpha chain variable domain of TCR clone 247870 (TRAV35, TRAJ30)
CAGLRDDKIIF

SEQ ID NO: 495740 - protein, 12 aa, Homo sapiens
  CDR3 for beta chain variable domain of TCR clone 247870 (TRBV6-3, TRBJ2-5)
CASSRDLETQYF

SEQ ID NO: 495741 - protein, 15 aa, Homo sapiens
  CDR3 for alpha chain variable domain of TCR clone 247871 (TRAV29/DV5, TRAJ40)
CAASAQGSGTYKYIF

SEQ ID NO: 495742 - protein, 15 aa, Homo sapiens
  CDR3 for beta chain variable domain of TCR clone 247871 (TRBV7-2, TRBJ2-3)
CASSLAGACIDTQYF

SEQ ID NO: 495743 - protein, 20 aa, Homo sapiens
  CDR3 for alpha chain variable domain of TCR clone 247872 (TRAV13-1, TRAJ10)
CAATGHGRRRQTHLWDRHSA

SEQ ID NO: 495744 - protein, 13 aa, Homo sapiens
  CDR3 for beta chain variable domain of TCR clone 247872 (TRBV20-1, TRBJ1-1)
CSARGGGNTEAFF

SEQ ID NO: 495745 - protein, 12 aa, Homo sapiens
  CDR3 for alpha chain variable domain of TCR clone 247873 (TRAV8-3, TRAJ26)
CAGDNYGQNFDF

SEQ ID NO: 495746 - protein, 13 aa, Homo sapiens
  CDR3 for beta chain variable domain of TCR clone 247873 (TRBV20-1, TRBJ1-1)
CSAGTVGNTEAFF

SEQ ID NO: 495747 - protein, 14 aa, Homo sapiens
  CDR3 for alpha chain variable domain of TCR clone 247874 (TRAV35, TRAJ33)
CWPRGRDSNYELIW

SEQ ID NO: 495748 - protein, 11 aa, Homo sapiens
  CDR3 for beta chain variable domain of TCR clone 247874 (TRBV10-3, TRBJ2-7)
CAISEGLEQYF

SEQ ID NO: 495749 - protein, 14 aa, Homo sapiens
  CDR3 for alpha chain variable domain of TCR clone 247875 (TRAV17, TRAJ54)
CATDDNQGAQKLVF

SEQ ID NO: 495750 - protein, 12 aa, Homo sapiens
  CDR3 for beta chain variable domain of TCR clone 247875 (TRBV7-9, TRBJ2-7)
CASSIKREEQYF

SEQ ID NO: 495751 - protein, 18 aa, Homo sapiens
  CDR3 for alpha chain variable domain of TCR clone 247876 (TRAV13-1, TRAJ10)
CAASKGRAVTGGGNKLTF

SEQ ID NO: 495752 - protein, 14 aa, Homo sapiens
  CDR3 for beta chain variable domain of TCR clone 247876 (TRBV18, TRBJ2-7)
CASSPRGGAYERYF

SEQ ID NO: 495753 - protein, 14 aa, Homo sapiens
  CDR3 for alpha chain variable domain of TCR clone 247877 (TRAV12-2, TRAJ40)
CAVKSPSGTYKYIF

SEQ ID NO: 495754 - protein, 14 aa, Homo sapiens
  CDR3 for beta chain variable domain of TCR clone 247877 (TRBV20-1, TRBJ1-1)
CSAQTRIGGTEAFF

SEQ ID NO: 495755 - protein, 13 aa, Homo sapiens
  CDR3 for alpha chain variable domain of TCR clone 247878 (TRAV1-2, TRAJ9)
CAVLNTGGFKTIF

SEQ ID NO: 495756 - protein, 13 aa, Homo sapiens
  CDR3 for beta chain variable domain of TCR clone 247878 (TRBV19, TRBJ2-7)
CAGRKAGGSEQYF

SEQ ID NO: 495757 - protein, 13 aa, Homo sapiens
  CDR3 for alpha chain variable domain of TCR clone 247879 (TRAV12-1, TRAJ11)
CVVNRAGYSTLTF

SEQ ID NO: 495758 - protein, 12 aa, Homo sapiens
  CDR3 for beta chain variable domain of TCR clone 247879 (TRBV11-2, TRBJ2-2)
CASSLGGGELFF

SEQ ID NO: 495759 - protein, 14 aa, Homo sapiens
  CDR3 for alpha chain variable domain of TCR clone 247880 (TRAV2, TRAJ9)
CALEDRSGGFKTIF

SEQ ID NO: 495760 - protein, 14 aa, Homo sapiens
  CDR3 for beta chain variable domain of TCR clone 247880 (TRBV5-1, TRBJ2-3)
CASSLFGPTDTQYF

SEQ ID NO: 495761 - protein, 12 aa, Homo sapiens
  CDR3 for alpha chain variable domain of TCR clone 247881 (TRAV8-3, TRAJ26)
CAGDNYGQNFVS

SEQ ID NO: 495762 - protein, 13 aa, Homo sapiens
  CDR3 for beta chain variable domain of TCR clone 247881 (TRBV6-1, TRBJ2-1)
CASSPDRNNEQFF

SEQ ID NO: 495763 - protein, 14 aa, Homo sapiens
  CDR3 for alpha chain variable domain of TCR clone 247882 (TRAV3, TRAJ33)
CAVRDMGSDYQLIW

SEQ ID NO: 495764 - protein, 17 aa, Homo sapiens
  CDR3 for beta chain variable domain of TCR clone 247882 (TRBV19, TRBJ2-1)
CASSIWSAQPTHNEQFF

SEQ ID NO: 495765 - protein, 15 aa, Homo sapiens
  CDR3 for alpha chain variable domain of TCR clone 247883 (TRAV3, TRAJ12)
CAVRDIRDSSYKLIF

SEQ ID NO: 495766 - protein, 14 aa, Homo sapiens
  CDR3 for beta chain variable domain of TCR clone 247883 (TRBV7-2, TRBJ2-5)
CASSTGGELKTQYF

SEQ ID NO: 495767 - protein, 17 aa, Homo sapiens
  CDR3 for alpha chain variable domain of TCR clone 247884 (TRAV35, TRAJ28)
CAGLQVYSVAGSYQLTF

SEQ ID NO: 495768 - protein, 15 aa, Homo sapiens
  CDR3 for beta chain variable domain of TCR clone 247884 (TRBV2, TRBJ1-2)
CASSEIGGANYGYTF

SEQ ID NO: 495769 - protein, 14 aa, Homo sapiens
  CDR3 for alpha chain variable domain of TCR clone 247885 (TRAV34, TRAJ44)
CGADGTGTASKLTF

SEQ ID NO: 495770 - protein, 16 aa, Homo sapiens
  CDR3 for beta chain variable domain of TCR clone 247885 (TRBV11-2, TRBJ1-2)
CASSPSGREANYGYTF

SEQ ID NO: 495771 - protein, 18 aa, Homo sapiens
  CDR3 for alpha chain variable domain of TCR clone 247886 (TRAV21, TRAJ52)
CAVRPPPAGGTSYGKLTF

SEQ ID NO: 495772 - protein, 15 aa, Homo sapiens
  CDR3 for beta chain variable domain of TCR clone 247886 (TRBV19, TRBJ2-1)
CASSGGGTLYNEQFF

SEQ ID NO: 495773 - protein, 22 aa, Homo sapiens
  CDR3 for alpha chain variable domain of TCR clone 247887 (TRAV4, )
CLVGPHNYDIQNPDPAVYQLID

SEQ ID NO: 495774 - protein, 17 aa, Homo sapiens
  CDR3 for beta chain variable domain of TCR clone 247887 (TRBV24-1, TRBJ2-1)
CATSDVSTSGTYNEQFF

SEQ ID NO: 495775 - protein, 15 aa, Homo sapiens
  CDR3 for alpha chain variable domain of TCR clone 247888 (TRAV17, TRAJ10)
CATVLLTGGGNKLTF

SEQ ID NO: 495776 - protein, 14 aa, Homo sapiens
  CDR3 for beta chain variable domain of TCR clone 247888 (TRBV19, TRBJ2-1)
CASPTFVLSGEQFF

SEQ ID NO: 495777 - protein, 12 aa, Homo sapiens
  CDR3 for alpha chain variable domain of TCR clone 247889 (TRAV17, TRAJ57)
CATDGGSEKLVF

SEQ ID NO: 495778 - protein, 17 aa, Homo sapiens
  CDR3 for beta chain variable domain of TCR clone 247889 (TRBV7-8, TRBJ2-6)
CASSAGTGGAGANVLTF

SEQ ID NO: 495779 - protein, 15 aa, Homo sapiens
  CDR3 for alpha chain variable domain of TCR clone 247890 (TRAV12-2, TRAJ43)
CAFDMRFGAGTRLTV

SEQ ID NO: 495780 - protein, 15 aa, Homo sapiens
  CDR3 for beta chain variable domain of TCR clone 247890 (TRBV20-1, TRBJ2-3)
CSASGLAGGRNTQYF

SEQ ID NO: 495781 - protein, 18 aa, Homo sapiens
  CDR3 for alpha chain variable domain of TCR clone 247891 (TRAV21, TRAJ52)
CAVRPFPAGGTSYGKLTF

SEQ ID NO: 495782 - protein, 17 aa, Homo sapiens
  CDR3 for beta chain variable domain of TCR clone 247891 (TRBV13, TRBJ2-3)
CASSRSRVAGGRNTQYF

SEQ ID NO: 495783 - protein, 13 aa, Homo sapiens
  CDR3 for alpha chain variable domain of TCR clone 247892 (TRAV13-1, TRAJ10)
CAALEGGGNKLTL

SEQ ID NO: 495784 - protein, 17 aa, Homo sapiens
  CDR3 for beta chain variable domain of TCR clone 247892 (TRBV7-3, TRBJ2-2)
CASSLSGTSGGTGELFF

SEQ ID NO: 495785 - protein, 14 aa, Homo sapiens
  CDR3 for alpha chain variable domain of TCR clone 247893 (TRAV16, TRAJ26)
CALTRWSESCLWSR

SEQ ID NO: 495786 - protein, 15 aa, Homo sapiens
  CDR3 for beta chain variable domain of TCR clone 247893 (TRBV6-3, TRBJ2-7)
CASSSPRTVFYEQYF

SEQ ID NO: 495787 - protein, 14 aa, Homo sapiens
  CDR3 for alpha chain variable domain of TCR clone 247894 (TRAV23/DV6, TRAJ27)
CAASRDTNAVKSTF

SEQ ID NO: 495788 - protein, 13 aa, Homo sapiens
  CDR3 for beta chain variable domain of TCR clone 247894 (TRBV20-1, TRBJ1-5)
CSASGRGNQPQHF

SEQ ID NO: 495789 - protein, 17 aa, Homo sapiens
  CDR3 for alpha chain variable domain of TCR clone 247895 (TRAV3, TRAJ42)
CAVRDRDYGGSQGNSIF

SEQ ID NO: 495790 - protein, 15 aa, Homo sapiens
  CDR3 for beta chain variable domain of TCR clone 247895 (TRBV3-1, TRBJ2-1)
CASSQVVDDGEEQFF

SEQ ID NO: 495791 - protein, 12 aa, Homo sapiens
  CDR3 for alpha chain variable domain of TCR clone 247896 (TRAV22, TRAJ22)
CAPGGSARQLTF

SEQ ID NO: 495792 - protein, 16 aa, Homo sapiens
  CDR3 for beta chain variable domain of TCR clone 247896 (TRBV7-9, TRBJ1-2)
CASSLGFSSGEDGYTF

SEQ ID NO: 495793 - protein, 13 aa, Homo sapiens
  CDR3 for alpha chain variable domain of TCR clone 247897 (TRAV12-1, TRAJ16)
CVVNTRNGQKLLF

SEQ ID NO: 495794 - protein, 14 aa, Homo sapiens
  CDR3 for beta chain variable domain of TCR clone 247897 (TRBV18, TRBJ2-7)
CASSPRGGAYEQYF

SEQ ID NO: 495795 - protein, 13 aa, Homo sapiens
  CDR3 for alpha chain variable domain of TCR clone 247898 (TRAV17, TRAJ34)
CATVPYNTDKLIF

SEQ ID NO: 495796 - protein, 16 aa, Homo sapiens
  CDR3 for beta chain variable domain of TCR clone 247898 (TRBV20-1, TRBJ2-6)
CSASSQGYDGANVLTF

SEQ ID NO: 495797 - protein, 15 aa, Homo sapiens
  CDR3 for alpha chain variable domain of TCR clone 247899 (TRAV17, TRAJ22)
CATVAPSGSARQLTF

SEQ ID NO: 495798 - protein, 14 aa, Homo sapiens
  CDR3 for beta chain variable domain of TCR clone 247899 (TRBV4-1, TRBJ2-2)
CARSQAVNTGELFF

SEQ ID NO: 495799 - protein, 12 aa, Homo sapiens
  CDR3 for alpha chain variable domain of TCR clone 247900 (TRAV1-1, TRAJ8)
CAGGTGFQRLVF

SEQ ID NO: 495800 - protein, 15 aa, Homo sapiens
  CDR3 for beta chain variable domain of TCR clone 247900 (TRBV7-9, TRBJ1-4)
CASGRTGGFNEKLFF

SEQ ID NO: 495801 - protein, 11 aa, Homo sapiens
  CDR3 for alpha chain variable domain of TCR clone 247901 (TRAV8-3, TRAJ49)
CAVNTGTQFYF

SEQ ID NO: 495802 - protein, 12 aa, Homo sapiens
  CDR3 for beta chain variable domain of TCR clone 247901 (TRBV11-2, TRBJ2-7)
CASSPPADEQYF

SEQ ID NO: 495803 - protein, 15 aa, Homo sapiens
  CDR3 for alpha chain variable domain of TCR clone 247902 (TRAV21, TRAJ13)
CAVRPTSGGYQQVTF

SEQ ID NO: 495804 - protein, 18 aa, Homo sapiens
  CDR3 for beta chain variable domain of TCR clone 247902 (TRBV11-3, TRBJ2-1)
CASSSYPGGRDSYNEQFF

SEQ ID NO: 495805 - protein, 14 aa, Homo sapiens
  CDR3 for alpha chain variable domain of TCR clone 247903 (TRAV8-2, TRAJ37)
CVVSISGNTGRLIF

SEQ ID NO: 495806 - protein, 14 aa, Homo sapiens
  CDR3 for beta chain variable domain of TCR clone 247903 (TRBV7-2, TRBJ2-2)
CASRGQGAAGELFF

SEQ ID NO: 495807 - protein, 11 aa, Homo sapiens
  CDR3 for alpha chain variable domain of TCR clone 247904 (TRAV12-2, TRAJ33)
CAVGSNYHLIW

SEQ ID NO: 495808 - protein, 14 aa, Homo sapiens
  CDR3 for beta chain variable domain of TCR clone 247904 (TRBV6-1, TRBJ2-2)
CASVEHIESGELFF

SEQ ID NO: 495809 - protein, 15 aa, Homo sapiens
  CDR3 for alpha chain variable domain of TCR clone 247905 (TRAV8-3, TRAJ17)
CAVGAIKAAGNKLTF

SEQ ID NO: 495810 - protein, 15 aa, Homo sapiens
  CDR3 for beta chain variable domain of TCR clone 247905 (TRBV20-1, TRBJ2-7)
CSARDRVSGMDEQYF

SEQ ID NO: 495811 - protein, 18 aa, Homo sapiens
  CDR3 for alpha chain variable domain of TCR clone 247906 (TRAV13-1, TRAJ52)
CAAKNPNAGGTSYGKLTF

SEQ ID NO: 495812 - protein, 15 aa, Homo sapiens
  CDR3 for beta chain variable domain of TCR clone 247906 (TRBV6-1, TRBJ2-3)
CASSELGGITDTQYF

SEQ ID NO: 495813 - protein, 11 aa, Homo sapiens
  CDR3 for alpha chain variable domain of TCR clone 247907 (TRAV1-1, TRAJ23)
CAVRQGGKLIF

SEQ ID NO: 495814 - protein, 12 aa, Homo sapiens
  CDR3 for beta chain variable domain of TCR clone 247907 (TRBV6-5, TRBJ2-7)
CASYIYGYEQYF

SEQ ID NO: 495815 - protein, 15 aa, Homo sapiens
  CDR3 for alpha chain variable domain of TCR clone 247908 (TRAV12-3, TRAJ11)
CAMSEENSGYSTLTF

SEQ ID NO: 495816 - protein, 18 aa, Homo sapiens
  CDR3 for beta chain variable domain of TCR clone 247908 (TRBV7-6, TRBJ2-1)
CASSPRTSGMSSYNEQFF

SEQ ID NO: 495817 - protein, 12 aa, Homo sapiens
  CDR3 for alpha chain variable domain of TCR clone 247909 (TRAV8-2, TRAJ30)
CVVSDRDDKLIF

SEQ ID NO: 495818 - protein, 16 aa, Homo sapiens
  CDR3 for beta chain variable domain of TCR clone 247909 (TRBV5-4, TRBJ2-5)
CAESPGLAGTQETQYF

SEQ ID NO: 495819 - protein, 11 aa, Homo sapiens
  CDR3 for alpha chain variable domain of TCR clone 247910 (TRAV20, TRAJ34)
CAVLDTDKLIF

SEQ ID NO: 495820 - protein, 14 aa, Homo sapiens
  CDR3 for beta chain variable domain of TCR clone 247910 (TRBV19, TRBJ2-7)
CASNFRDTFTGMYF

SEQ ID NO: 495821 - protein, 11 aa, Homo sapiens
  CDR3 for alpha chain variable domain of TCR clone 247911 (TRAV2, TRAJ21)
CAVFNFNKFYF

SEQ ID NO: 495822 - protein, 14 aa, Homo sapiens
  CDR3 for beta chain variable domain of TCR clone 247911 (TRBV15, TRBJ2-3)
CATRSGTSTGTQYF

SEQ ID NO: 495823 - protein, 14 aa, Homo sapiens
  CDR3 for alpha chain variable domain of TCR clone 247912 (TRAV38-1, TRAJ40)
CALRPTSGTYKYIF

SEQ ID NO: 495824 - protein, 14 aa, Homo sapiens
  CDR3 for beta chain variable domain of TCR clone 247912 (TRBV5-4, TRBJ1-1)
CASSLGSRRDEAFF

SEQ ID NO: 495825 - protein, 15 aa, Homo sapiens
  CDR3 for alpha chain variable domain of TCR clone 247913 (TRAV3, TRAJ20)
CAVRDIKLIDYKLSF

SEQ ID NO: 495826 - protein, 15 aa, Homo sapiens
  CDR3 for beta chain variable domain of TCR clone 247913 (TRBV7-9, TRBJ1-6)
CAGSSPGRGNSPLHF

SEQ ID NO: 495827 - protein, 10 aa, Homo sapiens
  CDR3 for alpha chain variable domain of TCR clone 247914 (TRAV5, TRAJ34)
CAEDTDKLIF

SEQ ID NO: 495828 - protein, 16 aa, Homo sapiens
  CDR3 for beta chain variable domain of TCR clone 247914 (TRBV5-1, TRBJ2-2)
CASSSYREGDTGELFF

SEQ ID NO: 495829 - protein, 15 aa, Homo sapiens
  CDR3 for alpha chain variable domain of TCR clone 247915 (TRAV26-1, TRAJ42)
CIVRVKGGSQGNLIF

SEQ ID NO: 495830 - protein, 15 aa, Homo sapiens
  CDR3 for beta chain variable domain of TCR clone 247915 (TRBV7-2, TRBJ2-1)
CASSFQADEYNEQFF

SEQ ID NO: 495831 - protein, 11 aa, Homo sapiens
  CDR3 for alpha chain variable domain of TCR clone 247916 (TRAV13-1, TRAJ20)
CAASNDYKLSF

SEQ ID NO: 495832 - protein, 14 aa, Homo sapiens
  CDR3 for beta chain variable domain of TCR clone 247916 (TRBV7-2, TRBJ2-7)
CASSPKTSFYEQYV

SEQ ID NO: 495833 - protein, 14 aa, Homo sapiens
  CDR3 for alpha chain variable domain of TCR clone 247917 (TRAV12-2, TRAJ40)
CAVKIPSGTYQYIF

SEQ ID NO: 495834 - protein, 13 aa, Homo sapiens
  CDR3 for beta chain variable domain of TCR clone 247917 (TRBV19, TRBJ1-2)
CASSVPGQDGYTF

SEQ ID NO: 495835 - protein, 13 aa, Homo sapiens
  CDR3 for alpha chain variable domain of TCR clone 247918 (TRAV12-2, TRAJ12)
CAVNEDSSYKLIF

SEQ ID NO: 495836 - protein, 17 aa, Homo sapiens
  CDR3 for beta chain variable domain of TCR clone 247918 (TRBV20-1, TRBJ2-7)
CSATRGGGVAGVEEQYF

SEQ ID NO: 495837 - protein, 17 aa, Homo sapiens
  CDR3 for alpha chain variable domain of TCR clone 247919 (TRAV3, TRAJ6)
CAVRDGPRAGGSSIPTF

SEQ ID NO: 495838 - protein, 14 aa, Homo sapiens
  CDR3 for beta chain variable domain of TCR clone 247919 (TRBV7-2, TRBJ2-2)
CASRGQGAAGELFF

SEQ ID NO: 495839 - protein, 14 aa, Homo sapiens
  CDR3 for alpha chain variable domain of TCR clone 247920 (TRAV8-2, TRAJ37)
CVVSISGNTGKLIF

SEQ ID NO: 495840 - protein, 14 aa, Homo sapiens
  CDR3 for beta chain variable domain of TCR clone 247920 (TRBV7-2, TRBJ1-1)
CASSFLTGTTEAFF

SEQ ID NO: 495841 - protein, 12 aa, Homo sapiens
  CDR3 for alpha chain variable domain of TCR clone 247921 (TRAV21, TRAJ49)
CAVNDGGNQFYF

SEQ ID NO: 495842 - protein, 16 aa, Homo sapiens
  CDR3 for beta chain variable domain of TCR clone 247921 (TRBV2, TRBJ1-4)
CASNLLQGATNEKLFF

SEQ ID NO: 495843 - protein, 16 aa, Homo sapiens
  CDR3 for alpha chain variable domain of TCR clone 247922 (TRAV3, TRAJ10)
CAVRDMRSGGGNKLTF

SEQ ID NO: 495844 - protein, 13 aa, Homo sapiens
  CDR3 for beta chain variable domain of TCR clone 247922 (TRBV4-2, TRBJ1-1)
CASSQAGNTEAFF

SEQ ID NO: 495845 - protein, 14 aa, Homo sapiens
  CDR3 for alpha chain variable domain of TCR clone 247923 (TRAV12-3, TRAJ47)
CAMSVREYGNKLVF

SEQ ID NO: 495846 - protein, 15 aa, Homo sapiens
  CDR3 for beta chain variable domain of TCR clone 247923 (TRBV20-1, TRBJ2-2)
CSARDTRLNTGELVF

SEQ ID NO: 495847 - protein, 14 aa, Homo sapiens
  CDR3 for alpha chain variable domain of TCR clone 247924 (TRAV12-3, TRAJ58)
CAMSTETSGSRLTF

SEQ ID NO: 495848 - protein, 12 aa, Homo sapiens
  CDR3 for beta chain variable domain of TCR clone 247924 (TRBV7-8, TRBJ2-7)
CASSLGDREQHF

SEQ ID NO: 495849 - protein, 18 aa, Homo sapiens
  CDR3 for alpha chain variable domain of TCR clone 247925 (TRAV21, TRAJ52)
CAVRPSPAGGTSYGKLTS

SEQ ID NO: 495850 - protein, 17 aa, Homo sapiens
  CDR3 for beta chain variable domain of TCR clone 247925 (TRBV13, TRBJ2-3)
CANSLSRVAGGRNTQYF

SEQ ID NO: 495851 - protein, 14 aa, Homo sapiens
  CDR3 for alpha chain variable domain of TCR clone 247926 (TRAV29/DV5, TRAJ45)
CAVYSGGGADGLTF

SEQ ID NO: 495852 - protein, 16 aa, Homo sapiens
  CDR3 for beta chain variable domain of TCR clone 247926 (TRBV4-2, TRBJ2-3)
CASSQELAGDTDTQYF

SEQ ID NO: 495853 - protein, 12 aa, Homo sapiens
  CDR3 for alpha chain variable domain of TCR clone 247927 (TRAV12-2, TRAJ8)
CAVNTGFQKLVF

SEQ ID NO: 495854 - protein, 17 aa, Homo sapiens
  CDR3 for beta chain variable domain of TCR clone 247927 (TRBV28, TRBJ2-5)
CASSTPEGDALQETQYF

SEQ ID NO: 495855 - protein, 14 aa, Homo sapiens
  CDR3 for alpha chain variable domain of TCR clone 247928 (TRAV13-2, TRAJ49)
CAEILSNTGNQFYF

SEQ ID NO: 495856 - protein, 16 aa, Homo sapiens
  CDR3 for beta chain variable domain of TCR clone 247928 (TRBV12-5, TRBJ2-5)
CASGPRTSGNQETQYF

SEQ ID NO: 495857 - protein, 15 aa, Homo sapiens
  CDR3 for alpha chain variable domain of TCR clone 247929 (TRAV3, TRAJ22)
CAVRDRGGSARQLTF

SEQ ID NO: 495858 - protein, 15 aa, Homo sapiens
  CDR3 for beta chain variable domain of TCR clone 247929 (TRBV27, TRBJ1-4)
CASSAQQDLNDKLFF

SEQ ID NO: 495859 - protein, 19 aa, Homo sapiens
  CDR3 for alpha chain variable domain of TCR clone 247930 (TRAV4, TRAJ39)
CCVLLPRGSNNNAGNMLTF

SEQ ID NO: 495860 - protein, 16 aa, Homo sapiens
  CDR3 for beta chain variable domain of TCR clone 247930 (TRBV13, TRBJ2-2)
CASSPRTGEHTGELFF

SEQ ID NO: 495861 - protein, 12 aa, Homo sapiens
  CDR3 for alpha chain variable domain of TCR clone 247931 (TRAV17, TRAJ57)
CATDGGSEKLVF

SEQ ID NO: 495862 - protein, 16 aa, Homo sapiens
  CDR3 for beta chain variable domain of TCR clone 247931 (TRBV12-4, TRBJ2-5)
CASSWRPSGDLETQYF

SEQ ID NO: 495863 - protein, 14 aa, Homo sapiens
  CDR3 for alpha chain variable domain of TCR clone 247932 (TRAV21, TRAJ21)
CAVGVEDNFSKFYF

SEQ ID NO: 495864 - protein, 17 aa, Homo sapiens
  CDR3 for beta chain variable domain of TCR clone 247932 (TRBV20-1, TRBJ2-2)
CSASGSGQGGLTGELFF

SEQ ID NO: 495865 - protein, 14 aa, Homo sapiens
  CDR3 for alpha chain variable domain of TCR clone 247933 (TRAV2, TRAJ37)
CAVDFTSNTGKLIF

SEQ ID NO: 495866 - protein, 14 aa, Homo sapiens
  CDR3 for beta chain variable domain of TCR clone 247933 (TRBV7-8, TRBJ1-2)
CASSPDSLSYGYTF

SEQ ID NO: 495867 - protein, 13 aa, Homo sapiens
  CDR3 for alpha chain variable domain of TCR clone 247934 (TRAV21, TRAJ27)
CAARPGNAGKSTF

SEQ ID NO: 495868 - protein, 15 aa, Homo sapiens
  CDR3 for beta chain variable domain of TCR clone 247934 (TRBV7-2, TRBJ1-5)
CASGSTGVDNQPQHF

SEQ ID NO: 495869 - protein, 14 aa, Homo sapiens
  CDR3 for alpha chain variable domain of TCR clone 247935 (TRAV12-2, TRAJ17)
CAVWVKAAGNKLTF

SEQ ID NO: 495870 - protein, 16 aa, Homo sapiens
  CDR3 for beta chain variable domain of TCR clone 247935 (TRBV20-1, TRBJ2-6)
CTGSHEGNEGDNEQTF

SEQ ID NO: 495871 - protein, 14 aa, Homo sapiens
  CDR3 for alpha chain variable domain of TCR clone 247936 (TRAV17, TRAJ57)
CATDPQGGSEKLVF

SEQ ID NO: 495872 - protein, 15 aa, Homo sapiens
  CDR3 for beta chain variable domain of TCR clone 247936 (TRBV12-4, TRBJ1-2)
CASRLGVARNYGYTF

SEQ ID NO: 495873 - protein, 13 aa, Homo sapiens
  CDR3 for alpha chain variable domain of TCR clone 247937 (TRAV6, TRAJ20)
CALAVSNDYKLSF

SEQ ID NO: 495874 - protein, 16 aa, Homo sapiens
  CDR3 for beta chain variable domain of TCR clone 247937 (TRBV7-9, TRBJ2-1)
CASGDVAGGSYNEQFF

SEQ ID NO: 495875 - protein, 16 aa, Homo sapiens
  CDR3 for alpha chain variable domain of TCR clone 247938 (TRAV25, TRAJ52)
CAGPRAGGTSYGKLTF

SEQ ID NO: 495876 - protein, 15 aa, Homo sapiens
  CDR3 for beta chain variable domain of TCR clone 247938 (TRBV10-2, TRBJ2-6)
CASSEQGTGANVLTF

SEQ ID NO: 495877 - protein, 18 aa, Homo sapiens
  CDR3 for alpha chain variable domain of TCR clone 247939 (TRAV26-2, TRAJ45)
CILRVDKYSGGGADGLTF

SEQ ID NO: 495878 - protein, 15 aa, Homo sapiens
  CDR3 for beta chain variable domain of TCR clone 247939 (TRBV7-2, TRBJ2-3)
CASTPTSGETDTQYF

SEQ ID NO: 495879 - protein, 14 aa, Homo sapiens
  CDR3 for alpha chain variable domain of TCR clone 247940 (TRAV23/DV6, TRAJ17)
CAARGRAAGHKLTF

SEQ ID NO: 495880 - protein, 13 aa, Homo sapiens
  CDR3 for beta chain variable domain of TCR clone 247940 (TRBV7-6, TRBJ1-2)
CASSLVADYGYTF

SEQ ID NO: 495881 - protein, 15 aa, Homo sapiens
  CDR3 for alpha chain variable domain of TCR clone 247941 (TRAV16, TRAJ20)
CALKGGLKADYKLSF

SEQ ID NO: 495882 - protein, 16 aa, Homo sapiens
  CDR3 for beta chain variable domain of TCR clone 247941 (TRBV11-3, TRBJ2-2)
CASSSRTSPGTGELFF

SEQ ID NO: 495883 - protein, 15 aa, Homo sapiens
  CDR3 for alpha chain variable domain of TCR clone 247942 (TRAV8-2, TRAJ16)
CVVSDGFSDCQQLLF

SEQ ID NO: 495884 - protein, 14 aa, Homo sapiens
  CDR3 for beta chain variable domain of TCR clone 247942 (TRBV7-3, TRBJ1-1)
CASSLGTGYTEAFF

SEQ ID NO: 495885 - protein, 13 aa, Homo sapiens
  CDR3 for alpha chain variable domain of TCR clone 247943 (TRAV23/DV6, TRAJ24)
CRSLSDSWGKLQF

SEQ ID NO: 495886 - protein, 16 aa, Homo sapiens
  CDR3 for beta chain variable domain of TCR clone 247943 (TRBV7-9, TRBJ2-6)
CASSLKGPLRANVLSF

SEQ ID NO: 495887 - protein, 16 aa, Homo sapiens
  CDR3 for alpha chain variable domain of TCR clone 247944 (TRAV27, TRAJ48)
TAAQPGDTGLYLPLTF

SEQ ID NO: 495888 - protein, 13 aa, Homo sapiens
  CDR3 for beta chain variable domain of TCR clone 247944 (TRBV10-3, TRBJ2-7)
CASKLAVNYEQYF

SEQ ID NO: 495889 - protein, 17 aa, Homo sapiens
  CDR3 for alpha chain variable domain of TCR clone 247945 (TRAV12-2, TRAJ6)
CAPQGPPRAGGSYIPTF

SEQ ID NO: 495890 - protein, 16 aa, Homo sapiens
  CDR3 for beta chain variable domain of TCR clone 247945 (TRBV19, TRBJ2-2)
CASSTARASNTGELLF

SEQ ID NO: 495891 - protein, 15 aa, Homo sapiens
  CDR3 for alpha chain variable domain of TCR clone 247946 (TRAV21, TRAJ52)
CATRGGGTRYGKLTF

SEQ ID NO: 495892 - protein, 14 aa, Homo sapiens
  CDR3 for beta chain variable domain of TCR clone 247946 (TRBV28, TRBJ2-3)
CASSSAPSTDTQYF

SEQ ID NO: 495893 - protein, 11 aa, Homo sapiens
  CDR3 for alpha chain variable domain of TCR clone 247947 (TRAV2, TRAJ33)
CAVESDYQLIR

SEQ ID NO: 495894 - protein, 15 aa, Homo sapiens
  CDR3 for beta chain variable domain of TCR clone 247947 (TRBV19, TRBJ1-1)
CASTSGQIQNTEAFF

SEQ ID NO: 495895 - protein, 15 aa, Homo sapiens
  CDR3 for alpha chain variable domain of TCR clone 247948 (TRAV12-3, TRAJ6)
CAMSAASGGRYIPTF

SEQ ID NO: 495896 - protein, 13 aa, Homo sapiens
  CDR3 for beta chain variable domain of TCR clone 247948 (TRBV20-1, TRBJ1-2)
CSASTERIYGCTF

SEQ ID NO: 495897 - protein, 15 aa, Homo sapiens
  CDR3 for alpha chain variable domain of TCR clone 247949 (TRAV16, TRAJ16)
CALQGGGSDGQKLLF

SEQ ID NO: 495898 - protein, 13 aa, Homo sapiens
  CDR3 for beta chain variable domain of TCR clone 247949 (TRBV10-2, TRBJ2-3)
CASSESGDHTQYF

SEQ ID NO: 495899 - protein, 18 aa, Homo sapiens
  CDR3 for alpha chain variable domain of TCR clone 247950 (TRAV21, TRAJ53)
CAVKGGENSGGSNYKLTF

SEQ ID NO: 495900 - protein, 13 aa, Homo sapiens
  CDR3 for beta chain variable domain of TCR clone 247950 (TRBV19, TRBJ1-5)
CASSMRGYQPQHF

SEQ ID NO: 495901 - protein, 17 aa, Homo sapiens
  CDR3 for alpha chain variable domain of TCR clone 247951 (TRAV2, TRAJ22)
ILQVREADAAEQRQLTF

SEQ ID NO: 495902 - protein, 13 aa, Homo sapiens
  CDR3 for beta chain variable domain of TCR clone 247951 (TRBV4-1, TRBJ2-1)
CASSQEVQYEQFF

SEQ ID NO: 495903 - protein, 12 aa, Homo sapiens
  CDR3 for alpha chain variable domain of TCR clone 247952 (TRAV12-3, TRAJ17)
CAMTLTGNKLTF

SEQ ID NO: 495904 - protein, 14 aa, Homo sapiens
  CDR3 for beta chain variable domain of TCR clone 247952 (TRBV7-2, TRBJ2-7)
CASRSQGASYEQYF

SEQ ID NO: 495905 - protein, 17 aa, Homo sapiens
  CDR3 for alpha chain variable domain of TCR clone 247953 (TRAV3, TRAJ6)
CAVRDGPRAGGGYIPTF

SEQ ID NO: 495906 - protein, 18 aa, Homo sapiens
  CDR3 for beta chain variable domain of TCR clone 247953 (TRBV7-9, TRBJ2-7)
CASSLTTSGGRTWYEQYF

SEQ ID NO: 495907 - protein, 17 aa, Homo sapiens
  CDR3 for alpha chain variable domain of TCR clone 247954 (TRAV26-1, TRAJ37)
CIVRVVTVSSNTGKLIF

SEQ ID NO: 495908 - protein, 11 aa, Homo sapiens
  CDR3 for beta chain variable domain of TCR clone 247954 (TRBV11-2, TRBJ2-2)
CASSLPGELFF

SEQ ID NO: 495909 - protein, 17 aa, Homo sapiens
  CDR3 for alpha chain variable domain of TCR clone 247955 (TRAV3, TRAJ6)
CAVRDGPRAGGSYIPTL

SEQ ID NO: 495910 - protein, 17 aa, Homo sapiens
  CDR3 for beta chain variable domain of TCR clone 247955 (TRBV20-1, TRBJ2-1)
CSASSSGLAGSYNEQFF

SEQ ID NO: 495911 - protein, 13 aa, Homo sapiens
  CDR3 for alpha chain variable domain of TCR clone 247956 (TRAV3, TRAJ29)
CAVRDIIDTPLVF

SEQ ID NO: 495912 - protein, 14 aa, Homo sapiens
  CDR3 for beta chain variable domain of TCR clone 247956 (TRBV27, TRBJ2-1)
CARSAPGGYNEQFF

SEQ ID NO: 495913 - protein, 16 aa, Homo sapiens
  CDR3 for alpha chain variable domain of TCR clone 247957 (TRAV30, TRAJ24)
CGTEIVDADSWGKFQL

SEQ ID NO: 495914 - protein, 14 aa, Homo sapiens
  CDR3 for beta chain variable domain of TCR clone 247957 (TRBV12-4, TRBJ1-1)
CASSRGTGGTEAFF

SEQ ID NO: 495915 - protein, 14 aa, Homo sapiens
  CDR3 for alpha chain variable domain of TCR clone 247958 (TRAV35, TRAJ34)
CAGQSSYNTDKLIF

SEQ ID NO: 495916 - protein, 11 aa, Homo sapiens
  CDR3 for beta chain variable domain of TCR clone 247958 (TRBV29-1, TRBJ2-5)
CSEDRTGTQYF

SEQ ID NO: 495917 - protein, 14 aa, Homo sapiens
  CDR3 for alpha chain variable domain of TCR clone 247959 (TRAV12-2, TRAJ44)
CAVNPAGTASKLSF

SEQ ID NO: 495918 - protein, 15 aa, Homo sapiens
  CDR3 for beta chain variable domain of TCR clone 247959 (TRBV5-1, TRBJ2-1)
CASSPPRAPYNEQFF

SEQ ID NO: 495919 - protein, 15 aa, Homo sapiens
  CDR3 for alpha chain variable domain of TCR clone 247960 (TRAV3, TRAJ13)
CAVRDRGVGYQKVTF

SEQ ID NO: 495920 - protein, 14 aa, Homo sapiens
  CDR3 for beta chain variable domain of TCR clone 247960 (TRBV4-1, TRBJ1-1)
CASSRSGQSFEAFF

SEQ ID NO: 495921 - protein, 15 aa, Homo sapiens
  CDR3 for alpha chain variable domain of TCR clone 247961 (TRAV38-1, TRAJ37)
CAFIFGSGNTGKLIF

SEQ ID NO: 495922 - protein, 14 aa, Homo sapiens
  CDR3 for beta chain variable domain of TCR clone 247961 (TRBV19, TRBJ2-7)
CASSMGQGAIEQYF

SEQ ID NO: 495923 - protein, 13 aa, Homo sapiens
  CDR3 for alpha chain variable domain of TCR clone 247962 (TRAV29/DV5, TRAJ31)
CAASRNNNARLMF

SEQ ID NO: 495924 - protein, 12 aa, Homo sapiens
  CDR3 for beta chain variable domain of TCR clone 247962 (TRBV14, TRBJ2-7)
CASSSLEGEQYF

SEQ ID NO: 495925 - protein, 13 aa, Homo sapiens
  CDR3 for alpha chain variable domain of TCR clone 247963 (TRAV21, TRAJ57)
CAVTQGGSEKLVF

SEQ ID NO: 495926 - protein, 11 aa, Homo sapiens
  CDR3 for beta chain variable domain of TCR clone 247963 (TRBV11-2, TRBJ2-2)
CASSLPGELFC

SEQ ID NO: 495927 - protein, 15 aa, Homo sapiens
  CDR3 for alpha chain variable domain of TCR clone 247964 (TRAV1-2, TRAJ12)
CAVIPEVDSSYKLIF

SEQ ID NO: 495928 - protein, 12 aa, Homo sapiens
  CDR3 for beta chain variable domain of TCR clone 247964 (TRBV14, TRBJ2-7)
CASSSLKGEQYF

SEQ ID NO: 495929 - protein, 14 aa, Homo sapiens
  CDR3 for alpha chain variable domain of TCR clone 247965 (TRAV12-1, TRAJ9)
CVVNRGTGGFKTIF

SEQ ID NO: 495930 - protein, 15 aa, Homo sapiens
  CDR3 for beta chain variable domain of TCR clone 247965 (TRBV9, TRBJ1-6)
CASSVAGTGDSPLHF

SEQ ID NO: 495931 - protein, 16 aa, Homo sapiens
  CDR3 for alpha chain variable domain of TCR clone 247966 (TRAV26-2, TRAJ23)
CIVRFDRYNQGGKLIF

SEQ ID NO: 495932 - protein, 15 aa, Homo sapiens
  CDR3 for beta chain variable domain of TCR clone 247966 (TRBV18, TRBJ2-7)
CASSPRGGKGYEQYF

SEQ ID NO: 495933 - protein, 12 aa, Homo sapiens
  CDR3 for alpha chain variable domain of TCR clone 247967 (TRAV21, TRAJ12)
CAVMDSSYKLIF

SEQ ID NO: 495934 - protein, 16 aa, Homo sapiens
  CDR3 for beta chain variable domain of TCR clone 247967 (TRBV7-9, TRBJ2-5)
CASRLEIGTRNETQYF

SEQ ID NO: 495935 - protein, 15 aa, Homo sapiens
  CDR3 for alpha chain variable domain of TCR clone 247968 (TRAV12-1, TRAJ44)
CVVFVNTGTASKLTF

SEQ ID NO: 495936 - protein, 15 aa, Homo sapiens
  CDR3 for beta chain variable domain of TCR clone 247968 (TRBV19, TRBJ1-2)
CASTPGQVANYGYTF

SEQ ID NO: 495937 - protein, 15 aa, Homo sapiens
  CDR3 for alpha chain variable domain of TCR clone 247969 (TRAV13-1, TRAJ57)
CAASNTQGGSEKLVF

SEQ ID NO: 495938 - protein, 16 aa, Homo sapiens
  CDR3 for beta chain variable domain of TCR clone 247969 (TRBV19, TRBJ2-1)
CASGKSGPSSYNEQFF

SEQ ID NO: 495939 - protein, 13 aa, Homo sapiens
  CDR3 for alpha chain variable domain of TCR clone 247970 (TRAV12-3, TRAJ4)
CDEQAGGYNKLIF

SEQ ID NO: 495940 - protein, 15 aa, Homo sapiens
  CDR3 for beta chain variable domain of TCR clone 247970 (TRBV5-1, TRBJ1-1)
CASSLSDLGGTEAFF

SEQ ID NO: 495941 - protein, 12 aa, Homo sapiens
  CDR3 for alpha chain variable domain of TCR clone 247971 (TRAV17, TRAJ49)
CATVTTGNQFYS

SEQ ID NO: 495942 - protein, 18 aa, Homo sapiens
  CDR3 for beta chain variable domain of TCR clone 247971 (TRBV11-2, TRBJ2-6)
CASSLNPFLGTGANVLTF

SEQ ID NO: 495943 - protein, 15 aa, Homo sapiens
  CDR3 for alpha chain variable domain of TCR clone 247972 (TRAV17, TRAJ57)
CATCPSQGGAEKLVF

SEQ ID NO: 495944 - protein, 17 aa, Homo sapiens
  CDR3 for beta chain variable domain of TCR clone 247972 (TRBV20-1, TRBJ2-1)
CSASSSGLAGSYNEQFF

SEQ ID NO: 495945 - protein, 14 aa, Homo sapiens
  CDR3 for alpha chain variable domain of TCR clone 247973 (TRAV20, TRAJ10)
CAVRVEGGGNNLTF

SEQ ID NO: 495946 - protein, 13 aa, Homo sapiens
  CDR3 for beta chain variable domain of TCR clone 247973 (TRBV13, TRBJ2-2)
CASSPGLTGELFF

SEQ ID NO: 495947 - protein, 12 aa, Homo sapiens
  CDR3 for alpha chain variable domain of TCR clone 247974 (TRAV12-3, TRAJ42)
CAPGGSQGNLIF

SEQ ID NO: 495948 - protein, 16 aa, Homo sapiens
  CDR3 for beta chain variable domain of TCR clone 247974 (TRBV9, TRBJ2-1)
CASSVGGGGNYNEQFF

SEQ ID NO: 495949 - protein, 16 aa, Homo sapiens
  CDR3 for alpha chain variable domain of TCR clone 247975 (TRAV13-1, TRAJ17)
CAASKGVKAAGNKLTF

SEQ ID NO: 495950 - protein, 15 aa, Homo sapiens
  CDR3 for beta chain variable domain of TCR clone 247975 (TRBV20-1, TRBJ1-5)
CSASEGGYSNQPQHF

SEQ ID NO: 495951 - protein, 15 aa, Homo sapiens
  CDR3 for alpha chain variable domain of TCR clone 247976 (TRAV12-2, TRAJ53)
CAVNGGGGSNYKLTF

SEQ ID NO: 495952 - protein, 14 aa, Homo sapiens
  CDR3 for beta chain variable domain of TCR clone 247976 (TRBV7-9, TRBJ2-3)
CASSLEDGTDTQYF

SEQ ID NO: 495953 - protein, 15 aa, Homo sapiens
  CDR3 for alpha chain variable domain of TCR clone 247977 (TRAV17, TRAJ57)
CATGPSQGGSEKLVF

SEQ ID NO: 495954 - protein, 20 aa, Homo sapiens
  CDR3 for beta chain variable domain of TCR clone 247977 (TRBV7-9, TRBJ2-7)
CASSLTTSGSRTCTSSTSGR

SEQ ID NO: 495955 - protein, 15 aa, Homo sapiens
  CDR3 for alpha chain variable domain of TCR clone 247978 (TRAV23/DV6, TRAJ13)
CAAWPGGGGYQKVTF

SEQ ID NO: 495956 - protein, 17 aa, Homo sapiens
  CDR3 for beta chain variable domain of TCR clone 247978 (TRBV19, TRBJ2-7)
CASSISFDDSYPYKQYF

SEQ ID NO: 495957 - protein, 14 aa, Homo sapiens
  CDR3 for alpha chain variable domain of TCR clone 247979 (TRAV14/DV4, TRAJ32)
SNVLPLTPTNKLIF

SEQ ID NO: 495958 - protein, 14 aa, Homo sapiens
  CDR3 for beta chain variable domain of TCR clone 247979 (TRBV15, TRBJ2-3)
CATRSGTSTDTQYF

SEQ ID NO: 495959 - protein, 14 aa, Homo sapiens
  CDR3 for alpha chain variable domain of TCR clone 247980 (TRAV20, TRAJ56)
CAVQFGGANSKLTF

SEQ ID NO: 495960 - protein, 11 aa, Homo sapiens
  CDR3 for beta chain variable domain of TCR clone 247980 (TRBV7-6, TRBJ1-2)
CASSKSTGTMA

SEQ ID NO: 495961 - protein, 14 aa, Homo sapiens
  CDR3 for alpha chain variable domain of TCR clone 247981 (TRAV13-1, TRAJ23)
CAASRLGRGGKLIL

SEQ ID NO: 495962 - protein, 15 aa, Homo sapiens
  CDR3 for beta chain variable domain of TCR clone 247981 (TRBV7-2, TRBJ2-1)
CASSLVAGRYNEQFF

SEQ ID NO: 495963 - protein, 19 aa, Homo sapiens
  CDR3 for alpha chain variable domain of TCR clone 247982 (TRAV2, TRAJ20)
ILQVREADAAVYRDCKLSC

SEQ ID NO: 495964 - protein, 12 aa, Homo sapiens
  CDR3 for beta chain variable domain of TCR clone 247982 (TRBV11-2, TRBJ2-2)
CASSLGGGELFF

SEQ ID NO: 495965 - protein, 15 aa, Homo sapiens
  CDR3 for alpha chain variable domain of TCR clone 247983 (TRAV12-1, TRAJ45)
CVVLSGGGGADGLTF

SEQ ID NO: 495966 - protein, 15 aa, Homo sapiens
  CDR3 for beta chain variable domain of TCR clone 247983 (TRBV20-1, TRBJ2-7)
CSAGDRVSGMDEQYF

SEQ ID NO: 495967 - protein, 14 aa, Homo sapiens
  CDR3 for alpha chain variable domain of TCR clone 247984 (TRAV8-4, TRAJ8)
CAVSVGTGFPKLVF

SEQ ID NO: 495968 - protein, 15 aa, Homo sapiens
  CDR3 for beta chain variable domain of TCR clone 247984 (TRBV2, TRBJ2-3)
CASSGEGTGTDTQYF

SEQ ID NO: 495969 - protein, 12 aa, Homo sapiens
  CDR3 for alpha chain variable domain of TCR clone 247985 (TRAV35, TRAJ49)
CAGWNTGNQFYF

SEQ ID NO: 495970 - protein, 16 aa, Homo sapiens
  CDR3 for beta chain variable domain of TCR clone 247985 (TRBV5-1, TRBJ2-2)
CVSSLWDTTNTGELFF

SEQ ID NO: 495971 - protein, 14 aa, Homo sapiens
  CDR3 for alpha chain variable domain of TCR clone 247986 (TRAV8-4, TRAJ5)
CAVSTDTGRRALTF

SEQ ID NO: 495972 - protein, 16 aa, Homo sapiens
  CDR3 for beta chain variable domain of TCR clone 247986 (TRBV5-4, TRBJ2-3)
CASQQPGAGGADTQYF

SEQ ID NO: 495973 - protein, 11 aa, Homo sapiens
  CDR3 for alpha chain variable domain of TCR clone 247987 (TRAV21, TRAJ41)
CAVRSGYALNF

SEQ ID NO: 495974 - protein, 13 aa, Homo sapiens
  CDR3 for beta chain variable domain of TCR clone 247987 (TRBV7-9, TRBJ1-2)
CASSLKQTYGYTV

SEQ ID NO: 495975 - protein, 16 aa, Homo sapiens
  CDR3 for alpha chain variable domain of TCR clone 247988 (TRAV30, TRAJ24)
CGTEIVDADSWGKFQF

SEQ ID NO: 495976 - protein, 18 aa, Homo sapiens
  CDR3 for beta chain variable domain of TCR clone 247988 (TRBV11-2, TRBJ2-6)
CASSLNPFLGTEANVLTF

SEQ ID NO: 495977 - protein, 16 aa, Homo sapiens
  CDR3 for alpha chain variable domain of TCR clone 247989 (TRAV30, TRAJ24)
CGTEIVDADSWRKFQF

SEQ ID NO: 495978 - protein, 19 aa, Homo sapiens
  CDR3 for beta chain variable domain of TCR clone 247989 (TRBV25-1, TRBJ2-2)
CATLVYRVDRGRKTGEPFF

SEQ ID NO: 495979 - protein, 15 aa, Homo sapiens
  CDR3 for alpha chain variable domain of TCR clone 247990 (TRAV17, TRAJ57)
CATGPSQGGSDKLVF

SEQ ID NO: 495980 - protein, 11 aa, Homo sapiens
  CDR3 for beta chain variable domain of TCR clone 247990 (TRBV29-1, TRBJ2-5)
CSEDRTGTQYF

SEQ ID NO: 495981 - protein, 12 aa, Homo sapiens
  CDR3 for alpha chain variable domain of TCR clone 247991 (TRAV12-2, TRAJ21)
CAVRYNFNKFYF

SEQ ID NO: 495982 - protein, 14 aa, Homo sapiens
  CDR3 for beta chain variable domain of TCR clone 247991 (TRBV28, TRBJ2-1)
CVSSYYTAYNEQFF

SEQ ID NO: 495983 - protein, 15 aa, Homo sapiens
  CDR3 for alpha chain variable domain of TCR clone 247992 (TRAV12-2, TRAJ11)
CAVNLRSSGYSTLTF

SEQ ID NO: 495984 - protein, 18 aa, Homo sapiens
  CDR3 for beta chain variable domain of TCR clone 247992 (TRBV7-2, TRBJ2-2)
CASSLASRGAGGPGELFF

SEQ ID NO: 495985 - protein, 15 aa, Homo sapiens
  CDR3 for alpha chain variable domain of TCR clone 247993 (TRAV3, TRAJ22)
CALRDRGGSARQLTF

SEQ ID NO: 495986 - protein, 13 aa, Homo sapiens
  CDR3 for beta chain variable domain of TCR clone 247993 (TRBV20-1, TRBJ2-2)
CSALSGGAGELFF

SEQ ID NO: 495987 - protein, 16 aa, Homo sapiens
  CDR3 for alpha chain variable domain of TCR clone 247994 (TRAV30, TRAJ24)
CGTEIVDADSWGKFQF

SEQ ID NO: 495988 - protein, 15 aa, Homo sapiens
  CDR3 for beta chain variable domain of TCR clone 247994 (TRBV4-1, TRBJ2-5)
CASSQSDLYQETQYF

SEQ ID NO: 495989 - protein, 12 aa, Homo sapiens
  CDR3 for alpha chain variable domain of TCR clone 247995 (TRAV35, TRAJ39)
LAPNNAGNMLTF

SEQ ID NO: 495990 - protein, 14 aa, Homo sapiens
  CDR3 for beta chain variable domain of TCR clone 247995 (TRBV7-9, TRBJ2-1)
CASSQGQAEAEQFF

SEQ ID NO: 495991 - protein, 11 aa, Homo sapiens
  CDR3 for alpha chain variable domain of TCR clone 247996 (TRAV2, TRAJ4)
CAAGGYNKLIF

SEQ ID NO: 495992 - protein, 13 aa, Homo sapiens
  CDR3 for beta chain variable domain of TCR clone 247996 (TRBV20-1, TRBJ1-1)
CSARVGGNTEAVF

SEQ ID NO: 495993 - protein, 18 aa, Homo sapiens
  CDR3 for alpha chain variable domain of TCR clone 247997 (TRAV14/DV4, TRAJ11)
CAMREAHHRNSGYSTLTF

SEQ ID NO: 495994 - protein, 20 aa, Homo sapiens
  CDR3 for beta chain variable domain of TCR clone 247997 (TRBV28, TRBJ2-1)
YASTPIGRSPGLAGGNEQFF

SEQ ID NO: 495995 - protein, 15 aa, Homo sapiens
  CDR3 for alpha chain variable domain of TCR clone 247998 (TRAV12-1, TRAJ44)
CVVDTPQGTASKRTF

SEQ ID NO: 495996 - protein, 13 aa, Homo sapiens
  CDR3 for beta chain variable domain of TCR clone 247998 (TRBV27, TRBJ2-1)
CASSSGSYNEQFF

SEQ ID NO: 495997 - protein, 15 aa, Homo sapiens
  CDR3 for alpha chain variable domain of TCR clone 247999 (TRAV12-1, TRAJ44)
CVVDTPQGTASKLTF

SEQ ID NO: 495998 - protein, 21 aa, Homo sapiens
  CDR3 for beta chain variable domain of TCR clone 247999 (TRBV7-9, TRBJ2-1)
RGTRPCISVPAAPGTLYEQFF

SEQ ID NO: 495999 - protein, 14 aa, Homo sapiens
  CDR3 for alpha chain variable domain of TCR clone 248000 (TRAV23/DV6, TRAJ22)
CADISSGSARQLTF

SEQ ID NO: 496000 - protein, 13 aa, Homo sapiens
  CDR3 for beta chain variable domain of TCR clone 248000 (TRBV4-2, TRBJ1-1)
CASSQAGNTEAFF

SEQ ID NO: 496001 - protein, 14 aa, Homo sapiens
  CDR3 for alpha chain variable domain of TCR clone 248001 (TRAV35, TRAJ38)
CAGSNAGNNRKLIW

SEQ ID NO: 496002 - protein, 14 aa, Homo sapiens
  CDR3 for beta chain variable domain of TCR clone 248001 (TRBV12-5, TRBJ2-5)
CASGSRTHQETQYF

SEQ ID NO: 496003 - protein, 16 aa, Homo sapiens
  CDR3 for alpha chain variable domain of TCR clone 248002 (TRAV30, TRAJ24)
CGTEIVDADSRGKFQF

SEQ ID NO: 496004 - protein, 15 aa, Homo sapiens
  CDR3 for beta chain variable domain of TCR clone 248002 (TRBV12-4, TRBJ2-2)
CASSPNDSGTGELFF

SEQ ID NO: 496005 - protein, 15 aa, Homo sapiens
  CDR3 for alpha chain variable domain of TCR clone 248003 (TRAV17, TRAJ56)
CATEPFTGANSKLTF

SEQ ID NO: 496006 - protein, 15 aa, Homo sapiens
  CDR3 for beta chain variable domain of TCR clone 248003 (TRBV7-9, TRBJ1-5)
CASSQGHQPNQPQHF

SEQ ID NO: 496007 - protein, 11 aa, Homo sapiens
  CDR3 for alpha chain variable domain of TCR clone 248004 (TRAV2, TRAJ13)
CASGGYQKVTF

SEQ ID NO: 496008 - protein, 16 aa, Homo sapiens
  CDR3 for beta chain variable domain of TCR clone 248004 (TRBV2, TRBJ2-1)
CDSSVGGSLSYNEQFF

SEQ ID NO: 496009 - protein, 13 aa, Homo sapiens
  CDR3 for alpha chain variable domain of TCR clone 248005 (TRAV1-2, TRAJ12)
CAVSMDSSYKLIF

SEQ ID NO: 496010 - protein, 20 aa, Homo sapiens
  CDR3 for beta chain variable domain of TCR clone 248005 (TRBV7-8, TRBJ2-2)
CASSHLFPGPTIHITGELFF

SEQ ID NO: 496011 - protein, 16 aa, Homo sapiens
  CDR3 for alpha chain variable domain of TCR clone 248006 (TRAV21, TRAJ37)
CPVRPRGSSNTGKLIF

SEQ ID NO: 496012 - protein, 16 aa, Homo sapiens
  CDR3 for beta chain variable domain of TCR clone 248006 (TRBV2, TRBJ2-1)
CASSVGGSLSYNEQFF

SEQ ID NO: 496013 - protein, 15 aa, Homo sapiens
  CDR3 for alpha chain variable domain of TCR clone 248007 (TRAV8-3, TRAJ41)
CAVGSNSNSGYALNF

SEQ ID NO: 496014 - protein, 14 aa, Homo sapiens
  CDR3 for beta chain variable domain of TCR clone 248007 (TRBV18, TRBJ2-5)
CASSPGVSQETQYF

SEQ ID NO: 496015 - protein, 14 aa, Homo sapiens
  CDR3 for alpha chain variable domain of TCR clone 248008 (TRAV12-1, TRAJ17)
CVVNFKAAGNKLTF

SEQ ID NO: 496016 - protein, 15 aa, Homo sapiens
  CDR3 for beta chain variable domain of TCR clone 248008 (TRBV4-1, TRBJ2-7)
CASSQNTGRLCEQYF

SEQ ID NO: 496017 - protein, 14 aa, Homo sapiens
  CDR3 for alpha chain variable domain of TCR clone 248009 (TRAV4, TRAJ26)
CRVGPHNYGQNFVF

SEQ ID NO: 496018 - protein, 17 aa, Homo sapiens
  CDR3 for beta chain variable domain of TCR clone 248009 (TRBV24-1, TRBJ2-1)
CATSDVSTSGTYNEQFF

SEQ ID NO: 496019 - protein, 11 aa, Homo sapiens
  CDR3 for alpha chain variable domain of TCR clone 248010 (TRAV2, TRAJ13)
CASGGYQKVTF

SEQ ID NO: 496020 - protein, 18 aa, Homo sapiens
  CDR3 for beta chain variable domain of TCR clone 248010 (TRBV10-3, TRBJ2-1)
CTSVPSVSLRGGVDEQFF

SEQ ID NO: 496021 - protein, 17 aa, Homo sapiens
  CDR3 for alpha chain variable domain of TCR clone 248011 (TRAV3, TRAJ42)
CAVRDRDYGGSKGNLTF

SEQ ID NO: 496022 - protein, 15 aa, Homo sapiens
  CDR3 for beta chain variable domain of TCR clone 248011 (TRBV6-6, TRBJ2-7)
CASSYSYGGSYEQYF

SEQ ID NO: 496023 - protein, 12 aa, Homo sapiens
  CDR3 for alpha chain variable domain of TCR clone 248012 (TRAV26-1, TRAJ35)
CIGLSFGNVLHC

SEQ ID NO: 496024 - protein, 15 aa, Homo sapiens
  CDR3 for beta chain variable domain of TCR clone 248012 (TRBV18, TRBJ2-1)
CASLPDRGRDNEQFF

SEQ ID NO: 496025 - protein, 16 aa, Homo sapiens
  CDR3 for alpha chain variable domain of TCR clone 248013 (TRAV3, TRAJ37)
CAVRGKGSGNTGKLIF

SEQ ID NO: 496026 - protein, 13 aa, Homo sapiens
  CDR3 for beta chain variable domain of TCR clone 248013 (TRBV12-4, TRBJ1-5)
CASSPDRAQPQHF

SEQ ID NO: 496027 - protein, 12 aa, Homo sapiens
  CDR3 for alpha chain variable domain of TCR clone 248014 (TRAV8-3, TRAJ6)
CAVAGGSYIPTS

SEQ ID NO: 496028 - protein, 14 aa, Homo sapiens
  CDR3 for beta chain variable domain of TCR clone 248014 (TRBV27, TRBJ2-7)
CASATGTERREQYF

SEQ ID NO: 496029 - protein, 15 aa, Homo sapiens
  CDR3 for alpha chain variable domain of TCR clone 248015 (TRAV26-1, TRAJ29)
CIVRVEGSGNKPLVF

SEQ ID NO: 496030 - protein, 14 aa, Homo sapiens
  CDR3 for beta chain variable domain of TCR clone 248015 (TRBV18, TRBJ2-5)
CASSPGVSQDTQYF

SEQ ID NO: 496031 - protein, 16 aa, Homo sapiens
  CDR3 for alpha chain variable domain of TCR clone 248016 (TRAV8-6, TRAJ10)
CAVSDEITGRGNKLTF

SEQ ID NO: 496032 - protein, 13 aa, Homo sapiens
  CDR3 for beta chain variable domain of TCR clone 248016 (TRBV7-3, TRBJ1-1)
CASSQDWGAEAFF

SEQ ID NO: 496033 - protein, 18 aa, Homo sapiens
  CDR3 for alpha chain variable domain of TCR clone 248017 (TRAV9-2, TRAJ52)
CALSRHNAGGTSYGKLTF

SEQ ID NO: 496034 - protein, 14 aa, Homo sapiens
  CDR3 for beta chain variable domain of TCR clone 248017 (TRBV9, TRBJ2-4)
CASSPSGTSGVQYF

SEQ ID NO: 496035 - protein, 12 aa, Homo sapiens
  CDR3 for alpha chain variable domain of TCR clone 248018 (TRAV2, TRAJ31)
CAVEVGNARLMF

SEQ ID NO: 496036 - protein, 18 aa, Homo sapiens
  CDR3 for beta chain variable domain of TCR clone 248018 (TRBV7-9, TRBJ2-3)
CASSLDLAGLATPDTQYF

SEQ ID NO: 496037 - protein, 13 aa, Homo sapiens
  CDR3 for alpha chain variable domain of TCR clone 248019 (TRAV30, TRAJ16)
CGTFGGDGQKLLF

SEQ ID NO: 496038 - protein, 16 aa, Homo sapiens
  CDR3 for beta chain variable domain of TCR clone 248019 (TRBV7-6, TRBJ2-1)
CASSLAYSGRAGEQFF

SEQ ID NO: 496039 - protein, 15 aa, Homo sapiens
  CDR3 for alpha chain variable domain of TCR clone 248020 (TRAV17, TRAJ57)
CATGPSQGGSEKLVF

SEQ ID NO: 496040 - protein, 14 aa, Homo sapiens
  CDR3 for beta chain variable domain of TCR clone 248020 (TRBV12-5, TRBJ2-5)
CASGSRTHQETQYY

SEQ ID NO: 496041 - protein, 16 aa, Homo sapiens
  CDR3 for alpha chain variable domain of TCR clone 248021 (TRAV30, TRAJ24)
CGTEIVDANSGGKFQF

SEQ ID NO: 496042 - protein, 13 aa, Homo sapiens
  CDR3 for beta chain variable domain of TCR clone 248021 (TRBV12-4, TRBJ2-5)
CASSPGTEETQYF

SEQ ID NO: 496043 - protein, 15 aa, Homo sapiens
  CDR3 for alpha chain variable domain of TCR clone 248022 (TRAV12-2, TRAJ53)
CAGNGGGGSNYKLTF

SEQ ID NO: 496044 - protein, 15 aa, Homo sapiens
  CDR3 for beta chain variable domain of TCR clone 248022 (TRBV20-1, TRBJ2-7)
CSARDRVSGMDEQYF

SEQ ID NO: 496045 - protein, 14 aa, Homo sapiens
  CDR3 for alpha chain variable domain of TCR clone 248023 (TRAV8-1, TRAJ34)
CAVITTYNTDKLIF

SEQ ID NO: 496046 - protein, 14 aa, Homo sapiens
  CDR3 for beta chain variable domain of TCR clone 248023 (TRBV11-3, TRBJ1-3)
CASSHNGQGNTIYF

SEQ ID NO: 496047 - protein, 14 aa, Homo sapiens
  CDR3 for alpha chain variable domain of TCR clone 248024 (TRAV12-3, TRAJ9)
CAMSPNTGGLKTIF

SEQ ID NO: 496048 - protein, 12 aa, Homo sapiens
  CDR3 for beta chain variable domain of TCR clone 248024 (TRBV11-2, TRBJ2-2)
CASSLGGGELFC

SEQ ID NO: 496049 - protein, 15 aa, Homo sapiens
  CDR3 for alpha chain variable domain of TCR clone 248025 (TRAV3, TRAJ5)
CAVRDRKTGRGALTF

SEQ ID NO: 496050 - protein, 15 aa, Homo sapiens
  CDR3 for beta chain variable domain of TCR clone 248025 (TRBV7-9, TRBJ2-2)
CASGPLDTFPGELFF

SEQ ID NO: 496051 - protein, 12 aa, Homo sapiens
  CDR3 for alpha chain variable domain of TCR clone 248026 (TRAV8-3, TRAJ34)
WASGYNTDKLIF

SEQ ID NO: 496052 - protein, 13 aa, Homo sapiens
  CDR3 for beta chain variable domain of TCR clone 248026 (TRBV6-4, TRBJ2-3)
CASSFSWADTQYF

SEQ ID NO: 496053 - protein, 14 aa, Homo sapiens
  CDR3 for alpha chain variable domain of TCR clone 248027 (TRAV8-3, TRAJ4)
CAVGASGGYNKLIF

SEQ ID NO: 496054 - protein, 15 aa, Homo sapiens
  CDR3 for beta chain variable domain of TCR clone 248027 (TRBV7-2, TRBJ2-1)
CASSLNRGAYNEQFF

SEQ ID NO: 496055 - protein, 16 aa, Homo sapiens
  CDR3 for alpha chain variable domain of TCR clone 248028 (TRAV3, TRAJ37)
CAVRPHGSGNTGKLIF

SEQ ID NO: 496056 - protein, 13 aa, Homo sapiens
  CDR3 for beta chain variable domain of TCR clone 248028 (TRBV20-1, TRBJ1-1)
CSARGGENTEAFF

SEQ ID NO: 496057 - protein, 14 aa, Homo sapiens
  CDR3 for alpha chain variable domain of TCR clone 248029 (TRAV13-1, TRAJ40)
CAASMTSGTYKYIF

SEQ ID NO: 496058 - protein, 16 aa, Homo sapiens
  CDR3 for beta chain variable domain of TCR clone 248029 (TRBV19, TRBJ1-1)
CASSPTRFWPGTEAFF

SEQ ID NO: 496059 - protein, 16 aa, Homo sapiens
  CDR3 for alpha chain variable domain of TCR clone 248030 (TRAV17, TRAJ36)
CATVSLNWGKQPLLWD

SEQ ID NO: 496060 - protein, 14 aa, Homo sapiens
  CDR3 for beta chain variable domain of TCR clone 248030 (TRBV19, TRBJ2-1)
CASPTFVLSGEQFF

SEQ ID NO: 496061 - protein, 15 aa, Homo sapiens
  CDR3 for alpha chain variable domain of TCR clone 248031 (TRAV3, TRAJ5)
CAVRDLDTGRRALTF

SEQ ID NO: 496062 - protein, 13 aa, Homo sapiens
  CDR3 for beta chain variable domain of TCR clone 248031 (TRBV12-4, TRBJ2-7)
CPSSPTETYEKYF

SEQ ID NO: 496063 - protein, 13 aa, Homo sapiens
  CDR3 for alpha chain variable domain of TCR clone 248032 (TRAV8-4, TRAJ10)
CAAFTGGGNKLTF

SEQ ID NO: 496064 - protein, 14 aa, Homo sapiens
  CDR3 for beta chain variable domain of TCR clone 248032 (TRBV9, TRBJ2-2)
CASSSRPYTGELFF

SEQ ID NO: 496065 - protein, 15 aa, Homo sapiens
  CDR3 for alpha chain variable domain of TCR clone 248033 (TRAV25, TRAJ53)
CPTSNSGGSNYKLTF

SEQ ID NO: 496066 - protein, 14 aa, Homo sapiens
  CDR3 for beta chain variable domain of TCR clone 248033 (TRBV19, TRBJ2-1)
CASPTFVLSGEQFF

SEQ ID NO: 496067 - protein, 14 aa, Homo sapiens
  CDR3 for alpha chain variable domain of TCR clone 248034 (TRAV12-2, TRAJ13)
CAVKKTGGCQKVTF

SEQ ID NO: 496068 - protein, 12 aa, Homo sapiens
  CDR3 for beta chain variable domain of TCR clone 248034 (TRBV12-4, TRBJ1-2)
CASSFIWLHLRF

SEQ ID NO: 496069 - protein, 12 aa, Homo sapiens
  CDR3 for alpha chain variable domain of TCR clone 248035 (TRAV17, TRAJ39)
CATGAAGNMLTF

SEQ ID NO: 496070 - protein, 14 aa, Homo sapiens
  CDR3 for beta chain variable domain of TCR clone 248035 (TRBV25-1, TRBJ1-1)
CASTHLGGNTEAFF

SEQ ID NO: 496071 - protein, 15 aa, Homo sapiens
  CDR3 for alpha chain variable domain of TCR clone 248036 (TRAV35, TRAJ23)
CAGPLGNNQGGKLIF

SEQ ID NO: 496072 - protein, 14 aa, Homo sapiens
  CDR3 for beta chain variable domain of TCR clone 248036 (TRBV7-9, TRBJ1-1)
NDTATTETYTEAFF

SEQ ID NO: 496073 - protein, 15 aa, Homo sapiens
  CDR3 for alpha chain variable domain of TCR clone 248037 (TRAV3, TRAJ45)
CAVRTPLGGADGLTL

SEQ ID NO: 496074 - protein, 16 aa, Homo sapiens
  CDR3 for beta chain variable domain of TCR clone 248037 (TRBV6-1, TRBJ2-2)
CASSFGQGANTGELFF

SEQ ID NO: 496075 - protein, 15 aa, Homo sapiens
  CDR3 for alpha chain variable domain of TCR clone 248038 (TRAV8-3, TRAJ45)
CALPYSGGGADGLTF

SEQ ID NO: 496076 - protein, 13 aa, Homo sapiens
  CDR3 for beta chain variable domain of TCR clone 248038 (TRBV10-3, TRBJ2-7)
CASKLAVNYEQYF

SEQ ID NO: 496077 - protein, 13 aa, Homo sapiens
  CDR3 for alpha chain variable domain of TCR clone 248039 (TRAV8-6, TRAJ49)
CAVITNTGNQFYF

SEQ ID NO: 496078 - protein, 13 aa, Homo sapiens
  CDR3 for beta chain variable domain of TCR clone 248039 (TRBV7-6, TRBJ1-2)
CASSLVADYGYTF

SEQ ID NO: 496079 - protein, 13 aa, Homo sapiens
  CDR3 for alpha chain variable domain of TCR clone 248040 (TRAV2, TRAJ40)
CAVVTSGTYKYTF

SEQ ID NO: 496080 - protein, 15 aa, Homo sapiens
  CDR3 for beta chain variable domain of TCR clone 248040 (TRBV12-4, TRBJ2-5)
CASSPPTGLQETQYF

SEQ ID NO: 496081 - protein, 13 aa, Homo sapiens
  CDR3 for alpha chain variable domain of TCR clone 248041 (TRAV12-1, TRAJ37)
CVANAGNTGKLIF

SEQ ID NO: 496082 - protein, 14 aa, Homo sapiens
  CDR3 for beta chain variable domain of TCR clone 248041 (TRBV7-2, TRBJ2-3)
CASRRGLAADTQYF

SEQ ID NO: 496083 - protein, 17 aa, Homo sapiens
  CDR3 for alpha chain variable domain of TCR clone 248042 (TRAV3, TRAJ6)
CAVSRRTDTGGSYIPTF

SEQ ID NO: 496084 - protein, 17 aa, Homo sapiens
  CDR3 for beta chain variable domain of TCR clone 248042 (TRBV13, TRBJ2-3)
CASSLSRVAGGRNTQYF

SEQ ID NO: 496085 - protein, 14 aa, Homo sapiens
  CDR3 for alpha chain variable domain of TCR clone 248043 (TRAV12-2, TRAJ13)
CAVKKTGGYQKVTF

SEQ ID NO: 496086 - protein, 15 aa, Homo sapiens
  CDR3 for beta chain variable domain of TCR clone 248043 (TRBV20-1, TRBJ2-1)
CSARGIGGTYNDQFF

SEQ ID NO: 496087 - protein, 14 aa, Homo sapiens
  CDR3 for alpha chain variable domain of TCR clone 248044 (TRAV12-2, TRAJ13)
CAVKQTGGYQKVTF

SEQ ID NO: 496088 - protein, 12 aa, Homo sapiens
  CDR3 for beta chain variable domain of TCR clone 248044 (TRBV12-4, TRBJ1-2)
CASSFIWLHLRF

SEQ ID NO: 496089 - protein, 16 aa, Homo sapiens
  CDR3 for alpha chain variable domain of TCR clone 248045 (TRAV30, TRAJ24)
CGTEIVDADSWGKFQV

SEQ ID NO: 496090 - protein, 17 aa, Homo sapiens
  CDR3 for beta chain variable domain of TCR clone 248045 (TRBV7-3, TRBJ2-3)
CASSLMKRMRGADTQYF

SEQ ID NO: 496091 - protein, 20 aa, Homo sapiens
  CDR3 for alpha chain variable domain of TCR clone 248046 (TRAV12-3, TRAJ41)
SLFIRDSQPSDSATPEALNF

SEQ ID NO: 496092 - protein, 14 aa, Homo sapiens
  CDR3 for beta chain variable domain of TCR clone 248046 (TRBV7-6, TRBJ2-3)
CASSLGTVTDTQYF

SEQ ID NO: 496093 - protein, 14 aa, Homo sapiens
  CDR3 for alpha chain variable domain of TCR clone 248047 (TRAV12-2, TRAJ13)
CAVKNTGGYQKVTF

SEQ ID NO: 496094 - protein, 15 aa, Homo sapiens
  CDR3 for beta chain variable domain of TCR clone 248047 (TRBV12-4, TRBJ2-5)
CASSPPTGLQETQYF

SEQ ID NO: 496095 - protein, 12 aa, Homo sapiens
  CDR3 for alpha chain variable domain of TCR clone 248048 (TRAV13-1, TRAJ49)
CAAYSTGNQFYF

SEQ ID NO: 496096 - protein, 14 aa, Homo sapiens
  CDR3 for beta chain variable domain of TCR clone 248048 (TRBV6-1, TRBJ1-3)
CASSEDRGIDTIYF

SEQ ID NO: 496097 - protein, 14 aa, Homo sapiens
  CDR3 for alpha chain variable domain of TCR clone 248049 (TRAV2, TRAJ26)
CAGSPGRLWSEFCL

SEQ ID NO: 496098 - protein, 16 aa, Homo sapiens
  CDR3 for beta chain variable domain of TCR clone 248049 (TRBV13, TRBJ2-2)
CASSPRTGEHTGELFF

SEQ ID NO: 496099 - protein, 13 aa, Homo sapiens
  CDR3 for alpha chain variable domain of TCR clone 248050 (TRAV35, TRAJ44)
CAGLSGTASKLTF

SEQ ID NO: 496100 - protein, 17 aa, Homo sapiens
  CDR3 for beta chain variable domain of TCR clone 248050 (TRBV7-8, TRBJ1-2)
CASSLRLLQGHLYGYTF

SEQ ID NO: 496101 - protein, 10 aa, Homo sapiens
  CDR3 for alpha chain variable domain of TCR clone 248051 (TRAV1-2, TRAJ31)
CVSEDARLMF

SEQ ID NO: 496102 - protein, 14 aa, Homo sapiens
  CDR3 for beta chain variable domain of TCR clone 248051 (TRBV19, TRBJ2-1)
CASPTFVLSGEQFL

SEQ ID NO: 496103 - protein, 15 aa, Homo sapiens
  CDR3 for alpha chain variable domain of TCR clone 248052 (TRAV12-3, TRAJ6)
CAMSATSGGSYIPTF

SEQ ID NO: 496104 - protein, 14 aa, Homo sapiens
  CDR3 for beta chain variable domain of TCR clone 248052 (TRBV12-5, TRBJ2-5)
CASGSRTHEETQYF

SEQ ID NO: 496105 - protein, 16 aa, Homo sapiens
  CDR3 for alpha chain variable domain of TCR clone 248053 (TRAV30, TRAJ24)
CGTEIVDADSWGKFQF

SEQ ID NO: 496106 - protein, 15 aa, Homo sapiens
  CDR3 for beta chain variable domain of TCR clone 248053 (TRBV18, TRBJ2-1)
CASLPDRGRENEQFF

SEQ ID NO: 496107 - protein, 13 aa, Homo sapiens
  CDR3 for alpha chain variable domain of TCR clone 248054 (TRAV2, TRAJ15)
CAVEAQAGTALIF

SEQ ID NO: 496108 - protein, 14 aa, Homo sapiens
  CDR3 for beta chain variable domain of TCR clone 248054 (TRBV4-1, TRBJ2-2)
CASSQAVNTGELFF

SEQ ID NO: 496109 - protein, 17 aa, Homo sapiens
  CDR3 for alpha chain variable domain of TCR clone 248055 (TRAV3, TRAJ6)
CAVRDGPRAGGSYIPTF

SEQ ID NO: 496110 - protein, 14 aa, Homo sapiens
  CDR3 for beta chain variable domain of TCR clone 248055 (TRBV7-2, TRBJ2-3)
CASSFVMPTDKQYF

SEQ ID NO: 496111 - protein, 14 aa, Homo sapiens
  CDR3 for alpha chain variable domain of TCR clone 248056 (TRAV13-1, TRAJ35)
CAASKGGVGNVLHC

SEQ ID NO: 496112 - protein, 15 aa, Homo sapiens
  CDR3 for beta chain variable domain of TCR clone 248056 (TRBV28, TRBJ2-1)
CASSGLAEVDNEQFF

SEQ ID NO: 496113 - protein, 13 aa, Homo sapiens
  CDR3 for alpha chain variable domain of TCR clone 248057 (TRAV3, TRAJ4)
CAVRDGCYNKLIF

SEQ ID NO: 496114 - protein, 15 aa, Homo sapiens
  CDR3 for beta chain variable domain of TCR clone 248057 (TRBV5-1, TRBJ2-1)
CASSPPRAPYNEQFF

SEQ ID NO: 496115 - protein, 15 aa, Homo sapiens
  CDR3 for alpha chain variable domain of TCR clone 248058 (TRAV19, TRAJ9)
CALSEARTGGFKTIF

SEQ ID NO: 496116 - protein, 17 aa, Homo sapiens
  CDR3 for beta chain variable domain of TCR clone 248058 (TRBV28, TRBJ2-5)
CASSTPEEDALQETQYF

SEQ ID NO: 496117 - protein, 14 aa, Homo sapiens
  CDR3 for alpha chain variable domain of TCR clone 248059 (TRAV17, TRAJ57)
CATDPQGGSEKLVF

SEQ ID NO: 496118 - protein, 14 aa, Homo sapiens
  CDR3 for beta chain variable domain of TCR clone 248059 (TRBV7-3, TRBJ2-2)
CASSSGGYTGELFF

SEQ ID NO: 496119 - protein, 14 aa, Homo sapiens
  CDR3 for alpha chain variable domain of TCR clone 248060 (TRAV1-1, TRAJ35)
CAVRSIGFGNVLHC

SEQ ID NO: 496120 - protein, 12 aa, Homo sapiens
  CDR3 for beta chain variable domain of TCR clone 248060 (TRBV27, TRBJ2-2)
CASKLFTGELFF

SEQ ID NO: 496121 - protein, 15 aa, Homo sapiens
  CDR3 for alpha chain variable domain of TCR clone 248061 (TRAV3, TRAJ36)
CAVRASQTGENNLFF

SEQ ID NO: 496122 - protein, 15 aa, Homo sapiens
  CDR3 for beta chain variable domain of TCR clone 248061 (TRBV3-1, TRBJ2-1)
CASSQDYTPRGEQFF

SEQ ID NO: 496123 - protein, 14 aa, Homo sapiens
  CDR3 for alpha chain variable domain of TCR clone 248062 (TRAV35, TRAJ50)
CAGHRKTSYDKAIF

SEQ ID NO: 496124 - protein, 17 aa, Homo sapiens
  CDR3 for beta chain variable domain of TCR clone 248062 (TRBV7-8, TRBJ2-6)
CASSAGTGGAGANVLTF

SEQ ID NO: 496125 - protein, 13 aa, Homo sapiens
  CDR3 for alpha chain variable domain of TCR clone 248063 (TRAV26-1, )
CIVSHRVEGFWNQ

SEQ ID NO: 496126 - protein, 15 aa, Homo sapiens
  CDR3 for beta chain variable domain of TCR clone 248063 (TRBV11-3, TRBJ2-3)
CASLKDGREGDTQYF

SEQ ID NO: 496127 - protein, 14 aa, Homo sapiens
  CDR3 for alpha chain variable domain of TCR clone 248064 (TRAV12-2, TRAJ40)
CAVKIPSGTYKYIF

SEQ ID NO: 496128 - protein, 15 aa, Homo sapiens
  CDR3 for beta chain variable domain of TCR clone 248064 (TRBV5-1, TRBJ2-5)
CASSFKGGDQETQYF

SEQ ID NO: 496129 - protein, 12 aa, Homo sapiens
  CDR3 for alpha chain variable domain of TCR clone 248065 (TRAV13-1, TRAJ53)
AASGGTNYKLTF

SEQ ID NO: 496130 - protein, 15 aa, Homo sapiens
  CDR3 for beta chain variable domain of TCR clone 248065 (TRBV5-1, TRBJ2-1)
CASSPPRAPYNEQFF

SEQ ID NO: 496131 - protein, 15 aa, Homo sapiens
  CDR3 for alpha chain variable domain of TCR clone 248066 (TRAV8-3, TRAJ27)
CAVGPSKTNAGKSTF

SEQ ID NO: 496132 - protein, 15 aa, Homo sapiens
  CDR3 for beta chain variable domain of TCR clone 248066 (TRBV12-4, TRBJ1-1)
CASSLAVSRGAEAFF

SEQ ID NO: 496133 - protein, 12 aa, Homo sapiens
  CDR3 for alpha chain variable domain of TCR clone 248067 (TRAV13-1, TRAJ21)
CAAKGGFNKFYF

SEQ ID NO: 496134 - protein, 15 aa, Homo sapiens
  CDR3 for beta chain variable domain of TCR clone 248067 (TRBV7-9, TRBJ1-6)
CASSSPGRGNSPLHF

SEQ ID NO: 496135 - protein, 13 aa, Homo sapiens
  CDR3 for alpha chain variable domain of TCR clone 248068 (TRAV3, TRAJ20)
CAVRSLNDSKLSF

SEQ ID NO: 496136 - protein, 12 aa, Homo sapiens
  CDR3 for beta chain variable domain of TCR clone 248068 (TRBV6-1, TRBJ2-1)
CASYSTYNEQFF

SEQ ID NO: 496137 - protein, 15 aa, Homo sapiens
  CDR3 for alpha chain variable domain of TCR clone 248069 (TRAV12-2, TRAJ8)
CAVREENTGFQKLVF

SEQ ID NO: 496138 - protein, 15 aa, Homo sapiens
  CDR3 for beta chain variable domain of TCR clone 248069 (TRBV28, TRBJ2-4)
CAACSGTLLMGIQYF

SEQ ID NO: 496139 - protein, 14 aa, Homo sapiens
  CDR3 for alpha chain variable domain of TCR clone 248070 (TRAV1-2, TRAJ16)
CAVNRLSDGQKLLF

SEQ ID NO: 496140 - protein, 15 aa, Homo sapiens
  CDR3 for beta chain variable domain of TCR clone 248070 (TRBV7-9, TRBJ1-6)
CASSSPGRGTSPLHF

SEQ ID NO: 496141 - protein, 13 aa, Homo sapiens
  CDR3 for alpha chain variable domain of TCR clone 248071 (TRAV26-1, TRAJ54)
CIVGVKGAQKLGF

SEQ ID NO: 496142 - protein, 15 aa, Homo sapiens
  CDR3 for beta chain variable domain of TCR clone 248071 (TRBV20-1, TRBJ2-1)
CSAQPGGGPYNEQFF

SEQ ID NO: 496143 - protein, 14 aa, Homo sapiens
  CDR3 for alpha chain variable domain of TCR clone 248072 (TRAV12-3, TRAJ12)
CARSEVDSSYKLIF

SEQ ID NO: 496144 - protein, 12 aa, Homo sapiens
  CDR3 for beta chain variable domain of TCR clone 248072 (TRBV18, TRBJ1-4)
CASSPSREKLFF

SEQ ID NO: 496145 - protein, 14 aa, Homo sapiens
  CDR3 for alpha chain variable domain of TCR clone 248073 (TRAV26-1, TRAJ38)
CIADNAGNNRKLFW

SEQ ID NO: 496146 - protein, 12 aa, Homo sapiens
  CDR3 for beta chain variable domain of TCR clone 248073 (TRBV5-1, TRBJ2-7)
CAGSFRGYEQYF

SEQ ID NO: 496147 - protein, 11 aa, Homo sapiens
  CDR3 for alpha chain variable domain of TCR clone 248074 (TRAV21, TRAJ11)
CCDFRIQHLTF

SEQ ID NO: 496148 - protein, 17 aa, Homo sapiens
  CDR3 for beta chain variable domain of TCR clone 248074 (TRBV13, TRBJ2-3)
CASSLSRVAGGRNTQYF

SEQ ID NO: 496149 - protein, 15 aa, Homo sapiens
  CDR3 for alpha chain variable domain of TCR clone 248075 (TRAV26-1, TRAJ56)
CIVRVATGANSKLTF

SEQ ID NO: 496150 - protein, 17 aa, Homo sapiens
  CDR3 for beta chain variable domain of TCR clone 248075 (TRBV13, TRBJ2-3)
CASSLSRVAGGRNTQYF

SEQ ID NO: 496151 - protein, 15 aa, Homo sapiens
  CDR3 for alpha chain variable domain of TCR clone 248076 (TRAV12-3, TRAJ6)
CAMSATSGGSYIPTF

SEQ ID NO: 496152 - protein, 14 aa, Homo sapiens
  CDR3 for beta chain variable domain of TCR clone 248076 (TRBV25-1, TRBJ1-1)
CASTHLGGNTEAFF

SEQ ID NO: 496153 - protein, 14 aa, Homo sapiens
  CDR3 for alpha chain variable domain of TCR clone 248077 (TRAV8-1, TRAJ24)
CAVNAADSGGKLRF

SEQ ID NO: 496154 - protein, 16 aa, Homo sapiens
  CDR3 for beta chain variable domain of TCR clone 248077 (TRBV4-3, TRBJ2-1)
CASSPALDRGVNEQFF

SEQ ID NO: 496155 - protein, 19 aa, Homo sapiens
  CDR3 for alpha chain variable domain of TCR clone 248078 (TRAV26-1, TRAJ52)
CSVRAHRNAGGTSYGKLTF

SEQ ID NO: 496156 - protein, 15 aa, Homo sapiens
  CDR3 for beta chain variable domain of TCR clone 248078 (TRBV12-4, TRBJ2-5)
CASSTPTGLQETQYF

SEQ ID NO: 496157 - protein, 14 aa, Homo sapiens
  CDR3 for alpha chain variable domain of TCR clone 248079 (TRAV12-1, TRAJ17)
CVVNYKAAGNKLTF

SEQ ID NO: 496158 - protein, 12 aa, Homo sapiens
  CDR3 for beta chain variable domain of TCR clone 248079 (TRBV10-3, TRBJ1-1)
CATMDRPPEAFF

SEQ ID NO: 496159 - protein, 11 aa, Homo sapiens
  CDR3 for alpha chain variable domain of TCR clone 248080 (TRAV2, TRAJ33)
CAVDSNYQLIW

SEQ ID NO: 496160 - protein, 16 aa, Homo sapiens
  CDR3 for beta chain variable domain of TCR clone 248080 (TRBV7-9, TRBJ1-2)
CASSLGFSSGEDGYTF

SEQ ID NO: 496161 - protein, 15 aa, Homo sapiens
  CDR3 for alpha chain variable domain of TCR clone 248081 (TRAV21, TRAJ32)
CAVNPYGGATNKLIF

SEQ ID NO: 496162 - protein, 18 aa, Homo sapiens
  CDR3 for beta chain variable domain of TCR clone 248081 (TRBV7-9, TRBJ2-1)
CASSTGLAEGSSYNEQFF

SEQ ID NO: 496163 - protein, 14 aa, Homo sapiens
  CDR3 for alpha chain variable domain of TCR clone 248082 (TRAV12-3, TRAJ10)
SHLPLTGGGNKLIF

SEQ ID NO: 496164 - protein, 13 aa, Homo sapiens
  CDR3 for beta chain variable domain of TCR clone 248082 (TRBV2, TRBJ1-6)
CADSGSYNSPLHF

SEQ ID NO: 496165 - protein, 13 aa, Homo sapiens
  CDR3 for alpha chain variable domain of TCR clone 248083 (TRAV13-2, TRAJ20)
CAEKSWNDYKISF

SEQ ID NO: 496166 - protein, 17 aa, Homo sapiens
  CDR3 for beta chain variable domain of TCR clone 248083 (TRBV5-1, TRBJ2-1)
CASSMGLAGEGYNEQFF

SEQ ID NO: 496167 - protein, 10 aa, Homo sapiens
  CDR3 for alpha chain variable domain of TCR clone 248084 (TRAV27, TRAJ34)
CASDTDKLIF

SEQ ID NO: 496168 - protein, 16 aa, Homo sapiens
  CDR3 for beta chain variable domain of TCR clone 248084 (TRBV10-3, TRBJ2-1)
CAISGVGDGGGGEQFF

SEQ ID NO: 496169 - protein, 14 aa, Homo sapiens
  CDR3 for alpha chain variable domain of TCR clone 248085 (TRAV4, TRAJ17)
CLVGDMAAGNQLTF

SEQ ID NO: 496170 - protein, 14 aa, Homo sapiens
  CDR3 for beta chain variable domain of TCR clone 248085 (TRBV4-1, TRBJ2-7)
CASSPVAGGDEQYF

SEQ ID NO: 496171 - protein, 14 aa, Homo sapiens
  CDR3 for alpha chain variable domain of TCR clone 248086 (TRAV9-2, TRAJ39)
CALYIYNAGNMLTF

SEQ ID NO: 496172 - protein, 15 aa, Homo sapiens
  CDR3 for beta chain variable domain of TCR clone 248086 (TRBV2, TRBJ2-7)
CASSEGLARSYEQYL

SEQ ID NO: 496173 - protein, 18 aa, Homo sapiens
  CDR3 for alpha chain variable domain of TCR clone 248087 (TRAV12-3, TRAJ52)
CAMSVGGAGGTSYGKLTF

SEQ ID NO: 496174 - protein, 16 aa, Homo sapiens
  CDR3 for beta chain variable domain of TCR clone 248087 (TRBV28, TRBJ2-3)
CASSSFGTGGTDTQYF

SEQ ID NO: 496175 - protein, 17 aa, Homo sapiens
  CDR3 for alpha chain variable domain of TCR clone 248088 (TRAV1-2, TRAJ8)
CAVRYPDENTGFQKLVF

SEQ ID NO: 496176 - protein, 16 aa, Homo sapiens
  CDR3 for beta chain variable domain of TCR clone 248088 (TRBV7-9, TRBJ2-2)
CASSGFGGANTGELFF

SEQ ID NO: 496177 - protein, 18 aa, Homo sapiens
  CDR3 for alpha chain variable domain of TCR clone 248089 (TRAV1-1, TRAJ8)
CAGGTGFQTCIWNWHPTS

SEQ ID NO: 496178 - protein, 15 aa, Homo sapiens
  CDR3 for beta chain variable domain of TCR clone 248089 (TRBV9, TRBJ1-6)
CASSVAGTGDSPLHF

SEQ ID NO: 496179 - protein, 15 aa, Homo sapiens
  CDR3 for alpha chain variable domain of TCR clone 248090 (TRAV13-1, TRAJ44)
CAASRNTGTASKLTF

SEQ ID NO: 496180 - protein, 17 aa, Homo sapiens
  CDR3 for beta chain variable domain of TCR clone 248090 (TRBV13, TRBJ2-3)
CASSLSRGAGGRNTQYF

SEQ ID NO: 496181 - protein, 15 aa, Homo sapiens
  CDR3 for alpha chain variable domain of TCR clone 248091 (TRAV20, TRAJ53)
CSVQASGGSNYKLTF

SEQ ID NO: 496182 - protein, 12 aa, Homo sapiens
  CDR3 for beta chain variable domain of TCR clone 248091 (TRBV7-6, TRBJ2-5)
CASSLSQETQYF

SEQ ID NO: 496183 - protein, 12 aa, Homo sapiens
  CDR3 for alpha chain variable domain of TCR clone 248092 (TRAV8-6, TRAJ44)
DSYTGTASKLTF

SEQ ID NO: 496184 - protein, 13 aa, Homo sapiens
  CDR3 for beta chain variable domain of TCR clone 248092 (TRBV27, TRBJ2-7)
CASSFSQGYEQYF

SEQ ID NO: 496185 - protein, 13 aa, Homo sapiens
  CDR3 for alpha chain variable domain of TCR clone 248093 (TRAV20, TRAJ39)
CAVHPNAGNMLTF

SEQ ID NO: 496186 - protein, 16 aa, Homo sapiens
  CDR3 for beta chain variable domain of TCR clone 248093 (TRBV7-6, TRBJ2-7)
CASSGGTGALSYEQYF

SEQ ID NO: 496187 - protein, 12 aa, Homo sapiens
  CDR3 for alpha chain variable domain of TCR clone 248094 (TRAV3, TRAJ39)
CAVIEWSNMLTF

SEQ ID NO: 496188 - protein, 14 aa, Homo sapiens
  CDR3 for beta chain variable domain of TCR clone 248094 (TRBV7-8, TRBJ2-3)
CASSFPDGQDTEYF

SEQ ID NO: 496189 - protein, 13 aa, Homo sapiens
  CDR3 for alpha chain variable domain of TCR clone 248095 (TRAV8-1, TRAJ13)
CAVSKGGYQKVNL

SEQ ID NO: 496190 - protein, 18 aa, Homo sapiens
  CDR3 for beta chain variable domain of TCR clone 248095 (TRBV11-2, TRBJ2-7)
CASSWRTVQTGQSYEQYF

SEQ ID NO: 496191 - protein, 11 aa, Homo sapiens
  CDR3 for alpha chain variable domain of TCR clone 248096 (TRAV1-2, TRAJ31)
CAVNNNARLSF

SEQ ID NO: 496192 - protein, 15 aa, Homo sapiens
  CDR3 for beta chain variable domain of TCR clone 248096 (TRBV28, TRBJ2-1)
CASSIIAGGRSEQFF

SEQ ID NO: 496193 - protein, 15 aa, Homo sapiens
  CDR3 for alpha chain variable domain of TCR clone 248097 (TRAV26-1, TRAJ40)
CIDRYATSGTYKYIF

SEQ ID NO: 496194 - protein, 13 aa, Homo sapiens
  CDR3 for beta chain variable domain of TCR clone 248097 (TRBV7-9, TRBJ1-2)
CASSLKQNYGYIF

SEQ ID NO: 496195 - protein, 13 aa, Homo sapiens
  CDR3 for alpha chain variable domain of TCR clone 248098 (TRAV12-1, TRAJ31)
CVVNDNNNARIMF

SEQ ID NO: 496196 - protein, 14 aa, Homo sapiens
  CDR3 for beta chain variable domain of TCR clone 248098 (TRBV7-2, TRBJ2-1)
CASSFGTSYGEQFF

SEQ ID NO: 496197 - protein, 14 aa, Homo sapiens
  CDR3 for alpha chain variable domain of TCR clone 248099 (TRAV16, TRAJ33)
CALSAMDSNYQLIW

SEQ ID NO: 496198 - protein, 18 aa, Homo sapiens
  CDR3 for beta chain variable domain of TCR clone 248099 (TRBV11-2, TRBJ2-3)
CASSVRTSGSKKTDTQYF

SEQ ID NO: 496199 - protein, 15 aa, Homo sapiens
  CDR3 for alpha chain variable domain of TCR clone 248100 (TRAV21, TRAJ53)
CATLNSGGSNYKLTF

SEQ ID NO: 496200 - protein, 13 aa, Homo sapiens
  CDR3 for beta chain variable domain of TCR clone 248100 (TRBV2, TRBJ1-1)
CASSVLMNTEAFF

SEQ ID NO: 496201 - protein, 14 aa, Homo sapiens
  CDR3 for alpha chain variable domain of TCR clone 248101 (TRAV1-2, TRAJ16)
CAVNRFSDGQKLLF

SEQ ID NO: 496202 - protein, 14 aa, Homo sapiens
  CDR3 for beta chain variable domain of TCR clone 248101 (TRBV7-2, TRBJ1-1)
CAGSFLTGTTEAFF

SEQ ID NO: 496203 - protein, 12 aa, Homo sapiens
  CDR3 for alpha chain variable domain of TCR clone 248102 (TRAV12-3, TRAJ17)
CAMTLTGNKLTF

SEQ ID NO: 496204 - protein, 15 aa, Homo sapiens
  CDR3 for beta chain variable domain of TCR clone 248102 (TRBV5-1, TRBJ2-1)
GASSPPRAPYNEQFF

SEQ ID NO: 496205 - protein, 14 aa, Homo sapiens
  CDR3 for alpha chain variable domain of TCR clone 248103 (TRAV12-2, TRAJ13)
CAVKETGGYQKVTF

SEQ ID NO: 496206 - protein, 12 aa, Homo sapiens
  CDR3 for beta chain variable domain of TCR clone 248103 (TRBV11-2, TRBJ2-2)
CASSLGGGELFF

SEQ ID NO: 496207 - protein, 14 aa, Homo sapiens
  CDR3 for alpha chain variable domain of TCR clone 248104 (TRAV12-3, TRAJ10)
SHLHLTGGGNKLTF

SEQ ID NO: 496208 - protein, 13 aa, Homo sapiens
  CDR3 for beta chain variable domain of TCR clone 248104 (TRBV20-1, TRBJ2-2)
CSASAAGTGELFF

SEQ ID NO: 496209 - protein, 15 aa, Homo sapiens
  CDR3 for alpha chain variable domain of TCR clone 248105 (TRAV26-1, TRAJ29)
CIVRVEGSGNTRLVF

SEQ ID NO: 496210 - protein, 14 aa, Homo sapiens
  CDR3 for beta chain variable domain of TCR clone 248105 (TRBV18, TRBJ2-5)
CASSPGLSQETQYF

SEQ ID NO: 496211 - protein, 15 aa, Homo sapiens
  CDR3 for alpha chain variable domain of TCR clone 248106 (TRAV16, TRAJ4)
CALEDPSGGYNKLIV

SEQ ID NO: 496212 - protein, 13 aa, Homo sapiens
  CDR3 for beta chain variable domain of TCR clone 248106 (TRBV7-3, TRBJ2-7)
CASSQAGGYEQYF

SEQ ID NO: 496213 - protein, 13 aa, Homo sapiens
  CDR3 for alpha chain variable domain of TCR clone 248107 (TRAV3, TRAJ15)
CAVRDQAGTALIF

SEQ ID NO: 496214 - protein, 14 aa, Homo sapiens
  CDR3 for beta chain variable domain of TCR clone 248107 (TRBV20-1, TRBJ2-1)
CSAQIGGSANEQFF

SEQ ID NO: 496215 - protein, 11 aa, Homo sapiens
  CDR3 for alpha chain variable domain of TCR clone 248108 (TRAV17, TRAJ9)
CGFTGGFKTIF

SEQ ID NO: 496216 - protein, 14 aa, Homo sapiens
  CDR3 for beta chain variable domain of TCR clone 248108 (TRBV7-9, TRBJ2-2)
CASSLIQDTGELFF

SEQ ID NO: 496217 - protein, 16 aa, Homo sapiens
  CDR3 for alpha chain variable domain of TCR clone 248109 (TRAV8-4, TRAJ16)
CAVSPVGRWPEAALCK

SEQ ID NO: 496218 - protein, 15 aa, Homo sapiens
  CDR3 for beta chain variable domain of TCR clone 248109 (TRBV7-3, TRBJ1-6)
CASSLVRGAGSPLHF

SEQ ID NO: 496219 - protein, 13 aa, Homo sapiens
  CDR3 for alpha chain variable domain of TCR clone 248110 (TRAV35, TRAJ48)
CAGHEFGNEKLTF

SEQ ID NO: 496220 - protein, 15 aa, Homo sapiens
  CDR3 for beta chain variable domain of TCR clone 248110 (TRBV27, TRBJ2-7)
CASSPQREGKREQYF

SEQ ID NO: 496221 - protein, 15 aa, Homo sapiens
  CDR3 for alpha chain variable domain of TCR clone 248111 (TRAV13-1, TRAJ32)
CAASIYGGATNKLIF

SEQ ID NO: 496222 - protein, 12 aa, Homo sapiens
  CDR3 for beta chain variable domain of TCR clone 248111 (TRBV7-6, TRBJ2-3)
CDSSTGTDTQYF

SEQ ID NO: 496223 - protein, 16 aa, Homo sapiens
  CDR3 for alpha chain variable domain of TCR clone 248112 (TRAV30, TRAJ24)
CGTEIVDADSWGKFQF

SEQ ID NO: 496224 - protein, 18 aa, Homo sapiens
  CDR3 for beta chain variable domain of TCR clone 248112 (TRBV7-9, TRBJ2-7)
CASSLTTGGSRTWYEQYF

SEQ ID NO: 496225 - protein, 16 aa, Homo sapiens
  CDR3 for alpha chain variable domain of TCR clone 248113 (TRAV30, TRAJ49)
SAAQRVGPTTGNQFYF

SEQ ID NO: 496226 - protein, 15 aa, Homo sapiens
  CDR3 for beta chain variable domain of TCR clone 248113 (TRBV7-2, TRBJ2-1)
CASSSGLAGGNEQFF

SEQ ID NO: 496227 - protein, 13 aa, Homo sapiens
  CDR3 for alpha chain variable domain of TCR clone 248114 (TRAV3, TRAJ33)
CERLLLWNYQLIW

SEQ ID NO: 496228 - protein, 15 aa, Homo sapiens
  CDR3 for beta chain variable domain of TCR clone 248114 (TRBV20-1, TRBJ1-1)
CSASRGVTGNTEAFF

SEQ ID NO: 496229 - protein, 15 aa, Homo sapiens
  CDR3 for alpha chain variable domain of TCR clone 248115 (TRAV27, TRAJ53)
CRARNSGGSNYKLTF

SEQ ID NO: 496230 - protein, 14 aa, Homo sapiens
  CDR3 for beta chain variable domain of TCR clone 248115 (TRBV7-3, TRBJ2-1)
CASSLAGGTNEQFF

SEQ ID NO: 496231 - protein, 19 aa, Homo sapiens
  CDR3 for alpha chain variable domain of TCR clone 248116 (TRAV2, TRAJ20)
ILQVREADAAVYLDCKLSF

SEQ ID NO: 496232 - protein, 16 aa, Homo sapiens
  CDR3 for beta chain variable domain of TCR clone 248116 (TRBV20-1, TRBJ1-4)
CSAPGQGLLTNEKLFF

SEQ ID NO: 496233 - protein, 15 aa, Homo sapiens
  CDR3 for alpha chain variable domain of TCR clone 248117 (TRAV26-1, TRAJ29)
CIVRAEGAGNTPLVF

SEQ ID NO: 496234 - protein, 15 aa, Homo sapiens
  CDR3 for beta chain variable domain of TCR clone 248117 (TRBV7-9, TRBJ1-5)
CASSQGHQPNQPQHF

SEQ ID NO: 496235 - protein, 14 aa, Homo sapiens
  CDR3 for alpha chain variable domain of TCR clone 248118 (TRAV8-1, TRAJ24)
CAVNAADSWGKLRF

SEQ ID NO: 496236 - protein, 16 aa, Homo sapiens
  CDR3 for beta chain variable domain of TCR clone 248118 (TRBV4-3, TRBJ2-1)
CASSPALDRGVNEQFF

SEQ ID NO: 496237 - protein, 13 aa, Homo sapiens
  CDR3 for alpha chain variable domain of TCR clone 248119 (TRAV13-1, TRAJ29)
CAATISGNTPLVF

SEQ ID NO: 496238 - protein, 17 aa, Homo sapiens
  CDR3 for beta chain variable domain of TCR clone 248119 (TRBV5-1, TRBJ1-3)
CASSWVSSFHSGNTIYF

SEQ ID NO: 496239 - protein, 16 aa, Homo sapiens
  CDR3 for alpha chain variable domain of TCR clone 248120 (TRAV16, TRAJ4)
CALSRMFSGGYTKLIF

SEQ ID NO: 496240 - protein, 12 aa, Homo sapiens
  CDR3 for beta chain variable domain of TCR clone 248120 (TRBV29-1, TRBJ2-3)
CSVTGGADTQYF

SEQ ID NO: 496241 - protein, 16 aa, Homo sapiens
  CDR3 for alpha chain variable domain of TCR clone 248121 (TRAV26-1, )
CIDIQNPDPAVYQLRD

SEQ ID NO: 496242 - protein, 19 aa, Homo sapiens
  CDR3 for beta chain variable domain of TCR clone 248121 (TRBV19, TRBJ2-5)
CANSIGQVTDFFLGETQYF

SEQ ID NO: 496243 - protein, 17 aa, Homo sapiens
  CDR3 for alpha chain variable domain of TCR clone 248122 (TRAV26-2, TRAJ42)
CILRDVGYGGSQGNLIF

SEQ ID NO: 496244 - protein, 16 aa, Homo sapiens
  CDR3 for beta chain variable domain of TCR clone 248122 (TRBV12-4, TRBJ2-7)
CASSLIGGTGNYEQYF

SEQ ID NO: 496245 - protein, 12 aa, Homo sapiens
  CDR3 for alpha chain variable domain of TCR clone 248123 (TRAV12-2, TRAJ8)
CAVNTGFQKLVF

SEQ ID NO: 496246 - protein, 15 aa, Homo sapiens
  CDR3 for beta chain variable domain of TCR clone 248123 (TRBV7-8, TRBJ1-5)
CASSLERRGLETRHF

SEQ ID NO: 496247 - protein, 12 aa, Homo sapiens
  CDR3 for alpha chain variable domain of TCR clone 248124 (TRAV27, TRAJ13)
CAGVRGYQKVTF

SEQ ID NO: 496248 - protein, 16 aa, Homo sapiens
  CDR3 for beta chain variable domain of TCR clone 248124 (TRBV12-4, TRBJ1-5)
CASRQPVEGSNQPQHF

SEQ ID NO: 496249 - protein, 14 aa, Homo sapiens
  CDR3 for alpha chain variable domain of TCR clone 248125 (TRAV2, TRAJ20)
CAVEDVVNDDKLSF

SEQ ID NO: 496250 - protein, 13 aa, Homo sapiens
  CDR3 for beta chain variable domain of TCR clone 248125 (TRBV19, TRBJ2-7)
CASRKAGGSEQYF

SEQ ID NO: 496251 - protein, 17 aa, Homo sapiens
  CDR3 for alpha chain variable domain of TCR clone 248126 (TRAV3, TRAJ42)
CAVRDRDYGGSQGNLII

SEQ ID NO: 496252 - protein, 14 aa, Homo sapiens
  CDR3 for beta chain variable domain of TCR clone 248126 (TRBV7-2, TRBJ2-5)
CASSPRGSSETQYF

SEQ ID NO: 496253 - protein, 13 aa, Homo sapiens
  CDR3 for alpha chain variable domain of TCR clone 248127 (TRAV8-1, TRAJ30)
CAVIMNRDDKIIF

SEQ ID NO: 496254 - protein, 14 aa, Homo sapiens
  CDR3 for beta chain variable domain of TCR clone 248127 (TRBV19, TRBJ2-1)
CASPTFVLSGEQFF

SEQ ID NO: 496255 - protein, 14 aa, Homo sapiens
  CDR3 for alpha chain variable domain of TCR clone 248128 (TRAV16, TRAJ33)
CALSAMDSNYQLIW

SEQ ID NO: 496256 - protein, 15 aa, Homo sapiens
  CDR3 for beta chain variable domain of TCR clone 248128 (TRBV7-9, TRBJ1-6)
CASSSPGRGNSPLHF

SEQ ID NO: 496257 - protein, 12 aa, Homo sapiens
  CDR3 for alpha chain variable domain of TCR clone 248129 (TRAV3, TRAJ20)
CAVRDPDYKLSF

SEQ ID NO: 496258 - protein, 16 aa, Homo sapiens
  CDR3 for beta chain variable domain of TCR clone 248129 (TRBV18, TRBJ2-7)
CASSPLQSGTHYEQYF

SEQ ID NO: 496259 - protein, 14 aa, Homo sapiens
  CDR3 for alpha chain variable domain of TCR clone 248130 (TRAV12-2, TRAJ3)
CAVSLYSSAYKIIF

SEQ ID NO: 496260 - protein, 14 aa, Homo sapiens
  CDR3 for beta chain variable domain of TCR clone 248130 (TRBV27, TRBJ2-1)
CAGSIAETYNEQFF

SEQ ID NO: 496261 - protein, 16 aa, Homo sapiens
  CDR3 for alpha chain variable domain of TCR clone 248131 (TRAV3, TRAJ37)
CAVRGRGSGITGKLIF

SEQ ID NO: 496262 - protein, 13 aa, Homo sapiens
  CDR3 for beta chain variable domain of TCR clone 248131 (TRBV14, TRBJ2-7)
CASSQDRRGEQYV

SEQ ID NO: 496263 - protein, 14 aa, Homo sapiens
  CDR3 for alpha chain variable domain of TCR clone 248132 (TRAV12-2, TRAJ9)
CAVNALEGGFKTIF

SEQ ID NO: 496264 - protein, 16 aa, Homo sapiens
  CDR3 for beta chain variable domain of TCR clone 248132 (TRBV19, TRBJ1-6)
CASSVAPVAGNSPLVF

SEQ ID NO: 496265 - protein, 12 aa, Homo sapiens
  CDR3 for alpha chain variable domain of TCR clone 248133 (TRAV12-1, TRAJ40)
CVVYSGTYKYIF

SEQ ID NO: 496266 - protein, 16 aa, Homo sapiens
  CDR3 for beta chain variable domain of TCR clone 248133 (TRBV20-1, TRBJ2-4)
CSATSLAELAKNIQYF

SEQ ID NO: 496267 - protein, 19 aa, Homo sapiens
  CDR3 for alpha chain variable domain of TCR clone 248134 (TRAV23/DV6, TRAJ9)
CSKHRLKGAGHTGGFKTIF

SEQ ID NO: 496268 - protein, 15 aa, Homo sapiens
  CDR3 for beta chain variable domain of TCR clone 248134 (TRBV6-3, TRBJ2-1)
CASTYASDSYNEQFF

SEQ ID NO: 496269 - protein, 13 aa, Homo sapiens
  CDR3 for alpha chain variable domain of TCR clone 248135 (TRAV1-1, TRAJ30)
CAVRSDRDDKIIS

SEQ ID NO: 496270 - protein, 15 aa, Homo sapiens
  CDR3 for beta chain variable domain of TCR clone 248135 (TRBV20-1, TRBJ2-7)
CSARDRVSGMDEQYF

SEQ ID NO: 496271 - protein, 14 aa, Homo sapiens
  CDR3 for alpha chain variable domain of TCR clone 248136 (TRAV26-1, TRAJ49)
CIVRLTNTGNQSYF

SEQ ID NO: 496272 - protein, 13 aa, Homo sapiens
  CDR3 for beta chain variable domain of TCR clone 248136 (TRBV4-1, TRBJ2-7)
CASSQGQAYGQYF

SEQ ID NO: 496273 - protein, 14 aa, Homo sapiens
  CDR3 for alpha chain variable domain of TCR clone 248137 (TRAV8-4, TRAJ9)
CAVRINTGGFKTIF

SEQ ID NO: 496274 - protein, 15 aa, Homo sapiens
  CDR3 for beta chain variable domain of TCR clone 248137 (TRBV9, TRBJ1-6)
CASSVAGTGDSPLHF

SEQ ID NO: 496275 - protein, 14 aa, Homo sapiens
  CDR3 for alpha chain variable domain of TCR clone 248138 (TRAV3, TRAJ36)
CAVRDGTGANNPFF

SEQ ID NO: 496276 - protein, 16 aa, Homo sapiens
  CDR3 for beta chain variable domain of TCR clone 248138 (TRBV7-3, TRBJ2-5)
CASIQQGGSVQETQYF

SEQ ID NO: 496277 - protein, 13 aa, Homo sapiens
  CDR3 for alpha chain variable domain of TCR clone 248139 (TRAV3, TRAJ20)
CAVRDTPRYTLSF

SEQ ID NO: 496278 - protein, 15 aa, Homo sapiens
  CDR3 for beta chain variable domain of TCR clone 248139 (TRBV10-3, TRBJ2-1)
CAISDRDRGGNEQFF

SEQ ID NO: 496279 - protein, 14 aa, Homo sapiens
  CDR3 for alpha chain variable domain of TCR clone 248140 (TRAV1-1, TRAJ5)
CAERDGAGRRALTF

SEQ ID NO: 496280 - protein, 14 aa, Homo sapiens
  CDR3 for beta chain variable domain of TCR clone 248140 (TRBV28, TRBJ2-1)
CASSCYTAYNEQFF

SEQ ID NO: 496281 - protein, 12 aa, Homo sapiens
  CDR3 for alpha chain variable domain of TCR clone 248141 (TRAV13-1, TRAJ21)
CAAKEGFNKFYF

SEQ ID NO: 496282 - protein, 15 aa, Homo sapiens
  CDR3 for beta chain variable domain of TCR clone 248141 (TRBV7-9, TRBJ1-6)
CASSFPGRGNSPLHF

SEQ ID NO: 496283 - protein, 16 aa, Homo sapiens
  CDR3 for alpha chain variable domain of TCR clone 248142 (TRAV8-3, TRAJ10)
CAVGPGVTGGGNKPPF

SEQ ID NO: 496284 - protein, 13 aa, Homo sapiens
  CDR3 for beta chain variable domain of TCR clone 248142 (TRBV18, TRBJ1-1)
CASSPGPSGEAFF

SEQ ID NO: 496285 - protein, 14 aa, Homo sapiens
  CDR3 for alpha chain variable domain of TCR clone 248143 (TRAV1-2, TRAJ8)
CAVREDKGFQKLVF

SEQ ID NO: 496286 - protein, 13 aa, Homo sapiens
  CDR3 for beta chain variable domain of TCR clone 248143 (TRBV7-7, TRBJ2-5)
CASSRSGQETQYF

SEQ ID NO: 496287 - protein, 15 aa, Homo sapiens
  CDR3 for alpha chain variable domain of TCR clone 248144 (TRAV17, TRAJ57)
CSTGPSQGGSEKLVF

SEQ ID NO: 496288 - protein, 16 aa, Homo sapiens
  CDR3 for beta chain variable domain of TCR clone 248144 (TRBV12-4, TRBJ1-5)
CASSRPVGGSNQHQHF

SEQ ID NO: 496289 - protein, 15 aa, Homo sapiens
  CDR3 for alpha chain variable domain of TCR clone 248145 (TRAV26-1, TRAJ48)
CIVRVGDFGNEKLTF

SEQ ID NO: 496290 - protein, 13 aa, Homo sapiens
  CDR3 for beta chain variable domain of TCR clone 248145 (TRBV12-5, TRBJ2-3)
CASGDRQSDTQYF

SEQ ID NO: 496291 - protein, 12 aa, Homo sapiens
  CDR3 for alpha chain variable domain of TCR clone 248146 (TRAV21, TRAJ23)
CAVMPQGGKLIF

SEQ ID NO: 496292 - protein, 14 aa, Homo sapiens
  CDR3 for beta chain variable domain of TCR clone 248146 (TRBV7-9, TRBJ1-4)
CAITEGEANEKLFF

SEQ ID NO: 496293 - protein, 17 aa, Homo sapiens
  CDR3 for alpha chain variable domain of TCR clone 248147 (TRAV26-1, TRAJ46)
IASSESEKKSSVDKLTF

SEQ ID NO: 496294 - protein, 15 aa, Homo sapiens
  CDR3 for beta chain variable domain of TCR clone 248147 (TRBV7-9, TRBJ2-7)
CASSLALAEAYEQYF

SEQ ID NO: 496295 - protein, 12 aa, Homo sapiens
  CDR3 for alpha chain variable domain of TCR clone 248148 (TRAV12-3, TRAJ17)
CAMTLTGNKLTF

SEQ ID NO: 496296 - protein, 17 aa, Homo sapiens
  CDR3 for beta chain variable domain of TCR clone 248148 (TRBV4-1, TRBJ2-1)
CASSQDVFLAGNNEQFF

SEQ ID NO: 496297 - protein, 16 aa, Homo sapiens
  CDR3 for alpha chain variable domain of TCR clone 248149 (TRAV21, TRAJ52)
CAVTNAGGTSYGKLTF

SEQ ID NO: 496298 - protein, 16 aa, Homo sapiens
  CDR3 for beta chain variable domain of TCR clone 248149 (TRBV7-9, TRBJ1-2)
CASSLGFSSGEDGYTF

SEQ ID NO: 496299 - protein, 13 aa, Homo sapiens
  CDR3 for alpha chain variable domain of TCR clone 248150 (TRAV21, TRAJ27)
CAARPGNAGKSTF

SEQ ID NO: 496300 - protein, 15 aa, Homo sapiens
  CDR3 for beta chain variable domain of TCR clone 248150 (TRBV11-3, TRBJ2-7)
CASSPGPASAYEQYF

SEQ ID NO: 496301 - protein, 15 aa, Homo sapiens
  CDR3 for alpha chain variable domain of TCR clone 248151 (TRAV8-4, TRAJ3)
CAVTGENLVQQCFQD

SEQ ID NO: 496302 - protein, 13 aa, Homo sapiens
  CDR3 for beta chain variable domain of TCR clone 248151 (TRBV7-6, TRBJ2-3)
CASSLRSDNTQYF

SEQ ID NO: 496303 - protein, 11 aa, Homo sapiens
  CDR3 for alpha chain variable domain of TCR clone 248152 (TRAV2, TRAJ33)
CAVDSNYQLIW

SEQ ID NO: 496304 - protein, 14 aa, Homo sapiens
  CDR3 for beta chain variable domain of TCR clone 248152 (TRBV19, TRBJ2-1)
CASSPGLAPNEQFF

SEQ ID NO: 496305 - protein, 15 aa, Homo sapiens
  CDR3 for alpha chain variable domain of TCR clone 248153 (TRAV17, TRAJ57)
CATGPSQGGSEKLVF

SEQ ID NO: 496306 - protein, 16 aa, Homo sapiens
  CDR3 for beta chain variable domain of TCR clone 248153 (TRBV27, TRBJ2-2)
CASGFRGLVRTGELFF

SEQ ID NO: 496307 - protein, 14 aa, Homo sapiens
  CDR3 for alpha chain variable domain of TCR clone 248154 (TRAV12-3, TRAJ10)
SHLPLTGGGNKLTF

SEQ ID NO: 496308 - protein, 15 aa, Homo sapiens
  CDR3 for beta chain variable domain of TCR clone 248154 (TRBV5-1, TRBJ2-7)
CASSLGDFTTYEQYF

SEQ ID NO: 496309 - protein, 13 aa, Homo sapiens
  CDR3 for alpha chain variable domain of TCR clone 248155 (TRAV12-2, TRAJ20)
CTVNRFDDYKLSF

SEQ ID NO: 496310 - protein, 12 aa, Homo sapiens
  CDR3 for beta chain variable domain of TCR clone 248155 (TRBV19, TRBJ2-1)
CASSQISNEQFF

SEQ ID NO: 496311 - protein, 11 aa, Homo sapiens
  CDR3 for alpha chain variable domain of TCR clone 248156 (TRAV2, TRAJ13)
CASVGYQKVNF

SEQ ID NO: 496312 - protein, 16 aa, Homo sapiens
  CDR3 for beta chain variable domain of TCR clone 248156 (TRBV6-1, TRBJ2-5)
CASSETLDRGAETQYF

SEQ ID NO: 496313 - protein, 16 aa, Homo sapiens
  CDR3 for alpha chain variable domain of TCR clone 248157 (TRAV3, TRAJ21)
CAVRDIERGNFNKFYF

SEQ ID NO: 496314 - protein, 13 aa, Homo sapiens
  CDR3 for beta chain variable domain of TCR clone 248157 (TRBV27, TRBJ2-7)
CASSLTTGYEQCF

SEQ ID NO: 496315 - protein, 12 aa, Homo sapiens
  CDR3 for alpha chain variable domain of TCR clone 248158 (TRAV12-3, TRAJ41)
CAMSYSGYALNF

SEQ ID NO: 496316 - protein, 13 aa, Homo sapiens
  CDR3 for beta chain variable domain of TCR clone 248158 (TRBV7-3, TRBJ2-1)
CASSLDSYDEQFF

SEQ ID NO: 496317 - protein, 13 aa, Homo sapiens
  CDR3 for alpha chain variable domain of TCR clone 248159 (TRAV13-2, TRAJ13)
CAERPGGYQKVTL

SEQ ID NO: 496318 - protein, 13 aa, Homo sapiens
  CDR3 for beta chain variable domain of TCR clone 248159 (TRBV28, TRBJ1-2)
CAGRDRGNYGYTF

SEQ ID NO: 496319 - protein, 13 aa, Homo sapiens
  CDR3 for alpha chain variable domain of TCR clone 248160 (TRAV12-2, TRAJ42)
CAVKRGSQGNLIF

SEQ ID NO: 496320 - protein, 14 aa, Homo sapiens
  CDR3 for beta chain variable domain of TCR clone 248160 (TRBV19, TRBJ2-5)
CASSMTGQQETQYF

SEQ ID NO: 496321 - protein, 13 aa, Homo sapiens
  CDR3 for alpha chain variable domain of TCR clone 248161 (TRAV2, TRAJ29)
CAVYSSGNTPLVF

SEQ ID NO: 496322 - protein, 13 aa, Homo sapiens
  CDR3 for beta chain variable domain of TCR clone 248161 (TRBV7-9, TRBJ1-1)
CQQLGGLKTEAFF

SEQ ID NO: 496323 - protein, 12 aa, Homo sapiens
  CDR3 for alpha chain variable domain of TCR clone 248162 (TRAV12-2, TRAJ21)
CAVRYNFNKFYF

SEQ ID NO: 496324 - protein, 14 aa, Homo sapiens
  CDR3 for beta chain variable domain of TCR clone 248162 (TRBV28, TRBJ2-1)
CASSYYNAYNEQFF

SEQ ID NO: 496325 - protein, 12 aa, Homo sapiens
  CDR3 for alpha chain variable domain of TCR clone 248163 (TRAV3, TRAJ27)
CAVRDGAGKSTF

SEQ ID NO: 496326 - protein, 13 aa, Homo sapiens
  CDR3 for beta chain variable domain of TCR clone 248163 (TRBV10-3, TRBJ1-2)
CAINADLNYSYTF

SEQ ID NO: 496327 - protein, 15 aa, Homo sapiens
  CDR3 for alpha chain variable domain of TCR clone 248164 (TRAV3, TRAJ22)
CAVRDRGGSARQMTV

SEQ ID NO: 496328 - protein, 13 aa, Homo sapiens
  CDR3 for beta chain variable domain of TCR clone 248164 (TRBV20-1, TRBJ1-1)
CSARVGGNTEAFF

SEQ ID NO: 496329 - protein, 13 aa, Homo sapiens
  CDR3 for alpha chain variable domain of TCR clone 248165 (TRAV12-2, TRAJ9)
CAVSNTGGFKTIF

SEQ ID NO: 496330 - protein, 14 aa, Homo sapiens
  CDR3 for beta chain variable domain of TCR clone 248165 (TRBV7-2, TRBJ2-7)
CASRSQGAAYEQYF

SEQ ID NO: 496331 - protein, 14 aa, Homo sapiens
  CDR3 for alpha chain variable domain of TCR clone 248166 (TRAV12-2, TRAJ13)
CAVKKTGGYQKVTL

SEQ ID NO: 496332 - protein, 15 aa, Homo sapiens
  CDR3 for beta chain variable domain of TCR clone 248166 (TRBV27, TRBJ2-1)
CTSSNGGGSSNEQFF

SEQ ID NO: 496333 - protein, 14 aa, Homo sapiens
  CDR3 for alpha chain variable domain of TCR clone 248167 (TRAV3, TRAJ33)
CAVRDMGSNYQLIW

SEQ ID NO: 496334 - protein, 11 aa, Homo sapiens
  CDR3 for beta chain variable domain of TCR clone 248167 (TRBV11-2, TRBJ1-1)
CASSINTEAFF

SEQ ID NO: 496335 - protein, 13 aa, Homo sapiens
  CDR3 for alpha chain variable domain of TCR clone 248168 (TRAV3, TRAJ36)
CAVRDTGANNLFF

SEQ ID NO: 496336 - protein, 15 aa, Homo sapiens
  CDR3 for beta chain variable domain of TCR clone 248168 (TRBV24-1, TRBJ2-1)
CATSGSGGFYNGRFF

SEQ ID NO: 496337 - protein, 12 aa, Homo sapiens
  CDR3 for alpha chain variable domain of TCR clone 248169 (TRAV3, TRAJ39)
CAVIEWCNMLTF

SEQ ID NO: 496338 - protein, 14 aa, Homo sapiens
  CDR3 for beta chain variable domain of TCR clone 248169 (TRBV19, TRBJ2-1)
CASPTFVLSGEQFF

SEQ ID NO: 496339 - protein, 15 aa, Homo sapiens
  CDR3 for alpha chain variable domain of TCR clone 248170 (TRAV34, TRAJ38)
CGDDFTPGNNRKLIW

SEQ ID NO: 496340 - protein, 14 aa, Homo sapiens
  CDR3 for beta chain variable domain of TCR clone 248170 (TRBV12-5, TRBJ2-5)
CASGSRTHQETQYF

SEQ ID NO: 496341 - protein, 12 aa, Homo sapiens
  CDR3 for alpha chain variable domain of TCR clone 248171 (TRAV12-2, TRAJ31)
CAVNTPDARLMF

SEQ ID NO: 496342 - protein, 17 aa, Homo sapiens
  CDR3 for beta chain variable domain of TCR clone 248171 (TRBV20-1, TRBJ1-6)
CSARGGYSFSYNSPLHF

SEQ ID NO: 496343 - protein, 12 aa, Homo sapiens
  CDR3 for alpha chain variable domain of TCR clone 248172 (TRAV2, TRAJ9)
CAVGAGGFKTIF

SEQ ID NO: 496344 - protein, 13 aa, Homo sapiens
  CDR3 for beta chain variable domain of TCR clone 248172 (TRBV20-1, TRBJ1-2)
CSASTERIYGYTF

SEQ ID NO: 496345 - protein, 14 aa, Homo sapiens
  CDR3 for alpha chain variable domain of TCR clone 248173 (TRAV8-4, TRAJ9)
CAGRINTGGFKTIV

SEQ ID NO: 496346 - protein, 15 aa, Homo sapiens
  CDR3 for beta chain variable domain of TCR clone 248173 (TRBV10-2, TRBJ2-6)
CASSEQGTGANVLTF

SEQ ID NO: 496347 - protein, 14 aa, Homo sapiens
  CDR3 for alpha chain variable domain of TCR clone 248174 (TRAV21, TRAJ58)
CAVRRGRSGSRLTF

SEQ ID NO: 496348 - protein, 13 aa, Homo sapiens
  CDR3 for beta chain variable domain of TCR clone 248174 (TRBV7-2, TRBJ1-6)
CASSLKFDPPLHF

SEQ ID NO: 496349 - protein, 15 aa, Homo sapiens
  CDR3 for alpha chain variable domain of TCR clone 248175 (TRAV8-3, TRAJ45)
CASSYSGGGADGLTF

SEQ ID NO: 496350 - protein, 18 aa, Homo sapiens
  CDR3 for beta chain variable domain of TCR clone 248175 (TRBV18, TRBJ1-3)
CASSPRGGAGASGNTIYF

SEQ ID NO: 496351 - protein, 14 aa, Homo sapiens
  CDR3 for alpha chain variable domain of TCR clone 248176 (TRAV26-1, TRAJ39)
CIARGSRAGNMLTF

SEQ ID NO: 496352 - protein, 15 aa, Homo sapiens
  CDR3 for beta chain variable domain of TCR clone 248176 (TRBV10-2, TRBJ2-5)
CASRGSGGPQETQYF

SEQ ID NO: 496353 - protein, 11 aa, Homo sapiens
  CDR3 for alpha chain variable domain of TCR clone 248177 (TRAV2, TRAJ33)
CAVESNYQLIW

SEQ ID NO: 496354 - protein, 16 aa, Homo sapiens
  CDR3 for beta chain variable domain of TCR clone 248177 (TRBV27, TRBJ2-5)
CASSSQTSGFQETRYF

SEQ ID NO: 496355 - protein, 12 aa, Homo sapiens
  CDR3 for alpha chain variable domain of TCR clone 248178 (TRAV12-3, TRAJ17)
CAMTLTGNKLTF

SEQ ID NO: 496356 - protein, 16 aa, Homo sapiens
  CDR3 for beta chain variable domain of TCR clone 248178 (TRBV27, TRBJ2-2)
CASSPLAAANTGELFF

SEQ ID NO: 496357 - protein, 16 aa, Homo sapiens
  CDR3 for alpha chain variable domain of TCR clone 248179 (TRAV3, TRAJ37)
CAVRGKGSVNTGKLIF

SEQ ID NO: 496358 - protein, 22 aa, Homo sapiens
  CDR3 for beta chain variable domain of TCR clone 248179 (TRBV15, TRBJ2-1)
QAWGTQPCTCVPPAEVDTARFF

SEQ ID NO: 496359 - protein, 11 aa, Homo sapiens
  CDR3 for alpha chain variable domain of TCR clone 248180 (TRAV2, TRAJ13)
CASGGYQKVTF

SEQ ID NO: 496360 - protein, 20 aa, Homo sapiens
  CDR3 for beta chain variable domain of TCR clone 248180 (TRBV7-9, TRBJ2-1)
CASSSPRAPRTRSSYNEQFF

SEQ ID NO: 496361 - protein, 13 aa, Homo sapiens
  CDR3 for alpha chain variable domain of TCR clone 248181 (TRAV17, TRAJ5)
CAPMDTGRRALTF

SEQ ID NO: 496362 - protein, 11 aa, Homo sapiens
  CDR3 for beta chain variable domain of TCR clone 248181 (TRBV19, TRBJ1-1)
CASSIGSEAFL

SEQ ID NO: 496363 - protein, 12 aa, Homo sapiens
  CDR3 for alpha chain variable domain of TCR clone 248182 (TRAV29/DV5, TRAJ43)
CAAPYNNNDMRF

SEQ ID NO: 496364 - protein, 17 aa, Homo sapiens
  CDR3 for beta chain variable domain of TCR clone 248182 (TRBV19, TRBJ2-6)
CASSTGQVFSGTNVLTF

SEQ ID NO: 496365 - protein, 14 aa, Homo sapiens
  CDR3 for alpha chain variable domain of TCR clone 248183 (TRAV12-3, TRAJ20)
CAMSARPGDYKLSF

SEQ ID NO: 496366 - protein, 14 aa, Homo sapiens
  CDR3 for beta chain variable domain of TCR clone 248183 (TRBV7-3, TRBJ2-3)
CASSPSARTDTQYF

SEQ ID NO: 496367 - protein, 15 aa, Homo sapiens
  CDR3 for alpha chain variable domain of TCR clone 248184 (TRAV17, TRAJ42)
CATDHYGGSQGNRIF

SEQ ID NO: 496368 - protein, 15 aa, Homo sapiens
  CDR3 for beta chain variable domain of TCR clone 248184 (TRBV5-1, TRBJ2-2)
CASSSQGGNTGELFF

SEQ ID NO: 496369 - protein, 13 aa, Homo sapiens
  CDR3 for alpha chain variable domain of TCR clone 248185 (TRAV12-1, TRAJ11)
CVVTRGGYSTLTF

SEQ ID NO: 496370 - protein, 13 aa, Homo sapiens
  CDR3 for beta chain variable domain of TCR clone 248185 (TRBV20-1, TRBJ1-2)
CSARDHGAYGYTF

SEQ ID NO: 496371 - protein, 15 aa, Homo sapiens
  CDR3 for alpha chain variable domain of TCR clone 248186 (TRAV1-1, TRAJ20)
CAVRDNVANDYKLSF

SEQ ID NO: 496372 - protein, 16 aa, Homo sapiens
  CDR3 for beta chain variable domain of TCR clone 248186 (TRBV7-8, TRBJ2-7)
CASSLASGTSVYEQYF

SEQ ID NO: 496373 - protein, 18 aa, Homo sapiens
  CDR3 for alpha chain variable domain of TCR clone 248187 (TRAV16, TRAJ52)
CALSGADAGGTSYGRLTF

SEQ ID NO: 496374 - protein, 13 aa, Homo sapiens
  CDR3 for beta chain variable domain of TCR clone 248187 (TRBV19, TRBJ1-3)
CASRLSLGNTIYF

SEQ ID NO: 496375 - protein, 14 aa, Homo sapiens
  CDR3 for alpha chain variable domain of TCR clone 248188 (TRAV2, TRAJ9)
CAVEDRSGGFKTIF

SEQ ID NO: 496376 - protein, 15 aa, Homo sapiens
  CDR3 for beta chain variable domain of TCR clone 248188 (TRBV4-3, TRBJ2-1)
CASSQESAIYNEQFF

SEQ ID NO: 496377 - protein, 14 aa, Homo sapiens
  CDR3 for alpha chain variable domain of TCR clone 248189 (TRAV9-2, TRAJ39)
CALYIYNAGNMLTY

SEQ ID NO: 496378 - protein, 15 aa, Homo sapiens
  CDR3 for beta chain variable domain of TCR clone 248189 (TRBV28, TRBJ1-3)
CASSMGWASGNTIYF

SEQ ID NO: 496379 - protein, 12 aa, Homo sapiens
  CDR3 for alpha chain variable domain of TCR clone 248190 (TRAV8-3, TRAJ40)
CAVTSGTYKYIF

SEQ ID NO: 496380 - protein, 15 aa, Homo sapiens
  CDR3 for beta chain variable domain of TCR clone 248190 (TRBV6-3, TRBJ2-7)
CASSSPGTVFYEQYF

SEQ ID NO: 496381 - protein, 14 aa, Homo sapiens
  CDR3 for alpha chain variable domain of TCR clone 248191 (TRAV8-2, TRAJ23)
CVVSDDNQGGKLSF

SEQ ID NO: 496382 - protein, 16 aa, Homo sapiens
  CDR3 for beta chain variable domain of TCR clone 248191 (TRBV4-2, TRBJ2-5)
CASSRELVGSQETQYF

SEQ ID NO: 496383 - protein, 14 aa, Homo sapiens
  CDR3 for alpha chain variable domain of TCR clone 248192 (TRAV1-2, TRAJ16)
CAVNRFSDGQKLLF

SEQ ID NO: 496384 - protein, 17 aa, Homo sapiens
  CDR3 for beta chain variable domain of TCR clone 248192 (TRBV10-3, TRBJ2-6)
CAISELAEGSGANVLTF

SEQ ID NO: 496385 - protein, 17 aa, Homo sapiens
  CDR3 for alpha chain variable domain of TCR clone 248193 (TRAV3, TRAJ38)
CAVRDCLNAGNNRKLIW

SEQ ID NO: 496386 - protein, 14 aa, Homo sapiens
  CDR3 for beta chain variable domain of TCR clone 248193 (TRBV15, TRBJ2-3)
CATRSGTSTDTQYF

SEQ ID NO: 496387 - protein, 14 aa, Homo sapiens
  CDR3 for alpha chain variable domain of TCR clone 248194 (TRAV12-1, TRAJ30)
CVVNIGGGDDKIIF

SEQ ID NO: 496388 - protein, 14 aa, Homo sapiens
  CDR3 for beta chain variable domain of TCR clone 248194 (TRBV7-6, TRBJ2-3)
CASSLGTVTDTQYF

SEQ ID NO: 496389 - protein, 13 aa, Homo sapiens
  CDR3 for alpha chain variable domain of TCR clone 248195 (TRAV35, TRAJ57)
CAGSQGGSEKRVF

SEQ ID NO: 496390 - protein, 14 aa, Homo sapiens
  CDR3 for beta chain variable domain of TCR clone 248195 (TRBV25-1, TRBJ1-1)
CASTHLGGNTEAFF

SEQ ID NO: 496391 - protein, 13 aa, Homo sapiens
  CDR3 for alpha chain variable domain of TCR clone 248196 (TRAV20, TRAJ37)
CAGCSSNTGKLIF

SEQ ID NO: 496392 - protein, 14 aa, Homo sapiens
  CDR3 for beta chain variable domain of TCR clone 248196 (TRBV20-1, TRBJ2-5)
GSARDGRAGETQYF

SEQ ID NO: 496393 - protein, 13 aa, Homo sapiens
  CDR3 for alpha chain variable domain of TCR clone 248197 (TRAV8-3, TRAJ30)
CAVGGWSDDKIIF

SEQ ID NO: 496394 - protein, 14 aa, Homo sapiens
  CDR3 for beta chain variable domain of TCR clone 248197 (TRBV20-1, TRBJ1-1)
CSTPPADMNTEAFF

SEQ ID NO: 496395 - protein, 13 aa, Homo sapiens
  CDR3 for alpha chain variable domain of TCR clone 248198 (TRAV35, TRAJ44)
CAGLSVTASKLTF

SEQ ID NO: 496396 - protein, 13 aa, Homo sapiens
  CDR3 for beta chain variable domain of TCR clone 248198 (TRBV7-3, TRBJ1-1)
CASSQDWGAEAFF

SEQ ID NO: 496397 - protein, 13 aa, Homo sapiens
  CDR3 for alpha chain variable domain of TCR clone 248199 (TRAV2, TRAJ15)
CAVASQAGTALIF

SEQ ID NO: 496398 - protein, 16 aa, Homo sapiens
  CDR3 for beta chain variable domain of TCR clone 248199 (TRBV12-4, TRBJ1-5)
CASSRPVGGSNQPQHF

SEQ ID NO: 496399 - protein, 15 aa, Homo sapiens
  CDR3 for alpha chain variable domain of TCR clone 248200 (TRAV26-1, TRAJ56)
CIVRVATGANSKLTY

SEQ ID NO: 496400 - protein, 13 aa, Homo sapiens
  CDR3 for beta chain variable domain of TCR clone 248200 (TRBV7-9, TRBJ1-2)
CASSLKQNYGYTF

SEQ ID NO: 496401 - protein, 14 aa, Homo sapiens
  CDR3 for alpha chain variable domain of TCR clone 248201 (TRAV9-2, TRAJ39)
CALYIYNAGNMLTF

SEQ ID NO: 496402 - protein, 13 aa, Homo sapiens
  CDR3 for beta chain variable domain of TCR clone 248201 (TRBV19, TRBJ2-2)
CASSPLGIGELFF

SEQ ID NO: 496403 - protein, 13 aa, Homo sapiens
  CDR3 for alpha chain variable domain of TCR clone 248202 (TRAV13-1, TRAJ5)
CAARVTGRRALTF

SEQ ID NO: 496404 - protein, 16 aa, Homo sapiens
  CDR3 for beta chain variable domain of TCR clone 248202 (TRBV7-9, TRBJ1-2)
CASSLGFSSGEDGYTF

SEQ ID NO: 496405 - protein, 22 aa, Homo sapiens
  CDR3 for alpha chain variable domain of TCR clone 248203 (TRAV21, )
CAVRQDAGNNNIQNPDPAVYQL

SEQ ID NO: 496406 - protein, 16 aa, Homo sapiens
  CDR3 for beta chain variable domain of TCR clone 248203 (TRBV4-2, TRBJ1-1)
CASRPLGGGGDTEAFF

SEQ ID NO: 496407 - protein, 13 aa, Homo sapiens
  CDR3 for alpha chain variable domain of TCR clone 248204 (TRAV20, TRAJ40)
CGVPFSGTYKYIF

SEQ ID NO: 496408 - protein, 13 aa, Homo sapiens
  CDR3 for beta chain variable domain of TCR clone 248204 (TRBV15, TRBJ2-5)
CATSQIGEETQYF

SEQ ID NO: 496409 - protein, 14 aa, Homo sapiens
  CDR3 for alpha chain variable domain of TCR clone 248205 (TRAV25, TRAJ35)
CARRMEGFGNVLQC

SEQ ID NO: 496410 - protein, 13 aa, Homo sapiens
  CDR3 for beta chain variable domain of TCR clone 248205 (TRBV7-2, TRBJ1-4)
CASSLAGLEKLFF

SEQ ID NO: 496411 - protein, 14 aa, Homo sapiens
  CDR3 for alpha chain variable domain of TCR clone 248206 (TRAV17, TRAJ9)
CATDENTGGFKTIF

SEQ ID NO: 496412 - protein, 14 aa, Homo sapiens
  CDR3 for beta chain variable domain of TCR clone 248206 (TRBV11-2, TRBJ2-3)
CASSLYAGRDTQYF

SEQ ID NO: 496413 - protein, 14 aa, Homo sapiens
  CDR3 for alpha chain variable domain of TCR clone 248207 (TRAV1-2, TRAJ16)
CAVNRFSDGQKLLF

SEQ ID NO: 496414 - protein, 12 aa, Homo sapiens
  CDR3 for beta chain variable domain of TCR clone 248207 (TRBV7-2, TRBJ2-3)
CASNTGTDTQYF

SEQ ID NO: 496415 - protein, 10 aa, Homo sapiens
  CDR3 for alpha chain variable domain of TCR clone 248208 (TRAV36/DV7, TRAJ56)
CAGHAVELTF

SEQ ID NO: 496416 - protein, 13 aa, Homo sapiens
  CDR3 for beta chain variable domain of TCR clone 248208 (TRBV7-9, TRBJ2-7)
CASSFWSSYEQYF

SEQ ID NO: 496417 - protein, 12 aa, Homo sapiens
  CDR3 for alpha chain variable domain of TCR clone 248209 (TRAV2, TRAJ45)
CAEEEVLTDSPL

SEQ ID NO: 496418 - protein, 14 aa, Homo sapiens
  CDR3 for beta chain variable domain of TCR clone 248209 (TRBV27, TRBJ2-5)
CASSWREGLETQSF

SEQ ID NO: 496419 - protein, 16 aa, Homo sapiens
  CDR3 for alpha chain variable domain of TCR clone 248210 (TRAV17, TRAJ22)
CATDAISSVSARQLTF

SEQ ID NO: 496420 - protein, 15 aa, Homo sapiens
  CDR3 for beta chain variable domain of TCR clone 248210 (TRBV5-1, TRBJ2-1)
CASSPPRAPYNEQFF

SEQ ID NO: 496421 - protein, 17 aa, Homo sapiens
  CDR3 for alpha chain variable domain of TCR clone 248211 (TRAV3, TRAJ6)
CAVRDGPGAGGSYIPTF

SEQ ID NO: 496422 - protein, 14 aa, Homo sapiens
  CDR3 for beta chain variable domain of TCR clone 248211 (TRBV19, TRBJ2-1)
CASPTFVLSGEQFF

SEQ ID NO: 496423 - protein, 14 aa, Homo sapiens
  CDR3 for alpha chain variable domain of TCR clone 248212 (TRAV17, TRAJ57)
CATDPQGGSEKLVF

SEQ ID NO: 496424 - protein, 15 aa, Homo sapiens
  CDR3 for beta chain variable domain of TCR clone 248212 (TRBV7-2, TRBJ2-3)
CASTPTSGETDTQYF

SEQ ID NO: 496425 - protein, 12 aa, Homo sapiens
  CDR3 for alpha chain variable domain of TCR clone 248213 (TRAV25, TRAJ31)
CAGHLNNARLMF

SEQ ID NO: 496426 - protein, 15 aa, Homo sapiens
  CDR3 for beta chain variable domain of TCR clone 248213 (TRBV7-3, TRBJ2-2)
CASKANGANTGELFF

SEQ ID NO: 496427 - protein, 14 aa, Homo sapiens
  CDR3 for alpha chain variable domain of TCR clone 248214 (TRAV8-2, TRAJ37)
CVVSISGNAGKLIF

SEQ ID NO: 496428 - protein, 13 aa, Homo sapiens
  CDR3 for beta chain variable domain of TCR clone 248214 (TRBV7-8, TRBJ2-7)
RRVRLTEMGEQYF

SEQ ID NO: 496429 - protein, 14 aa, Homo sapiens
  CDR3 for alpha chain variable domain of TCR clone 248215 (TRAV38-1, TRAJ40)
CALRPTSGTYKSIF

SEQ ID NO: 496430 - protein, 14 aa, Homo sapiens
  CDR3 for beta chain variable domain of TCR clone 248215 (TRBV25-1, TRBJ1-1)
CASTHLGGNTEDFF

SEQ ID NO: 496431 - protein, 14 aa, Homo sapiens
  CDR3 for alpha chain variable domain of TCR clone 248216 (TRAV38-1, TRAJ29)
CAFITPSGNTPLVF

SEQ ID NO: 496432 - protein, 12 aa, Homo sapiens
  CDR3 for beta chain variable domain of TCR clone 248216 (TRBV5-1, TRBJ2-7)
CASSFRGYEQYF

SEQ ID NO: 496433 - protein, 13 aa, Homo sapiens
  CDR3 for alpha chain variable domain of TCR clone 248217 (TRAV30, TRAJ24)
CGTVTDSWGKLQF

SEQ ID NO: 496434 - protein, 16 aa, Homo sapiens
  CDR3 for beta chain variable domain of TCR clone 248217 (TRBV7-3, TRBJ2-2)
SASSLKRETLSGELFF

SEQ ID NO: 496435 - protein, 12 aa, Homo sapiens
  CDR3 for alpha chain variable domain of TCR clone 248218 (TRAV12-2, TRAJ29)
CAVDSGNTPLVF

SEQ ID NO: 496436 - protein, 16 aa, Homo sapiens
  CDR3 for beta chain variable domain of TCR clone 248218 (TRBV24-1, TRBJ2-1)
CATSDILGGNYNEQFF

SEQ ID NO: 496437 - protein, 11 aa, Homo sapiens
  CDR3 for alpha chain variable domain of TCR clone 248219 (TRAV3, TRAJ21)
CAVGNFNKFYF

SEQ ID NO: 496438 - protein, 14 aa, Homo sapiens
  CDR3 for beta chain variable domain of TCR clone 248219 (TRBV25-1, TRBJ1-1)
CASTHLGGNTEAFL

SEQ ID NO: 496439 - protein, 14 aa, Homo sapiens
  CDR3 for alpha chain variable domain of TCR clone 248220 (TRAV12-2, TRAJ17)
CAVLFKAAGNKLTF

SEQ ID NO: 496440 - protein, 17 aa, Homo sapiens
  CDR3 for beta chain variable domain of TCR clone 248220 (TRBV20-1, TRBJ2-2)
CSASCSGQGGLTGELFF

SEQ ID NO: 496441 - protein, 17 aa, Homo sapiens
  CDR3 for alpha chain variable domain of TCR clone 248221 (TRAV26-1, TRAJ37)
CIVRVITASSKTGKLIF

SEQ ID NO: 496442 - protein, 11 aa, Homo sapiens
  CDR3 for beta chain variable domain of TCR clone 248221 (TRBV29-1, TRBJ2-5)
CSEDRTGTQYF

SEQ ID NO: 496443 - protein, 12 aa, Homo sapiens
  CDR3 for alpha chain variable domain of TCR clone 248222 (TRAV12-3, TRAJ17)
RAMTLTGNKLTF

SEQ ID NO: 496444 - protein, 15 aa, Homo sapiens
  CDR3 for beta chain variable domain of TCR clone 248222 (TRBV20-1, TRBJ2-7)
CSARDRVSWMDEQYF

SEQ ID NO: 496445 - protein, 17 aa, Homo sapiens
  CDR3 for alpha chain variable domain of TCR clone 248223 (TRAV3, TRAJ38)
CAVRDCLNAGNNRKLIW

SEQ ID NO: 496446 - protein, 14 aa, Homo sapiens
  CDR3 for beta chain variable domain of TCR clone 248223 (TRBV5-5, TRBJ1-5)
CASSGQGVDQPQHL

SEQ ID NO: 496447 - protein, 13 aa, Homo sapiens
  CDR3 for alpha chain variable domain of TCR clone 248224 (TRAV12-3, TRAJ9)
CAMRNTGGFKTIF

SEQ ID NO: 496448 - protein, 16 aa, Homo sapiens
  CDR3 for beta chain variable domain of TCR clone 248224 (TRBV9, TRBJ2-5)
CASSWRPSGDLETQYF

SEQ ID NO: 496449 - protein, 12 aa, Homo sapiens
  CDR3 for alpha chain variable domain of TCR clone 248225 (TRAV1-1, TRAJ9)
CAVDTGGFKAIF

SEQ ID NO: 496450 - protein, 15 aa, Homo sapiens
  CDR3 for beta chain variable domain of TCR clone 248225 (TRBV6-1, TRBJ2-3)
CASSERGGITDTQYF

SEQ ID NO: 496451 - protein, 12 aa, Homo sapiens
  CDR3 for alpha chain variable domain of TCR clone 248226 (TRAV16, TRAJ8)
LALDKGFKKLVF

SEQ ID NO: 496452 - protein, 15 aa, Homo sapiens
  CDR3 for beta chain variable domain of TCR clone 248226 (TRBV2, TRBJ1-2)
CASRNRESGNYGYTF

SEQ ID NO: 496453 - protein, 16 aa, Homo sapiens
  CDR3 for alpha chain variable domain of TCR clone 248227 (TRAV20, TRAJ52)
CAVLPDGGTSYGKLTF

SEQ ID NO: 496454 - protein, 14 aa, Homo sapiens
  CDR3 for beta chain variable domain of TCR clone 248227 (TRBV5-4, TRBJ1-1)
CASSLDSRRDEAFF

SEQ ID NO: 496455 - protein, 23 aa, Homo sapiens
  CDR3 for alpha chain variable domain of TCR clone 248228 (TRAV26-1, TRAJ38)
CIADNAGNNHIQNPDPAVHQLRD

SEQ ID NO: 496456 - protein, 12 aa, Homo sapiens
  CDR3 for beta chain variable domain of TCR clone 248228 (TRBV11-2, TRBJ2-2)
CASSLGGGELLF

SEQ ID NO: 496457 - protein, 12 aa, Homo sapiens
  CDR3 for alpha chain variable domain of TCR clone 248229 (TRAV8-3, TRAJ47)
CAVGVYGNKLVF

SEQ ID NO: 496458 - protein, 12 aa, Homo sapiens
  CDR3 for beta chain variable domain of TCR clone 248229 (TRBV11-2, TRBJ2-2)
CASSLGGGELFF

SEQ ID NO: 496459 - protein, 13 aa, Homo sapiens
  CDR3 for alpha chain variable domain of TCR clone 248230 (TRAV2, TRAJ40)
CAVVTSGTYKYIF

SEQ ID NO: 496460 - protein, 14 aa, Homo sapiens
  CDR3 for beta chain variable domain of TCR clone 248230 (TRBV5-4, TRBJ1-1)
CASSLDSRRAEAFF

SEQ ID NO: 496461 - protein, 14 aa, Homo sapiens
  CDR3 for alpha chain variable domain of TCR clone 248231 (TRAV1-1, TRAJ27)
CAVIYNTSAGKSTF

SEQ ID NO: 496462 - protein, 14 aa, Homo sapiens
  CDR3 for beta chain variable domain of TCR clone 248231 (TRBV4-1, TRBJ2-5)
CASSRSGSGETQYF

SEQ ID NO: 496463 - protein, 12 aa, Homo sapiens
  CDR3 for alpha chain variable domain of TCR clone 248232 (TRAV12-3, TRAJ42)
CAPGGSQGNLIF

SEQ ID NO: 496464 - protein, 17 aa, Homo sapiens
  CDR3 for beta chain variable domain of TCR clone 248232 (TRBV11-2, TRBJ2-1)
CASSLYPPGVEYNEQFF

SEQ ID NO: 496465 - protein, 15 aa, Homo sapiens
  CDR3 for alpha chain variable domain of TCR clone 248233 (TRAV27, TRAJ38)
CAARRNAGNNRKLIW

SEQ ID NO: 496466 - protein, 16 aa, Homo sapiens
  CDR3 for beta chain variable domain of TCR clone 248233 (TRBV5-1, TRBJ2-5)
CASSFQGLADQETQYF

SEQ ID NO: 496467 - protein, 13 aa, Homo sapiens
  CDR3 for alpha chain variable domain of TCR clone 248234 (TRAV13-1, TRAJ6)
CAASKGGSYIPTF

SEQ ID NO: 496468 - protein, 14 aa, Homo sapiens
  CDR3 for beta chain variable domain of TCR clone 248234 (TRBV7-2, TRBJ2-1)
CASSLGVGYNEQVF

SEQ ID NO: 496469 - protein, 12 aa, Homo sapiens
  CDR3 for alpha chain variable domain of TCR clone 248235 (TRAV21, TRAJ11)
CAATSGYSTLTF

SEQ ID NO: 496470 - protein, 14 aa, Homo sapiens
  CDR3 for beta chain variable domain of TCR clone 248235 (TRBV15, TRBJ1-5)
CATSREQSNQPQHF

SEQ ID NO: 496471 - protein, 15 aa, Homo sapiens
  CDR3 for alpha chain variable domain of TCR clone 248236 (TRAV21, TRAJ53)
CATLNRGGSNYKLTF

SEQ ID NO: 496472 - protein, 16 aa, Homo sapiens
  CDR3 for beta chain variable domain of TCR clone 248236 (TRBV20-1, TRBJ1-4)
CSAPGQGLLTNEKLFF

SEQ ID NO: 496473 - protein, 15 aa, Homo sapiens
  CDR3 for alpha chain variable domain of TCR clone 248237 (TRAV17, TRAJ57)
CATGPSQGGSEKLVF

SEQ ID NO: 496474 - protein, 15 aa, Homo sapiens
  CDR3 for beta chain variable domain of TCR clone 248237 (TRBV25-1, TRBJ1-4)
CASSPGDSTNDKLFF

SEQ ID NO: 496475 - protein, 15 aa, Homo sapiens
  CDR3 for alpha chain variable domain of TCR clone 248238 (TRAV12-1, TRAJ44)
CVVFVNTGTASKLTF

SEQ ID NO: 496476 - protein, 17 aa, Homo sapiens
  CDR3 for beta chain variable domain of TCR clone 248238 (TRBV13, TRBJ2-3)
CASSLSRVAGGRNTQYF

SEQ ID NO: 496477 - protein, 10 aa, Homo sapiens
  CDR3 for alpha chain variable domain of TCR clone 248239 (TRAV13-1, TRAJ8)
CAAPFQKLVF

SEQ ID NO: 496478 - protein, 20 aa, Homo sapiens
  CDR3 for beta chain variable domain of TCR clone 248239 (TRBV3-1, TRBJ2-6)
CASSPRPGLEGGAGANVLPF

SEQ ID NO: 496479 - protein, 17 aa, Homo sapiens
  CDR3 for alpha chain variable domain of TCR clone 248240 (TRAV3, TRAJ6)
CAVRDGPRAGGSYIPTF

SEQ ID NO: 496480 - protein, 10 aa, Homo sapiens
  CDR3 for beta chain variable domain of TCR clone 248240 (TRBV28, TRBJ1-2)
CASSSDRAVF

SEQ ID NO: 496481 - protein, 15 aa, Homo sapiens
  CDR3 for alpha chain variable domain of TCR clone 248241 (TRAV26-2, TRAJ21)
CILSNTTSTNFTLDL

SEQ ID NO: 496482 - protein, 14 aa, Homo sapiens
  CDR3 for beta chain variable domain of TCR clone 248241 (TRBV11-3, TRBJ2-7)
CASSPDRNTYEQYF

SEQ ID NO: 496483 - protein, 12 aa, Homo sapiens
  CDR3 for alpha chain variable domain of TCR clone 248242 (TRAV8-3, TRAJ26)
CAGVNYGQNFVF

SEQ ID NO: 496484 - protein, 16 aa, Homo sapiens
  CDR3 for beta chain variable domain of TCR clone 248242 (TRBV12-4, TRBJ1-5)
CASSRPVGGSNQPQHF

SEQ ID NO: 496485 - protein, 14 aa, Homo sapiens
  CDR3 for alpha chain variable domain of TCR clone 248243 (TRAV8-2, TRAJ4)
CVVSTSGGYNKLIF

SEQ ID NO: 496486 - protein, 15 aa, Homo sapiens
  CDR3 for beta chain variable domain of TCR clone 248243 (TRBV4-1, TRBJ1-4)
CASSDTGGTDEKLFF

SEQ ID NO: 496487 - protein, 13 aa, Homo sapiens
  CDR3 for alpha chain variable domain of TCR clone 248244 (TRAV21, TRAJ10)
CAVRTGGGNKLTF

SEQ ID NO: 496488 - protein, 16 aa, Homo sapiens
  CDR3 for beta chain variable domain of TCR clone 248244 (TRBV27, TRBJ2-2)
CASSSSGVSNTGELFF

SEQ ID NO: 496489 - protein, 13 aa, Homo sapiens
  CDR3 for alpha chain variable domain of TCR clone 248245 (TRAV12-2, TRAJ12)
CAGNWDSSYKLIF

SEQ ID NO: 496490 - protein, 13 aa, Homo sapiens
  CDR3 for beta chain variable domain of TCR clone 248245 (TRBV20-1, TRBJ2-7)
CSATTPGIYEQFF

SEQ ID NO: 496491 - protein, 13 aa, Homo sapiens
  CDR3 for alpha chain variable domain of TCR clone 248246 (TRAV27, TRAJ41)
CAGEGNYGDALNF

SEQ ID NO: 496492 - protein, 15 aa, Homo sapiens
  CDR3 for beta chain variable domain of TCR clone 248246 (TRBV11-2, TRBJ2-1)
CASSKNRGLIYEQFF

SEQ ID NO: 496493 - protein, 16 aa, Homo sapiens
  CDR3 for alpha chain variable domain of TCR clone 248247 (TRAV30, TRAJ24)
CGTEIVDADSWGKLQF

SEQ ID NO: 496494 - protein, 15 aa, Homo sapiens
  CDR3 for beta chain variable domain of TCR clone 248247 (TRBV5-1, TRBJ2-5)
CASSLSQGVVATQYF

SEQ ID NO: 496495 - protein, 18 aa, Homo sapiens
  CDR3 for alpha chain variable domain of TCR clone 248248 (TRAV12-2, )
CAVEDIQNPDPAVYQLRD

SEQ ID NO: 496496 - protein, 15 aa, Homo sapiens
  CDR3 for beta chain variable domain of TCR clone 248248 (TRBV7-9, TRBJ1-6)
CASSSPGRGNSPLHF

SEQ ID NO: 496497 - protein, 12 aa, Homo sapiens
  CDR3 for alpha chain variable domain of TCR clone 248249 (TRAV38-2/DV8, TRAJ21)
FAYRSNFNKFYF

SEQ ID NO: 496498 - protein, 15 aa, Homo sapiens
  CDR3 for beta chain variable domain of TCR clone 248249 (TRBV6-1, TRBJ2-7)
CASSDWDKPNYEQYF

SEQ ID NO: 496499 - protein, 14 aa, Homo sapiens
  CDR3 for alpha chain variable domain of TCR clone 248250 (TRAV8-3, TRAJ6)
CAVVASGGSYIPTF

SEQ ID NO: 496500 - protein, 17 aa, Homo sapiens
  CDR3 for beta chain variable domain of TCR clone 248250 (TRBV18, TRBJ2-2)
CASSPSDPWQNTGELFF

SEQ ID NO: 496501 - protein, 13 aa, Homo sapiens
  CDR3 for alpha chain variable domain of TCR clone 248251 (TRAV27, TRAJ45)
CRSSGGGADGLTF

SEQ ID NO: 496502 - protein, 15 aa, Homo sapiens
  CDR3 for beta chain variable domain of TCR clone 248251 (TRBV4-1, TRBJ1-1)
CASSQAPGLNTEAFF

SEQ ID NO: 496503 - protein, 15 aa, Homo sapiens
  CDR3 for alpha chain variable domain of TCR clone 248252 (TRAV12-3, TRAJ6)
CAMSPASGGSYIPPF

SEQ ID NO: 496504 - protein, 14 aa, Homo sapiens
  CDR3 for beta chain variable domain of TCR clone 248252 (TRBV7-2, TRBJ2-7)
CASSPKTSFYEQYF

SEQ ID NO: 496505 - protein, 10 aa, Homo sapiens
  CDR3 for alpha chain variable domain of TCR clone 248253 (TRAV12-1, TRAJ37)
ARGNTGKLIF

SEQ ID NO: 496506 - protein, 13 aa, Homo sapiens
  CDR3 for beta chain variable domain of TCR clone 248253 (TRBV27, TRBJ1-1)
CASSLSIGAEAFF

SEQ ID NO: 496507 - protein, 12 aa, Homo sapiens
  CDR3 for alpha chain variable domain of TCR clone 248254 (TRAV13-1, TRAJ54)
CAASGGAQKLVF

SEQ ID NO: 496508 - protein, 13 aa, Homo sapiens
  CDR3 for beta chain variable domain of TCR clone 248254 (TRBV5-1, TRBJ1-1)
CATSTRDGTEAFF

SEQ ID NO: 496509 - protein, 13 aa, Homo sapiens
  CDR3 for alpha chain variable domain of TCR clone 248255 (TRAV12-1, TRAJ17)
CVVNKAAGNKLTF

SEQ ID NO: 496510 - protein, 16 aa, Homo sapiens
  CDR3 for beta chain variable domain of TCR clone 248255 (TRBV11-2, TRBJ2-2)
CASSLRTGNLIGQLFF

SEQ ID NO: 496511 - protein, 15 aa, Homo sapiens
  CDR3 for alpha chain variable domain of TCR clone 248256 (TRAV13-1, TRAJ50)
CAAKGSETSYDKVLF

SEQ ID NO: 496512 - protein, 18 aa, Homo sapiens
  CDR3 for beta chain variable domain of TCR clone 248256 (TRBV10-3, TRBJ2-1)
CTSVPSVSLRGGVDEQFF

SEQ ID NO: 496513 - protein, 17 aa, Homo sapiens
  CDR3 for alpha chain variable domain of TCR clone 248257 (TRAV3, TRAJ42)
CAVRDRDYGGSQGNLIF

SEQ ID NO: 496514 - protein, 12 aa, Homo sapiens
  CDR3 for beta chain variable domain of TCR clone 248257 (TRBV7-9, TRBJ1-1)
CASSPSSTEAFF

SEQ ID NO: 496515 - protein, 15 aa, Homo sapiens
  CDR3 for alpha chain variable domain of TCR clone 248258 (TRAV21, TRAJ53)
CATLNSGGSNYKLKF

SEQ ID NO: 496516 - protein, 16 aa, Homo sapiens
  CDR3 for beta chain variable domain of TCR clone 248258 (TRBV9, TRBJ2-1)
CASSVGGGGNCNEQFF

SEQ ID NO: 496517 - protein, 11 aa, Homo sapiens
  CDR3 for alpha chain variable domain of TCR clone 248259 (TRAV2, TRAJ13)
CASGGYQKVIF

SEQ ID NO: 496518 - protein, 20 aa, Homo sapiens
  CDR3 for beta chain variable domain of TCR clone 248259 (TRBV6-1, TRBJ2-5)
CASSETLDRGAETSTSGQAR

SEQ ID NO: 496519 - protein, 14 aa, Homo sapiens
  CDR3 for alpha chain variable domain of TCR clone 248260 (TRAV1-2, TRAJ16)
CAVNRFSDGQKLLF

SEQ ID NO: 496520 - protein, 15 aa, Homo sapiens
  CDR3 for beta chain variable domain of TCR clone 248260 (TRBV19, TRBJ1-5)
CASSIVWADIQPQHF

SEQ ID NO: 496521 - protein, 13 aa, Homo sapiens
  CDR3 for alpha chain variable domain of TCR clone 248261 (TRAV9-2, TRAJ37)
CALHSSNTGKLIF

SEQ ID NO: 496522 - protein, 15 aa, Homo sapiens
  CDR3 for beta chain variable domain of TCR clone 248261 (TRBV7-2, TRBJ2-7)
CANSTPGLTRCEQYF

SEQ ID NO: 496523 - protein, 13 aa, Homo sapiens
  CDR3 for alpha chain variable domain of TCR clone 248262 (TRAV17, TRAJ21)
CATDGGNFNKFYF

SEQ ID NO: 496524 - protein, 13 aa, Homo sapiens
  CDR3 for beta chain variable domain of TCR clone 248262 (TRBV11-3, TRBJ1-1)
CASTGSLNTEAFI

SEQ ID NO: 496525 - protein, 14 aa, Homo sapiens
  CDR3 for alpha chain variable domain of TCR clone 248263 (TRAV19, TRAJ5)
CALKKDTGRRALPF

SEQ ID NO: 496526 - protein, 15 aa, Homo sapiens
  CDR3 for beta chain variable domain of TCR clone 248263 (TRBV2, TRBJ2-5)
CASSDAGTRQETQYF

SEQ ID NO: 496527 - protein, 16 aa, Homo sapiens
  CDR3 for alpha chain variable domain of TCR clone 248264 (TRAV3, TRAJ5)
CAVRNLMDTGRRALTF

SEQ ID NO: 496528 - protein, 16 aa, Homo sapiens
  CDR3 for beta chain variable domain of TCR clone 248264 (TRBV12-5, TRBJ2-5)
CASGPRTSGNQETRYF

SEQ ID NO: 496529 - protein, 16 aa, Homo sapiens
  CDR3 for alpha chain variable domain of TCR clone 248265 (TRAV30, TRAJ24)
CGTEIVDADSWGKFPF

SEQ ID NO: 496530 - protein, 14 aa, Homo sapiens
  CDR3 for beta chain variable domain of TCR clone 248265 (TRBV12-5, TRBJ2-5)
CACGSRTHQETQYF

SEQ ID NO: 496531 - protein, 12 aa, Homo sapiens
  CDR3 for alpha chain variable domain of TCR clone 248266 (TRAV21, TRAJ11)
CAATSGYSTLTF

SEQ ID NO: 496532 - protein, 14 aa, Homo sapiens
  CDR3 for beta chain variable domain of TCR clone 248266 (TRBV20-1, TRBJ2-7)
CSAPELAGVGEQYF

SEQ ID NO: 496533 - protein, 13 aa, Homo sapiens
  CDR3 for alpha chain variable domain of TCR clone 248267 (TRAV27, TRAJ41)
CAGEGNSGYALNF

SEQ ID NO: 496534 - protein, 15 aa, Homo sapiens
  CDR3 for beta chain variable domain of TCR clone 248267 (TRBV7-8, TRBJ2-1)
CASSLADSLYNEQFF

SEQ ID NO: 496535 - protein, 15 aa, Homo sapiens
  CDR3 for alpha chain variable domain of TCR clone 248268 (TRAV3, TRAJ42)
CAVRGGTGSQGNLIF

SEQ ID NO: 496536 - protein, 16 aa, Homo sapiens
  CDR3 for beta chain variable domain of TCR clone 248268 (TRBV7-3, TRBJ2-2)
CASSLKRGTLSGELFF

SEQ ID NO: 496537 - protein, 16 aa, Homo sapiens
  CDR3 for alpha chain variable domain of TCR clone 248269 (TRAV3, TRAJ37)
CAVRGKGSGNTGKLIF

SEQ ID NO: 496538 - protein, 20 aa, Homo sapiens
  CDR3 for beta chain variable domain of TCR clone 248269 (TRBV19, TRBJ2-1)
CASSISRTVTSTRLNNEQFF

SEQ ID NO: 496539 - protein, 14 aa, Homo sapiens
  CDR3 for alpha chain variable domain of TCR clone 248270 (TRAV17, TRAJ16)
CATADFSDGQMLLF

SEQ ID NO: 496540 - protein, 12 aa, Homo sapiens
  CDR3 for beta chain variable domain of TCR clone 248270 (TRBV24-1, TRBJ1-1)
CATLYPDTEAFF

SEQ ID NO: 496541 - protein, 16 aa, Homo sapiens
  CDR3 for alpha chain variable domain of TCR clone 248271 (TRAV35, TRAJ28)
CAGQKYSGAGRYQLTF

SEQ ID NO: 496542 - protein, 16 aa, Homo sapiens
  CDR3 for beta chain variable domain of TCR clone 248271 (TRBV7-3, TRBJ2-2)
CASSLKRGTLSGEPFF

SEQ ID NO: 496543 - protein, 11 aa, Homo sapiens
  CDR3 for alpha chain variable domain of TCR clone 248272 (TRAV1-2, TRAJ20)
CAVANDYELSF

SEQ ID NO: 496544 - protein, 18 aa, Homo sapiens
  CDR3 for beta chain variable domain of TCR clone 248272 (TRBV20-1, TRBJ2-6)
GSAETTPTHGSGANVLTF

SEQ ID NO: 496545 - protein, 17 aa, Homo sapiens
  CDR3 for alpha chain variable domain of TCR clone 248273 (TRAV27, TRAJ42)
CAERVIYYGGSQGNLIF

SEQ ID NO: 496546 - protein, 14 aa, Homo sapiens
  CDR3 for beta chain variable domain of TCR clone 248273 (TRBV7-2, TRBJ2-3)
CQQLRAGGRDTQYF

SEQ ID NO: 496547 - protein, 15 aa, Homo sapiens
  CDR3 for alpha chain variable domain of TCR clone 248274 (TRAV21, TRAJ24)
CAARSSTDSWWKLKF

SEQ ID NO: 496548 - protein, 13 aa, Homo sapiens
  CDR3 for beta chain variable domain of TCR clone 248274 (TRBV11-2, TRBJ2-5)
CASSSTGEETQYF

SEQ ID NO: 496549 - protein, 11 aa, Homo sapiens
  CDR3 for alpha chain variable domain of TCR clone 248275 (TRAV2, TRAJ13)
CASGGYQKVTF

SEQ ID NO: 496550 - protein, 11 aa, Homo sapiens
  CDR3 for beta chain variable domain of TCR clone 248275 (TRBV7-9, TRBJ2-3)
CASSPTDTQYF

SEQ ID NO: 496551 - protein, 12 aa, Homo sapiens
  CDR3 for alpha chain variable domain of TCR clone 248276 (TRAV12-1, TRAJ23)
CVVNNQGGKLIF

SEQ ID NO: 496552 - protein, 16 aa, Homo sapiens
  CDR3 for beta chain variable domain of TCR clone 248276 (TRBV7-3, TRBJ2-2)
CASSLKRGTLSGELFF

SEQ ID NO: 496553 - protein, 13 aa, Homo sapiens
  CDR3 for alpha chain variable domain of TCR clone 248277 (TRAV29/DV5, TRAJ31)
CAASRNNNARLMF

SEQ ID NO: 496554 - protein, 13 aa, Homo sapiens
  CDR3 for beta chain variable domain of TCR clone 248277 (TRBV4-1, TRBJ2-1)
CASSQAGGDEQFF

SEQ ID NO: 496555 - protein, 11 aa, Homo sapiens
  CDR3 for alpha chain variable domain of TCR clone 248278 (TRAV1-1, TRAJ23)
CAVRQGGKLIF

SEQ ID NO: 496556 - protein, 12 aa, Homo sapiens
  CDR3 for beta chain variable domain of TCR clone 248278 (TRBV18, TRBJ2-1)
CASSSDEDEQFF

SEQ ID NO: 496557 - protein, 13 aa, Homo sapiens
  CDR3 for alpha chain variable domain of TCR clone 248279 (TRAV29/DV5, TRAJ31)
CAASRNNNARLMF

SEQ ID NO: 496558 - protein, 12 aa, Homo sapiens
  CDR3 for beta chain variable domain of TCR clone 248279 (TRBV14, TRBJ2-5)
CASSQLKKTQYF

SEQ ID NO: 496559 - protein, 17 aa, Homo sapiens
  CDR3 for alpha chain variable domain of TCR clone 248280 (TRAV38-1, TRAJ45)
CAFMRSHSGGGADGLTF

SEQ ID NO: 496560 - protein, 14 aa, Homo sapiens
  CDR3 for beta chain variable domain of TCR clone 248280 (TRBV7-2, TRBJ2-3)
CASSLVVRGPYAVF

SEQ ID NO: 496561 - protein, 14 aa, Homo sapiens
  CDR3 for alpha chain variable domain of TCR clone 248281 (TRAV12-2, TRAJ13)
CAVKKTGGYQKVTF

SEQ ID NO: 496562 - protein, 15 aa, Homo sapiens
  CDR3 for beta chain variable domain of TCR clone 248281 (TRBV6-3, TRBJ2-2)
CASSFLATLTGELIF

SEQ ID NO: 496563 - protein, 13 aa, Homo sapiens
  CDR3 for alpha chain variable domain of TCR clone 248282 (TRAV8-4, TRAJ48)
CAVSLFGNEKLTF

SEQ ID NO: 496564 - protein, 12 aa, Homo sapiens
  CDR3 for beta chain variable domain of TCR clone 248282 (TRBV7-9, TRBJ2-7)
CASSIKREEQYF

SEQ ID NO: 496565 - protein, 10 aa, Homo sapiens
  CDR3 for alpha chain variable domain of TCR clone 248283 (TRAV12-1, TRAJ20)
CAIYFQRLQA

SEQ ID NO: 496566 - protein, 14 aa, Homo sapiens
  CDR3 for beta chain variable domain of TCR clone 248283 (TRBV4-2, TRBJ2-1)
CASGLDRAYNEQFF

SEQ ID NO: 496567 - protein, 14 aa, Homo sapiens
  CDR3 for alpha chain variable domain of TCR clone 248284 (TRAV3, TRAJ22)
WAVGDYGSARQLTF

SEQ ID NO: 496568 - protein, 13 aa, Homo sapiens
  CDR3 for beta chain variable domain of TCR clone 248284 (TRBV11-2, TRBJ2-5)
CASGHGAKETQYF

SEQ ID NO: 496569 - protein, 21 aa, Homo sapiens
  CDR3 for alpha chain variable domain of TCR clone 248285 (TRAV3, TRAJ17)
CAVRARRGGRSCRQPANFCRR

SEQ ID NO: 496570 - protein, 14 aa, Homo sapiens
  CDR3 for beta chain variable domain of TCR clone 248285 (TRBV4-1, TRBJ2-2)
CASSQAVNTGELFF

SEQ ID NO: 496571 - protein, 13 aa, Homo sapiens
  CDR3 for alpha chain variable domain of TCR clone 248286 (TRAV3, TRAJ15)
CAVRDQAGTALIF

SEQ ID NO: 496572 - protein, 12 aa, Homo sapiens
  CDR3 for beta chain variable domain of TCR clone 248286 (TRBV5-5, TRBJ2-5)
CASSYFGETQYF

SEQ ID NO: 496573 - protein, 17 aa, Homo sapiens
  CDR3 for alpha chain variable domain of TCR clone 248287 (TRAV3, TRAJ42)
CAVRDRDYGGSQGNLIF

SEQ ID NO: 496574 - protein, 11 aa, Homo sapiens
  CDR3 for beta chain variable domain of TCR clone 248287 (TRBV12-4, TRBJ2-3)
WASTATDTQYF

SEQ ID NO: 496575 - protein, 11 aa, Homo sapiens
  CDR3 for alpha chain variable domain of TCR clone 248288 (TRAV30, TRAJ43)
CTEERGNDMRF

SEQ ID NO: 496576 - protein, 13 aa, Homo sapiens
  CDR3 for beta chain variable domain of TCR clone 248288 (TRBV27, TRBJ2-7)
CASSFSQGYEQYF

SEQ ID NO: 496577 - protein, 14 aa, Homo sapiens
  CDR3 for alpha chain variable domain of TCR clone 248289 (TRAV20, TRAJ4)
CAVRLGGGYNTLIF

SEQ ID NO: 496578 - protein, 14 aa, Homo sapiens
  CDR3 for beta chain variable domain of TCR clone 248289 (TRBV7-3, TRBJ2-3)
CASSPGASRDTQYF

SEQ ID NO: 496579 - protein, 16 aa, Homo sapiens
  CDR3 for alpha chain variable domain of TCR clone 248290 (TRAV12-1, TRAJ8)
CVVNGRGNTGFQKLVF

SEQ ID NO: 496580 - protein, 15 aa, Homo sapiens
  CDR3 for beta chain variable domain of TCR clone 248290 (TRBV6-1, TRBJ1-2)
CASNPGRGGSYGYAF

SEQ ID NO: 496581 - protein, 16 aa, Homo sapiens
  CDR3 for alpha chain variable domain of TCR clone 248291 (TRAV27, TRAJ34)
CAGGGLGDYNTDKLIF

SEQ ID NO: 496582 - protein, 15 aa, Homo sapiens
  CDR3 for beta chain variable domain of TCR clone 248291 (TRBV9, TRBJ1-4)
CASSVVGSTNEKLFF

SEQ ID NO: 496583 - protein, 11 aa, Homo sapiens
  CDR3 for alpha chain variable domain of TCR clone 248292 (TRAV2, TRAJ33)
CAVDSNYQLIW

SEQ ID NO: 496584 - protein, 13 aa, Homo sapiens
  CDR3 for beta chain variable domain of TCR clone 248292 (TRBV28, TRBJ2-5)
CASSFAGGETQYF

SEQ ID NO: 496585 - protein, 16 aa, Homo sapiens
  CDR3 for alpha chain variable domain of TCR clone 248293 (TRAV30, TRAJ24)
CGTEIVDADSWGKFQF

SEQ ID NO: 496586 - protein, 15 aa, Homo sapiens
  CDR3 for beta chain variable domain of TCR clone 248293 (TRBV20-1, TRBJ2-7)
CSARDRVSGMDEQYY

SEQ ID NO: 496587 - protein, 13 aa, Homo sapiens
  CDR3 for alpha chain variable domain of TCR clone 248294 (TRAV17, TRAJ9)
CATDYTGGFKTIF

SEQ ID NO: 496588 - protein, 16 aa, Homo sapiens
  CDR3 for beta chain variable domain of TCR clone 248294 (TRBV12-4, TRBJ1-5)
CASSRPVGGSNQPQHF

SEQ ID NO: 496589 - protein, 12 aa, Homo sapiens
  CDR3 for alpha chain variable domain of TCR clone 248295 (TRAV13-2, TRAJ8)
CAPWLGFQKLVF

SEQ ID NO: 496590 - protein, 16 aa, Homo sapiens
  CDR3 for beta chain variable domain of TCR clone 248295 (TRBV4-3, TRBJ2-2)
CASSHLQGSGTGELFF

SEQ ID NO: 496591 - protein, 13 aa, Homo sapiens
  CDR3 for alpha chain variable domain of TCR clone 248296 (TRAV8-3, TRAJ28)
GAVGAVGSYKLTF

SEQ ID NO: 496592 - protein, 14 aa, Homo sapiens
  CDR3 for beta chain variable domain of TCR clone 248296 (TRBV7-2, TRBJ2-7)
CASRSQGAAYEQYF

SEQ ID NO: 496593 - protein, 13 aa, Homo sapiens
  CDR3 for alpha chain variable domain of TCR clone 248297 (TRAV38-2/DV8, TRAJ45)
RAYVGGGAGGLTF

SEQ ID NO: 496594 - protein, 16 aa, Homo sapiens
  CDR3 for beta chain variable domain of TCR clone 248297 (TRBV5-1, TRBJ2-2)
CASSSRTGGRTGELFF

SEQ ID NO: 496595 - protein, 15 aa, Homo sapiens
  CDR3 for alpha chain variable domain of TCR clone 248298 (TRAV21, TRAJ53)
CTTLNSGGSNYKLTF

SEQ ID NO: 496596 - protein, 13 aa, Homo sapiens
  CDR3 for beta chain variable domain of TCR clone 248298 (TRBV7-9, TRBJ2-3)
CASSPGSTDTQYF

SEQ ID NO: 496597 - protein, 10 aa, Homo sapiens
  CDR3 for alpha chain variable domain of TCR clone 248299 (TRAV13-1, TRAJ27)
CAPLASQINL

SEQ ID NO: 496598 - protein, 13 aa, Homo sapiens
  CDR3 for beta chain variable domain of TCR clone 248299 (TRBV7-3, TRBJ1-1)
CASSQDWGAEAFF

SEQ ID NO: 496599 - protein, 12 aa, Homo sapiens
  CDR3 for alpha chain variable domain of TCR clone 248300 (TRAV13-2, TRAJ8)
CAPWLGFQKLVS

SEQ ID NO: 496600 - protein, 15 aa, Homo sapiens
  CDR3 for beta chain variable domain of TCR clone 248300 (TRBV7-2, TRBJ2-1)
CASSSGLAGGNEQFF

SEQ ID NO: 496601 - protein, 13 aa, Homo sapiens
  CDR3 for alpha chain variable domain of TCR clone 248301 (TRAV21, TRAJ37)
CAVSSGNTGHLIF

SEQ ID NO: 496602 - protein, 15 aa, Homo sapiens
  CDR3 for beta chain variable domain of TCR clone 248301 (TRBV12-4, TRBJ1-2)
CASSFVDRGNYGYTF

SEQ ID NO: 496603 - protein, 12 aa, Homo sapiens
  CDR3 for alpha chain variable domain of TCR clone 248302 (TRAV20, TRAJ36)
CAVLTGANNLSF

SEQ ID NO: 496604 - protein, 17 aa, Homo sapiens
  CDR3 for beta chain variable domain of TCR clone 248302 (TRBV11-2, TRBJ2-1)
CASSLYPPGVEYNEQFF

SEQ ID NO: 496605 - protein, 14 aa, Homo sapiens
  CDR3 for alpha chain variable domain of TCR clone 248303 (TRAV2, TRAJ29)
CAVESYSGNTPLVF

SEQ ID NO: 496606 - protein, 14 aa, Homo sapiens
  CDR3 for beta chain variable domain of TCR clone 248303 (TRBV6-1, TRBJ2-7)
CASTRTGDYYEQYF

SEQ ID NO: 496607 - protein, 16 aa, Homo sapiens
  CDR3 for alpha chain variable domain of TCR clone 248304 (TRAV12-1, TRAJ43)
CVVNPHRFGAGTRLTV

SEQ ID NO: 496608 - protein, 12 aa, Homo sapiens
  CDR3 for beta chain variable domain of TCR clone 248304 (TRBV12-4, TRBJ1-2)
CQQFGAKLWLHL

SEQ ID NO: 496609 - protein, 15 aa, Homo sapiens
  CDR3 for alpha chain variable domain of TCR clone 248305 (TRAV38-1, TRAJ57)
CAFMDSQGESEKLVF

SEQ ID NO: 496610 - protein, 16 aa, Homo sapiens
  CDR3 for beta chain variable domain of TCR clone 248305 (TRBV10-3, TRBJ2-1)
CAIRGGGRGDYNEQFF

SEQ ID NO: 496611 - protein, 18 aa, Homo sapiens
  CDR3 for alpha chain variable domain of TCR clone 248306 (TRAV13-1, TRAJ52)
CAAKNPNAGGTSYGKLTF

SEQ ID NO: 496612 - protein, 14 aa, Homo sapiens
  CDR3 for beta chain variable domain of TCR clone 248306 (TRBV7-3, TRBJ2-1)
CASSLAGWTNEQFF

SEQ ID NO: 496613 - protein, 16 aa, Homo sapiens
  CDR3 for alpha chain variable domain of TCR clone 248307 (TRAV16, TRAJ4)
CSLSRMFSGGYNKLIF

SEQ ID NO: 496614 - protein, 16 aa, Homo sapiens
  CDR3 for beta chain variable domain of TCR clone 248307 (TRBV24-1, TRBJ2-3)
CATSDSGTGATDTQYF

SEQ ID NO: 496615 - protein, 14 aa, Homo sapiens
  CDR3 for alpha chain variable domain of TCR clone 248308 (TRAV16, TRAJ37)
CALDISGNTGKLIF

SEQ ID NO: 496616 - protein, 14 aa, Homo sapiens
  CDR3 for beta chain variable domain of TCR clone 248308 (TRBV19, TRBJ2-5)
CASSMTGQQETQYF

SEQ ID NO: 496617 - protein, 13 aa, Homo sapiens
  CDR3 for alpha chain variable domain of TCR clone 248309 (TRAV13-1, TRAJ21)
CAASIYNFNKFYF

SEQ ID NO: 496618 - protein, 15 aa, Homo sapiens
  CDR3 for beta chain variable domain of TCR clone 248309 (TRBV7-8, TRBJ1-5)
CASSLAGQLNQPQHF

SEQ ID NO: 496619 - protein, 14 aa, Homo sapiens
  CDR3 for alpha chain variable domain of TCR clone 248310 (TRAV26-1, TRAJ38)
CIADNAGNNRKLIW

SEQ ID NO: 496620 - protein, 15 aa, Homo sapiens
  CDR3 for beta chain variable domain of TCR clone 248310 (TRBV20-1, TRBJ2-7)
CSARERVSGMDEQYF

SEQ ID NO: 496621 - protein, 22 aa, Homo sapiens
  CDR3 for alpha chain variable domain of TCR clone 248311 (TRAV4, )
CLVGPHNYGIQNPDPAVSQLRD

SEQ ID NO: 496622 - protein, 17 aa, Homo sapiens
  CDR3 for beta chain variable domain of TCR clone 248311 (TRBV24-1, TRBJ2-1)
CATSDVSTSGTYNEQFF

SEQ ID NO: 496623 - protein, 16 aa, Homo sapiens
  CDR3 for alpha chain variable domain of TCR clone 248312 (TRAV3, TRAJ37)
CAVRGRCSGNTGKLIF

SEQ ID NO: 496624 - protein, 12 aa, Homo sapiens
  CDR3 for beta chain variable domain of TCR clone 248312 (TRBV11-2, TRBJ2-2)
CASSLGGGELFF

SEQ ID NO: 496625 - protein, 17 aa, Homo sapiens
  CDR3 for alpha chain variable domain of TCR clone 248313 (TRAV38-1, TRAJ28)
CAFMKPTSGAGSYQLTF

SEQ ID NO: 496626 - protein, 13 aa, Homo sapiens
  CDR3 for beta chain variable domain of TCR clone 248313 (TRBV7-2, TRBJ2-7)
CASSSPSGSEQYF

SEQ ID NO: 496627 - protein, 11 aa, Homo sapiens
  CDR3 for alpha chain variable domain of TCR clone 248314 (TRAV27, TRAJ20)
CAGLNDYKPSF

SEQ ID NO: 496628 - protein, 16 aa, Homo sapiens
  CDR3 for beta chain variable domain of TCR clone 248314 (TRBV27, TRBJ2-2)
CASSFRGLVRTGELFF

SEQ ID NO: 496629 - protein, 13 aa, Homo sapiens
  CDR3 for alpha chain variable domain of TCR clone 248315 (TRAV2, TRAJ24)
CAVSTDSWGKLQF

SEQ ID NO: 496630 - protein, 14 aa, Homo sapiens
  CDR3 for beta chain variable domain of TCR clone 248315 (TRBV13, TRBJ2-7)
CASSLGTAQETQYF

SEQ ID NO: 496631 - protein, 17 aa, Homo sapiens
  CDR3 for alpha chain variable domain of TCR clone 248316 (TRAV3, TRAJ28)
CAVSEAYSGAGSYQLTC

SEQ ID NO: 496632 - protein, 18 aa, Homo sapiens
  CDR3 for beta chain variable domain of TCR clone 248316 (TRBV27, TRBJ2-1)
CASGNRAVGVGSKNEQFF

SEQ ID NO: 496633 - protein, 10 aa, Homo sapiens
  CDR3 for alpha chain variable domain of TCR clone 248317 (TRAV17, TRAJ36)
CATVAGNLFF

SEQ ID NO: 496634 - protein, 12 aa, Homo sapiens
  CDR3 for beta chain variable domain of TCR clone 248317 (TRBV11-2, TRBJ2-2)
CASSLGGGELFF

SEQ ID NO: 496635 - protein, 15 aa, Homo sapiens
  CDR3 for alpha chain variable domain of TCR clone 248318 (TRAV20, TRAJ4)
CAVQVFSGGYNKLMF

SEQ ID NO: 496636 - protein, 14 aa, Homo sapiens
  CDR3 for beta chain variable domain of TCR clone 248318 (TRBV7-6, TRBJ2-3)
CASNSGGDANTQYF

SEQ ID NO: 496637 - protein, 11 aa, Homo sapiens
  CDR3 for alpha chain variable domain of TCR clone 248319 (TRAV35, TRAJ34)
CWARNTDKLIF

SEQ ID NO: 496638 - protein, 13 aa, Homo sapiens
  CDR3 for beta chain variable domain of TCR clone 248319 (TRBV7-2, TRBJ2-4)
CASSREHANIQYI

SEQ ID NO: 496639 - protein, 15 aa, Homo sapiens
  CDR3 for alpha chain variable domain of TCR clone 248320 (TRAV27, TRAJ38)
CAGRFNAGNNRKLTG

SEQ ID NO: 496640 - protein, 13 aa, Homo sapiens
  CDR3 for beta chain variable domain of TCR clone 248320 (TRBV12-5, TRBJ2-3)
CASQNRGTDTQYF

SEQ ID NO: 496641 - protein, 16 aa, Homo sapiens
  CDR3 for alpha chain variable domain of TCR clone 248321 (TRAV8-3, TRAJ13)
CAVGAYPSGGYQKVTF

SEQ ID NO: 496642 - protein, 13 aa, Homo sapiens
  CDR3 for beta chain variable domain of TCR clone 248321 (TRBV4-1, TRBJ2-2)
CASSQENTGELFF

SEQ ID NO: 496643 - protein, 15 aa, Homo sapiens
  CDR3 for alpha chain variable domain of TCR clone 248322 (TRAV3, TRAJ5)
CAVRDRKAGRRALTF

SEQ ID NO: 496644 - protein, 13 aa, Homo sapiens
  CDR3 for beta chain variable domain of TCR clone 248322 (TRBV7-9, TRBJ1-2)
CASSLKQNYGYTF

SEQ ID NO: 496645 - protein, 14 aa, Homo sapiens
  CDR3 for alpha chain variable domain of TCR clone 248323 (TRAV1-2, TRAJ16)
CAVNRFSDGQKLLF

SEQ ID NO: 496646 - protein, 14 aa, Homo sapiens
  CDR3 for beta chain variable domain of TCR clone 248323 (TRBV7-9, TRBJ2-3)
CASSLEDGTDTQFF

SEQ ID NO: 496647 - protein, 13 aa, Homo sapiens
  CDR3 for alpha chain variable domain of TCR clone 248324 (TRAV22, TRAJ44)
CALNPGTASKLTF

SEQ ID NO: 496648 - protein, 18 aa, Homo sapiens
  CDR3 for beta chain variable domain of TCR clone 248324 (TRBV4-1, TRBJ2-1)
CASSLVGGELAGFNEQFF

SEQ ID NO: 496649 - protein, 15 aa, Homo sapiens
  CDR3 for alpha chain variable domain of TCR clone 248325 (TRAV35, TRAJ50)
CAGQLRKTSYDKVNF

SEQ ID NO: 496650 - protein, 12 aa, Homo sapiens
  CDR3 for beta chain variable domain of TCR clone 248325 (TRBV5-1, TRBJ2-5)
CASSLGLETQYF

SEQ ID NO: 496651 - protein, 14 aa, Homo sapiens
  CDR3 for alpha chain variable domain of TCR clone 248326 (TRAV23/DV6, TRAJ4)
CAAPSSGGYNKRIF

SEQ ID NO: 496652 - protein, 16 aa, Homo sapiens
  CDR3 for beta chain variable domain of TCR clone 248326 (TRBV19, TRBJ1-1)
CASRFGGPVTGTEALF

SEQ ID NO: 496653 - protein, 13 aa, Homo sapiens
  CDR3 for alpha chain variable domain of TCR clone 248327 (TRAV27, TRAJ41)
CAGEGNSGYALNF

SEQ ID NO: 496654 - protein, 13 aa, Homo sapiens
  CDR3 for beta chain variable domain of TCR clone 248327 (TRBV27, TRBJ1-1)
CASSLSIGAEAFF

SEQ ID NO: 496655 - protein, 15 aa, Homo sapiens
  CDR3 for alpha chain variable domain of TCR clone 248328 (TRAV12-2, TRAJ43)
CAFDMRFGAGTRLTV

SEQ ID NO: 496656 - protein, 18 aa, Homo sapiens
  CDR3 for beta chain variable domain of TCR clone 248328 (TRBV20-1, TRBJ2-3)
CSAFGLAGGPGTTDTQYF

SEQ ID NO: 496657 - protein, 13 aa, Homo sapiens
  CDR3 for alpha chain variable domain of TCR clone 248329 (TRAV1-2, TRAJ9)
CAALDTGGFKTIF

SEQ ID NO: 496658 - protein, 14 aa, Homo sapiens
  CDR3 for beta chain variable domain of TCR clone 248329 (TRBV9, TRBJ2-3)
CASSAGGGPDTQYF

SEQ ID NO: 496659 - protein, 15 aa, Homo sapiens
  CDR3 for alpha chain variable domain of TCR clone 248330 (TRAV8-2, )
CVVNIQNPDPAVYQL

SEQ ID NO: 496660 - protein, 14 aa, Homo sapiens
  CDR3 for beta chain variable domain of TCR clone 248330 (TRBV7-9, TRBJ2-5)
CASSLVGGEETQYF

SEQ ID NO: 496661 - protein, 13 aa, Homo sapiens
  CDR3 for alpha chain variable domain of TCR clone 248331 (TRAV2, TRAJ40)
CAVVTSGTYKYIF

SEQ ID NO: 496662 - protein, 15 aa, Homo sapiens
  CDR3 for beta chain variable domain of TCR clone 248331 (TRBV10-1, TRBJ2-3)
CASSATSGGFDTQYF

SEQ ID NO: 496663 - protein, 16 aa, Homo sapiens
  CDR3 for alpha chain variable domain of TCR clone 248332 (TRAV3, TRAJ13)
CAVRDPNSWVYPKVTF

SEQ ID NO: 496664 - protein, 13 aa, Homo sapiens
  CDR3 for beta chain variable domain of TCR clone 248332 (TRBV7-9, TRBJ2-7)
CASSLQGSYEQYF

SEQ ID NO: 496665 - protein, 13 aa, Homo sapiens
  CDR3 for alpha chain variable domain of TCR clone 248333 (TRAV13-2, TRAJ13)
CADLSGGYQKVTF

SEQ ID NO: 496666 - protein, 15 aa, Homo sapiens
  CDR3 for beta chain variable domain of TCR clone 248333 (TRBV19, TRBJ1-1)
CVSSIGGGRNTEAFL

SEQ ID NO: 496667 - protein, 12 aa, Homo sapiens
  CDR3 for alpha chain variable domain of TCR clone 248334 (TRAV12-2, TRAJ10)
WGVTGGGNKLTF

SEQ ID NO: 496668 - protein, 14 aa, Homo sapiens
  CDR3 for beta chain variable domain of TCR clone 248334 (TRBV7-6, TRBJ2-3)
CASSLGTVTDTRYF

SEQ ID NO: 496669 - protein, 18 aa, Homo sapiens
  CDR3 for alpha chain variable domain of TCR clone 248335 (TRAV12-3, TRAJ52)
CARSRTNAGGTSYGKLTF

SEQ ID NO: 496670 - protein, 17 aa, Homo sapiens
  CDR3 for beta chain variable domain of TCR clone 248335 (TRBV7-3, TRBJ2-3)
CASSLVKRMRGADTQYF

SEQ ID NO: 496671 - protein, 14 aa, Homo sapiens
  CDR3 for alpha chain variable domain of TCR clone 248336 (TRAV26-1, TRAJ52)
CIPAGGTSYGKLTF

SEQ ID NO: 496672 - protein, 13 aa, Homo sapiens
  CDR3 for beta chain variable domain of TCR clone 248336 (TRBV20-1, TRBJ1-1)
CSARGGGNTEAFF

SEQ ID NO: 496673 - protein, 14 aa, Homo sapiens
  CDR3 for alpha chain variable domain of TCR clone 248337 (TRAV12-3, TRAJ20)
CAMSARRGDYKLSF

SEQ ID NO: 496674 - protein, 14 aa, Homo sapiens
  CDR3 for beta chain variable domain of TCR clone 248337 (TRBV7-3, TRBJ2-3)
CASSSSARTDTQYF

SEQ ID NO: 496675 - protein, 12 aa, Homo sapiens
  CDR3 for alpha chain variable domain of TCR clone 248338 (TRAV12-2, TRAJ47)
CAVAEYGNKLVF

SEQ ID NO: 496676 - protein, 14 aa, Homo sapiens
  CDR3 for beta chain variable domain of TCR clone 248338 (TRBV20-1, TRBJ1-1)
CSAIGGTANTEAFF

SEQ ID NO: 496677 - protein, 16 aa, Homo sapiens
  CDR3 for alpha chain variable domain of TCR clone 248339 (TRAV27, TRAJ13)
CAGAKSDSGGYQKVTF

SEQ ID NO: 496678 - protein, 16 aa, Homo sapiens
  CDR3 for beta chain variable domain of TCR clone 248339 (TRBV20-1, TRBJ2-2)
CSARSAGGLGTGELFF

SEQ ID NO: 496679 - protein, 12 aa, Homo sapiens
  CDR3 for alpha chain variable domain of TCR clone 248340 (TRAV12-2, TRAJ10)
WGVTGGGNKLTF

SEQ ID NO: 496680 - protein, 14 aa, Homo sapiens
  CDR3 for beta chain variable domain of TCR clone 248340 (TRBV19, TRBJ2-1)
CASSSGRDYNEQFF

SEQ ID NO: 496681 - protein, 13 aa, Homo sapiens
  CDR3 for alpha chain variable domain of TCR clone 248341 (TRAV3, TRAJ30)
CAVRDRGDDKIIF

SEQ ID NO: 496682 - protein, 14 aa, Homo sapiens
  CDR3 for beta chain variable domain of TCR clone 248341 (TRBV5-1, TRBJ1-1)
CASSRTTGDTEAFC

SEQ ID NO: 496683 - protein, 13 aa, Homo sapiens
  CDR3 for alpha chain variable domain of TCR clone 248342 (TRAV1-2, TRAJ11)
CAVRSSGYSTLTF

SEQ ID NO: 496684 - protein, 15 aa, Homo sapiens
  CDR3 for beta chain variable domain of TCR clone 248342 (TRBV2, TRBJ2-1)
CASSELAGSYNEQFF

SEQ ID NO: 496685 - protein, 14 aa, Homo sapiens
  CDR3 for alpha chain variable domain of TCR clone 248343 (TRAV8-1, TRAJ5)
CAVMTDTGRRALTF

SEQ ID NO: 496686 - protein, 16 aa, Homo sapiens
  CDR3 for beta chain variable domain of TCR clone 248343 (TRBV6-1, TRBJ2-5)
CASSETLDRGAETQYF

SEQ ID NO: 496687 - protein, 16 aa, Homo sapiens
  CDR3 for alpha chain variable domain of TCR clone 248344 (TRAV27, TRAJ48)
TAAQPGDTGLYLPLTF

SEQ ID NO: 496688 - protein, 13 aa, Homo sapiens
  CDR3 for beta chain variable domain of TCR clone 248344 (TRBV14, TRBJ2-7)
CASSQDRRYEQYF

SEQ ID NO: 496689 - protein, 13 aa, Homo sapiens
  CDR3 for alpha chain variable domain of TCR clone 248345 (TRAV2, TRAJ40)
CAVVTSGTYKYIF

SEQ ID NO: 496690 - protein, 14 aa, Homo sapiens
  CDR3 for beta chain variable domain of TCR clone 248345 (TRBV20-1, TRBJ1-1)
SAVLGVGGNTEAFF

SEQ ID NO: 496691 - protein, 16 aa, Homo sapiens
  CDR3 for alpha chain variable domain of TCR clone 248346 (TRAV3, TRAJ8)
CAVRDMKNTGFQKLVF

SEQ ID NO: 496692 - protein, 16 aa, Homo sapiens
  CDR3 for beta chain variable domain of TCR clone 248346 (TRBV19, TRBJ1-1)
CASRFGGPVTGTEAFF

SEQ ID NO: 496693 - protein, 10 aa, Homo sapiens
  CDR3 for alpha chain variable domain of TCR clone 248347 (TRAV27, TRAJ43)
CAGANNDMRF

SEQ ID NO: 496694 - protein, 11 aa, Homo sapiens
  CDR3 for beta chain variable domain of TCR clone 248347 (TRBV29-1, TRBJ2-5)
CSEDRTGTQYF

SEQ ID NO: 496695 - protein, 15 aa, Homo sapiens
  CDR3 for alpha chain variable domain of TCR clone 248348 (TRAV3, TRAJ16)
CAVRDGFSGGQKLLF

SEQ ID NO: 496696 - protein, 13 aa, Homo sapiens
  CDR3 for beta chain variable domain of TCR clone 248348 (TRBV7-9, TRBJ1-2)
CASSLKQNYGYTF

SEQ ID NO: 496697 - protein, 17 aa, Homo sapiens
  CDR3 for alpha chain variable domain of TCR clone 248349 (TRAV27, TRAJ26)
CAGARAPLDNYGPNFVF

SEQ ID NO: 496698 - protein, 15 aa, Homo sapiens
  CDR3 for beta chain variable domain of TCR clone 248349 (TRBV11-2, TRBJ2-5)
CASSPRSGGLETQYF

SEQ ID NO: 496699 - protein, 14 aa, Homo sapiens
  CDR3 for alpha chain variable domain of TCR clone 248350 (TRAV1-2, TRAJ8)
CAVREDTGFQKLLF

SEQ ID NO: 496700 - protein, 15 aa, Homo sapiens
  CDR3 for beta chain variable domain of TCR clone 248350 (TRBV7-9, TRBJ1-4)
CASSARTGGNEKLFF

SEQ ID NO: 496701 - protein, 13 aa, Homo sapiens
  CDR3 for alpha chain variable domain of TCR clone 248351 (TRAV12-1, TRAJ33)
CGDSPDSNYQLIW

SEQ ID NO: 496702 - protein, 15 aa, Homo sapiens
  CDR3 for beta chain variable domain of TCR clone 248351 (TRBV27, TRBJ2-1)
CASSNGGGSSNEQSF

SEQ ID NO: 496703 - protein, 17 aa, Homo sapiens
  CDR3 for alpha chain variable domain of TCR clone 248352 (TRAV26-1, TRAJ37)
CIVRVITVSSNTGKLIF

SEQ ID NO: 496704 - protein, 14 aa, Homo sapiens
  CDR3 for beta chain variable domain of TCR clone 248352 (TRBV7-2, TRBJ2-7)
CASSPKTSLYEQYF

SEQ ID NO: 496705 - protein, 14 aa, Homo sapiens
  CDR3 for alpha chain variable domain of TCR clone 248353 (TRAV26-1, TRAJ44)
CIPQGTGTASKLTF

SEQ ID NO: 496706 - protein, 15 aa, Homo sapiens
  CDR3 for beta chain variable domain of TCR clone 248353 (TRBV20-1, TRBJ2-7)
CSARGRGPSSYEQYF

SEQ ID NO: 496707 - protein, 12 aa, Homo sapiens
  CDR3 for alpha chain variable domain of TCR clone 248354 (TRAV12-1, TRAJ40)
CVFYSGTYKYIF

SEQ ID NO: 496708 - protein, 17 aa, Homo sapiens
  CDR3 for beta chain variable domain of TCR clone 248354 (TRBV12-4, TRBJ2-2)
CASSVAGTRGRTGELFF

SEQ ID NO: 496709 - protein, 15 aa, Homo sapiens
  CDR3 for alpha chain variable domain of TCR clone 248355 (TRAV21, TRAJ53)
CATLNSGGSNYKLTF

SEQ ID NO: 496710 - protein, 16 aa, Homo sapiens
  CDR3 for beta chain variable domain of TCR clone 248355 (TRBV20-1, TRBJ1-2)
CSASMGQGVANYGYTL

SEQ ID NO: 496711 - protein, 14 aa, Homo sapiens
  CDR3 for alpha chain variable domain of TCR clone 248356 (TRAV1-2, TRAJ8)
CAVREDTGFQKLVF

SEQ ID NO: 496712 - protein, 17 aa, Homo sapiens
  CDR3 for beta chain variable domain of TCR clone 248356 (TRBV6-5, TRBJ2-7)
CASRPSVGEVQQYEQYF

SEQ ID NO: 496713 - protein, 15 aa, Homo sapiens
  CDR3 for alpha chain variable domain of TCR clone 248357 (TRAV25, TRAJ52)
CAGRPGGTSYGELTF

SEQ ID NO: 496714 - protein, 17 aa, Homo sapiens
  CDR3 for beta chain variable domain of TCR clone 248357 (TRBV7-8, TRBJ2-6)
SASSAGTGGAGANVLTF

SEQ ID NO: 496715 - protein, 14 aa, Homo sapiens
  CDR3 for alpha chain variable domain of TCR clone 248358 (TRAV12-3, TRAJ7)
CAMSEIGGNNRLAF

SEQ ID NO: 496716 - protein, 15 aa, Homo sapiens
  CDR3 for beta chain variable domain of TCR clone 248358 (TRBV11-3, TRBJ2-3)
CASLKDGREGDTQYF

SEQ ID NO: 496717 - protein, 14 aa, Homo sapiens
  CDR3 for alpha chain variable domain of TCR clone 248359 (TRAV17, TRAJ31)
CATVVRNNNARLMF

SEQ ID NO: 496718 - protein, 14 aa, Homo sapiens
  CDR3 for beta chain variable domain of TCR clone 248359 (TRBV12-4, TRBJ2-5)
CASSLWQKQETQYF

SEQ ID NO: 496719 - protein, 16 aa, Homo sapiens
  CDR3 for alpha chain variable domain of TCR clone 248360 (TRAV38-2/DV8, TRAJ45)
CAYTTTSGGGADGLTF

SEQ ID NO: 496720 - protein, 14 aa, Homo sapiens
  CDR3 for beta chain variable domain of TCR clone 248360 (TRBV7-9, TRBJ2-2)
CASSLGQRTGELFF

SEQ ID NO: 496721 - protein, 13 aa, Homo sapiens
  CDR3 for alpha chain variable domain of TCR clone 248361 (TRAV13-1, TRAJ6)
CARGSGGSYIPTF

SEQ ID NO: 496722 - protein, 15 aa, Homo sapiens
  CDR3 for beta chain variable domain of TCR clone 248361 (TRBV7-3, TRBJ2-1)
CASSPTGGGEVEQFF

SEQ ID NO: 496723 - protein, 11 aa, Homo sapiens
  CDR3 for alpha chain variable domain of TCR clone 248362 (TRAV3, TRAJ21)
CAVGNFNKFYF

SEQ ID NO: 496724 - protein, 13 aa, Homo sapiens
  CDR3 for beta chain variable domain of TCR clone 248362 (TRBV7-9, TRBJ1-2)
CASSLRQNYGYTF

SEQ ID NO: 496725 - protein, 13 aa, Homo sapiens
  CDR3 for alpha chain variable domain of TCR clone 248363 (TRAV8-1, TRAJ34)
CAVNAGNNDKLIF

SEQ ID NO: 496726 - protein, 13 aa, Homo sapiens
  CDR3 for beta chain variable domain of TCR clone 248363 (TRBV20-1, TRBJ2-1)
CSAGAGTYNEQFF

SEQ ID NO: 496727 - protein, 14 aa, Homo sapiens
  CDR3 for alpha chain variable domain of TCR clone 248364 (TRAV30, TRAJ33)
CGTVAPRSNYQLIW

SEQ ID NO: 496728 - protein, 17 aa, Homo sapiens
  CDR3 for beta chain variable domain of TCR clone 248364 (TRBV20-1, TRBJ2-2)
CSASGSGQGGLTGELFF

SEQ ID NO: 496729 - protein, 10 aa, Homo sapiens
  CDR3 for alpha chain variable domain of TCR clone 248365 (TRAV1-2, TRAJ20)
CAVTDYKLSF

SEQ ID NO: 496730 - protein, 14 aa, Homo sapiens
  CDR3 for beta chain variable domain of TCR clone 248365 (TRBV7-2, TRBJ1-1)
CASSFLTGTTEAFF

SEQ ID NO: 496731 - protein, 15 aa, Homo sapiens
  CDR3 for alpha chain variable domain of TCR clone 248366 (TRAV12-3, TRAJ6)
CVMSETKGGSYIPTF

SEQ ID NO: 496732 - protein, 13 aa, Homo sapiens
  CDR3 for beta chain variable domain of TCR clone 248366 (TRBV20-1, TRBJ1-1)
CSAPLGGGTEAFF

SEQ ID NO: 496733 - protein, 13 aa, Homo sapiens
  CDR3 for alpha chain variable domain of TCR clone 248367 (TRAV20, TRAJ42)
CAVQGGSQGNLIF

SEQ ID NO: 496734 - protein, 15 aa, Homo sapiens
  CDR3 for beta chain variable domain of TCR clone 248367 (TRBV10-1, TRBJ2-1)
CASSEWRGTYNEQFV

SEQ ID NO: 496735 - protein, 15 aa, Homo sapiens
  CDR3 for alpha chain variable domain of TCR clone 248368 (TRAV13-1, TRAJ10)
CASTILTGGGNKLTF

SEQ ID NO: 496736 - protein, 15 aa, Homo sapiens
  CDR3 for beta chain variable domain of TCR clone 248368 (TRBV6-1, TRBJ2-7)
CASSESMGDFYEQYF

SEQ ID NO: 496737 - protein, 13 aa, Homo sapiens
  CDR3 for alpha chain variable domain of TCR clone 248369 (TRAV21, TRAJ27)
CAALNTNAGKSTF

SEQ ID NO: 496738 - protein, 14 aa, Homo sapiens
  CDR3 for beta chain variable domain of TCR clone 248369 (TRBV19, TRBJ2-5)
CASSMTGQQETQYF

SEQ ID NO: 496739 - protein, 13 aa, Homo sapiens
  CDR3 for alpha chain variable domain of TCR clone 248370 (TRAV17, TRAJ54)
CAAGIQGAQKLVF

SEQ ID NO: 496740 - protein, 14 aa, Homo sapiens
  CDR3 for beta chain variable domain of TCR clone 248370 (TRBV11-2, TRBJ1-2)
CASSLGTANYGDTF

SEQ ID NO: 496741 - protein, 14 aa, Homo sapiens
  CDR3 for alpha chain variable domain of TCR clone 248371 (TRAV1-2, TRAJ16)
CAVNRFSDGQELLF

SEQ ID NO: 496742 - protein, 12 aa, Homo sapiens
  CDR3 for beta chain variable domain of TCR clone 248371 (TRBV6-5, TRBJ2-2)
CASRQITGELFF

SEQ ID NO: 496743 - protein, 13 aa, Homo sapiens
  CDR3 for alpha chain variable domain of TCR clone 248372 (TRAV12-3, TRAJ50)
CARGGTSYDKVIF

SEQ ID NO: 496744 - protein, 16 aa, Homo sapiens
  CDR3 for beta chain variable domain of TCR clone 248372 (TRBV10-3, TRBJ2-7)
CAISADFADRPYEQYF

SEQ ID NO: 496745 - protein, 14 aa, Homo sapiens
  CDR3 for alpha chain variable domain of TCR clone 248373 (TRAV8-3, TRAJ10)
CAVGNAGGGNKLTF

SEQ ID NO: 496746 - protein, 13 aa, Homo sapiens
  CDR3 for beta chain variable domain of TCR clone 248373 (TRBV12-5, TRBJ2-3)
CASGDRQSDTQYF

SEQ ID NO: 496747 - protein, 18 aa, Homo sapiens
  CDR3 for alpha chain variable domain of TCR clone 248374 (TRAV17, TRAJ17)
CFLLLCYGVEAAGNKLTF

SEQ ID NO: 496748 - protein, 15 aa, Homo sapiens
  CDR3 for beta chain variable domain of TCR clone 248374 (TRBV20-1, TRBJ1-1)
CSASRGVTGNTEAFF

SEQ ID NO: 496749 - protein, 14 aa, Homo sapiens
  CDR3 for alpha chain variable domain of TCR clone 248375 (TRAV29/DV5, TRAJ36)
WAARRKTGANNLFF

SEQ ID NO: 496750 - protein, 14 aa, Homo sapiens
  CDR3 for beta chain variable domain of TCR clone 248375 (TRBV12-5, TRBJ2-5)
CASGSRTHQETQYF

SEQ ID NO: 496751 - protein, 14 aa, Homo sapiens
  CDR3 for alpha chain variable domain of TCR clone 248376 (TRAV17, TRAJ57)
CATDTQGGSEKLAF

SEQ ID NO: 496752 - protein, 18 aa, Homo sapiens
  CDR3 for beta chain variable domain of TCR clone 248376 (TRBV6-6, TRBJ1-3)
CASSYSKWDSISGNTIYF

SEQ ID NO: 496753 - protein, 13 aa, Homo sapiens
  CDR3 for alpha chain variable domain of TCR clone 248377 (TRAV27, TRAJ8)
CAGGPTGFQKIVF

SEQ ID NO: 496754 - protein, 15 aa, Homo sapiens
  CDR3 for beta chain variable domain of TCR clone 248377 (TRBV6-1, TRBJ2-7)
CASSESMGDFYEQYF

SEQ ID NO: 496755 - protein, 15 aa, Homo sapiens
  CDR3 for alpha chain variable domain of TCR clone 248378 (TRAV21, TRAJ24)
CASRSSTDSWEKLQF

SEQ ID NO: 496756 - protein, 13 aa, Homo sapiens
  CDR3 for beta chain variable domain of TCR clone 248378 (TRBV11-2, TRBJ2-5)
CASSSTGEETQYF

SEQ ID NO: 496757 - protein, 14 aa, Homo sapiens
  CDR3 for alpha chain variable domain of TCR clone 248379 (TRAV16, TRAJ33)
CALSAMDSNYQLIW

SEQ ID NO: 496758 - protein, 17 aa, Homo sapiens
  CDR3 for beta chain variable domain of TCR clone 248379 (TRBV20-1, TRBJ2-2)
CSASGSGQGGLTGELFF

SEQ ID NO: 496759 - protein, 14 aa, Homo sapiens
  CDR3 for alpha chain variable domain of TCR clone 248380 (TRAV9-2, TRAJ39)
CALYIYNAGNMLTF

SEQ ID NO: 496760 - protein, 15 aa, Homo sapiens
  CDR3 for beta chain variable domain of TCR clone 248380 (TRBV2, TRBJ2-7)
CASSEGLARSYEQYF

SEQ ID NO: 496761 - protein, 15 aa, Homo sapiens
  CDR3 for alpha chain variable domain of TCR clone 248381 (TRAV16, TRAJ12)
CSKWPLRDSSYKLIF

SEQ ID NO: 496762 - protein, 14 aa, Homo sapiens
  CDR3 for beta chain variable domain of TCR clone 248381 (TRBV19, TRBJ1-5)
CASGTEVYNQPQHF

SEQ ID NO: 496763 - protein, 10 aa, Homo sapiens
  CDR3 for alpha chain variable domain of TCR clone 248382 (TRAV2, TRAJ34)
CAVVNDKLFF

SEQ ID NO: 496764 - protein, 15 aa, Homo sapiens
  CDR3 for beta chain variable domain of TCR clone 248382 (TRBV3-1, TRBJ2-2)
CASSQDWTRAGELFF

SEQ ID NO: 496765 - protein, 11 aa, Homo sapiens
  CDR3 for alpha chain variable domain of TCR clone 248383 (TRAV1-2, TRAJ20)
CAVANDYKLSF

SEQ ID NO: 496766 - protein, 15 aa, Homo sapiens
  CDR3 for beta chain variable domain of TCR clone 248383 (TRBV2, TRBJ2-1)
CASSELAGSCNEQFF

SEQ ID NO: 496767 - protein, 14 aa, Homo sapiens
  CDR3 for alpha chain variable domain of TCR clone 248384 (TRAV9-2, TRAJ6)
CALSDPGGSYIPTF

SEQ ID NO: 496768 - protein, 14 aa, Homo sapiens
  CDR3 for beta chain variable domain of TCR clone 248384 (TRBV20-1, TRBJ1-1)
CSAQTRIGGTEAFF

SEQ ID NO: 496769 - protein, 12 aa, Homo sapiens
  CDR3 for alpha chain variable domain of TCR clone 248385 (TRAV21, TRAJ49)
CAVTNTGNQFYF

SEQ ID NO: 496770 - protein, 14 aa, Homo sapiens
  CDR3 for beta chain variable domain of TCR clone 248385 (TRBV7-2, TRBJ2-7)
CASSFLGRVYEQYF

SEQ ID NO: 496771 - protein, 14 aa, Homo sapiens
  CDR3 for alpha chain variable domain of TCR clone 248386 (TRAV17, TRAJ12)
CAILPMDSSYKVIF

SEQ ID NO: 496772 - protein, 11 aa, Homo sapiens
  CDR3 for beta chain variable domain of TCR clone 248386 (TRBV19, TRBJ1-1)
CASSIGSEAFF

SEQ ID NO: 496773 - protein, 14 aa, Homo sapiens
  CDR3 for alpha chain variable domain of TCR clone 248387 (TRAV17, TRAJ57)
CATDPQGGSEKLVF

SEQ ID NO: 496774 - protein, 14 aa, Homo sapiens
  CDR3 for beta chain variable domain of TCR clone 248387 (TRBV5-8, TRBJ2-3)
CAGSLGQGTDTQYF

SEQ ID NO: 496775 - protein, 14 aa, Homo sapiens
  CDR3 for alpha chain variable domain of TCR clone 248388 (TRAV1-1, TRAJ28)
CAAPSGAGSYQLTF

SEQ ID NO: 496776 - protein, 19 aa, Homo sapiens
  CDR3 for beta chain variable domain of TCR clone 248388 (TRBV2, TRBJ2-2)
CASSQPGLAGGGNTGELFF

SEQ ID NO: 496777 - protein, 13 aa, Homo sapiens
  CDR3 for alpha chain variable domain of TCR clone 248389 (TRAV6, TRAJ4)
CALLRGGSNKLIF

SEQ ID NO: 496778 - protein, 16 aa, Homo sapiens
  CDR3 for beta chain variable domain of TCR clone 248389 (TRBV5-1, TRBJ2-1)
CASSIRSGGSYNEQFF

SEQ ID NO: 496779 - protein, 16 aa, Homo sapiens
  CDR3 for alpha chain variable domain of TCR clone 248390 (TRAV13-1, TRAJ37)
CAASSLGSSNTGKLIF

SEQ ID NO: 496780 - protein, 12 aa, Homo sapiens
  CDR3 for beta chain variable domain of TCR clone 248390 (TRBV6-1, TRBJ2-5)
CTSSEGRETQYF

SEQ ID NO: 496781 - protein, 16 aa, Homo sapiens
  CDR3 for alpha chain variable domain of TCR clone 248391 (TRAV3, TRAJ10)
CAVRDMSAGGGNKLTF

SEQ ID NO: 496782 - protein, 14 aa, Homo sapiens
  CDR3 for beta chain variable domain of TCR clone 248391 (TRBV25-1, TRBJ1-1)
CASTHLGGNTEAFF

SEQ ID NO: 496783 - protein, 13 aa, Homo sapiens
  CDR3 for alpha chain variable domain of TCR clone 248392 (TRAV21, TRAJ57)
CAVTQGGSEKLVF

SEQ ID NO: 496784 - protein, 16 aa, Homo sapiens
  CDR3 for beta chain variable domain of TCR clone 248392 (TRBV7-9, TRBJ1-2)
CASSLGFSSGEDGYTF

SEQ ID NO: 496785 - protein, 11 aa, Homo sapiens
  CDR3 for alpha chain variable domain of TCR clone 248393 (TRAV2, TRAJ4)
CAAGGDNKLIF

SEQ ID NO: 496786 - protein, 13 aa, Homo sapiens
  CDR3 for beta chain variable domain of TCR clone 248393 (TRBV20-1, TRBJ1-1)
CSARVGGNTEAFF

SEQ ID NO: 496787 - protein, 13 aa, Homo sapiens
  CDR3 for alpha chain variable domain of TCR clone 248394 (TRAV34, TRAJ33)
CGADMNSNYQLIW

SEQ ID NO: 496788 - protein, 15 aa, Homo sapiens
  CDR3 for beta chain variable domain of TCR clone 248394 (TRBV7-6, TRBJ2-7)
CASSLEGQGAGEQYF

SEQ ID NO: 496789 - protein, 18 aa, Homo sapiens
  CDR3 for alpha chain variable domain of TCR clone 248395 (TRAV13-1, TRAJ52)
CAAKNPNAGGTSYGKLTF

SEQ ID NO: 496790 - protein, 14 aa, Homo sapiens
  CDR3 for beta chain variable domain of TCR clone 248395 (TRBV13, TRBJ2-3)
CASSSGSPTDTQYF

SEQ ID NO: 496791 - protein, 11 aa, Homo sapiens
  CDR3 for alpha chain variable domain of TCR clone 248396 (TRAV3, TRAJ21)
CAVGNFNKFYF

SEQ ID NO: 496792 - protein, 12 aa, Homo sapiens
  CDR3 for beta chain variable domain of TCR clone 248396 (TRBV14, TRBJ2-5)
CASSNLKETQYF

SEQ ID NO: 496793 - protein, 14 aa, Homo sapiens
  CDR3 for alpha chain variable domain of TCR clone 248397 (TRAV2, TRAJ9)
CAVEDRSGGFKTIF

SEQ ID NO: 496794 - protein, 17 aa, Homo sapiens
  CDR3 for beta chain variable domain of TCR clone 248397 (TRBV15, TRBJ1-2)
CATSGREIDVVNYGYTF

SEQ ID NO: 496795 - protein, 13 aa, Homo sapiens
  CDR3 for alpha chain variable domain of TCR clone 248398 (TRAV13-1, TRAJ21)
CAASKGNFNKFYF

SEQ ID NO: 496796 - protein, 14 aa, Homo sapiens
  CDR3 for beta chain variable domain of TCR clone 248398 (TRBV19, TRBJ2-1)
CASSRLASINEQFF

SEQ ID NO: 496797 - protein, 16 aa, Homo sapiens
  CDR3 for alpha chain variable domain of TCR clone 248399 (TRAV3, TRAJ21)
CAVRDIERGNFNKFYF

SEQ ID NO: 496798 - protein, 14 aa, Homo sapiens
  CDR3 for beta chain variable domain of TCR clone 248399 (TRBV7-9, TRBJ2-1)
CASSSMVGFGEQFF

SEQ ID NO: 496799 - protein, 12 aa, Homo sapiens
  CDR3 for alpha chain variable domain of TCR clone 248400 (TRAV12-3, TRAJ17)
CAMTLTGNKLTL

SEQ ID NO: 496800 - protein, 14 aa, Homo sapiens
  CDR3 for beta chain variable domain of TCR clone 248400 (TRBV19, TRBJ2-1)
CASPTFVLSGEQFF

SEQ ID NO: 496801 - protein, 13 aa, Homo sapiens
  CDR3 for alpha chain variable domain of TCR clone 248401 (TRAV35, TRAJ42)
CAGFPGSQGNLIV

SEQ ID NO: 496802 - protein, 14 aa, Homo sapiens
  CDR3 for beta chain variable domain of TCR clone 248401 (TRBV19, TRBJ2-1)
CASPTFVLSGEQFF

SEQ ID NO: 496803 - protein, 15 aa, Homo sapiens
  CDR3 for alpha chain variable domain of TCR clone 248402 (TRAV13-2, TRAJ5)
CAENPHWTGRRALTF

SEQ ID NO: 496804 - protein, 16 aa, Homo sapiens
  CDR3 for beta chain variable domain of TCR clone 248402 (TRBV7-9, TRBJ1-3)
CASSQTSGLRMCTIYF

SEQ ID NO: 496805 - protein, 16 aa, Homo sapiens
  CDR3 for alpha chain variable domain of TCR clone 248403 (TRAV12-3, TRAJ53)
CAMSPGSGGSNYKLTF

SEQ ID NO: 496806 - protein, 20 aa, Homo sapiens
  CDR3 for beta chain variable domain of TCR clone 248403 (TRBV7-8, TRBJ2-2)
CASSYLFPGPTIHITGELFF

SEQ ID NO: 496807 - protein, 11 aa, Homo sapiens
  CDR3 for alpha chain variable domain of TCR clone 248404 (TRAV12-2, TRAJ36)
CSVDGANNLFF

SEQ ID NO: 496808 - protein, 13 aa, Homo sapiens
  CDR3 for beta chain variable domain of TCR clone 248404 (TRBV28, TRBJ2-5)
CAGVSRGEETQYF

SEQ ID NO: 496809 - protein, 16 aa, Homo sapiens
  CDR3 for alpha chain variable domain of TCR clone 248405 (TRAV12-2, TRAJ32)
CAVNLGQGGATNMLIF

SEQ ID NO: 496810 - protein, 15 aa, Homo sapiens
  CDR3 for beta chain variable domain of TCR clone 248405 (TRBV20-1, TRBJ2-7)
CSARGPLAGGREQYF

SEQ ID NO: 496811 - protein, 14 aa, Homo sapiens
  CDR3 for alpha chain variable domain of TCR clone 248406 (TRAV35, TRAJ50)
CAGHRKTSYDKEIF

SEQ ID NO: 496812 - protein, 13 aa, Homo sapiens
  CDR3 for beta chain variable domain of TCR clone 248406 (TRBV7-7, TRBJ2-3)
CASSLSRADTQYF

SEQ ID NO: 496813 - protein, 12 aa, Homo sapiens
  CDR3 for alpha chain variable domain of TCR clone 248407 (TRAV13-1, TRAJ42)
VNYGGSQGNLIF

SEQ ID NO: 496814 - protein, 15 aa, Homo sapiens
  CDR3 for beta chain variable domain of TCR clone 248407 (TRBV20-1, TRBJ2-1)
CGASSAGSFYNEQFF

SEQ ID NO: 496815 - protein, 16 aa, Homo sapiens
  CDR3 for alpha chain variable domain of TCR clone 248408 (TRAV3, TRAJ37)
CAVRGKGSGNTGQLIF

SEQ ID NO: 496816 - protein, 20 aa, Homo sapiens
  CDR3 for beta chain variable domain of TCR clone 248408 (TRBV7-8, TRBJ2-2)
CASSHLFPGPTIHITGELFF

SEQ ID NO: 496817 - protein, 13 aa, Homo sapiens
  CDR3 for alpha chain variable domain of TCR clone 248409 (TRAV17, TRAJ9)
CATVYTGGFKTIF

SEQ ID NO: 496818 - protein, 14 aa, Homo sapiens
  CDR3 for beta chain variable domain of TCR clone 248409 (TRBV19, TRBJ2-5)
CASSMTGQQETQYF

SEQ ID NO: 496819 - protein, 16 aa, Homo sapiens
  CDR3 for alpha chain variable domain of TCR clone 248410 (TRAV30, TRAJ24)
CGTEIVDADSWGKFQF

SEQ ID NO: 496820 - protein, 16 aa, Homo sapiens
  CDR3 for beta chain variable domain of TCR clone 248410 (TRBV20-1, TRBJ1-1)
CSARALTHGMNTEAFF

SEQ ID NO: 496821 - protein, 18 aa, Homo sapiens
  CDR3 for alpha chain variable domain of TCR clone 248411 (TRAV16, TRAJ45)
CAQASYPSSGGGADGLTF

SEQ ID NO: 496822 - protein, 12 aa, Homo sapiens
  CDR3 for beta chain variable domain of TCR clone 248411 (TRBV11-3, TRBJ2-4)
CASSAGRVMQYF

SEQ ID NO: 496823 - protein, 14 aa, Homo sapiens
  CDR3 for alpha chain variable domain of TCR clone 248412 (TRAV1-2, TRAJ16)
CAESPVFRWPEAAL

SEQ ID NO: 496824 - protein, 14 aa, Homo sapiens
  CDR3 for beta chain variable domain of TCR clone 248412 (TRBV5-1, TRBJ2-5)
CASSLAGKQETQYF

SEQ ID NO: 496825 - protein, 14 aa, Homo sapiens
  CDR3 for alpha chain variable domain of TCR clone 248413 (TRAV35, TRAJ13)
CAGSPSGGYQKVTF

SEQ ID NO: 496826 - protein, 13 aa, Homo sapiens
  CDR3 for beta chain variable domain of TCR clone 248413 (TRBV29-1, TRBJ1-1)
CSVGDSRNSEAFF

SEQ ID NO: 496827 - protein, 14 aa, Homo sapiens
  CDR3 for alpha chain variable domain of TCR clone 248414 (TRAV17, TRAJ15)
CATTTNQAGTALIF

SEQ ID NO: 496828 - protein, 16 aa, Homo sapiens
  CDR3 for beta chain variable domain of TCR clone 248414 (TRBV4-1, TRBJ2-7)
CASSRGDIPNSYEQYF

SEQ ID NO: 496829 - protein, 12 aa, Homo sapiens
  CDR3 for alpha chain variable domain of TCR clone 248415 (TRAV8-3, TRAJ45)
CASSYQEEVLTD

SEQ ID NO: 496830 - protein, 13 aa, Homo sapiens
  CDR3 for beta chain variable domain of TCR clone 248415 (TRBV10-3, TRBJ2-7)
CASKLAVNYEQYF

SEQ ID NO: 496831 - protein, 14 aa, Homo sapiens
  CDR3 for alpha chain variable domain of TCR clone 248416 (TRAV22, TRAJ6)
CAGVGPGGSYVPTF

SEQ ID NO: 496832 - protein, 11 aa, Homo sapiens
  CDR3 for beta chain variable domain of TCR clone 248416 (TRBV20-1, TRBJ2-1)
CSLSSGSEQFF

SEQ ID NO: 496833 - protein, 15 aa, Homo sapiens
  CDR3 for alpha chain variable domain of TCR clone 248417 (TRAV27, TRAJ38)
CAARRNAGNNRKLIW

SEQ ID NO: 496834 - protein, 15 aa, Homo sapiens
  CDR3 for beta chain variable domain of TCR clone 248417 (TRBV4-1, TRBJ2-1)
CASSQAQREINEQFF

SEQ ID NO: 496835 - protein, 16 aa, Homo sapiens
  CDR3 for alpha chain variable domain of TCR clone 248418 (TRAV13-1, TRAJ48)
CAASIFGNFGNEKLTF

SEQ ID NO: 496836 - protein, 12 aa, Homo sapiens
  CDR3 for beta chain variable domain of TCR clone 248418 (TRBV14, TRBJ2-4)
CASSNLKSNQYF

SEQ ID NO: 496837 - protein, 12 aa, Homo sapiens
  CDR3 for alpha chain variable domain of TCR clone 248419 (TRAV17, TRAJ12)
CATLRSSYKLIF

SEQ ID NO: 496838 - protein, 14 aa, Homo sapiens
  CDR3 for beta chain variable domain of TCR clone 248419 (TRBV11-2, TRBJ2-1)
CASSPGSRDNEQFF

SEQ ID NO: 496839 - protein, 11 aa, Homo sapiens
  CDR3 for alpha chain variable domain of TCR clone 248420 (TRAV1-2, TRAJ20)
CAVANDYKLSF

SEQ ID NO: 496840 - protein, 14 aa, Homo sapiens
  CDR3 for beta chain variable domain of TCR clone 248420 (TRBV11-3, TRBJ2-7)
CASSPDRNTYEQYF

SEQ ID NO: 496841 - protein, 15 aa, Homo sapiens
  CDR3 for alpha chain variable domain of TCR clone 248421 (TRAV17, TRAJ56)
CATEPFTGANSKLIF

SEQ ID NO: 496842 - protein, 15 aa, Homo sapiens
  CDR3 for beta chain variable domain of TCR clone 248421 (TRBV28, TRBJ1-5)
CASSRTGGYVQPQHF

SEQ ID NO: 496843 - protein, 16 aa, Homo sapiens
  CDR3 for alpha chain variable domain of TCR clone 248422 (TRAV26-1, TRAJ50)
CIVIVEAGTSYDKVIF

SEQ ID NO: 496844 - protein, 13 aa, Homo sapiens
  CDR3 for beta chain variable domain of TCR clone 248422 (TRBV25-1, TRBJ1-2)
CASSENMGRGYTF

SEQ ID NO: 496845 - protein, 10 aa, Homo sapiens
  CDR3 for alpha chain variable domain of TCR clone 248423 (TRAV36/DV7, TRAJ13)
CAAGYQKVTF

SEQ ID NO: 496846 - protein, 15 aa, Homo sapiens
  CDR3 for beta chain variable domain of TCR clone 248423 (TRBV6-3, TRBJ2-7)
CASSSPGTVFYEQYF

SEQ ID NO: 496847 - protein, 12 aa, Homo sapiens
  CDR3 for alpha chain variable domain of TCR clone 248424 (TRAV13-1, TRAJ15)
CAANQAGAALIF

SEQ ID NO: 496848 - protein, 14 aa, Homo sapiens
  CDR3 for beta chain variable domain of TCR clone 248424 (TRBV20-1, TRBJ2-5)
CSARYRGLQETQYF

SEQ ID NO: 496849 - protein, 15 aa, Homo sapiens
  CDR3 for alpha chain variable domain of TCR clone 248425 (TRAV26-1, TRAJ29)
CIVRVEGSGNTPLVF

SEQ ID NO: 496850 - protein, 13 aa, Homo sapiens
  CDR3 for beta chain variable domain of TCR clone 248425 (TRBV25-1, TRBJ1-2)
CASSEAGASGYTF

SEQ ID NO: 496851 - protein, 12 aa, Homo sapiens
  CDR3 for alpha chain variable domain of TCR clone 248426 (TRAV27, TRAJ13)
CAGAGGYQKVTF

SEQ ID NO: 496852 - protein, 12 aa, Homo sapiens
  CDR3 for beta chain variable domain of TCR clone 248426 (TRBV19, TRBJ2-1)
CASSRQGAEQFF

SEQ ID NO: 496853 - protein, 15 aa, Homo sapiens
  CDR3 for alpha chain variable domain of TCR clone 248427 (TRAV4, TRAJ28)
CLVEGSGAGSSHLTF

SEQ ID NO: 496854 - protein, 15 aa, Homo sapiens
  CDR3 for beta chain variable domain of TCR clone 248427 (TRBV9, TRBJ2-3)
CASSVRGLAVDTQYF

SEQ ID NO: 496855 - protein, 16 aa, Homo sapiens
  CDR3 for alpha chain variable domain of TCR clone 248428 (TRAV26-1, TRAJ33)
CIVPFWGEDSSYQLIW

SEQ ID NO: 496856 - protein, 14 aa, Homo sapiens
  CDR3 for beta chain variable domain of TCR clone 248428 (TRBV6-3, TRBJ1-1)
CASSYHSKKTEAFF

SEQ ID NO: 496857 - protein, 11 aa, Homo sapiens
  CDR3 for alpha chain variable domain of TCR clone 248429 (TRAV17, TRAJ43)
CATHRSNDMRF

SEQ ID NO: 496858 - protein, 13 aa, Homo sapiens
  CDR3 for beta chain variable domain of TCR clone 248429 (TRBV28, TRBJ1-2)
CAGRDRGNYGYTF

SEQ ID NO: 496859 - protein, 15 aa, Homo sapiens
  CDR3 for alpha chain variable domain of TCR clone 248430 (TRAV38-2/DV8, TRAJ45)
CAYWDSGGGAVGLTF

SEQ ID NO: 496860 - protein, 14 aa, Homo sapiens
  CDR3 for beta chain variable domain of TCR clone 248430 (TRBV7-2, TRBJ2-7)
CASRSQGAAYEQYF

SEQ ID NO: 496861 - protein, 16 aa, Homo sapiens
  CDR3 for alpha chain variable domain of TCR clone 248431 (TRAV39, TRAJ32)
CAVDMEYGGATNKLIF

SEQ ID NO: 496862 - protein, 15 aa, Homo sapiens
  CDR3 for beta chain variable domain of TCR clone 248431 (TRBV12-4, TRBJ2-5)
CASSPPTGLQETQYF

SEQ ID NO: 496863 - protein, 19 aa, Homo sapiens
  CDR3 for alpha chain variable domain of TCR clone 248432 (TRAV1-2, TRAJ26)
CLLPLCCERPDHYGQNFVF

SEQ ID NO: 496864 - protein, 15 aa, Homo sapiens
  CDR3 for beta chain variable domain of TCR clone 248432 (TRBV9, TRBJ1-6)
CASSVAGTGDSPLHF

SEQ ID NO: 496865 - protein, 16 aa, Homo sapiens
  CDR3 for alpha chain variable domain of TCR clone 248433 (TRAV30, TRAJ24)
CGTEIVDADSWGKFQF

SEQ ID NO: 496866 - protein, 16 aa, Homo sapiens
  CDR3 for beta chain variable domain of TCR clone 248433 (TRBV19, TRBJ2-7)
CASSISAGGALYEQYF

SEQ ID NO: 496867 - protein, 11 aa, Homo sapiens
  CDR3 for alpha chain variable domain of TCR clone 248434 (TRAV21, TRAJ48)
CAVDGNEKLTF

SEQ ID NO: 496868 - protein, 16 aa, Homo sapiens
  CDR3 for beta chain variable domain of TCR clone 248434 (TRBV12-4, TRBJ1-5)
CDSSSGPRGSNQPQHF

SEQ ID NO: 496869 - protein, 14 aa, Homo sapiens
  CDR3 for alpha chain variable domain of TCR clone 248435 (TRAV17, TRAJ54)
CATDANQGAQKLGF

SEQ ID NO: 496870 - protein, 13 aa, Homo sapiens
  CDR3 for beta chain variable domain of TCR clone 248435 (TRBV4-2, TRBJ1-2)
CASSLSASGGYTF

SEQ ID NO: 496871 - protein, 13 aa, Homo sapiens
  CDR3 for alpha chain variable domain of TCR clone 248436 (TRAV26-1, TRAJ30)
CIVNMSRDDKIIF

SEQ ID NO: 496872 - protein, 16 aa, Homo sapiens
  CDR3 for beta chain variable domain of TCR clone 248436 (TRBV16, TRBJ2-7)
CASSRPAGGSSYEQYF

SEQ ID NO: 496873 - protein, 13 aa, Homo sapiens
  CDR3 for alpha chain variable domain of TCR clone 248437 (TRAV12-1, TRAJ33)
CGDAPDSNYQLIW

SEQ ID NO: 496874 - protein, 17 aa, Homo sapiens
  CDR3 for beta chain variable domain of TCR clone 248437 (TRBV20-1, TRBJ2-1)
CSAPPRLAGTRYNEQFF

SEQ ID NO: 496875 - protein, 17 aa, Homo sapiens
  CDR3 for alpha chain variable domain of TCR clone 248438 (TRAV12-2, TRAJ4)
CAVNVRPVSGDYNKLIF

SEQ ID NO: 496876 - protein, 17 aa, Homo sapiens
  CDR3 for beta chain variable domain of TCR clone 248438 (TRBV6-3, TRBJ2-1)
CASSYSSGTRGLDEQFF

SEQ ID NO: 496877 - protein, 15 aa, Homo sapiens
  CDR3 for alpha chain variable domain of TCR clone 248439 (TRAV12-3, TRAJ6)
CAMSATTGGSYIPTF

SEQ ID NO: 496878 - protein, 11 aa, Homo sapiens
  CDR3 for beta chain variable domain of TCR clone 248439 (TRBV4-1, TRBJ1-4)
CASKENEKLFF

SEQ ID NO: 496879 - protein, 10 aa, Homo sapiens
  CDR3 for alpha chain variable domain of TCR clone 248440 (TRAV12-1, TRAJ43)
CVVHNNDMRF

SEQ ID NO: 496880 - protein, 13 aa, Homo sapiens
  CDR3 for beta chain variable domain of TCR clone 248440 (TRBV12-4, TRBJ1-2)
CASSSGLTVISAS

SEQ ID NO: 496881 - protein, 15 aa, Homo sapiens
  CDR3 for alpha chain variable domain of TCR clone 248441 (TRAV3, TRAJ29)
CAVRAPLSGNKPLFF

SEQ ID NO: 496882 - protein, 15 aa, Homo sapiens
  CDR3 for beta chain variable domain of TCR clone 248441 (TRBV28, TRBJ1-1)
CASRTKGGLNTEAFF

SEQ ID NO: 496883 - protein, 14 aa, Homo sapiens
  CDR3 for alpha chain variable domain of TCR clone 248442 (TRAV20, TRAJ4)
CAVRLGGGYNKLIF

SEQ ID NO: 496884 - protein, 14 aa, Homo sapiens
  CDR3 for beta chain variable domain of TCR clone 248442 (TRBV6-1, TRBJ1-3)
CASVQGGGGNTIYF

SEQ ID NO: 496885 - protein, 14 aa, Homo sapiens
  CDR3 for alpha chain variable domain of TCR clone 248443 (TRAV21, TRAJ58)
CAVRRGRSGSRLTF

SEQ ID NO: 496886 - protein, 13 aa, Homo sapiens
  CDR3 for beta chain variable domain of TCR clone 248443 (TRBV7-2, TRBJ1-6)
CASSFKFDSPLHF

SEQ ID NO: 496887 - protein, 14 aa, Homo sapiens
  CDR3 for alpha chain variable domain of TCR clone 248444 (TRAV12-2, TRAJ17)
CAVLFKAAGNKLTF

SEQ ID NO: 496888 - protein, 17 aa, Homo sapiens
  CDR3 for beta chain variable domain of TCR clone 248444 (TRBV7-3, TRBJ2-5)
CASSLGSGRSGSETQYF

SEQ ID NO: 496889 - protein, 13 aa, Homo sapiens
  CDR3 for alpha chain variable domain of TCR clone 248445 (TRAV38-1, TRAJ42)
CARWGGSQGNLIF

SEQ ID NO: 496890 - protein, 17 aa, Homo sapiens
  CDR3 for beta chain variable domain of TCR clone 248445 (TRBV20-1, TRBJ2-1)
CSARDPLAVVWDNEQFF

SEQ ID NO: 496891 - protein, 17 aa, Homo sapiens
  CDR3 for alpha chain variable domain of TCR clone 248446 (TRAV36/DV7, TRAJ52)
CAVAQRAGGTSYGKLTF

SEQ ID NO: 496892 - protein, 14 aa, Homo sapiens
  CDR3 for beta chain variable domain of TCR clone 248446 (TRBV11-2, TRBJ2-5)
CASRPLAGRETQYF

SEQ ID NO: 496893 - protein, 14 aa, Homo sapiens
  CDR3 for alpha chain variable domain of TCR clone 248447 (TRAV12-2, TRAJ45)
CAVYSGGGANGLTF

SEQ ID NO: 496894 - protein, 13 aa, Homo sapiens
  CDR3 for beta chain variable domain of TCR clone 248447 (TRBV7-9, TRBJ1-2)
CASSLKQNYGYTF

SEQ ID NO: 496895 - protein, 13 aa, Homo sapiens
  CDR3 for alpha chain variable domain of TCR clone 248448 (TRAV30, TRAJ8)
CGTPNPGFQKLVF

SEQ ID NO: 496896 - protein, 12 aa, Homo sapiens
  CDR3 for beta chain variable domain of TCR clone 248448 (TRBV6-3, TRBJ2-1)
CASSGSYNEQFF

SEQ ID NO: 496897 - protein, 17 aa, Homo sapiens
  CDR3 for alpha chain variable domain of TCR clone 248449 (TRAV36/DV7, TRAJ52)
CAVAQRAGGTSYGKLTF

SEQ ID NO: 496898 - protein, 14 aa, Homo sapiens
  CDR3 for beta chain variable domain of TCR clone 248449 (TRBV6-3, TRBJ1-1)
CASSYQRRDTEAFF

SEQ ID NO: 496899 - protein, 14 aa, Homo sapiens
  CDR3 for alpha chain variable domain of TCR clone 248450 (TRAV9-2, TRAJ36)
RALPWRTGANNLFF

SEQ ID NO: 496900 - protein, 14 aa, Homo sapiens
  CDR3 for beta chain variable domain of TCR clone 248450 (TRBV2, TRBJ1-2)
CASSELQVKYGYTF

SEQ ID NO: 496901 - protein, 15 aa, Homo sapiens
  CDR3 for alpha chain variable domain of TCR clone 248451 (TRAV38-1, TRAJ37)
CAFIFGSGNTGKLIF

SEQ ID NO: 496902 - protein, 15 aa, Homo sapiens
  CDR3 for beta chain variable domain of TCR clone 248451 (TRBV11-3, TRBJ2-3)
CASLKDGREGDTQYF

SEQ ID NO: 496903 - protein, 10 aa, Homo sapiens
  CDR3 for alpha chain variable domain of TCR clone 248452 (TRAV1-2, TRAJ20)
CALNDYKLSF

SEQ ID NO: 496904 - protein, 13 aa, Homo sapiens
  CDR3 for beta chain variable domain of TCR clone 248452 (TRBV10-3, TRBJ1-2)
CAISERDSYGYTF

SEQ ID NO: 496905 - protein, 18 aa, Homo sapiens
  CDR3 for alpha chain variable domain of TCR clone 248453 (TRAV26-1, TRAJ5)
CIVRVVPPRDTGRRVLTF

SEQ ID NO: 496906 - protein, 15 aa, Homo sapiens
  CDR3 for beta chain variable domain of TCR clone 248453 (TRBV7-9, TRBJ2-7)
CASSLPMGQANEQYF

SEQ ID NO: 496907 - protein, 16 aa, Homo sapiens
  CDR3 for alpha chain variable domain of TCR clone 248454 (TRAV36/DV7, TRAJ52)
CAVEDAGGASYGKLTF

SEQ ID NO: 496908 - protein, 16 aa, Homo sapiens
  CDR3 for beta chain variable domain of TCR clone 248454 (TRBV2, TRBJ2-1)
CASRSPAGGKYNEQFF

SEQ ID NO: 496909 - protein, 16 aa, Homo sapiens
  CDR3 for alpha chain variable domain of TCR clone 248455 (TRAV26-1, TRAJ32)
CIVRTNSGSATNKLIF

SEQ ID NO: 496910 - protein, 14 aa, Homo sapiens
  CDR3 for beta chain variable domain of TCR clone 248455 (TRBV27, TRBJ1-1)
CASSLLSGLSEAFF

SEQ ID NO: 496911 - protein, 12 aa, Homo sapiens
  CDR3 for alpha chain variable domain of TCR clone 248456 (TRAV16, TRAJ27)
CALYHQCRQINL

SEQ ID NO: 496912 - protein, 16 aa, Homo sapiens
  CDR3 for beta chain variable domain of TCR clone 248456 (TRBV11-2, TRBJ1-5)
CISVPAAYRGRQAQHF

SEQ ID NO: 496913 - protein, 10 aa, Homo sapiens
  CDR3 for alpha chain variable domain of TCR clone 248457 (TRAV20, TRAJ22)
CAATARQLTF

SEQ ID NO: 496914 - protein, 14 aa, Homo sapiens
  CDR3 for beta chain variable domain of TCR clone 248457 (TRBV19, TRBJ2-1)
CASSMGSGATEQFF

SEQ ID NO: 496915 - protein, 13 aa, Homo sapiens
  CDR3 for alpha chain variable domain of TCR clone 248458 (TRAV20, TRAJ21)
CAVEGYNFNKFYF

SEQ ID NO: 496916 - protein, 17 aa, Homo sapiens
  CDR3 for beta chain variable domain of TCR clone 248458 (TRBV4-2, TRBJ1-1)
CASTQFGGGSGNTEAFF

SEQ ID NO: 496917 - protein, 11 aa, Homo sapiens
  CDR3 for alpha chain variable domain of TCR clone 248459 (TRAV1-1, TRAJ23)
CAVRQGGKLIF

SEQ ID NO: 496918 - protein, 19 aa, Homo sapiens
  CDR3 for beta chain variable domain of TCR clone 248459 (TRBV7-8, TRBJ2-2)
CQQPLISRADYPYHRELFF

SEQ ID NO: 496919 - protein, 17 aa, Homo sapiens
  CDR3 for alpha chain variable domain of TCR clone 248460 (TRAV3, TRAJ38)
CAVRDCLNAGNNRKLLW

SEQ ID NO: 496920 - protein, 12 aa, Homo sapiens
  CDR3 for beta chain variable domain of TCR clone 248460 (TRBV11-2, TRBJ2-2)
CASSLPTGELFF

SEQ ID NO: 496921 - protein, 13 aa, Homo sapiens
  CDR3 for alpha chain variable domain of TCR clone 248461 (TRAV27, TRAJ56)
CAGKPGANSKLTF

SEQ ID NO: 496922 - protein, 14 aa, Homo sapiens
  CDR3 for beta chain variable domain of TCR clone 248461 (TRBV5-1, TRBJ2-7)
CASSRGESLYEQYF

SEQ ID NO: 496923 - protein, 14 aa, Homo sapiens
  CDR3 for alpha chain variable domain of TCR clone 248462 (TRAV17, TRAJ54)
CATDANQGAQKLVL

SEQ ID NO: 496924 - protein, 12 aa, Homo sapiens
  CDR3 for beta chain variable domain of TCR clone 248462 (TRBV6-3, TRBJ2-1)
CASSGSYNEQFF

SEQ ID NO: 496925 - protein, 23 aa, Homo sapiens
  CDR3 for alpha chain variable domain of TCR clone 248463 (TRAV12-2, TRAJ36)
SLLIRDSQPSDSATLERANNLFF

SEQ ID NO: 496926 - protein, 15 aa, Homo sapiens
  CDR3 for beta chain variable domain of TCR clone 248463 (TRBV7-3, TRBJ2-2)
CQQLKAGTLSGELFF

SEQ ID NO: 496927 - protein, 15 aa, Homo sapiens
  CDR3 for alpha chain variable domain of TCR clone 248464 (TRAV2, TRAJ22)
CAVPSRGGSARQLTF

SEQ ID NO: 496928 - protein, 14 aa, Homo sapiens
  CDR3 for beta chain variable domain of TCR clone 248464 (TRBV5-1, TRBJ2-5)
CASSLAGKQETQYF

SEQ ID NO: 496929 - protein, 15 aa, Homo sapiens
  CDR3 for alpha chain variable domain of TCR clone 248465 (TRAV12-1, TRAJ42)
CVVTRDGGSRGNLIF

SEQ ID NO: 496930 - protein, 14 aa, Homo sapiens
  CDR3 for beta chain variable domain of TCR clone 248465 (TRBV11-2, TRBJ2-3)
CASSLGGGANTQYF

SEQ ID NO: 496931 - protein, 14 aa, Homo sapiens
  CDR3 for alpha chain variable domain of TCR clone 248466 (TRAV1-2, TRAJ8)
CALREDTGFQKLVF

SEQ ID NO: 496932 - protein, 16 aa, Homo sapiens
  CDR3 for beta chain variable domain of TCR clone 248466 (TRBV12-5, TRBJ2-5)
CASGPRTSGNQETQYF

SEQ ID NO: 496933 - protein, 17 aa, Homo sapiens
  CDR3 for alpha chain variable domain of TCR clone 248467 (TRAV21, TRAJ24)
CAGIRLRSTHSWGKLQF

SEQ ID NO: 496934 - protein, 15 aa, Homo sapiens
  CDR3 for beta chain variable domain of TCR clone 248467 (TRBV7-2, TRBJ2-3)
CASSPRGLSTDTQYF

SEQ ID NO: 496935 - protein, 16 aa, Homo sapiens
  CDR3 for alpha chain variable domain of TCR clone 248468 (TRAV3, TRAJ10)
CAVRDMMAGGGNKLTF

SEQ ID NO: 496936 - protein, 13 aa, Homo sapiens
  CDR3 for beta chain variable domain of TCR clone 248468 (TRBV4-2, TRBJ1-1)
CASSQAGNTEAFF

SEQ ID NO: 496937 - protein, 14 aa, Homo sapiens
  CDR3 for alpha chain variable domain of TCR clone 248469 (TRAV21, TRAJ9)
CCGGGGTGGFKTIL

SEQ ID NO: 496938 - protein, 13 aa, Homo sapiens
  CDR3 for beta chain variable domain of TCR clone 248469 (TRBV12-4, TRBJ1-2)
CASSSGLTVISTF

SEQ ID NO: 496939 - protein, 11 aa, Homo sapiens
  CDR3 for alpha chain variable domain of TCR clone 248470 (TRAV29/DV5, TRAJ37)
CATSNTGKLIF

SEQ ID NO: 496940 - protein, 13 aa, Homo sapiens
  CDR3 for beta chain variable domain of TCR clone 248470 (TRBV12-4, TRBJ2-3)
CASSSPLGGTQYV

SEQ ID NO: 496941 - protein, 17 aa, Homo sapiens
  CDR3 for alpha chain variable domain of TCR clone 248471 (TRAV3, TRAJ6)
CAVRDGPRAGGSKIPTF

SEQ ID NO: 496942 - protein, 14 aa, Homo sapiens
  CDR3 for beta chain variable domain of TCR clone 248471 (TRBV7-2, TRBJ2-7)
CASSSKTSFYEQYF

SEQ ID NO: 496943 - protein, 13 aa, Homo sapiens
  CDR3 for alpha chain variable domain of TCR clone 248472 (TRAV36/DV7, TRAJ49)
CAVEANTGNQFYF

SEQ ID NO: 496944 - protein, 14 aa, Homo sapiens
  CDR3 for beta chain variable domain of TCR clone 248472 (TRBV20-1, TRBJ2-5)
CSASSGRAAENQYF

SEQ ID NO: 496945 - protein, 16 aa, Homo sapiens
  CDR3 for alpha chain variable domain of TCR clone 248473 (TRAV3, TRAJ37)
CAVRGKGSGNTGKLIF

SEQ ID NO: 496946 - protein, 12 aa, Homo sapiens
  CDR3 for beta chain variable domain of TCR clone 248473 (TRBV11-2, TRBJ2-7)
CASSLPTYEQYF

SEQ ID NO: 496947 - protein, 14 aa, Homo sapiens
  CDR3 for alpha chain variable domain of TCR clone 248474 (TRAV1-2, TRAJ16)
CAVNRFSDGQKLPF

SEQ ID NO: 496948 - protein, 15 aa, Homo sapiens
  CDR3 for beta chain variable domain of TCR clone 248474 (TRBV9, TRBJ1-6)
CASSVAGTGDSPLYF

SEQ ID NO: 496949 - protein, 10 aa, Homo sapiens
  CDR3 for alpha chain variable domain of TCR clone 248475 (TRAV8-4, TRAJ43)
CAWSADDIRF

SEQ ID NO: 496950 - protein, 15 aa, Homo sapiens
  CDR3 for beta chain variable domain of TCR clone 248475 (TRBV5-1, TRBJ2-3)
CASSVTSGSTDTQYF

SEQ ID NO: 496951 - protein, 14 aa, Homo sapiens
  CDR3 for alpha chain variable domain of TCR clone 248476 (TRAV17, TRAJ57)
CATDPQGRSEKLVF

SEQ ID NO: 496952 - protein, 16 aa, Homo sapiens
  CDR3 for beta chain variable domain of TCR clone 248476 (TRBV2, TRBJ2-3)
CASSTSVEGVTDTQYF

SEQ ID NO: 496953 - protein, 14 aa, Homo sapiens
  CDR3 for alpha chain variable domain of TCR clone 248477 (TRAV8-4, TRAJ13)
CAVTLSRGYQKVTF

SEQ ID NO: 496954 - protein, 13 aa, Homo sapiens
  CDR3 for beta chain variable domain of TCR clone 248477 (TRBV11-3, TRBJ2-7)
CASSLDKLYEQYF

SEQ ID NO: 496955 - protein, 13 aa, Homo sapiens
  CDR3 for alpha chain variable domain of TCR clone 248478 (TRAV25, TRAJ26)
CAGMDNYGQNFVF

SEQ ID NO: 496956 - protein, 12 aa, Homo sapiens
  CDR3 for beta chain variable domain of TCR clone 248478 (TRBV5-1, TRBJ2-4)
LAGEWTKNIQYF

SEQ ID NO: 496957 - protein, 14 aa, Homo sapiens
  CDR3 for alpha chain variable domain of TCR clone 248479 (TRAV8-3, TRAJ4)
CAVGAAGGYNKLIF

SEQ ID NO: 496958 - protein, 16 aa, Homo sapiens
  CDR3 for beta chain variable domain of TCR clone 248479 (TRBV7-2, TRBJ1-2)
CTSSRQGGGANYGYTF

SEQ ID NO: 496959 - protein, 13 aa, Homo sapiens
  CDR3 for alpha chain variable domain of TCR clone 248480 (TRAV8-3, TRAJ44)
CAVVPGTASKLTF

SEQ ID NO: 496960 - protein, 14 aa, Homo sapiens
  CDR3 for beta chain variable domain of TCR clone 248480 (TRBV11-2, TRBJ2-3)
CASSRLARRDTQYF

SEQ ID NO: 496961 - protein, 13 aa, Homo sapiens
  CDR3 for alpha chain variable domain of TCR clone 248481 (TRAV27, TRAJ43)
CGGAGNNNNDMRF

SEQ ID NO: 496962 - protein, 14 aa, Homo sapiens
  CDR3 for beta chain variable domain of TCR clone 248481 (TRBV7-2, TRBJ2-7)
CASRSQGAAYEQYF

SEQ ID NO: 496963 - protein, 15 aa, Homo sapiens
  CDR3 for alpha chain variable domain of TCR clone 248482 (TRAV21, TRAJ24)
CAARSSTDSWGKSQF

SEQ ID NO: 496964 - protein, 14 aa, Homo sapiens
  CDR3 for beta chain variable domain of TCR clone 248482 (TRBV19, TRBJ2-1)
CASPTFVLSGEQFF

SEQ ID NO: 496965 - protein, 16 aa, Homo sapiens
  CDR3 for alpha chain variable domain of TCR clone 248483 (TRAV16, TRAJ4)
CALSRMFSGSYNKLFF

SEQ ID NO: 496966 - protein, 16 aa, Homo sapiens
  CDR3 for beta chain variable domain of TCR clone 248483 (TRBV24-1, TRBJ2-3)
CATSDPGTGATDTQYF

SEQ ID NO: 496967 - protein, 15 aa, Homo sapiens
  CDR3 for alpha chain variable domain of TCR clone 248484 (TRAV13-1, TRAJ5)
CAASPRGHGQESTYF

SEQ ID NO: 496968 - protein, 13 aa, Homo sapiens
  CDR3 for beta chain variable domain of TCR clone 248484 (TRBV6-5, TRBJ2-1)
CAGRGRVGNEQFF

SEQ ID NO: 496969 - protein, 13 aa, Homo sapiens
  CDR3 for alpha chain variable domain of TCR clone 248485 (TRAV1-2, TRAJ9)
CAALNTGGFKTIF

SEQ ID NO: 496970 - protein, 13 aa, Homo sapiens
  CDR3 for beta chain variable domain of TCR clone 248485 (TRBV12-4, TRBJ2-3)
CASSSPLGGTQYF

SEQ ID NO: 496971 - protein, 13 aa, Homo sapiens
  CDR3 for alpha chain variable domain of TCR clone 248486 (TRAV38-1, TRAJ42)
CARWGGSQGNPIV

SEQ ID NO: 496972 - protein, 17 aa, Homo sapiens
  CDR3 for beta chain variable domain of TCR clone 248486 (TRBV20-1, TRBJ2-1)
CSARDPLAGVWDNEQFF

SEQ ID NO: 496973 - protein, 13 aa, Homo sapiens
  CDR3 for alpha chain variable domain of TCR clone 248487 (TRAV12-3, TRAJ13)
CAMGTGGYQKVTF

SEQ ID NO: 496974 - protein, 14 aa, Homo sapiens
  CDR3 for beta chain variable domain of TCR clone 248487 (TRBV7-2, TRBJ2-5)
CASSTGGELETQYF

SEQ ID NO: 496975 - protein, 14 aa, Homo sapiens
  CDR3 for alpha chain variable domain of TCR clone 248488 (TRAV26-1, TRAJ48)
CIVTVGFGNEKLTF

SEQ ID NO: 496976 - protein, 13 aa, Homo sapiens
  CDR3 for beta chain variable domain of TCR clone 248488 (TRBV11-3, TRBJ2-3)
CASSHDTKDTQYF

SEQ ID NO: 496977 - protein, 17 aa, Homo sapiens
  CDR3 for alpha chain variable domain of TCR clone 248489 (TRAV3, TRAJ6)
CAVRDGPRAGGSYIPTF

SEQ ID NO: 496978 - protein, 15 aa, Homo sapiens
  CDR3 for beta chain variable domain of TCR clone 248489 (TRBV18, TRBJ1-1)
CASSPSSWVNTEAFF

SEQ ID NO: 496979 - protein, 14 aa, Homo sapiens
  CDR3 for alpha chain variable domain of TCR clone 248490 (TRAV23/DV6, TRAJ49)
CAASKSFVGNQFYF

SEQ ID NO: 496980 - protein, 14 aa, Homo sapiens
  CDR3 for beta chain variable domain of TCR clone 248490 (TRBV19, TRBJ2-1)
CASPTFVLSGEQFF

SEQ ID NO: 496981 - protein, 17 aa, Homo sapiens
  CDR3 for alpha chain variable domain of TCR clone 248491 (TRAV26-1, TRAJ37)
CIVRVITVSSNTGKLIF

SEQ ID NO: 496982 - protein, 14 aa, Homo sapiens
  CDR3 for beta chain variable domain of TCR clone 248491 (TRBV6-1, TRBJ1-3)
CASVQGGGGNTMYF

SEQ ID NO: 496983 - protein, 10 aa, Homo sapiens
  CDR3 for alpha chain variable domain of TCR clone 248492 (TRAV21, TRAJ20)
CAVNVGRLQA

SEQ ID NO: 496984 - protein, 15 aa, Homo sapiens
  CDR3 for beta chain variable domain of TCR clone 248492 (TRBV7-3, TRBJ2-1)
CASSPTGGGEVEQFF

SEQ ID NO: 496985 - protein, 12 aa, Homo sapiens
  CDR3 for alpha chain variable domain of TCR clone 248493 (TRAV12-2, TRAJ8)
CVVNTGFQKLVF

SEQ ID NO: 496986 - protein, 15 aa, Homo sapiens
  CDR3 for beta chain variable domain of TCR clone 248493 (TRBV7-8, TRBJ1-5)
CASSLERRGLEPQHF

SEQ ID NO: 496987 - protein, 13 aa, Homo sapiens
  CDR3 for alpha chain variable domain of TCR clone 248494 (TRAV21, TRAJ26)
CAVLDNYGQNFVF

SEQ ID NO: 496988 - protein, 16 aa, Homo sapiens
  CDR3 for beta chain variable domain of TCR clone 248494 (TRBV29-1, TRBJ2-2)
CSVETRPSGNTGELFF

SEQ ID NO: 496989 - protein, 15 aa, Homo sapiens
  CDR3 for alpha chain variable domain of TCR clone 248495 (TRAV8-3, TRAJ15)
CAVGAPNQAGTARIF

SEQ ID NO: 496990 - protein, 14 aa, Homo sapiens
  CDR3 for beta chain variable domain of TCR clone 248495 (TRBV20-1, TRBJ2-1)
CSPDDEASYNEQFF

SEQ ID NO: 496991 - protein, 13 aa, Homo sapiens
  CDR3 for alpha chain variable domain of TCR clone 248496 (TRAV38-1, TRAJ42)
CARWGGSQGNLIV

SEQ ID NO: 496992 - protein, 10 aa, Homo sapiens
  CDR3 for beta chain variable domain of TCR clone 248496 (TRBV2, TRBJ2-5)
CASSAATPYF

SEQ ID NO: 496993 - protein, 14 aa, Homo sapiens
  CDR3 for alpha chain variable domain of TCR clone 248497 (TRAV12-2, TRAJ13)
CAVKKTGGYQKVTF

SEQ ID NO: 496994 - protein, 13 aa, Homo sapiens
  CDR3 for beta chain variable domain of TCR clone 248497 (TRBV6-3, TRBJ1-1)
CASRPNMNAEAFF

SEQ ID NO: 496995 - protein, 16 aa, Homo sapiens
  CDR3 for alpha chain variable domain of TCR clone 248498 (TRAV3, TRAJ10)
CAVRDMRAGGGNKLNF

SEQ ID NO: 496996 - protein, 15 aa, Homo sapiens
  CDR3 for beta chain variable domain of TCR clone 248498 (TRBV11-2, TRBJ1-2)
CASSLEGVQRNGYTF

SEQ ID NO: 496997 - protein, 14 aa, Homo sapiens
  CDR3 for alpha chain variable domain of TCR clone 248499 (TRAV23/DV6, TRAJ8)
CAASKNTGFQKIVF

SEQ ID NO: 496998 - protein, 16 aa, Homo sapiens
  CDR3 for beta chain variable domain of TCR clone 248499 (TRBV4-1, TRBJ2-6)
CASSQVGDPGANVLTF

SEQ ID NO: 496999 - protein, 13 aa, Homo sapiens
  CDR3 for alpha chain variable domain of TCR clone 248500 (TRAV12-2, TRAJ20)
CAGNRFDDYKLSF

SEQ ID NO: 497000 - protein, 12 aa, Homo sapiens
  CDR3 for beta chain variable domain of TCR clone 248500 (TRBV28, TRBJ2-3)
CASSLYRDTQYF

SEQ ID NO: 497001 - protein, 14 aa, Homo sapiens
  CDR3 for alpha chain variable domain of TCR clone 248501 (TRAV12-2, TRAJ40)
CAAKIPSGTYKYIF

SEQ ID NO: 497002 - protein, 17 aa, Homo sapiens
  CDR3 for beta chain variable domain of TCR clone 248501 (TRBV7-8, TRBJ2-6)
CASSAGTGGAGANVLTF

SEQ ID NO: 497003 - protein, 14 aa, Homo sapiens
  CDR3 for alpha chain variable domain of TCR clone 248502 (TRAV17, TRAJ6)
CATDASGGSYIPTF

SEQ ID NO: 497004 - protein, 19 aa, Homo sapiens
  CDR3 for beta chain variable domain of TCR clone 248502 (TRBV4-3, TRBJ2-7)
CASSQDFIGWQVTPYELYF

SEQ ID NO: 497005 - protein, 11 aa, Homo sapiens
  CDR3 for alpha chain variable domain of TCR clone 248503 (TRAV1-2, TRAJ31)
CAVTNNARLMF

SEQ ID NO: 497006 - protein, 14 aa, Homo sapiens
  CDR3 for beta chain variable domain of TCR clone 248503 (TRBV20-1, TRBJ2-7)
CSAWTALSSYEQYF

SEQ ID NO: 497007 - protein, 13 aa, Homo sapiens
  CDR3 for alpha chain variable domain of TCR clone 248504 (TRAV12-1, TRAJ37)
CVVNIDNTGKLIF

SEQ ID NO: 497008 - protein, 14 aa, Homo sapiens
  CDR3 for beta chain variable domain of TCR clone 248504 (TRBV6-5, TRBJ1-2)
CASSYDGTGGGYTF

SEQ ID NO: 497009 - protein, 15 aa, Homo sapiens
  CDR3 for alpha chain variable domain of TCR clone 248505 (TRAV3, TRAJ36)
CAVRASQTGANNLFF

SEQ ID NO: 497010 - protein, 16 aa, Homo sapiens
  CDR3 for beta chain variable domain of TCR clone 248505 (TRBV4-3, TRBJ2-7)
CASSPRTSGRSYEQYF

SEQ ID NO: 497011 - protein, 15 aa, Homo sapiens
  CDR3 for alpha chain variable domain of TCR clone 248506 (TRAV26-1, TRAJ44)
CIVRANTGTASKLTF

SEQ ID NO: 497012 - protein, 13 aa, Homo sapiens
  CDR3 for beta chain variable domain of TCR clone 248506 (TRBV5-4, TRBJ2-5)
CASSRQEGETQYF

SEQ ID NO: 497013 - protein, 12 aa, Homo sapiens
  CDR3 for alpha chain variable domain of TCR clone 248507 (TRAV16, TRAJ10)
CSRTGGGNKLTF

SEQ ID NO: 497014 - protein, 15 aa, Homo sapiens
  CDR3 for beta chain variable domain of TCR clone 248507 (TRBV11-2, TRBJ1-3)
CASSAHSSSGNTIYF

SEQ ID NO: 497015 - protein, 12 aa, Homo sapiens
  CDR3 for alpha chain variable domain of TCR clone 248508 (TRAV12-3, TRAJ21)
CAMFNNFNKFYF

SEQ ID NO: 497016 - protein, 16 aa, Homo sapiens
  CDR3 for beta chain variable domain of TCR clone 248508 (TRBV7-9, TRBJ1-2)
CASSLAPLRAAYGYTV

SEQ ID NO: 497017 - protein, 14 aa, Homo sapiens
  CDR3 for alpha chain variable domain of TCR clone 248509 (TRAV12-2, TRAJ36)
CAVNPPTGANNLFF

SEQ ID NO: 497018 - protein, 13 aa, Homo sapiens
  CDR3 for beta chain variable domain of TCR clone 248509 (TRBV19, TRBJ1-2)
CASSVPGQDGYTF

SEQ ID NO: 497019 - protein, 15 aa, Homo sapiens
  CDR3 for alpha chain variable domain of TCR clone 248510 (TRAV3, TRAJ16)
RAVRDGVSDGQKLLF

SEQ ID NO: 497020 - protein, 14 aa, Homo sapiens
  CDR3 for beta chain variable domain of TCR clone 248510 (TRBV19, TRBJ2-1)
CASPTFVLSGEQFF

SEQ ID NO: 497021 - protein, 15 aa, Homo sapiens
  CDR3 for alpha chain variable domain of TCR clone 248511 (TRAV17, TRAJ22)
CATVAPSGSARQLTF

SEQ ID NO: 497022 - protein, 15 aa, Homo sapiens
  CDR3 for beta chain variable domain of TCR clone 248511 (TRBV5-1, TRBJ2-1)
CASSPPRAPYNEQFF

SEQ ID NO: 497023 - protein, 14 aa, Homo sapiens
  CDR3 for alpha chain variable domain of TCR clone 248512 (TRAV12-2, TRAJ45)
CAVNIGGGADGLTF

SEQ ID NO: 497024 - protein, 16 aa, Homo sapiens
  CDR3 for beta chain variable domain of TCR clone 248512 (TRBV24-1, TRBJ2-3)
CATSDRRQDLTDTQYF

SEQ ID NO: 497025 - protein, 14 aa, Homo sapiens
  CDR3 for alpha chain variable domain of TCR clone 248513 (TRAV17, TRAJ16)
CATADSSDGQKLLF

SEQ ID NO: 497026 - protein, 15 aa, Homo sapiens
  CDR3 for beta chain variable domain of TCR clone 248513 (TRBV18, TRBJ2-1)
CASSPPSASYNEQFF

SEQ ID NO: 497027 - protein, 17 aa, Homo sapiens
  CDR3 for alpha chain variable domain of TCR clone 248514 (TRAV3, TRAJ6)
CAVRDAPRAGGSYIPPF

SEQ ID NO: 497028 - protein, 14 aa, Homo sapiens
  CDR3 for beta chain variable domain of TCR clone 248514 (TRBV7-2, TRBJ2-7)
CASSPKTSFYEQYF

SEQ ID NO: 497029 - protein, 15 aa, Homo sapiens
  CDR3 for alpha chain variable domain of TCR clone 248515 (TRAV26-1, TRAJ3)
CIVRSGYSSASKLIF

SEQ ID NO: 497030 - protein, 14 aa, Homo sapiens
  CDR3 for beta chain variable domain of TCR clone 248515 (TRBV13, TRBJ2-5)
CASYRRLAEETQYF

SEQ ID NO: 497031 - protein, 13 aa, Homo sapiens
  CDR3 for alpha chain variable domain of TCR clone 248516 (TRAV27, TRAJ45)
CRSSGGSADGLTF

SEQ ID NO: 497032 - protein, 17 aa, Homo sapiens
  CDR3 for beta chain variable domain of TCR clone 248516 (TRBV11-2, TRBJ2-1)
CASSLYPPGVEYNEQFF

SEQ ID NO: 497033 - protein, 14 aa, Homo sapiens
  CDR3 for alpha chain variable domain of TCR clone 248517 (TRAV3, TRAJ37)
CAVKESGNTGKLIF

SEQ ID NO: 497034 - protein, 16 aa, Homo sapiens
  CDR3 for beta chain variable domain of TCR clone 248517 (TRBV19, TRBJ2-2)
CASRSPGTGATGELFF

SEQ ID NO: 497035 - protein, 14 aa, Homo sapiens
  CDR3 for alpha chain variable domain of TCR clone 248518 (TRAV12-2, TRAJ13)
CTVKKPGGYQKVTF

SEQ ID NO: 497036 - protein, 15 aa, Homo sapiens
  CDR3 for beta chain variable domain of TCR clone 248518 (TRBV7-8, TRBJ1-3)
CASSPRGKDGNTIYF

SEQ ID NO: 497037 - protein, 11 aa, Homo sapiens
  CDR3 for alpha chain variable domain of TCR clone 248519 (TRAV21, TRAJ11)
CAVNGYSTLTF

SEQ ID NO: 497038 - protein, 14 aa, Homo sapiens
  CDR3 for beta chain variable domain of TCR clone 248519 (TRBV28, TRBJ2-1)
CASSPGEGGNEQFF

SEQ ID NO: 497039 - protein, 19 aa, Homo sapiens
  CDR3 for alpha chain variable domain of TCR clone 248520 (TRAV2, TRAJ20)
ILQVREADAAVYRDCKLSF

SEQ ID NO: 497040 - protein, 13 aa, Homo sapiens
  CDR3 for beta chain variable domain of TCR clone 248520 (TRBV15, TRBJ1-6)
CPTSGGLNSPLHF

SEQ ID NO: 497041 - protein, 16 aa, Homo sapiens
  CDR3 for alpha chain variable domain of TCR clone 248521 (TRAV36/DV7, TRAJ30)
CAVETYGLDRDDKIIF

SEQ ID NO: 497042 - protein, 13 aa, Homo sapiens
  CDR3 for beta chain variable domain of TCR clone 248521 (TRBV12-4, TRBJ1-3)
CASSLASGNTIYF

SEQ ID NO: 497043 - protein, 14 aa, Homo sapiens
  CDR3 for alpha chain variable domain of TCR clone 248522 (TRAV2, TRAJ37)
CAVDFTSNTGKLIF

SEQ ID NO: 497044 - protein, 16 aa, Homo sapiens
  CDR3 for beta chain variable domain of TCR clone 248522 (TRBV15, TRBJ2-7)
CATSARQARSSYEQYF

SEQ ID NO: 497045 - protein, 12 aa, Homo sapiens
  CDR3 for alpha chain variable domain of TCR clone 248523 (TRAV12-3, TRAJ17)
RAMTLTGNKLTF

SEQ ID NO: 497046 - protein, 15 aa, Homo sapiens
  CDR3 for beta chain variable domain of TCR clone 248523 (TRBV20-1, TRBJ2-7)
CSARDWVSGMDEQYF

SEQ ID NO: 497047 - protein, 15 aa, Homo sapiens
  CDR3 for alpha chain variable domain of TCR clone 248524 (TRAV12-3, TRAJ6)
CAMSATAGGSYIPTF

SEQ ID NO: 497048 - protein, 13 aa, Homo sapiens
  CDR3 for beta chain variable domain of TCR clone 248524 (TRBV7-9, TRBJ1-2)
CASSLKQNYGYTF

SEQ ID NO: 497049 - protein, 14 aa, Homo sapiens
  CDR3 for alpha chain variable domain of TCR clone 248525 (TRAV1-2, TRAJ16)
CAVNRFSDGQKLLF

SEQ ID NO: 497050 - protein, 15 aa, Homo sapiens
  CDR3 for beta chain variable domain of TCR clone 248525 (TRBV20-1, TRBJ2-2)
SAVPRTPRTPGSGFF

SEQ ID NO: 497051 - protein, 15 aa, Homo sapiens
  CDR3 for alpha chain variable domain of TCR clone 248526 (TRAV8-3, TRAJ17)
CAVGAIKAAGNKLTF

SEQ ID NO: 497052 - protein, 12 aa, Homo sapiens
  CDR3 for beta chain variable domain of TCR clone 248526 (TRBV7-8, TRBJ2-7)
CASSLGDREQYF

SEQ ID NO: 497053 - protein, 17 aa, Homo sapiens
  CDR3 for alpha chain variable domain of TCR clone 248527 (TRAV26-1, TRAJ46)
IASSESEKKSSGDKLTF

SEQ ID NO: 497054 - protein, 16 aa, Homo sapiens
  CDR3 for beta chain variable domain of TCR clone 248527 (TRBV27, TRBJ2-2)
CASSFRGLVRTGGLFF

SEQ ID NO: 497055 - protein, 14 aa, Homo sapiens
  CDR3 for alpha chain variable domain of TCR clone 248528 (TRAV12-2, TRAJ13)
CAVKKTGVYQKVTF

SEQ ID NO: 497056 - protein, 15 aa, Homo sapiens
  CDR3 for beta chain variable domain of TCR clone 248528 (TRBV20-1, TRBJ2-7)
CSARDRVSGMDEQYF

SEQ ID NO: 497057 - protein, 14 aa, Homo sapiens
  CDR3 for alpha chain variable domain of TCR clone 248529 (TRAV1-2, TRAJ8)
CAVREDTGFQKLVF

SEQ ID NO: 497058 - protein, 15 aa, Homo sapiens
  CDR3 for beta chain variable domain of TCR clone 248529 (TRBV2, TRBJ2-5)
RASSEQGLIGETQYF

SEQ ID NO: 497059 - protein, 14 aa, Homo sapiens
  CDR3 for alpha chain variable domain of TCR clone 248530 (TRAV1-2, TRAJ8)
CAVREDTGFQKLVF

SEQ ID NO: 497060 - protein, 13 aa, Homo sapiens
  CDR3 for beta chain variable domain of TCR clone 248530 (TRBV20-1, TRBJ1-6)
CSAPLGVGSPLHF

SEQ ID NO: 497061 - protein, 16 aa, Homo sapiens
  CDR3 for alpha chain variable domain of TCR clone 248531 (TRAV27, TRAJ13)
CAGAKSDSGGYHKGTF

SEQ ID NO: 497062 - protein, 12 aa, Homo sapiens
  CDR3 for beta chain variable domain of TCR clone 248531 (TRBV11-2, TRBJ2-2)
CASSLGGGELFF

SEQ ID NO: 497063 - protein, 15 aa, Homo sapiens
  CDR3 for alpha chain variable domain of TCR clone 248532 (TRAV8-6, TRAJ10)
CAVSDQAGGGNKLTF

SEQ ID NO: 497064 - protein, 16 aa, Homo sapiens
  CDR3 for beta chain variable domain of TCR clone 248532 (TRBV28, TRBJ2-7)
CASSLFFETGGPEQYF

SEQ ID NO: 497065 - protein, 14 aa, Homo sapiens
  CDR3 for alpha chain variable domain of TCR clone 248533 (TRAV13-2, TRAJ32)
FAENYGGATNKLIF

SEQ ID NO: 497066 - protein, 15 aa, Homo sapiens
  CDR3 for beta chain variable domain of TCR clone 248533 (TRBV12-4, TRBJ2-5)
CASTLNSGRGETQYF

SEQ ID NO: 497067 - protein, 18 aa, Homo sapiens
  CDR3 for alpha chain variable domain of TCR clone 248534 (TRAV13-1, TRAJ52)
CAAKNPNAGGTSYGKLTF

SEQ ID NO: 497068 - protein, 15 aa, Homo sapiens
  CDR3 for beta chain variable domain of TCR clone 248534 (TRBV6-1, TRBJ2-3)
CASSERGGFTDTQYF

SEQ ID NO: 497069 - protein, 13 aa, Homo sapiens
  CDR3 for alpha chain variable domain of TCR clone 248535 (TRAV17, TRAJ5)
CAPMDTGRRALTF

SEQ ID NO: 497070 - protein, 14 aa, Homo sapiens
  CDR3 for beta chain variable domain of TCR clone 248535 (TRBV19, TRBJ2-1)
CASPTFVLSGEQLF

SEQ ID NO: 497071 - protein, 14 aa, Homo sapiens
  CDR3 for alpha chain variable domain of TCR clone 248536 (TRAV1-2, TRAJ16)
CAVNRFSDGQKLLF

SEQ ID NO: 497072 - protein, 11 aa, Homo sapiens
  CDR3 for beta chain variable domain of TCR clone 248536 (TRBV2, TRBJ1-2)
CASSPGNGYTF

SEQ ID NO: 497073 - protein, 11 aa, Homo sapiens
  CDR3 for alpha chain variable domain of TCR clone 248537 (TRAV17, TRAJ43)
CATPRSNDMRF

SEQ ID NO: 497074 - protein, 18 aa, Homo sapiens
  CDR3 for beta chain variable domain of TCR clone 248537 (TRBV11-2, TRBJ2-3)
CASSLGGASRGAPNTQYC

SEQ ID NO: 497075 - protein, 13 aa, Homo sapiens
  CDR3 for alpha chain variable domain of TCR clone 248538 (TRAV21, TRAJ27)
RAARPGNPGKSTL

SEQ ID NO: 497076 - protein, 14 aa, Homo sapiens
  CDR3 for beta chain variable domain of TCR clone 248538 (TRBV7-6, TRBJ2-3)
CASSLGTVTDTQYF

SEQ ID NO: 497077 - protein, 14 aa, Homo sapiens
  CDR3 for alpha chain variable domain of TCR clone 248539 (TRAV1-2, TRAJ16)
CAVNRFSDGQKLLF

SEQ ID NO: 497078 - protein, 14 aa, Homo sapiens
  CDR3 for beta chain variable domain of TCR clone 248539 (TRBV2, TRBJ2-1)
CASGTSGGLNEQFF

SEQ ID NO: 497079 - protein, 17 aa, Homo sapiens
  CDR3 for alpha chain variable domain of TCR clone 248540 (TRAV4, TRAJ18)
CLVGERSVGSTLGSLYF

SEQ ID NO: 497080 - protein, 16 aa, Homo sapiens
  CDR3 for beta chain variable domain of TCR clone 248540 (TRBV10-3, TRBJ2-1)
CAISGVGDGGGGEQFF

SEQ ID NO: 497081 - protein, 12 aa, Homo sapiens
  CDR3 for alpha chain variable domain of TCR clone 248541 (TRAV2, TRAJ33)
CAVPDSNYQLIW

SEQ ID NO: 497082 - protein, 11 aa, Homo sapiens
  CDR3 for beta chain variable domain of TCR clone 248541 (TRBV12-4, TRBJ2-3)
CASTATDTQYL

SEQ ID NO: 497083 - protein, 14 aa, Homo sapiens
  CDR3 for alpha chain variable domain of TCR clone 248542 (TRAV38-1, TRAJ45)
CASHSGGGADGLTF

SEQ ID NO: 497084 - protein, 13 aa, Homo sapiens
  CDR3 for beta chain variable domain of TCR clone 248542 (TRBV10-3, TRBJ1-2)
CTISERDSYGYTF

SEQ ID NO: 497085 - protein, 19 aa, Homo sapiens
  CDR3 for alpha chain variable domain of TCR clone 248543 (TRAV21, TRAJ20)
SLVTQPPTSVLPNDYKLSF

SEQ ID NO: 497086 - protein, 14 aa, Homo sapiens
  CDR3 for beta chain variable domain of TCR clone 248543 (TRBV4-1, TRBJ2-2)
CASSQAVNTGELFF

SEQ ID NO: 497087 - protein, 10 aa, Homo sapiens
  CDR3 for alpha chain variable domain of TCR clone 248544 (TRAV1-2, TRAJ31)
CAFFDARLMF

SEQ ID NO: 497088 - protein, 12 aa, Homo sapiens
  CDR3 for beta chain variable domain of TCR clone 248544 (TRBV19, TRBJ2-7)
CASTDRGYEQYF

SEQ ID NO: 497089 - protein, 13 aa, Homo sapiens
  CDR3 for alpha chain variable domain of TCR clone 248545 (TRAV21, TRAJ27)
CAARPGNAGKSTF

SEQ ID NO: 497090 - protein, 12 aa, Homo sapiens
  CDR3 for beta chain variable domain of TCR clone 248545 (TRBV2, TRBJ2-1)
CAYGPPGNEQFF

SEQ ID NO: 497091 - protein, 12 aa, Homo sapiens
  CDR3 for alpha chain variable domain of TCR clone 248546 (TRAV3, TRAJ20)
CAVRDPDYKLSF

SEQ ID NO: 497092 - protein, 14 aa, Homo sapiens
  CDR3 for beta chain variable domain of TCR clone 248546 (TRBV7-3, TRBJ1-1)
CASSRQGGDTEAFF

SEQ ID NO: 497093 - protein, 21 aa, Homo sapiens
  CDR3 for alpha chain variable domain of TCR clone 248547 (TRAV30, TRAJ43)
GLPAQLLRNLLPILELNDMRF

SEQ ID NO: 497094 - protein, 14 aa, Homo sapiens
  CDR3 for beta chain variable domain of TCR clone 248547 (TRBV27, TRBJ2-1)
CASRHLGGGKEQFF

SEQ ID NO: 497095 - protein, 14 aa, Homo sapiens
  CDR3 for alpha chain variable domain of TCR clone 248548 (TRAV26-1, TRAJ38)
CIADNAGNNRKLIW

SEQ ID NO: 497096 - protein, 16 aa, Homo sapiens
  CDR3 for beta chain variable domain of TCR clone 248548 (TRBV7-3, TRBJ2-1)
CASSKPLAGGYNEQFF

SEQ ID NO: 497097 - protein, 14 aa, Homo sapiens
  CDR3 for alpha chain variable domain of TCR clone 248549 (TRAV8-4, TRAJ9)
CPVRINTGGFKTIF

SEQ ID NO: 497098 - protein, 14 aa, Homo sapiens
  CDR3 for beta chain variable domain of TCR clone 248549 (TRBV5-1, TRBJ1-1)
CASSLQGASTEAFF

SEQ ID NO: 497099 - protein, 15 aa, Homo sapiens
  CDR3 for alpha chain variable domain of TCR clone 248550 (TRAV17, TRAJ23)
CATDAEDNQGGKLVF

SEQ ID NO: 497100 - protein, 12 aa, Homo sapiens
  CDR3 for beta chain variable domain of TCR clone 248550 (TRBV2, TRBJ2-1)
CAKREGYNEQFF

SEQ ID NO: 497101 - protein, 13 aa, Homo sapiens
  CDR3 for alpha chain variable domain of TCR clone 248551 (TRAV8-3, TRAJ15)
CAVGIQAGTALIF

SEQ ID NO: 497102 - protein, 17 aa, Homo sapiens
  CDR3 for beta chain variable domain of TCR clone 248551 (TRBV20-1, TRBJ2-1)
CRARVALAGVSYNEQFF

SEQ ID NO: 497103 - protein, 17 aa, Homo sapiens
  CDR3 for alpha chain variable domain of TCR clone 248552 (TRAV36/DV7, TRAJ52)
CAVAQRAGSTSYGKLTF

SEQ ID NO: 497104 - protein, 17 aa, Homo sapiens
  CDR3 for beta chain variable domain of TCR clone 248552 (TRBV28, TRBJ2-5)
CASSTPEGDALQETQYF

SEQ ID NO: 497105 - protein, 14 aa, Homo sapiens
  CDR3 for alpha chain variable domain of TCR clone 248553 (TRAV9-2, TRAJ39)
CALYIYNAGNMLPF

SEQ ID NO: 497106 - protein, 16 aa, Homo sapiens
  CDR3 for beta chain variable domain of TCR clone 248553 (TRBV19, TRBJ2-1)
CASSKAGPSSYNEQFF

SEQ ID NO: 497107 - protein, 14 aa, Homo sapiens
  CDR3 for alpha chain variable domain of TCR clone 248554 (TRAV1-2, TRAJ8)
CAVREDTGFQKLIF

SEQ ID NO: 497108 - protein, 14 aa, Homo sapiens
  CDR3 for beta chain variable domain of TCR clone 248554 (TRBV20-1, TRBJ1-1)
CSAQTRIGGTEAFF

SEQ ID NO: 497109 - protein, 13 aa, Homo sapiens
  CDR3 for alpha chain variable domain of TCR clone 248555 (TRAV2, TRAJ40)
CAEVTSGTYKYIF

SEQ ID NO: 497110 - protein, 14 aa, Homo sapiens
  CDR3 for beta chain variable domain of TCR clone 248555 (TRBV19, TRBJ2-1)
CASPTFVLSGGQFF

SEQ ID NO: 497111 - protein, 11 aa, Homo sapiens
  CDR3 for alpha chain variable domain of TCR clone 248556 (TRAV2, TRAJ33)
CAVESNYQLIW

SEQ ID NO: 497112 - protein, 15 aa, Homo sapiens
  CDR3 for beta chain variable domain of TCR clone 248556 (TRBV19, TRBJ1-1)
CASTSGQIQNTAAFF

SEQ ID NO: 497113 - protein, 15 aa, Homo sapiens
  CDR3 for alpha chain variable domain of TCR clone 248557 (TRAV25, TRAJ52)
CAGRPGGTSYGKITF

SEQ ID NO: 497114 - protein, 17 aa, Homo sapiens
  CDR3 for beta chain variable domain of TCR clone 248557 (TRBV7-8, TRBJ2-6)
CASSAGTGGAGANVLTF

SEQ ID NO: 497115 - protein, 15 aa, Homo sapiens
  CDR3 for alpha chain variable domain of TCR clone 248558 (TRAV26-1, TRAJ17)
CIVRVVKSAGNKLTF

SEQ ID NO: 497116 - protein, 16 aa, Homo sapiens
  CDR3 for beta chain variable domain of TCR clone 248558 (TRBV7-9, TRBJ2-1)
CASSLVSGPSYNEQFF

SEQ ID NO: 497117 - protein, 13 aa, Homo sapiens
  CDR3 for alpha chain variable domain of TCR clone 248559 (TRAV8-3, TRAJ28)
CAVGAVGSYQLTF

SEQ ID NO: 497118 - protein, 18 aa, Homo sapiens
  CDR3 for beta chain variable domain of TCR clone 248559 (TRBV7-2, TRBJ2-7)
CASSLSGRGLAGGYEQYF

SEQ ID NO: 497119 - protein, 11 aa, Homo sapiens
  CDR3 for alpha chain variable domain of TCR clone 248560 (TRAV3, TRAJ21)
CAVGNFNKFYF

SEQ ID NO: 497120 - protein, 15 aa, Homo sapiens
  CDR3 for beta chain variable domain of TCR clone 248560 (TRBV29-1, TRBJ2-1)
CSVEGGPASYNGQFF

SEQ ID NO: 497121 - protein, 14 aa, Homo sapiens
  CDR3 for alpha chain variable domain of TCR clone 248561 (TRAV29/DV5, TRAJ36)
CAARRRTGANNLFS

SEQ ID NO: 497122 - protein, 14 aa, Homo sapiens
  CDR3 for beta chain variable domain of TCR clone 248561 (TRBV12-5, TRBJ2-5)
CASGSRTHQETQYF

SEQ ID NO: 497123 - protein, 14 aa, Homo sapiens
  CDR3 for alpha chain variable domain of TCR clone 248562 (TRAV12-2, TRAJ13)
CAVKKTGGYQKDTF

SEQ ID NO: 497124 - protein, 15 aa, Homo sapiens
  CDR3 for beta chain variable domain of TCR clone 248562 (TRBV20-1, TRBJ2-7)
CSARDRVSGMDEQYF

SEQ ID NO: 497125 - protein, 18 aa, Homo sapiens
  CDR3 for alpha chain variable domain of TCR clone 248563 (TRAV26-1, TRAJ30)
CCVLLHRQSTNRDDQIIF

SEQ ID NO: 497126 - protein, 18 aa, Homo sapiens
  CDR3 for beta chain variable domain of TCR clone 248563 (TRBV4-1, TRBJ1-5)
CASSQDPRGQGLNQPQHF

SEQ ID NO: 497127 - protein, 15 aa, Homo sapiens
  CDR3 for alpha chain variable domain of TCR clone 248564 (TRAV8-3, TRAJ11)
CAVGLLNSGYSTLTF

SEQ ID NO: 497128 - protein, 13 aa, Homo sapiens
  CDR3 for beta chain variable domain of TCR clone 248564 (TRBV7-9, TRBJ1-2)
GASSLKQNYGYTF

SEQ ID NO: 497129 - protein, 14 aa, Homo sapiens
  CDR3 for alpha chain variable domain of TCR clone 248565 (TRAV17, TRAJ45)
CATASGGGADGLTF

SEQ ID NO: 497130 - protein, 13 aa, Homo sapiens
  CDR3 for beta chain variable domain of TCR clone 248565 (TRBV19, TRBJ1-5)
CASSTRRDQPQHF

SEQ ID NO: 497131 - protein, 18 aa, Homo sapiens
  CDR3 for alpha chain variable domain of TCR clone 248566 (TRAV21, TRAJ52)
CAARPSPAGGTSYGKLTF

SEQ ID NO: 497132 - protein, 13 aa, Homo sapiens
  CDR3 for beta chain variable domain of TCR clone 248566 (TRBV7-9, TRBJ1-2)
CASSLKQNYGYTF

SEQ ID NO: 497133 - protein, 17 aa, Homo sapiens
  CDR3 for alpha chain variable domain of TCR clone 248567 (TRAV3, TRAJ38)
CAVRDCLNAGNNRKLIW

SEQ ID NO: 497134 - protein, 16 aa, Homo sapiens
  CDR3 for beta chain variable domain of TCR clone 248567 (TRBV7-7, TRBJ2-1)
CASSLASGTSYNEQFF

SEQ ID NO: 497135 - protein, 14 aa, Homo sapiens
  CDR3 for alpha chain variable domain of TCR clone 248568 (TRAV27, TRAJ22)
CAGLPSGSARQLTF

SEQ ID NO: 497136 - protein, 13 aa, Homo sapiens
  CDR3 for beta chain variable domain of TCR clone 248568 (TRBV7-8, TRBJ2-7)
CASSFAGLYEQYF

SEQ ID NO: 497137 - protein, 15 aa, Homo sapiens
  CDR3 for alpha chain variable domain of TCR clone 248569 (TRAV35, TRAJ40)
CAGQLGTSGTYKHIF

SEQ ID NO: 497138 - protein, 14 aa, Homo sapiens
  CDR3 for beta chain variable domain of TCR clone 248569 (TRBV7-3, TRBJ2-1)
CASRLAGGTNEQFF

SEQ ID NO: 497139 - protein, 14 aa, Homo sapiens
  CDR3 for alpha chain variable domain of TCR clone 248570 (TRAV8-4, TRAJ17)
CAVSDQAAGNKLIF

SEQ ID NO: 497140 - protein, 15 aa, Homo sapiens
  CDR3 for beta chain variable domain of TCR clone 248570 (TRBV7-2, TRBJ1-2)
CASSLAPDRGLGYTF

SEQ ID NO: 497141 - protein, 18 aa, Homo sapiens
  CDR3 for alpha chain variable domain of TCR clone 248571 (TRAV12-3, TRAJ52)
CAMSVGGAGGTSYGKLTF

SEQ ID NO: 497142 - protein, 13 aa, Homo sapiens
  CDR3 for beta chain variable domain of TCR clone 248571 (TRBV2, TRBJ1-5)
CATAGPGNQPQHF

SEQ ID NO: 497143 - protein, 14 aa, Homo sapiens
  CDR3 for alpha chain variable domain of TCR clone 248572 (TRAV8-4, TRAJ17)
CAVSEGAAGNKRTF

SEQ ID NO: 497144 - protein, 13 aa, Homo sapiens
  CDR3 for beta chain variable domain of TCR clone 248572 (TRBV19, TRBJ2-1)
CASSMYRVNEQFF

SEQ ID NO: 497145 - protein, 14 aa, Homo sapiens
  CDR3 for alpha chain variable domain of TCR clone 248573 (TRAV12-2, TRAJ45)
CAVNIGGGVDGLTF

SEQ ID NO: 497146 - protein, 13 aa, Homo sapiens
  CDR3 for beta chain variable domain of TCR clone 248573 (TRBV19, TRBJ2-2)
CASSIWSTGELFF

SEQ ID NO: 497147 - protein, 13 aa, Homo sapiens
  CDR3 for alpha chain variable domain of TCR clone 248574 (TRAV8-6, TRAJ13)
CAVSSGGYQKVTF

SEQ ID NO: 497148 - protein, 15 aa, Homo sapiens
  CDR3 for beta chain variable domain of TCR clone 248574 (TRBV7-9, TRBJ2-7)
CASSLPMGQANEQYV

SEQ ID NO: 497149 - protein, 12 aa, Homo sapiens
  CDR3 for alpha chain variable domain of TCR clone 248575 (TRAV2, TRAJ31)
CAVEDNNARLMF

SEQ ID NO: 497150 - protein, 16 aa, Homo sapiens
  CDR3 for beta chain variable domain of TCR clone 248575 (TRBV10-3, TRBJ2-1)
CAITGVGDGGGGEQFF

SEQ ID NO: 497151 - protein, 13 aa, Homo sapiens
  CDR3 for alpha chain variable domain of TCR clone 248576 (TRAV8-3, TRAJ44)
CAVVPGTASKLTF

SEQ ID NO: 497152 - protein, 13 aa, Homo sapiens
  CDR3 for beta chain variable domain of TCR clone 248576 (TRBV27, TRBJ2-7)
CASSLRHRYEQYF

SEQ ID NO: 497153 - protein, 13 aa, Homo sapiens
  CDR3 for alpha chain variable domain of TCR clone 248577 (TRAV27, TRAJ6)
CAGGTRGSYIPTF

SEQ ID NO: 497154 - protein, 15 aa, Homo sapiens
  CDR3 for beta chain variable domain of TCR clone 248577 (TRBV7-6, TRBJ1-2)
CASSSGGRGGYGYTF

SEQ ID NO: 497155 - protein, 15 aa, Homo sapiens
  CDR3 for alpha chain variable domain of TCR clone 248578 (TRAV8-3, TRAJ40)
CAAPSLGSGTYKYIF

SEQ ID NO: 497156 - protein, 16 aa, Homo sapiens
  CDR3 for beta chain variable domain of TCR clone 248578 (TRBV7-3, TRBJ2-3)
CASSLSGYRPENTQYF

SEQ ID NO: 497157 - protein, 17 aa, Homo sapiens
  CDR3 for alpha chain variable domain of TCR clone 248579 (TRAV3, TRAJ28)
CAVRPLYSGAGSYKLTF

SEQ ID NO: 497158 - protein, 16 aa, Homo sapiens
  CDR3 for beta chain variable domain of TCR clone 248579 (TRBV4-2, TRBJ1-4)
CASSQARGPTNEKLFF

SEQ ID NO: 497159 - protein, 15 aa, Homo sapiens
  CDR3 for alpha chain variable domain of TCR clone 248580 (TRAV8-3, TRAJ41)
CAVGSNSNCGYALNF

SEQ ID NO: 497160 - protein, 17 aa, Homo sapiens
  CDR3 for beta chain variable domain of TCR clone 248580 (TRBV25-1, TRBJ2-1)
CASSAYGQGRGVYEQFF

SEQ ID NO: 497161 - protein, 10 aa, Homo sapiens
  CDR3 for alpha chain variable domain of TCR clone 248581 (TRAV12-2, TRAJ31)
CAVTRWATHV

SEQ ID NO: 497162 - protein, 15 aa, Homo sapiens
  CDR3 for beta chain variable domain of TCR clone 248581 (TRBV19, TRBJ2-7)
CASSIGGGLVNEQYF

SEQ ID NO: 497163 - protein, 15 aa, Homo sapiens
  CDR3 for alpha chain variable domain of TCR clone 248582 (TRAV8-3, TRAJ23)
CAVGDRYNQGGKLIF

SEQ ID NO: 497164 - protein, 13 aa, Homo sapiens
  CDR3 for beta chain variable domain of TCR clone 248582 (TRBV2, TRBJ1-1)
CASSEGGNTEAFF

SEQ ID NO: 497165 - protein, 13 aa, Homo sapiens
  CDR3 for alpha chain variable domain of TCR clone 248583 (TRAV1-1, TRAJ9)
CAAKNTEGFKTIF

SEQ ID NO: 497166 - protein, 14 aa, Homo sapiens
  CDR3 for beta chain variable domain of TCR clone 248583 (TRBV19, TRBJ2-1)
CASEVTGARNEQFF

SEQ ID NO: 497167 - protein, 14 aa, Homo sapiens
  CDR3 for alpha chain variable domain of TCR clone 248584 (TRAV1-2, TRAJ16)
CAVNRFSDGKKLLF

SEQ ID NO: 497168 - protein, 14 aa, Homo sapiens
  CDR3 for beta chain variable domain of TCR clone 248584 (TRBV20-1, TRBJ1-5)
CSAPGTGVGQPQHF

SEQ ID NO: 497169 - protein, 20 aa, Homo sapiens
  CDR3 for alpha chain variable domain of TCR clone 248585 (TRAV1-1, TRAJ4)
CLLLLRCEPSFSGGYNKLIF

SEQ ID NO: 497170 - protein, 13 aa, Homo sapiens
  CDR3 for beta chain variable domain of TCR clone 248585 (TRBV7-6, TRBJ1-2)
CASSLVADYGYTF

SEQ ID NO: 497171 - protein, 17 aa, Homo sapiens
  CDR3 for alpha chain variable domain of TCR clone 248586 (TRAV3, TRAJ6)
CAVRDGPRAGGGYIPTF

SEQ ID NO: 497172 - protein, 13 aa, Homo sapiens
  CDR3 for beta chain variable domain of TCR clone 248586 (TRBV20-1, TRBJ1-6)
CSAPLGVGSPLHF

SEQ ID NO: 497173 - protein, 11 aa, Homo sapiens
  CDR3 for alpha chain variable domain of TCR clone 248587 (TRAV12-2, TRAJ49)
CALQGGNQFYF

SEQ ID NO: 497174 - protein, 14 aa, Homo sapiens
  CDR3 for beta chain variable domain of TCR clone 248587 (TRBV7-2, TRBJ2-7)
FASSPKTSFYEQYF

SEQ ID NO: 497175 - protein, 13 aa, Homo sapiens
  CDR3 for alpha chain variable domain of TCR clone 248588 (TRAV12-2, TRAJ10)
CAVPTGGGYKLTF

SEQ ID NO: 497176 - protein, 14 aa, Homo sapiens
  CDR3 for beta chain variable domain of TCR clone 248588 (TRBV25-1, TRBJ1-1)
CASTHLGGNTEAVF

SEQ ID NO: 497177 - protein, 14 aa, Homo sapiens
  CDR3 for alpha chain variable domain of TCR clone 248589 (TRAV1-2, TRAJ29)
CAVRELTSATPLVF

SEQ ID NO: 497178 - protein, 15 aa, Homo sapiens
  CDR3 for beta chain variable domain of TCR clone 248589 (TRBV7-9, TRBJ2-7)
CASSPGGGLTYEQYF

SEQ ID NO: 497179 - protein, 11 aa, Homo sapiens
  CDR3 for alpha chain variable domain of TCR clone 248590 (TRAV4, TRAJ31)
CLVGDNARLMF

SEQ ID NO: 497180 - protein, 14 aa, Homo sapiens
  CDR3 for beta chain variable domain of TCR clone 248590 (TRBV5-4, TRBJ2-3)
CASRTGSRTDTQYF

SEQ ID NO: 497181 - protein, 13 aa, Homo sapiens
  CDR3 for alpha chain variable domain of TCR clone 248591 (TRAV27, TRAJ45)
CRSSGGGADGLTF

SEQ ID NO: 497182 - protein, 13 aa, Homo sapiens
  CDR3 for beta chain variable domain of TCR clone 248591 (TRBV7-9, TRBJ2-3)
CASSPGSTDTQYF

SEQ ID NO: 497183 - protein, 14 aa, Homo sapiens
  CDR3 for alpha chain variable domain of TCR clone 248592 (TRAV12-2, TRAJ36)
CAVKISTGATNLFF

SEQ ID NO: 497184 - protein, 14 aa, Homo sapiens
  CDR3 for beta chain variable domain of TCR clone 248592 (TRBV25-1, TRBJ1-2)
CASSDTTGVVGYTF

SEQ ID NO: 497185 - protein, 12 aa, Homo sapiens
  CDR3 for alpha chain variable domain of TCR clone 248593 (TRAV1-1, TRAJ39)
CAVPVVGNMLTF

SEQ ID NO: 497186 - protein, 17 aa, Homo sapiens
  CDR3 for beta chain variable domain of TCR clone 248593 (TRBV28, TRBJ2-5)
CASSTTEGDALQETQYF

SEQ ID NO: 497187 - protein, 13 aa, Homo sapiens
  CDR3 for alpha chain variable domain of TCR clone 248594 (TRAV36/DV7, TRAJ37)
CAVFSSNIGELIF

SEQ ID NO: 497188 - protein, 16 aa, Homo sapiens
  CDR3 for beta chain variable domain of TCR clone 248594 (TRBV3-1, TRBJ2-5)
CASSPGQFNGFGTQYF

SEQ ID NO: 497189 - protein, 13 aa, Homo sapiens
  CDR3 for alpha chain variable domain of TCR clone 248595 (TRAV23/DV6, TRAJ16)
CAESISDGQKLLF

SEQ ID NO: 497190 - protein, 15 aa, Homo sapiens
  CDR3 for beta chain variable domain of TCR clone 248595 (TRBV2, TRBJ2-2)
CASSRETVGTGELFF

SEQ ID NO: 497191 - protein, 16 aa, Homo sapiens
  CDR3 for alpha chain variable domain of TCR clone 248596 (TRAV30, TRAJ24)
CGTEIVDADSWGKFQF

SEQ ID NO: 497192 - protein, 13 aa, Homo sapiens
  CDR3 for beta chain variable domain of TCR clone 248596 (TRBV7-2, TRBJ1-4)
CASSLAGLERLFF

SEQ ID NO: 497193 - protein, 12 aa, Homo sapiens
  CDR3 for alpha chain variable domain of TCR clone 248597 (TRAV26-1, TRAJ48)
CIVSRGNEKLTF

SEQ ID NO: 497194 - protein, 13 aa, Homo sapiens
  CDR3 for beta chain variable domain of TCR clone 248597 (TRBV18, TRBJ2-7)
CASFRDSAYEQYF

SEQ ID NO: 497195 - protein, 14 aa, Homo sapiens
  CDR3 for alpha chain variable domain of TCR clone 248598 (TRAV1-2, TRAJ16)
CAVNRFSDGQKLLF

SEQ ID NO: 497196 - protein, 13 aa, Homo sapiens
  CDR3 for beta chain variable domain of TCR clone 248598 (TRBV6-3, TRBJ1-1)
CASTAGGNTEAFF

SEQ ID NO: 497197 - protein, 11 aa, Homo sapiens
  CDR3 for alpha chain variable domain of TCR clone 248599 (TRAV2, TRAJ20)
CAVADDYKLSF

SEQ ID NO: 497198 - protein, 15 aa, Homo sapiens
  CDR3 for beta chain variable domain of TCR clone 248599 (TRBV20-1, TRBJ2-7)
CSARDRVSGMDEQYF

SEQ ID NO: 497199 - protein, 16 aa, Homo sapiens
  CDR3 for alpha chain variable domain of TCR clone 248600 (TRAV30, TRAJ24)
CGTEMVDADSWGKFQF

SEQ ID NO: 497200 - protein, 14 aa, Homo sapiens
  CDR3 for beta chain variable domain of TCR clone 248600 (TRBV12-5, TRBJ2-5)
CPSGSRTHQETQYF

SEQ ID NO: 497201 - protein, 10 aa, Homo sapiens
  CDR3 for alpha chain variable domain of TCR clone 248601 (TRAV36/DV7, TRAJ31)
CAVGEARLMF

SEQ ID NO: 497202 - protein, 15 aa, Homo sapiens
  CDR3 for beta chain variable domain of TCR clone 248601 (TRBV11-3, TRBJ2-5)
CASSDTSGGIETQYF

SEQ ID NO: 497203 - protein, 14 aa, Homo sapiens
  CDR3 for alpha chain variable domain of TCR clone 248602 (TRAV2, TRAJ9)
CAVEDRSGGFKTIY

SEQ ID NO: 497204 - protein, 12 aa, Homo sapiens
  CDR3 for beta chain variable domain of TCR clone 248602 (TRBV12-4, TRBJ2-4)
CASRSSGNMQYF

SEQ ID NO: 497205 - protein, 11 aa, Homo sapiens
  CDR3 for alpha chain variable domain of TCR clone 248603 (TRAV2, TRAJ33)
CAVDSNYHLIW

SEQ ID NO: 497206 - protein, 13 aa, Homo sapiens
  CDR3 for beta chain variable domain of TCR clone 248603 (TRBV7-2, TRBJ2-7)
CASSSPSGSEQYF

SEQ ID NO: 497207 - protein, 13 aa, Homo sapiens
  CDR3 for alpha chain variable domain of TCR clone 248604 (TRAV12-1, TRAJ16)
CVVNTRNGQKLLF

SEQ ID NO: 497208 - protein, 16 aa, Homo sapiens
  CDR3 for beta chain variable domain of TCR clone 248604 (TRBV11-2, TRBJ2-7)
CASSPTTGGVSYEQYF

SEQ ID NO: 497209 - protein, 13 aa, Homo sapiens
  CDR3 for alpha chain variable domain of TCR clone 248605 (TRAV25, TRAJ17)
CAGLRAAGNKLTF

SEQ ID NO: 497210 - protein, 15 aa, Homo sapiens
  CDR3 for beta chain variable domain of TCR clone 248605 (TRBV18, TRBJ2-3)
CASSPLAGETDTQYF

SEQ ID NO: 497211 - protein, 13 aa, Homo sapiens
  CDR3 for alpha chain variable domain of TCR clone 248606 (TRAV13-1, TRAJ6)
CARGSGGSYIPTF

SEQ ID NO: 497212 - protein, 14 aa, Homo sapiens
  CDR3 for beta chain variable domain of TCR clone 248606 (TRBV7-6, TRBJ2-3)
CASSLGTVTDTQYF

SEQ ID NO: 497213 - protein, 14 aa, Homo sapiens
  CDR3 for alpha chain variable domain of TCR clone 248607 (TRAV1-2, TRAJ16)
CAVNRFSDGQKLLF

SEQ ID NO: 497214 - protein, 15 aa, Homo sapiens
  CDR3 for beta chain variable domain of TCR clone 248607 (TRBV20-1, TRBJ2-7)
CSARDRVSEMDEQYF

SEQ ID NO: 497215 - protein, 15 aa, Homo sapiens
  CDR3 for alpha chain variable domain of TCR clone 248608 (TRAV12-3, TRAJ6)
CAMSATTGGSYIPTF

SEQ ID NO: 497216 - protein, 15 aa, Homo sapiens
  CDR3 for beta chain variable domain of TCR clone 248608 (TRBV25-1, TRBJ2-2)
VYRVDRGRKTGELFF

SEQ ID NO: 497217 - protein, 14 aa, Homo sapiens
  CDR3 for alpha chain variable domain of TCR clone 248609 (TRAV1-2, TRAJ8)
CAVREDTGFQKLVF

SEQ ID NO: 497218 - protein, 17 aa, Homo sapiens
  CDR3 for beta chain variable domain of TCR clone 248609 (TRBV20-1, TRBJ2-7)
CSATRAGGVAGVEEQYF

SEQ ID NO: 497219 - protein, 13 aa, Homo sapiens
  CDR3 for alpha chain variable domain of TCR clone 248610 (TRAV17, TRAJ9)
CATDYTGGFKTIF

SEQ ID NO: 497220 - protein, 14 aa, Homo sapiens
  CDR3 for beta chain variable domain of TCR clone 248610 (TRBV19, TRBJ2-5)
CASSMTEQQETQYF

SEQ ID NO: 497221 - protein, 14 aa, Homo sapiens
  CDR3 for alpha chain variable domain of TCR clone 248611 (TRAV26-1, TRAJ38)
RIAANAGNNRKLIW

SEQ ID NO: 497222 - protein, 13 aa, Homo sapiens
  CDR3 for beta chain variable domain of TCR clone 248611 (TRBV4-1, TRBJ2-7)
CASSQGQAYEQYF

SEQ ID NO: 497223 - protein, 15 aa, Homo sapiens
  CDR3 for alpha chain variable domain of TCR clone 248612 (TRAV26-2, TRAJ45)
CILRDRVDQGEVLTD

SEQ ID NO: 497224 - protein, 15 aa, Homo sapiens
  CDR3 for beta chain variable domain of TCR clone 248612 (TRBV7-6, TRBJ2-5)
CASSKPTGPQETQYF

SEQ ID NO: 497225 - protein, 15 aa, Homo sapiens
  CDR3 for alpha chain variable domain of TCR clone 248613 (TRAV23/DV6, TRAJ57)
CAASSTLSKGGSEQL

SEQ ID NO: 497226 - protein, 14 aa, Homo sapiens
  CDR3 for beta chain variable domain of TCR clone 248613 (TRBV25-1, TRBJ1-1)
CASTHLGGNTEAFF

SEQ ID NO: 497227 - protein, 15 aa, Homo sapiens
  CDR3 for alpha chain variable domain of TCR clone 248614 (TRAV16, TRAJ12)
CSKWPLRDSSYKLIF

SEQ ID NO: 497228 - protein, 14 aa, Homo sapiens
  CDR3 for beta chain variable domain of TCR clone 248614 (TRBV7-6, TRBJ2-7)
CASSFRQGADEQYF

SEQ ID NO: 497229 - protein, 10 aa, Homo sapiens
  CDR3 for alpha chain variable domain of TCR clone 248615 (TRAV12-1, TRAJ37)
ARGNTGKLIF

SEQ ID NO: 497230 - protein, 15 aa, Homo sapiens
  CDR3 for beta chain variable domain of TCR clone 248615 (TRBV7-2, TRBJ2-3)
CASRFGWGGGGALFF

SEQ ID NO: 497231 - protein, 13 aa, Homo sapiens
  CDR3 for alpha chain variable domain of TCR clone 248616 (TRAV13-2, TRAJ40)
CAEFTSGTYKYIF

SEQ ID NO: 497232 - protein, 14 aa, Homo sapiens
  CDR3 for beta chain variable domain of TCR clone 248616 (TRBV19, TRBJ2-1)
CASGKSTQYNEQFF

SEQ ID NO: 497233 - protein, 16 aa, Homo sapiens
  CDR3 for alpha chain variable domain of TCR clone 248617 (TRAV12-3, TRAJ53)
CAMRPGSGGSNYKLTF

SEQ ID NO: 497234 - protein, 14 aa, Homo sapiens
  CDR3 for beta chain variable domain of TCR clone 248617 (TRBV4-2, TRBJ2-1)
CASGLDRAYNEQFF

SEQ ID NO: 497235 - protein, 11 aa, Homo sapiens
  CDR3 for alpha chain variable domain of TCR clone 248618 (TRAV3, TRAJ21)
CAVGNFNKFYF

SEQ ID NO: 497236 - protein, 16 aa, Homo sapiens
  CDR3 for beta chain variable domain of TCR clone 248618 (TRBV20-1, TRBJ1-4)
CSARPYGGELNEKLFF

SEQ ID NO: 497237 - protein, 12 aa, Homo sapiens
  CDR3 for alpha chain variable domain of TCR clone 248619 (TRAV21, TRAJ29)
CAVTSGNTPLVF

SEQ ID NO: 497238 - protein, 16 aa, Homo sapiens
  CDR3 for beta chain variable domain of TCR clone 248619 (TRBV4-2, TRBJ1-1)
CASSQAGFGMNTEAFF

SEQ ID NO: 497239 - protein, 16 aa, Homo sapiens
  CDR3 for alpha chain variable domain of TCR clone 248620 (TRAV20, TRAJ22)
CAVQASSSGSARQLTF

SEQ ID NO: 497240 - protein, 11 aa, Homo sapiens
  CDR3 for beta chain variable domain of TCR clone 248620 (TRBV12-4, TRBJ2-3)
CASTATDTQYF

SEQ ID NO: 497241 - protein, 11 aa, Homo sapiens
  CDR3 for alpha chain variable domain of TCR clone 248621 (TRAV20, TRAJ40)
CAVGGTYKYIF

SEQ ID NO: 497242 - protein, 15 aa, Homo sapiens
  CDR3 for beta chain variable domain of TCR clone 248621 (TRBV6-3, TRBJ2-2)
CASSLLATLTGELFF

SEQ ID NO: 497243 - protein, 12 aa, Homo sapiens
  CDR3 for alpha chain variable domain of TCR clone 248622 (TRAV35, TRAJ49)
CAGWNTGNQFYF

SEQ ID NO: 497244 - protein, 16 aa, Homo sapiens
  CDR3 for beta chain variable domain of TCR clone 248622 (TRBV5-1, TRBJ2-2)
CASSLWDTTNTGELFV

SEQ ID NO: 497245 - protein, 13 aa, Homo sapiens
  CDR3 for alpha chain variable domain of TCR clone 248623 (TRAV21, TRAJ27)
CAARPGNAGKSTF

SEQ ID NO: 497246 - protein, 16 aa, Homo sapiens
  CDR3 for beta chain variable domain of TCR clone 248623 (TRBV11-3, TRBJ2-3)
CASSSGSGGGTDTQYF

SEQ ID NO: 497247 - protein, 18 aa, Homo sapiens
  CDR3 for alpha chain variable domain of TCR clone 248624 (TRAV26-2, TRAJ45)
CILRVDKYSGGGADGLTF

SEQ ID NO: 497248 - protein, 16 aa, Homo sapiens
  CDR3 for beta chain variable domain of TCR clone 248624 (TRBV2, TRBJ1-4)
CASNLLQGATNEKQFF

SEQ ID NO: 497249 - protein, 12 aa, Homo sapiens
  CDR3 for alpha chain variable domain of TCR clone 248625 (TRAV12-3, TRAJ34)
CAMGYNTDKPIF

SEQ ID NO: 497250 - protein, 14 aa, Homo sapiens
  CDR3 for beta chain variable domain of TCR clone 248625 (TRBV4-1, TRBJ2-2)
CAGSQAVNTGELFF

SEQ ID NO: 497251 - protein, 14 aa, Homo sapiens
  CDR3 for alpha chain variable domain of TCR clone 248626 (TRAV17, TRAJ6)
CATDASGGSYIPTF

SEQ ID NO: 497252 - protein, 14 aa, Homo sapiens
  CDR3 for beta chain variable domain of TCR clone 248626 (TRBV7-3, TRBJ2-1)
CASSLAGGTNEQFF

SEQ ID NO: 497253 - protein, 14 aa, Homo sapiens
  CDR3 for alpha chain variable domain of TCR clone 248627 (TRAV12-2, TRAJ13)
CAVKKTGGYQRVTF

SEQ ID NO: 497254 - protein, 16 aa, Homo sapiens
  CDR3 for beta chain variable domain of TCR clone 248627 (TRBV7-3, TRBJ2-2)
CASSLKRGTLSGELFF

SEQ ID NO: 497255 - protein, 14 aa, Homo sapiens
  CDR3 for alpha chain variable domain of TCR clone 248628 (TRAV12-2, TRAJ44)
CAVNPAGTASTLTF

SEQ ID NO: 497256 - protein, 15 aa, Homo sapiens
  CDR3 for beta chain variable domain of TCR clone 248628 (TRBV28, TRBJ2-7)
CASSVRQVSSYEQYF

SEQ ID NO: 497257 - protein, 12 aa, Homo sapiens
  CDR3 for alpha chain variable domain of TCR clone 248629 (TRAV17, TRAJ29)
CATPHQETHLLS

SEQ ID NO: 497258 - protein, 17 aa, Homo sapiens
  CDR3 for beta chain variable domain of TCR clone 248629 (TRBV20-1, TRBJ2-2)
CSASGSGQGGVTGELFF

SEQ ID NO: 497259 - protein, 13 aa, Homo sapiens
  CDR3 for alpha chain variable domain of TCR clone 248630 (TRAV12-3, TRAJ13)
CAMSSGGYQEVTL

SEQ ID NO: 497260 - protein, 13 aa, Homo sapiens
  CDR3 for beta chain variable domain of TCR clone 248630 (TRBV20-1, TRBJ1-1)
CSAPPGGHTEAFF

SEQ ID NO: 497261 - protein, 15 aa, Homo sapiens
  CDR3 for alpha chain variable domain of TCR clone 248631 (TRAV14/DV4, TRAJ12)
CAMGEERDSSYKLIF

SEQ ID NO: 497262 - protein, 16 aa, Homo sapiens
  CDR3 for beta chain variable domain of TCR clone 248631 (TRBV11-2, TRBJ1-2)
CASSLDRGGNNYGYTF

SEQ ID NO: 497263 - protein, 16 aa, Homo sapiens
  CDR3 for alpha chain variable domain of TCR clone 248632 (TRAV8-6, TRAJ28)
CAVTSKPGARSYQLTF

SEQ ID NO: 497264 - protein, 16 aa, Homo sapiens
  CDR3 for beta chain variable domain of TCR clone 248632 (TRBV12-4, TRBJ2-5)
CASSCRPSGDLETQYF

SEQ ID NO: 497265 - protein, 15 aa, Homo sapiens
  CDR3 for alpha chain variable domain of TCR clone 248633 (TRAV17, TRAJ57)
CATGPSQGGSEKLVF

SEQ ID NO: 497266 - protein, 14 aa, Homo sapiens
  CDR3 for beta chain variable domain of TCR clone 248633 (TRBV4-1, TRBJ2-7)
CASRLTSGSYEQYF

SEQ ID NO: 497267 - protein, 12 aa, Homo sapiens
  CDR3 for alpha chain variable domain of TCR clone 248634 (TRAV3, TRAJ43)
CAVRDPDNDMRF

SEQ ID NO: 497268 - protein, 15 aa, Homo sapiens
  CDR3 for beta chain variable domain of TCR clone 248634 (TRBV6-5, TRBJ2-1)
CASSYDAGAGNEQFF

SEQ ID NO: 497269 - protein, 14 aa, Homo sapiens
  CDR3 for alpha chain variable domain of TCR clone 248635 (TRAV1-2, TRAJ8)
CAVREDTGFQKLVV

SEQ ID NO: 497270 - protein, 12 aa, Homo sapiens
  CDR3 for beta chain variable domain of TCR clone 248635 (TRBV11-2, TRBJ2-1)
CASSPGNNEQFF

SEQ ID NO: 497271 - protein, 13 aa, Homo sapiens
  CDR3 for alpha chain variable domain of TCR clone 248636 (TRAV30, TRAJ24)
CGTVTASLGKLQF

SEQ ID NO: 497272 - protein, 14 aa, Homo sapiens
  CDR3 for beta chain variable domain of TCR clone 248636 (TRBV6-3, TRBJ2-2)
CASTYTPDTGELFF

SEQ ID NO: 497273 - protein, 12 aa, Homo sapiens
  CDR3 for alpha chain variable domain of TCR clone 248637 (TRAV9-2, TRAJ26)
CALRGYGQKFVF

SEQ ID NO: 497274 - protein, 12 aa, Homo sapiens
  CDR3 for beta chain variable domain of TCR clone 248637 (TRBV29-1, TRBJ2-3)
CSVTWGADTQYF

SEQ ID NO: 497275 - protein, 13 aa, Homo sapiens
  CDR3 for alpha chain variable domain of TCR clone 248638 (TRAV12-1, TRAJ16)
CVVNGPDGQKLLF

SEQ ID NO: 497276 - protein, 12 aa, Homo sapiens
  CDR3 for beta chain variable domain of TCR clone 248638 (TRBV7-6, TRBJ2-5)
CASSLSQETQYF

SEQ ID NO: 497277 - protein, 15 aa, Homo sapiens
  CDR3 for alpha chain variable domain of TCR clone 248639 (TRAV3, TRAJ5)
CAVRDRKTGRRALTF

SEQ ID NO: 497278 - protein, 14 aa, Homo sapiens
  CDR3 for beta chain variable domain of TCR clone 248639 (TRBV7-8, TRBJ2-7)
CASRSQGAAYEQYF

SEQ ID NO: 497279 - protein, 14 aa, Homo sapiens
  CDR3 for alpha chain variable domain of TCR clone 248640 (TRAV1-2, TRAJ8)
CAVREDTGLQKLVF

SEQ ID NO: 497280 - protein, 14 aa, Homo sapiens
  CDR3 for beta chain variable domain of TCR clone 248640 (TRBV29-1, TRBJ2-3)
CSAGAGVGADTQYF

SEQ ID NO: 497281 - protein, 18 aa, Homo sapiens
  CDR3 for alpha chain variable domain of TCR clone 248641 (TRAV26-1, TRAJ23)
CIVRVGLEVWNQGGKLIF

SEQ ID NO: 497282 - protein, 16 aa, Homo sapiens
  CDR3 for beta chain variable domain of TCR clone 248641 (TRBV12-4, TRBJ1-5)
CASSRPVGGSNQPQHF

SEQ ID NO: 497283 - protein, 11 aa, Homo sapiens
  CDR3 for alpha chain variable domain of TCR clone 248642 (TRAV3, TRAJ21)
CAVGNFNKFYF

SEQ ID NO: 497284 - protein, 16 aa, Homo sapiens
  CDR3 for beta chain variable domain of TCR clone 248642 (TRBV19, TRBJ2-1)
FASSNAGPSSYNEQFF

SEQ ID NO: 497285 - protein, 14 aa, Homo sapiens
  CDR3 for alpha chain variable domain of TCR clone 248643 (TRAV8-2, TRAJ33)
CVVSDRNSNYQLIW

SEQ ID NO: 497286 - protein, 17 aa, Homo sapiens
  CDR3 for beta chain variable domain of TCR clone 248643 (TRBV5-1, TRBJ2-5)
CASSPVALGQNQETQYF

SEQ ID NO: 497287 - protein, 17 aa, Homo sapiens
  CDR3 for alpha chain variable domain of TCR clone 248644 (TRAV38-2/DV8, TRAJ38)
CAYRSARGAGNNCKLIW

SEQ ID NO: 497288 - protein, 13 aa, Homo sapiens
  CDR3 for beta chain variable domain of TCR clone 248644 (TRBV6-5, TRBJ2-1)
CASRGRVGNEQFF

SEQ ID NO: 497289 - protein, 14 aa, Homo sapiens
  CDR3 for alpha chain variable domain of TCR clone 248645 (TRAV21, TRAJ4)
CAAPGVGGYNKLIF

SEQ ID NO: 497290 - protein, 13 aa, Homo sapiens
  CDR3 for beta chain variable domain of TCR clone 248645 (TRBV7-3, TRBJ2-1)
CASSPGSYNEQFS

SEQ ID NO: 497291 - protein, 13 aa, Homo sapiens
  CDR3 for alpha chain variable domain of TCR clone 248646 (TRAV3, TRAJ8)
CAVRLTGFHKLVF

SEQ ID NO: 497292 - protein, 12 aa, Homo sapiens
  CDR3 for beta chain variable domain of TCR clone 248646 (TRBV2, TRBJ1-2)
CASSGQTYGYTF

SEQ ID NO: 497293 - protein, 14 aa, Homo sapiens
  CDR3 for alpha chain variable domain of TCR clone 248647 (TRAV3, TRAJ36)
CAVRDGAGANNLFF

SEQ ID NO: 497294 - protein, 14 aa, Homo sapiens
  CDR3 for beta chain variable domain of TCR clone 248647 (TRBV5-5, TRBJ1-5)
CASSGQGVDQPQHF

SEQ ID NO: 497295 - protein, 15 aa, Homo sapiens
  CDR3 for alpha chain variable domain of TCR clone 248648 (TRAV12-3, TRAJ17)
CAMSPSLAAGNKLTF

SEQ ID NO: 497296 - protein, 14 aa, Homo sapiens
  CDR3 for beta chain variable domain of TCR clone 248648 (TRBV7-2, TRBJ2-7)
CASRSQGAAYEQYF

SEQ ID NO: 497297 - protein, 13 aa, Homo sapiens
  CDR3 for alpha chain variable domain of TCR clone 248649 (TRAV29/DV5, TRAJ31)
CAASRNNNARLMF

SEQ ID NO: 497298 - protein, 15 aa, Homo sapiens
  CDR3 for beta chain variable domain of TCR clone 248649 (TRBV2, TRBJ2-1)
CASSELAGATMSSSS

SEQ ID NO: 497299 - protein, 17 aa, Homo sapiens
  CDR3 for alpha chain variable domain of TCR clone 248650 (TRAV3, TRAJ6)
CAVRDGPRAGGSYIPTF

SEQ ID NO: 497300 - protein, 14 aa, Homo sapiens
  CDR3 for beta chain variable domain of TCR clone 248650 (TRBV7-9, TRBJ2-1)
CASSSMVGFGEQFF

SEQ ID NO: 497301 - protein, 14 aa, Homo sapiens
  CDR3 for alpha chain variable domain of TCR clone 248651 (TRAV26-1, TRAJ38)
CIADNAGNNLKLIL

SEQ ID NO: 497302 - protein, 13 aa, Homo sapiens
  CDR3 for beta chain variable domain of TCR clone 248651 (TRBV20-1, TRBJ1-1)
CSARGGGNTEAFF

SEQ ID NO: 497303 - protein, 11 aa, Homo sapiens
  CDR3 for alpha chain variable domain of TCR clone 248652 (TRAV13-1, TRAJ39)
CASHAGNMLTF

SEQ ID NO: 497304 - protein, 14 aa, Homo sapiens
  CDR3 for beta chain variable domain of TCR clone 248652 (TRBV11-2, TRBJ1-5)
CASSLDRGRQRQHF

SEQ ID NO: 497305 - protein, 14 aa, Homo sapiens
  CDR3 for alpha chain variable domain of TCR clone 248653 (TRAV12-3, TRAJ10)
SHLPLTGGGNKLTF

SEQ ID NO: 497306 - protein, 14 aa, Homo sapiens
  CDR3 for beta chain variable domain of TCR clone 248653 (TRBV6-1, TRBJ1-3)
CASGQGGGGNTIYF

SEQ ID NO: 497307 - protein, 11 aa, Homo sapiens
  CDR3 for alpha chain variable domain of TCR clone 248654 (TRAV21, TRAJ34)
CAVTNTDKLIV

SEQ ID NO: 497308 - protein, 16 aa, Homo sapiens
  CDR3 for beta chain variable domain of TCR clone 248654 (TRBV20-1, TRBJ1-4)
CSAPGQGLLTNEKLFF

SEQ ID NO: 497309 - protein, 16 aa, Homo sapiens
  CDR3 for alpha chain variable domain of TCR clone 248655 (TRAV4, TRAJ5)
CLVGPDHGHGQESTYF

SEQ ID NO: 497310 - protein, 15 aa, Homo sapiens
  CDR3 for beta chain variable domain of TCR clone 248655 (TRBV27, TRBJ2-5)
CASSLIPSGRETQYF

SEQ ID NO: 497311 - protein, 15 aa, Homo sapiens
  CDR3 for alpha chain variable domain of TCR clone 248656 (TRAV10, TRAJ34)
PTSVWLAVNTDKLIF

SEQ ID NO: 497312 - protein, 14 aa, Homo sapiens
  CDR3 for beta chain variable domain of TCR clone 248656 (TRBV19, TRBJ2-1)
CASPTVVLSGELFF

SEQ ID NO: 497313 - protein, 12 aa, Homo sapiens
  CDR3 for alpha chain variable domain of TCR clone 248657 (TRAV20, TRAJ39)
CAVGNAGNMLTF

SEQ ID NO: 497314 - protein, 16 aa, Homo sapiens
  CDR3 for beta chain variable domain of TCR clone 248657 (TRBV15, TRBJ1-2)
CAASRGPRTGGGGYSF

SEQ ID NO: 497315 - protein, 14 aa, Homo sapiens
  CDR3 for alpha chain variable domain of TCR clone 248658 (TRAV2, TRAJ9)
CAVADRSGGFKTIF

SEQ ID NO: 497316 - protein, 14 aa, Homo sapiens
  CDR3 for beta chain variable domain of TCR clone 248658 (TRBV20-1, TRBJ2-1)
CSAQIGGSANEQFF

SEQ ID NO: 497317 - protein, 22 aa, Homo sapiens
  CDR3 for alpha chain variable domain of TCR clone 248659 (TRAV40, )
CLLGDGISDIQNPDPAVYQLRD

SEQ ID NO: 497318 - protein, 16 aa, Homo sapiens
  CDR3 for beta chain variable domain of TCR clone 248659 (TRBV20-1, TRBJ1-5)
CSAELPGQQTNQPQHF

SEQ ID NO: 497319 - protein, 14 aa, Homo sapiens
  CDR3 for alpha chain variable domain of TCR clone 248660 (TRAV26-1, TRAJ38)
CIADNAGNNRKLIW

SEQ ID NO: 497320 - protein, 16 aa, Homo sapiens
  CDR3 for beta chain variable domain of TCR clone 248660 (TRBV19, TRBJ2-2)
CASSLQRGGNTGELFF

SEQ ID NO: 497321 - protein, 11 aa, Homo sapiens
  CDR3 for alpha chain variable domain of TCR clone 248661 (TRAV13-1, TRAJ39)
CASHAGNMLTF

SEQ ID NO: 497322 - protein, 14 aa, Homo sapiens
  CDR3 for beta chain variable domain of TCR clone 248661 (TRBV7-9, TRBJ2-1)
CASSSMVGFGEQFF

SEQ ID NO: 497323 - protein, 14 aa, Homo sapiens
  CDR3 for alpha chain variable domain of TCR clone 248662 (TRAV8-2, TRAJ23)
CVVSDDNQGGKLIF

SEQ ID NO: 497324 - protein, 13 aa, Homo sapiens
  CDR3 for beta chain variable domain of TCR clone 248662 (TRBV7-7, TRBJ2-2)
CASSLTSSGELFF

SEQ ID NO: 497325 - protein, 20 aa, Homo sapiens
  CDR3 for alpha chain variable domain of TCR clone 248663 (TRAV25, TRAJ21)
TATQTTDVGTYPLSFNKFYF

SEQ ID NO: 497326 - protein, 15 aa, Homo sapiens
  CDR3 for beta chain variable domain of TCR clone 248663 (TRBV10-3, TRBJ2-7)
CAISAQAGGPYEQYF

SEQ ID NO: 497327 - protein, 14 aa, Homo sapiens
  CDR3 for alpha chain variable domain of TCR clone 248664 (TRAV12-2, TRAJ13)
CSLKKTGGYQKVTV

SEQ ID NO: 497328 - protein, 15 aa, Homo sapiens
  CDR3 for beta chain variable domain of TCR clone 248664 (TRBV27, TRBJ2-1)
CASSNGGGSSNEQFF

SEQ ID NO: 497329 - protein, 15 aa, Homo sapiens
  CDR3 for alpha chain variable domain of TCR clone 248665 (TRAV13-1, TRAJ11)
CAASNRNSGYSTLPF

SEQ ID NO: 497330 - protein, 11 aa, Homo sapiens
  CDR3 for beta chain variable domain of TCR clone 248665 (TRBV20-1, TRBJ2-7)
CSARLSYEQYF

SEQ ID NO: 497331 - protein, 18 aa, Homo sapiens
  CDR3 for alpha chain variable domain of TCR clone 248666 (TRAV21, TRAJ52)
CAVRPSPAGGTSYGKQTF

SEQ ID NO: 497332 - protein, 14 aa, Homo sapiens
  CDR3 for beta chain variable domain of TCR clone 248666 (TRBV4-1, TRBJ2-2)
CASSQAVNTGELFF

SEQ ID NO: 497333 - protein, 14 aa, Homo sapiens
  CDR3 for alpha chain variable domain of TCR clone 248667 (TRAV17, TRAJ28)
CAIYSGAGSYQLTF

SEQ ID NO: 497334 - protein, 15 aa, Homo sapiens
  CDR3 for beta chain variable domain of TCR clone 248667 (TRBV4-1, TRBJ2-7)
CASSQQGQGFDEQYF

SEQ ID NO: 497335 - protein, 14 aa, Homo sapiens
  CDR3 for alpha chain variable domain of TCR clone 248668 (TRAV2, TRAJ37)
CAVDCTSNTGKLIF

SEQ ID NO: 497336 - protein, 15 aa, Homo sapiens
  CDR3 for beta chain variable domain of TCR clone 248668 (TRBV20-1, TRBJ1-1)
CSASRGVTRNTEAFF

SEQ ID NO: 497337 - protein, 12 aa, Homo sapiens
  CDR3 for alpha chain variable domain of TCR clone 248669 (TRAV12-3, TRAJ17)
CAMTLTGNKLTF

SEQ ID NO: 497338 - protein, 15 aa, Homo sapiens
  CDR3 for beta chain variable domain of TCR clone 248669 (TRBV20-1, TRBJ2-7)
CSARDRATGMDEQYF

SEQ ID NO: 497339 - protein, 14 aa, Homo sapiens
  CDR3 for alpha chain variable domain of TCR clone 248670 (TRAV3, TRAJ20)
CAVPPAPNDYKLSF

SEQ ID NO: 497340 - protein, 17 aa, Homo sapiens
  CDR3 for beta chain variable domain of TCR clone 248670 (TRBV13, TRBJ2-3)
CASSLSRVAGGRNTQYF

SEQ ID NO: 497341 - protein, 14 aa, Homo sapiens
  CDR3 for alpha chain variable domain of TCR clone 248671 (TRAV16, TRAJ58)
CALKRETSGSRLTF

SEQ ID NO: 497342 - protein, 17 aa, Homo sapiens
  CDR3 for beta chain variable domain of TCR clone 248671 (TRBV18, TRBJ2-1)
CASSKGLSGGADNEQFF

SEQ ID NO: 497343 - protein, 16 aa, Homo sapiens
  CDR3 for alpha chain variable domain of TCR clone 248672 (TRAV12-2, TRAJ28)
CAVITDSGAGSYQRTF

SEQ ID NO: 497344 - protein, 14 aa, Homo sapiens
  CDR3 for beta chain variable domain of TCR clone 248672 (TRBV25-1, TRBJ1-1)
CASTHLGGNTEAFF

SEQ ID NO: 497345 - protein, 12 aa, Homo sapiens
  CDR3 for alpha chain variable domain of TCR clone 248673 (TRAV38-2/DV8, TRAJ49)
CASRGTGNQFYF

SEQ ID NO: 497346 - protein, 16 aa, Homo sapiens
  CDR3 for beta chain variable domain of TCR clone 248673 (TRBV7-9, TRBJ2-2)
CASSLATGVGTGELFF

SEQ ID NO: 497347 - protein, 14 aa, Homo sapiens
  CDR3 for alpha chain variable domain of TCR clone 248674 (TRAV17, TRAJ22)
CATRYCWFCKATDL

SEQ ID NO: 497348 - protein, 13 aa, Homo sapiens
  CDR3 for beta chain variable domain of TCR clone 248674 (TRBV4-1, TRBJ1-1)
CASSRKMNTEAFF

SEQ ID NO: 497349 - protein, 14 aa, Homo sapiens
  CDR3 for alpha chain variable domain of TCR clone 248675 (TRAV17, TRAJ57)
CATDPQGGSEKLVF

SEQ ID NO: 497350 - protein, 16 aa, Homo sapiens
  CDR3 for beta chain variable domain of TCR clone 248675 (TRBV27, TRBJ2-1)
CASSLSKGFGLDEQFF

SEQ ID NO: 497351 - protein, 15 aa, Homo sapiens
  CDR3 for alpha chain variable domain of TCR clone 248676 (TRAV27, TRAJ38)
CAARRNAGNNRTLIW

SEQ ID NO: 497352 - protein, 13 aa, Homo sapiens
  CDR3 for beta chain variable domain of TCR clone 248676 (TRBV10-3, TRBJ2-7)
CASKLAVNYEQYF

SEQ ID NO: 497353 - protein, 21 aa, Homo sapiens
  CDR3 for alpha chain variable domain of TCR clone 248677 (TRAV9-2, )
CALIQIGDIQNPDPAVYQLRD

SEQ ID NO: 497354 - protein, 15 aa, Homo sapiens
  CDR3 for beta chain variable domain of TCR clone 248677 (TRBV18, TRBJ2-1)
CASSPPSASYNEQFF

SEQ ID NO: 497355 - protein, 14 aa, Homo sapiens
  CDR3 for alpha chain variable domain of TCR clone 248678 (TRAV8-3, TRAJ36)
CAVGTITGANNLFF

SEQ ID NO: 497356 - protein, 15 aa, Homo sapiens
  CDR3 for beta chain variable domain of TCR clone 248678 (TRBV4-1, TRBJ2-1)
CASSQDPGDYNEQFF

SEQ ID NO: 497357 - protein, 10 aa, Homo sapiens
  CDR3 for alpha chain variable domain of TCR clone 248679 (TRAV23/DV6, TRAJ57)
CAASSTLSQG

SEQ ID NO: 497358 - protein, 12 aa, Homo sapiens
  CDR3 for beta chain variable domain of TCR clone 248679 (TRBV19, TRBJ2-1)
CASSQISNEQFF

SEQ ID NO: 497359 - protein, 13 aa, Homo sapiens
  CDR3 for alpha chain variable domain of TCR clone 248680 (TRAV8-3, TRAJ40)
CAVDPSGTYKYIF

SEQ ID NO: 497360 - protein, 15 aa, Homo sapiens
  CDR3 for beta chain variable domain of TCR clone 248680 (TRBV27, TRBJ2-1)
CASSNGGGSSNEQFF

SEQ ID NO: 497361 - protein, 20 aa, Homo sapiens
  CDR3 for alpha chain variable domain of TCR clone 248681 (TRAV26-1, TRAJ45)
CCVLLHRRKVFRGGADGLTF

SEQ ID NO: 497362 - protein, 16 aa, Homo sapiens
  CDR3 for beta chain variable domain of TCR clone 248681 (TRBV10-3, TRBJ1-6)
CAISERRGQGNSPLHF

SEQ ID NO: 497363 - protein, 15 aa, Homo sapiens
  CDR3 for alpha chain variable domain of TCR clone 248682 (TRAV8-3, TRAJ7)
CAVGSISYGNNRLAF

SEQ ID NO: 497364 - protein, 14 aa, Homo sapiens
  CDR3 for beta chain variable domain of TCR clone 248682 (TRBV12-4, TRBJ1-1)
CASSLGTGGTEAFF

SEQ ID NO: 497365 - protein, 15 aa, Homo sapiens
  CDR3 for alpha chain variable domain of TCR clone 248683 (TRAV3, TRAJ22)
CAVRDRGGSARQLTF

SEQ ID NO: 497366 - protein, 16 aa, Homo sapiens
  CDR3 for beta chain variable domain of TCR clone 248683 (TRBV5-1, TRBJ2-7)
CASSLEGLAGLYEQYF

SEQ ID NO: 497367 - protein, 11 aa, Homo sapiens
  CDR3 for alpha chain variable domain of TCR clone 248684 (TRAV3, TRAJ21)
CAVGNLNKLYF

SEQ ID NO: 497368 - protein, 16 aa, Homo sapiens
  CDR3 for beta chain variable domain of TCR clone 248684 (TRBV19, TRBJ2-1)
CASSKAGPSSYNEQFF

SEQ ID NO: 497369 - protein, 13 aa, Homo sapiens
  CDR3 for alpha chain variable domain of TCR clone 248685 (TRAV13-1, TRAJ39)
CAASIWAGNMLTS

SEQ ID NO: 497370 - protein, 16 aa, Homo sapiens
  CDR3 for beta chain variable domain of TCR clone 248685 (TRBV7-3, TRBJ2-2)
CASSLKRGTLSGELFF

SEQ ID NO: 497371 - protein, 14 aa, Homo sapiens
  CDR3 for alpha chain variable domain of TCR clone 248686 (TRAV34, TRAJ22)
CGADTSGSARQLTF

SEQ ID NO: 497372 - protein, 13 aa, Homo sapiens
  CDR3 for beta chain variable domain of TCR clone 248686 (TRBV29-1, TRBJ2-1)
CSVEGGRVNEQFF

SEQ ID NO: 497373 - protein, 14 aa, Homo sapiens
  CDR3 for alpha chain variable domain of TCR clone 248687 (TRAV13-2, TRAJ5)
CAESWDTGRRALTF

SEQ ID NO: 497374 - protein, 12 aa, Homo sapiens
  CDR3 for beta chain variable domain of TCR clone 248687 (TRBV11-2, TRBJ2-2)
CASSLGGGELFF

SEQ ID NO: 497375 - protein, 16 aa, Homo sapiens
  CDR3 for alpha chain variable domain of TCR clone 248688 (TRAV8-3, TRAJ44)
CAVGAANTGTASRLTF

SEQ ID NO: 497376 - protein, 15 aa, Homo sapiens
  CDR3 for beta chain variable domain of TCR clone 248688 (TRBV27, TRBJ1-5)
CASTFNRGSNQPQHF

SEQ ID NO: 497377 - protein, 15 aa, Homo sapiens
  CDR3 for alpha chain variable domain of TCR clone 248689 (TRAV8-6, TRAJ11)
CAVNFMNSGYSTLTF

SEQ ID NO: 497378 - protein, 18 aa, Homo sapiens
  CDR3 for beta chain variable domain of TCR clone 248689 (TRBV4-3, TRBJ1-2)
CASSQDGQSAPSDYGYTF

SEQ ID NO: 497379 - protein, 11 aa, Homo sapiens
  CDR3 for alpha chain variable domain of TCR clone 248690 (TRAV21, TRAJ34)
CAHYNTDKLIF

SEQ ID NO: 497380 - protein, 15 aa, Homo sapiens
  CDR3 for beta chain variable domain of TCR clone 248690 (TRBV28, TRBJ2-1)
CASSGLAEVDNEQFF

SEQ ID NO: 497381 - protein, 12 aa, Homo sapiens
  CDR3 for alpha chain variable domain of TCR clone 248691 (TRAV3, TRAJ20)
CAVRDGDYKLSF

SEQ ID NO: 497382 - protein, 15 aa, Homo sapiens
  CDR3 for beta chain variable domain of TCR clone 248691 (TRBV10-2, TRBJ2-6)
CASSEQGTGANVLTF

SEQ ID NO: 497383 - protein, 12 aa, Homo sapiens
  CDR3 for alpha chain variable domain of TCR clone 248692 (TRAV21, TRAJ37)
CAVENNTGKLIF

SEQ ID NO: 497384 - protein, 14 aa, Homo sapiens
  CDR3 for beta chain variable domain of TCR clone 248692 (TRBV7-9, TRBJ1-2)
CASSSGLKVYGYTF

SEQ ID NO: 497385 - protein, 13 aa, Homo sapiens
  CDR3 for alpha chain variable domain of TCR clone 248693 (TRAV30, TRAJ24)
CGTVTGSWGKLQF

SEQ ID NO: 497386 - protein, 14 aa, Homo sapiens
  CDR3 for beta chain variable domain of TCR clone 248693 (TRBV6-3, TRBJ2-2)
CASTYTPDTGELFF

SEQ ID NO: 497387 - protein, 12 aa, Homo sapiens
  CDR3 for alpha chain variable domain of TCR clone 248694 (TRAV27, TRAJ58)
CAGARDTSRLTF

SEQ ID NO: 497388 - protein, 14 aa, Homo sapiens
  CDR3 for beta chain variable domain of TCR clone 248694 (TRBV7-3, TRBJ2-1)
CASSLGTSANEQYF

SEQ ID NO: 497389 - protein, 13 aa, Homo sapiens
  CDR3 for alpha chain variable domain of TCR clone 248695 (TRAV3, TRAJ4)
CAVRDGGYNKLIF

SEQ ID NO: 497390 - protein, 15 aa, Homo sapiens
  CDR3 for beta chain variable domain of TCR clone 248695 (TRBV5-1, TRBJ2-1)
CASSPPRPPTMSSSS

SEQ ID NO: 497391 - protein, 12 aa, Homo sapiens
  CDR3 for alpha chain variable domain of TCR clone 248696 (TRAV2, TRAJ34)
CAVERNTDKLIF

SEQ ID NO: 497392 - protein, 23 aa, Homo sapiens
  CDR3 for beta chain variable domain of TCR clone 248696 (TRBV7-2, TRBJ2-5)
RGTRPCISVPAASLGGGEETQYF

SEQ ID NO: 497393 - protein, 16 aa, Homo sapiens
  CDR3 for alpha chain variable domain of TCR clone 248697 (TRAV30, TRAJ24)
CGTEIVDADSWGKFQF

SEQ ID NO: 497394 - protein, 19 aa, Homo sapiens
  CDR3 for beta chain variable domain of TCR clone 248697 (TRBV25-1, TRBJ2-2)
CAILVYRVDRGRKTGELFV

SEQ ID NO: 497395 - protein, 12 aa, Homo sapiens
  CDR3 for alpha chain variable domain of TCR clone 248698 (TRAV17, TRAJ39)
CATGAAGNMLTF

SEQ ID NO: 497396 - protein, 14 aa, Homo sapiens
  CDR3 for beta chain variable domain of TCR clone 248698 (TRBV7-9, TRBJ1-2)
CASSRQGANYGGTF

SEQ ID NO: 497397 - protein, 14 aa, Homo sapiens
  CDR3 for alpha chain variable domain of TCR clone 248699 (TRAV1-2, TRAJ8)
YAVREDTGFQKLVF

SEQ ID NO: 497398 - protein, 15 aa, Homo sapiens
  CDR3 for beta chain variable domain of TCR clone 248699 (TRBV7-3, TRBJ2-2)
CASSETGQGTGELFF

SEQ ID NO: 497399 - protein, 17 aa, Homo sapiens
  CDR3 for alpha chain variable domain of TCR clone 248700 (TRAV3, TRAJ42)
CAVRDRDYGGSQGNLIF

SEQ ID NO: 497400 - protein, 13 aa, Homo sapiens
  CDR3 for beta chain variable domain of TCR clone 248700 (TRBV2, TRBJ2-7)
CASGLGSSYEQYF

SEQ ID NO: 497401 - protein, 14 aa, Homo sapiens
  CDR3 for alpha chain variable domain of TCR clone 248701 (TRAV26-1, TRAJ38)
CIADNAGNNRKLFW

SEQ ID NO: 497402 - protein, 15 aa, Homo sapiens
  CDR3 for beta chain variable domain of TCR clone 248701 (TRBV20-1, TRBJ1-1)
CSASRGVTGNTEAFF

SEQ ID NO: 497403 - protein, 14 aa, Homo sapiens
  CDR3 for alpha chain variable domain of TCR clone 248702 (TRAV8-3, TRAJ4)
CAVGAAGGYNKLIF

SEQ ID NO: 497404 - protein, 12 aa, Homo sapiens
  CDR3 for beta chain variable domain of TCR clone 248702 (TRBV3-1, TRBJ2-1)
CASSQGSSGQFF

SEQ ID NO: 497405 - protein, 18 aa, Homo sapiens
  CDR3 for alpha chain variable domain of TCR clone 248703 (TRAV26-2, TRAJ54)
CILRDVEVAIQGAQKLVF

SEQ ID NO: 497406 - protein, 17 aa, Homo sapiens
  CDR3 for beta chain variable domain of TCR clone 248703 (TRBV20-1, TRBJ1-5)
CSASLSPGQGGNQPQHF

SEQ ID NO: 497407 - protein, 14 aa, Homo sapiens
  CDR3 for alpha chain variable domain of TCR clone 248704 (TRAV16, TRAJ37)
CALDISGNTGKLIF

SEQ ID NO: 497408 - protein, 14 aa, Homo sapiens
  CDR3 for beta chain variable domain of TCR clone 248704 (TRBV7-6, TRBJ2-7)
CASSFLQGADEQYF

SEQ ID NO: 497409 - protein, 14 aa, Homo sapiens
  CDR3 for alpha chain variable domain of TCR clone 248705 (TRAV8-2, TRAJ11)
CVVSEKSGYSTLTF

SEQ ID NO: 497410 - protein, 16 aa, Homo sapiens
  CDR3 for beta chain variable domain of TCR clone 248705 (TRBV28, TRBJ2-1)
CAGSSPEYPRDNEQFF

SEQ ID NO: 497411 - protein, 16 aa, Homo sapiens
  CDR3 for alpha chain variable domain of TCR clone 248706 (TRAV3, TRAJ3)
CAVRDRAKSSASKIIF

SEQ ID NO: 497412 - protein, 15 aa, Homo sapiens
  CDR3 for beta chain variable domain of TCR clone 248706 (TRBV7-2, TRBJ2-3)
CASSLNLRDTDTQYF

SEQ ID NO: 497413 - protein, 14 aa, Homo sapiens
  CDR3 for alpha chain variable domain of TCR clone 248707 (TRAV26-1, TRAJ57)
CIVITQGGSEKLVF

SEQ ID NO: 497414 - protein, 16 aa, Homo sapiens
  CDR3 for beta chain variable domain of TCR clone 248707 (TRBV4-1, TRBJ2-6)
CASSQDGGPGANVLTF

SEQ ID NO: 497415 - protein, 12 aa, Homo sapiens
  CDR3 for alpha chain variable domain of TCR clone 248708 (TRAV12-2, TRAJ42)
CAPGGSQGNLIF

SEQ ID NO: 497416 - protein, 14 aa, Homo sapiens
  CDR3 for beta chain variable domain of TCR clone 248708 (TRBV7-2, TRBJ1-6)
CASSLQGANSPLHF

SEQ ID NO: 497417 - protein, 15 aa, Homo sapiens
  CDR3 for alpha chain variable domain of TCR clone 248709 (TRAV2, TRAJ15)
CAVEDRGQAGTALIF

SEQ ID NO: 497418 - protein, 16 aa, Homo sapiens
  CDR3 for beta chain variable domain of TCR clone 248709 (TRBV12-4, TRBJ2-5)
CTSVPAVWGGSRTQYF

SEQ ID NO: 497419 - protein, 12 aa, Homo sapiens
  CDR3 for alpha chain variable domain of TCR clone 248710 (TRAV12-2, TRAJ10)
WGVTGGGNKLTF

SEQ ID NO: 497420 - protein, 14 aa, Homo sapiens
  CDR3 for beta chain variable domain of TCR clone 248710 (TRBV20-1, TRBJ2-3)
CSARGGTSTDTQYF

SEQ ID NO: 497421 - protein, 13 aa, Homo sapiens
  CDR3 for alpha chain variable domain of TCR clone 248711 (TRAV3, TRAJ21)
CAVREPDFNKFYF

SEQ ID NO: 497422 - protein, 14 aa, Homo sapiens
  CDR3 for beta chain variable domain of TCR clone 248711 (TRBV7-3, TRBJ2-2)
CASSSGGYTGELFF

SEQ ID NO: 497423 - protein, 11 aa, Homo sapiens
  CDR3 for alpha chain variable domain of TCR clone 248712 (TRAV12-2, TRAJ31)
CTILNNARLMF

SEQ ID NO: 497424 - protein, 16 aa, Homo sapiens
  CDR3 for beta chain variable domain of TCR clone 248712 (TRBV13, TRBJ2-2)
CASSPRTGEHTGELSF

SEQ ID NO: 497425 - protein, 12 aa, Homo sapiens
  CDR3 for alpha chain variable domain of TCR clone 248713 (TRAV12-1, TRAJ40)
CVVSSGTYRYIF

SEQ ID NO: 497426 - protein, 14 aa, Homo sapiens
  CDR3 for beta chain variable domain of TCR clone 248713 (TRBV20-1, TRBJ2-2)
CSAPDTANTGELFF

SEQ ID NO: 497427 - protein, 13 aa, Homo sapiens
  CDR3 for alpha chain variable domain of TCR clone 248714 (TRAV26-2, TRAJ43)
CILRAVNNNDMRF

SEQ ID NO: 497428 - protein, 22 aa, Homo sapiens
  CDR3 for beta chain variable domain of TCR clone 248714 (TRBV7-2, TRBJ2-1)
RRTRPCISVPAPTGQGSNEQLF

SEQ ID NO: 497429 - protein, 16 aa, Homo sapiens
  CDR3 for alpha chain variable domain of TCR clone 248715 (TRAV26-1, TRAJ42)
CIVRPIMEEAKEISSF

SEQ ID NO: 497430 - protein, 16 aa, Homo sapiens
  CDR3 for beta chain variable domain of TCR clone 248715 (TRBV7-3, TRBJ2-2)
CASSVKRGTLSGELFF

SEQ ID NO: 497431 - protein, 13 aa, Homo sapiens
  CDR3 for alpha chain variable domain of TCR clone 248716 (TRAV16, TRAJ26)
CITLLCLCQNFVF

SEQ ID NO: 497432 - protein, 12 aa, Homo sapiens
  CDR3 for beta chain variable domain of TCR clone 248716 (TRBV11-2, TRBJ2-1)
CASSPGNNEQFF

SEQ ID NO: 497433 - protein, 11 aa, Homo sapiens
  CDR3 for alpha chain variable domain of TCR clone 248717 (TRAV21, TRAJ34)
CAHYNTDKLIF

SEQ ID NO: 497434 - protein, 15 aa, Homo sapiens
  CDR3 for beta chain variable domain of TCR clone 248717 (TRBV10-2, TRBJ2-6)
CASSEQGTGANVLTF

SEQ ID NO: 497435 - protein, 14 aa, Homo sapiens
  CDR3 for alpha chain variable domain of TCR clone 248718 (TRAV29/DV5, TRAJ36)
CAARRKTGANNLFF

SEQ ID NO: 497436 - protein, 14 aa, Homo sapiens
  CDR3 for beta chain variable domain of TCR clone 248718 (TRBV12-5, TRBJ2-5)
CASGSRTHQATQYF

SEQ ID NO: 497437 - protein, 13 aa, Homo sapiens
  CDR3 for alpha chain variable domain of TCR clone 248719 (TRAV8-1, TRAJ23)
CAVTGGQGGKLIF

SEQ ID NO: 497438 - protein, 12 aa, Homo sapiens
  CDR3 for beta chain variable domain of TCR clone 248719 (TRBV7-2, TRBJ2-2)
CASSLPPGMLFF

SEQ ID NO: 497439 - protein, 13 aa, Homo sapiens
  CDR3 for alpha chain variable domain of TCR clone 248720 (TRAV36/DV7, TRAJ54)
CAVEVHGAQKLVF

SEQ ID NO: 497440 - protein, 15 aa, Homo sapiens
  CDR3 for beta chain variable domain of TCR clone 248720 (TRBV20-1, TRBJ2-7)
CSARDRVSGMDEQCF

SEQ ID NO: 497441 - protein, 16 aa, Homo sapiens
  CDR3 for alpha chain variable domain of TCR clone 248721 (TRAV26-1, TRAJ52)
CIVSNAGGTSYGKLTF

SEQ ID NO: 497442 - protein, 14 aa, Homo sapiens
  CDR3 for beta chain variable domain of TCR clone 248721 (TRBV7-9, TRBJ2-4)
CASSLAMGGNIQYF

SEQ ID NO: 497443 - protein, 11 aa, Homo sapiens
  CDR3 for alpha chain variable domain of TCR clone 248722 (TRAV13-1, TRAJ39)
CASHAGNMLTF

SEQ ID NO: 497444 - protein, 16 aa, Homo sapiens
  CDR3 for beta chain variable domain of TCR clone 248722 (TRBV4-2, TRBJ2-1)
CASSQETATPYNEQFF

SEQ ID NO: 497445 - protein, 15 aa, Homo sapiens
  CDR3 for alpha chain variable domain of TCR clone 248723 (TRAV2, TRAJ11)
CAVGGRNSGYSTLTF

SEQ ID NO: 497446 - protein, 14 aa, Homo sapiens
  CDR3 for beta chain variable domain of TCR clone 248723 (TRBV20-1, TRBJ2-1)
CSAQVGGSANEQFF

SEQ ID NO: 497447 - protein, 14 aa, Homo sapiens
  CDR3 for alpha chain variable domain of TCR clone 248724 (TRAV13-1, TRAJ16)
CAAAYFFRWPEAAL

SEQ ID NO: 497448 - protein, 14 aa, Homo sapiens
  CDR3 for beta chain variable domain of TCR clone 248724 (TRBV7-8, TRBJ2-3)
CASSFPDGQDTQYF

SEQ ID NO: 497449 - protein, 14 aa, Homo sapiens
  CDR3 for alpha chain variable domain of TCR clone 248725 (TRAV20, TRAJ56)
CAVQFGGANSKLTF

SEQ ID NO: 497450 - protein, 13 aa, Homo sapiens
  CDR3 for beta chain variable domain of TCR clone 248725 (TRBV7-2, TRBJ2-4)
CASSREHANIQYF

SEQ ID NO: 497451 - protein, 15 aa, Homo sapiens
  CDR3 for alpha chain variable domain of TCR clone 248726 (TRAV12-2, TRAJ5)
CAVNGKDTGRRALTF

SEQ ID NO: 497452 - protein, 15 aa, Homo sapiens
  CDR3 for beta chain variable domain of TCR clone 248726 (TRBV7-9, TRBJ1-4)
CASSATGGNNEKLFF

SEQ ID NO: 497453 - protein, 14 aa, Homo sapiens
  CDR3 for alpha chain variable domain of TCR clone 248727 (TRAV9-2, TRAJ56)
CALSYTGANSKLTF

SEQ ID NO: 497454 - protein, 14 aa, Homo sapiens
  CDR3 for beta chain variable domain of TCR clone 248727 (TRBV4-1, TRBJ2-2)
CASSQAVNTGELFF

SEQ ID NO: 497455 - protein, 15 aa, Homo sapiens
  CDR3 for alpha chain variable domain of TCR clone 248728 (TRAV25, TRAJ52)
CARTSGGTSYGKLTF

SEQ ID NO: 497456 - protein, 16 aa, Homo sapiens
  CDR3 for beta chain variable domain of TCR clone 248728 (TRBV15, TRBJ1-2)
CATSRGPRTGGGGYTF

SEQ ID NO: 497457 - protein, 14 aa, Homo sapiens
  CDR3 for alpha chain variable domain of TCR clone 248729 (TRAV9-2, TRAJ39)
CALYIYNAGNMLTF

SEQ ID NO: 497458 - protein, 14 aa, Homo sapiens
  CDR3 for beta chain variable domain of TCR clone 248729 (TRBV11-2, TRBJ2-1)
CASTTGQGNNEQFF

SEQ ID NO: 497459 - protein, 13 aa, Homo sapiens
  CDR3 for alpha chain variable domain of TCR clone 248730 (TRAV3, TRAJ43)
CAVRDTRGGDMRF

SEQ ID NO: 497460 - protein, 15 aa, Homo sapiens
  CDR3 for beta chain variable domain of TCR clone 248730 (TRBV6-5, TRBJ1-5)
CASSYPRRSNQPQHF

SEQ ID NO: 497461 - protein, 15 aa, Homo sapiens
  CDR3 for alpha chain variable domain of TCR clone 248731 (TRAV3, TRAJ20)
CAVRDIKLSDYKISF

SEQ ID NO: 497462 - protein, 13 aa, Homo sapiens
  CDR3 for beta chain variable domain of TCR clone 248731 (TRBV20-1, TRBJ1-1)
CSARVGGNTEAFF

SEQ ID NO: 497463 - protein, 13 aa, Homo sapiens
  CDR3 for alpha chain variable domain of TCR clone 248732 (TRAV13-2, TRAJ48)
CAEMDFGNEKLTF

SEQ ID NO: 497464 - protein, 15 aa, Homo sapiens
  CDR3 for beta chain variable domain of TCR clone 248732 (TRBV7-9, TRBJ1-6)
GASSSPGRGNSPLHF

SEQ ID NO: 497465 - protein, 14 aa, Homo sapiens
  CDR3 for alpha chain variable domain of TCR clone 248733 (TRAV1-2, TRAJ16)
CAVNRFSDGQKLLF

SEQ ID NO: 497466 - protein, 13 aa, Homo sapiens
  CDR3 for beta chain variable domain of TCR clone 248733 (TRBV10-2, TRBJ2-7)
CASRESGVYEQYF

SEQ ID NO: 497467 - protein, 12 aa, Homo sapiens
  CDR3 for alpha chain variable domain of TCR clone 248734 (TRAV12-3, TRAJ17)
CAMTLTGNELTF

SEQ ID NO: 497468 - protein, 12 aa, Homo sapiens
  CDR3 for beta chain variable domain of TCR clone 248734 (TRBV29-1, TRBJ2-3)
CSVTGGADTQYF

SEQ ID NO: 497469 - protein, 17 aa, Homo sapiens
  CDR3 for alpha chain variable domain of TCR clone 248735 (TRAV13-1, TRAJ28)
CAASPPYSGAGRYQLPF

SEQ ID NO: 497470 - protein, 13 aa, Homo sapiens
  CDR3 for beta chain variable domain of TCR clone 248735 (TRBV12-5, TRBJ2-3)
CASGDRQSDTQYF

SEQ ID NO: 497471 - protein, 19 aa, Homo sapiens
  CDR3 for alpha chain variable domain of TCR clone 248736 (TRAV1-2, TRAJ26)
CLLPLCCERPDNYGQNFVF

SEQ ID NO: 497472 - protein, 15 aa, Homo sapiens
  CDR3 for beta chain variable domain of TCR clone 248736 (TRBV7-9, TRBJ1-6)
CASSSPGRGNSPLHF

SEQ ID NO: 497473 - protein, 12 aa, Homo sapiens
  CDR3 for alpha chain variable domain of TCR clone 248737 (TRAV13-1, TRAJ53)
AASGGSNYKLTF

SEQ ID NO: 497474 - protein, 15 aa, Homo sapiens
  CDR3 for beta chain variable domain of TCR clone 248737 (TRBV7-9, TRBJ1-4)
CASSRTGGFNENLFF

SEQ ID NO: 497475 - protein, 15 aa, Homo sapiens
  CDR3 for alpha chain variable domain of TCR clone 248738 (TRAV8-4, TRAJ3)
CAVTGENLVQQCFQD

SEQ ID NO: 497476 - protein, 17 aa, Homo sapiens
  CDR3 for beta chain variable domain of TCR clone 248738 (TRBV5-5, TRBJ1-1)
CASSLRFRGLMNTEAFF

SEQ ID NO: 497477 - protein, 12 aa, Homo sapiens
  CDR3 for alpha chain variable domain of TCR clone 248739 (TRAV12-3, TRAJ41)
CAMSYSGYALNF

SEQ ID NO: 497478 - protein, 13 aa, Homo sapiens
  CDR3 for beta chain variable domain of TCR clone 248739 (TRBV7-3, TRBJ2-1)
CASSLDSYNQQFF

SEQ ID NO: 497479 - protein, 12 aa, Homo sapiens
  CDR3 for alpha chain variable domain of TCR clone 248740 (TRAV2, TRAJ32)
CAAGGATNKLIF

SEQ ID NO: 497480 - protein, 15 aa, Homo sapiens
  CDR3 for beta chain variable domain of TCR clone 248740 (TRBV5-1, TRBJ2-7)
CASSLNGGPAREQYF

SEQ ID NO: 497481 - protein, 13 aa, Homo sapiens
  CDR3 for alpha chain variable domain of TCR clone 248741 (TRAV21, TRAJ36)
CAVIKTGANNLFF

SEQ ID NO: 497482 - protein, 15 aa, Homo sapiens
  CDR3 for beta chain variable domain of TCR clone 248741 (TRBV7-3, TRBJ2-1)
CASSPTGGGEVEQFF

SEQ ID NO: 497483 - protein, 14 aa, Homo sapiens
  CDR3 for alpha chain variable domain of TCR clone 248742 (TRAV35, TRAJ22)
CAGLRPGSARQLTF

SEQ ID NO: 497484 - protein, 15 aa, Homo sapiens
  CDR3 for beta chain variable domain of TCR clone 248742 (TRBV12-3, TRBJ2-5)
CASSPPPGLPATPYF

SEQ ID NO: 497485 - protein, 15 aa, Homo sapiens
  CDR3 for alpha chain variable domain of TCR clone 248743 (TRAV13-2, TRAJ23)
CAERGFYNQGGKLIF

SEQ ID NO: 497486 - protein, 14 aa, Homo sapiens
  CDR3 for beta chain variable domain of TCR clone 248743 (TRBV4-1, TRBJ2-3)
CASSQDWSTDTQYL

SEQ ID NO: 497487 - protein, 18 aa, Homo sapiens
  CDR3 for alpha chain variable domain of TCR clone 248744 (TRAV21, TRAJ52)
CAVRPSPAGGTSYGKLTF

SEQ ID NO: 497488 - protein, 15 aa, Homo sapiens
  CDR3 for beta chain variable domain of TCR clone 248744 (TRBV7-9, TRBJ2-7)
CASSSSGLAVYEQSF

SEQ ID NO: 497489 - protein, 11 aa, Homo sapiens
  CDR3 for alpha chain variable domain of TCR clone 248745 (TRAV12-2, TRAJ29)
CAVTLRSPLVF

SEQ ID NO: 497490 - protein, 14 aa, Homo sapiens
  CDR3 for beta chain variable domain of TCR clone 248745 (TRBV9, TRBJ1-2)
CASSVSTRSYGDTF

SEQ ID NO: 497491 - protein, 12 aa, Homo sapiens
  CDR3 for alpha chain variable domain of TCR clone 248746 (TRAV12-3, TRAJ17)
CAMTLTGNKLTF

SEQ ID NO: 497492 - protein, 14 aa, Homo sapiens
  CDR3 for beta chain variable domain of TCR clone 248746 (TRBV7-3, TRBJ2-7)
CASSLRGVSYEQYF

SEQ ID NO: 497493 - protein, 14 aa, Homo sapiens
  CDR3 for alpha chain variable domain of TCR clone 248747 (TRAV4, TRAJ17)
CLVGDPLVGNKLTF

SEQ ID NO: 497494 - protein, 14 aa, Homo sapiens
  CDR3 for beta chain variable domain of TCR clone 248747 (TRBV7-2, TRBJ2-7)
CASRSQGAAYEQYS

SEQ ID NO: 497495 - protein, 14 aa, Homo sapiens
  CDR3 for alpha chain variable domain of TCR clone 248748 (TRAV17, TRAJ57)
CATDPQGGSEKLVF

SEQ ID NO: 497496 - protein, 13 aa, Homo sapiens
  CDR3 for beta chain variable domain of TCR clone 248748 (TRBV19, TRBJ2-2)
CASSIWSTGELFF

SEQ ID NO: 497497 - protein, 14 aa, Homo sapiens
  CDR3 for alpha chain variable domain of TCR clone 248749 (TRAV26-1, TRAJ45)
CIEVTGGGADGLTF

SEQ ID NO: 497498 - protein, 14 aa, Homo sapiens
  CDR3 for beta chain variable domain of TCR clone 248749 (TRBV12-4, TRBJ1-1)
CASSLGTGGTEAFF

SEQ ID NO: 497499 - protein, 14 aa, Homo sapiens
  CDR3 for alpha chain variable domain of TCR clone 248750 (TRAV12-2, TRAJ13)
CAVKKTGGYQRVTF

SEQ ID NO: 497500 - protein, 13 aa, Homo sapiens
  CDR3 for beta chain variable domain of TCR clone 248750 (TRBV10-3, TRBJ2-7)
CASKLAVNYEQYF

SEQ ID NO: 497501 - protein, 14 aa, Homo sapiens
  CDR3 for alpha chain variable domain of TCR clone 248751 (TRAV16, TRAJ39)
CSLSKNNAGNMLTF

SEQ ID NO: 497502 - protein, 16 aa, Homo sapiens
  CDR3 for beta chain variable domain of TCR clone 248751 (TRBV6-6, TRBJ2-1)
CASSYSFSGSYSEQFF

SEQ ID NO: 497503 - protein, 13 aa, Homo sapiens
  CDR3 for alpha chain variable domain of TCR clone 248752 (TRAV16, TRAJ48)
CPPLNFGNEKLTF

SEQ ID NO: 497504 - protein, 11 aa, Homo sapiens
  CDR3 for beta chain variable domain of TCR clone 248752 (TRBV7-9, TRBJ2-3)
CASSPTDTQYF

SEQ ID NO: 497505 - protein, 13 aa, Homo sapiens
  CDR3 for alpha chain variable domain of TCR clone 248753 (TRAV21, TRAJ32)
CAVSGGATNKLIL

SEQ ID NO: 497506 - protein, 15 aa, Homo sapiens
  CDR3 for beta chain variable domain of TCR clone 248753 (TRBV23-1, TRBJ2-1)
CASSQWPQLIMSSSS

SEQ ID NO: 497507 - protein, 17 aa, Homo sapiens
  CDR3 for alpha chain variable domain of TCR clone 248754 (TRAV26-1, TRAJ22)
CIVRVPSHSGSARQLTF

SEQ ID NO: 497508 - protein, 16 aa, Homo sapiens
  CDR3 for beta chain variable domain of TCR clone 248754 (TRBV28, TRBJ2-1)
CASRRGGRVVGNEQFF

SEQ ID NO: 497509 - protein, 20 aa, Homo sapiens
  CDR3 for alpha chain variable domain of TCR clone 248755 (TRAV26-1, TRAJ42)
CCVLLHRQTYYGASQGNLIF

SEQ ID NO: 497510 - protein, 16 aa, Homo sapiens
  CDR3 for beta chain variable domain of TCR clone 248755 (TRBV7-3, TRBJ2-2)
CASSLKRGTLSGELFF

SEQ ID NO: 497511 - protein, 11 aa, Homo sapiens
  CDR3 for alpha chain variable domain of TCR clone 248756 (TRAV17, TRAJ31)
CATSNNARLMF

SEQ ID NO: 497512 - protein, 14 aa, Homo sapiens
  CDR3 for beta chain variable domain of TCR clone 248756 (TRBV7-2, TRBJ1-1)
CASSFLTGTTEAFF

SEQ ID NO: 497513 - protein, 15 aa, Homo sapiens
  CDR3 for alpha chain variable domain of TCR clone 248757 (TRAV3, TRAJ5)
CAVRDLDTCRRALTF

SEQ ID NO: 497514 - protein, 13 aa, Homo sapiens
  CDR3 for beta chain variable domain of TCR clone 248757 (TRBV12-4, TRBJ2-7)
CASSTTETYEQYF

SEQ ID NO: 497515 - protein, 15 aa, Homo sapiens
  CDR3 for alpha chain variable domain of TCR clone 248758 (TRAV26-1, TRAJ29)
GIVRVEGSGNTPLVF

SEQ ID NO: 497516 - protein, 15 aa, Homo sapiens
  CDR3 for beta chain variable domain of TCR clone 248758 (TRBV7-9, TRBJ1-5)
CASSQGHQPNQPQHS

SEQ ID NO: 497517 - protein, 14 aa, Homo sapiens
  CDR3 for alpha chain variable domain of TCR clone 248759 (TRAV1-2, TRAJ33)
CAVRAPDSNYQLIW

SEQ ID NO: 497518 - protein, 14 aa, Homo sapiens
  CDR3 for beta chain variable domain of TCR clone 248759 (TRBV11-3, TRBJ1-6)
CASSLSGGDSAFHF

SEQ ID NO: 497519 - protein, 14 aa, Homo sapiens
  CDR3 for alpha chain variable domain of TCR clone 248760 (TRAV12-3, TRAJ42)
CAMNYGGSQGNLIF

SEQ ID NO: 497520 - protein, 17 aa, Homo sapiens
  CDR3 for beta chain variable domain of TCR clone 248760 (TRBV7-9, TRBJ2-7)
CASSFDGSRGGAYEQYF

SEQ ID NO: 497521 - protein, 17 aa, Homo sapiens
  CDR3 for alpha chain variable domain of TCR clone 248761 (TRAV3, TRAJ6)
CAVRDGPSAGGSDIPTF

SEQ ID NO: 497522 - protein, 14 aa, Homo sapiens
  CDR3 for beta chain variable domain of TCR clone 248761 (TRBV7-2, TRBJ2-7)
CASSPKTSFYEQYF

SEQ ID NO: 497523 - protein, 14 aa, Homo sapiens
  CDR3 for alpha chain variable domain of TCR clone 248762 (TRAV17, TRAJ57)
CATDPQGGPEKLVF

SEQ ID NO: 497524 - protein, 15 aa, Homo sapiens
  CDR3 for beta chain variable domain of TCR clone 248762 (TRBV6-3, TRBJ2-7)
CASSSPGTVFYEQYF

SEQ ID NO: 497525 - protein, 12 aa, Homo sapiens
  CDR3 for alpha chain variable domain of TCR clone 248763 (TRAV27, TRAJ9)
CAGESVGFKTIF

SEQ ID NO: 497526 - protein, 14 aa, Homo sapiens
  CDR3 for beta chain variable domain of TCR clone 248763 (TRBV6-1, TRBJ2-1)
CASAKDGFYNEQFF

SEQ ID NO: 497527 - protein, 14 aa, Homo sapiens
  CDR3 for alpha chain variable domain of TCR clone 248764 (TRAV26-1, TRAJ39)
CIVRGSRSGNMLTF

SEQ ID NO: 497528 - protein, 15 aa, Homo sapiens
  CDR3 for beta chain variable domain of TCR clone 248764 (TRBV7-9, TRBJ1-5)
CASSQGHQPNQPQHF

SEQ ID NO: 497529 - protein, 12 aa, Homo sapiens
  CDR3 for alpha chain variable domain of TCR clone 248765 (TRAV12-3, TRAJ17)
CAMTLTGNKLTF

SEQ ID NO: 497530 - protein, 14 aa, Homo sapiens
  CDR3 for beta chain variable domain of TCR clone 248765 (TRBV7-2, TRBJ1-3)
CASSLGTAGNTMYF

SEQ ID NO: 497531 - protein, 13 aa, Homo sapiens
  CDR3 for alpha chain variable domain of TCR clone 248766 (TRAV8-3, TRAJ43)
CAVGIHNNNDMRF

SEQ ID NO: 497532 - protein, 16 aa, Homo sapiens
  CDR3 for beta chain variable domain of TCR clone 248766 (TRBV7-2, TRBJ2-5)
CASSLVLWTKQETQYF

SEQ ID NO: 497533 - protein, 13 aa, Homo sapiens
  CDR3 for alpha chain variable domain of TCR clone 248767 (TRAV8-3, TRAJ8)
WGPMNTGFQKLVF

SEQ ID NO: 497534 - protein, 13 aa, Homo sapiens
  CDR3 for beta chain variable domain of TCR clone 248767 (TRBV10-2, TRBJ2-3)
CASSESGDHTQYF

SEQ ID NO: 497535 - protein, 14 aa, Homo sapiens
  CDR3 for alpha chain variable domain of TCR clone 248768 (TRAV8-3, TRAJ4)
CAVGASGGYNKLTF

SEQ ID NO: 497536 - protein, 16 aa, Homo sapiens
  CDR3 for beta chain variable domain of TCR clone 248768 (TRBV4-3, TRBJ2-2)
CASSHLQGSGTGELFF

SEQ ID NO: 497537 - protein, 14 aa, Homo sapiens
  CDR3 for alpha chain variable domain of TCR clone 248769 (TRAV26-1, TRAJ38)
CIADNAGNNRKLIW

SEQ ID NO: 497538 - protein, 16 aa, Homo sapiens
  CDR3 for beta chain variable domain of TCR clone 248769 (TRBV7-2, TRBJ1-4)
CASSLAPGRRDEKLFC

SEQ ID NO: 497539 - protein, 12 aa, Homo sapiens
  CDR3 for alpha chain variable domain of TCR clone 248770 (TRAV3, TRAJ20)
CAVRDPDYKLSF

SEQ ID NO: 497540 - protein, 18 aa, Homo sapiens
  CDR3 for beta chain variable domain of TCR clone 248770 (TRBV7-3, TRBJ2-3)
CASSSTGTYPGSTDTQYF

SEQ ID NO: 497541 - protein, 13 aa, Homo sapiens
  CDR3 for alpha chain variable domain of TCR clone 248771 (TRAV3, TRAJ27)
CAVRPLGAGKSTF

SEQ ID NO: 497542 - protein, 15 aa, Homo sapiens
  CDR3 for beta chain variable domain of TCR clone 248771 (TRBV11-1, TRBJ2-7)
CASSLNYGASYEQYF

SEQ ID NO: 497543 - protein, 14 aa, Homo sapiens
  CDR3 for alpha chain variable domain of TCR clone 248772 (TRAV2, TRAJ37)
CAVDFTSNTGKLIF

SEQ ID NO: 497544 - protein, 15 aa, Homo sapiens
  CDR3 for beta chain variable domain of TCR clone 248772 (TRBV4-3, TRBJ1-1)
CASSQELGRGTEAFF

SEQ ID NO: 497545 - protein, 15 aa, Homo sapiens
  CDR3 for alpha chain variable domain of TCR clone 248773 (TRAV8-3, TRAJ45)
CASSYSGGGADELTF

SEQ ID NO: 497546 - protein, 13 aa, Homo sapiens
  CDR3 for beta chain variable domain of TCR clone 248773 (TRBV10-3, TRBJ2-7)
CASKLAVNYEQYV

SEQ ID NO: 497547 - protein, 17 aa, Homo sapiens
  CDR3 for alpha chain variable domain of TCR clone 248774 (TRAV3, TRAJ6)
CVVRDGPRAGGSYIPTF

SEQ ID NO: 497548 - protein, 13 aa, Homo sapiens
  CDR3 for beta chain variable domain of TCR clone 248774 (TRBV19, TRBJ1-2)
CASSQGQVYGYTF

SEQ ID NO: 497549 - protein, 17 aa, Homo sapiens
  CDR3 for alpha chain variable domain of TCR clone 248775 (TRAV17, TRAJ28)
CATGPRRGGAGSYQLTF

SEQ ID NO: 497550 - protein, 16 aa, Homo sapiens
  CDR3 for beta chain variable domain of TCR clone 248775 (TRBV25-1, TRBJ1-1)
CASSGDRDRGRNEAFF

SEQ ID NO: 497551 - protein, 14 aa, Homo sapiens
  CDR3 for alpha chain variable domain of TCR clone 248776 (TRAV8-4, TRAJ13)
CAVTLSGGYQKVTF

SEQ ID NO: 497552 - protein, 14 aa, Homo sapiens
  CDR3 for beta chain variable domain of TCR clone 248776 (TRBV7-2, TRBJ1-2)
CAGSQTGSTYGCTF

SEQ ID NO: 497553 - protein, 16 aa, Homo sapiens
  CDR3 for alpha chain variable domain of TCR clone 248777 (TRAV12-1, TRAJ12)
CVVNTLLMVSSYKLIF

SEQ ID NO: 497554 - protein, 16 aa, Homo sapiens
  CDR3 for beta chain variable domain of TCR clone 248777 (TRBV10-2, TRBJ2-7)
CASSESPGSSGFEQYF

SEQ ID NO: 497555 - protein, 12 aa, Homo sapiens
  CDR3 for alpha chain variable domain of TCR clone 248778 (TRAV12-3, TRAJ17)
RAMALTGNKLTF

SEQ ID NO: 497556 - protein, 12 aa, Homo sapiens
  CDR3 for beta chain variable domain of TCR clone 248778 (TRBV19, TRBJ2-1)
CASSRQGAEQFF

SEQ ID NO: 497557 - protein, 17 aa, Homo sapiens
  CDR3 for alpha chain variable domain of TCR clone 248779 (TRAV13-1, TRAJ52)
CAASSGAGGTSYGKLTF

SEQ ID NO: 497558 - protein, 15 aa, Homo sapiens
  CDR3 for beta chain variable domain of TCR clone 248779 (TRBV2, TRBJ2-1)
CANSELAGSYNERFF

SEQ ID NO: 497559 - protein, 17 aa, Homo sapiens
  CDR3 for alpha chain variable domain of TCR clone 248780 (TRAV3, TRAJ28)
CAVRPLYSGAGRYQLTF

SEQ ID NO: 497560 - protein, 16 aa, Homo sapiens
  CDR3 for beta chain variable domain of TCR clone 248780 (TRBV4-2, TRBJ1-4)
CASSQARGPTNEKLFF

SEQ ID NO: 497561 - protein, 12 aa, Homo sapiens
  CDR3 for alpha chain variable domain of TCR clone 248781 (TRAV1-1, TRAJ8)
CAGGTGFQKLVF

SEQ ID NO: 497562 - protein, 12 aa, Homo sapiens
  CDR3 for beta chain variable domain of TCR clone 248781 (TRBV7-9, TRBJ2-1)
CASSLGDGEQFF

SEQ ID NO: 497563 - protein, 18 aa, Homo sapiens
  CDR3 for alpha chain variable domain of TCR clone 248782 (TRAV21, TRAJ52)
CAVMPSPAGGTSYGNLTF

SEQ ID NO: 497564 - protein, 13 aa, Homo sapiens
  CDR3 for beta chain variable domain of TCR clone 248782 (TRBV7-3, TRBJ1-1)
CASSQDWGAEAFF

SEQ ID NO: 497565 - protein, 13 aa, Homo sapiens
  CDR3 for alpha chain variable domain of TCR clone 248783 (TRAV29/DV5, TRAJ31)
CAESRNNNARLMF

SEQ ID NO: 497566 - protein, 18 aa, Homo sapiens
  CDR3 for beta chain variable domain of TCR clone 248783 (TRBV11-2, TRBJ2-3)
CASSLGGASRGAPNTQYF

SEQ ID NO: 497567 - protein, 15 aa, Homo sapiens
  CDR3 for alpha chain variable domain of TCR clone 248784 (TRAV16, TRAJ4)
CAIEDPSGGYNKLIF

SEQ ID NO: 497568 - protein, 13 aa, Homo sapiens
  CDR3 for beta chain variable domain of TCR clone 248784 (TRBV7-3, TRBJ2-7)
CASSQAGGYEQYF

SEQ ID NO: 497569 - protein, 14 aa, Homo sapiens
  CDR3 for alpha chain variable domain of TCR clone 248785 (TRAV12-2, TRAJ45)
CAVNIGGGADGLPF

SEQ ID NO: 497570 - protein, 17 aa, Homo sapiens
  CDR3 for beta chain variable domain of TCR clone 248785 (TRBV7-8, TRBJ2-6)
CASSAGTGGAGANVLTF

SEQ ID NO: 497571 - protein, 13 aa, Homo sapiens
  CDR3 for alpha chain variable domain of TCR clone 248786 (TRAV29/DV5, TRAJ31)
CSASRNNNARLMF

SEQ ID NO: 497572 - protein, 13 aa, Homo sapiens
  CDR3 for beta chain variable domain of TCR clone 248786 (TRBV7-2, TRBJ2-4)
CASSREHANMQYF

SEQ ID NO: 497573 - protein, 14 aa, Homo sapiens
  CDR3 for alpha chain variable domain of TCR clone 248787 (TRAV12-2, TRAJ40)
CAVEIPSGTYKYIF

SEQ ID NO: 497574 - protein, 14 aa, Homo sapiens
  CDR3 for beta chain variable domain of TCR clone 248787 (TRBV20-1, TRBJ1-1)
CSAQTRIGGTEVFF

SEQ ID NO: 497575 - protein, 16 aa, Homo sapiens
  CDR3 for alpha chain variable domain of TCR clone 248788 (TRAV30, TRAJ24)
CGTEIVDADSWGKFQL

SEQ ID NO: 497576 - protein, 16 aa, Homo sapiens
  CDR3 for beta chain variable domain of TCR clone 248788 (TRBV13, TRBJ2-2)
CASSPRTGEHTGELFF

SEQ ID NO: 497577 - protein, 14 aa, Homo sapiens
  CDR3 for alpha chain variable domain of TCR clone 248789 (TRAV20, TRAJ22)
CAVALGGSARQLTF

SEQ ID NO: 497578 - protein, 15 aa, Homo sapiens
  CDR3 for beta chain variable domain of TCR clone 248789 (TRBV7-2, TRBJ1-1)
CASSFAGDRDTEAFV

SEQ ID NO: 497579 - protein, 13 aa, Homo sapiens
  CDR3 for alpha chain variable domain of TCR clone 248790 (TRAV12-1, TRAJ39)
CVARSGAGNMLTF

SEQ ID NO: 497580 - protein, 14 aa, Homo sapiens
  CDR3 for beta chain variable domain of TCR clone 248790 (TRBV27, TRBJ2-1)
CAGSIAETYNEQFF

SEQ ID NO: 497581 - protein, 18 aa, Homo sapiens
  CDR3 for alpha chain variable domain of TCR clone 248791 (TRAV26-2, TRAJ45)
CILRVDKYSGGGADVLTF

SEQ ID NO: 497582 - protein, 15 aa, Homo sapiens
  CDR3 for beta chain variable domain of TCR clone 248791 (TRBV5-1, TRBJ2-5)
CASSLGLAEQETQYF

SEQ ID NO: 497583 - protein, 11 aa, Homo sapiens
  CDR3 for alpha chain variable domain of TCR clone 248792 (TRAV12-3, TRAJ27)
CAMANAGKSTF

SEQ ID NO: 497584 - protein, 20 aa, Homo sapiens
  CDR3 for beta chain variable domain of TCR clone 248792 (TRBV11-3, TRBJ2-7)
CASSQRTSGSLRAVLRAGHQ

SEQ ID NO: 497585 - protein, 14 aa, Homo sapiens
  CDR3 for alpha chain variable domain of TCR clone 248793 (TRAV13-1, TRAJ44)
CAAKATGTASKLTF

SEQ ID NO: 497586 - protein, 15 aa, Homo sapiens
  CDR3 for beta chain variable domain of TCR clone 248793 (TRBV28, TRBJ2-1)
CASSIIAGGRSEQFF

SEQ ID NO: 497587 - protein, 15 aa, Homo sapiens
  CDR3 for alpha chain variable domain of TCR clone 248794 (TRAV26-2, TRAJ26)
CILRNFDNYGQNFVF

SEQ ID NO: 497588 - protein, 14 aa, Homo sapiens
  CDR3 for beta chain variable domain of TCR clone 248794 (TRBV29-1, TRBJ2-5)
CSFWTPYAGETQYF

SEQ ID NO: 497589 - protein, 11 aa, Homo sapiens
  CDR3 for alpha chain variable domain of TCR clone 248795 (TRAV3, TRAJ13)
CAVTSYQKVTF

SEQ ID NO: 497590 - protein, 15 aa, Homo sapiens
  CDR3 for beta chain variable domain of TCR clone 248795 (TRBV7-9, TRBJ2-7)
CASSSSGLAVYEQDF

SEQ ID NO: 497591 - protein, 16 aa, Homo sapiens
  CDR3 for alpha chain variable domain of TCR clone 248796 (TRAV30, TRAJ24)
CGTEIVDADSWGKFQF

SEQ ID NO: 497592 - protein, 13 aa, Homo sapiens
  CDR3 for beta chain variable domain of TCR clone 248796 (TRBV7-3, TRBJ1-1)
CASSQDRGAEAFF

SEQ ID NO: 497593 - protein, 14 aa, Homo sapiens
  CDR3 for alpha chain variable domain of TCR clone 248797 (TRAV26-1, TRAJ34)
FIVRVAGNTDKLIF

SEQ ID NO: 497594 - protein, 16 aa, Homo sapiens
  CDR3 for beta chain variable domain of TCR clone 248797 (TRBV12-5, TRBJ2-5)
CASGPRTSGNQETQYF

SEQ ID NO: 497595 - protein, 12 aa, Homo sapiens
  CDR3 for alpha chain variable domain of TCR clone 248798 (TRAV13-1, TRAJ21)
CAAFFNFNKFYF

SEQ ID NO: 497596 - protein, 14 aa, Homo sapiens
  CDR3 for beta chain variable domain of TCR clone 248798 (TRBV4-1, TRBJ2-7)
CASSLTSGSYEQYF

SEQ ID NO: 497597 - protein, 14 aa, Homo sapiens
  CDR3 for alpha chain variable domain of TCR clone 248799 (TRAV8-3, TRAJ21)
CAVGLNPRSDKFYF

SEQ ID NO: 497598 - protein, 15 aa, Homo sapiens
  CDR3 for beta chain variable domain of TCR clone 248799 (TRBV28, TRBJ1-4)
CASSVSGSGLEKLFF

SEQ ID NO: 497599 - protein, 13 aa, Homo sapiens
  CDR3 for alpha chain variable domain of TCR clone 248800 (TRAV21, TRAJ27)
CAAHPGNAGKSTF

SEQ ID NO: 497600 - protein, 14 aa, Homo sapiens
  CDR3 for beta chain variable domain of TCR clone 248800 (TRBV7-7, TRBJ2-3)
CASSLGTVTDTQYF

SEQ ID NO: 497601 - protein, 11 aa, Homo sapiens
  CDR3 for alpha chain variable domain of TCR clone 248801 (TRAV8-4, TRAJ34)
CAVSWTGKLIF

SEQ ID NO: 497602 - protein, 16 aa, Homo sapiens
  CDR3 for beta chain variable domain of TCR clone 248801 (TRBV6-1, TRBJ2-5)
CASSETLDRGAETQYF

SEQ ID NO: 497603 - protein, 12 aa, Homo sapiens
  CDR3 for alpha chain variable domain of TCR clone 248802 (TRAV27, TRAJ35)
CSGADFGNVLHC

SEQ ID NO: 497604 - protein, 15 aa, Homo sapiens
  CDR3 for beta chain variable domain of TCR clone 248802 (TRBV7-2, TRBJ1-2)
CASSLVSGGDYGYTF

SEQ ID NO: 497605 - protein, 17 aa, Homo sapiens
  CDR3 for alpha chain variable domain of TCR clone 248803 (TRAV26-2, TRAJ42)
CILRDVGYGGSQGNLIF

SEQ ID NO: 497606 - protein, 14 aa, Homo sapiens
  CDR3 for beta chain variable domain of TCR clone 248803 (TRBV19, TRBJ2-3)
CASSEGPRTDTQYL

SEQ ID NO: 497607 - protein, 15 aa, Homo sapiens
  CDR3 for alpha chain variable domain of TCR clone 248804 (TRAV3, TRAJ16)
CAVRDGFSESQKLLF

SEQ ID NO: 497608 - protein, 17 aa, Homo sapiens
  CDR3 for beta chain variable domain of TCR clone 248804 (TRBV6-1, TRBJ2-3)
CASRTRGLAQSTDTQYF

SEQ ID NO: 497609 - protein, 14 aa, Homo sapiens
  CDR3 for alpha chain variable domain of TCR clone 248805 (TRAV35, TRAJ22)
CAGLSPGSARQLTF

SEQ ID NO: 497610 - protein, 15 aa, Homo sapiens
  CDR3 for beta chain variable domain of TCR clone 248805 (TRBV12-4, TRBJ2-5)
CASSPPTGVQETQYF

SEQ ID NO: 497611 - protein, 14 aa, Homo sapiens
  CDR3 for alpha chain variable domain of TCR clone 248806 (TRAV17, TRAJ16)
CATVDFSDGQKLPF

SEQ ID NO: 497612 - protein, 12 aa, Homo sapiens
  CDR3 for beta chain variable domain of TCR clone 248806 (TRBV24-1, TRBJ1-1)
CATLYPDTEAFF

SEQ ID NO: 497613 - protein, 17 aa, Homo sapiens
  CDR3 for alpha chain variable domain of TCR clone 248807 (TRAV3, TRAJ42)
CAVRDRNYGGSQGNLIF

SEQ ID NO: 497614 - protein, 16 aa, Homo sapiens
  CDR3 for beta chain variable domain of TCR clone 248807 (TRBV7-3, TRBJ2-3)
CASSSLGGGSRDTQYF

SEQ ID NO: 497615 - protein, 17 aa, Homo sapiens
  CDR3 for alpha chain variable domain of TCR clone 248808 (TRAV3, TRAJ42)
CAVRDRDDRGGQGNLIF

SEQ ID NO: 497616 - protein, 15 aa, Homo sapiens
  CDR3 for beta chain variable domain of TCR clone 248808 (TRBV6-6, TRBJ2-7)
CVSSYSYGGSYEQYF

SEQ ID NO: 497617 - protein, 12 aa, Homo sapiens
  CDR3 for alpha chain variable domain of TCR clone 248809 (TRAV8-4, TRAJ37)
CAVRSNTGNLIF

SEQ ID NO: 497618 - protein, 16 aa, Homo sapiens
  CDR3 for beta chain variable domain of TCR clone 248809 (TRBV7-2, TRBJ2-3)
CASSLVGDASTDTQYF

SEQ ID NO: 497619 - protein, 11 aa, Homo sapiens
  CDR3 for alpha chain variable domain of TCR clone 248810 (TRAV27, TRAJ20)
CAGADDYKLSF

SEQ ID NO: 497620 - protein, 16 aa, Homo sapiens
  CDR3 for beta chain variable domain of TCR clone 248810 (TRBV19, TRBJ2-2)
CASSAAGTGGTGELFF

SEQ ID NO: 497621 - protein, 16 aa, Homo sapiens
  CDR3 for alpha chain variable domain of TCR clone 248811 (TRAV13-1, TRAJ45)
CAARGSSKGGADGLTF

SEQ ID NO: 497622 - protein, 16 aa, Homo sapiens
  CDR3 for beta chain variable domain of TCR clone 248811 (TRBV2, TRBJ2-3)
CASSTSVEGVTDTQYF

SEQ ID NO: 497623 - protein, 13 aa, Homo sapiens
  CDR3 for alpha chain variable domain of TCR clone 248812 (TRAV8-6, TRAJ36)
CAVSDWLGQTTSY

SEQ ID NO: 497624 - protein, 15 aa, Homo sapiens
  CDR3 for beta chain variable domain of TCR clone 248812 (TRBV10-3, TRBJ2-2)
CAISVATSNTGELFF

SEQ ID NO: 497625 - protein, 15 aa, Homo sapiens
  CDR3 for alpha chain variable domain of TCR clone 248813 (TRAV8-2, TRAJ40)
CVVSDRGSGPYKYIF

SEQ ID NO: 497626 - protein, 17 aa, Homo sapiens
  CDR3 for beta chain variable domain of TCR clone 248813 (TRBV9, TRBJ2-1)
CASSVRSLSGGNNEQSF

SEQ ID NO: 497627 - protein, 12 aa, Homo sapiens
  CDR3 for alpha chain variable domain of TCR clone 248814 (TRAV1-1, TRAJ23)
CAVTNQGGKLIF

SEQ ID NO: 497628 - protein, 16 aa, Homo sapiens
  CDR3 for beta chain variable domain of TCR clone 248814 (TRBV5-4, TRBJ2-1)
CASSLALAGAYNEQFF

SEQ ID NO: 497629 - protein, 13 aa, Homo sapiens
  CDR3 for alpha chain variable domain of TCR clone 248815 (TRAV12-1, TRAJ9)
CVVLNTGGFKTIF

SEQ ID NO: 497630 - protein, 13 aa, Homo sapiens
  CDR3 for beta chain variable domain of TCR clone 248815 (TRBV20-1, TRBJ2-5)
CSAREAFQETQYF

SEQ ID NO: 497631 - protein, 14 aa, Homo sapiens
  CDR3 for alpha chain variable domain of TCR clone 248816 (TRAV9-2, TRAJ39)
CALYIYNAGNMLTF

SEQ ID NO: 497632 - protein, 18 aa, Homo sapiens
  CDR3 for beta chain variable domain of TCR clone 248816 (TRBV20-1, TRBJ2-6)
CSAETTPAHGSGANVLTF

SEQ ID NO: 497633 - protein, 15 aa, Homo sapiens
  CDR3 for alpha chain variable domain of TCR clone 248817 (TRAV12-2, TRAJ57)
CAVSRGQGGAEKLAF

SEQ ID NO: 497634 - protein, 14 aa, Homo sapiens
  CDR3 for beta chain variable domain of TCR clone 248817 (TRBV20-1, TRBJ2-1)
CSAHPGLPYNEQFF

SEQ ID NO: 497635 - protein, 17 aa, Homo sapiens
  CDR3 for alpha chain variable domain of TCR clone 248818 (TRAV3, TRAJ42)
CAVRDRDYGGSQGNLLF

SEQ ID NO: 497636 - protein, 17 aa, Homo sapiens
  CDR3 for beta chain variable domain of TCR clone 248818 (TRBV7-9, TRBJ2-3)
CASSPTVAGDLTDTQYF

SEQ ID NO: 497637 - protein, 12 aa, Homo sapiens
  CDR3 for alpha chain variable domain of TCR clone 248819 (TRAV12-3, TRAJ17)
CAMTLTGNKLTF

SEQ ID NO: 497638 - protein, 15 aa, Homo sapiens
  CDR3 for beta chain variable domain of TCR clone 248819 (TRBV20-1, TRBJ2-7)
CSARDRGSGMYEQYF

SEQ ID NO: 497639 - protein, 11 aa, Homo sapiens
  CDR3 for alpha chain variable domain of TCR clone 248820 (TRAV21, TRAJ34)
CAHYNTDKLIF

SEQ ID NO: 497640 - protein, 14 aa, Homo sapiens
  CDR3 for beta chain variable domain of TCR clone 248820 (TRBV7-3, TRBJ2-1)
CASSLSGSYNEQFF

SEQ ID NO: 497641 - protein, 12 aa, Homo sapiens
  CDR3 for alpha chain variable domain of TCR clone 248821 (TRAV13-1, TRAJ49)
CAASPMGNQFYF

SEQ ID NO: 497642 - protein, 14 aa, Homo sapiens
  CDR3 for beta chain variable domain of TCR clone 248821 (TRBV12-4, TRBJ2-5)
CASSFGASGGTQYF

SEQ ID NO: 497643 - protein, 12 aa, Homo sapiens
  CDR3 for alpha chain variable domain of TCR clone 248822 (TRAV2, TRAJ5)
SALDTGRRALTF

SEQ ID NO: 497644 - protein, 15 aa, Homo sapiens
  CDR3 for beta chain variable domain of TCR clone 248822 (TRBV10-3, TRBJ2-1)
CAISDVQDRAYEQFF

SEQ ID NO: 497645 - protein, 16 aa, Homo sapiens
  CDR3 for alpha chain variable domain of TCR clone 248823 (TRAV23/DV6, TRAJ9)
CAASIGGNTGGFKTIF

SEQ ID NO: 497646 - protein, 16 aa, Homo sapiens
  CDR3 for beta chain variable domain of TCR clone 248823 (TRBV6-1, TRBJ2-1)
CASILRQGSSYNEQFF

SEQ ID NO: 497647 - protein, 18 aa, Homo sapiens
  CDR3 for alpha chain variable domain of TCR clone 248824 (TRAV26-2, TRAJ45)
CILRVDEYSGGGADGLTF

SEQ ID NO: 497648 - protein, 16 aa, Homo sapiens
  CDR3 for beta chain variable domain of TCR clone 248824 (TRBV2, TRBJ1-4)
CASNLLQGAINEKLFF

SEQ ID NO: 497649 - protein, 12 aa, Homo sapiens
  CDR3 for alpha chain variable domain of TCR clone 248825 (TRAV17, TRAJ57)
CATDGGSEKLVF

SEQ ID NO: 497650 - protein, 13 aa, Homo sapiens
  CDR3 for beta chain variable domain of TCR clone 248825 (TRBV7-2, TRBJ2-7)
CASSSPSGSEQYF

SEQ ID NO: 497651 - protein, 18 aa, Homo sapiens
  CDR3 for alpha chain variable domain of TCR clone 248826 (TRAV12-3, TRAJ52)
CGMSRTNAGGTSYGKLTF

SEQ ID NO: 497652 - protein, 17 aa, Homo sapiens
  CDR3 for beta chain variable domain of TCR clone 248826 (TRBV7-3, TRBJ2-3)
CASSLMKRMRGADTQYF

SEQ ID NO: 497653 - protein, 14 aa, Homo sapiens
  CDR3 for alpha chain variable domain of TCR clone 248827 (TRAV12-2, TRAJ17)
CAVLFKAAGNTLNF

SEQ ID NO: 497654 - protein, 14 aa, Homo sapiens
  CDR3 for beta chain variable domain of TCR clone 248827 (TRBV4-1, TRBJ2-2)
CASSQAVNTGELFF

SEQ ID NO: 497655 - protein, 14 aa, Homo sapiens
  CDR3 for alpha chain variable domain of TCR clone 248828 (TRAV34, TRAJ44)
CGADGTGTASKLTF

SEQ ID NO: 497656 - protein, 17 aa, Homo sapiens
  CDR3 for beta chain variable domain of TCR clone 248828 (TRBV20-1, TRBJ2-1)
CSASSSGLAGSYNEQFF

SEQ ID NO: 497657 - protein, 11 aa, Homo sapiens
  CDR3 for alpha chain variable domain of TCR clone 248829 (TRAV12-2, TRAJ29)
CAVTLRSPLVF

SEQ ID NO: 497658 - protein, 16 aa, Homo sapiens
  CDR3 for beta chain variable domain of TCR clone 248829 (TRBV19, TRBJ1-5)
CASSIERGGPRQPQYF

SEQ ID NO: 497659 - protein, 13 aa, Homo sapiens
  CDR3 for alpha chain variable domain of TCR clone 248830 (TRAV6, TRAJ20)
CALAVSNDYKLSF

SEQ ID NO: 497660 - protein, 15 aa, Homo sapiens
  CDR3 for beta chain variable domain of TCR clone 248830 (TRBV7-2, TRBJ2-5)
CASSFLRGGEETQYF

SEQ ID NO: 497661 - protein, 13 aa, Homo sapiens
  CDR3 for alpha chain variable domain of TCR clone 248831 (TRAV23/DV6, TRAJ6)
CAAKTGGSYIPTS

SEQ ID NO: 497662 - protein, 15 aa, Homo sapiens
  CDR3 for beta chain variable domain of TCR clone 248831 (TRBV5-1, TRBJ1-2)
CASSSYGEFDYGYTF

SEQ ID NO: 497663 - protein, 15 aa, Homo sapiens
  CDR3 for alpha chain variable domain of TCR clone 248832 (TRAV25, TRAJ53)
CPTSNSGGSNYKLTF

SEQ ID NO: 497664 - protein, 17 aa, Homo sapiens
  CDR3 for beta chain variable domain of TCR clone 248832 (TRBV7-2, TRBJ2-3)
CASSLAGGLAGTAGQYF

SEQ ID NO: 497665 - protein, 13 aa, Homo sapiens
  CDR3 for alpha chain variable domain of TCR clone 248833 (TRAV2, TRAJ40)
CAVVTSGTYKYIF

SEQ ID NO: 497666 - protein, 17 aa, Homo sapiens
  CDR3 for beta chain variable domain of TCR clone 248833 (TRBV11-2, TRBJ2-6)
FASSQRDIFSGANVLTF

SEQ ID NO: 497667 - protein, 15 aa, Homo sapiens
  CDR3 for alpha chain variable domain of TCR clone 248834 (TRAV13-1, TRAJ48)
CSKYLRNFGNEKLTF

SEQ ID NO: 497668 - protein, 16 aa, Homo sapiens
  CDR3 for beta chain variable domain of TCR clone 248834 (TRBV7-2, TRBJ2-6)
CASSERRASGANVLTF

SEQ ID NO: 497669 - protein, 14 aa, Homo sapiens
  CDR3 for alpha chain variable domain of TCR clone 248835 (TRAV1-2, TRAJ8)
CAVREDTGFQKLVF

SEQ ID NO: 497670 - protein, 14 aa, Homo sapiens
  CDR3 for beta chain variable domain of TCR clone 248835 (TRBV6-3, TRBJ1-3)
CASVQGGGGNTIYF

SEQ ID NO: 497671 - protein, 15 aa, Homo sapiens
  CDR3 for alpha chain variable domain of TCR clone 248836 (TRAV12-1, TRAJ4)
CVVNPFSGGYNKLIF

SEQ ID NO: 497672 - protein, 14 aa, Homo sapiens
  CDR3 for beta chain variable domain of TCR clone 248836 (TRBV4-1, TRBJ2-2)
CASSQAVNTGELFF

SEQ ID NO: 497673 - protein, 14 aa, Homo sapiens
  CDR3 for alpha chain variable domain of TCR clone 248837 (TRAV1-2, TRAJ16)
CAVNRFSDGQRLLF

SEQ ID NO: 497674 - protein, 15 aa, Homo sapiens
  CDR3 for beta chain variable domain of TCR clone 248837 (TRBV28, TRBJ2-5)
CASSPGQGSIETQYF

SEQ ID NO: 497675 - protein, 14 aa, Homo sapiens
  CDR3 for alpha chain variable domain of TCR clone 248838 (TRAV17, TRAJ57)
CATDPQGGTEKLVF

SEQ ID NO: 497676 - protein, 16 aa, Homo sapiens
  CDR3 for beta chain variable domain of TCR clone 248838 (TRBV27, TRBJ2-2)
CASSFRGLVRTGELFF

SEQ ID NO: 497677 - protein, 17 aa, Homo sapiens
  CDR3 for alpha chain variable domain of TCR clone 248839 (TRAV38-1, TRAJ45)
CAFMRSHSGGGAAGLTF

SEQ ID NO: 497678 - protein, 15 aa, Homo sapiens
  CDR3 for beta chain variable domain of TCR clone 248839 (TRBV7-2, TRBJ2-3)
CASSLVVRGPDTQYF

SEQ ID NO: 497679 - protein, 14 aa, Homo sapiens
  CDR3 for alpha chain variable domain of TCR clone 248840 (TRAV2, TRAJ37)
CAVDFTSNTGKLIF

SEQ ID NO: 497680 - protein, 16 aa, Homo sapiens
  CDR3 for beta chain variable domain of TCR clone 248840 (TRBV4-1, TRBJ2-3)
CASSQSTSGAEDTQYF

SEQ ID NO: 497681 - protein, 16 aa, Homo sapiens
  CDR3 for alpha chain variable domain of TCR clone 248841 (TRAV12-2, TRAJ40)
CAVKRGGTSGTYKYIF

SEQ ID NO: 497682 - protein, 14 aa, Homo sapiens
  CDR3 for beta chain variable domain of TCR clone 248841 (TRBV20-1, TRBJ2-5)
CSARDGRAGETQYF

SEQ ID NO: 497683 - protein, 14 aa, Homo sapiens
  CDR3 for alpha chain variable domain of TCR clone 248842 (TRAV16, TRAJ4)
CALHFSGGYNNLIF

SEQ ID NO: 497684 - protein, 15 aa, Homo sapiens
  CDR3 for beta chain variable domain of TCR clone 248842 (TRBV7-2, TRBJ2-7)
CASSTRLAGVDEQYF

SEQ ID NO: 497685 - protein, 11 aa, Homo sapiens
  CDR3 for alpha chain variable domain of TCR clone 248843 (TRAV16, TRAJ42)
CALASQGNLIF

SEQ ID NO: 497686 - protein, 15 aa, Homo sapiens
  CDR3 for beta chain variable domain of TCR clone 248843 (TRBV6-3, TRBJ1-5)
CASSPEVGFNQPQHF

SEQ ID NO: 497687 - protein, 18 aa, Homo sapiens
  CDR3 for alpha chain variable domain of TCR clone 248844 (TRAV16, TRAJ26)
CALTRWSESCLWSRNQIV

SEQ ID NO: 497688 - protein, 15 aa, Homo sapiens
  CDR3 for beta chain variable domain of TCR clone 248844 (TRBV6-3, TRBJ2-7)
YASSSPGTVFYEQYF

SEQ ID NO: 497689 - protein, 18 aa, Homo sapiens
  CDR3 for alpha chain variable domain of TCR clone 248845 (TRAV12-3, TRAJ52)
CAMSAGGAGGTSYGKLTF

SEQ ID NO: 497690 - protein, 14 aa, Homo sapiens
  CDR3 for beta chain variable domain of TCR clone 248845 (TRBV9, TRBJ2-4)
CASSPSGTSGFQYF

SEQ ID NO: 497691 - protein, 15 aa, Homo sapiens
  CDR3 for alpha chain variable domain of TCR clone 248846 (TRAV23/DV6, TRAJ33)
CAASNSWGGNYQLIW

SEQ ID NO: 497692 - protein, 14 aa, Homo sapiens
  CDR3 for beta chain variable domain of TCR clone 248846 (TRBV7-2, TRBJ2-7)
CASSLYTGRYEQYF

SEQ ID NO: 497693 - protein, 14 aa, Homo sapiens
  CDR3 for alpha chain variable domain of TCR clone 248847 (TRAV12-2, TRAJ18)
CAVKRGSTLGRLYF

SEQ ID NO: 497694 - protein, 16 aa, Homo sapiens
  CDR3 for beta chain variable domain of TCR clone 248847 (TRBV27, TRBJ2-3)
CASSFRGQLRRDTQYF

SEQ ID NO: 497695 - protein, 15 aa, Homo sapiens
  CDR3 for alpha chain variable domain of TCR clone 248848 (TRAV9-2, TRAJ39)
CALSDRNNAGNMLTL

SEQ ID NO: 497696 - protein, 15 aa, Homo sapiens
  CDR3 for beta chain variable domain of TCR clone 248848 (TRBV10-3, TRBJ2-2)
CAISPGRTNTGELFF

SEQ ID NO: 497697 - protein, 15 aa, Homo sapiens
  CDR3 for alpha chain variable domain of TCR clone 248849 (TRAV8-2, TRAJ15)
CVVTMGNQAGTALIS

SEQ ID NO: 497698 - protein, 12 aa, Homo sapiens
  CDR3 for beta chain variable domain of TCR clone 248849 (TRBV6-1, TRBJ2-7)
CASSDYSYEQYF

SEQ ID NO: 497699 - protein, 15 aa, Homo sapiens
  CDR3 for alpha chain variable domain of TCR clone 248850 (TRAV38-2/DV8, TRAJ57)
CASARAQGGSEKLVF

SEQ ID NO: 497700 - protein, 14 aa, Homo sapiens
  CDR3 for beta chain variable domain of TCR clone 248850 (TRBV7-8, TRBJ2-3)
CASSLEAGTDTQYF

SEQ ID NO: 497701 - protein, 14 aa, Homo sapiens
  CDR3 for alpha chain variable domain of TCR clone 248851 (TRAV30, TRAJ33)
CGTVAPCSNYQLIW

SEQ ID NO: 497702 - protein, 15 aa, Homo sapiens
  CDR3 for beta chain variable domain of TCR clone 248851 (TRBV11-3, TRBJ2-7)
CASSPGPASSYEQYF

SEQ ID NO: 497703 - protein, 12 aa, Homo sapiens
  CDR3 for alpha chain variable domain of TCR clone 248852 (TRAV1-1, TRAJ39)
CAVPVVGNMLTF

SEQ ID NO: 497704 - protein, 15 aa, Homo sapiens
  CDR3 for beta chain variable domain of TCR clone 248852 (TRBV28, TRBJ1-5)
CASSLPQQGEQPQDF

SEQ ID NO: 497705 - protein, 17 aa, Homo sapiens
  CDR3 for alpha chain variable domain of TCR clone 248853 (TRAV3, TRAJ6)
CAVRDCPRAGGSYIPTF

SEQ ID NO: 497706 - protein, 15 aa, Homo sapiens
  CDR3 for beta chain variable domain of TCR clone 248853 (TRBV29-1, TRBJ2-5)
CSVEGLAVNQETQYF

SEQ ID NO: 497707 - protein, 12 aa, Homo sapiens
  CDR3 for alpha chain variable domain of TCR clone 248854 (TRAV12-2, TRAJ20)
CAVNRNDYKLSF

SEQ ID NO: 497708 - protein, 16 aa, Homo sapiens
  CDR3 for beta chain variable domain of TCR clone 248854 (TRBV7-3, TRBJ1-2)
CASSLGAPVPKYGYTF

SEQ ID NO: 497709 - protein, 14 aa, Homo sapiens
  CDR3 for alpha chain variable domain of TCR clone 248855 (TRAV1-2, TRAJ8)
CAVREDTGFQKLVF

SEQ ID NO: 497710 - protein, 22 aa, Homo sapiens
  CDR3 for beta chain variable domain of TCR clone 248855 (TRBV7-3, TRBJ2-2)
GGTQPCISMPAAQEDTPGSCFF

SEQ ID NO: 497711 - protein, 14 aa, Homo sapiens
  CDR3 for alpha chain variable domain of TCR clone 248856 (TRAV1-2, TRAJ8)
CAVREDTGFPKLVF

SEQ ID NO: 497712 - protein, 15 aa, Homo sapiens
  CDR3 for beta chain variable domain of TCR clone 248856 (TRBV6-3, TRBJ2-7)
CASSSPGTVFYEQHF

SEQ ID NO: 497713 - protein, 12 aa, Homo sapiens
  CDR3 for alpha chain variable domain of TCR clone 248857 (TRAV13-2, TRAJ41)
CAKNLGRYALNF

SEQ ID NO: 497714 - protein, 12 aa, Homo sapiens
  CDR3 for beta chain variable domain of TCR clone 248857 (TRBV7-9, TRBJ1-1)
CASSLSGGVAFF

SEQ ID NO: 497715 - protein, 11 aa, Homo sapiens
  CDR3 for alpha chain variable domain of TCR clone 248858 (TRAV2, TRAJ31)
CAVYNNARLMF

SEQ ID NO: 497716 - protein, 16 aa, Homo sapiens
  CDR3 for beta chain variable domain of TCR clone 248858 (TRBV28, TRBJ1-6)
CASSSLPEGDNSPLHF

SEQ ID NO: 497717 - protein, 13 aa, Homo sapiens
  CDR3 for alpha chain variable domain of TCR clone 248859 (TRAV8-4, TRAJ4)
CAVSDIGYNKLIF

SEQ ID NO: 497718 - protein, 13 aa, Homo sapiens
  CDR3 for beta chain variable domain of TCR clone 248859 (TRBV7-9, TRBJ1-2)
CASSLKQNYGYTF

SEQ ID NO: 497719 - protein, 19 aa, Homo sapiens
  CDR3 for alpha chain variable domain of TCR clone 248860 (TRAV8-3, TRAJ32)
LSTSVLWVRRGGAANKLIF

SEQ ID NO: 497720 - protein, 15 aa, Homo sapiens
  CDR3 for beta chain variable domain of TCR clone 248860 (TRBV18, TRBJ2-1)
CASSPPSASYNEQFF

SEQ ID NO: 497721 - protein, 14 aa, Homo sapiens
  CDR3 for alpha chain variable domain of TCR clone 248861 (TRAV3, TRAJ8)
CAVSLNTGFQKLVF

SEQ ID NO: 497722 - protein, 14 aa, Homo sapiens
  CDR3 for beta chain variable domain of TCR clone 248861 (TRBV25-1, TRBJ1-1)
CASTHLGGNTEAFF

SEQ ID NO: 497723 - protein, 11 aa, Homo sapiens
  CDR3 for alpha chain variable domain of TCR clone 248862 (TRAV13-1, TRAJ39)
CASHAVNMLTF

SEQ ID NO: 497724 - protein, 15 aa, Homo sapiens
  CDR3 for beta chain variable domain of TCR clone 248862 (TRBV20-1, TRBJ2-7)
CSARDRVSGMDEQYF

SEQ ID NO: 497725 - protein, 16 aa, Homo sapiens
  CDR3 for alpha chain variable domain of TCR clone 248863 (TRAV30, TRAJ24)
CGTEIVDADSWGKFQF

SEQ ID NO: 497726 - protein, 16 aa, Homo sapiens
  CDR3 for beta chain variable domain of TCR clone 248863 (TRBV4-2, TRBJ2-1)
CASSPRAGQGANEQFF

SEQ ID NO: 497727 - protein, 15 aa, Homo sapiens
  CDR3 for alpha chain variable domain of TCR clone 248864 (TRAV13-1, TRAJ17)
CAASIERAAGNKLTF

SEQ ID NO: 497728 - protein, 14 aa, Homo sapiens
  CDR3 for beta chain variable domain of TCR clone 248864 (TRBV7-9, TRBJ2-1)
CASSPRDSIYEQFF

SEQ ID NO: 497729 - protein, 11 aa, Homo sapiens
  CDR3 for alpha chain variable domain of TCR clone 248865 (TRAV13-2, TRAJ20)
CADSNDYKLSF

SEQ ID NO: 497730 - protein, 15 aa, Homo sapiens
  CDR3 for beta chain variable domain of TCR clone 248865 (TRBV4-1, TRBJ1-4)
RASSDTGGTNEKLFF

SEQ ID NO: 497731 - protein, 13 aa, Homo sapiens
  CDR3 for alpha chain variable domain of TCR clone 248866 (TRAV17, TRAJ9)
CATDYTGGFKTIF

SEQ ID NO: 497732 - protein, 14 aa, Homo sapiens
  CDR3 for beta chain variable domain of TCR clone 248866 (TRBV7-2, TRBJ2-1)
CASSPGLAGNEQFF

SEQ ID NO: 497733 - protein, 13 aa, Homo sapiens
  CDR3 for alpha chain variable domain of TCR clone 248867 (TRAV3, TRAJ30)
CAVRDRGDDKIIF

SEQ ID NO: 497734 - protein, 16 aa, Homo sapiens
  CDR3 for beta chain variable domain of TCR clone 248867 (TRBV7-3, TRBJ2-2)
CAISLKRGTLSGELFF

SEQ ID NO: 497735 - protein, 14 aa, Homo sapiens
  CDR3 for alpha chain variable domain of TCR clone 248868 (TRAV12-2, TRAJ13)
CAVKKTGGYQKVTF

SEQ ID NO: 497736 - protein, 14 aa, Homo sapiens
  CDR3 for beta chain variable domain of TCR clone 248868 (TRBV5-5, TRBJ2-7)
CASSLGQVTYEQYF

SEQ ID NO: 497737 - protein, 14 aa, Homo sapiens
  CDR3 for alpha chain variable domain of TCR clone 248869 (TRAV1-2, TRAJ29)
CAVRELTSATPLVF

SEQ ID NO: 497738 - protein, 14 aa, Homo sapiens
  CDR3 for beta chain variable domain of TCR clone 248869 (TRBV27, TRBJ2-5)
CASSSLKGWETQYF

SEQ ID NO: 497739 - protein, 14 aa, Homo sapiens
  CDR3 for alpha chain variable domain of TCR clone 248870 (TRAV13-1, TRAJ20)
CAARPGSNDYKLSF

SEQ ID NO: 497740 - protein, 14 aa, Homo sapiens
  CDR3 for beta chain variable domain of TCR clone 248870 (TRBV7-9, TRBJ2-7)
CASSLDRPTDEQYF

SEQ ID NO: 497741 - protein, 12 aa, Homo sapiens
  CDR3 for alpha chain variable domain of TCR clone 248871 (TRAV8-3, TRAJ27)
CAVGTMQANQPL

SEQ ID NO: 497742 - protein, 13 aa, Homo sapiens
  CDR3 for beta chain variable domain of TCR clone 248871 (TRBV24-1, TRBJ2-2)
CATSETNTVELFF

SEQ ID NO: 497743 - protein, 18 aa, Homo sapiens
  CDR3 for alpha chain variable domain of TCR clone 248872 (TRAV21, TRAJ52)
CAVRPSPSGGTSCGKLTF

SEQ ID NO: 497744 - protein, 14 aa, Homo sapiens
  CDR3 for beta chain variable domain of TCR clone 248872 (TRBV7-2, TRBJ2-1)
CASSLEGGYNEQFF

SEQ ID NO: 497745 - protein, 14 aa, Homo sapiens
  CDR3 for alpha chain variable domain of TCR clone 248873 (TRAV12-1, TRAJ17)
CVVNPKATGNKLTF

SEQ ID NO: 497746 - protein, 16 aa, Homo sapiens
  CDR3 for beta chain variable domain of TCR clone 248873 (TRBV20-1, TRBJ2-1)
CSASASGYSSYNEQFF

SEQ ID NO: 497747 - protein, 14 aa, Homo sapiens
  CDR3 for alpha chain variable domain of TCR clone 248874 (TRAV39, TRAJ54)
CAVVLIQGAQKLVF

SEQ ID NO: 497748 - protein, 13 aa, Homo sapiens
  CDR3 for beta chain variable domain of TCR clone 248874 (TRBV29-1, TRBJ2-5)
CSVGGNSAETQYF

SEQ ID NO: 497749 - protein, 12 aa, Homo sapiens
  CDR3 for alpha chain variable domain of TCR clone 248875 (TRAV21, TRAJ33)
CAKMDSNYQLIW

SEQ ID NO: 497750 - protein, 16 aa, Homo sapiens
  CDR3 for beta chain variable domain of TCR clone 248875 (TRBV10-3, TRBJ2-7)
CAISADFADRPYEQYF

SEQ ID NO: 497751 - protein, 15 aa, Homo sapiens
  CDR3 for alpha chain variable domain of TCR clone 248876 (TRAV23/DV6, TRAJ13)
CAAWPGGGGYQKVTF

SEQ ID NO: 497752 - protein, 12 aa, Homo sapiens
  CDR3 for beta chain variable domain of TCR clone 248876 (TRBV7-6, TRBJ2-5)
CASSLSQETQYF

SEQ ID NO: 497753 - protein, 15 aa, Homo sapiens
  CDR3 for alpha chain variable domain of TCR clone 248877 (TRAV3, TRAJ13)
CAVRVYSGGYQKVTF

SEQ ID NO: 497754 - protein, 15 aa, Homo sapiens
  CDR3 for beta chain variable domain of TCR clone 248877 (TRBV5-1, TRBJ2-3)
CASSVTSGSTDTQYF

SEQ ID NO: 497755 - protein, 17 aa, Homo sapiens
  CDR3 for alpha chain variable domain of TCR clone 248878 (TRAV13-1, TRAJ5)
CSNPSLSRDTGRRALTF

SEQ ID NO: 497756 - protein, 17 aa, Homo sapiens
  CDR3 for beta chain variable domain of TCR clone 248878 (TRBV24-1, TRBJ2-1)
CATSDVSTSGTCNEQFF

SEQ ID NO: 497757 - protein, 11 aa, Homo sapiens
  CDR3 for alpha chain variable domain of TCR clone 248879 (TRAV21, TRAJ11)
CAVNGYSNLTF

SEQ ID NO: 497758 - protein, 11 aa, Homo sapiens
  CDR3 for beta chain variable domain of TCR clone 248879 (TRBV11-2, TRBJ2-7)
CASSSDYEQYF

SEQ ID NO: 497759 - protein, 15 aa, Homo sapiens
  CDR3 for alpha chain variable domain of TCR clone 248880 (TRAV3, TRAJ13)
RAVRVYSGGYQKVTF

SEQ ID NO: 497760 - protein, 12 aa, Homo sapiens
  CDR3 for beta chain variable domain of TCR clone 248880 (TRBV5-1, TRBJ1-2)
CASSQDTYGYTF

SEQ ID NO: 497761 - protein, 16 aa, Homo sapiens
  CDR3 for alpha chain variable domain of TCR clone 248881 (TRAV20, TRAJ52)
CAVLPDGGTSYRKLTF

SEQ ID NO: 497762 - protein, 12 aa, Homo sapiens
  CDR3 for beta chain variable domain of TCR clone 248881 (TRBV19, TRBJ2-1)
CASSQISNEQFF

SEQ ID NO: 497763 - protein, 17 aa, Homo sapiens
  CDR3 for alpha chain variable domain of TCR clone 248882 (TRAV35, TRAJ28)
CAGLQVYSGAGSHQLTF

SEQ ID NO: 497764 - protein, 15 aa, Homo sapiens
  CDR3 for beta chain variable domain of TCR clone 248882 (TRBV2, TRBJ1-2)
CASSEIGGANYGYTF

SEQ ID NO: 497765 - protein, 17 aa, Homo sapiens
  CDR3 for alpha chain variable domain of TCR clone 248883 (TRAV1-2, TRAJ13)
CLLPLCCEFWGYQKVTF

SEQ ID NO: 497766 - protein, 14 aa, Homo sapiens
  CDR3 for beta chain variable domain of TCR clone 248883 (TRBV4-1, TRBJ1-5)
CASSPKGDNQPQHF

SEQ ID NO: 497767 - protein, 13 aa, Homo sapiens
  CDR3 for alpha chain variable domain of TCR clone 248884 (TRAV3, TRAJ21)
CAVTEPDFNKFYF

SEQ ID NO: 497768 - protein, 18 aa, Homo sapiens
  CDR3 for beta chain variable domain of TCR clone 248884 (TRBV11-2, TRBJ2-3)
CASSLGGASRGAPNTQYF

SEQ ID NO: 497769 - protein, 15 aa, Homo sapiens
  CDR3 for alpha chain variable domain of TCR clone 248885 (TRAV21, TRAJ53)
CATLKSGGSNYKLTF

SEQ ID NO: 497770 - protein, 15 aa, Homo sapiens
  CDR3 for beta chain variable domain of TCR clone 248885 (TRBV6-3, TRBJ2-7)
CASSSPGTVFYEQYF

SEQ ID NO: 497771 - protein, 14 aa, Homo sapiens
  CDR3 for alpha chain variable domain of TCR clone 248886 (TRAV26-1, TRAJ45)
CIEVTGGGADGLTF

SEQ ID NO: 497772 - protein, 19 aa, Homo sapiens
  CDR3 for beta chain variable domain of TCR clone 248886 (TRBV19, TRBJ2-2)
CASTRPGLAGGRATGELFF

SEQ ID NO: 497773 - protein, 15 aa, Homo sapiens
  CDR3 for alpha chain variable domain of TCR clone 248887 (TRAV3, TRAJ5)
CAVRDLDTGRRALTF

SEQ ID NO: 497774 - protein, 15 aa, Homo sapiens
  CDR3 for beta chain variable domain of TCR clone 248887 (TRBV12-4, TRBJ2-7)
CASSSPGTVFYEQYI

SEQ ID NO: 497775 - protein, 10 aa, Homo sapiens
  CDR3 for alpha chain variable domain of TCR clone 248888 (TRAV16, TRAJ22)
SAMYLRQLTF

SEQ ID NO: 497776 - protein, 15 aa, Homo sapiens
  CDR3 for beta chain variable domain of TCR clone 248888 (TRBV7-9, TRBJ1-4)
CASSRTGGFNEKLFF

SEQ ID NO: 497777 - protein, 14 aa, Homo sapiens
  CDR3 for alpha chain variable domain of TCR clone 248889 (TRAV8-1, TRAJ5)
CAVRTYTGRRALTS

SEQ ID NO: 497778 - protein, 12 aa, Homo sapiens
  CDR3 for beta chain variable domain of TCR clone 248889 (TRBV11-2, TRBJ2-2)
CASSLGGGELFF

SEQ ID NO: 497779 - protein, 17 aa, Homo sapiens
  CDR3 for alpha chain variable domain of TCR clone 248890 (TRAV23/DV6, TRAJ57)
CAASSTLSSGGSEKLVF

SEQ ID NO: 497780 - protein, 14 aa, Homo sapiens
  CDR3 for beta chain variable domain of TCR clone 248890 (TRBV25-1, TRBJ1-1)
CASTHLGGNTEAFF

SEQ ID NO: 497781 - protein, 14 aa, Homo sapiens
  CDR3 for alpha chain variable domain of TCR clone 248891 (TRAV35, TRAJ33)
CAGSSQDSNYQLIW

SEQ ID NO: 497782 - protein, 15 aa, Homo sapiens
  CDR3 for beta chain variable domain of TCR clone 248891 (TRBV20-1, TRBJ2-7)
WSAESGTSGAYEQYF

SEQ ID NO: 497783 - protein, 15 aa, Homo sapiens
  CDR3 for alpha chain variable domain of TCR clone 248892 (TRAV8-3, TRAJ15)
CAVGAPNQAGTALIF

SEQ ID NO: 497784 - protein, 14 aa, Homo sapiens
  CDR3 for beta chain variable domain of TCR clone 248892 (TRBV20-1, TRBJ2-1)
CSPDDEASYNEQFF

SEQ ID NO: 497785 - protein, 12 aa, Homo sapiens
  CDR3 for alpha chain variable domain of TCR clone 248893 (TRAV12-2, TRAJ47)
CAVMEYGNKLVF

SEQ ID NO: 497786 - protein, 15 aa, Homo sapiens
  CDR3 for beta chain variable domain of TCR clone 248893 (TRBV15, TRBJ1-4)
CATSRDMGSYEKLFF

SEQ ID NO: 497787 - protein, 14 aa, Homo sapiens
  CDR3 for alpha chain variable domain of TCR clone 248894 (TRAV1-2, TRAJ8)
CAVREGTGFQKLVF

SEQ ID NO: 497788 - protein, 15 aa, Homo sapiens
  CDR3 for beta chain variable domain of TCR clone 248894 (TRBV12-4, TRBJ2-5)
CASSPPTGLQETQYF

SEQ ID NO: 497789 - protein, 11 aa, Homo sapiens
  CDR3 for alpha chain variable domain of TCR clone 248895 (TRAV23/DV6, TRAJ58)
CAARLPRGETS

SEQ ID NO: 497790 - protein, 13 aa, Homo sapiens
  CDR3 for beta chain variable domain of TCR clone 248895 (TRBV7-9, TRBJ1-2)
CASSLKQNYGYTF

SEQ ID NO: 497791 - protein, 12 aa, Homo sapiens
  CDR3 for alpha chain variable domain of TCR clone 248896 (TRAV12-3, TRAJ17)
CAMTLTGNKLTF

SEQ ID NO: 497792 - protein, 13 aa, Homo sapiens
  CDR3 for beta chain variable domain of TCR clone 248896 (TRBV20-1, TRBJ2-5)
CSARWDYQETQYF

SEQ ID NO: 497793 - protein, 17 aa, Homo sapiens
  CDR3 for alpha chain variable domain of TCR clone 248897 (TRAV3, TRAJ42)
CAVRDRDYGGSQGNLIF

SEQ ID NO: 497794 - protein, 13 aa, Homo sapiens
  CDR3 for beta chain variable domain of TCR clone 248897 (TRBV10-3, TRBJ2-7)
CASKLAVHYEQYF

SEQ ID NO: 497795 - protein, 14 aa, Homo sapiens
  CDR3 for alpha chain variable domain of TCR clone 248898 (TRAV17, TRAJ22)
CATSPSGSARLLTF

SEQ ID NO: 497796 - protein, 13 aa, Homo sapiens
  CDR3 for beta chain variable domain of TCR clone 248898 (TRBV10-3, TRBJ1-2)
CAISERDSYGYTF

SEQ ID NO: 497797 - protein, 15 aa, Homo sapiens
  CDR3 for alpha chain variable domain of TCR clone 248899 (TRAV8-6, TRAJ37)
CAVIFSSGNTGKLLF

SEQ ID NO: 497798 - protein, 15 aa, Homo sapiens
  CDR3 for beta chain variable domain of TCR clone 248899 (TRBV25-1, TRBJ2-4)
CANSETESAKNIQYF

SEQ ID NO: 497799 - protein, 13 aa, Homo sapiens
  CDR3 for alpha chain variable domain of TCR clone 248900 (TRAV12-2, TRAJ10)
CAVPTGGGNKLTF

SEQ ID NO: 497800 - protein, 11 aa, Homo sapiens
  CDR3 for beta chain variable domain of TCR clone 248900 (TRBV6-1, TRBJ2-1)
CASISSKEQFF

SEQ ID NO: 497801 - protein, 16 aa, Homo sapiens
  CDR3 for alpha chain variable domain of TCR clone 248901 (TRAV17, TRAJ53)
CATDALSGGSNYKLTF

SEQ ID NO: 497802 - protein, 12 aa, Homo sapiens
  CDR3 for beta chain variable domain of TCR clone 248901 (TRBV5-1, TRBJ2-7)
CASSFRGYEQHF

SEQ ID NO: 497803 - protein, 14 aa, Homo sapiens
  CDR3 for alpha chain variable domain of TCR clone 248902 (TRAV1-2, TRAJ16)
CAVNRFSDGQKLLF

SEQ ID NO: 497804 - protein, 15 aa, Homo sapiens
  CDR3 for beta chain variable domain of TCR clone 248902 (TRBV5-1, TRBJ2-1)
CAGSPPRAPYNEQLF

SEQ ID NO: 497805 - protein, 13 aa, Homo sapiens
  CDR3 for alpha chain variable domain of TCR clone 248903 (TRAV26-1, TRAJ36)
CIAVRRGANNLFF

SEQ ID NO: 497806 - protein, 19 aa, Homo sapiens
  CDR3 for beta chain variable domain of TCR clone 248903 (TRBV27, TRBJ2-1)
CASSLEIRSPGAAGNEQFF

SEQ ID NO: 497807 - protein, 14 aa, Homo sapiens
  CDR3 for alpha chain variable domain of TCR clone 248904 (TRAV1-2, TRAJ16)
CAVNRFSDGQKLLF

SEQ ID NO: 497808 - protein, 16 aa, Homo sapiens
  CDR3 for beta chain variable domain of TCR clone 248904 (TRBV28, TRBJ2-7)
CASSSPVGTGGPWQYF

SEQ ID NO: 497809 - protein, 13 aa, Homo sapiens
  CDR3 for alpha chain variable domain of TCR clone 248905 (TRAV12-2, TRAJ50)
CAVIVTSYDKVLF

SEQ ID NO: 497810 - protein, 13 aa, Homo sapiens
  CDR3 for beta chain variable domain of TCR clone 248905 (TRBV7-9, TRBJ1-2)
CASSLKQNYGYTF

SEQ ID NO: 497811 - protein, 14 aa, Homo sapiens
  CDR3 for alpha chain variable domain of TCR clone 248906 (TRAV13-1, TRAJ9)
CAASALTGGFKPIF

SEQ ID NO: 497812 - protein, 16 aa, Homo sapiens
  CDR3 for beta chain variable domain of TCR clone 248906 (TRBV12-4, TRBJ2-3)
CASSFGTGGISDTQYF

SEQ ID NO: 497813 - protein, 11 aa, Homo sapiens
  CDR3 for alpha chain variable domain of TCR clone 248907 (TRAV29/DV5, TRAJ31)
CAAMNNARLMF

SEQ ID NO: 497814 - protein, 15 aa, Homo sapiens
  CDR3 for beta chain variable domain of TCR clone 248907 (TRBV19, TRBJ1-2)
CASSVGQVLNYGYTF

SEQ ID NO: 497815 - protein, 17 aa, Homo sapiens
  CDR3 for alpha chain variable domain of TCR clone 248908 (TRAV12-2, TRAJ48)
CASNEKLTLGTGTRLTI

SEQ ID NO: 497816 - protein, 16 aa, Homo sapiens
  CDR3 for beta chain variable domain of TCR clone 248908 (TRBV7-3, TRBJ2-2)
CASSLKRGTLSGELFF

SEQ ID NO: 497817 - protein, 18 aa, Homo sapiens
  CDR3 for alpha chain variable domain of TCR clone 248909 (TRAV3, TRAJ32)
CAVSDIRGYGGATNTLIF

SEQ ID NO: 497818 - protein, 15 aa, Homo sapiens
  CDR3 for beta chain variable domain of TCR clone 248909 (TRBV12-4, TRBJ2-2)
CASSLGVRHTGELFF

SEQ ID NO: 497819 - protein, 11 aa, Homo sapiens
  CDR3 for alpha chain variable domain of TCR clone 248910 (TRAV1-2, TRAJ20)
CAVANDYKLNF

SEQ ID NO: 497820 - protein, 14 aa, Homo sapiens
  CDR3 for beta chain variable domain of TCR clone 248910 (TRBV7-9, TRBJ1-1)
CASTPLQSYTEAFF

SEQ ID NO: 497821 - protein, 13 aa, Homo sapiens
  CDR3 for alpha chain variable domain of TCR clone 248911 (TRAV14/DV4, TRAJ22)
CAMRDLSAMQLTF

SEQ ID NO: 497822 - protein, 18 aa, Homo sapiens
  CDR3 for beta chain variable domain of TCR clone 248911 (TRBV19, TRBJ1-5)
CASSKGQVSIHSNQPQHF

SEQ ID NO: 497823 - protein, 23 aa, Homo sapiens
  CDR3 for alpha chain variable domain of TCR clone 248912 (TRAV26-1, )
CIADNDGNNHIQNPDPAVYQLRD

SEQ ID NO: 497824 - protein, 17 aa, Homo sapiens
  CDR3 for beta chain variable domain of TCR clone 248912 (TRBV11-2, TRBJ2-6)
CASSQRDIFSGANVLTF

SEQ ID NO: 497825 - protein, 16 aa, Homo sapiens
  CDR3 for alpha chain variable domain of TCR clone 248913 (TRAV3, TRAJ28)
CAVLPMSGAGSYQLTF

SEQ ID NO: 497826 - protein, 13 aa, Homo sapiens
  CDR3 for beta chain variable domain of TCR clone 248913 (TRBV12-4, TRBJ2-5)
CASRLAVQETQYF

SEQ ID NO: 497827 - protein, 15 aa, Homo sapiens
  CDR3 for alpha chain variable domain of TCR clone 248914 (TRAV3, TRAJ47)
CAVGDIGEYGNKLVF

SEQ ID NO: 497828 - protein, 14 aa, Homo sapiens
  CDR3 for beta chain variable domain of TCR clone 248914 (TRBV13, TRBJ2-5)
CASSLERVWETQYF

SEQ ID NO: 497829 - protein, 14 aa, Homo sapiens
  CDR3 for alpha chain variable domain of TCR clone 248915 (TRAV8-1, TRAJ5)
CAVRTDTGRRALTF

SEQ ID NO: 497830 - protein, 12 aa, Homo sapiens
  CDR3 for beta chain variable domain of TCR clone 248915 (TRBV11-2, TRBJ2-1)
CASSTGNNEQFF

SEQ ID NO: 497831 - protein, 12 aa, Homo sapiens
  CDR3 for alpha chain variable domain of TCR clone 248916 (TRAV1-2, TRAJ11)
YAVRGGYSTLTF

SEQ ID NO: 497832 - protein, 16 aa, Homo sapiens
  CDR3 for beta chain variable domain of TCR clone 248916 (TRBV7-9, TRBJ2-1)
CASSSPQGTTRNEQFF

SEQ ID NO: 497833 - protein, 14 aa, Homo sapiens
  CDR3 for alpha chain variable domain of TCR clone 248917 (TRAV13-1, TRAJ35)
CAASKGGFGNVLHC

SEQ ID NO: 497834 - protein, 13 aa, Homo sapiens
  CDR3 for beta chain variable domain of TCR clone 248917 (TRBV7-3, TRBJ1-1)
CASSQDRGAEAFC

SEQ ID NO: 497835 - protein, 14 aa, Homo sapiens
  CDR3 for alpha chain variable domain of TCR clone 248918 (TRAV12-3, TRAJ10)
SHLPLAGGGNKLTF

SEQ ID NO: 497836 - protein, 15 aa, Homo sapiens
  CDR3 for beta chain variable domain of TCR clone 248918 (TRBV10-2, TRBJ2-6)
CASSEQGTGANVLTF

SEQ ID NO: 497837 - protein, 13 aa, Homo sapiens
  CDR3 for alpha chain variable domain of TCR clone 248919 (TRAV13-1, TRAJ39)
CSKYSNAGNMLTF

SEQ ID NO: 497838 - protein, 15 aa, Homo sapiens
  CDR3 for beta chain variable domain of TCR clone 248919 (TRBV28, TRBJ2-1)
CASRTGAGVIARQFF

SEQ ID NO: 497839 - protein, 15 aa, Homo sapiens
  CDR3 for alpha chain variable domain of TCR clone 248920 (TRAV12-2, TRAJ6)
CRPLAGSGGSYIPTF

SEQ ID NO: 497840 - protein, 13 aa, Homo sapiens
  CDR3 for beta chain variable domain of TCR clone 248920 (TRBV6-9, TRBJ2-5)
CASKGDGRRTQYF

SEQ ID NO: 497841 - protein, 13 aa, Homo sapiens
  CDR3 for alpha chain variable domain of TCR clone 248921 (TRAV12-2, TRAJ20)
CAVYPSNDYKLSF

SEQ ID NO: 497842 - protein, 16 aa, Homo sapiens
  CDR3 for beta chain variable domain of TCR clone 248921 (TRBV5-1, TRBJ2-3)
CASSLEGGSFTDTQYF

SEQ ID NO: 497843 - protein, 13 aa, Homo sapiens
  CDR3 for alpha chain variable domain of TCR clone 248922 (TRAV27, TRAJ57)
CRSAQGGSEMLVF

SEQ ID NO: 497844 - protein, 11 aa, Homo sapiens
  CDR3 for beta chain variable domain of TCR clone 248922 (TRBV11-2, TRBJ1-1)
CASSINTEAFF

SEQ ID NO: 497845 - protein, 15 aa, Homo sapiens
  CDR3 for alpha chain variable domain of TCR clone 248923 (TRAV12-2, TRAJ50)
CAVNGLETSYDKGIF

SEQ ID NO: 497846 - protein, 14 aa, Homo sapiens
  CDR3 for beta chain variable domain of TCR clone 248923 (TRBV7-2, TRBJ1-1)
CASSFLTGTTEAFF

SEQ ID NO: 497847 - protein, 17 aa, Homo sapiens
  CDR3 for alpha chain variable domain of TCR clone 248924 (TRAV8-4, TRAJ8)
CAGSDGEANTGFQKLVF

SEQ ID NO: 497848 - protein, 16 aa, Homo sapiens
  CDR3 for beta chain variable domain of TCR clone 248924 (TRBV3-1, TRBJ2-2)
CASSHYSGRSTGELFF

SEQ ID NO: 497849 - protein, 14 aa, Homo sapiens
  CDR3 for alpha chain variable domain of TCR clone 248925 (TRAV8-3, TRAJ39)
CAVGANNAGNMLTF

SEQ ID NO: 497850 - protein, 12 aa, Homo sapiens
  CDR3 for beta chain variable domain of TCR clone 248925 (TRBV11-3, TRBJ1-1)
CASGHRQGEAFF

SEQ ID NO: 497851 - protein, 16 aa, Homo sapiens
  CDR3 for alpha chain variable domain of TCR clone 248926 (TRAV3, TRAJ23)
CAVKIGIYNQGGKLIF

SEQ ID NO: 497852 - protein, 12 aa, Homo sapiens
  CDR3 for beta chain variable domain of TCR clone 248926 (TRBV11-2, TRBJ2-2)
CASSLGGGELFF

SEQ ID NO: 497853 - protein, 16 aa, Homo sapiens
  CDR3 for alpha chain variable domain of TCR clone 248927 (TRAV17, TRAJ28)
CASYAYSGAGSYQLTF

SEQ ID NO: 497854 - protein, 15 aa, Homo sapiens
  CDR3 for beta chain variable domain of TCR clone 248927 (TRBV4-2, TRBJ2-1)
CASSPSGGLYNEQLF

SEQ ID NO: 497855 - protein, 15 aa, Homo sapiens
  CDR3 for alpha chain variable domain of TCR clone 248928 (TRAV21, TRAJ24)
CAARSSTASWGNLQF

SEQ ID NO: 497856 - protein, 11 aa, Homo sapiens
  CDR3 for beta chain variable domain of TCR clone 248928 (TRBV11-2, TRBJ2-2)
CASSLPGELFF

SEQ ID NO: 497857 - protein, 14 aa, Homo sapiens
  CDR3 for alpha chain variable domain of TCR clone 248929 (TRAV16, TRAJ17)
CALSGRAAGNKLTF

SEQ ID NO: 497858 - protein, 17 aa, Homo sapiens
  CDR3 for beta chain variable domain of TCR clone 248929 (TRBV18, TRBJ2-6)
CASSPSQGAVGANVLTF

SEQ ID NO: 497859 - protein, 16 aa, Homo sapiens
  CDR3 for alpha chain variable domain of TCR clone 248930 (TRAV30, TRAJ24)
CGTEIVDADSWGKFQF

SEQ ID NO: 497860 - protein, 14 aa, Homo sapiens
  CDR3 for beta chain variable domain of TCR clone 248930 (TRBV25-1, TRBJ1-4)
CASSGGGQPEKLFF

SEQ ID NO: 497861 - protein, 12 aa, Homo sapiens
  CDR3 for alpha chain variable domain of TCR clone 248931 (TRAV21, TRAJ26)
YAVDNYGQNFVF

SEQ ID NO: 497862 - protein, 10 aa, Homo sapiens
  CDR3 for beta chain variable domain of TCR clone 248931 (TRBV2, TRBJ2-5)
CASGAATQYF

SEQ ID NO: 497863 - protein, 11 aa, Homo sapiens
  CDR3 for alpha chain variable domain of TCR clone 248932 (TRAV17, TRAJ43)
CATPRSNDMRF

SEQ ID NO: 497864 - protein, 15 aa, Homo sapiens
  CDR3 for beta chain variable domain of TCR clone 248932 (TRBV25-1, TRBJ1-4)
CASSPGDSTNEKLFF

SEQ ID NO: 497865 - protein, 14 aa, Homo sapiens
  CDR3 for alpha chain variable domain of TCR clone 248933 (TRAV1-1, TRAJ27)
CAVIYNTNAGKSTF

SEQ ID NO: 497866 - protein, 15 aa, Homo sapiens
  CDR3 for beta chain variable domain of TCR clone 248933 (TRBV7-2, TRBJ2-1)
CASSSGLAGGNEKFF

SEQ ID NO: 497867 - protein, 12 aa, Homo sapiens
  CDR3 for alpha chain variable domain of TCR clone 248934 (TRAV17, TRAJ12)
CATLRSSYKLIF

SEQ ID NO: 497868 - protein, 18 aa, Homo sapiens
  CDR3 for beta chain variable domain of TCR clone 248934 (TRBV11-2, TRBJ2-3)
CASSLGGASRGAPNTQYF

SEQ ID NO: 497869 - protein, 13 aa, Homo sapiens
  CDR3 for alpha chain variable domain of TCR clone 248935 (TRAV26-1, TRAJ33)
CIVRVEGNYQLIW

SEQ ID NO: 497870 - protein, 16 aa, Homo sapiens
  CDR3 for beta chain variable domain of TCR clone 248935 (TRBV4-1, TRBJ1-3)
CASSQDELLAGNTIYF

SEQ ID NO: 497871 - protein, 15 aa, Homo sapiens
  CDR3 for alpha chain variable domain of TCR clone 248936 (TRAV2, TRAJ28)
CAVPYSGAGSYQLTF

SEQ ID NO: 497872 - protein, 17 aa, Homo sapiens
  CDR3 for beta chain variable domain of TCR clone 248936 (TRBV20-1, TRBJ2-4)
CSARDWASVGRENIQYF

SEQ ID NO: 497873 - protein, 15 aa, Homo sapiens
  CDR3 for alpha chain variable domain of TCR clone 248937 (TRAV12-3, TRAJ52)
CNGGAGGTSYGKLTF

SEQ ID NO: 497874 - protein, 13 aa, Homo sapiens
  CDR3 for beta chain variable domain of TCR clone 248937 (TRBV20-1, TRBJ2-5)
CSARVDYQETQYF

SEQ ID NO: 497875 - protein, 14 aa, Homo sapiens
  CDR3 for alpha chain variable domain of TCR clone 248938 (TRAV4, TRAJ32)
CLGNYGGATNKLIF

SEQ ID NO: 497876 - protein, 14 aa, Homo sapiens
  CDR3 for beta chain variable domain of TCR clone 248938 (TRBV15, TRBJ2-5)
CATSGGTRTETQYF

SEQ ID NO: 497877 - protein, 14 aa, Homo sapiens
  CDR3 for alpha chain variable domain of TCR clone 248939 (TRAV13-1, TRAJ44)
CAAKATGTASKLTF

SEQ ID NO: 497878 - protein, 14 aa, Homo sapiens
  CDR3 for beta chain variable domain of TCR clone 248939 (TRBV18, TRBJ2-5)
CASSPGVSQETQYF

SEQ ID NO: 497879 - protein, 13 aa, Homo sapiens
  CDR3 for alpha chain variable domain of TCR clone 248940 (TRAV36/DV7, TRAJ54)
CAVCTQGAQKLVF

SEQ ID NO: 497880 - protein, 13 aa, Homo sapiens
  CDR3 for beta chain variable domain of TCR clone 248940 (TRBV7-6, TRBJ2-7)
CASSLDHTHAQYF

SEQ ID NO: 497881 - protein, 15 aa, Homo sapiens
  CDR3 for alpha chain variable domain of TCR clone 248941 (TRAV13-2, TRAJ40)
CAENRSRQGTYKYMF

SEQ ID NO: 497882 - protein, 15 aa, Homo sapiens
  CDR3 for beta chain variable domain of TCR clone 248941 (TRBV19, TRBJ2-1)
CASSMGWNSNNEQFF

SEQ ID NO: 497883 - protein, 12 aa, Homo sapiens
  CDR3 for alpha chain variable domain of TCR clone 248942 (TRAV8-6, TRAJ7)
CAVFYGNNRLVF

SEQ ID NO: 497884 - protein, 14 aa, Homo sapiens
  CDR3 for beta chain variable domain of TCR clone 248942 (TRBV19, TRBJ2-1)
CASSRLASINEQFF

SEQ ID NO: 497885 - protein, 13 aa, Homo sapiens
  CDR3 for alpha chain variable domain of TCR clone 248943 (TRAV13-2, TRAJ5)
CAVMDTGRRALTF

SEQ ID NO: 497886 - protein, 15 aa, Homo sapiens
  CDR3 for beta chain variable domain of TCR clone 248943 (TRBV7-2, TRBJ2-1)
CASTHGTGIYNEQFF

SEQ ID NO: 497887 - protein, 15 aa, Homo sapiens
  CDR3 for alpha chain variable domain of TCR clone 248944 (TRAV8-3, TRAJ15)
CAVGAPNQAGTALIF

SEQ ID NO: 497888 - protein, 16 aa, Homo sapiens
  CDR3 for beta chain variable domain of TCR clone 248944 (TRBV7-7, TRBJ2-5)
CASSLVASGVRETQYF

SEQ ID NO: 497889 - protein, 16 aa, Homo sapiens
  CDR3 for alpha chain variable domain of TCR clone 248945 (TRAV3, TRAJ22)
CAVRDMGSGSARQLTF

SEQ ID NO: 497890 - protein, 13 aa, Homo sapiens
  CDR3 for beta chain variable domain of TCR clone 248945 (TRBV4-2, TRBJ1-1)
CASSQAGNTEAFF

SEQ ID NO: 497891 - protein, 14 aa, Homo sapiens
  CDR3 for alpha chain variable domain of TCR clone 248946 (TRAV38-1, TRAJ45)
CASHSGGGADGLTY

SEQ ID NO: 497892 - protein, 13 aa, Homo sapiens
  CDR3 for beta chain variable domain of TCR clone 248946 (TRBV10-3, TRBJ1-2)
CAISERDSYGYTF

SEQ ID NO: 497893 - protein, 13 aa, Homo sapiens
  CDR3 for alpha chain variable domain of TCR clone 248947 (TRAV2, TRAJ40)
CAVVTSGTYKYIF

SEQ ID NO: 497894 - protein, 14 aa, Homo sapiens
  CDR3 for beta chain variable domain of TCR clone 248947 (TRBV15, TRBJ1-4)
CATSGQGRDEKLFF

SEQ ID NO: 497895 - protein, 12 aa, Homo sapiens
  CDR3 for alpha chain variable domain of TCR clone 248948 (TRAV23/DV6, TRAJ37)
CAASMNTGKLIF

SEQ ID NO: 497896 - protein, 15 aa, Homo sapiens
  CDR3 for beta chain variable domain of TCR clone 248948 (TRBV7-2, TRBJ2-1)
CASSSGLAGGNEQFF

SEQ ID NO: 497897 - protein, 10 aa, Homo sapiens
  CDR3 for alpha chain variable domain of TCR clone 248949 (TRAV12-3, TRAJ49)
CAMNDDPFYF

SEQ ID NO: 497898 - protein, 16 aa, Homo sapiens
  CDR3 for beta chain variable domain of TCR clone 248949 (TRBV27, TRBJ2-2)
CASSFRGLVRTGELFF

SEQ ID NO: 497899 - protein, 13 aa, Homo sapiens
  CDR3 for alpha chain variable domain of TCR clone 248950 (TRAV8-6, TRAJ50)
CAVIKTSYDKVIF

SEQ ID NO: 497900 - protein, 13 aa, Homo sapiens
  CDR3 for beta chain variable domain of TCR clone 248950 (TRBV3-1, TRBJ1-1)
CASSPGVITEAFF

SEQ ID NO: 497901 - protein, 15 aa, Homo sapiens
  CDR3 for alpha chain variable domain of TCR clone 248951 (TRAV12-2, TRAJ43)
CAFDMRFGAGTRLTV

SEQ ID NO: 497902 - protein, 13 aa, Homo sapiens
  CDR3 for beta chain variable domain of TCR clone 248951 (TRBV6-1, TRBJ1-6)
CASSRSWDSPLHF

SEQ ID NO: 497903 - protein, 13 aa, Homo sapiens
  CDR3 for alpha chain variable domain of TCR clone 248952 (TRAV3, TRAJ26)
CAVRGAEGQNFVF

SEQ ID NO: 497904 - protein, 15 aa, Homo sapiens
  CDR3 for beta chain variable domain of TCR clone 248952 (TRBV2, TRBJ1-5)
CASSPGPTGNQHQHF

SEQ ID NO: 497905 - protein, 13 aa, Homo sapiens
  CDR3 for alpha chain variable domain of TCR clone 248953 (TRAV3, TRAJ20)
CAVRPLNDYNLSF

SEQ ID NO: 497906 - protein, 12 aa, Homo sapiens
  CDR3 for beta chain variable domain of TCR clone 248953 (TRBV6-1, TRBJ2-1)
CATYGLNNEQFF

SEQ ID NO: 497907 - protein, 11 aa, Homo sapiens
  CDR3 for alpha chain variable domain of TCR clone 248954 (TRAV26-1, TRAJ37)
CIVRVGRKLIF

SEQ ID NO: 497908 - protein, 14 aa, Homo sapiens
  CDR3 for beta chain variable domain of TCR clone 248954 (TRBV12-4, TRBJ2-5)
CASSLWQKQETQYF

SEQ ID NO: 497909 - protein, 11 aa, Homo sapiens
  CDR3 for alpha chain variable domain of TCR clone 248955 (TRAV12-3, TRAJ41)
CARNAREALNF

SEQ ID NO: 497910 - protein, 16 aa, Homo sapiens
  CDR3 for beta chain variable domain of TCR clone 248955 (TRBV7-8, TRBJ2-3)
CASSTEGQRETDTQYF

SEQ ID NO: 497911 - protein, 14 aa, Homo sapiens
  CDR3 for alpha chain variable domain of TCR clone 248956 (TRAV1-2, TRAJ16)
CAVNRFSDGQTLLF

SEQ ID NO: 497912 - protein, 16 aa, Homo sapiens
  CDR3 for beta chain variable domain of TCR clone 248956 (TRBV28, TRBJ2-4)
CASSLIQGSLGNIQYF

SEQ ID NO: 497913 - protein, 16 aa, Homo sapiens
  CDR3 for alpha chain variable domain of TCR clone 248957 (TRAV12-2, TRAJ32)
CAVNMNYGGATHKLIF

SEQ ID NO: 497914 - protein, 12 aa, Homo sapiens
  CDR3 for beta chain variable domain of TCR clone 248957 (TRBV19, TRBJ2-1)
CASSQISNEQFF

SEQ ID NO: 497915 - protein, 11 aa, Homo sapiens
  CDR3 for alpha chain variable domain of TCR clone 248958 (TRAV21, TRAJ34)
CAVTNTDKLIF

SEQ ID NO: 497916 - protein, 15 aa, Homo sapiens
  CDR3 for beta chain variable domain of TCR clone 248958 (TRBV11-2, TRBJ1-6)
CASSLDPWAVSPLHF

SEQ ID NO: 497917 - protein, 11 aa, Homo sapiens
  CDR3 for alpha chain variable domain of TCR clone 248959 (TRAV12-2, TRAJ3)
CAVKRASKLIF

SEQ ID NO: 497918 - protein, 14 aa, Homo sapiens
  CDR3 for beta chain variable domain of TCR clone 248959 (TRBV6-5, TRBJ1-1)
CASNRQRSDTEAFF

SEQ ID NO: 497919 - protein, 17 aa, Homo sapiens
  CDR3 for alpha chain variable domain of TCR clone 248960 (TRAV12-1, TRAJ8)
CVVNPKRANTGFQKLVF

SEQ ID NO: 497920 - protein, 14 aa, Homo sapiens
  CDR3 for beta chain variable domain of TCR clone 248960 (TRBV3-1, TRBJ2-7)
CASSRTSGKEEQYF

SEQ ID NO: 497921 - protein, 14 aa, Homo sapiens
  CDR3 for alpha chain variable domain of TCR clone 248961 (TRAV8-3, TRAJ21)
CAVDARDNCNKFYF

SEQ ID NO: 497922 - protein, 16 aa, Homo sapiens
  CDR3 for beta chain variable domain of TCR clone 248961 (TRBV20-1, TRBJ2-1)
CSARDLAGHSYNEQFF

SEQ ID NO: 497923 - protein, 11 aa, Homo sapiens
  CDR3 for alpha chain variable domain of TCR clone 248962 (TRAV12-3, TRAJ43)
CAMSVSNDMRF

SEQ ID NO: 497924 - protein, 15 aa, Homo sapiens
  CDR3 for beta chain variable domain of TCR clone 248962 (TRBV5-1, TRBJ2-3)
CASSVTSGSTDTQYF

SEQ ID NO: 497925 - protein, 12 aa, Homo sapiens
  CDR3 for alpha chain variable domain of TCR clone 248963 (TRAV12-3, TRAJ39)
CAMTQAGNMLTF

SEQ ID NO: 497926 - protein, 15 aa, Homo sapiens
  CDR3 for beta chain variable domain of TCR clone 248963 (TRBV9, TRBJ1-6)
CASSVAGTGDSPLHF

SEQ ID NO: 497927 - protein, 14 aa, Homo sapiens
  CDR3 for alpha chain variable domain of TCR clone 248964 (TRAV13-2, TRAJ22)
CADGTWGSARQLTY

SEQ ID NO: 497928 - protein, 16 aa, Homo sapiens
  CDR3 for beta chain variable domain of TCR clone 248964 (TRBV19, TRBJ2-1)
CASSSKGTRSYNEQFF

SEQ ID NO: 497929 - protein, 15 aa, Homo sapiens
  CDR3 for alpha chain variable domain of TCR clone 248965 (TRAV26-1, TRAJ52)
CIVSDLGTRYGKLTF

SEQ ID NO: 497930 - protein, 13 aa, Homo sapiens
  CDR3 for beta chain variable domain of TCR clone 248965 (TRBV7-3, TRBJ1-1)
CASSQDWGAEAFF

SEQ ID NO: 497931 - protein, 14 aa, Homo sapiens
  CDR3 for alpha chain variable domain of TCR clone 248966 (TRAV13-1, TRAJ8)
CAASEDTGFQKLVF

SEQ ID NO: 497932 - protein, 13 aa, Homo sapiens
  CDR3 for beta chain variable domain of TCR clone 248966 (TRBV19, TRBJ1-5)
CASSTGRDQPQHF

SEQ ID NO: 497933 - protein, 15 aa, Homo sapiens
  CDR3 for alpha chain variable domain of TCR clone 248967 (TRAV26-1, TRAJ48)
CIVRVGDFGKEKLTF

SEQ ID NO: 497934 - protein, 16 aa, Homo sapiens
  CDR3 for beta chain variable domain of TCR clone 248967 (TRBV4-1, TRBJ2-3)
CASSQRAGGLTDTQYF

SEQ ID NO: 497935 - protein, 14 aa, Homo sapiens
  CDR3 for alpha chain variable domain of TCR clone 248968 (TRAV12-1, TRAJ30)
CVVNIGGRDDKSIF

SEQ ID NO: 497936 - protein, 15 aa, Homo sapiens
  CDR3 for beta chain variable domain of TCR clone 248968 (TRBV18, TRBJ1-2)
CASSPSNTPNYGYTF

SEQ ID NO: 497937 - protein, 12 aa, Homo sapiens
  CDR3 for alpha chain variable domain of TCR clone 248969 (TRAV17, TRAJ39)
CATGAAGNMLTI

SEQ ID NO: 497938 - protein, 14 aa, Homo sapiens
  CDR3 for beta chain variable domain of TCR clone 248969 (TRBV7-9, TRBJ1-2)
CASSRQGANYGYTF

SEQ ID NO: 497939 - protein, 13 aa, Homo sapiens
  CDR3 for alpha chain variable domain of TCR clone 248970 (TRAV21, TRAJ42)
CSVGGGSQGNLIF

SEQ ID NO: 497940 - protein, 15 aa, Homo sapiens
  CDR3 for beta chain variable domain of TCR clone 248970 (TRBV20-1, TRBJ2-7)
CSARDRVSGMDEQYF

SEQ ID NO: 497941 - protein, 12 aa, Homo sapiens
  CDR3 for alpha chain variable domain of TCR clone 248971 (TRAV25, TRAJ29)
CAGHSGNTPLVF

SEQ ID NO: 497942 - protein, 14 aa, Homo sapiens
  CDR3 for beta chain variable domain of TCR clone 248971 (TRBV6-1, TRBJ2-7)
CASTRTGDYYEPYF

SEQ ID NO: 497943 - protein, 14 aa, Homo sapiens
  CDR3 for alpha chain variable domain of TCR clone 248972 (TRAV12-2, TRAJ13)
CAVKKTGGYQEVTF

SEQ ID NO: 497944 - protein, 15 aa, Homo sapiens
  CDR3 for beta chain variable domain of TCR clone 248972 (TRBV27, TRBJ2-1)
CASSNGGGSANEQFF

SEQ ID NO: 497945 - protein, 18 aa, Homo sapiens
  CDR3 for alpha chain variable domain of TCR clone 248973 (TRAV13-1, TRAJ52)
CAASKRSAGGTSYGKLTF

SEQ ID NO: 497946 - protein, 15 aa, Homo sapiens
  CDR3 for beta chain variable domain of TCR clone 248973 (TRBV12-4, TRBJ1-2)
CASSLRQGKRLHLRF

SEQ ID NO: 497947 - protein, 13 aa, Homo sapiens
  CDR3 for alpha chain variable domain of TCR clone 248974 (TRAV27, TRAJ41)
CAGGGNSGYALNF

SEQ ID NO: 497948 - protein, 15 aa, Homo sapiens
  CDR3 for beta chain variable domain of TCR clone 248974 (TRBV2, TRBJ2-1)
CASSDRSSGAREQFF

SEQ ID NO: 497949 - protein, 15 aa, Homo sapiens
  CDR3 for alpha chain variable domain of TCR clone 248975 (TRAV17, TRAJ57)
CATGPSQGGSDKLVF

SEQ ID NO: 497950 - protein, 15 aa, Homo sapiens
  CDR3 for beta chain variable domain of TCR clone 248975 (TRBV9, TRBJ2-1)
CASSLAGSSYNEQFF

SEQ ID NO: 497951 - protein, 16 aa, Homo sapiens
  CDR3 for alpha chain variable domain of TCR clone 248976 (TRAV12-2, TRAJ10)
CAVNRVLTGGGSKLTF

SEQ ID NO: 497952 - protein, 17 aa, Homo sapiens
  CDR3 for beta chain variable domain of TCR clone 248976 (TRBV7-8, TRBJ2-6)
CASSAGTGGAGANVLTF

SEQ ID NO: 497953 - protein, 13 aa, Homo sapiens
  CDR3 for alpha chain variable domain of TCR clone 248977 (TRAV1-2, TRAJ9)
CAALNNGGFKTIF

SEQ ID NO: 497954 - protein, 13 aa, Homo sapiens
  CDR3 for beta chain variable domain of TCR clone 248977 (TRBV19, TRBJ1-2)
CASSVPGQDGYTS

SEQ ID NO: 497955 - protein, 21 aa, Homo sapiens
  CDR3 for alpha chain variable domain of TCR clone 248978 (TRAV2, TRAJ20)
AAHPPGAGADAAVYRDCKLSF

SEQ ID NO: 497956 - protein, 12 aa, Homo sapiens
  CDR3 for beta chain variable domain of TCR clone 248978 (TRBV11-2, TRBJ2-2)
CASSLGGGELFF

SEQ ID NO: 497957 - protein, 14 aa, Homo sapiens
  CDR3 for alpha chain variable domain of TCR clone 248979 (TRAV21, TRAJ35)
CAVMPIGFGNVVHC

SEQ ID NO: 497958 - protein, 12 aa, Homo sapiens
  CDR3 for beta chain variable domain of TCR clone 248979 (TRBV7-9, TRBJ2-7)
CASSIKREEQYF

SEQ ID NO: 497959 - protein, 13 aa, Homo sapiens
  CDR3 for alpha chain variable domain of TCR clone 248980 (TRAV12-3, TRAJ35)
CAMSIGFGNVLHC

SEQ ID NO: 497960 - protein, 15 aa, Homo sapiens
  CDR3 for beta chain variable domain of TCR clone 248980 (TRBV20-1, TRBJ2-1)
CSARGSGTYYNEQFF

SEQ ID NO: 497961 - protein, 15 aa, Homo sapiens
  CDR3 for alpha chain variable domain of TCR clone 248981 (TRAV2, TRAJ9)
CAVEDRGPGGFKTIF

SEQ ID NO: 497962 - protein, 16 aa, Homo sapiens
  CDR3 for beta chain variable domain of TCR clone 248981 (TRBV24-1, TRBJ2-3)
CATSDPGTGATDTQYF

SEQ ID NO: 497963 - protein, 13 aa, Homo sapiens
  CDR3 for alpha chain variable domain of TCR clone 248982 (TRAV13-1, TRAJ39)
CAASIWAGDMLTF

SEQ ID NO: 497964 - protein, 15 aa, Homo sapiens
  CDR3 for beta chain variable domain of TCR clone 248982 (TRBV7-9, TRBJ1-1)
CASSLIEQGGTEAFF

SEQ ID NO: 497965 - protein, 18 aa, Homo sapiens
  CDR3 for alpha chain variable domain of TCR clone 248983 (TRAV21, TRAJ52)
CAVRPSQAGGTSYGKLTF

SEQ ID NO: 497966 - protein, 13 aa, Homo sapiens
  CDR3 for beta chain variable domain of TCR clone 248983 (TRBV2, TRBJ1-5)
CATAGPGNQPQHF

SEQ ID NO: 497967 - protein, 18 aa, Homo sapiens
  CDR3 for alpha chain variable domain of TCR clone 248984 (TRAV21, TRAJ52)
CAVRPSPADGTSYGKLTF

SEQ ID NO: 497968 - protein, 13 aa, Homo sapiens
  CDR3 for beta chain variable domain of TCR clone 248984 (TRBV10-3, TRBJ2-1)
CAISEFSGREQFF

SEQ ID NO: 497969 - protein, 15 aa, Homo sapiens
  CDR3 for alpha chain variable domain of TCR clone 248985 (TRAV26-1, TRAJ44)
CIVRVATGTASKLTF

SEQ ID NO: 497970 - protein, 14 aa, Homo sapiens
  CDR3 for beta chain variable domain of TCR clone 248985 (TRBV20-1, TRBJ2-7)
CSAWTALSSYEQYF

SEQ ID NO: 497971 - protein, 13 aa, Homo sapiens
  CDR3 for alpha chain variable domain of TCR clone 248986 (TRAV13-1, TRAJ39)
CSKYSNAGNMLTF

SEQ ID NO: 497972 - protein, 18 aa, Homo sapiens
  CDR3 for beta chain variable domain of TCR clone 248986 (TRBV10-2, TRBJ2-2)
CIAAPAVHRQADAGELFF

SEQ ID NO: 497973 - protein, 20 aa, Homo sapiens
  CDR3 for alpha chain variable domain of TCR clone 248987 (TRAV12-1, TRAJ42)
SSVIQPPTSVKGGSQGNLIF

SEQ ID NO: 497974 - protein, 20 aa, Homo sapiens
  CDR3 for beta chain variable domain of TCR clone 248987 (TRBV7-8, TRBJ2-2)
CASSHLFPGPTIHITGELFF

SEQ ID NO: 497975 - protein, 16 aa, Homo sapiens
  CDR3 for alpha chain variable domain of TCR clone 248988 (TRAV1-2, TRAJ18)
CAVRVERGSTLGRLYF

SEQ ID NO: 497976 - protein, 16 aa, Homo sapiens
  CDR3 for beta chain variable domain of TCR clone 248988 (TRBV20-1, TRBJ2-7)
CSASTSGRLSFYEQYF

SEQ ID NO: 497977 - protein, 15 aa, Homo sapiens
  CDR3 for alpha chain variable domain of TCR clone 248989 (TRAV14/DV4, TRAJ10)
CAMRELTGGGNKLTF

SEQ ID NO: 497978 - protein, 17 aa, Homo sapiens
  CDR3 for beta chain variable domain of TCR clone 248989 (TRBV5-1, TRBJ2-5)
CASSLLGLAANQETQYF

SEQ ID NO: 497979 - protein, 14 aa, Homo sapiens
  CDR3 for alpha chain variable domain of TCR clone 248990 (TRAV29/DV5, TRAJ28)
CAARSGAGSYQLTF

SEQ ID NO: 497980 - protein, 13 aa, Homo sapiens
  CDR3 for beta chain variable domain of TCR clone 248990 (TRBV7-2, TRBJ1-5)
CASSFARNQPQHF

SEQ ID NO: 497981 - protein, 12 aa, Homo sapiens
  CDR3 for alpha chain variable domain of TCR clone 248991 (TRAV2, TRAJ33)
CAFMDSNYQLIW

SEQ ID NO: 497982 - protein, 12 aa, Homo sapiens
  CDR3 for beta chain variable domain of TCR clone 248991 (TRBV2, TRBJ2-7)
EPWTGPSYEQYF

SEQ ID NO: 497983 - protein, 16 aa, Homo sapiens
  CDR3 for alpha chain variable domain of TCR clone 248992 (TRAV30, TRAJ24)
CGTEIVDADSWGKFQF

SEQ ID NO: 497984 - protein, 17 aa, Homo sapiens
  CDR3 for beta chain variable domain of TCR clone 248992 (TRBV7-8, TRBJ2-6)
CASSAGTGGAGANGLTF

SEQ ID NO: 497985 - protein, 14 aa, Homo sapiens
  CDR3 for alpha chain variable domain of TCR clone 248993 (TRAV26-1, TRAJ49)
CIVRPSNTGDQFYF

SEQ ID NO: 497986 - protein, 15 aa, Homo sapiens
  CDR3 for beta chain variable domain of TCR clone 248993 (TRBV19, TRBJ1-1)
CASMGFRDVNTEAFF

SEQ ID NO: 497987 - protein, 12 aa, Homo sapiens
  CDR3 for alpha chain variable domain of TCR clone 248994 (TRAV21, TRAJ13)
PGPSGGYQKVTF

SEQ ID NO: 497988 - protein, 15 aa, Homo sapiens
  CDR3 for beta chain variable domain of TCR clone 248994 (TRBV27, TRBJ2-5)
CASSLYQRGGETQYF

SEQ ID NO: 497989 - protein, 13 aa, Homo sapiens
  CDR3 for alpha chain variable domain of TCR clone 248995 (TRAV2, TRAJ23)
CAAMGNQGGKLNF

SEQ ID NO: 497990 - protein, 14 aa, Homo sapiens
  CDR3 for beta chain variable domain of TCR clone 248995 (TRBV11-2, TRBJ2-1)
CASSRATSYNEQFF

SEQ ID NO: 497991 - protein, 12 aa, Homo sapiens
  CDR3 for alpha chain variable domain of TCR clone 248996 (TRAV2, TRAJ31)
CAVEDNNARLMF

SEQ ID NO: 497992 - protein, 14 aa, Homo sapiens
  CDR3 for beta chain variable domain of TCR clone 248996 (TRBV19, TRBJ2-5)
RASSMTGQQETQYF

SEQ ID NO: 497993 - protein, 15 aa, Homo sapiens
  CDR3 for alpha chain variable domain of TCR clone 248997 (TRAV25, TRAJ23)
CALAPNYNQGGKLIF

SEQ ID NO: 497994 - protein, 12 aa, Homo sapiens
  CDR3 for beta chain variable domain of TCR clone 248997 (TRBV11-2, TRBJ2-1)
CASSPGNNEQFF

SEQ ID NO: 497995 - protein, 14 aa, Homo sapiens
  CDR3 for alpha chain variable domain of TCR clone 248998 (TRAV12-2, TRAJ13)
CAVKKTGGSQKVTF

SEQ ID NO: 497996 - protein, 15 aa, Homo sapiens
  CDR3 for beta chain variable domain of TCR clone 248998 (TRBV5-1, TRBJ2-5)
CASSLGLAEQETQYF

SEQ ID NO: 497997 - protein, 10 aa, Homo sapiens
  CDR3 for alpha chain variable domain of TCR clone 248999 (TRAV5, TRAJ34)
CAEDTDKLIF

SEQ ID NO: 497998 - protein, 14 aa, Homo sapiens
  CDR3 for beta chain variable domain of TCR clone 248999 (TRBV7-6, TRBJ2-3)
CASSLGTVTDTQYF

SEQ ID NO: 497999 - protein, 14 aa, Homo sapiens
  CDR3 for alpha chain variable domain of TCR clone 249000 (TRAV12-2, TRAJ13)
CAVTKTGCYQKVTF

SEQ ID NO: 498000 - protein, 12 aa, Homo sapiens
  CDR3 for beta chain variable domain of TCR clone 249000 (TRBV12-4, TRBJ1-2)
CASSFIWLHLRF

SEQ ID NO: 498001 - protein, 13 aa, Homo sapiens
  CDR3 for alpha chain variable domain of TCR clone 249001 (TRAV14/DV4, TRAJ20)
CAMRESNDYKLSF

SEQ ID NO: 498002 - protein, 17 aa, Homo sapiens
  CDR3 for beta chain variable domain of TCR clone 249001 (TRBV13, TRBJ2-3)
CASSLSRVAGGRNTQYF

SEQ ID NO: 498003 - protein, 15 aa, Homo sapiens
  CDR3 for alpha chain variable domain of TCR clone 249002 (TRAV25, TRAJ53)
CAATGGGGSNYKLTF

SEQ ID NO: 498004 - protein, 19 aa, Homo sapiens
  CDR3 for beta chain variable domain of TCR clone 249002 (TRBV7-2, TRBJ2-3)
CASSFLPRNWGGGTDTQYF

SEQ ID NO: 498005 - protein, 15 aa, Homo sapiens
  CDR3 for alpha chain variable domain of TCR clone 249003 (TRAV3, TRAJ3)
CAVRDRESSASKLIF

SEQ ID NO: 498006 - protein, 18 aa, Homo sapiens
  CDR3 for beta chain variable domain of TCR clone 249003 (TRBV25-1, TRBJ1-2)
CASSGLQNGQGLIFGYTF

SEQ ID NO: 498007 - protein, 11 aa, Homo sapiens
  CDR3 for alpha chain variable domain of TCR clone 249004 (TRAV12-2, TRAJ31)
CAVTRWARLIF

SEQ ID NO: 498008 - protein, 15 aa, Homo sapiens
  CDR3 for beta chain variable domain of TCR clone 249004 (TRBV19, TRBJ2-7)
CASSVGGGLVNEQYF

SEQ ID NO: 498009 - protein, 11 aa, Homo sapiens
  CDR3 for alpha chain variable domain of TCR clone 249005 (TRAV12-1, TRAJ44)
SLSGTASKLTF

SEQ ID NO: 498010 - protein, 16 aa, Homo sapiens
  CDR3 for beta chain variable domain of TCR clone 249005 (TRBV7-2, TRBJ2-7)
CASSLAGLAGTYEQYF

SEQ ID NO: 498011 - protein, 15 aa, Homo sapiens
  CDR3 for alpha chain variable domain of TCR clone 249006 (TRAV4, TRAJ26)
CLVGNMNNYGQNFVF

SEQ ID NO: 498012 - protein, 16 aa, Homo sapiens
  CDR3 for beta chain variable domain of TCR clone 249006 (TRBV28, TRBJ1-4)
CASSSRTGAANEKLFF

SEQ ID NO: 498013 - protein, 14 aa, Homo sapiens
  CDR3 for alpha chain variable domain of TCR clone 249007 (TRAV1-2, TRAJ16)
CAVNRFSDGQKLLF

SEQ ID NO: 498014 - protein, 14 aa, Homo sapiens
  CDR3 for beta chain variable domain of TCR clone 249007 (TRBV13, TRBJ2-5)
CASILGRGQETQYF

SEQ ID NO: 498015 - protein, 13 aa, Homo sapiens
  CDR3 for alpha chain variable domain of TCR clone 249008 (TRAV20, TRAJ49)
CAVQARTGNQFHF

SEQ ID NO: 498016 - protein, 14 aa, Homo sapiens
  CDR3 for beta chain variable domain of TCR clone 249008 (TRBV7-2, TRBJ2-7)
CASSPKTSFYEQYF

SEQ ID NO: 498017 - protein, 12 aa, Homo sapiens
  CDR3 for alpha chain variable domain of TCR clone 249009 (TRAV13-2, TRAJ23)
CAERHRGGKLIF

SEQ ID NO: 498018 - protein, 16 aa, Homo sapiens
  CDR3 for beta chain variable domain of TCR clone 249009 (TRBV2, TRBJ2-3)
CAGSTSVEGVTDTQYF

SEQ ID NO: 498019 - protein, 15 aa, Homo sapiens
  CDR3 for alpha chain variable domain of TCR clone 249010 (TRAV1-2, TRAJ32)
CAVRGYGGATNKLIF

SEQ ID NO: 498020 - protein, 15 aa, Homo sapiens
  CDR3 for beta chain variable domain of TCR clone 249010 (TRBV25-1, TRBJ2-5)
CASGDTGTHQETQYF

SEQ ID NO: 498021 - protein, 17 aa, Homo sapiens
  CDR3 for alpha chain variable domain of TCR clone 249011 (TRAV3, TRAJ38)
CAVRDCLNAGNNRMLIW

SEQ ID NO: 498022 - protein, 13 aa, Homo sapiens
  CDR3 for beta chain variable domain of TCR clone 249011 (TRBV7-3, TRBJ1-1)
CASSQDWGAEAFF

SEQ ID NO: 498023 - protein, 23 aa, Homo sapiens
  CDR3 for alpha chain variable domain of TCR clone 249012 (TRAV26-1, TRAJ38)
CIADNAGNNHIRNPDPAVYQLRD

SEQ ID NO: 498024 - protein, 15 aa, Homo sapiens
  CDR3 for beta chain variable domain of TCR clone 249012 (TRBV27, TRBJ2-1)
CASSNGGGSSNEQFF

SEQ ID NO: 498025 - protein, 14 aa, Homo sapiens
  CDR3 for alpha chain variable domain of TCR clone 249013 (TRAV12-2, TRAJ40)
CAVKIPSGTYKYIF

SEQ ID NO: 498026 - protein, 13 aa, Homo sapiens
  CDR3 for beta chain variable domain of TCR clone 249013 (TRBV3-1, TRBJ2-2)
CASLARGSGELFF

SEQ ID NO: 498027 - protein, 12 aa, Homo sapiens
  CDR3 for alpha chain variable domain of TCR clone 249014 (TRAV24, TRAJ37)
CASSSNTGKLIF

SEQ ID NO: 498028 - protein, 11 aa, Homo sapiens
  CDR3 for beta chain variable domain of TCR clone 249014 (TRBV29-1, TRBJ2-5)
CSEDRTWTQYF

SEQ ID NO: 498029 - protein, 13 aa, Homo sapiens
  CDR3 for alpha chain variable domain of TCR clone 249015 (TRAV3, TRAJ20)
CAVRSLDDYKLSF

SEQ ID NO: 498030 - protein, 13 aa, Homo sapiens
  CDR3 for beta chain variable domain of TCR clone 249015 (TRBV6-1, TRBJ2-1)
CAGMDPTNNEQFF

SEQ ID NO: 498031 - protein, 14 aa, Homo sapiens
  CDR3 for alpha chain variable domain of TCR clone 249016 (TRAV1-2, TRAJ8)
CAVREDTGFQKLVF

SEQ ID NO: 498032 - protein, 16 aa, Homo sapiens
  CDR3 for beta chain variable domain of TCR clone 249016 (TRBV7-6, TRBJ2-6)
CASSLPGLSGANVLTS

SEQ ID NO: 498033 - protein, 12 aa, Homo sapiens
  CDR3 for alpha chain variable domain of TCR clone 249017 (TRAV12-2, TRAJ21)
CAVHRNFNKFYF

SEQ ID NO: 498034 - protein, 14 aa, Homo sapiens
  CDR3 for beta chain variable domain of TCR clone 249017 (TRBV12-4, TRBJ2-3)
CASSLSGATDTQYF

SEQ ID NO: 498035 - protein, 12 aa, Homo sapiens
  CDR3 for alpha chain variable domain of TCR clone 249018 (TRAV17, TRAJ20)
CATLANDYKLSF

SEQ ID NO: 498036 - protein, 16 aa, Homo sapiens
  CDR3 for beta chain variable domain of TCR clone 249018 (TRBV2, TRBJ2-1)
CASSANPRDWQAEQFF

SEQ ID NO: 498037 - protein, 14 aa, Homo sapiens
  CDR3 for alpha chain variable domain of TCR clone 249019 (TRAV35, TRAJ22)
CAGLRPGSARQLTF

SEQ ID NO: 498038 - protein, 19 aa, Homo sapiens
  CDR3 for beta chain variable domain of TCR clone 249019 (TRBV12-4, TRBJ2-5)
CASSPRQASKRPVLRARHA

SEQ ID NO: 498039 - protein, 14 aa, Homo sapiens
  CDR3 for alpha chain variable domain of TCR clone 249020 (TRAV1-2, TRAJ16)
CAVNRFSDGQKLLF

SEQ ID NO: 498040 - protein, 17 aa, Homo sapiens
  CDR3 for beta chain variable domain of TCR clone 249020 (TRBV20-1, TRBJ2-2)
CSASGSGQGGSTGELFF

SEQ ID NO: 498041 - protein, 15 aa, Homo sapiens
  CDR3 for alpha chain variable domain of TCR clone 249021 (TRAV13-1, TRAJ42)
CAAIIAGGSQGNLIF

SEQ ID NO: 498042 - protein, 15 aa, Homo sapiens
  CDR3 for beta chain variable domain of TCR clone 249021 (TRBV19, TRBJ2-1)
CASSIVRGEGREQFF

SEQ ID NO: 498043 - protein, 12 aa, Homo sapiens
  CDR3 for alpha chain variable domain of TCR clone 249022 (TRAV9-2, TRAJ24)
CAQTDSWGKLQF

SEQ ID NO: 498044 - protein, 13 aa, Homo sapiens
  CDR3 for beta chain variable domain of TCR clone 249022 (TRBV28, TRBJ2-5)
CASSFAGGETQYF

SEQ ID NO: 498045 - protein, 14 aa, Homo sapiens
  CDR3 for alpha chain variable domain of TCR clone 249023 (TRAV8-3, TRAJ33)
CAVGAVDSNYQLIW

SEQ ID NO: 498046 - protein, 16 aa, Homo sapiens
  CDR3 for beta chain variable domain of TCR clone 249023 (TRBV12-4, TRBJ2-5)
CASSFFVRGRQETQYF

SEQ ID NO: 498047 - protein, 13 aa, Homo sapiens
  CDR3 for alpha chain variable domain of TCR clone 249024 (TRAV27, TRAJ41)
RAGEGNSGYALNF

SEQ ID NO: 498048 - protein, 13 aa, Homo sapiens
  CDR3 for beta chain variable domain of TCR clone 249024 (TRBV7-9, TRBJ1-2)
CASSLKQNYGYTF

SEQ ID NO: 498049 - protein, 13 aa, Homo sapiens
  CDR3 for alpha chain variable domain of TCR clone 249025 (TRAV12-3, TRAJ4)
CNEQAGGYNKLIF

SEQ ID NO: 498050 - protein, 15 aa, Homo sapiens
  CDR3 for beta chain variable domain of TCR clone 249025 (TRBV18, TRBJ2-1)
CASSPPSASYNEQFF

SEQ ID NO: 498051 - protein, 11 aa, Homo sapiens
  CDR3 for alpha chain variable domain of TCR clone 249026 (TRAV3, TRAJ21)
CAVGKFNNFYF

SEQ ID NO: 498052 - protein, 16 aa, Homo sapiens
  CDR3 for beta chain variable domain of TCR clone 249026 (TRBV19, TRBJ2-1)
CASSKAGPSSYNEQFF

SEQ ID NO: 498053 - protein, 14 aa, Homo sapiens
  CDR3 for alpha chain variable domain of TCR clone 249027 (TRAV17, TRAJ54)
CATDANQGTQKLEF

SEQ ID NO: 498054 - protein, 14 aa, Homo sapiens
  CDR3 for beta chain variable domain of TCR clone 249027 (TRBV4-2, TRBJ2-1)
CAIGLDRAYNEQFF

SEQ ID NO: 498055 - protein, 12 aa, Homo sapiens
  CDR3 for alpha chain variable domain of TCR clone 249028 (TRAV3, TRAJ26)
CAVRDYGQNFVF

SEQ ID NO: 498056 - protein, 16 aa, Homo sapiens
  CDR3 for beta chain variable domain of TCR clone 249028 (TRBV3-1, TRBJ2-5)
CASSPGQFNGFGTQYF

SEQ ID NO: 498057 - protein, 18 aa, Homo sapiens
  CDR3 for alpha chain variable domain of TCR clone 249029 (TRAV26-1, TRAJ23)
CNVRVGLEVWNQGGKLIF

SEQ ID NO: 498058 - protein, 14 aa, Homo sapiens
  CDR3 for beta chain variable domain of TCR clone 249029 (TRBV7-6, TRBJ2-3)
CASSLGTVTDTQYF

SEQ ID NO: 498059 - protein, 13 aa, Homo sapiens
  CDR3 for alpha chain variable domain of TCR clone 249030 (TRAV21, TRAJ57)
CAVTQGGSEKLVF

SEQ ID NO: 498060 - protein, 16 aa, Homo sapiens
  CDR3 for beta chain variable domain of TCR clone 249030 (TRBV7-2, TRBJ2-1)
CASSYPSGGAGDEQFF

SEQ ID NO: 498061 - protein, 14 aa, Homo sapiens
  CDR3 for alpha chain variable domain of TCR clone 249031 (TRAV1-2, TRAJ16)
CAVNRCSDGQKLLF

SEQ ID NO: 498062 - protein, 12 aa, Homo sapiens
  CDR3 for beta chain variable domain of TCR clone 249031 (TRBV7-9, TRBJ2-7)
CASSLEGYEQYF

SEQ ID NO: 498063 - protein, 13 aa, Homo sapiens
  CDR3 for alpha chain variable domain of TCR clone 249032 (TRAV2, TRAJ40)
CAVVTSGTYKYIF

SEQ ID NO: 498064 - protein, 14 aa, Homo sapiens
  CDR3 for beta chain variable domain of TCR clone 249032 (TRBV19, TRBJ2-1)
CTSPTVVLSGEQFF

SEQ ID NO: 498065 - protein, 10 aa, Homo sapiens
  CDR3 for alpha chain variable domain of TCR clone 249033 (TRAV12-1, TRAJ20)
CVVNPRKPSF

SEQ ID NO: 498066 - protein, 15 aa, Homo sapiens
  CDR3 for beta chain variable domain of TCR clone 249033 (TRBV5-1, TRBJ2-1)
CASSPPRAPYNEQFF

SEQ ID NO: 498067 - protein, 15 aa, Homo sapiens
  CDR3 for alpha chain variable domain of TCR clone 249034 (TRAV13-1, TRAJ52)
CALRTGGTSYGKLTF

SEQ ID NO: 498068 - protein, 12 aa, Homo sapiens
  CDR3 for beta chain variable domain of TCR clone 249034 (TRBV24-1, TRBJ2-3)
CATSDSTDTQYF

SEQ ID NO: 498069 - protein, 12 aa, Homo sapiens
  CDR3 for alpha chain variable domain of TCR clone 249035 (TRAV12-1, TRAJ40)
CVFYSGTYKYIF

SEQ ID NO: 498070 - protein, 13 aa, Homo sapiens
  CDR3 for beta chain variable domain of TCR clone 249035 (TRBV25-1, TRBJ2-7)
CASSEDGDYEQYF

SEQ ID NO: 498071 - protein, 10 aa, Homo sapiens
  CDR3 for alpha chain variable domain of TCR clone 249036 (TRAV1-2, TRAJ20)
CVPNDYKPSF

SEQ ID NO: 498072 - protein, 16 aa, Homo sapiens
  CDR3 for beta chain variable domain of TCR clone 249036 (TRBV20-1, TRBJ1-1)
CSARDRMGGMNTEAFF

SEQ ID NO: 498073 - protein, 16 aa, Homo sapiens
  CDR3 for alpha chain variable domain of TCR clone 249037 (TRAV26-1, TRAJ32)
CIVRTNYGGATNKLIF

SEQ ID NO: 498074 - protein, 14 aa, Homo sapiens
  CDR3 for beta chain variable domain of TCR clone 249037 (TRBV27, TRBJ1-1)
CASSLLSGLSEGFF

SEQ ID NO: 498075 - protein, 13 aa, Homo sapiens
  CDR3 for alpha chain variable domain of TCR clone 249038 (TRAV13-2, TRAJ8)
CAFMDTGFQKLVF

SEQ ID NO: 498076 - protein, 17 aa, Homo sapiens
  CDR3 for beta chain variable domain of TCR clone 249038 (TRBV28, TRBJ2-1)
CASSSARQALTYNEQFF

SEQ ID NO: 498077 - protein, 14 aa, Homo sapiens
  CDR3 for alpha chain variable domain of TCR clone 249039 (TRAV26-1, TRAJ38)
CIADNAGNNRKLIW

SEQ ID NO: 498078 - protein, 14 aa, Homo sapiens
  CDR3 for beta chain variable domain of TCR clone 249039 (TRBV9, TRBJ2-1)
CSSLAGSSYNEQFF

SEQ ID NO: 498079 - protein, 16 aa, Homo sapiens
  CDR3 for alpha chain variable domain of TCR clone 249040 (TRAV3, TRAJ18)
CAVRDGRGSTLGRLYF

SEQ ID NO: 498080 - protein, 15 aa, Homo sapiens
  CDR3 for beta chain variable domain of TCR clone 249040 (TRBV7-9, TRBJ1-6)
CASSSPVRGNSPLHF

SEQ ID NO: 498081 - protein, 12 aa, Homo sapiens
  CDR3 for alpha chain variable domain of TCR clone 249041 (TRAV29/DV5, TRAJ15)
CASNQAETALIF

SEQ ID NO: 498082 - protein, 15 aa, Homo sapiens
  CDR3 for beta chain variable domain of TCR clone 249041 (TRBV11-2, TRBJ2-2)
CASSSDRVNAGELFF

SEQ ID NO: 498083 - protein, 15 aa, Homo sapiens
  CDR3 for alpha chain variable domain of TCR clone 249042 (TRAV3, TRAJ15)
CAVRPAHQAGTALIF

SEQ ID NO: 498084 - protein, 15 aa, Homo sapiens
  CDR3 for beta chain variable domain of TCR clone 249042 (TRBV7-7, TRBJ1-3)
CASSQGEHSGNTIYF

SEQ ID NO: 498085 - protein, 12 aa, Homo sapiens
  CDR3 for alpha chain variable domain of TCR clone 249043 (TRAV3, TRAJ31)
CALRPRGPRLMF

SEQ ID NO: 498086 - protein, 17 aa, Homo sapiens
  CDR3 for beta chain variable domain of TCR clone 249043 (TRBV7-9, TRBJ1-5)
CASSASQGGYSNQPQHF

SEQ ID NO: 498087 - protein, 16 aa, Homo sapiens
  CDR3 for alpha chain variable domain of TCR clone 249044 (TRAV27, TRAJ52)
CAVAGAGGTSYGKLTF

SEQ ID NO: 498088 - protein, 17 aa, Homo sapiens
  CDR3 for beta chain variable domain of TCR clone 249044 (TRBV24-1, TRBJ2-3)
CATSDLPSGEDTDTQYF

SEQ ID NO: 498089 - protein, 13 aa, Homo sapiens
  CDR3 for alpha chain variable domain of TCR clone 249045 (TRAV8-3, TRAJ31)
CAVGAMNNARLMF

SEQ ID NO: 498090 - protein, 14 aa, Homo sapiens
  CDR3 for beta chain variable domain of TCR clone 249045 (TRBV12-5, TRBJ2-5)
CASGSRTHQGTQYF

SEQ ID NO: 498091 - protein, 17 aa, Homo sapiens
  CDR3 for alpha chain variable domain of TCR clone 249046 (TRAV26-1, TRAJ28)
CIVRARYSGTGSYQLTF

SEQ ID NO: 498092 - protein, 10 aa, Homo sapiens
  CDR3 for beta chain variable domain of TCR clone 249046 (TRBV12-4, TRBJ2-7)
CASLTFEQYF

SEQ ID NO: 498093 - protein, 13 aa, Homo sapiens
  CDR3 for alpha chain variable domain of TCR clone 249047 (TRAV13-1, TRAJ20)
CAARVSNDYKLSF

SEQ ID NO: 498094 - protein, 12 aa, Homo sapiens
  CDR3 for beta chain variable domain of TCR clone 249047 (TRBV20-1, TRBJ2-1)
CSARLGTDEQFF

SEQ ID NO: 498095 - protein, 11 aa, Homo sapiens
  CDR3 for alpha chain variable domain of TCR clone 249048 (TRAV12-2, TRAJ4)
HVSGGYNKLIF

SEQ ID NO: 498096 - protein, 13 aa, Homo sapiens
  CDR3 for beta chain variable domain of TCR clone 249048 (TRBV7-3, TRBJ2-5)
CASSLTAGETQYF

SEQ ID NO: 498097 - protein, 13 aa, Homo sapiens
  CDR3 for alpha chain variable domain of TCR clone 249049 (TRAV21, TRAJ20)
CAVSSLGDYKLSF

SEQ ID NO: 498098 - protein, 13 aa, Homo sapiens
  CDR3 for beta chain variable domain of TCR clone 249049 (TRBV7-3, TRBJ1-1)
CASSPAGGLEAFF

SEQ ID NO: 498099 - protein, 13 aa, Homo sapiens
  CDR3 for alpha chain variable domain of TCR clone 249050 (TRAV17, TRAJ5)
CAPMDTGRRALTF

SEQ ID NO: 498100 - protein, 15 aa, Homo sapiens
  CDR3 for beta chain variable domain of TCR clone 249050 (TRBV7-6, TRBJ2-7)
CASSLGGAEPYEQYF

SEQ ID NO: 498101 - protein, 11 aa, Homo sapiens
  CDR3 for alpha chain variable domain of TCR clone 249051 (TRAV8-3, TRAJ43)
CAVGPFNDMRF

SEQ ID NO: 498102 - protein, 14 aa, Homo sapiens
  CDR3 for beta chain variable domain of TCR clone 249051 (TRBV20-1, TRBJ2-1)
CSARDRRIAREQFF

SEQ ID NO: 498103 - protein, 11 aa, Homo sapiens
  CDR3 for alpha chain variable domain of TCR clone 249052 (TRAV21, TRAJ34)
CAVTNTDKLIF

SEQ ID NO: 498104 - protein, 12 aa, Homo sapiens
  CDR3 for beta chain variable domain of TCR clone 249052 (TRBV7-9, TRBJ1-1)
CASSLLRGEAFF

SEQ ID NO: 498105 - protein, 13 aa, Homo sapiens
  CDR3 for alpha chain variable domain of TCR clone 249053 (TRAV2, TRAJ40)
CAVVTSGTSKYIF

SEQ ID NO: 498106 - protein, 16 aa, Homo sapiens
  CDR3 for beta chain variable domain of TCR clone 249053 (TRBV29-1, TRBJ1-2)
CSVEANRDIANYGYTF

SEQ ID NO: 498107 - protein, 14 aa, Homo sapiens
  CDR3 for alpha chain variable domain of TCR clone 249054 (TRAV9-2, TRAJ39)
CALYIYNAGNMLTF

SEQ ID NO: 498108 - protein, 11 aa, Homo sapiens
  CDR3 for beta chain variable domain of TCR clone 249054 (TRBV10-3, TRBJ2-7)
CAISEGLEQYF

SEQ ID NO: 498109 - protein, 13 aa, Homo sapiens
  CDR3 for alpha chain variable domain of TCR clone 249055 (TRAV12-3, TRAJ49)
CAMLSNTGNQFYF

SEQ ID NO: 498110 - protein, 14 aa, Homo sapiens
  CDR3 for beta chain variable domain of TCR clone 249055 (TRBV4-1, TRBJ2-2)
CASSQAVNTGELFF

SEQ ID NO: 498111 - protein, 16 aa, Homo sapiens
  CDR3 for alpha chain variable domain of TCR clone 249056 (TRAV12-3, TRAJ53)
CSMSPGIVGSNYKLTF

SEQ ID NO: 498112 - protein, 11 aa, Homo sapiens
  CDR3 for beta chain variable domain of TCR clone 249056 (TRBV29-1, TRBJ2-5)
CSEDRTGTQYF

SEQ ID NO: 498113 - protein, 13 aa, Homo sapiens
  CDR3 for alpha chain variable domain of TCR clone 249057 (TRAV38-2/DV8, TRAJ49)
CAYRRRTGNQFYF

SEQ ID NO: 498114 - protein, 15 aa, Homo sapiens
  CDR3 for beta chain variable domain of TCR clone 249057 (TRBV24-1, TRBJ1-1)
CATSYSKTVNTEAFF

SEQ ID NO: 498115 - protein, 11 aa, Homo sapiens
  CDR3 for alpha chain variable domain of TCR clone 249058 (TRAV2, TRAJ20)
CAVADDYKLSF

SEQ ID NO: 498116 - protein, 15 aa, Homo sapiens
  CDR3 for beta chain variable domain of TCR clone 249058 (TRBV7-3, TRBJ2-2)
CQQLKAGDLVRELFF

SEQ ID NO: 498117 - protein, 14 aa, Homo sapiens
  CDR3 for alpha chain variable domain of TCR clone 249059 (TRAV1-2, TRAJ8)
CSVRKDTGFQKLVF

SEQ ID NO: 498118 - protein, 13 aa, Homo sapiens
  CDR3 for beta chain variable domain of TCR clone 249059 (TRBV24-1, TRBJ2-2)
CATSDWSTGELFF

SEQ ID NO: 498119 - protein, 11 aa, Homo sapiens
  CDR3 for alpha chain variable domain of TCR clone 249060 (TRAV1-2, TRAJ40)
CAVPGTYKYIF

SEQ ID NO: 498120 - protein, 13 aa, Homo sapiens
  CDR3 for beta chain variable domain of TCR clone 249060 (TRBV7-2, TRBJ2-7)
CASSSPSGSEQYF

SEQ ID NO: 498121 - protein, 10 aa, Homo sapiens
  CDR3 for alpha chain variable domain of TCR clone 249061 (TRAV8-2, TRAJ41)
CVVSELRRTQ

SEQ ID NO: 498122 - protein, 15 aa, Homo sapiens
  CDR3 for beta chain variable domain of TCR clone 249061 (TRBV6-3, TRBJ2-7)
CASSSPGTVFYEQYF

SEQ ID NO: 498123 - protein, 16 aa, Homo sapiens
  CDR3 for alpha chain variable domain of TCR clone 249062 (TRAV30, TRAJ24)
CGTEIVDADSWGKFKF

SEQ ID NO: 498124 - protein, 14 aa, Homo sapiens
  CDR3 for beta chain variable domain of TCR clone 249062 (TRBV12-5, TRBJ2-5)
CASGSRTHQETQYS

SEQ ID NO: 498125 - protein, 15 aa, Homo sapiens
  CDR3 for alpha chain variable domain of TCR clone 249063 (TRAV12-2, TRAJ43)
CAFDMRFGAGTRLTV

SEQ ID NO: 498126 - protein, 16 aa, Homo sapiens
  CDR3 for beta chain variable domain of TCR clone 249063 (TRBV12-4, TRBJ2-7)
CASSLIGGTGTYEQYF

SEQ ID NO: 498127 - protein, 16 aa, Homo sapiens
  CDR3 for alpha chain variable domain of TCR clone 249064 (TRAV16, TRAJ42)
FALSGLLGGSQGNLIF

SEQ ID NO: 498128 - protein, 15 aa, Homo sapiens
  CDR3 for beta chain variable domain of TCR clone 249064 (TRBV5-1, TRBJ2-1)
CASSPGGLAGNEQFF

SEQ ID NO: 498129 - protein, 10 aa, Homo sapiens
  CDR3 for alpha chain variable domain of TCR clone 249065 (TRAV38-2/DV8, TRAJ40)
CASGTYRYIF

SEQ ID NO: 498130 - protein, 14 aa, Homo sapiens
  CDR3 for beta chain variable domain of TCR clone 249065 (TRBV7-9, TRBJ2-1)
CASSPWDSLYEQFF

SEQ ID NO: 498131 - protein, 16 aa, Homo sapiens
  CDR3 for alpha chain variable domain of TCR clone 249066 (TRAV3, TRAJ37)
CAVRGKGSGNTGKLIF

SEQ ID NO: 498132 - protein, 19 aa, Homo sapiens
  CDR3 for beta chain variable domain of TCR clone 249066 (TRBV25-1, TRBJ2-2)
CAILVYRVDRGRKTGELFF

SEQ ID NO: 498133 - protein, 14 aa, Homo sapiens
  CDR3 for alpha chain variable domain of TCR clone 249067 (TRAV12-2, TRAJ17)
CAVLFKAAGNKLTF

SEQ ID NO: 498134 - protein, 15 aa, Homo sapiens
  CDR3 for beta chain variable domain of TCR clone 249067 (TRBV7-9, TRBJ1-3)
CASSFRGSPGNTIYF

SEQ ID NO: 498135 - protein, 14 aa, Homo sapiens
  CDR3 for alpha chain variable domain of TCR clone 249068 (TRAV26-1, TRAJ38)
CIADNAGNNCKLIW

SEQ ID NO: 498136 - protein, 11 aa, Homo sapiens
  CDR3 for beta chain variable domain of TCR clone 249068 (TRBV2, TRBJ1-1)
CASREGTEAFF

SEQ ID NO: 498137 - protein, 16 aa, Homo sapiens
  CDR3 for alpha chain variable domain of TCR clone 249069 (TRAV3, TRAJ23)
CAVKIGIYNQGGKLIF

SEQ ID NO: 498138 - protein, 17 aa, Homo sapiens
  CDR3 for beta chain variable domain of TCR clone 249069 (TRBV10-3, TRBJ2-6)
CAISESTAPSVANVLTF

SEQ ID NO: 498139 - protein, 15 aa, Homo sapiens
  CDR3 for alpha chain variable domain of TCR clone 249070 (TRAV39, TRAJ32)
CAVDMEGGSTNKLIF

SEQ ID NO: 498140 - protein, 17 aa, Homo sapiens
  CDR3 for beta chain variable domain of TCR clone 249070 (TRBV7-2, TRBJ1-4)
CASSFKAGPTTNEKLFF

SEQ ID NO: 498141 - protein, 13 aa, Homo sapiens
  CDR3 for alpha chain variable domain of TCR clone 249071 (TRAV17, TRAJ9)
CATFLTGGFKTIF

SEQ ID NO: 498142 - protein, 13 aa, Homo sapiens
  CDR3 for beta chain variable domain of TCR clone 249071 (TRBV12-4, TRBJ2-3)
CASSFPPRDTQYF

SEQ ID NO: 498143 - protein, 16 aa, Homo sapiens
  CDR3 for alpha chain variable domain of TCR clone 249072 (TRAV30, TRAJ24)
CGTEIVDADSWGKFQF

SEQ ID NO: 498144 - protein, 14 aa, Homo sapiens
  CDR3 for beta chain variable domain of TCR clone 249072 (TRBV12-5, TRBJ2-5)
CDSGSRTQQETQYF

SEQ ID NO: 498145 - protein, 17 aa, Homo sapiens
  CDR3 for alpha chain variable domain of TCR clone 249073 (TRAV13-1, TRAJ28)
CAASPPYSGAGSYQLTF

SEQ ID NO: 498146 - protein, 15 aa, Homo sapiens
  CDR3 for beta chain variable domain of TCR clone 249073 (TRBV9, TRBJ1-6)
CASSVAGTGDSPLHF

SEQ ID NO: 498147 - protein, 12 aa, Homo sapiens
  CDR3 for alpha chain variable domain of TCR clone 249074 (TRAV1-2, TRAJ29)
CAVPSGNTPLVF

SEQ ID NO: 498148 - protein, 14 aa, Homo sapiens
  CDR3 for beta chain variable domain of TCR clone 249074 (TRBV7-6, TRBJ2-3)
CASSLGTLTDTQYF

SEQ ID NO: 498149 - protein, 12 aa, Homo sapiens
  CDR3 for alpha chain variable domain of TCR clone 249075 (TRAV23/DV6, TRAJ30)
CAARKGDDKIIF

SEQ ID NO: 498150 - protein, 15 aa, Homo sapiens
  CDR3 for beta chain variable domain of TCR clone 249075 (TRBV12-4, TRBJ2-1)
CASRPTRAGYNEQFF

SEQ ID NO: 498151 - protein, 16 aa, Homo sapiens
  CDR3 for alpha chain variable domain of TCR clone 249076 (TRAV35, TRAJ54)
SDVGIYPLQGAQKLVF

SEQ ID NO: 498152 - protein, 11 aa, Homo sapiens
  CDR3 for beta chain variable domain of TCR clone 249076 (TRBV7-3, TRBJ2-5)
CASSLSETQYF

SEQ ID NO: 498153 - protein, 16 aa, Homo sapiens
  CDR3 for alpha chain variable domain of TCR clone 249077 (TRAV3, TRAJ10)
CAVRDMRAGGGNKLTF

SEQ ID NO: 498154 - protein, 16 aa, Homo sapiens
  CDR3 for beta chain variable domain of TCR clone 249077 (TRBV5-7, TRBJ1-5)
CASSVQQDREYQPQHF

SEQ ID NO: 498155 - protein, 14 aa, Homo sapiens
  CDR3 for alpha chain variable domain of TCR clone 249078 (TRAV13-1, TRAJ35)
CAASKGGFGNGLHC

SEQ ID NO: 498156 - protein, 16 aa, Homo sapiens
  CDR3 for beta chain variable domain of TCR clone 249078 (TRBV2, TRBJ1-4)
CASNLLQGATNEKLFF

SEQ ID NO: 498157 - protein, 12 aa, Homo sapiens
  CDR3 for alpha chain variable domain of TCR clone 249079 (TRAV3, TRAJ43)
CCERGRNNDMCF

SEQ ID NO: 498158 - protein, 12 aa, Homo sapiens
  CDR3 for beta chain variable domain of TCR clone 249079 (TRBV5-1, TRBJ2-7)
CASSLDSYEQYF

SEQ ID NO: 498159 - protein, 15 aa, Homo sapiens
  CDR3 for alpha chain variable domain of TCR clone 249080 (TRAV12-3, TRAJ6)
CAMSATTGGSYIPTF

SEQ ID NO: 498160 - protein, 13 aa, Homo sapiens
  CDR3 for beta chain variable domain of TCR clone 249080 (TRBV7-9, TRBJ1-2)
CASSLKQNYGSTF

SEQ ID NO: 498161 - protein, 14 aa, Homo sapiens
  CDR3 for alpha chain variable domain of TCR clone 249081 (TRAV21, TRAJ37)
CAVKGSSNTGKLIF

SEQ ID NO: 498162 - protein, 15 aa, Homo sapiens
  CDR3 for beta chain variable domain of TCR clone 249081 (TRBV7-3, TRBJ2-1)
CASSPTGGGEVEQFF

SEQ ID NO: 498163 - protein, 14 aa, Homo sapiens
  CDR3 for alpha chain variable domain of TCR clone 249082 (TRAV12-3, TRAJ9)
CAMSPNTGGFKTIF

SEQ ID NO: 498164 - protein, 14 aa, Homo sapiens
  CDR3 for beta chain variable domain of TCR clone 249082 (TRBV7-2, TRBJ2-5)
CASSPRGSSETQYF

SEQ ID NO: 498165 - protein, 13 aa, Homo sapiens
  CDR3 for alpha chain variable domain of TCR clone 249083 (TRAV21, TRAJ27)
CAARPGNARKSTF

SEQ ID NO: 498166 - protein, 17 aa, Homo sapiens
  CDR3 for beta chain variable domain of TCR clone 249083 (TRBV4-1, TRBJ1-4)
CASSQEGPRGVEEKLFF

SEQ ID NO: 498167 - protein, 14 aa, Homo sapiens
  CDR3 for alpha chain variable domain of TCR clone 249084 (TRAV38-1, TRAJ45)
CAYYLGGGADGLTF

SEQ ID NO: 498168 - protein, 15 aa, Homo sapiens
  CDR3 for beta chain variable domain of TCR clone 249084 (TRBV10-2, TRBJ2-6)
CASSEQGTGANVLTF

SEQ ID NO: 498169 - protein, 12 aa, Homo sapiens
  CDR3 for alpha chain variable domain of TCR clone 249085 (TRAV30, TRAJ43)
CGTGERGNDMRF

SEQ ID NO: 498170 - protein, 17 aa, Homo sapiens
  CDR3 for beta chain variable domain of TCR clone 249085 (TRBV7-8, TRBJ2-6)
CASSAGTGGAGANVLTF

SEQ ID NO: 498171 - protein, 20 aa, Homo sapiens
  CDR3 for alpha chain variable domain of TCR clone 249086 (TRAV8-3, )
CAVGAGDIQNPDPAGYQLRD

SEQ ID NO: 498172 - protein, 14 aa, Homo sapiens
  CDR3 for beta chain variable domain of TCR clone 249086 (TRBV5-1, TRBJ1-5)
CASSLGQGAQPQHF

SEQ ID NO: 498173 - protein, 14 aa, Homo sapiens
  CDR3 for alpha chain variable domain of TCR clone 249087 (TRAV1-2, TRAJ16)
CAVNRFSDGQKLLF

SEQ ID NO: 498174 - protein, 13 aa, Homo sapiens
  CDR3 for beta chain variable domain of TCR clone 249087 (TRBV7-9, TRBJ1-2)
CASSVKQNYGDTF

SEQ ID NO: 498175 - protein, 15 aa, Homo sapiens
  CDR3 for alpha chain variable domain of TCR clone 249088 (TRAV13-2, TRAJ40)
CAENRSRQGTYKSIF

SEQ ID NO: 498176 - protein, 15 aa, Homo sapiens
  CDR3 for beta chain variable domain of TCR clone 249088 (TRBV19, TRBJ2-1)
CASSMGWNSNNEQFF

SEQ ID NO: 498177 - protein, 14 aa, Homo sapiens
  CDR3 for alpha chain variable domain of TCR clone 249089 (TRAV1-2, TRAJ16)
CAVNRFSDGQKLLF

SEQ ID NO: 498178 - protein, 16 aa, Homo sapiens
  CDR3 for beta chain variable domain of TCR clone 249089 (TRBV12-5, TRBJ2-1)
CASGFAGRDAYNEQFF

SEQ ID NO: 498179 - protein, 14 aa, Homo sapiens
  CDR3 for alpha chain variable domain of TCR clone 249090 (TRAV3, TRAJ34)
CAVRAPGNTDKLIF

SEQ ID NO: 498180 - protein, 17 aa, Homo sapiens
  CDR3 for beta chain variable domain of TCR clone 249090 (TRBV20-1, TRBJ2-7)
CSAAPGLARGISYEQYC

SEQ ID NO: 498181 - protein, 16 aa, Homo sapiens
  CDR3 for alpha chain variable domain of TCR clone 249091 (TRAV30, TRAJ49)
SAAQRVGPNTGNQFYF

SEQ ID NO: 498182 - protein, 15 aa, Homo sapiens
  CDR3 for beta chain variable domain of TCR clone 249091 (TRBV7-2, TRBJ2-1)
CASSAGLAGGNEQFF

SEQ ID NO: 498183 - protein, 14 aa, Homo sapiens
  CDR3 for alpha chain variable domain of TCR clone 249092 (TRAV13-1, TRAJ20)
CAARPGSNDYKLSF

SEQ ID NO: 498184 - protein, 13 aa, Homo sapiens
  CDR3 for beta chain variable domain of TCR clone 249092 (TRBV6-6, TRBJ2-7)
CASSTSGSYEQYF

SEQ ID NO: 498185 - protein, 11 aa, Homo sapiens
  CDR3 for alpha chain variable domain of TCR clone 249093 (TRAV20, TRAJ23)
CACNQVGKLIF

SEQ ID NO: 498186 - protein, 16 aa, Homo sapiens
  CDR3 for beta chain variable domain of TCR clone 249093 (TRBV7-8, TRBJ2-5)
CASSFGGQPAQETQYF

SEQ ID NO: 498187 - protein, 15 aa, Homo sapiens
  CDR3 for alpha chain variable domain of TCR clone 249094 (TRAV3, TRAJ22)
CAVRDRGGSARQLAF

SEQ ID NO: 498188 - protein, 12 aa, Homo sapiens
  CDR3 for beta chain variable domain of TCR clone 249094 (TRBV5-1, TRBJ1-2)
CASSQDTYGYTF

SEQ ID NO: 498189 - protein, 10 aa, Homo sapiens
  CDR3 for alpha chain variable domain of TCR clone 249095 (TRAV13-1, TRAJ8)
CAAPFQKIVF

SEQ ID NO: 498190 - protein, 20 aa, Homo sapiens
  CDR3 for beta chain variable domain of TCR clone 249095 (TRBV3-1, TRBJ2-6)
CASSPRPGLEGGAGANVLTF

SEQ ID NO: 498191 - protein, 13 aa, Homo sapiens
  CDR3 for alpha chain variable domain of TCR clone 249096 (TRAV13-1, TRAJ39)
CAASIWAGDMLTF

SEQ ID NO: 498192 - protein, 13 aa, Homo sapiens
  CDR3 for beta chain variable domain of TCR clone 249096 (TRBV7-3, TRBJ2-1)
CASSLWPYNEQFF

SEQ ID NO: 498193 - protein, 15 aa, Homo sapiens
  CDR3 for alpha chain variable domain of TCR clone 249097 (TRAV8-3, TRAJ45)
CASSYSGGCADGLTF

SEQ ID NO: 498194 - protein, 12 aa, Homo sapiens
  CDR3 for beta chain variable domain of TCR clone 249097 (TRBV29-1, TRBJ2-3)
CSVTGGADTQYF

SEQ ID NO: 498195 - protein, 10 aa, Homo sapiens
  CDR3 for alpha chain variable domain of TCR clone 249098 (TRAV12-1, TRAJ43)
CVVHNNDMRF

SEQ ID NO: 498196 - protein, 11 aa, Homo sapiens
  CDR3 for beta chain variable domain of TCR clone 249098 (TRBV2, TRBJ1-4)
CASRENEKLFF

SEQ ID NO: 498197 - protein, 15 aa, Homo sapiens
  CDR3 for alpha chain variable domain of TCR clone 249099 (TRAV8-3, TRAJ23)
CAVGDRYNQGGKLIF

SEQ ID NO: 498198 - protein, 14 aa, Homo sapiens
  CDR3 for beta chain variable domain of TCR clone 249099 (TRBV4-1, TRBJ2-2)
CASSQAVNTGELFF

SEQ ID NO: 498199 - protein, 13 aa, Homo sapiens
  CDR3 for alpha chain variable domain of TCR clone 249100 (TRAV2, TRAJ15)
CAVASQAGTALIF

SEQ ID NO: 498200 - protein, 16 aa, Homo sapiens
  CDR3 for beta chain variable domain of TCR clone 249100 (TRBV18, TRBJ1-5)
CTSSPYRVEGNQPQHF

SEQ ID NO: 498201 - protein, 13 aa, Homo sapiens
  CDR3 for alpha chain variable domain of TCR clone 249101 (TRAV8-3, TRAJ28)
CAVVAVGSYQLTF

SEQ ID NO: 498202 - protein, 14 aa, Homo sapiens
  CDR3 for beta chain variable domain of TCR clone 249101 (TRBV15, TRBJ2-3)
CATRSGTSTDTQYF

SEQ ID NO: 498203 - protein, 14 aa, Homo sapiens
  CDR3 for alpha chain variable domain of TCR clone 249102 (TRAV1-2, TRAJ8)
CAGREDTGFQKLVF

SEQ ID NO: 498204 - protein, 12 aa, Homo sapiens
  CDR3 for beta chain variable domain of TCR clone 249102 (TRBV11-2, TRBJ2-2)
CASSLGGGELFF

SEQ ID NO: 498205 - protein, 23 aa, Homo sapiens
  CDR3 for alpha chain variable domain of TCR clone 249103 (TRAV8-3, )
CAVVTTRIPDIQNRDPAVYQLRD

SEQ ID NO: 498206 - protein, 14 aa, Homo sapiens
  CDR3 for beta chain variable domain of TCR clone 249103 (TRBV11-2, TRBJ2-7)
CASSPSTTSYEQYF

SEQ ID NO: 498207 - protein, 15 aa, Homo sapiens
  CDR3 for alpha chain variable domain of TCR clone 249104 (TRAV8-4, TRAJ3)
CAVTGENLVQQCFQD

SEQ ID NO: 498208 - protein, 16 aa, Homo sapiens
  CDR3 for beta chain variable domain of TCR clone 249104 (TRBV4-2, TRBJ1-1)
CASSQAGVGMNTEAFF

SEQ ID NO: 498209 - protein, 16 aa, Homo sapiens
  CDR3 for alpha chain variable domain of TCR clone 249105 (TRAV20, TRAJ22)
CAVQASSSGSARQQTF

SEQ ID NO: 498210 - protein, 13 aa, Homo sapiens
  CDR3 for beta chain variable domain of TCR clone 249105 (TRBV7-2, TRBJ2-5)
CASNQTSVETQYF

SEQ ID NO: 498211 - protein, 14 aa, Homo sapiens
  CDR3 for alpha chain variable domain of TCR clone 249106 (TRAV23/DV6, TRAJ39)
CAASIGNAGNMLTF

SEQ ID NO: 498212 - protein, 14 aa, Homo sapiens
  CDR3 for beta chain variable domain of TCR clone 249106 (TRBV7-3, TRBJ1-1)
YASSLKGGNTEAFF

SEQ ID NO: 498213 - protein, 18 aa, Homo sapiens
  CDR3 for alpha chain variable domain of TCR clone 249107 (TRAV12-2, )
CAVEDIQNPDPAVYQLRD

SEQ ID NO: 498214 - protein, 17 aa, Homo sapiens
  CDR3 for beta chain variable domain of TCR clone 249107 (TRBV28, TRBJ2-5)
CASSRQGGLAGAETQYF

SEQ ID NO: 498215 - protein, 11 aa, Homo sapiens
  CDR3 for alpha chain variable domain of TCR clone 249108 (TRAV2, TRAJ13)
CASGGYQKVTF

SEQ ID NO: 498216 - protein, 16 aa, Homo sapiens
  CDR3 for beta chain variable domain of TCR clone 249108 (TRBV2, TRBJ2-1)
CASSVGGSLAYNEQFF

SEQ ID NO: 498217 - protein, 17 aa, Homo sapiens
  CDR3 for alpha chain variable domain of TCR clone 249109 (TRAV2, TRAJ40)
CCLLLSVVTSGTYKYIF

SEQ ID NO: 498218 - protein, 14 aa, Homo sapiens
  CDR3 for beta chain variable domain of TCR clone 249109 (TRBV19, TRBJ2-1)
CASPTFVLSGEQFF

SEQ ID NO: 498219 - protein, 19 aa, Homo sapiens
  CDR3 for alpha chain variable domain of TCR clone 249110 (TRAV29/DV5, TRAJ49)
CSVLLCSKLTVDTGNQFYF

SEQ ID NO: 498220 - protein, 17 aa, Homo sapiens
  CDR3 for beta chain variable domain of TCR clone 249110 (TRBV11-2, TRBJ2-1)
CASSLYPPGVEYNEQFF

SEQ ID NO: 498221 - protein, 12 aa, Homo sapiens
  CDR3 for alpha chain variable domain of TCR clone 249111 (TRAV3, TRAJ20)
CAVRDPDYKLSF

SEQ ID NO: 498222 - protein, 15 aa, Homo sapiens
  CDR3 for beta chain variable domain of TCR clone 249111 (TRBV6-3, TRBJ2-7)
CASSSPVTVFYEQYF

SEQ ID NO: 498223 - protein, 18 aa, Homo sapiens
  CDR3 for alpha chain variable domain of TCR clone 249112 (TRAV12-3, TRAJ10)
SPVIQPPTSDGGGNKLTF

SEQ ID NO: 498224 - protein, 15 aa, Homo sapiens
  CDR3 for beta chain variable domain of TCR clone 249112 (TRBV13, TRBJ2-1)
CASSLLSGLNNEQFF

SEQ ID NO: 498225 - protein, 14 aa, Homo sapiens
  CDR3 for alpha chain variable domain of TCR clone 249113 (TRAV12-3, TRAJ9)
SAMSPNTGGFKTIF

SEQ ID NO: 498226 - protein, 12 aa, Homo sapiens
  CDR3 for beta chain variable domain of TCR clone 249113 (TRBV19, TRBJ1-5)
CASSIAQQPQHF

SEQ ID NO: 498227 - protein, 13 aa, Homo sapiens
  CDR3 for alpha chain variable domain of TCR clone 249114 (TRAV4, TRAJ42)
CLAGGGSQGNLIF

SEQ ID NO: 498228 - protein, 12 aa, Homo sapiens
  CDR3 for beta chain variable domain of TCR clone 249114 (TRBV11-2, TRBJ2-2)
CASSLPTGELFF

SEQ ID NO: 498229 - protein, 16 aa, Homo sapiens
  CDR3 for alpha chain variable domain of TCR clone 249115 (TRAV3, TRAJ37)
CAVRGKGSGNTGKLIF

SEQ ID NO: 498230 - protein, 13 aa, Homo sapiens
  CDR3 for beta chain variable domain of TCR clone 249115 (TRBV9, TRBJ2-7)
CASSASDSYEQYF

SEQ ID NO: 498231 - protein, 14 aa, Homo sapiens
  CDR3 for alpha chain variable domain of TCR clone 249116 (TRAV26-1, TRAJ44)
CIVKSTGTASTLTF

SEQ ID NO: 498232 - protein, 15 aa, Homo sapiens
  CDR3 for beta chain variable domain of TCR clone 249116 (TRBV19, TRBJ2-4)
CASSDGGGAKNMQYF

SEQ ID NO: 498233 - protein, 12 aa, Homo sapiens
  CDR3 for alpha chain variable domain of TCR clone 249117 (TRAV20, TRAJ23)
CAVQDPGGKLIF

SEQ ID NO: 498234 - protein, 14 aa, Homo sapiens
  CDR3 for beta chain variable domain of TCR clone 249117 (TRBV5-4, TRBJ2-1)
CASSLSGSYNEQFF

SEQ ID NO: 498235 - protein, 16 aa, Homo sapiens
  CDR3 for alpha chain variable domain of TCR clone 249118 (TRAV30, TRAJ28)
CGTVTPRRAGSYQLTF

SEQ ID NO: 498236 - protein, 15 aa, Homo sapiens
  CDR3 for beta chain variable domain of TCR clone 249118 (TRBV9, TRBJ2-1)
CASSLAGSSYNEQFF

SEQ ID NO: 498237 - protein, 16 aa, Homo sapiens
  CDR3 for alpha chain variable domain of TCR clone 249119 (TRAV4, TRAJ18)
CCVLLIGGSTLGRLYF

SEQ ID NO: 498238 - protein, 16 aa, Homo sapiens
  CDR3 for beta chain variable domain of TCR clone 249119 (TRBV6-5, TRBJ2-1)
CASSYSLSGGYNEQFF

SEQ ID NO: 498239 - protein, 11 aa, Homo sapiens
  CDR3 for alpha chain variable domain of TCR clone 249120 (TRAV21, TRAJ48)
CAVGGNEKLTF

SEQ ID NO: 498240 - protein, 16 aa, Homo sapiens
  CDR3 for beta chain variable domain of TCR clone 249120 (TRBV12-4, TRBJ1-5)
CASSSGPRGSNQPQHF

SEQ ID NO: 498241 - protein, 14 aa, Homo sapiens
  CDR3 for alpha chain variable domain of TCR clone 249121 (TRAV8-6, TRAJ8)
CAVNENTGFLKLVF

SEQ ID NO: 498242 - protein, 15 aa, Homo sapiens
  CDR3 for beta chain variable domain of TCR clone 249121 (TRBV27, TRBJ2-3)
CASSSLAGVIDTQYF

SEQ ID NO: 498243 - protein, 18 aa, Homo sapiens
  CDR3 for alpha chain variable domain of TCR clone 249122 (TRAV21, TRAJ52)
CAVRPSPAGGTSYGKLPF

SEQ ID NO: 498244 - protein, 17 aa, Homo sapiens
  CDR3 for beta chain variable domain of TCR clone 249122 (TRBV25-1, TRBJ2-1)
CASSAYGQGRGVYEQFF

SEQ ID NO: 498245 - protein, 11 aa, Homo sapiens
  CDR3 for alpha chain variable domain of TCR clone 249123 (TRAV21, TRAJ41)
CAVRSGYALNF

SEQ ID NO: 498246 - protein, 12 aa, Homo sapiens
  CDR3 for beta chain variable domain of TCR clone 249123 (TRBV7-8, TRBJ2-7)
CASSLGDREQYF

SEQ ID NO: 498247 - protein, 10 aa, Homo sapiens
  CDR3 for alpha chain variable domain of TCR clone 249124 (TRAV12-1, TRAJ33)
CVASNYQLIW

SEQ ID NO: 498248 - protein, 15 aa, Homo sapiens
  CDR3 for beta chain variable domain of TCR clone 249124 (TRBV5-4, TRBJ1-4)
CASSHGDGENEKLFV

SEQ ID NO: 498249 - protein, 16 aa, Homo sapiens
  CDR3 for alpha chain variable domain of TCR clone 249125 (TRAV9-2, TRAJ53)
CALRKNSGGSNYTLTF

SEQ ID NO: 498250 - protein, 14 aa, Homo sapiens
  CDR3 for beta chain variable domain of TCR clone 249125 (TRBV28, TRBJ2-1)
CASSLNGRNNEQFF

SEQ ID NO: 498251 - protein, 11 aa, Homo sapiens
  CDR3 for alpha chain variable domain of TCR clone 249126 (TRAV12-2, TRAJ10)
GVTGGGNKLTF

SEQ ID NO: 498252 - protein, 14 aa, Homo sapiens
  CDR3 for beta chain variable domain of TCR clone 249126 (TRBV27, TRBJ2-7)
CASATGTERREQYF

SEQ ID NO: 498253 - protein, 14 aa, Homo sapiens
  CDR3 for alpha chain variable domain of TCR clone 249127 (TRAV25, TRAJ22)
CAVRSPGSARQLTF

SEQ ID NO: 498254 - protein, 16 aa, Homo sapiens
  CDR3 for beta chain variable domain of TCR clone 249127 (TRBV4-2, TRBJ1-1)
CASSPSPGRAAPEAFF

SEQ ID NO: 498255 - protein, 12 aa, Homo sapiens
  CDR3 for alpha chain variable domain of TCR clone 249128 (TRAV25, TRAJ11)
CAGYSGYSTLTF

SEQ ID NO: 498256 - protein, 13 aa, Homo sapiens
  CDR3 for beta chain variable domain of TCR clone 249128 (TRBV7-9, TRBJ1-2)
CSSSLKQNYGYTF

SEQ ID NO: 498257 - protein, 12 aa, Homo sapiens
  CDR3 for alpha chain variable domain of TCR clone 249129 (TRAV6, TRAJ34)
CALHRGTDKLIF

SEQ ID NO: 498258 - protein, 12 aa, Homo sapiens
  CDR3 for beta chain variable domain of TCR clone 249129 (TRBV7-8, TRBJ2-7)
CASSLGDREQYF

SEQ ID NO: 498259 - protein, 13 aa, Homo sapiens
  CDR3 for alpha chain variable domain of TCR clone 249130 (TRAV2, TRAJ24)
CAVSTDSWGKLQF

SEQ ID NO: 498260 - protein, 17 aa, Homo sapiens
  CDR3 for beta chain variable domain of TCR clone 249130 (TRBV7-3, TRBJ2-3)
CASSPRGQGYGTDTQYF

SEQ ID NO: 498261 - protein, 18 aa, Homo sapiens
  CDR3 for alpha chain variable domain of TCR clone 249131 (TRAV13-1, TRAJ52)
CAAKNPNAGGTSYGKLTF

SEQ ID NO: 498262 - protein, 14 aa, Homo sapiens
  CDR3 for beta chain variable domain of TCR clone 249131 (TRBV7-2, TRBJ2-7)
CASRPQGAAYEQYF

SEQ ID NO: 498263 - protein, 13 aa, Homo sapiens
  CDR3 for alpha chain variable domain of TCR clone 249132 (TRAV13-1, TRAJ21)
CAASIYNFNKFYF

SEQ ID NO: 498264 - protein, 16 aa, Homo sapiens
  CDR3 for beta chain variable domain of TCR clone 249132 (TRBV7-9, TRBJ2-3)
CASSTWREVGTDTQYF

SEQ ID NO: 498265 - protein, 16 aa, Homo sapiens
  CDR3 for alpha chain variable domain of TCR clone 249133 (TRAV12-2, TRAJ52)
CRLANAGGTSYGKLTF

SEQ ID NO: 498266 - protein, 15 aa, Homo sapiens
  CDR3 for beta chain variable domain of TCR clone 249133 (TRBV19, TRBJ2-1)
CASSIGLAGWDEQFF

SEQ ID NO: 498267 - protein, 22 aa, Homo sapiens
  CDR3 for alpha chain variable domain of TCR clone 249134 (TRAV39, TRAJ49)
PCMTSLPPTSVPWTNTGNQFYF

SEQ ID NO: 498268 - protein, 17 aa, Homo sapiens
  CDR3 for beta chain variable domain of TCR clone 249134 (TRBV20-1, TRBJ2-1)
CSARDRRRASSYNEQFV

SEQ ID NO: 498269 - protein, 12 aa, Homo sapiens
  CDR3 for alpha chain variable domain of TCR clone 249135 (TRAV12-1, TRAJ40)
CVVYSGTYKYIF

SEQ ID NO: 498270 - protein, 13 aa, Homo sapiens
  CDR3 for beta chain variable domain of TCR clone 249135 (TRBV20-1, TRBJ2-2)
CSASAAGTGELFF

SEQ ID NO: 498271 - protein, 17 aa, Homo sapiens
  CDR3 for alpha chain variable domain of TCR clone 249136 (TRAV3, TRAJ6)
CAVRDGPRAGGSYIPTF

SEQ ID NO: 498272 - protein, 14 aa, Homo sapiens
  CDR3 for beta chain variable domain of TCR clone 249136 (TRBV4-2, TRBJ2-1)
CASGLDRAYNEQSF

SEQ ID NO: 498273 - protein, 11 aa, Homo sapiens
  CDR3 for alpha chain variable domain of TCR clone 249137 (TRAV21, TRAJ34)
CAVTNTDKLIF

SEQ ID NO: 498274 - protein, 14 aa, Homo sapiens
  CDR3 for beta chain variable domain of TCR clone 249137 (TRBV5-1, TRBJ2-2)
CASSLGGGSGELFF

SEQ ID NO: 498275 - protein, 15 aa, Homo sapiens
  CDR3 for alpha chain variable domain of TCR clone 249138 (TRAV12-1, TRAJ42)
CVVKTGGGSQGNLIF

SEQ ID NO: 498276 - protein, 14 aa, Homo sapiens
  CDR3 for beta chain variable domain of TCR clone 249138 (TRBV4-2, TRBJ2-3)
CASSQERGTDTQYF

SEQ ID NO: 498277 - protein, 15 aa, Homo sapiens
  CDR3 for alpha chain variable domain of TCR clone 249139 (TRAV8-1, TRAJ6)
CAVNTPPGGSYIHTF

SEQ ID NO: 498278 - protein, 15 aa, Homo sapiens
  CDR3 for beta chain variable domain of TCR clone 249139 (TRBV11-2, TRBJ2-2)
CASSSDRVNAGELFF

SEQ ID NO: 498279 - protein, 12 aa, Homo sapiens
  CDR3 for alpha chain variable domain of TCR clone 249140 (TRAV1-2, TRAJ29)
CAVPSGNTPLVF

SEQ ID NO: 498280 - protein, 12 aa, Homo sapiens
  CDR3 for beta chain variable domain of TCR clone 249140 (TRBV7-9, TRBJ2-7)
CASSFGSYEQYF

SEQ ID NO: 498281 - protein, 14 aa, Homo sapiens
  CDR3 for alpha chain variable domain of TCR clone 249141 (TRAV27, TRAJ36)
CAGPPKRGANNLFF

SEQ ID NO: 498282 - protein, 15 aa, Homo sapiens
  CDR3 for beta chain variable domain of TCR clone 249141 (TRBV18, TRBJ2-7)
CASSPASTPNYEQHF

SEQ ID NO: 498283 - protein, 18 aa, Homo sapiens
  CDR3 for alpha chain variable domain of TCR clone 249142 (TRAV13-1, TRAJ52)
CAAKNPNAGGTSYGKLTF

SEQ ID NO: 498284 - protein, 13 aa, Homo sapiens
  CDR3 for beta chain variable domain of TCR clone 249142 (TRBV20-1, TRBJ1-1)
CSARGVGNTEAFF

SEQ ID NO: 498285 - protein, 12 aa, Homo sapiens
  CDR3 for alpha chain variable domain of TCR clone 249143 (TRAV36/DV7, TRAJ54)
CAVVRGAQKLVF

SEQ ID NO: 498286 - protein, 14 aa, Homo sapiens
  CDR3 for beta chain variable domain of TCR clone 249143 (TRBV9, TRBJ2-4)
CASSPSGTSGFQYF

SEQ ID NO: 498287 - protein, 13 aa, Homo sapiens
  CDR3 for alpha chain variable domain of TCR clone 249144 (TRAV20, TRAJ37)
CAGCSSNTGKLIF

SEQ ID NO: 498288 - protein, 13 aa, Homo sapiens
  CDR3 for beta chain variable domain of TCR clone 249144 (TRBV18, TRBJ2-7)
CASQSGGGYEQYF

SEQ ID NO: 498289 - protein, 17 aa, Homo sapiens
  CDR3 for alpha chain variable domain of TCR clone 249145 (TRAV3, TRAJ42)
CAVRDRDYGGSEGNLIF

SEQ ID NO: 498290 - protein, 14 aa, Homo sapiens
  CDR3 for beta chain variable domain of TCR clone 249145 (TRBV7-2, TRBJ2-5)
CASSPRGSSETQYF

SEQ ID NO: 498291 - protein, 11 aa, Homo sapiens
  CDR3 for alpha chain variable domain of TCR clone 249146 (TRAV23/DV6, TRAJ34)
CAAEGTDKPIF

SEQ ID NO: 498292 - protein, 15 aa, Homo sapiens
  CDR3 for beta chain variable domain of TCR clone 249146 (TRBV6-5, TRBJ2-7)
CASSRTSGFSYEQYF

SEQ ID NO: 498293 - protein, 14 aa, Homo sapiens
  CDR3 for alpha chain variable domain of TCR clone 249147 (TRAV2, TRAJ37)
CAVDFTSNTGKLIF

SEQ ID NO: 498294 - protein, 16 aa, Homo sapiens
  CDR3 for beta chain variable domain of TCR clone 249147 (TRBV11-2, TRBJ1-2)
CASSLDRGGNNYGYTF

SEQ ID NO: 498295 - protein, 16 aa, Homo sapiens
  CDR3 for alpha chain variable domain of TCR clone 249148 (TRAV12-1, TRAJ12)
CVVDSLLMDSSYKLIF

SEQ ID NO: 498296 - protein, 13 aa, Homo sapiens
  CDR3 for beta chain variable domain of TCR clone 249148 (TRBV11-2, TRBJ2-1)
CASSSEAYNEQFF

SEQ ID NO: 498297 - protein, 11 aa, Homo sapiens
  CDR3 for alpha chain variable domain of TCR clone 249149 (TRAV1-1, TRAJ5)
CAVRVRRALTF

SEQ ID NO: 498298 - protein, 18 aa, Homo sapiens
  CDR3 for beta chain variable domain of TCR clone 249149 (TRBV12-4, TRBJ1-2)
CASSPNPGQAGPCYGYTF

SEQ ID NO: 498299 - protein, 11 aa, Homo sapiens
  CDR3 for alpha chain variable domain of TCR clone 249150 (TRAV2, TRAJ33)
CAVDSNYQLIW

SEQ ID NO: 498300 - protein, 13 aa, Homo sapiens
  CDR3 for beta chain variable domain of TCR clone 249150 (TRBV18, TRBJ2-5)
CASSLQGQETQYF

SEQ ID NO: 498301 - protein, 13 aa, Homo sapiens
  CDR3 for alpha chain variable domain of TCR clone 249151 (TRAV12-2, TRAJ57)
CAVTQGGSEKLVF

SEQ ID NO: 498302 - protein, 15 aa, Homo sapiens
  CDR3 for beta chain variable domain of TCR clone 249151 (TRBV4-1, TRBJ2-5)
CASSRKAGPQETQYF

SEQ ID NO: 498303 - protein, 13 aa, Homo sapiens
  CDR3 for alpha chain variable domain of TCR clone 249152 (TRAV12-3, TRAJ54)
CAMFAQGARKLVF

SEQ ID NO: 498304 - protein, 16 aa, Homo sapiens
  CDR3 for beta chain variable domain of TCR clone 249152 (TRBV7-6, TRBJ2-3)
CASNPRRGGLGDTQYF

SEQ ID NO: 498305 - protein, 12 aa, Homo sapiens
  CDR3 for alpha chain variable domain of TCR clone 249153 (TRAV36/DV7, TRAJ54)
CAVVRGAQKLGF

SEQ ID NO: 498306 - protein, 14 aa, Homo sapiens
  CDR3 for beta chain variable domain of TCR clone 249153 (TRBV12-5, TRBJ2-5)
CASGSRTHQETQYF

SEQ ID NO: 498307 - protein, 12 aa, Homo sapiens
  CDR3 for alpha chain variable domain of TCR clone 249154 (TRAV12-2, TRAJ4)
GWPEGGYNKLIF

SEQ ID NO: 498308 - protein, 15 aa, Homo sapiens
  CDR3 for beta chain variable domain of TCR clone 249154 (TRBV9, TRBJ1-6)
CASSVAGTGDSPLLF

SEQ ID NO: 498309 - protein, 10 aa, Homo sapiens
  CDR3 for alpha chain variable domain of TCR clone 249155 (TRAV12-3, TRAJ23)
CAPGGGKLIF

SEQ ID NO: 498310 - protein, 13 aa, Homo sapiens
  CDR3 for beta chain variable domain of TCR clone 249155 (TRBV12-4, TRBJ1-2)
CASSLRQGKGYTF

SEQ ID NO: 498311 - protein, 16 aa, Homo sapiens
  CDR3 for alpha chain variable domain of TCR clone 249156 (TRAV17, TRAJ28)
CATASVSGAGSYQLTF

SEQ ID NO: 498312 - protein, 15 aa, Homo sapiens
  CDR3 for beta chain variable domain of TCR clone 249156 (TRBV7-3, TRBJ2-1)
CASSATGGGEVEQFF

SEQ ID NO: 498313 - protein, 14 aa, Homo sapiens
  CDR3 for alpha chain variable domain of TCR clone 249157 (TRAV2, TRAJ9)
CAVEDRSVGFKTIF

SEQ ID NO: 498314 - protein, 14 aa, Homo sapiens
  CDR3 for beta chain variable domain of TCR clone 249157 (TRBV18, TRBJ1-5)
CASSRQQRNQPQHF

SEQ ID NO: 498315 - protein, 23 aa, Homo sapiens
  CDR3 for alpha chain variable domain of TCR clone 249158 (TRAV8-3, TRAJ38)
CAVGASNAGNNHIHNPDPAVYQL

SEQ ID NO: 498316 - protein, 15 aa, Homo sapiens
  CDR3 for beta chain variable domain of TCR clone 249158 (TRBV11-3, TRBJ1-3)
CASSLFGPSGNTIYF

SEQ ID NO: 498317 - protein, 21 aa, Homo sapiens
  CDR3 for alpha chain variable domain of TCR clone 249159 (TRAV2, TRAJ26)
CAGSPGRLWSEFCLLSRNQIF

SEQ ID NO: 498318 - protein, 17 aa, Homo sapiens
  CDR3 for beta chain variable domain of TCR clone 249159 (TRBV11-2, TRBJ2-1)
CASSLYPPGVEYNEQFF

SEQ ID NO: 498319 - protein, 14 aa, Homo sapiens
  CDR3 for alpha chain variable domain of TCR clone 249160 (TRAV26-1, TRAJ39)
CIVRAYNAGNMLTF

SEQ ID NO: 498320 - protein, 16 aa, Homo sapiens
  CDR3 for beta chain variable domain of TCR clone 249160 (TRBV15, TRBJ2-7)
CATSRGFGAAVYEQYF

SEQ ID NO: 498321 - protein, 12 aa, Homo sapiens
  CDR3 for alpha chain variable domain of TCR clone 249161 (TRAV34, TRAJ17)
CAMTLTGNKLTF

SEQ ID NO: 498322 - protein, 15 aa, Homo sapiens
  CDR3 for beta chain variable domain of TCR clone 249161 (TRBV20-1, TRBJ2-7)
CSARDRVSGMDEQYF

SEQ ID NO: 498323 - protein, 10 aa, Homo sapiens
  CDR3 for alpha chain variable domain of TCR clone 249162 (TRAV26-1, TRAJ22)
CIVSLNFFLF

SEQ ID NO: 498324 - protein, 15 aa, Homo sapiens
  CDR3 for beta chain variable domain of TCR clone 249162 (TRBV4-2, TRBJ1-2)
CASSQRTGGRDGDTF

SEQ ID NO: 498325 - protein, 16 aa, Homo sapiens
  CDR3 for alpha chain variable domain of TCR clone 249163 (TRAV41, TRAJ53)
CAVRFGSGGSNYKMTF

SEQ ID NO: 498326 - protein, 17 aa, Homo sapiens
  CDR3 for beta chain variable domain of TCR clone 249163 (TRBV20-1, TRBJ2-7)
CSARDPEGDHREYEQYF

SEQ ID NO: 498327 - protein, 17 aa, Homo sapiens
  CDR3 for alpha chain variable domain of TCR clone 249164 (TRAV3, TRAJ6)
CAVRDGPRAGGSYIRTF

SEQ ID NO: 498328 - protein, 13 aa, Homo sapiens
  CDR3 for beta chain variable domain of TCR clone 249164 (TRBV27, TRBJ2-1)
CASRTLGVGEQFF

SEQ ID NO: 498329 - protein, 12 aa, Homo sapiens
  CDR3 for alpha chain variable domain of TCR clone 249165 (TRAV1-2, TRAJ29)
CAVPSGNTPLVF

SEQ ID NO: 498330 - protein, 13 aa, Homo sapiens
  CDR3 for beta chain variable domain of TCR clone 249165 (TRBV5-4, TRBJ1-1)
CASSVGLGTEAFF

SEQ ID NO: 498331 - protein, 14 aa, Homo sapiens
  CDR3 for alpha chain variable domain of TCR clone 249166 (TRAV8-4, TRAJ9)
CAVRINTGGFKTIF

SEQ ID NO: 498332 - protein, 14 aa, Homo sapiens
  CDR3 for beta chain variable domain of TCR clone 249166 (TRBV27, TRBJ1-1)
CASSLLSGLSEAFF

SEQ ID NO: 498333 - protein, 16 aa, Homo sapiens
  CDR3 for alpha chain variable domain of TCR clone 249167 (TRAV12-3, TRAJ53)
CAMSPGSGGSNYKLTF

SEQ ID NO: 498334 - protein, 17 aa, Homo sapiens
  CDR3 for beta chain variable domain of TCR clone 249167 (TRBV28, TRBJ2-5)
CASSFGGEGGGQETQYF

SEQ ID NO: 498335 - protein, 14 aa, Homo sapiens
  CDR3 for alpha chain variable domain of TCR clone 249168 (TRAV20, TRAJ42)
CAVQARGSQGNLIF

SEQ ID NO: 498336 - protein, 12 aa, Homo sapiens
  CDR3 for beta chain variable domain of TCR clone 249168 (TRBV5-4, TRBJ2-5)
CASSSTRETQYF

SEQ ID NO: 498337 - protein, 14 aa, Homo sapiens
  CDR3 for alpha chain variable domain of TCR clone 249169 (TRAV38-1, TRAJ45)
CAYYSGGGADGLTF

SEQ ID NO: 498338 - protein, 15 aa, Homo sapiens
  CDR3 for beta chain variable domain of TCR clone 249169 (TRBV11-2, TRBJ2-1)
CASSKNRWIIYEQFF

SEQ ID NO: 498339 - protein, 15 aa, Homo sapiens
  CDR3 for alpha chain variable domain of TCR clone 249170 (TRAV26-1, TRAJ29)
CIVRVEGSGNTPLVF

SEQ ID NO: 498340 - protein, 13 aa, Homo sapiens
  CDR3 for beta chain variable domain of TCR clone 249170 (TRBV27, TRBJ2-1)
CASSSGSYNEQFF

SEQ ID NO: 498341 - protein, 10 aa, Homo sapiens
  CDR3 for alpha chain variable domain of TCR clone 249171 (TRAV26-1, TRAJ40)
CIAGTYKYIF

SEQ ID NO: 498342 - protein, 14 aa, Homo sapiens
  CDR3 for beta chain variable domain of TCR clone 249171 (TRBV11-2, TRBJ2-1)
CASSRATSYNEQFF

SEQ ID NO: 498343 - protein, 13 aa, Homo sapiens
  CDR3 for alpha chain variable domain of TCR clone 249172 (TRAV17, TRAJ9)
CATAITGGLKTIF

SEQ ID NO: 498344 - protein, 16 aa, Homo sapiens
  CDR3 for beta chain variable domain of TCR clone 249172 (TRBV15, TRBJ2-1)
CATSRNLAGGYTEQFF

SEQ ID NO: 498345 - protein, 15 aa, Homo sapiens
  CDR3 for alpha chain variable domain of TCR clone 249173 (TRAV3, TRAJ4)
CAVRDGTGGYNKLIF

SEQ ID NO: 498346 - protein, 13 aa, Homo sapiens
  CDR3 for beta chain variable domain of TCR clone 249173 (TRBV12-5, TRBJ1-2)
CASGVRTGNGYTL

SEQ ID NO: 498347 - protein, 16 aa, Homo sapiens
  CDR3 for alpha chain variable domain of TCR clone 249174 (TRAV30, TRAJ24)
CGTEIVDADSWGKFQF

SEQ ID NO: 498348 - protein, 12 aa, Homo sapiens
  CDR3 for beta chain variable domain of TCR clone 249174 (TRBV7-2, TRBJ2-5)
CQQLVRGETQYF

SEQ ID NO: 498349 - protein, 12 aa, Homo sapiens
  CDR3 for alpha chain variable domain of TCR clone 249175 (TRAV26-1, TRAJ36)
CIVRVRADNPFF

SEQ ID NO: 498350 - protein, 14 aa, Homo sapiens
  CDR3 for beta chain variable domain of TCR clone 249175 (TRBV14, TRBJ2-3)
CASSRKLAADTQYF

SEQ ID NO: 498351 - protein, 13 aa, Homo sapiens
  CDR3 for alpha chain variable domain of TCR clone 249176 (TRAV21, TRAJ45)
CAVMGGGAEGLTF

SEQ ID NO: 498352 - protein, 14 aa, Homo sapiens
  CDR3 for beta chain variable domain of TCR clone 249176 (TRBV7-2, TRBJ2-3)
CASSQTGSSYTQYF

SEQ ID NO: 498353 - protein, 16 aa, Homo sapiens
  CDR3 for alpha chain variable domain of TCR clone 249177 (TRAV3, TRAJ10)
CAVRDMNAGGGNKLTL

SEQ ID NO: 498354 - protein, 16 aa, Homo sapiens
  CDR3 for beta chain variable domain of TCR clone 249177 (TRBV6-3, TRBJ1-2)
CASSYSRRAANYGYTF

SEQ ID NO: 498355 - protein, 13 aa, Homo sapiens
  CDR3 for alpha chain variable domain of TCR clone 249178 (TRAV17, TRAJ21)
CATDGNNFNKFYF

SEQ ID NO: 498356 - protein, 15 aa, Homo sapiens
  CDR3 for beta chain variable domain of TCR clone 249178 (TRBV7-9, TRBJ1-2)
CASSLDREPNYGYTF

SEQ ID NO: 498357 - protein, 13 aa, Homo sapiens
  CDR3 for alpha chain variable domain of TCR clone 249179 (TRAV27, TRAJ56)
CAGKPGANSKLTF

SEQ ID NO: 498358 - protein, 18 aa, Homo sapiens
  CDR3 for beta chain variable domain of TCR clone 249179 (TRBV11-2, TRBJ2-3)
CASSLGGASRGAPITQYF

SEQ ID NO: 498359 - protein, 12 aa, Homo sapiens
  CDR3 for alpha chain variable domain of TCR clone 249180 (TRAV3, TRAJ31)
CAVRDGNARLMF

SEQ ID NO: 498360 - protein, 18 aa, Homo sapiens
  CDR3 for beta chain variable domain of TCR clone 249180 (TRBV7-2, TRBJ2-3)
CASSLKREGSGITDTEYF

SEQ ID NO: 498361 - protein, 13 aa, Homo sapiens
  CDR3 for alpha chain variable domain of TCR clone 249181 (TRAV21, TRAJ15)
CAVANQAGTALIF

SEQ ID NO: 498362 - protein, 14 aa, Homo sapiens
  CDR3 for beta chain variable domain of TCR clone 249181 (TRBV27, TRBJ2-2)
CSSSLGAATGELFF

SEQ ID NO: 498363 - protein, 15 aa, Homo sapiens
  CDR3 for alpha chain variable domain of TCR clone 249182 (TRAV3, TRAJ5)
CAVGDLDTGRRELTF

SEQ ID NO: 498364 - protein, 13 aa, Homo sapiens
  CDR3 for beta chain variable domain of TCR clone 249182 (TRBV12-4, TRBJ2-7)
CASSPTETYEQYF

SEQ ID NO: 498365 - protein, 14 aa, Homo sapiens
  CDR3 for alpha chain variable domain of TCR clone 249183 (TRAV13-1, TRAJ44)
CAAKATGTASKLTF

SEQ ID NO: 498366 - protein, 13 aa, Homo sapiens
  CDR3 for beta chain variable domain of TCR clone 249183 (TRBV7-9, TRBJ2-7)
CASSFAGAYEQYF

SEQ ID NO: 498367 - protein, 13 aa, Homo sapiens
  CDR3 for alpha chain variable domain of TCR clone 249184 (TRAV12-3, TRAJ13)
CAMSYGGYQKVTF

SEQ ID NO: 498368 - protein, 13 aa, Homo sapiens
  CDR3 for beta chain variable domain of TCR clone 249184 (TRBV20-1, TRBJ1-1)
CSAPPGGHTEAFF

SEQ ID NO: 498369 - protein, 12 aa, Homo sapiens
  CDR3 for alpha chain variable domain of TCR clone 249185 (TRAV2, TRAJ10)
CASTGGGNKLTF

SEQ ID NO: 498370 - protein, 14 aa, Homo sapiens
  CDR3 for beta chain variable domain of TCR clone 249185 (TRBV4-2, TRBJ2-1)
CASGLDRAYNEQFF

SEQ ID NO: 498371 - protein, 12 aa, Homo sapiens
  CDR3 for alpha chain variable domain of TCR clone 249186 (TRAV35, TRAJ12)
GRGMDSSYKLIF

SEQ ID NO: 498372 - protein, 14 aa, Homo sapiens
  CDR3 for beta chain variable domain of TCR clone 249186 (TRBV19, TRBJ1-1)
CASSPNRGDTEAFF

SEQ ID NO: 498373 - protein, 16 aa, Homo sapiens
  CDR3 for alpha chain variable domain of TCR clone 249187 (TRAV8-3, TRAJ42)
CAVGAGNGGSQGNLIF

SEQ ID NO: 498374 - protein, 14 aa, Homo sapiens
  CDR3 for beta chain variable domain of TCR clone 249187 (TRBV7-2, TRBJ2-1)
CASSRGGARNEQFF

SEQ ID NO: 498375 - protein, 16 aa, Homo sapiens
  CDR3 for alpha chain variable domain of TCR clone 249188 (TRAV16, TRAJ24)
CALSGGSTESWGKLQF

SEQ ID NO: 498376 - protein, 15 aa, Homo sapiens
  CDR3 for beta chain variable domain of TCR clone 249188 (TRBV27, TRBJ2-1)
CASSNGGGSSNEQFF

SEQ ID NO: 498377 - protein, 12 aa, Homo sapiens
  CDR3 for alpha chain variable domain of TCR clone 249189 (TRAV12-3, TRAJ17)
CAMTLTGNKLTF

SEQ ID NO: 498378 - protein, 12 aa, Homo sapiens
  CDR3 for beta chain variable domain of TCR clone 249189 (TRBV7-8, TRBJ2-7)
RASSLGDREQYF

SEQ ID NO: 498379 - protein, 14 aa, Homo sapiens
  CDR3 for alpha chain variable domain of TCR clone 249190 (TRAV12-2, TRAJ13)
CAVKKTGGYQKVTF

SEQ ID NO: 498380 - protein, 20 aa, Homo sapiens
  CDR3 for beta chain variable domain of TCR clone 249190 (TRBV19, TRBJ2-1)
CASSISRTVTSARLNNEQFF

SEQ ID NO: 498381 - protein, 16 aa, Homo sapiens
  CDR3 for alpha chain variable domain of TCR clone 249191 (TRAV1-2, TRAJ10)
CAVRGVLTGGGNKLTF

SEQ ID NO: 498382 - protein, 17 aa, Homo sapiens
  CDR3 for beta chain variable domain of TCR clone 249191 (TRBV20-1, TRBJ2-1)
CSASSSGLAGSYNEQFF

SEQ ID NO: 498383 - protein, 15 aa, Homo sapiens
  CDR3 for alpha chain variable domain of TCR clone 249192 (TRAV3, TRAJ4)
CAVRDGTGGYNKLIF

SEQ ID NO: 498384 - protein, 13 aa, Homo sapiens
  CDR3 for beta chain variable domain of TCR clone 249192 (TRBV7-2, TRBJ2-2)
CASSLAVTGELFF

SEQ ID NO: 498385 - protein, 16 aa, Homo sapiens
  CDR3 for alpha chain variable domain of TCR clone 249193 (TRAV8-3, TRAJ28)
CAVPPQRGAGSYQLTF

SEQ ID NO: 498386 - protein, 13 aa, Homo sapiens
  CDR3 for beta chain variable domain of TCR clone 249193 (TRBV7-6, TRBJ2-3)
CASSLRSDNTQYL

SEQ ID NO: 498387 - protein, 18 aa, Homo sapiens
  CDR3 for alpha chain variable domain of TCR clone 249194 (TRAV13-1, TRAJ52)
CAAKNPNAGGTSYGKLTF

SEQ ID NO: 498388 - protein, 17 aa, Homo sapiens
  CDR3 for beta chain variable domain of TCR clone 249194 (TRBV11-2, TRBJ2-1)
CASSLSPPGVEYNEQFF

SEQ ID NO: 498389 - protein, 12 aa, Homo sapiens
  CDR3 for alpha chain variable domain of TCR clone 249195 (TRAV21, TRAJ54)
CAVNGGAQKLVF

SEQ ID NO: 498390 - protein, 14 aa, Homo sapiens
  CDR3 for beta chain variable domain of TCR clone 249195 (TRBV19, TRBJ1-5)
CASTQGTSNQPQHF

SEQ ID NO: 498391 - protein, 16 aa, Homo sapiens
  CDR3 for alpha chain variable domain of TCR clone 249196 (TRAV26-1, TRAJ23)
CIDRVHPYNQGGKLIF

SEQ ID NO: 498392 - protein, 15 aa, Homo sapiens
  CDR3 for beta chain variable domain of TCR clone 249196 (TRBV5-7, TRBJ2-7)
CASSPYFEGSYEQYF

SEQ ID NO: 498393 - protein, 15 aa, Homo sapiens
  CDR3 for alpha chain variable domain of TCR clone 249197 (TRAV8-2, TRAJ15)
CVVTMGNQAGIALIF

SEQ ID NO: 498394 - protein, 14 aa, Homo sapiens
  CDR3 for beta chain variable domain of TCR clone 249197 (TRBV12-5, TRBJ2-5)
CASGSRTHQETQYF

SEQ ID NO: 498395 - protein, 15 aa, Homo sapiens
  CDR3 for alpha chain variable domain of TCR clone 249198 (TRAV4, TRAJ26)
CLVGDMNNYGQNFVF

SEQ ID NO: 498396 - protein, 14 aa, Homo sapiens
  CDR3 for beta chain variable domain of TCR clone 249198 (TRBV20-1, TRBJ1-1)
CSAQTRIGGTEAFF

SEQ ID NO: 498397 - protein, 16 aa, Homo sapiens
  CDR3 for alpha chain variable domain of TCR clone 249199 (TRAV1-2, TRAJ35)
CAVRGPTIGFGNVLHC

SEQ ID NO: 498398 - protein, 13 aa, Homo sapiens
  CDR3 for beta chain variable domain of TCR clone 249199 (TRBV6-6, TRBJ2-1)
CASSLHQGDEQFF

SEQ ID NO: 498399 - protein, 12 aa, Homo sapiens
  CDR3 for alpha chain variable domain of TCR clone 249200 (TRAV8-3, TRAJ26)
CAGDNYGQNFVF

SEQ ID NO: 498400 - protein, 15 aa, Homo sapiens
  CDR3 for beta chain variable domain of TCR clone 249200 (TRBV7-2, TRBJ2-3)
CASSSTGLETDSQYF

SEQ ID NO: 498401 - protein, 13 aa, Homo sapiens
  CDR3 for alpha chain variable domain of TCR clone 249201 (TRAV35, TRAJ36)
CARPRIGANNLFF

SEQ ID NO: 498402 - protein, 15 aa, Homo sapiens
  CDR3 for beta chain variable domain of TCR clone 249201 (TRBV28, TRBJ2-5)
CASSPPWSYQETQCF

SEQ ID NO: 498403 - protein, 14 aa, Homo sapiens
  CDR3 for alpha chain variable domain of TCR clone 249202 (TRAV8-3, TRAJ9)
CAVVYNTGGFKTIC

SEQ ID NO: 498404 - protein, 14 aa, Homo sapiens
  CDR3 for beta chain variable domain of TCR clone 249202 (TRBV7-3, TRBJ2-2)
CASSSGGYTGELFF

SEQ ID NO: 498405 - protein, 16 aa, Homo sapiens
  CDR3 for alpha chain variable domain of TCR clone 249203 (TRAV3, TRAJ18)
CAVRDGRGSTLERLYF

SEQ ID NO: 498406 - protein, 17 aa, Homo sapiens
  CDR3 for beta chain variable domain of TCR clone 249203 (TRBV5-1, TRBJ2-3)
CASSKIGLADRTDTQYF

SEQ ID NO: 498407 - protein, 13 aa, Homo sapiens
  CDR3 for alpha chain variable domain of TCR clone 249204 (TRAV21, TRAJ10)
CAVRPGGGNKLTF

SEQ ID NO: 498408 - protein, 14 aa, Homo sapiens
  CDR3 for beta chain variable domain of TCR clone 249204 (TRBV5-4, TRBJ2-7)
CASSADAGCYEQYF

SEQ ID NO: 498409 - protein, 13 aa, Homo sapiens
  CDR3 for alpha chain variable domain of TCR clone 249205 (TRAV21, TRAJ27)
CAARPGNAGKSTF

SEQ ID NO: 498410 - protein, 14 aa, Homo sapiens
  CDR3 for beta chain variable domain of TCR clone 249205 (TRBV7-2, TRBJ2-7)
CASSPKTSFYEQYV

SEQ ID NO: 498411 - protein, 12 aa, Homo sapiens
  CDR3 for alpha chain variable domain of TCR clone 249206 (TRAV21, TRAJ49)
CAVRNTGNQFYF

SEQ ID NO: 498412 - protein, 15 aa, Homo sapiens
  CDR3 for beta chain variable domain of TCR clone 249206 (TRBV2, TRBJ2-7)
CASSEGLARSYEQYF

SEQ ID NO: 498413 - protein, 14 aa, Homo sapiens
  CDR3 for alpha chain variable domain of TCR clone 249207 (TRAV8-3, TRAJ34)
CAVGPPHNTDKLIF

SEQ ID NO: 498414 - protein, 12 aa, Homo sapiens
  CDR3 for beta chain variable domain of TCR clone 249207 (TRBV14, TRBJ2-7)
CASSSLKGEQYF

SEQ ID NO: 498415 - protein, 17 aa, Homo sapiens
  CDR3 for alpha chain variable domain of TCR clone 249208 (TRAV26-1, TRAJ37)
CIVRVITVSSNTGKLIF

SEQ ID NO: 498416 - protein, 14 aa, Homo sapiens
  CDR3 for beta chain variable domain of TCR clone 249208 (TRBV7-7, TRBJ2-2)
CATRQAPAPGELFF

SEQ ID NO: 498417 - protein, 14 aa, Homo sapiens
  CDR3 for alpha chain variable domain of TCR clone 249209 (TRAV8-3, TRAJ31)
CAVGRGLNNARLMY

SEQ ID NO: 498418 - protein, 15 aa, Homo sapiens
  CDR3 for beta chain variable domain of TCR clone 249209 (TRBV7-2, TRBJ2-2)
CASSLAGGLTGELFF

SEQ ID NO: 498419 - protein, 12 aa, Homo sapiens
  CDR3 for alpha chain variable domain of TCR clone 249210 (TRAV25, TRAJ11)
CAGASGYSTLTF

SEQ ID NO: 498420 - protein, 16 aa, Homo sapiens
  CDR3 for beta chain variable domain of TCR clone 249210 (TRBV4-1, TRBJ2-7)
CASSQNDRDNSYEQYF

SEQ ID NO: 498421 - protein, 12 aa, Homo sapiens
  CDR3 for alpha chain variable domain of TCR clone 249211 (TRAV38-1, TRAJ34)
CAFMKETDKLIF

SEQ ID NO: 498422 - protein, 17 aa, Homo sapiens
  CDR3 for beta chain variable domain of TCR clone 249211 (TRBV7-8, TRBJ2-6)
CASSAGTGGAGANLLTF

SEQ ID NO: 498423 - protein, 12 aa, Homo sapiens
  CDR3 for alpha chain variable domain of TCR clone 249212 (TRAV12-3, TRAJ17)
CAMTLTGNKLTF

SEQ ID NO: 498424 - protein, 13 aa, Homo sapiens
  CDR3 for beta chain variable domain of TCR clone 249212 (TRBV12-4, TRBJ1-1)
CASSPGTGFQAFF

SEQ ID NO: 498425 - protein, 13 aa, Homo sapiens
  CDR3 for alpha chain variable domain of TCR clone 249213 (TRAV27, TRAJ58)
CAGAETSGSRLTF

SEQ ID NO: 498426 - protein, 13 aa, Homo sapiens
  CDR3 for beta chain variable domain of TCR clone 249213 (TRBV4-1, TRBJ2-5)
CASSLTRGETQYF

SEQ ID NO: 498427 - protein, 15 aa, Homo sapiens
  CDR3 for alpha chain variable domain of TCR clone 249214 (TRAV29/DV5, TRAJ53)
CAASASGGSNYKLTF

SEQ ID NO: 498428 - protein, 14 aa, Homo sapiens
  CDR3 for beta chain variable domain of TCR clone 249214 (TRBV19, TRBJ2-1)
CASPTFVLSGEQYF

SEQ ID NO: 498429 - protein, 17 aa, Homo sapiens
  CDR3 for alpha chain variable domain of TCR clone 249215 (TRAV13-1, )
CAANIQNPDPAVYQLRY

SEQ ID NO: 498430 - protein, 16 aa, Homo sapiens
  CDR3 for beta chain variable domain of TCR clone 249215 (TRBV5-4, TRBJ2-3)
CASSWGTSGGTDTQYF

SEQ ID NO: 498431 - protein, 15 aa, Homo sapiens
  CDR3 for alpha chain variable domain of TCR clone 249216 (TRAV25, TRAJ52)
CAGRPGGTSYGKLTF

SEQ ID NO: 498432 - protein, 11 aa, Homo sapiens
  CDR3 for beta chain variable domain of TCR clone 249216 (TRBV7-8, TRBJ2-7)
CASSLSLEQYF

SEQ ID NO: 498433 - protein, 14 aa, Homo sapiens
  CDR3 for alpha chain variable domain of TCR clone 249217 (TRAV9-2, TRAJ39)
CALYIYNSGNMLTF

SEQ ID NO: 498434 - protein, 18 aa, Homo sapiens
  CDR3 for beta chain variable domain of TCR clone 249217 (TRBV6-5, TRBJ1-1)
CASSYSAPGGTGGTEAFF

SEQ ID NO: 498435 - protein, 11 aa, Homo sapiens
  CDR3 for alpha chain variable domain of TCR clone 249218 (TRAV2, TRAJ33)
GAVDSNYQLIC

SEQ ID NO: 498436 - protein, 14 aa, Homo sapiens
  CDR3 for beta chain variable domain of TCR clone 249218 (TRBV11-2, TRBJ2-3)
CASSRLARTDTQYF

SEQ ID NO: 498437 - protein, 16 aa, Homo sapiens
  CDR3 for alpha chain variable domain of TCR clone 249219 (TRAV17, TRAJ53)
CATDALSGGSNYKLTF

SEQ ID NO: 498438 - protein, 12 aa, Homo sapiens
  CDR3 for beta chain variable domain of TCR clone 249219 (TRBV5-1, TRBJ2-7)
CASSFRGYGQYF

SEQ ID NO: 498439 - protein, 15 aa, Homo sapiens
  CDR3 for alpha chain variable domain of TCR clone 249220 (TRAV26-1, TRAJ40)
CIVRVTTSGTYKYIF

SEQ ID NO: 498440 - protein, 13 aa, Homo sapiens
  CDR3 for beta chain variable domain of TCR clone 249220 (TRBV7-9, TRBJ1-2)
CASSLKQNYGYTF

SEQ ID NO: 498441 - protein, 16 aa, Homo sapiens
  CDR3 for alpha chain variable domain of TCR clone 249221 (TRAV12-3, TRAJ53)
CAMSPGSGGSNYKLTF

SEQ ID NO: 498442 - protein, 14 aa, Homo sapiens
  CDR3 for beta chain variable domain of TCR clone 249221 (TRBV11-2, TRBJ2-5)
CASRPLAGRETQYF

SEQ ID NO: 498443 - protein, 10 aa, Homo sapiens
  CDR3 for alpha chain variable domain of TCR clone 249222 (TRAV8-3, TRAJ43)
VPYNNNDMRF

SEQ ID NO: 498444 - protein, 16 aa, Homo sapiens
  CDR3 for beta chain variable domain of TCR clone 249222 (TRBV7-2, TRBJ2-5)
CASSPFPTGGEETQYF

SEQ ID NO: 498445 - protein, 13 aa, Homo sapiens
  CDR3 for alpha chain variable domain of TCR clone 249223 (TRAV12-3, TRAJ30)
CAMSAQWDDKIIF

SEQ ID NO: 498446 - protein, 15 aa, Homo sapiens
  CDR3 for beta chain variable domain of TCR clone 249223 (TRBV11-3, TRBJ2-3)
CASLKDGREGDTQYF

SEQ ID NO: 498447 - protein, 18 aa, Homo sapiens
  CDR3 for alpha chain variable domain of TCR clone 249224 (TRAV21, TRAJ52)
CAERPSPAGGTSYGKLTF

SEQ ID NO: 498448 - protein, 14 aa, Homo sapiens
  CDR3 for beta chain variable domain of TCR clone 249224 (TRBV4-1, TRBJ2-2)
CASSQAVNTGELFF

SEQ ID NO: 498449 - protein, 14 aa, Homo sapiens
  CDR3 for alpha chain variable domain of TCR clone 249225 (TRAV12-3, TRAJ13)
CAMKNSGGYQKVTF

SEQ ID NO: 498450 - protein, 13 aa, Homo sapiens
  CDR3 for beta chain variable domain of TCR clone 249225 (TRBV29-1, TRBJ2-5)
CSTRDRVEETQYF

SEQ ID NO: 498451 - protein, 15 aa, Homo sapiens
  CDR3 for alpha chain variable domain of TCR clone 249226 (TRAV3, TRAJ10)
CAVRDGTGGGNKLTF

SEQ ID NO: 498452 - protein, 12 aa, Homo sapiens
  CDR3 for beta chain variable domain of TCR clone 249226 (TRBV11-2, TRBJ2-2)
CASSLGGGELFF

SEQ ID NO: 498453 - protein, 14 aa, Homo sapiens
  CDR3 for alpha chain variable domain of TCR clone 249227 (TRAV8-4, TRAJ9)
LAVILNTGGFKTIF

SEQ ID NO: 498454 - protein, 13 aa, Homo sapiens
  CDR3 for beta chain variable domain of TCR clone 249227 (TRBV20-1, TRBJ1-1)
CSAPLGGGTEAFF

SEQ ID NO: 498455 - protein, 12 aa, Homo sapiens
  CDR3 for alpha chain variable domain of TCR clone 249228 (TRAV2, TRAJ9)
CAVGAGGFKTIF

SEQ ID NO: 498456 - protein, 13 aa, Homo sapiens
  CDR3 for beta chain variable domain of TCR clone 249228 (TRBV24-1, TRBJ2-2)
CATSDWSTGELFF

SEQ ID NO: 498457 - protein, 15 aa, Homo sapiens
  CDR3 for alpha chain variable domain of TCR clone 249229 (TRAV17, TRAJ16)
CATALRFSDGQKLLF

SEQ ID NO: 498458 - protein, 15 aa, Homo sapiens
  CDR3 for beta chain variable domain of TCR clone 249229 (TRBV20-1, TRBJ1-1)
CSASRVVTGNTAAFF

SEQ ID NO: 498459 - protein, 14 aa, Homo sapiens
  CDR3 for alpha chain variable domain of TCR clone 249230 (TRAV17, TRAJ45)
CATASGGGADGLTL

SEQ ID NO: 498460 - protein, 13 aa, Homo sapiens
  CDR3 for beta chain variable domain of TCR clone 249230 (TRBV15, TRBJ2-7)
CATSTTGHYEQYF

SEQ ID NO: 498461 - protein, 12 aa, Homo sapiens
  CDR3 for alpha chain variable domain of TCR clone 249231 (TRAV24, TRAJ26)
CALDNYGQNFVF

SEQ ID NO: 498462 - protein, 19 aa, Homo sapiens
  CDR3 for beta chain variable domain of TCR clone 249231 (TRBV25-1, TRBJ2-2)
CAILVYRVDRGRKTGELFF

SEQ ID NO: 498463 - protein, 14 aa, Homo sapiens
  CDR3 for alpha chain variable domain of TCR clone 249232 (TRAV12-1, TRAJ29)
CVVNEGSGNTPLVL

SEQ ID NO: 498464 - protein, 13 aa, Homo sapiens
  CDR3 for beta chain variable domain of TCR clone 249232 (TRBV7-9, TRBJ2-3)
CASSPGSTDTQYF

SEQ ID NO: 498465 - protein, 11 aa, Homo sapiens
  CDR3 for alpha chain variable domain of TCR clone 249233 (TRAV1-2, TRAJ20)
CAVANDYKLSF

SEQ ID NO: 498466 - protein, 15 aa, Homo sapiens
  CDR3 for beta chain variable domain of TCR clone 249233 (TRBV5-1, TRBJ1-4)
FAPAAWKDGNEKLFF

SEQ ID NO: 498467 - protein, 15 aa, Homo sapiens
  CDR3 for alpha chain variable domain of TCR clone 249234 (TRAV26-2, TRAJ39)
CSLRGNNNAGNMLTF

SEQ ID NO: 498468 - protein, 15 aa, Homo sapiens
  CDR3 for beta chain variable domain of TCR clone 249234 (TRBV5-4, TRBJ1-1)
CASSSLGRANTEAFF

SEQ ID NO: 498469 - protein, 18 aa, Homo sapiens
  CDR3 for alpha chain variable domain of TCR clone 249235 (TRAV26-1, TRAJ52)
CIVRGRNAGGTSYGKLTF

SEQ ID NO: 498470 - protein, 12 aa, Homo sapiens
  CDR3 for beta chain variable domain of TCR clone 249235 (TRBV11-2, TRBJ2-2)
CASSLGGGELFF

SEQ ID NO: 498471 - protein, 13 aa, Homo sapiens
  CDR3 for alpha chain variable domain of TCR clone 249236 (TRAV36/DV7, TRAJ53)
CALSGGSNYKLTF

SEQ ID NO: 498472 - protein, 13 aa, Homo sapiens
  CDR3 for beta chain variable domain of TCR clone 249236 (TRBV28, TRBJ2-7)
CACSLPSRYEQYF

SEQ ID NO: 498473 - protein, 15 aa, Homo sapiens
  CDR3 for alpha chain variable domain of TCR clone 249237 (TRAV8-2, TRAJ16)
CVVRDGFSDGQQLLF

SEQ ID NO: 498474 - protein, 14 aa, Homo sapiens
  CDR3 for beta chain variable domain of TCR clone 249237 (TRBV7-3, TRBJ1-1)
CASSLGTGYTEAFF

SEQ ID NO: 498475 - protein, 15 aa, Homo sapiens
  CDR3 for alpha chain variable domain of TCR clone 249238 (TRAV27, TRAJ38)
CAARRNAGNNRKRIL

SEQ ID NO: 498476 - protein, 13 aa, Homo sapiens
  CDR3 for beta chain variable domain of TCR clone 249238 (TRBV12-5, TRBJ2-3)
CASGDRQSDTQYF

SEQ ID NO: 498477 - protein, 14 aa, Homo sapiens
  CDR3 for alpha chain variable domain of TCR clone 249239 (TRAV21, TRAJ45)
CAVHSGGGADGLTF

SEQ ID NO: 498478 - protein, 14 aa, Homo sapiens
  CDR3 for beta chain variable domain of TCR clone 249239 (TRBV20-1, TRBJ2-1)
CNARRLAEANEQFF

SEQ ID NO: 498479 - protein, 17 aa, Homo sapiens
  CDR3 for alpha chain variable domain of TCR clone 249240 (TRAV26-1, TRAJ58)
CIVRVGAEETSGSRLTF

SEQ ID NO: 498480 - protein, 16 aa, Homo sapiens
  CDR3 for beta chain variable domain of TCR clone 249240 (TRBV15, TRBJ2-7)
CATSRDRGRRRGEQYF

SEQ ID NO: 498481 - protein, 15 aa, Homo sapiens
  CDR3 for alpha chain variable domain of TCR clone 249241 (TRAV1-2, TRAJ24)
CAVRGSTDSWGKFQF

SEQ ID NO: 498482 - protein, 15 aa, Homo sapiens
  CDR3 for beta chain variable domain of TCR clone 249241 (TRBV20-1, TRBJ2-7)
CSARDRVSGMDEQYF

SEQ ID NO: 498483 - protein, 20 aa, Homo sapiens
  CDR3 for alpha chain variable domain of TCR clone 249242 (TRAV26-1, TRAJ42)
CCVLLHRQTYYGGSQGNLIF

SEQ ID NO: 498484 - protein, 16 aa, Homo sapiens
  CDR3 for beta chain variable domain of TCR clone 249242 (TRBV7-3, TRBJ2-2)
CASSLKRGTLSGELIF

SEQ ID NO: 498485 - protein, 14 aa, Homo sapiens
  CDR3 for alpha chain variable domain of TCR clone 249243 (TRAV17, TRAJ49)
CATDARDTGNQFYF

SEQ ID NO: 498486 - protein, 15 aa, Homo sapiens
  CDR3 for beta chain variable domain of TCR clone 249243 (TRBV20-1, TRBJ2-7)
CSARDPTEVGHEQYF

SEQ ID NO: 498487 - protein, 13 aa, Homo sapiens
  CDR3 for alpha chain variable domain of TCR clone 249244 (TRAV2, TRAJ40)
CAVDTSGTYKYIF

SEQ ID NO: 498488 - protein, 13 aa, Homo sapiens
  CDR3 for beta chain variable domain of TCR clone 249244 (TRBV7-9, TRBJ2-5)
CASLPSGRETQYF

SEQ ID NO: 498489 - protein, 13 aa, Homo sapiens
  CDR3 for alpha chain variable domain of TCR clone 249245 (TRAV12-1, TRAJ40)
CVVPTSGTYKYIF

SEQ ID NO: 498490 - protein, 16 aa, Homo sapiens
  CDR3 for beta chain variable domain of TCR clone 249245 (TRBV7-9, TRBJ1-2)
CASSVGFSSGEDGYTF

SEQ ID NO: 498491 - protein, 15 aa, Homo sapiens
  CDR3 for alpha chain variable domain of TCR clone 249246 (TRAV21, TRAJ52)
CAVRGGGTSYGKLTF

SEQ ID NO: 498492 - protein, 15 aa, Homo sapiens
  CDR3 for beta chain variable domain of TCR clone 249246 (TRBV18, TRBJ1-5)
CASSPSDKSNQPQHF

SEQ ID NO: 498493 - protein, 16 aa, Homo sapiens
  CDR3 for alpha chain variable domain of TCR clone 249247 (TRAV17, TRAJ21)
CATDAETTSTNFTLDL

SEQ ID NO: 498494 - protein, 14 aa, Homo sapiens
  CDR3 for beta chain variable domain of TCR clone 249247 (TRBV7-3, TRBJ2-1)
CASSLTGGANEQFF

SEQ ID NO: 498495 - protein, 16 aa, Homo sapiens
  CDR3 for alpha chain variable domain of TCR clone 249248 (TRAV14/DV4, TRAJ20)
CAMREGRSRDDYKLSF

SEQ ID NO: 498496 - protein, 15 aa, Homo sapiens
  CDR3 for beta chain variable domain of TCR clone 249248 (TRBV5-1, TRBJ2-7)
CASSLNGGPAREQYF

SEQ ID NO: 498497 - protein, 14 aa, Homo sapiens
  CDR3 for alpha chain variable domain of TCR clone 249249 (TRAV17, TRAJ4)
CATAPLGGYNTLIF

SEQ ID NO: 498498 - protein, 13 aa, Homo sapiens
  CDR3 for beta chain variable domain of TCR clone 249249 (TRBV12-4, TRBJ1-3)
CASSLASGNTIDF

SEQ ID NO: 498499 - protein, 15 aa, Homo sapiens
  CDR3 for alpha chain variable domain of TCR clone 249250 (TRAV3, TRAJ17)
CAVRDTGAAGNKLTF

SEQ ID NO: 498500 - protein, 14 aa, Homo sapiens
  CDR3 for beta chain variable domain of TCR clone 249250 (TRBV7-8, TRBJ2-7)
CASSPRDRVYEQYF

SEQ ID NO: 498501 - protein, 14 aa, Homo sapiens
  CDR3 for alpha chain variable domain of TCR clone 249251 (TRAV12-2, TRAJ17)
CAALFKAAGNKLTF

SEQ ID NO: 498502 - protein, 17 aa, Homo sapiens
  CDR3 for beta chain variable domain of TCR clone 249251 (TRBV25-1, TRBJ2-7)
CASSDARVVFSSYEQYF

SEQ ID NO: 498503 - protein, 14 aa, Homo sapiens
  CDR3 for alpha chain variable domain of TCR clone 249252 (TRAV12-2, TRAJ45)
CAVNSGGGADGLTF

SEQ ID NO: 498504 - protein, 13 aa, Homo sapiens
  CDR3 for beta chain variable domain of TCR clone 249252 (TRBV7-7, TRBJ2-2)
CASSLTSAGELFF

SEQ ID NO: 498505 - protein, 14 aa, Homo sapiens
  CDR3 for alpha chain variable domain of TCR clone 249253 (TRAV14/DV4, TRAJ54)
CAMREAPGAQKLVF

SEQ ID NO: 498506 - protein, 13 aa, Homo sapiens
  CDR3 for beta chain variable domain of TCR clone 249253 (TRBV7-3, TRBJ1-1)
CASSQDWGAEAFF

SEQ ID NO: 498507 - protein, 13 aa, Homo sapiens
  CDR3 for alpha chain variable domain of TCR clone 249254 (TRAV12-2, TRAJ34)
CAVRGHNTDKLIF

SEQ ID NO: 498508 - protein, 15 aa, Homo sapiens
  CDR3 for beta chain variable domain of TCR clone 249254 (TRBV28, TRBJ2-1)
CASRTGAGVIARRFF

SEQ ID NO: 498509 - protein, 12 aa, Homo sapiens
  CDR3 for alpha chain variable domain of TCR clone 249255 (TRAV12-3, TRAJ17)
CAMTLTGNKLNF

SEQ ID NO: 498510 - protein, 15 aa, Homo sapiens
  CDR3 for beta chain variable domain of TCR clone 249255 (TRBV20-1, TRBJ2-7)
CGARDRVSGMDEQYF

SEQ ID NO: 498511 - protein, 13 aa, Homo sapiens
  CDR3 for alpha chain variable domain of TCR clone 249256 (TRAV17, TRAJ6)
CATGFGGSYLPTF

SEQ ID NO: 498512 - protein, 14 aa, Homo sapiens
  CDR3 for beta chain variable domain of TCR clone 249256 (TRBV5-1, TRBJ2-5)
CASSFGGSQETQYF

SEQ ID NO: 498513 - protein, 14 aa, Homo sapiens
  CDR3 for alpha chain variable domain of TCR clone 249257 (TRAV3, TRAJ17)
CAVRDAAAGNKLTF

SEQ ID NO: 498514 - protein, 15 aa, Homo sapiens
  CDR3 for beta chain variable domain of TCR clone 249257 (TRBV9, TRBJ1-6)
CASSVAGTGDSHLHF

SEQ ID NO: 498515 - protein, 11 aa, Homo sapiens
  CDR3 for alpha chain variable domain of TCR clone 249258 (TRAV12-1, TRAJ31)
CVVNGDARLMF

SEQ ID NO: 498516 - protein, 17 aa, Homo sapiens
  CDR3 for beta chain variable domain of TCR clone 249258 (TRBV27, TRBJ2-7)
CASSTKRPGTGPYEQYF

SEQ ID NO: 498517 - protein, 12 aa, Homo sapiens
  CDR3 for alpha chain variable domain of TCR clone 249259 (TRAV12-2, TRAJ31)
CAVNTPDARLMF

SEQ ID NO: 498518 - protein, 12 aa, Homo sapiens
  CDR3 for beta chain variable domain of TCR clone 249259 (TRBV12-4, TRBJ2-7)
CASRLGGYEQYF

SEQ ID NO: 498519 - protein, 17 aa, Homo sapiens
  CDR3 for alpha chain variable domain of TCR clone 249260 (TRAV3, TRAJ6)
CAVRDVPRAGGSYIPTF

SEQ ID NO: 498520 - protein, 15 aa, Homo sapiens
  CDR3 for beta chain variable domain of TCR clone 249260 (TRBV5-1, TRBJ1-4)
FAPAAWKDGNEKLFF

SEQ ID NO: 498521 - protein, 13 aa, Homo sapiens
  CDR3 for alpha chain variable domain of TCR clone 249261 (TRAV8-3, TRAJ44)
CAVVPGTTSKLTF

SEQ ID NO: 498522 - protein, 14 aa, Homo sapiens
  CDR3 for beta chain variable domain of TCR clone 249261 (TRBV11-2, TRBJ2-3)
CASSRLARTDTQYF

SEQ ID NO: 498523 - protein, 13 aa, Homo sapiens
  CDR3 for alpha chain variable domain of TCR clone 249262 (TRAV35, TRAJ42)
CPGFPGSQGNLIF

SEQ ID NO: 498524 - protein, 14 aa, Homo sapiens
  CDR3 for beta chain variable domain of TCR clone 249262 (TRBV29-1, TRBJ2-2)
CSVLAETNTGELFF

SEQ ID NO: 498525 - protein, 13 aa, Homo sapiens
  CDR3 for alpha chain variable domain of TCR clone 249263 (TRAV20, TRAJ37)
CAGCSSNTGKLIF

SEQ ID NO: 498526 - protein, 13 aa, Homo sapiens
  CDR3 for beta chain variable domain of TCR clone 249263 (TRBV2, TRBJ1-5)
CATAGPGNQPQHF

SEQ ID NO: 498527 - protein, 14 aa, Homo sapiens
  CDR3 for alpha chain variable domain of TCR clone 249264 (TRAV2, TRAJ37)
CAVDFTSNTGKLIF

SEQ ID NO: 498528 - protein, 15 aa, Homo sapiens
  CDR3 for beta chain variable domain of TCR clone 249264 (TRBV4-3, TRBJ1-4)
CASSQETGSYEKLFF

SEQ ID NO: 498529 - protein, 13 aa, Homo sapiens
  CDR3 for alpha chain variable domain of TCR clone 249265 (TRAV16, TRAJ27)
CALRRTNAGKSTF

SEQ ID NO: 498530 - protein, 16 aa, Homo sapiens
  CDR3 for beta chain variable domain of TCR clone 249265 (TRBV12-4, TRBJ2-5)
CASSWRPSGDLETQYF

SEQ ID NO: 498531 - protein, 10 aa, Homo sapiens
  CDR3 for alpha chain variable domain of TCR clone 249266 (TRAV12-3, TRAJ49)
CAMNDDQFYF

SEQ ID NO: 498532 - protein, 17 aa, Homo sapiens
  CDR3 for beta chain variable domain of TCR clone 249266 (TRBV28, TRBJ2-5)
CASSRRGGLAGAETQYF

SEQ ID NO: 498533 - protein, 11 aa, Homo sapiens
  CDR3 for alpha chain variable domain of TCR clone 249267 (TRAV12-3, TRAJ27)
CAMANAGKSTF

SEQ ID NO: 498534 - protein, 14 aa, Homo sapiens
  CDR3 for beta chain variable domain of TCR clone 249267 (TRBV12-5, TRBJ2-5)
CASGSRTHQENQYF

SEQ ID NO: 498535 - protein, 15 aa, Homo sapiens
  CDR3 for alpha chain variable domain of TCR clone 249268 (TRAV26-1, TRAJ29)
CIARVEGSGNTPLGF

SEQ ID NO: 498536 - protein, 15 aa, Homo sapiens
  CDR3 for beta chain variable domain of TCR clone 249268 (TRBV7-9, TRBJ1-5)
CASSQGHQPNQPQHF

SEQ ID NO: 498537 - protein, 13 aa, Homo sapiens
  CDR3 for alpha chain variable domain of TCR clone 249269 (TRAV8-1, TRAJ30)
CAVIMNRDDKTIF

SEQ ID NO: 498538 - protein, 14 aa, Homo sapiens
  CDR3 for beta chain variable domain of TCR clone 249269 (TRBV7-2, TRBJ1-6)
CASSLQGANSPLLF

SEQ ID NO: 498539 - protein, 15 aa, Homo sapiens
  CDR3 for alpha chain variable domain of TCR clone 249270 (TRAV21, TRAJ53)
CATLNSGGSNYKLTF

SEQ ID NO: 498540 - protein, 16 aa, Homo sapiens
  CDR3 for beta chain variable domain of TCR clone 249270 (TRBV7-3, TRBJ2-3)
CASSPTGYQSTDTQYF

SEQ ID NO: 498541 - protein, 13 aa, Homo sapiens
  CDR3 for alpha chain variable domain of TCR clone 249271 (TRAV1-2, TRAJ9)
CAALNTGGFKTIF

SEQ ID NO: 498542 - protein, 15 aa, Homo sapiens
  CDR3 for beta chain variable domain of TCR clone 249271 (TRBV12-4, TRBJ2-1)
CACRETSGMSNEQFF

SEQ ID NO: 498543 - protein, 12 aa, Homo sapiens
  CDR3 for alpha chain variable domain of TCR clone 249272 (TRAV8-3, TRAJ26)
CAGDNYRQNFVF

SEQ ID NO: 498544 - protein, 12 aa, Homo sapiens
  CDR3 for beta chain variable domain of TCR clone 249272 (TRBV11-2, TRBJ2-1)
CASSPGNNGQFF

SEQ ID NO: 498545 - protein, 14 aa, Homo sapiens
  CDR3 for alpha chain variable domain of TCR clone 249273 (TRAV12-3, TRAJ41)
CAMSAGNSGYALNL

SEQ ID NO: 498546 - protein, 11 aa, Homo sapiens
  CDR3 for beta chain variable domain of TCR clone 249273 (TRBV7-2, TRBJ2-3)
CASSSSDTQYF

SEQ ID NO: 498547 - protein, 12 aa, Homo sapiens
  CDR3 for alpha chain variable domain of TCR clone 249274 (TRAV8-3, TRAJ26)
CAGDNYGQKFVF

SEQ ID NO: 498548 - protein, 12 aa, Homo sapiens
  CDR3 for beta chain variable domain of TCR clone 249274 (TRBV11-2, TRBJ2-1)
CASSPGNNEQFF

SEQ ID NO: 498549 - protein, 12 aa, Homo sapiens
  CDR3 for alpha chain variable domain of TCR clone 249275 (TRAV12-2, TRAJ47)
CAVAEYGNKLVF

SEQ ID NO: 498550 - protein, 14 aa, Homo sapiens
  CDR3 for beta chain variable domain of TCR clone 249275 (TRBV9, TRBJ2-7)
CASSVGVGSYEQYF

SEQ ID NO: 498551 - protein, 16 aa, Homo sapiens
  CDR3 for alpha chain variable domain of TCR clone 249276 (TRAV17, TRAJ53)
CATDALSGGSNYKLTF

SEQ ID NO: 498552 - protein, 12 aa, Homo sapiens
  CDR3 for beta chain variable domain of TCR clone 249276 (TRBV5-1, TRBJ2-7)
SASSFRGHEQYF

SEQ ID NO: 498553 - protein, 17 aa, Homo sapiens
  CDR3 for alpha chain variable domain of TCR clone 249277 (TRAV3, TRAJ42)
CAVRDRDYGGSQGNLIC

SEQ ID NO: 498554 - protein, 17 aa, Homo sapiens
  CDR3 for beta chain variable domain of TCR clone 249277 (TRBV7-9, TRBJ2-3)
CASSPTVAGDLTNTQYF

SEQ ID NO: 498555 - protein, 13 aa, Homo sapiens
  CDR3 for alpha chain variable domain of TCR clone 249278 (TRAV13-1, TRAJ4)
CAASIGGYNKLIF

SEQ ID NO: 498556 - protein, 16 aa, Homo sapiens
  CDR3 for beta chain variable domain of TCR clone 249278 (TRBV20-1, TRBJ2-1)
GSAPGLAGSYSDEQFF

SEQ ID NO: 498557 - protein, 14 aa, Homo sapiens
  CDR3 for alpha chain variable domain of TCR clone 249279 (TRAV1-2, TRAJ8)
CAVREDTGFQKLVF

SEQ ID NO: 498558 - protein, 18 aa, Homo sapiens
  CDR3 for beta chain variable domain of TCR clone 249279 (TRBV4-1, TRBJ1-4)
CASSQDLRRGGEKLFLAV

SEQ ID NO: 498559 - protein, 17 aa, Homo sapiens
  CDR3 for alpha chain variable domain of TCR clone 249280 (TRAV38-1, TRAJ28)
CAFMKSYSGAGSYQLTF

SEQ ID NO: 498560 - protein, 15 aa, Homo sapiens
  CDR3 for beta chain variable domain of TCR clone 249280 (TRBV7-6, TRBJ1-5)
CASSQSSGINQPQHF

SEQ ID NO: 498561 - protein, 15 aa, Homo sapiens
  CDR3 for alpha chain variable domain of TCR clone 249281 (TRAV14/DV4, TRAJ33)
CAMREGRDSNYQLIW

SEQ ID NO: 498562 - protein, 16 aa, Homo sapiens
  CDR3 for beta chain variable domain of TCR clone 249281 (TRBV11-2, TRBJ1-1)
CASSLRQGGEHSKAFF

SEQ ID NO: 498563 - protein, 13 aa, Homo sapiens
  CDR3 for alpha chain variable domain of TCR clone 249282 (TRAV21, TRAJ57)
CAVTQGGSEKLVF

SEQ ID NO: 498564 - protein, 16 aa, Homo sapiens
  CDR3 for beta chain variable domain of TCR clone 249282 (TRBV29-1, TRBJ2-7)
CSVEDAEDGTAYEQDF

SEQ ID NO: 498565 - protein, 19 aa, Homo sapiens
  CDR3 for alpha chain variable domain of TCR clone 249283 (TRAV12-2, TRAJ4)
PPTSVPPGWPEGGYNKLIF

SEQ ID NO: 498566 - protein, 16 aa, Homo sapiens
  CDR3 for beta chain variable domain of TCR clone 249283 (TRBV6-1, TRBJ2-5)
CASSETLDRGAETQYF

SEQ ID NO: 498567 - protein, 15 aa, Homo sapiens
  CDR3 for alpha chain variable domain of TCR clone 249284 (TRAV26-1, TRAJ29)
CIVRVEGSGNTPLVF

SEQ ID NO: 498568 - protein, 13 aa, Homo sapiens
  CDR3 for beta chain variable domain of TCR clone 249284 (TRBV18, TRBJ2-5)
CASSPGVSETQYF

SEQ ID NO: 498569 - protein, 14 aa, Homo sapiens
  CDR3 for alpha chain variable domain of TCR clone 249285 (TRAV26-1, TRAJ45)
CIEVTGGGADGLTF

SEQ ID NO: 498570 - protein, 18 aa, Homo sapiens
  CDR3 for beta chain variable domain of TCR clone 249285 (TRBV4-2, TRBJ1-2)
CARSQDKVGHTVNYGYTF

SEQ ID NO: 498571 - protein, 17 aa, Homo sapiens
  CDR3 for alpha chain variable domain of TCR clone 249286 (TRAV3, TRAJ6)
CAVRDGPRAEGSYIPTF

SEQ ID NO: 498572 - protein, 19 aa, Homo sapiens
  CDR3 for beta chain variable domain of TCR clone 249286 (TRBV25-1, TRBJ2-2)
CAILVYRVDRGRKTGELFF

SEQ ID NO: 498573 - protein, 14 aa, Homo sapiens
  CDR3 for alpha chain variable domain of TCR clone 249287 (TRAV12-2, TRAJ13)
CAVKKTGGYQKVTF

SEQ ID NO: 498574 - protein, 14 aa, Homo sapiens
  CDR3 for beta chain variable domain of TCR clone 249287 (TRBV7-9, TRBJ1-2)
CASSLGPPQWPATF

SEQ ID NO: 498575 - protein, 19 aa, Homo sapiens
  CDR3 for alpha chain variable domain of TCR clone 249288 (TRAV1-2, TRAJ26)
CLLPLCCERPDNYGQNFVF

SEQ ID NO: 498576 - protein, 16 aa, Homo sapiens
  CDR3 for beta chain variable domain of TCR clone 249288 (TRBV4-1, TRBJ2-1)
CASSQEAGQGSDEQFF

SEQ ID NO: 498577 - protein, 12 aa, Homo sapiens
  CDR3 for alpha chain variable domain of TCR clone 249289 (TRAV13-2, TRAJ31)
CAESYNNARLMF

SEQ ID NO: 498578 - protein, 12 aa, Homo sapiens
  CDR3 for beta chain variable domain of TCR clone 249289 (TRBV7-8, TRBJ2-7)
CASSLGDREQYF

SEQ ID NO: 498579 - protein, 12 aa, Homo sapiens
  CDR3 for alpha chain variable domain of TCR clone 249290 (TRAV13-1, TRAJ15)
CAANQAGTALIF

SEQ ID NO: 498580 - protein, 13 aa, Homo sapiens
  CDR3 for beta chain variable domain of TCR clone 249290 (TRBV7-3, TRBJ1-2)
CASSLKRGYGYTF

SEQ ID NO: 498581 - protein, 15 aa, Homo sapiens
  CDR3 for alpha chain variable domain of TCR clone 249291 (TRAV21, TRAJ53)
CATLNSGGSNYKLTF

SEQ ID NO: 498582 - protein, 13 aa, Homo sapiens
  CDR3 for beta chain variable domain of TCR clone 249291 (TRBV4-1, TRBJ2-2)
CASSQENTGELFL

SEQ ID NO: 498583 - protein, 14 aa, Homo sapiens
  CDR3 for alpha chain variable domain of TCR clone 249292 (TRAV3, TRAJ33)
CAVRDMVSNYQLIW

SEQ ID NO: 498584 - protein, 17 aa, Homo sapiens
  CDR3 for beta chain variable domain of TCR clone 249292 (TRBV19, TRBJ2-1)
CASSIWSAQPTHNEQFF

SEQ ID NO: 498585 - protein, 14 aa, Homo sapiens
  CDR3 for alpha chain variable domain of TCR clone 249293 (TRAV1-2, TRAJ8)
CAVREDTGFQKLVF

SEQ ID NO: 498586 - protein, 16 aa, Homo sapiens
  CDR3 for beta chain variable domain of TCR clone 249293 (TRBV19, TRBJ1-1)
CASSTTRFWPGTEAFF

SEQ ID NO: 498587 - protein, 12 aa, Homo sapiens
  CDR3 for alpha chain variable domain of TCR clone 249294 (TRAV19, TRAJ27)
CALRFNAGKSTF

SEQ ID NO: 498588 - protein, 16 aa, Homo sapiens
  CDR3 for beta chain variable domain of TCR clone 249294 (TRBV20-1, TRBJ1-4)
CSAPGQGLLTNEKLFF

SEQ ID NO: 498589 - protein, 15 aa, Homo sapiens
  CDR3 for alpha chain variable domain of TCR clone 249295 (TRAV25, TRAJ52)
FAGRPGGTSYGQLTF

SEQ ID NO: 498590 - protein, 16 aa, Homo sapiens
  CDR3 for beta chain variable domain of TCR clone 249295 (TRBV12-4, TRBJ1-5)
CASSSGPRGSNQPQHF

SEQ ID NO: 498591 - protein, 15 aa, Homo sapiens
  CDR3 for alpha chain variable domain of TCR clone 249296 (TRAV14/DV4, TRAJ46)
CAMREKKSSGGKLTF

SEQ ID NO: 498592 - protein, 13 aa, Homo sapiens
  CDR3 for beta chain variable domain of TCR clone 249296 (TRBV20-1, TRBJ2-5)
CSAREAFQETQYF

SEQ ID NO: 498593 - protein, 15 aa, Homo sapiens
  CDR3 for alpha chain variable domain of TCR clone 249297 (TRAV8-4, TRAJ29)
CVVSEGFRGNKPLVF

SEQ ID NO: 498594 - protein, 18 aa, Homo sapiens
  CDR3 for beta chain variable domain of TCR clone 249297 (TRBV20-1, TRBJ2-6)
CSARTLAGGPSGANVLTF

SEQ ID NO: 498595 - protein, 11 aa, Homo sapiens
  CDR3 for alpha chain variable domain of TCR clone 249298 (TRAV35, TRAJ30)
CAGLRDDKIIF

SEQ ID NO: 498596 - protein, 14 aa, Homo sapiens
  CDR3 for beta chain variable domain of TCR clone 249298 (TRBV5-4, TRBJ1-1)
CASSLDKLKLSLDK

SEQ ID NO: 498597 - protein, 14 aa, Homo sapiens
  CDR3 for alpha chain variable domain of TCR clone 249299 (TRAV2, TRAJ9)
CAVEDRSGGFKPIF

SEQ ID NO: 498598 - protein, 19 aa, Homo sapiens
  CDR3 for beta chain variable domain of TCR clone 249299 (TRBV25-1, TRBJ2-2)
CAILVYRVDRGRKTGELFF

SEQ ID NO: 498599 - protein, 12 aa, Homo sapiens
  CDR3 for alpha chain variable domain of TCR clone 249300 (TRAV21, TRAJ23)
CAVTNQGGKLIF

SEQ ID NO: 498600 - protein, 15 aa, Homo sapiens
  CDR3 for beta chain variable domain of TCR clone 249300 (TRBV27, TRBJ2-1)
CASSFGAGTGPEQFF

SEQ ID NO: 498601 - protein, 17 aa, Homo sapiens
  CDR3 for alpha chain variable domain of TCR clone 249301 (TRAV3, TRAJ6)
CAVRDGPRAGGSYVPTF

SEQ ID NO: 498602 - protein, 14 aa, Homo sapiens
  CDR3 for beta chain variable domain of TCR clone 249301 (TRBV11-2, TRBJ2-3)
CASSRLARTDTQYF

SEQ ID NO: 498603 - protein, 16 aa, Homo sapiens
  CDR3 for alpha chain variable domain of TCR clone 249302 (TRAV1-2, TRAJ10)
CTVRGVLTGGGNKLTF

SEQ ID NO: 498604 - protein, 14 aa, Homo sapiens
  CDR3 for beta chain variable domain of TCR clone 249302 (TRBV5-1, TRBJ2-7)
CASSRGESLYEQYF

SEQ ID NO: 498605 - protein, 12 aa, Homo sapiens
  CDR3 for alpha chain variable domain of TCR clone 249303 (TRAV17, TRAJ31)
CATEQGNARLMV

SEQ ID NO: 498606 - protein, 14 aa, Homo sapiens
  CDR3 for beta chain variable domain of TCR clone 249303 (TRBV28, TRBJ2-7)
CASTTDRDGFVQYF

SEQ ID NO: 498607 - protein, 11 aa, Homo sapiens
  CDR3 for alpha chain variable domain of TCR clone 249304 (TRAV21, TRAJ34)
CAVTNTDKLIF

SEQ ID NO: 498608 - protein, 15 aa, Homo sapiens
  CDR3 for beta chain variable domain of TCR clone 249304 (TRBV18, TRBJ2-5)
CASSPDPGLQETQYF

SEQ ID NO: 498609 - protein, 14 aa, Homo sapiens
  CDR3 for alpha chain variable domain of TCR clone 249305 (TRAV3, TRAJ7)
CAVREEEREQKTRF

SEQ ID NO: 498610 - protein, 12 aa, Homo sapiens
  CDR3 for beta chain variable domain of TCR clone 249305 (TRBV7-8, TRBJ2-7)
CACSLGDREQYF

SEQ ID NO: 498611 - protein, 14 aa, Homo sapiens
  CDR3 for alpha chain variable domain of TCR clone 249306 (TRAV3, TRAJ21)
CAVRDAYNFNKFYF

SEQ ID NO: 498612 - protein, 15 aa, Homo sapiens
  CDR3 for beta chain variable domain of TCR clone 249306 (TRBV6-5, TRBJ1-5)
CASSYSWDSKQPQHF

SEQ ID NO: 498613 - protein, 17 aa, Homo sapiens
  CDR3 for alpha chain variable domain of TCR clone 249307 (TRAV4, TRAJ13)
CLVGVQGSSGGYQKVTF

SEQ ID NO: 498614 - protein, 18 aa, Homo sapiens
  CDR3 for beta chain variable domain of TCR clone 249307 (TRBV15, TRBJ2-3)
CATNRDGARSWDTDTQYF

SEQ ID NO: 498615 - protein, 14 aa, Homo sapiens
  CDR3 for alpha chain variable domain of TCR clone 249308 (TRAV2, TRAJ3)
CAVDRYSSASKIIF

SEQ ID NO: 498616 - protein, 16 aa, Homo sapiens
  CDR3 for beta chain variable domain of TCR clone 249308 (TRBV20-1, TRBJ1-5)
CSAERPGQQANQPQHF

SEQ ID NO: 498617 - protein, 13 aa, Homo sapiens
  CDR3 for alpha chain variable domain of TCR clone 249309 (TRAV26-2, TRAJ37)
CIRGSSNTGKLIF

SEQ ID NO: 498618 - protein, 14 aa, Homo sapiens
  CDR3 for beta chain variable domain of TCR clone 249309 (TRBV28, TRBJ1-2)
CASRIQGANYGYTF

SEQ ID NO: 498619 - protein, 14 aa, Homo sapiens
  CDR3 for alpha chain variable domain of TCR clone 249310 (TRAV14/DV4, TRAJ15)
CAMRRDQAGTALIF

SEQ ID NO: 498620 - protein, 15 aa, Homo sapiens
  CDR3 for beta chain variable domain of TCR clone 249310 (TRBV20-1, TRBJ1-5)
CSAFKNGQRNQPQHF

SEQ ID NO: 498621 - protein, 10 aa, Homo sapiens
  CDR3 for alpha chain variable domain of TCR clone 249311 (TRAV30, TRAJ34)
CGTNPDKLIF

SEQ ID NO: 498622 - protein, 16 aa, Homo sapiens
  CDR3 for beta chain variable domain of TCR clone 249311 (TRBV20-1, TRBJ1-4)
CSAPGQGLLTNEKLFF

SEQ ID NO: 498623 - protein, 14 aa, Homo sapiens
  CDR3 for alpha chain variable domain of TCR clone 249312 (TRAV14/DV4, TRAJ54)
CAMREAPGAQKLVF

SEQ ID NO: 498624 - protein, 15 aa, Homo sapiens
  CDR3 for beta chain variable domain of TCR clone 249312 (TRBV5-1, TRBJ2-7)
CASSLNGGPARELYF

SEQ ID NO: 498625 - protein, 14 aa, Homo sapiens
  CDR3 for alpha chain variable domain of TCR clone 249313 (TRAV17, TRAJ16)
CATADFSDGQKLLP

SEQ ID NO: 498626 - protein, 15 aa, Homo sapiens
  CDR3 for beta chain variable domain of TCR clone 249313 (TRBV6-5, TRBJ2-1)
CASSYDTGAGNEQFF

SEQ ID NO: 498627 - protein, 20 aa, Homo sapiens
  CDR3 for alpha chain variable domain of TCR clone 249314 (TRAV21, TRAJ4)
AASQPGDSATLAGGYNKLIF

SEQ ID NO: 498628 - protein, 19 aa, Homo sapiens
  CDR3 for beta chain variable domain of TCR clone 249314 (TRBV18, TRBJ1-3)
CAISPLSRTGMSSGNTIYF

SEQ ID NO: 498629 - protein, 14 aa, Homo sapiens
  CDR3 for alpha chain variable domain of TCR clone 249315 (TRAV26-1, TRAJ52)
CIRAGGTSYGKLTF

SEQ ID NO: 498630 - protein, 16 aa, Homo sapiens
  CDR3 for beta chain variable domain of TCR clone 249315 (TRBV19, TRBJ2-2)
CASTIGARAGAGELFF

SEQ ID NO: 498631 - protein, 13 aa, Homo sapiens
  CDR3 for alpha chain variable domain of TCR clone 249316 (TRAV36/DV7, TRAJ37)
CAVFSSNTGKLIF

SEQ ID NO: 498632 - protein, 18 aa, Homo sapiens
  CDR3 for beta chain variable domain of TCR clone 249316 (TRBV11-3, TRBJ2-3)
WASSLGGASRGAPNTQYF

SEQ ID NO: 498633 - protein, 15 aa, Homo sapiens
  CDR3 for alpha chain variable domain of TCR clone 249317 (TRAV40, TRAJ45)
CLLGDLGGGADGLTF

SEQ ID NO: 498634 - protein, 13 aa, Homo sapiens
  CDR3 for beta chain variable domain of TCR clone 249317 (TRBV7-9, TRBJ1-2)
CGSSLKQNYGYTF

SEQ ID NO: 498635 - protein, 13 aa, Homo sapiens
  CDR3 for alpha chain variable domain of TCR clone 249318 (TRAV3, TRAJ20)
CAVRTLNDYKLSF

SEQ ID NO: 498636 - protein, 12 aa, Homo sapiens
  CDR3 for beta chain variable domain of TCR clone 249318 (TRBV6-1, TRBJ2-1)
CATYGLNNEQFF

SEQ ID NO: 498637 - protein, 12 aa, Homo sapiens
  CDR3 for alpha chain variable domain of TCR clone 249319 (TRAV41, TRAJ58)
CAVETSGSRLTC

SEQ ID NO: 498638 - protein, 15 aa, Homo sapiens
  CDR3 for beta chain variable domain of TCR clone 249319 (TRBV29-1, TRBJ2-6)
CSVGDRGSGANVLTF

SEQ ID NO: 498639 - protein, 10 aa, Homo sapiens
  CDR3 for alpha chain variable domain of TCR clone 249320 (TRAV23/DV6, TRAJ57)
CAASSTLSQG

SEQ ID NO: 498640 - protein, 12 aa, Homo sapiens
  CDR3 for beta chain variable domain of TCR clone 249320 (TRBV7-9, TRBJ1-5)
CASSPQGQPQHF

SEQ ID NO: 498641 - protein, 12 aa, Homo sapiens
  CDR3 for alpha chain variable domain of TCR clone 249321 (TRAV23/DV6, TRAJ30)
CAASKGDDKTIF

SEQ ID NO: 498642 - protein, 15 aa, Homo sapiens
  CDR3 for beta chain variable domain of TCR clone 249321 (TRBV12-4, TRBJ2-1)
CASRPTRTGYNEQFF

SEQ ID NO: 498643 - protein, 13 aa, Homo sapiens
  CDR3 for alpha chain variable domain of TCR clone 249322 (TRAV12-2, TRAJ39)
CAVNNNAGNMLTF

SEQ ID NO: 498644 - protein, 13 aa, Homo sapiens
  CDR3 for beta chain variable domain of TCR clone 249322 (TRBV2, TRBJ1-5)
CATSGPGNQPQHF

SEQ ID NO: 498645 - protein, 14 aa, Homo sapiens
  CDR3 for alpha chain variable domain of TCR clone 249323 (TRAV26-1, TRAJ45)
CIEVTGGGADGLTF

SEQ ID NO: 498646 - protein, 14 aa, Homo sapiens
  CDR3 for beta chain variable domain of TCR clone 249323 (TRBV7-6, TRBJ2-1)
CASSLAGGTNEQFF

SEQ ID NO: 498647 - protein, 16 aa, Homo sapiens
  CDR3 for alpha chain variable domain of TCR clone 249324 (TRAV20, TRAJ10)
CAVLRGLAGGGNKLTF

SEQ ID NO: 498648 - protein, 18 aa, Homo sapiens
  CDR3 for beta chain variable domain of TCR clone 249324 (TRBV25-1, TRBJ1-2)
CASSGLQNGQGLIFGYTF

SEQ ID NO: 498649 - protein, 12 aa, Homo sapiens
  CDR3 for alpha chain variable domain of TCR clone 249325 (TRAV17, TRAJ20)
CATDSNDYKLSF

SEQ ID NO: 498650 - protein, 15 aa, Homo sapiens
  CDR3 for beta chain variable domain of TCR clone 249325 (TRBV7-9, TRBJ2-2)
CASGPLDTFPGELFF

SEQ ID NO: 498651 - protein, 13 aa, Homo sapiens
  CDR3 for alpha chain variable domain of TCR clone 249326 (TRAV8-3, TRAJ43)
FAVGPDNNNDMRF

SEQ ID NO: 498652 - protein, 13 aa, Homo sapiens
  CDR3 for beta chain variable domain of TCR clone 249326 (TRBV29-1, TRBJ2-1)
CSVEGGRVNEQFF

SEQ ID NO: 498653 - protein, 13 aa, Homo sapiens
  CDR3 for alpha chain variable domain of TCR clone 249327 (TRAV6, TRAJ20)
CAPAVSNDYKLSF

SEQ ID NO: 498654 - protein, 15 aa, Homo sapiens
  CDR3 for beta chain variable domain of TCR clone 249327 (TRBV7-2, TRBJ2-5)
CASSFRRGGEETQYF

SEQ ID NO: 498655 - protein, 15 aa, Homo sapiens
  CDR3 for alpha chain variable domain of TCR clone 249328 (TRAV12-3, TRAJ6)
CAMSATTGGSYIPTC

SEQ ID NO: 498656 - protein, 16 aa, Homo sapiens
  CDR3 for beta chain variable domain of TCR clone 249328 (TRBV20-1, TRBJ1-2)
CSASTGQGVANYGYTF

SEQ ID NO: 498657 - protein, 13 aa, Homo sapiens
  CDR3 for alpha chain variable domain of TCR clone 249329 (TRAV13-2, TRAJ48)
FAEMDFGNDKLTF

SEQ ID NO: 498658 - protein, 13 aa, Homo sapiens
  CDR3 for beta chain variable domain of TCR clone 249329 (TRBV7-9, TRBJ1-2)
CASSLKQNYGYTF

SEQ ID NO: 498659 - protein, 14 aa, Homo sapiens
  CDR3 for alpha chain variable domain of TCR clone 249330 (TRAV12-3, TRAJ10)
SHLPLTGGGNKLTF

SEQ ID NO: 498660 - protein, 14 aa, Homo sapiens
  CDR3 for beta chain variable domain of TCR clone 249330 (TRBV19, TRBJ1-3)
CASRGTVSGNTIYF

SEQ ID NO: 498661 - protein, 16 aa, Homo sapiens
  CDR3 for alpha chain variable domain of TCR clone 249331 (TRAV30, TRAJ24)
CGTEIVDADSWGKFQF

SEQ ID NO: 498662 - protein, 15 aa, Homo sapiens
  CDR3 for beta chain variable domain of TCR clone 249331 (TRBV5-1, TRBJ2-5)
CASSFKGGDQETQYF

SEQ ID NO: 498663 - protein, 16 aa, Homo sapiens
  CDR3 for alpha chain variable domain of TCR clone 249332 (TRAV30, TRAJ24)
CGTEIVDADSWGKLQF

SEQ ID NO: 498664 - protein, 12 aa, Homo sapiens
  CDR3 for beta chain variable domain of TCR clone 249332 (TRBV11-2, TRBJ2-7)
CASSPPADEQYF

SEQ ID NO: 498665 - protein, 15 aa, Homo sapiens
  CDR3 for alpha chain variable domain of TCR clone 249333 (TRAV3, TRAJ3)
CAVRDRDSSASKIIF

SEQ ID NO: 498666 - protein, 14 aa, Homo sapiens
  CDR3 for beta chain variable domain of TCR clone 249333 (TRBV18, TRBJ1-2)
CASSPDRVVYGYTF

SEQ ID NO: 498667 - protein, 15 aa, Homo sapiens
  CDR3 for alpha chain variable domain of TCR clone 249334 (TRAV8-2, TRAJ44)
DAAEYFDGTASKLTF

SEQ ID NO: 498668 - protein, 14 aa, Homo sapiens
  CDR3 for beta chain variable domain of TCR clone 249334 (TRBV7-8, TRBJ2-3)
CASSLDRGTDTQYL

SEQ ID NO: 498669 - protein, 12 aa, Homo sapiens
  CDR3 for alpha chain variable domain of TCR clone 249335 (TRAV8-3, TRAJ26)
CAVGAGGQNFVF

SEQ ID NO: 498670 - protein, 13 aa, Homo sapiens
  CDR3 for beta chain variable domain of TCR clone 249335 (TRBV4-2, TRBJ1-1)
CASSQAGNTEAFF

SEQ ID NO: 498671 - protein, 23 aa, Homo sapiens
  CDR3 for alpha chain variable domain of TCR clone 249336 (TRAV8-3, )
CAVVTTRIPAIQNPDPAVYQLRD

SEQ ID NO: 498672 - protein, 14 aa, Homo sapiens
  CDR3 for beta chain variable domain of TCR clone 249336 (TRBV11-2, TRBJ2-7)
CASSPSTTSYEQYF

SEQ ID NO: 498673 - protein, 15 aa, Homo sapiens
  CDR3 for alpha chain variable domain of TCR clone 249337 (TRAV12-3, TRAJ6)
CAMSATTGGSYIPTF

SEQ ID NO: 498674 - protein, 15 aa, Homo sapiens
  CDR3 for beta chain variable domain of TCR clone 249337 (TRBV7-6, TRBJ1-5)
CASSQSSGIDQPQHF

SEQ ID NO: 498675 - protein, 11 aa, Homo sapiens
  CDR3 for alpha chain variable domain of TCR clone 249338 (TRAV12-1, TRAJ31)
CVGNGDARLMF

SEQ ID NO: 498676 - protein, 17 aa, Homo sapiens
  CDR3 for beta chain variable domain of TCR clone 249338 (TRBV4-3, TRBJ1-5)
CASSQWGDGGPNQPQHF

SEQ ID NO: 498677 - protein, 13 aa, Homo sapiens
  CDR3 for alpha chain variable domain of TCR clone 249339 (TRAV26-2, TRAJ43)
CILRAVNNNDMRF

SEQ ID NO: 498678 - protein, 13 aa, Homo sapiens
  CDR3 for beta chain variable domain of TCR clone 249339 (TRBV20-1, TRBJ2-5)
CSAREGGKETQYF

SEQ ID NO: 498679 - protein, 14 aa, Homo sapiens
  CDR3 for alpha chain variable domain of TCR clone 249340 (TRAV12-2, TRAJ40)
CAVKIPSGTYKYIF

SEQ ID NO: 498680 - protein, 13 aa, Homo sapiens
  CDR3 for beta chain variable domain of TCR clone 249340 (TRBV28, TRBJ1-2)
CAGRDRGNYGYTF

SEQ ID NO: 498681 - protein, 14 aa, Homo sapiens
  CDR3 for alpha chain variable domain of TCR clone 249341 (TRAV16, TRAJ17)
CAPRIKAAGNKLTF

SEQ ID NO: 498682 - protein, 12 aa, Homo sapiens
  CDR3 for beta chain variable domain of TCR clone 249341 (TRBV11-2, TRBJ2-1)
CASSPGNNEQFF

SEQ ID NO: 498683 - protein, 14 aa, Homo sapiens
  CDR3 for alpha chain variable domain of TCR clone 249342 (TRAV17, TRAJ54)
CATDANQGAQKLVF

SEQ ID NO: 498684 - protein, 15 aa, Homo sapiens
  CDR3 for beta chain variable domain of TCR clone 249342 (TRBV9, TRBJ1-6)
WASSVAGTGDSPLHF

SEQ ID NO: 498685 - protein, 11 aa, Homo sapiens
  CDR3 for alpha chain variable domain of TCR clone 249343 (TRAV1-1, TRAJ23)
CAVRQGGRLIF

SEQ ID NO: 498686 - protein, 20 aa, Homo sapiens
  CDR3 for beta chain variable domain of TCR clone 249343 (TRBV7-8, TRBJ2-2)
CASSHFFPGPTIHITGELFF

SEQ ID NO: 498687 - protein, 16 aa, Homo sapiens
  CDR3 for alpha chain variable domain of TCR clone 249344 (TRAV3, TRAJ37)
CAVRDSGSVNTGKLIF

SEQ ID NO: 498688 - protein, 12 aa, Homo sapiens
  CDR3 for beta chain variable domain of TCR clone 249344 (TRBV7-2, TRBJ2-5)
CASSLYQETQYF

SEQ ID NO: 498689 - protein, 14 aa, Homo sapiens
  CDR3 for alpha chain variable domain of TCR clone 249345 (TRAV12-2, TRAJ53)
CAVKGGGSNYKLTL

SEQ ID NO: 498690 - protein, 13 aa, Homo sapiens
  CDR3 for beta chain variable domain of TCR clone 249345 (TRBV3-1, TRBJ1-1)
CASSQLQGAEAFF

SEQ ID NO: 498691 - protein, 13 aa, Homo sapiens
  CDR3 for alpha chain variable domain of TCR clone 249346 (TRAV8-4, TRAJ10)
CAAFTGGGNKLTF

SEQ ID NO: 498692 - protein, 15 aa, Homo sapiens
  CDR3 for beta chain variable domain of TCR clone 249346 (TRBV2, TRBJ2-3)
CSSSDFERATDTQYF

SEQ ID NO: 498693 - protein, 17 aa, Homo sapiens
  CDR3 for alpha chain variable domain of TCR clone 249347 (TRAV3, TRAJ42)
CAVRDRDYGGSQGNLIF

SEQ ID NO: 498694 - protein, 13 aa, Homo sapiens
  CDR3 for beta chain variable domain of TCR clone 249347 (TRBV7-3, TRBJ1-2)
CATSLKRGYGYTF

SEQ ID NO: 498695 - protein, 13 aa, Homo sapiens
  CDR3 for alpha chain variable domain of TCR clone 249348 (TRAV8-1, TRAJ30)
CAVIMNRDDKIIF

SEQ ID NO: 498696 - protein, 14 aa, Homo sapiens
  CDR3 for beta chain variable domain of TCR clone 249348 (TRBV7-2, TRBJ1-6)
CACSLQGANSPLHF

SEQ ID NO: 498697 - protein, 11 aa, Homo sapiens
  CDR3 for alpha chain variable domain of TCR clone 249349 (TRAV3, TRAJ21)
CAVGNFNKFYF

SEQ ID NO: 498698 - protein, 12 aa, Homo sapiens
  CDR3 for beta chain variable domain of TCR clone 249349 (TRBV5-5, TRBJ2-5)
CASSYFGETQYF

SEQ ID NO: 498699 - protein, 14 aa, Homo sapiens
  CDR3 for alpha chain variable domain of TCR clone 249350 (TRAV12-2, TRAJ15)
CAPHTGQAGTALIF

SEQ ID NO: 498700 - protein, 13 aa, Homo sapiens
  CDR3 for beta chain variable domain of TCR clone 249350 (TRBV20-1, TRBJ1-1)
CSAPPGGHTEAFF

SEQ ID NO: 498701 - protein, 14 aa, Homo sapiens
  CDR3 for alpha chain variable domain of TCR clone 249351 (TRAV12-2, TRAJ13)
CAVKKTGGYQKVAF

SEQ ID NO: 498702 - protein, 16 aa, Homo sapiens
  CDR3 for beta chain variable domain of TCR clone 249351 (TRBV20-1, TRBJ1-4)
CSAPGQGLLTNEKLFF

SEQ ID NO: 498703 - protein, 15 aa, Homo sapiens
  CDR3 for alpha chain variable domain of TCR clone 249352 (TRAV23/DV6, TRAJ18)
CAARYRGSTLGRLYF

SEQ ID NO: 498704 - protein, 14 aa, Homo sapiens
  CDR3 for beta chain variable domain of TCR clone 249352 (TRBV7-3, TRBJ2-1)
CASSLAGGANEQFF

SEQ ID NO: 498705 - protein, 12 aa, Homo sapiens
  CDR3 for alpha chain variable domain of TCR clone 249353 (TRAV16, TRAJ56)
CAPTGANSKLTL

SEQ ID NO: 498706 - protein, 17 aa, Homo sapiens
  CDR3 for beta chain variable domain of TCR clone 249353 (TRBV27, TRBJ2-6)
CASSLTVFASGANVLTF

SEQ ID NO: 498707 - protein, 16 aa, Homo sapiens
  CDR3 for alpha chain variable domain of TCR clone 249354 (TRAV6, TRAJ37)
CALDIFGSSNTGNLIF

SEQ ID NO: 498708 - protein, 14 aa, Homo sapiens
  CDR3 for beta chain variable domain of TCR clone 249354 (TRBV5-7, TRBJ2-7)
CASSLRSATYEQYF

SEQ ID NO: 498709 - protein, 17 aa, Homo sapiens
  CDR3 for alpha chain variable domain of TCR clone 249355 (TRAV8-6, TRAJ58)
CAVSSWVGATSGSRLTF

SEQ ID NO: 498710 - protein, 14 aa, Homo sapiens
  CDR3 for beta chain variable domain of TCR clone 249355 (TRBV4-2, TRBJ2-1)
CASDLDRAYNEQFF

SEQ ID NO: 498711 - protein, 21 aa, Homo sapiens
  CDR3 for alpha chain variable domain of TCR clone 249356 (TRAV1-1, TRAJ6)
CLLLLRCERLERTGGSYIPTF

SEQ ID NO: 498712 - protein, 12 aa, Homo sapiens
  CDR3 for beta chain variable domain of TCR clone 249356 (TRBV7-3, TRBJ2-1)
CASSFINNEQFF

SEQ ID NO: 498713 - protein, 14 aa, Homo sapiens
  CDR3 for alpha chain variable domain of TCR clone 249357 (TRAV20, TRAJ42)
CAVQAGGSQGNLIF

SEQ ID NO: 498714 - protein, 15 aa, Homo sapiens
  CDR3 for beta chain variable domain of TCR clone 249357 (TRBV4-2, TRBJ2-7)
CASSQVDRSSYEQYF

SEQ ID NO: 498715 - protein, 14 aa, Homo sapiens
  CDR3 for alpha chain variable domain of TCR clone 249358 (TRAV29/DV5, TRAJ36)
CAARRKTGANSLFF

SEQ ID NO: 498716 - protein, 14 aa, Homo sapiens
  CDR3 for beta chain variable domain of TCR clone 249358 (TRBV29-1, TRBJ2-5)
CSVETSGSGETQYF

SEQ ID NO: 498717 - protein, 14 aa, Homo sapiens
  CDR3 for alpha chain variable domain of TCR clone 249359 (TRAV12-3, TRAJ10)
SHLPLTGGGNKLTF

SEQ ID NO: 498718 - protein, 15 aa, Homo sapiens
  CDR3 for beta chain variable domain of TCR clone 249359 (TRBV6-6, TRBJ1-5)
CVSSSIQGTNQPQHF

SEQ ID NO: 498719 - protein, 11 aa, Homo sapiens
  CDR3 for alpha chain variable domain of TCR clone 249360 (TRAV24, TRAJ34)
CAPREHRQPHL

SEQ ID NO: 498720 - protein, 18 aa, Homo sapiens
  CDR3 for beta chain variable domain of TCR clone 249360 (TRBV3-1, TRBJ2-1)
CASSSVLTSGGSTVEQFF

SEQ ID NO: 498721 - protein, 14 aa, Homo sapiens
  CDR3 for alpha chain variable domain of TCR clone 249361 (TRAV23/DV6, TRAJ37)
CAASTSSNTGQLIF

SEQ ID NO: 498722 - protein, 12 aa, Homo sapiens
  CDR3 for beta chain variable domain of TCR clone 249361 (TRBV11-2, TRBJ2-2)
CASSLGGGELFF

SEQ ID NO: 498723 - protein, 15 aa, Homo sapiens
  CDR3 for alpha chain variable domain of TCR clone 249362 (TRAV3, TRAJ4)
CAVRDGTGGYNKLIF

SEQ ID NO: 498724 - protein, 14 aa, Homo sapiens
  CDR3 for beta chain variable domain of TCR clone 249362 (TRBV11-2, TRBJ1-2)
CASSLGTANYGYTF

SEQ ID NO: 498725 - protein, 14 aa, Homo sapiens
  CDR3 for alpha chain variable domain of TCR clone 249363 (TRAV2, TRAJ9)
CAVEDRSGGFKTIF

SEQ ID NO: 498726 - protein, 16 aa, Homo sapiens
  CDR3 for beta chain variable domain of TCR clone 249363 (TRBV7-3, TRBJ2-2)
CASSLKRETLSGELFF

SEQ ID NO: 498727 - protein, 12 aa, Homo sapiens
  CDR3 for alpha chain variable domain of TCR clone 249364 (TRAV12-3, TRAJ17)
CAMTLTGNKLTF

SEQ ID NO: 498728 - protein, 15 aa, Homo sapiens
  CDR3 for beta chain variable domain of TCR clone 249364 (TRBV7-9, TRBJ1-2)
CASSLKQNYGYTLVR

SEQ ID NO: 498729 - protein, 15 aa, Homo sapiens
  CDR3 for alpha chain variable domain of TCR clone 249365 (TRAV26-1, TRAJ29)
CIVRVEGSGNTPLVF

SEQ ID NO: 498730 - protein, 15 aa, Homo sapiens
  CDR3 for beta chain variable domain of TCR clone 249365 (TRBV12-4, TRBJ1-1)
CQQQDRVVANTEAFC

SEQ ID NO: 498731 - protein, 14 aa, Homo sapiens
  CDR3 for alpha chain variable domain of TCR clone 249366 (TRAV8-1, TRAJ39)
CAVNDNNVGNMLTF

SEQ ID NO: 498732 - protein, 13 aa, Homo sapiens
  CDR3 for beta chain variable domain of TCR clone 249366 (TRBV19, TRBJ2-7)
CASRKAGGSEQYF

SEQ ID NO: 498733 - protein, 14 aa, Homo sapiens
  CDR3 for alpha chain variable domain of TCR clone 249367 (TRAV26-1, TRAJ38)
CIADNAGNNRKLIL

SEQ ID NO: 498734 - protein, 13 aa, Homo sapiens
  CDR3 for beta chain variable domain of TCR clone 249367 (TRBV20-1, TRBJ1-1)
CGARGGGNTEAFF

SEQ ID NO: 498735 - protein, 13 aa, Homo sapiens
  CDR3 for alpha chain variable domain of TCR clone 249368 (TRAV8-4, TRAJ48)
CAVSLFGNEKLTF

SEQ ID NO: 498736 - protein, 15 aa, Homo sapiens
  CDR3 for beta chain variable domain of TCR clone 249368 (TRBV20-1, TRBJ2-7)
CSARKGLAESDEQYF

SEQ ID NO: 498737 - protein, 14 aa, Homo sapiens
  CDR3 for alpha chain variable domain of TCR clone 249369 (TRAV2, TRAJ9)
CAVDPNTGGFKTIV

SEQ ID NO: 498738 - protein, 14 aa, Homo sapiens
  CDR3 for beta chain variable domain of TCR clone 249369 (TRBV7-2, TRBJ2-7)
CASSPKTSFYEQYF

SEQ ID NO: 498739 - protein, 15 aa, Homo sapiens
  CDR3 for alpha chain variable domain of TCR clone 249370 (TRAV3, TRAJ3)
CAVRDRRSSASKIIF

SEQ ID NO: 498740 - protein, 17 aa, Homo sapiens
  CDR3 for beta chain variable domain of TCR clone 249370 (TRBV7-8, TRBJ2-6)
CASSAGTGGAGANVLTF

SEQ ID NO: 498741 - protein, 17 aa, Homo sapiens
  CDR3 for alpha chain variable domain of TCR clone 249371 (TRAV26-1, TRAJ58)
CIVRAGAEETSGSRLTF

SEQ ID NO: 498742 - protein, 18 aa, Homo sapiens
  CDR3 for beta chain variable domain of TCR clone 249371 (TRBV7-9, TRBJ2-7)
CASSLTTSGSRTWYEQYF

SEQ ID NO: 498743 - protein, 14 aa, Homo sapiens
  CDR3 for alpha chain variable domain of TCR clone 249372 (TRAV1-2, TRAJ13)
CAVLNSGGYEKVTF

SEQ ID NO: 498744 - protein, 14 aa, Homo sapiens
  CDR3 for beta chain variable domain of TCR clone 249372 (TRBV12-4, TRBJ1-1)
CASSLNDMNTEAFF

SEQ ID NO: 498745 - protein, 13 aa, Homo sapiens
  CDR3 for alpha chain variable domain of TCR clone 249373 (TRAV27, TRAJ41)
CAGEGNSGYALNC

SEQ ID NO: 498746 - protein, 14 aa, Homo sapiens
  CDR3 for beta chain variable domain of TCR clone 249373 (TRBV25-1, TRBJ1-1)
CASTHLGGNTEAFF

SEQ ID NO: 498747 - protein, 18 aa, Homo sapiens
  CDR3 for alpha chain variable domain of TCR clone 249374 (TRAV12-3, TRAJ52)
CAMSRTNAGGTSYGKLTF

SEQ ID NO: 498748 - protein, 15 aa, Homo sapiens
  CDR3 for beta chain variable domain of TCR clone 249374 (TRBV11-2, TRBJ2-2)
CASSSDRVNAGELFF

SEQ ID NO: 498749 - protein, 17 aa, Homo sapiens
  CDR3 for alpha chain variable domain of TCR clone 249375 (TRAV13-1, TRAJ52)
CAEGRNAGGTSYGKLTF

SEQ ID NO: 498750 - protein, 13 aa, Homo sapiens
  CDR3 for beta chain variable domain of TCR clone 249375 (TRBV7-2, TRBJ1-1)
CASNLKGAKVAFF

SEQ ID NO: 498751 - protein, 12 aa, Homo sapiens
  CDR3 for alpha chain variable domain of TCR clone 249376 (TRAV27, TRAJ9)
CAGESGGFKTIF

SEQ ID NO: 498752 - protein, 14 aa, Homo sapiens
  CDR3 for beta chain variable domain of TCR clone 249376 (TRBV6-1, TRBJ2-1)
CASSKDGFYNEQFF

SEQ ID NO: 498753 - protein, 11 aa, Homo sapiens
  CDR3 for alpha chain variable domain of TCR clone 249377 (TRAV4, TRAJ31)
CLVGDNARLMF

SEQ ID NO: 498754 - protein, 16 aa, Homo sapiens
  CDR3 for beta chain variable domain of TCR clone 249377 (TRBV7-2, TRBJ2-5)
CASSSKWLSGQETHYF

SEQ ID NO: 498755 - protein, 13 aa, Homo sapiens
  CDR3 for alpha chain variable domain of TCR clone 249378 (TRAV4, TRAJ28)
CLFIWGWELPTHF

SEQ ID NO: 498756 - protein, 16 aa, Homo sapiens
  CDR3 for beta chain variable domain of TCR clone 249378 (TRBV20-1, TRBJ2-4)
CSATSLAELAKNMQYF

SEQ ID NO: 498757 - protein, 14 aa, Homo sapiens
  CDR3 for alpha chain variable domain of TCR clone 249379 (TRAV16, TRAJ37)
CALDISGNTGKLIF

SEQ ID NO: 498758 - protein, 14 aa, Homo sapiens
  CDR3 for beta chain variable domain of TCR clone 249379 (TRBV7-6, TRBJ2-7)
CVSSFRQGADEQYF

SEQ ID NO: 498759 - protein, 17 aa, Homo sapiens
  CDR3 for alpha chain variable domain of TCR clone 249380 (TRAV8-6, TRAJ8)
CAVKEGIENTGFQKLVC

SEQ ID NO: 498760 - protein, 12 aa, Homo sapiens
  CDR3 for beta chain variable domain of TCR clone 249380 (TRBV19, TRBJ1-4)
CASKDWPGGLFF

SEQ ID NO: 498761 - protein, 16 aa, Homo sapiens
  CDR3 for alpha chain variable domain of TCR clone 249381 (TRAV12-2, TRAJ28)
CAVITDSGAGSYQLTF

SEQ ID NO: 498762 - protein, 12 aa, Homo sapiens
  CDR3 for beta chain variable domain of TCR clone 249381 (TRBV28, TRBJ2-6)
CAIQAGANVLTF

SEQ ID NO: 498763 - protein, 13 aa, Homo sapiens
  CDR3 for alpha chain variable domain of TCR clone 249382 (TRAV6, TRAJ23)
CALDQNQGGKLIF

SEQ ID NO: 498764 - protein, 15 aa, Homo sapiens
  CDR3 for beta chain variable domain of TCR clone 249382 (TRBV28, TRBJ1-2)
CASSGSEQRAFGYTF

SEQ ID NO: 498765 - protein, 21 aa, Homo sapiens
  CDR3 for alpha chain variable domain of TCR clone 249383 (TRAV4, TRAJ39)
CCVLLPRGGAAGGNAGNMLTF

SEQ ID NO: 498766 - protein, 16 aa, Homo sapiens
  CDR3 for beta chain variable domain of TCR clone 249383 (TRBV7-6, TRBJ2-7)
CASSGGTGSLSYEQYF

SEQ ID NO: 498767 - protein, 17 aa, Homo sapiens
  CDR3 for alpha chain variable domain of TCR clone 249384 (TRAV8-6, TRAJ58)
CAVSSWVGETSGSRLTF

SEQ ID NO: 498768 - protein, 16 aa, Homo sapiens
  CDR3 for beta chain variable domain of TCR clone 249384 (TRBV19, TRBJ2-2)
CASRSPGTGATGELFF

SEQ ID NO: 498769 - protein, 13 aa, Homo sapiens
  CDR3 for alpha chain variable domain of TCR clone 249385 (TRAV2, TRAJ40)
CAVVTSGTYKYIF

SEQ ID NO: 498770 - protein, 13 aa, Homo sapiens
  CDR3 for beta chain variable domain of TCR clone 249385 (TRBV5-1, TRBJ2-1)
CASSLGSYNEQFF

SEQ ID NO: 498771 - protein, 15 aa, Homo sapiens
  CDR3 for alpha chain variable domain of TCR clone 249386 (TRAV12-1, TRAJ44)
CLVDEYTGTASKLTF

SEQ ID NO: 498772 - protein, 14 aa, Homo sapiens
  CDR3 for beta chain variable domain of TCR clone 249386 (TRBV5-1, TRBJ1-2)
CASSLEPVNYGYTF

SEQ ID NO: 498773 - protein, 14 aa, Homo sapiens
  CDR3 for alpha chain variable domain of TCR clone 249387 (TRAV4, TRAJ20)
CLVGRRSNDYKLSF

SEQ ID NO: 498774 - protein, 18 aa, Homo sapiens
  CDR3 for beta chain variable domain of TCR clone 249387 (TRBV2, TRBJ2-5)
CASSGDPKGRGAQETQYF

SEQ ID NO: 498775 - protein, 14 aa, Homo sapiens
  CDR3 for alpha chain variable domain of TCR clone 249388 (TRAV2, TRAJ9)
CAVEDRSGGFKTIF

SEQ ID NO: 498776 - protein, 13 aa, Homo sapiens
  CDR3 for beta chain variable domain of TCR clone 249388 (TRBV11-3, TRBJ2-7)
CASSLDKLYEQYF

SEQ ID NO: 498777 - protein, 15 aa, Homo sapiens
  CDR3 for alpha chain variable domain of TCR clone 249389 (TRAV12-3, TRAJ11)
CAMSEENSGYSNLTF

SEQ ID NO: 498778 - protein, 13 aa, Homo sapiens
  CDR3 for beta chain variable domain of TCR clone 249389 (TRBV7-9, TRBJ2-7)
CASSFVGAYEQYF

SEQ ID NO: 498779 - protein, 12 aa, Homo sapiens
  CDR3 for alpha chain variable domain of TCR clone 249390 (TRAV29/DV5, TRAJ48)
CAANEPNEKLTF

SEQ ID NO: 498780 - protein, 14 aa, Homo sapiens
  CDR3 for beta chain variable domain of TCR clone 249390 (TRBV5-7, TRBJ2-7)
CASSFKGATGEQYF

SEQ ID NO: 498781 - protein, 13 aa, Homo sapiens
  CDR3 for alpha chain variable domain of TCR clone 249391 (TRAV1-2, TRAJ9)
CAVLNTGGFKTIF

SEQ ID NO: 498782 - protein, 14 aa, Homo sapiens
  CDR3 for beta chain variable domain of TCR clone 249391 (TRBV5-1, TRBJ2-2)
CVSSLGGGSGELFF

SEQ ID NO: 498783 - protein, 17 aa, Homo sapiens
  CDR3 for alpha chain variable domain of TCR clone 249392 (TRAV27, TRAJ45)
ASTSVQELRRRSDGLTF

SEQ ID NO: 498784 - protein, 17 aa, Homo sapiens
  CDR3 for beta chain variable domain of TCR clone 249392 (TRBV11-2, TRBJ2-1)
CASSLYPPGVEYNEQFF

SEQ ID NO: 498785 - protein, 14 aa, Homo sapiens
  CDR3 for alpha chain variable domain of TCR clone 249393 (TRAV3, TRAJ6)
CAVSDWGGSYIPTF

SEQ ID NO: 498786 - protein, 15 aa, Homo sapiens
  CDR3 for beta chain variable domain of TCR clone 249393 (TRBV5-1, TRBJ2-1)
CASSPPRAPYNEQFF

SEQ ID NO: 498787 - protein, 14 aa, Homo sapiens
  CDR3 for alpha chain variable domain of TCR clone 249394 (TRAV12-2, TRAJ13)
CAVKKTGGYQKVTF

SEQ ID NO: 498788 - protein, 16 aa, Homo sapiens
  CDR3 for beta chain variable domain of TCR clone 249394 (TRBV12-4, TRBJ2-5)
CASSFSVRGRQETQYF

SEQ ID NO: 498789 - protein, 12 aa, Homo sapiens
  CDR3 for alpha chain variable domain of TCR clone 249395 (TRAV8-3, TRAJ26)
CAGDNYGQNFVF

SEQ ID NO: 498790 - protein, 12 aa, Homo sapiens
  CDR3 for beta chain variable domain of TCR clone 249395 (TRBV6-5, TRBJ2-2)
CASRQITGELFV

SEQ ID NO: 498791 - protein, 11 aa, Homo sapiens
  CDR3 for alpha chain variable domain of TCR clone 249396 (TRAV21, TRAJ34)
CAHYNTDKLIF

SEQ ID NO: 498792 - protein, 16 aa, Homo sapiens
  CDR3 for beta chain variable domain of TCR clone 249396 (TRBV10-2, TRBJ1-1)
CASSEFGGGASTEAFF

SEQ ID NO: 498793 - protein, 13 aa, Homo sapiens
  CDR3 for alpha chain variable domain of TCR clone 249397 (TRAV17, TRAJ26)
CATVDNYVQNFVF

SEQ ID NO: 498794 - protein, 16 aa, Homo sapiens
  CDR3 for beta chain variable domain of TCR clone 249397 (TRBV2, TRBJ2-1)
CANSVGGSPSYNEQFF

SEQ ID NO: 498795 - protein, 13 aa, Homo sapiens
  CDR3 for alpha chain variable domain of TCR clone 249398 (TRAV8-3, TRAJ44)
CAVVPGTASKLTF

SEQ ID NO: 498796 - protein, 14 aa, Homo sapiens
  CDR3 for beta chain variable domain of TCR clone 249398 (TRBV18, TRBJ2-5)
CASSPGVSQETQYF

SEQ ID NO: 498797 - protein, 13 aa, Homo sapiens
  CDR3 for alpha chain variable domain of TCR clone 249399 (TRAV23/DV6, TRAJ15)
CAALPAGRNCSDL

SEQ ID NO: 498798 - protein, 11 aa, Homo sapiens
  CDR3 for beta chain variable domain of TCR clone 249399 (TRBV7-9, TRBJ1-2)
CASSRQGLTMA

SEQ ID NO: 498799 - protein, 14 aa, Homo sapiens
  CDR3 for alpha chain variable domain of TCR clone 249400 (TRAV12-2, TRAJ13)
CAVKKTGGYRKVTF

SEQ ID NO: 498800 - protein, 15 aa, Homo sapiens
  CDR3 for beta chain variable domain of TCR clone 249400 (TRBV27, TRBJ2-1)
CASSNGGGSPNEQFF

SEQ ID NO: 498801 - protein, 14 aa, Homo sapiens
  CDR3 for alpha chain variable domain of TCR clone 249401 (TRAV26-1, TRAJ5)
CIVRVRFNRRALTF

SEQ ID NO: 498802 - protein, 17 aa, Homo sapiens
  CDR3 for beta chain variable domain of TCR clone 249401 (TRBV29-1, TRBJ2-3)
CSVEVLAGETSTDTRYF

SEQ ID NO: 498803 - protein, 13 aa, Homo sapiens
  CDR3 for alpha chain variable domain of TCR clone 249402 (TRAV8-6, TRAJ21)
CAVSPSSLNKFYF

SEQ ID NO: 498804 - protein, 16 aa, Homo sapiens
  CDR3 for beta chain variable domain of TCR clone 249402 (TRBV19, TRBJ2-2)
CASRSPGTGATGELFF

SEQ ID NO: 498805 - protein, 17 aa, Homo sapiens
  CDR3 for alpha chain variable domain of TCR clone 249403 (TRAV12-3, TRAJ52)
CALENNAGGTSYGKLTF

SEQ ID NO: 498806 - protein, 12 aa, Homo sapiens
  CDR3 for beta chain variable domain of TCR clone 249403 (TRBV29-1, TRBJ2-3)
CSVTGGADTQYF

SEQ ID NO: 498807 - protein, 16 aa, Homo sapiens
  CDR3 for alpha chain variable domain of TCR clone 249404 (TRAV12-3, TRAJ18)
CAMRGSRGSTLGRPYF

SEQ ID NO: 498808 - protein, 19 aa, Homo sapiens
  CDR3 for beta chain variable domain of TCR clone 249404 (TRBV6-3, TRBJ2-7)
CASSYRTGLAGGVSGEQYF

SEQ ID NO: 498809 - protein, 16 aa, Homo sapiens
  CDR3 for alpha chain variable domain of TCR clone 249405 (TRAV35, TRAJ42)
GRMERYYGGSEGNLTF

SEQ ID NO: 498810 - protein, 15 aa, Homo sapiens
  CDR3 for beta chain variable domain of TCR clone 249405 (TRBV6-1, TRBJ2-7)
CASSDWDKPNYEQYF

SEQ ID NO: 498811 - protein, 13 aa, Homo sapiens
  CDR3 for alpha chain variable domain of TCR clone 249406 (TRAV21, TRAJ10)
CAIPTRGGNKLTF

SEQ ID NO: 498812 - protein, 22 aa, Homo sapiens
  CDR3 for beta chain variable domain of TCR clone 249406 (TRBV19, TRBJ2-1)
CASSVRDRVTGTSGRIYNEQFF

SEQ ID NO: 498813 - protein, 17 aa, Homo sapiens
  CDR3 for alpha chain variable domain of TCR clone 249407 (TRAV3, TRAJ6)
CAVRDGPRAGGSYIPTF

SEQ ID NO: 498814 - protein, 14 aa, Homo sapiens
  CDR3 for beta chain variable domain of TCR clone 249407 (TRBV7-2, TRBJ2-7)
CASSPKTSCYEQYF

SEQ ID NO: 498815 - protein, 15 aa, Homo sapiens
  CDR3 for alpha chain variable domain of TCR clone 249408 (TRAV26-1, TRAJ44)
CIARVPFGTASELTF

SEQ ID NO: 498816 - protein, 15 aa, Homo sapiens
  CDR3 for beta chain variable domain of TCR clone 249408 (TRBV20-1, TRBJ1-1)
CSASRGVTGNTEAFF

SEQ ID NO: 498817 - protein, 15 aa, Homo sapiens
  CDR3 for alpha chain variable domain of TCR clone 249409 (TRAV26-1, TRAJ29)
CIVRVEGSGNTPLVF

SEQ ID NO: 498818 - protein, 16 aa, Homo sapiens
  CDR3 for beta chain variable domain of TCR clone 249409 (TRBV19, TRBJ2-2)
CASRSPGTGATGELCF

SEQ ID NO: 498819 - protein, 14 aa, Homo sapiens
  CDR3 for alpha chain variable domain of TCR clone 249410 (TRAV12-2, TRAJ13)
CAVNPSGGDQKVTF

SEQ ID NO: 498820 - protein, 14 aa, Homo sapiens
  CDR3 for beta chain variable domain of TCR clone 249410 (TRBV12-4, TRBJ1-1)
CASSLGTGGTEAFF

SEQ ID NO: 498821 - protein, 14 aa, Homo sapiens
  CDR3 for alpha chain variable domain of TCR clone 249411 (TRAV21, TRAJ35)
CAVMPIGLGNLLHC

SEQ ID NO: 498822 - protein, 12 aa, Homo sapiens
  CDR3 for beta chain variable domain of TCR clone 249411 (TRBV7-9, TRBJ2-7)
CASSIKREEQYF

SEQ ID NO: 498823 - protein, 14 aa, Homo sapiens
  CDR3 for alpha chain variable domain of TCR clone 249412 (TRAV12-2, TRAJ13)
WAVKKTGGYQKVTF

SEQ ID NO: 498824 - protein, 14 aa, Homo sapiens
  CDR3 for beta chain variable domain of TCR clone 249412 (TRBV7-2, TRBJ2-7)
CASSPKTSFYEQYF

SEQ ID NO: 498825 - protein, 13 aa, Homo sapiens
  CDR3 for alpha chain variable domain of TCR clone 249413 (TRAV20, TRAJ34)
CAVSSYNTDKLIF

SEQ ID NO: 498826 - protein, 15 aa, Homo sapiens
  CDR3 for beta chain variable domain of TCR clone 249413 (TRBV20-1, TRBJ1-2)
CSAAGEGARIYCYTF

SEQ ID NO: 498827 - protein, 16 aa, Homo sapiens
  CDR3 for alpha chain variable domain of TCR clone 249414 (TRAV26-2, TRAJ45)
CTTASTIGGGADGLTF

SEQ ID NO: 498828 - protein, 20 aa, Homo sapiens
  CDR3 for beta chain variable domain of TCR clone 249414 (TRBV28, TRBJ2-1)
CASTPIGRSTGLAGGNEQFF

SEQ ID NO: 498829 - protein, 13 aa, Homo sapiens
  CDR3 for alpha chain variable domain of TCR clone 249415 (TRAV23/DV6, TRAJ45)
CAARTGGADGLTF

SEQ ID NO: 498830 - protein, 14 aa, Homo sapiens
  CDR3 for beta chain variable domain of TCR clone 249415 (TRBV7-2, TRBJ2-3)
CASSLARGTDTQYF

SEQ ID NO: 498831 - protein, 15 aa, Homo sapiens
  CDR3 for alpha chain variable domain of TCR clone 249416 (TRAV17, TRAJ56)
CATEPFTGANSKLTF

SEQ ID NO: 498832 - protein, 14 aa, Homo sapiens
  CDR3 for beta chain variable domain of TCR clone 249416 (TRBV2, TRBJ2-7)
CAGSLTSGGYEQYF

SEQ ID NO: 498833 - protein, 22 aa, Homo sapiens
  CDR3 for alpha chain variable domain of TCR clone 249417 (TRAV25, TRAJ35)
CARRMEGFGNVLHCGSGTPVIF

SEQ ID NO: 498834 - protein, 13 aa, Homo sapiens
  CDR3 for beta chain variable domain of TCR clone 249417 (TRBV7-2, TRBJ1-4)
CASSLAGLEKLFF

SEQ ID NO: 498835 - protein, 13 aa, Homo sapiens
  CDR3 for alpha chain variable domain of TCR clone 249418 (TRAV12-3, TRAJ33)
CAMSVNSNYQLIW

SEQ ID NO: 498836 - protein, 16 aa, Homo sapiens
  CDR3 for beta chain variable domain of TCR clone 249418 (TRBV4-2, TRBJ1-1)
CASSPSPGRAAPEAFF

SEQ ID NO: 498837 - protein, 14 aa, Homo sapiens
  CDR3 for alpha chain variable domain of TCR clone 249419 (TRAV1-2, TRAJ16)
CAVNRFSDGQKLLF

SEQ ID NO: 498838 - protein, 15 aa, Homo sapiens
  CDR3 for beta chain variable domain of TCR clone 249419 (TRBV20-1, TRBJ1-5)
CSAFKNGQGNQPQHF

SEQ ID NO: 498839 - protein, 19 aa, Homo sapiens
  CDR3 for alpha chain variable domain of TCR clone 249420 (TRAV26-1, TRAJ52)
CIVRAHRNAGGTSYGKLPF

SEQ ID NO: 498840 - protein, 13 aa, Homo sapiens
  CDR3 for beta chain variable domain of TCR clone 249420 (TRBV20-1, TRBJ1-6)
CSAPLGVGSPLHF

SEQ ID NO: 498841 - protein, 16 aa, Homo sapiens
  CDR3 for alpha chain variable domain of TCR clone 249421 (TRAV26-1, TRAJ48)
CIFRVGANFGNEKLTF

SEQ ID NO: 498842 - protein, 13 aa, Homo sapiens
  CDR3 for beta chain variable domain of TCR clone 249421 (TRBV12-4, TRBJ1-5)
CASSPDRAQPQHF

SEQ ID NO: 498843 - protein, 13 aa, Homo sapiens
  CDR3 for alpha chain variable domain of TCR clone 249422 (TRAV2, TRAJ29)
CDEQNSGNTPLVF

SEQ ID NO: 498844 - protein, 13 aa, Homo sapiens
  CDR3 for beta chain variable domain of TCR clone 249422 (TRBV28, TRBJ1-2)
CASSPGSRNGYTF

SEQ ID NO: 498845 - protein, 11 aa, Homo sapiens
  CDR3 for alpha chain variable domain of TCR clone 249423 (TRAV21, TRAJ7)
CAAYGNNRLAF

SEQ ID NO: 498846 - protein, 14 aa, Homo sapiens
  CDR3 for beta chain variable domain of TCR clone 249423 (TRBV4-1, TRBJ2-7)
CASSPTGVAFEQYF

SEQ ID NO: 498847 - protein, 15 aa, Homo sapiens
  CDR3 for alpha chain variable domain of TCR clone 249424 (TRAV8-3, TRAJ45)
CASSYSGGGADGLTF

SEQ ID NO: 498848 - protein, 18 aa, Homo sapiens
  CDR3 for beta chain variable domain of TCR clone 249424 (TRBV18, TRBJ1-3)
CASSPRGGAGAAGNTIYF

SEQ ID NO: 498849 - protein, 13 aa, Homo sapiens
  CDR3 for alpha chain variable domain of TCR clone 249425 (TRAV12-2, TRAJ20)
CAVHPSNDYKLSF

SEQ ID NO: 498850 - protein, 20 aa, Homo sapiens
  CDR3 for beta chain variable domain of TCR clone 249425 (TRBV27, TRBJ2-5)
CASSLYPRGGRDPVLRARHA

SEQ ID NO: 498851 - protein, 13 aa, Homo sapiens
  CDR3 for alpha chain variable domain of TCR clone 249426 (TRAV39, TRAJ17)
CAAQFTAGNKLTF

SEQ ID NO: 498852 - protein, 12 aa, Homo sapiens
  CDR3 for beta chain variable domain of TCR clone 249426 (TRBV5-1, TRBJ1-2)
CASSLDSYGYTF

SEQ ID NO: 498853 - protein, 13 aa, Homo sapiens
  CDR3 for alpha chain variable domain of TCR clone 249427 (TRAV23/DV6, TRAJ27)
CAASKPMQANQPM

SEQ ID NO: 498854 - protein, 14 aa, Homo sapiens
  CDR3 for beta chain variable domain of TCR clone 249427 (TRBV5-4, TRBJ1-1)
CASSLDSRRDEAFF

SEQ ID NO: 498855 - protein, 14 aa, Homo sapiens
  CDR3 for alpha chain variable domain of TCR clone 249428 (TRAV17, TRAJ57)
CATDPQGGSEKLVF

SEQ ID NO: 498856 - protein, 17 aa, Homo sapiens
  CDR3 for beta chain variable domain of TCR clone 249428 (TRBV11-2, TRBJ2-1)
CASSLYPPGVEYNEQFL

SEQ ID NO: 498857 - protein, 14 aa, Homo sapiens
  CDR3 for alpha chain variable domain of TCR clone 249429 (TRAV1-2, TRAJ6)
CAVSLSGGSYIPTF

SEQ ID NO: 498858 - protein, 15 aa, Homo sapiens
  CDR3 for beta chain variable domain of TCR clone 249429 (TRBV28, TRBJ2-7)
CASSPGGRGFCEQYF

SEQ ID NO: 498859 - protein, 14 aa, Homo sapiens
  CDR3 for alpha chain variable domain of TCR clone 249430 (TRAV17, TRAJ37)
CATDAFSNTGKLIF

SEQ ID NO: 498860 - protein, 14 aa, Homo sapiens
  CDR3 for beta chain variable domain of TCR clone 249430 (TRBV7-9, TRBJ2-1)
CASSPRDSLYEQFF

SEQ ID NO: 498861 - protein, 14 aa, Homo sapiens
  CDR3 for alpha chain variable domain of TCR clone 249431 (TRAV26-1, TRAJ45)
CIEVTGGGAHGLTF

SEQ ID NO: 498862 - protein, 15 aa, Homo sapiens
  CDR3 for beta chain variable domain of TCR clone 249431 (TRBV9, TRBJ2-1)
CASSLAGSSYNEQFF

SEQ ID NO: 498863 - protein, 13 aa, Homo sapiens
  CDR3 for alpha chain variable domain of TCR clone 249432 (TRAV2, TRAJ40)
CAVVTSGTYKYIF

SEQ ID NO: 498864 - protein, 16 aa, Homo sapiens
  CDR3 for beta chain variable domain of TCR clone 249432 (TRBV7-6, TRBJ1-6)
CASSLSSRIGDSPLHF

SEQ ID NO: 498865 - protein, 13 aa, Homo sapiens
  CDR3 for alpha chain variable domain of TCR clone 249433 (TRAV17, TRAJ9)
CATDYTGGCKTIF

SEQ ID NO: 498866 - protein, 14 aa, Homo sapiens
  CDR3 for beta chain variable domain of TCR clone 249433 (TRBV19, TRBJ2-5)
CASSMTGQQETQYF

SEQ ID NO: 498867 - protein, 14 aa, Homo sapiens
  CDR3 for alpha chain variable domain of TCR clone 249434 (TRAV12-2, TRAJ24)
CAVTPADSWGKLQF

SEQ ID NO: 498868 - protein, 13 aa, Homo sapiens
  CDR3 for beta chain variable domain of TCR clone 249434 (TRBV6-4, TRBJ1-5)
CASSADLNQTQHF

SEQ ID NO: 498869 - protein, 15 aa, Homo sapiens
  CDR3 for alpha chain variable domain of TCR clone 249435 (TRAV23/DV6, TRAJ13)
CAAWPGGGGYQKVTF

SEQ ID NO: 498870 - protein, 17 aa, Homo sapiens
  CDR3 for beta chain variable domain of TCR clone 249435 (TRBV19, TRBJ2-7)
CASSIAFYDSYPYEQYF

SEQ ID NO: 498871 - protein, 15 aa, Homo sapiens
  CDR3 for alpha chain variable domain of TCR clone 249436 (TRAV21, TRAJ53)
CATLNNGGSNYKLTF

SEQ ID NO: 498872 - protein, 16 aa, Homo sapiens
  CDR3 for beta chain variable domain of TCR clone 249436 (TRBV9, TRBJ2-1)
CASSVGGGGNYNEQFS

SEQ ID NO: 498873 - protein, 15 aa, Homo sapiens
  CDR3 for alpha chain variable domain of TCR clone 249437 (TRAV38-2/DV8, TRAJ26)
CAYRSRDSYGQNFVF

SEQ ID NO: 498874 - protein, 14 aa, Homo sapiens
  CDR3 for beta chain variable domain of TCR clone 249437 (TRBV29-1, TRBJ1-3)
CSVADRVVGNTIYF

SEQ ID NO: 498875 - protein, 11 aa, Homo sapiens
  CDR3 for alpha chain variable domain of TCR clone 249438 (TRAV2, TRAJ13)
CASGGYQKVTF

SEQ ID NO: 498876 - protein, 15 aa, Homo sapiens
  CDR3 for beta chain variable domain of TCR clone 249438 (TRBV19, TRBJ1-5)
CASSILTGENQPQHF

SEQ ID NO: 498877 - protein, 11 aa, Homo sapiens
  CDR3 for alpha chain variable domain of TCR clone 249439 (TRAV12-1, TRAJ33)
CVVNMNYQLIW

SEQ ID NO: 498878 - protein, 15 aa, Homo sapiens
  CDR3 for beta chain variable domain of TCR clone 249439 (TRBV20-1, TRBJ1-1)
CSASRGVTGNTEAFF

SEQ ID NO: 498879 - protein, 11 aa, Homo sapiens
  CDR3 for alpha chain variable domain of TCR clone 249440 (TRAV29/DV5, TRAJ47)
CTATYGNKLVF

SEQ ID NO: 498880 - protein, 17 aa, Homo sapiens
  CDR3 for beta chain variable domain of TCR clone 249440 (TRBV7-9, TRBJ2-1)
CASSLVASYPSYNEQFF

SEQ ID NO: 498881 - protein, 14 aa, Homo sapiens
  CDR3 for alpha chain variable domain of TCR clone 249441 (TRAV17, TRAJ31)
CATVLRNNNARLMF

SEQ ID NO: 498882 - protein, 14 aa, Homo sapiens
  CDR3 for beta chain variable domain of TCR clone 249441 (TRBV12-4, TRBJ2-5)
CASSLWRKQETQCF

SEQ ID NO: 498883 - protein, 12 aa, Homo sapiens
  CDR3 for alpha chain variable domain of TCR clone 249442 (TRAV27, TRAJ35)
CAGADFGNVLHC

SEQ ID NO: 498884 - protein, 16 aa, Homo sapiens
  CDR3 for beta chain variable domain of TCR clone 249442 (TRBV6-1, TRBJ2-1)
CTSILRQGSSYNEQFF

SEQ ID NO: 498885 - protein, 18 aa, Homo sapiens
  CDR3 for alpha chain variable domain of TCR clone 249443 (TRAV21, TRAJ52)
CAVRPSPAGGTSYGKLTF

SEQ ID NO: 498886 - protein, 13 aa, Homo sapiens
  CDR3 for beta chain variable domain of TCR clone 249443 (TRBV4-1, TRBJ2-2)
CASSQENTGGLFF

SEQ ID NO: 498887 - protein, 23 aa, Homo sapiens
  CDR3 for alpha chain variable domain of TCR clone 249444 (TRAV26-1, TRAJ38)
CIADNAGNNHIQNPDPAAYQLRD

SEQ ID NO: 498888 - protein, 16 aa, Homo sapiens
  CDR3 for beta chain variable domain of TCR clone 249444 (TRBV7-9, TRBJ1-2)
CASSLGFSSGEDGYTF

SEQ ID NO: 498889 - protein, 18 aa, Homo sapiens
  CDR3 for alpha chain variable domain of TCR clone 249445 (TRAV21, TRAJ52)
CAVRPSPAGGTSDGKLTF

SEQ ID NO: 498890 - protein, 13 aa, Homo sapiens
  CDR3 for beta chain variable domain of TCR clone 249445 (TRBV28, TRBJ2-1)
CASRSGGLNEQFF

SEQ ID NO: 498891 - protein, 11 aa, Homo sapiens
  CDR3 for alpha chain variable domain of TCR clone 249446 (TRAV39, TRAJ26)
CAVDLMRHFVF

SEQ ID NO: 498892 - protein, 14 aa, Homo sapiens
  CDR3 for beta chain variable domain of TCR clone 249446 (TRBV7-6, TRBJ2-3)
CASSLGTVTDTQYF

SEQ ID NO: 498893 - protein, 13 aa, Homo sapiens
  CDR3 for alpha chain variable domain of TCR clone 249447 (TRAV3, TRAJ34)
CAVRAGGTDKLIF

SEQ ID NO: 498894 - protein, 13 aa, Homo sapiens
  CDR3 for beta chain variable domain of TCR clone 249447 (TRBV2, TRBJ1-1)
CASSVSGYTEAFF

SEQ ID NO: 498895 - protein, 14 aa, Homo sapiens
  CDR3 for alpha chain variable domain of TCR clone 249448 (TRAV1-2, TRAJ6)
CAVSLSGGSYIPTF

SEQ ID NO: 498896 - protein, 15 aa, Homo sapiens
  CDR3 for beta chain variable domain of TCR clone 249448 (TRBV28, TRBJ2-7)
CASSPGCRGFYEQYF

SEQ ID NO: 498897 - protein, 10 aa, Homo sapiens
  CDR3 for alpha chain variable domain of TCR clone 249449 (TRAV23/DV6, TRAJ57)
CAASSTLSQS

SEQ ID NO: 498898 - protein, 14 aa, Homo sapiens
  CDR3 for beta chain variable domain of TCR clone 249449 (TRBV25-1, TRBJ1-1)
CASTHLGGNTEAFC

SEQ ID NO: 498899 - protein, 12 aa, Homo sapiens
  CDR3 for alpha chain variable domain of TCR clone 249450 (TRAV12-3, TRAJ17)
CAMTLTGNKLNS

SEQ ID NO: 498900 - protein, 15 aa, Homo sapiens
  CDR3 for beta chain variable domain of TCR clone 249450 (TRBV20-1, TRBJ2-7)
CSARDRVSGMDEQYF

SEQ ID NO: 498901 - protein, 15 aa, Homo sapiens
  CDR3 for alpha chain variable domain of TCR clone 249451 (TRAV17, TRAJ57)
CATGPSQGGSEKLVF

SEQ ID NO: 498902 - protein, 18 aa, Homo sapiens
  CDR3 for beta chain variable domain of TCR clone 249451 (TRBV7-9, TRBJ2-7)
CASSLTTSVSRTWYEQYF

SEQ ID NO: 498903 - protein, 18 aa, Homo sapiens
  CDR3 for alpha chain variable domain of TCR clone 249452 (TRAV26-1, TRAJ52)
CIVRVAGAGGTSYGKLTF

SEQ ID NO: 498904 - protein, 15 aa, Homo sapiens
  CDR3 for beta chain variable domain of TCR clone 249452 (TRBV7-9, TRBJ1-6)
CASSSPGRGNSTLHF

SEQ ID NO: 498905 - protein, 14 aa, Homo sapiens
  CDR3 for alpha chain variable domain of TCR clone 249453 (TRAV12-2, TRAJ17)
CAVLFKAAGNKLTF

SEQ ID NO: 498906 - protein, 19 aa, Homo sapiens
  CDR3 for beta chain variable domain of TCR clone 249453 (TRBV4-1, TRBJ2-1)
CASSQGPLPGLGSRNEQFF

SEQ ID NO: 498907 - protein, 14 aa, Homo sapiens
  CDR3 for alpha chain variable domain of TCR clone 249454 (TRAV1-2, TRAJ16)
CAVNRFSDGQKLLF

SEQ ID NO: 498908 - protein, 16 aa, Homo sapiens
  CDR3 for beta chain variable domain of TCR clone 249454 (TRBV20-1, TRBJ1-4)
SAVLRQGLLTNEKLFF

SEQ ID NO: 498909 - protein, 18 aa, Homo sapiens
  CDR3 for alpha chain variable domain of TCR clone 249455 (TRAV12-3, TRAJ52)
CAMSVGGAGGTSYGKLTC

SEQ ID NO: 498910 - protein, 15 aa, Homo sapiens
  CDR3 for beta chain variable domain of TCR clone 249455 (TRBV7-9, TRBJ1-4)
CASSARTGGNEKLFF

SEQ ID NO: 498911 - protein, 11 aa, Homo sapiens
  CDR3 for alpha chain variable domain of TCR clone 249456 (TRAV26-2, TRAJ30)
CILWRDDKIIF

SEQ ID NO: 498912 - protein, 13 aa, Homo sapiens
  CDR3 for beta chain variable domain of TCR clone 249456 (TRBV4-1, TRBJ2-2)
CASSQENTGELFF

SEQ ID NO: 498913 - protein, 13 aa, Homo sapiens
  CDR3 for alpha chain variable domain of TCR clone 249457 (TRAV12-1, TRAJ31)
CVVNFPHNARLMF

SEQ ID NO: 498914 - protein, 15 aa, Homo sapiens
  CDR3 for beta chain variable domain of TCR clone 249457 (TRBV28, TRBJ1-3)
CASSMGWASGNTIYF

SEQ ID NO: 498915 - protein, 12 aa, Homo sapiens
  CDR3 for alpha chain variable domain of TCR clone 249458 (TRAV8-3, TRAJ34)
CAVLTNTDKLIF

SEQ ID NO: 498916 - protein, 15 aa, Homo sapiens
  CDR3 for beta chain variable domain of TCR clone 249458 (TRBV7-2, TRBJ2-7)
CASSVGIGNDYEQYF

SEQ ID NO: 498917 - protein, 15 aa, Homo sapiens
  CDR3 for alpha chain variable domain of TCR clone 249459 (TRAV4, TRAJ42)
CLVGGYGGSQGNVIF

SEQ ID NO: 498918 - protein, 16 aa, Homo sapiens
  CDR3 for beta chain variable domain of TCR clone 249459 (TRBV27, TRBJ1-1)
CASSTRTGGVGTEAFF

SEQ ID NO: 498919 - protein, 18 aa, Homo sapiens
  CDR3 for alpha chain variable domain of TCR clone 249460 (TRAV12-3, TRAJ52)
RAMSVGGAGGTSYGNLTF

SEQ ID NO: 498920 - protein, 15 aa, Homo sapiens
  CDR3 for beta chain variable domain of TCR clone 249460 (TRBV27, TRBJ1-6)
CASSFDRGLGSPLHF

SEQ ID NO: 498921 - protein, 14 aa, Homo sapiens
  CDR3 for alpha chain variable domain of TCR clone 249461 (TRAV2, TRAJ37)
CAVDFTSNTGKLIF

SEQ ID NO: 498922 - protein, 15 aa, Homo sapiens
  CDR3 for beta chain variable domain of TCR clone 249461 (TRBV3-1, TRBJ2-2)
CASSQGSGTFGGLFF

SEQ ID NO: 498923 - protein, 13 aa, Homo sapiens
  CDR3 for alpha chain variable domain of TCR clone 249462 (TRAV21, TRAJ27)
CAARPGNAGKSTF

SEQ ID NO: 498924 - protein, 13 aa, Homo sapiens
  CDR3 for beta chain variable domain of TCR clone 249462 (TRBV14, TRBJ1-1)
CASSREFGTEAFF

SEQ ID NO: 498925 - protein, 14 aa, Homo sapiens
  CDR3 for alpha chain variable domain of TCR clone 249463 (TRAV1-2, TRAJ16)
CAVNRFSDGQKLLF

SEQ ID NO: 498926 - protein, 15 aa, Homo sapiens
  CDR3 for beta chain variable domain of TCR clone 249463 (TRBV14, TRBJ2-5)
CASSQGEAVQETQYF

SEQ ID NO: 498927 - protein, 18 aa, Homo sapiens
  CDR3 for alpha chain variable domain of TCR clone 249464 (TRAV12-3, TRAJ52)
CAMSRTNAGGTSSGKLTF

SEQ ID NO: 498928 - protein, 15 aa, Homo sapiens
  CDR3 for beta chain variable domain of TCR clone 249464 (TRBV19, TRBJ1-2)
CASSVGQVLNYGYTF

SEQ ID NO: 498929 - protein, 18 aa, Homo sapiens
  CDR3 for alpha chain variable domain of TCR clone 249465 (TRAV12-3, TRAJ52)
CAMSRTNAGGTSYGKLTF

SEQ ID NO: 498930 - protein, 17 aa, Homo sapiens
  CDR3 for beta chain variable domain of TCR clone 249465 (TRBV7-3, TRBJ2-3)
FASSLMKRMRGADTQYF

SEQ ID NO: 498931 - protein, 13 aa, Homo sapiens
  CDR3 for alpha chain variable domain of TCR clone 249466 (TRAV21, TRAJ20)
CAVGLRVDYKLSF

SEQ ID NO: 498932 - protein, 14 aa, Homo sapiens
  CDR3 for beta chain variable domain of TCR clone 249466 (TRBV7-2, TRBJ1-6)
CASSLTGVNSPLHF

SEQ ID NO: 498933 - protein, 16 aa, Homo sapiens
  CDR3 for alpha chain variable domain of TCR clone 249467 (TRAV3, TRAJ10)
CAVRDMRAGGGKKLTF

SEQ ID NO: 498934 - protein, 17 aa, Homo sapiens
  CDR3 for beta chain variable domain of TCR clone 249467 (TRBV4-1, TRBJ2-7)
CASSRDPLGVRGGEQYF

SEQ ID NO: 498935 - protein, 14 aa, Homo sapiens
  CDR3 for alpha chain variable domain of TCR clone 249468 (TRAV13-1, TRAJ44)
CAAKATGTASKLTF

SEQ ID NO: 498936 - protein, 12 aa, Homo sapiens
  CDR3 for beta chain variable domain of TCR clone 249468 (TRBV12-4, TRBJ2-3)
CASSSTTDTQYF

SEQ ID NO: 498937 - protein, 23 aa, Homo sapiens
  CDR3 for alpha chain variable domain of TCR clone 249469 (TRAV26-1, TRAJ38)
CIADNAGNNHIQNPDPAVSQLRY

SEQ ID NO: 498938 - protein, 13 aa, Homo sapiens
  CDR3 for beta chain variable domain of TCR clone 249469 (TRBV20-1, TRBJ1-1)
CSARGGGNTEAFF

SEQ ID NO: 498939 - protein, 15 aa, Homo sapiens
  CDR3 for alpha chain variable domain of TCR clone 249470 (TRAV27, TRAJ38)
CSARRNAGNNRKLIW

SEQ ID NO: 498940 - protein, 14 aa, Homo sapiens
  CDR3 for beta chain variable domain of TCR clone 249470 (TRBV9, TRBJ2-7)
CASSVGVGSYEQYF

SEQ ID NO: 498941 - protein, 10 aa, Homo sapiens
  CDR3 for alpha chain variable domain of TCR clone 249471 (TRAV3, TRAJ30)
CAVREIEIIF

SEQ ID NO: 498942 - protein, 14 aa, Homo sapiens
  CDR3 for beta chain variable domain of TCR clone 249471 (TRBV15, TRBJ2-3)
YATRSGTSTDTQYF

SEQ ID NO: 498943 - protein, 14 aa, Homo sapiens
  CDR3 for alpha chain variable domain of TCR clone 249472 (TRAV1-2, TRAJ16)
CAVNRVSDGQKLLF

SEQ ID NO: 498944 - protein, 15 aa, Homo sapiens
  CDR3 for beta chain variable domain of TCR clone 249472 (TRBV24-1, TRBJ2-5)
CATSETTGAVGAQYF

SEQ ID NO: 498945 - protein, 14 aa, Homo sapiens
  CDR3 for alpha chain variable domain of TCR clone 249473 (TRAV12-3, TRAJ29)
CAMSPYSGNTPLVF

SEQ ID NO: 498946 - protein, 12 aa, Homo sapiens
  CDR3 for beta chain variable domain of TCR clone 249473 (TRBV9, TRBJ2-1)
CASSVGGTNIFF

SEQ ID NO: 498947 - protein, 13 aa, Homo sapiens
  CDR3 for alpha chain variable domain of TCR clone 249474 (TRAV13-1, TRAJ23)
CAASGRGGGKLVF

SEQ ID NO: 498948 - protein, 13 aa, Homo sapiens
  CDR3 for beta chain variable domain of TCR clone 249474 (TRBV7-2, TRBJ1-5)
CASSLAEGGANEF

SEQ ID NO: 498949 - protein, 11 aa, Homo sapiens
  CDR3 for alpha chain variable domain of TCR clone 249475 (TRAV12-2, TRAJ31)
CPVTRWARLMF

SEQ ID NO: 498950 - protein, 15 aa, Homo sapiens
  CDR3 for beta chain variable domain of TCR clone 249475 (TRBV19, TRBJ2-7)
CASSIGGGLVNEQYF

SEQ ID NO: 498951 - protein, 17 aa, Homo sapiens
  CDR3 for alpha chain variable domain of TCR clone 249476 (TRAV8-6, TRAJ58)
CAVSSWGGETSGSMLTF

SEQ ID NO: 498952 - protein, 14 aa, Homo sapiens
  CDR3 for beta chain variable domain of TCR clone 249476 (TRBV4-2, TRBJ2-1)
CASGLDRAYNEQFF

SEQ ID NO: 498953 - protein, 14 aa, Homo sapiens
  CDR3 for alpha chain variable domain of TCR clone 249477 (TRAV21, TRAJ38)
CAVANAGNDRKLIW

SEQ ID NO: 498954 - protein, 16 aa, Homo sapiens
  CDR3 for beta chain variable domain of TCR clone 249477 (TRBV5-4, TRBJ2-1)
CASSLALAGAYNEQFF

SEQ ID NO: 498955 - protein, 12 aa, Homo sapiens
  CDR3 for alpha chain variable domain of TCR clone 249478 (TRAV17, TRAJ12)
CATLRSSYKLIF

SEQ ID NO: 498956 - protein, 15 aa, Homo sapiens
  CDR3 for beta chain variable domain of TCR clone 249478 (TRBV7-9, TRBJ1-6)
CASSSPGRGNSPLHF

SEQ ID NO: 498957 - protein, 14 aa, Homo sapiens
  CDR3 for alpha chain variable domain of TCR clone 249479 (TRAV17, TRAJ32)
CATDPGGATNKLIF

SEQ ID NO: 498958 - protein, 15 aa, Homo sapiens
  CDR3 for beta chain variable domain of TCR clone 249479 (TRBV7-7, TRBJ2-3)
CASSFGLAPTDTQYF

SEQ ID NO: 498959 - protein, 16 aa, Homo sapiens
  CDR3 for alpha chain variable domain of TCR clone 249480 (TRAV4, TRAJ22)
CLVGDLYSGSARQLTF

SEQ ID NO: 498960 - protein, 17 aa, Homo sapiens
  CDR3 for beta chain variable domain of TCR clone 249480 (TRBV11-2, TRBJ2-1)
CASSLYPPGVEYIEQFF

SEQ ID NO: 498961 - protein, 11 aa, Homo sapiens
  CDR3 for alpha chain variable domain of TCR clone 249481 (TRAV13-2, TRAJ23)
CAESLRGKLIF

SEQ ID NO: 498962 - protein, 12 aa, Homo sapiens
  CDR3 for beta chain variable domain of TCR clone 249481 (TRBV11-2, TRBJ2-2)
CASSLGGGELFF

SEQ ID NO: 498963 - protein, 16 aa, Homo sapiens
  CDR3 for alpha chain variable domain of TCR clone 249482 (TRAV12-3, TRAJ53)
CAMSPGSGGSDYKLTF

SEQ ID NO: 498964 - protein, 11 aa, Homo sapiens
  CDR3 for beta chain variable domain of TCR clone 249482 (TRBV29-1, TRBJ2-5)
CSEDLTGTQYF

SEQ ID NO: 498965 - protein, 13 aa, Homo sapiens
  CDR3 for alpha chain variable domain of TCR clone 249483 (TRAV30, TRAJ24)
CGTVTDSWGKLKF

SEQ ID NO: 498966 - protein, 15 aa, Homo sapiens
  CDR3 for beta chain variable domain of TCR clone 249483 (TRBV25-1, TRBJ1-4)
CASSPGDSTNEKLFF

SEQ ID NO: 498967 - protein, 11 aa, Homo sapiens
  CDR3 for alpha chain variable domain of TCR clone 249484 (TRAV12-3, TRAJ26)
CVVAYGQNFVF

SEQ ID NO: 498968 - protein, 14 aa, Homo sapiens
  CDR3 for beta chain variable domain of TCR clone 249484 (TRBV12-4, TRBJ2-3)
CASTIAGWGDTQYF

SEQ ID NO: 498969 - protein, 10 aa, Homo sapiens
  CDR3 for alpha chain variable domain of TCR clone 249485 (TRAV12-3, TRAJ4)
CAMTGAGTRL

SEQ ID NO: 498970 - protein, 14 aa, Homo sapiens
  CDR3 for beta chain variable domain of TCR clone 249485 (TRBV10-3, TRBJ1-1)
CAISDTDRGVEAVF

SEQ ID NO: 498971 - protein, 18 aa, Homo sapiens
  CDR3 for alpha chain variable domain of TCR clone 249486 (TRAV21, TRAJ52)
CAGRPSPAGGTSYGKLTF

SEQ ID NO: 498972 - protein, 13 aa, Homo sapiens
  CDR3 for beta chain variable domain of TCR clone 249486 (TRBV7-3, TRBJ1-1)
CASSQDWGAEAFF

SEQ ID NO: 498973 - protein, 19 aa, Homo sapiens
  CDR3 for alpha chain variable domain of TCR clone 249487 (TRAV3, TRAJ6)
CAVRDRTPSRSGGSYIPTF

SEQ ID NO: 498974 - protein, 15 aa, Homo sapiens
  CDR3 for beta chain variable domain of TCR clone 249487 (TRBV18, TRBJ2-7)
CASSPTFMDSYEQYF

SEQ ID NO: 498975 - protein, 14 aa, Homo sapiens
  CDR3 for alpha chain variable domain of TCR clone 249488 (TRAV8-2, TRAJ11)
CVVSEKSGYSTLTF

SEQ ID NO: 498976 - protein, 16 aa, Homo sapiens
  CDR3 for beta chain variable domain of TCR clone 249488 (TRBV28, TRBJ2-1)
CASSSPEHPRDNEQFF

SEQ ID NO: 498977 - protein, 12 aa, Homo sapiens
  CDR3 for alpha chain variable domain of TCR clone 249489 (TRAV30, TRAJ43)
CGTEERGTDMRF

SEQ ID NO: 498978 - protein, 13 aa, Homo sapiens
  CDR3 for beta chain variable domain of TCR clone 249489 (TRBV27, TRBJ2-7)
CASSFSQGYEQYF

SEQ ID NO: 498979 - protein, 13 aa, Homo sapiens
  CDR3 for alpha chain variable domain of TCR clone 249490 (TRAV8-6, TRAJ8)
CAVSNTGFQKLVF

SEQ ID NO: 498980 - protein, 15 aa, Homo sapiens
  CDR3 for beta chain variable domain of TCR clone 249490 (TRBV28, TRBJ2-5)
CSSSSGRTIQETQYF

SEQ ID NO: 498981 - protein, 12 aa, Homo sapiens
  CDR3 for alpha chain variable domain of TCR clone 249491 (TRAV2, TRAJ36)
CAELTGANNLFF

SEQ ID NO: 498982 - protein, 15 aa, Homo sapiens
  CDR3 for beta chain variable domain of TCR clone 249491 (TRBV28, TRBJ2-1)
CASSIIAGGRSEQFF

SEQ ID NO: 498983 - protein, 17 aa, Homo sapiens
  CDR3 for alpha chain variable domain of TCR clone 249492 (TRAV3, TRAJ6)
CAVRDGPRAGGSYIPTF

SEQ ID NO: 498984 - protein, 14 aa, Homo sapiens
  CDR3 for beta chain variable domain of TCR clone 249492 (TRBV7-2, TRBJ2-7)
CASSPKTSFYERHF

SEQ ID NO: 498985 - protein, 14 aa, Homo sapiens
  CDR3 for alpha chain variable domain of TCR clone 249493 (TRAV13-1, TRAJ9)
CAASALTGGFKTIF

SEQ ID NO: 498986 - protein, 13 aa, Homo sapiens
  CDR3 for beta chain variable domain of TCR clone 249493 (TRBV20-1, TRBJ1-1)
CSAGTVVNAEAFF

SEQ ID NO: 498987 - protein, 13 aa, Homo sapiens
  CDR3 for alpha chain variable domain of TCR clone 249494 (TRAV8-4, TRAJ9)
CAVSDTGGFKTIF

SEQ ID NO: 498988 - protein, 14 aa, Homo sapiens
  CDR3 for beta chain variable domain of TCR clone 249494 (TRBV13, TRBJ2-5)
CASSLERVGETQYF

SEQ ID NO: 498989 - protein, 11 aa, Homo sapiens
  CDR3 for alpha chain variable domain of TCR clone 249495 (TRAV27, TRAJ20)
CAGADDYKLSF

SEQ ID NO: 498990 - protein, 14 aa, Homo sapiens
  CDR3 for beta chain variable domain of TCR clone 249495 (TRBV7-9, TRBJ1-1)
CASTPLQSCTEAFF

SEQ ID NO: 498991 - protein, 15 aa, Homo sapiens
  CDR3 for alpha chain variable domain of TCR clone 249496 (TRAV38-2/DV8, TRAJ48)
CAYRSGGFGNEKLTF

SEQ ID NO: 498992 - protein, 18 aa, Homo sapiens
  CDR3 for beta chain variable domain of TCR clone 249496 (TRBV28, TRBJ2-7)
CASSPWSRQGTFHSTSGR

SEQ ID NO: 498993 - protein, 12 aa, Homo sapiens
  CDR3 for alpha chain variable domain of TCR clone 249497 (TRAV12-1, TRAJ23)
CVVNIPGGKLIF

SEQ ID NO: 498994 - protein, 13 aa, Homo sapiens
  CDR3 for beta chain variable domain of TCR clone 249497 (TRBV7-9, TRBJ2-3)
CASSPGSTDTQYF

SEQ ID NO: 498995 - protein, 14 aa, Homo sapiens
  CDR3 for alpha chain variable domain of TCR clone 249498 (TRAV8-4, TRAJ8)
CAVIGNTCFQKLVF

SEQ ID NO: 498996 - protein, 16 aa, Homo sapiens
  CDR3 for beta chain variable domain of TCR clone 249498 (TRBV9, TRBJ2-1)
CASSVEGDGSYNEQFF

SEQ ID NO: 498997 - protein, 11 aa, Homo sapiens
  CDR3 for alpha chain variable domain of TCR clone 249499 (TRAV23/DV6, TRAJ48)
CAPRWGENLIF

SEQ ID NO: 498998 - protein, 13 aa, Homo sapiens
  CDR3 for beta chain variable domain of TCR clone 249499 (TRBV12-4, TRBJ2-5)
CASSPGTEETQYF

SEQ ID NO: 498999 - protein, 14 aa, Homo sapiens
  CDR3 for alpha chain variable domain of TCR clone 249500 (TRAV13-1, TRAJ44)
CAAKATGTASKLTF

SEQ ID NO: 499000 - protein, 11 aa, Homo sapiens
  CDR3 for beta chain variable domain of TCR clone 249500 (TRBV10-3, TRBJ2-7)
CAISEGLEQYF

SEQ ID NO: 499001 - protein, 16 aa, Homo sapiens
  CDR3 for alpha chain variable domain of TCR clone 249501 (TRAV25, TRAJ53)
CAGPKGSGGSNYKLTF

SEQ ID NO: 499002 - protein, 14 aa, Homo sapiens
  CDR3 for beta chain variable domain of TCR clone 249501 (TRBV7-2, TRBJ2-7)
CASRSQGAAYEQYF

SEQ ID NO: 499003 - protein, 12 aa, Homo sapiens
  CDR3 for alpha chain variable domain of TCR clone 249502 (TRAV29/DV5, TRAJ15)
CASYQAGTALIF

SEQ ID NO: 499004 - protein, 15 aa, Homo sapiens
  CDR3 for beta chain variable domain of TCR clone 249502 (TRBV11-2, TRBJ2-2)
CASSSDRVNAGELFF

SEQ ID NO: 499005 - protein, 13 aa, Homo sapiens
  CDR3 for alpha chain variable domain of TCR clone 249503 (TRAV13-1, TRAJ22)
CAASRGSARQLTF

SEQ ID NO: 499006 - protein, 15 aa, Homo sapiens
  CDR3 for beta chain variable domain of TCR clone 249503 (TRBV19, TRBJ1-1)
CASTSGQIQNTEAFF

SEQ ID NO: 499007 - protein, 13 aa, Homo sapiens
  CDR3 for alpha chain variable domain of TCR clone 249504 (TRAV12-3, TRAJ33)
CAMSVNSNYQLIW

SEQ ID NO: 499008 - protein, 13 aa, Homo sapiens
  CDR3 for beta chain variable domain of TCR clone 249504 (TRBV7-2, TRBJ2-2)
CASSLAVTGELFI

SEQ ID NO: 499009 - protein, 15 aa, Homo sapiens
  CDR3 for alpha chain variable domain of TCR clone 249505 (TRAV8-6, TRAJ38)
CAVSSNAGNNRTLSW

SEQ ID NO: 499010 - protein, 14 aa, Homo sapiens
  CDR3 for beta chain variable domain of TCR clone 249505 (TRBV14, TRBJ2-1)
CASSQVQGRGEQFF

SEQ ID NO: 499011 - protein, 14 aa, Homo sapiens
  CDR3 for alpha chain variable domain of TCR clone 249506 (TRAV1-2, TRAJ8)
CAVREDTGFQKLAF

SEQ ID NO: 499012 - protein, 15 aa, Homo sapiens
  CDR3 for beta chain variable domain of TCR clone 249506 (TRBV11-3, TRBJ2-7)
CASSPGPASSYEQYF

SEQ ID NO: 499013 - protein, 14 aa, Homo sapiens
  CDR3 for alpha chain variable domain of TCR clone 249507 (TRAV16, TRAJ48)
CALTPGFGNEKLTF

SEQ ID NO: 499014 - protein, 14 aa, Homo sapiens
  CDR3 for beta chain variable domain of TCR clone 249507 (TRBV7-2, TRBJ2-7)
CASSSISGFSDQYF

SEQ ID NO: 499015 - protein, 14 aa, Homo sapiens
  CDR3 for alpha chain variable domain of TCR clone 249508 (TRAV2, TRAJ9)
CAVEDRSGGFKTIF

SEQ ID NO: 499016 - protein, 11 aa, Homo sapiens
  CDR3 for beta chain variable domain of TCR clone 249508 (TRBV23-1, TRBJ2-7)
SSSGTGLEQYF

SEQ ID NO: 499017 - protein, 14 aa, Homo sapiens
  CDR3 for alpha chain variable domain of TCR clone 249509 (TRAV17, TRAJ57)
CATDPQGGSEKLVF

SEQ ID NO: 499018 - protein, 17 aa, Homo sapiens
  CDR3 for beta chain variable domain of TCR clone 249509 (TRBV5-1, TRBJ2-2)
CASILAGLSGGTGELFF

SEQ ID NO: 499019 - protein, 11 aa, Homo sapiens
  CDR3 for alpha chain variable domain of TCR clone 249510 (TRAV21, TRAJ11)
CAVNGYSTLTF

SEQ ID NO: 499020 - protein, 16 aa, Homo sapiens
  CDR3 for beta chain variable domain of TCR clone 249510 (TRBV7-8, TRBJ2-6)
CASPGRVVAGANVLTF

SEQ ID NO: 499021 - protein, 14 aa, Homo sapiens
  CDR3 for alpha chain variable domain of TCR clone 249511 (TRAV21, TRAJ37)
CAVKGSSNTGKLIL

SEQ ID NO: 499022 - protein, 15 aa, Homo sapiens
  CDR3 for beta chain variable domain of TCR clone 249511 (TRBV5-1, TRBJ2-7)
CASSLNGGPAREQYF

SEQ ID NO: 499023 - protein, 12 aa, Homo sapiens
  CDR3 for alpha chain variable domain of TCR clone 249512 (TRAV12-3, TRAJ40)
CAMSSGTYKYIF

SEQ ID NO: 499024 - protein, 14 aa, Homo sapiens
  CDR3 for beta chain variable domain of TCR clone 249512 (TRBV5-1, TRBJ2-7)
CASSLTQGLREQYF

SEQ ID NO: 499025 - protein, 14 aa, Homo sapiens
  CDR3 for alpha chain variable domain of TCR clone 249513 (TRAV1-2, TRAJ16)
CAVNRFAGGQKLLF

SEQ ID NO: 499026 - protein, 16 aa, Homo sapiens
  CDR3 for beta chain variable domain of TCR clone 249513 (TRBV11-2, TRBJ1-2)
CASSLDTGGADYGYTF

SEQ ID NO: 499027 - protein, 11 aa, Homo sapiens
  CDR3 for alpha chain variable domain of TCR clone 249514 (TRAV13-1, TRAJ24)
CAASGRGKLQF

SEQ ID NO: 499028 - protein, 14 aa, Homo sapiens
  CDR3 for beta chain variable domain of TCR clone 249514 (TRBV7-7, TRBJ2-2)
CATRQDSDTGELFF

SEQ ID NO: 499029 - protein, 15 aa, Homo sapiens
  CDR3 for alpha chain variable domain of TCR clone 249515 (TRAV2, TRAJ22)
CAVPSRGGSARQMTF

SEQ ID NO: 499030 - protein, 11 aa, Homo sapiens
  CDR3 for beta chain variable domain of TCR clone 249515 (TRBV27, TRBJ2-3)
CASSLGDTQYF

SEQ ID NO: 499031 - protein, 14 aa, Homo sapiens
  CDR3 for alpha chain variable domain of TCR clone 249516 (TRAV12-2, TRAJ17)
CAVNIKAAGNKLTF

SEQ ID NO: 499032 - protein, 13 aa, Homo sapiens
  CDR3 for beta chain variable domain of TCR clone 249516 (TRBV7-8, TRBJ2-7)
CASSLTWGREQYF

SEQ ID NO: 499033 - protein, 15 aa, Homo sapiens
  CDR3 for alpha chain variable domain of TCR clone 249517 (TRAV13-2, TRAJ6)
CAEKVLAGGSYIPIF

SEQ ID NO: 499034 - protein, 13 aa, Homo sapiens
  CDR3 for beta chain variable domain of TCR clone 249517 (TRBV20-1, TRBJ1-1)
CSARGGGNTEAFF

SEQ ID NO: 499035 - protein, 15 aa, Homo sapiens
  CDR3 for alpha chain variable domain of TCR clone 249518 (TRAV12-1, TRAJ44)
CVVFVNTGTASKLTF

SEQ ID NO: 499036 - protein, 17 aa, Homo sapiens
  CDR3 for beta chain variable domain of TCR clone 249518 (TRBV24-1, TRBJ2-1)
CATSDVSTSGTYNEQFF

SEQ ID NO: 499037 - protein, 11 aa, Homo sapiens
  CDR3 for alpha chain variable domain of TCR clone 249519 (TRAV12-1, TRAJ34)
CVVNKGRELIF

SEQ ID NO: 499038 - protein, 14 aa, Homo sapiens
  CDR3 for beta chain variable domain of TCR clone 249519 (TRBV20-1, TRBJ2-3)
CSARGGTSTDTQYF

SEQ ID NO: 499039 - protein, 15 aa, Homo sapiens
  CDR3 for alpha chain variable domain of TCR clone 249520 (TRAV12-2, TRAJ23)
CRGEDDYNQGGKLIF

SEQ ID NO: 499040 - protein, 13 aa, Homo sapiens
  CDR3 for beta chain variable domain of TCR clone 249520 (TRBV11-2, TRBJ2-7)
CASSPLGSYEQYF

SEQ ID NO: 499041 - protein, 13 aa, Homo sapiens
  CDR3 for alpha chain variable domain of TCR clone 249521 (TRAV29/DV5, TRAJ31)
WAASRNNNARLMF

SEQ ID NO: 499042 - protein, 13 aa, Homo sapiens
  CDR3 for beta chain variable domain of TCR clone 249521 (TRBV7-2, TRBJ2-4)
CASSREHANIQYF

SEQ ID NO: 499043 - protein, 14 aa, Homo sapiens
  CDR3 for alpha chain variable domain of TCR clone 249522 (TRAV29/DV5, TRAJ36)
CAARRKTGANNLFF

SEQ ID NO: 499044 - protein, 15 aa, Homo sapiens
  CDR3 for beta chain variable domain of TCR clone 249522 (TRBV9, TRBJ1-6)
CASSVAGTGDSPLHC

SEQ ID NO: 499045 - protein, 13 aa, Homo sapiens
  CDR3 for alpha chain variable domain of TCR clone 249523 (TRAV23/DV6, TRAJ36)
CAASQTGATNPFF

SEQ ID NO: 499046 - protein, 13 aa, Homo sapiens
  CDR3 for beta chain variable domain of TCR clone 249523 (TRBV5-4, TRBJ1-5)
CASSLGGDQPQHF

SEQ ID NO: 499047 - protein, 14 aa, Homo sapiens
  CDR3 for alpha chain variable domain of TCR clone 249524 (TRAV26-1, TRAJ38)
CIADNAGNNRKLIW

SEQ ID NO: 499048 - protein, 18 aa, Homo sapiens
  CDR3 for beta chain variable domain of TCR clone 249524 (TRBV11-3, TRBJ2-3)
CASSLGGASRGAPNTQYF

SEQ ID NO: 499049 - protein, 11 aa, Homo sapiens
  CDR3 for alpha chain variable domain of TCR clone 249525 (TRAV2, TRAJ13)
CASGGYQKVTF

SEQ ID NO: 499050 - protein, 13 aa, Homo sapiens
  CDR3 for beta chain variable domain of TCR clone 249525 (TRBV20-1, TRBJ1-6)
CSAPLGVGSPLHF

SEQ ID NO: 499051 - protein, 13 aa, Homo sapiens
  CDR3 for alpha chain variable domain of TCR clone 249526 (TRAV12-2, TRAJ11)
CAVPNSGYSTLTF

SEQ ID NO: 499052 - protein, 14 aa, Homo sapiens
  CDR3 for beta chain variable domain of TCR clone 249526 (TRBV12-5, TRBJ2-5)
CASGSRTHQETQYF

SEQ ID NO: 499053 - protein, 13 aa, Homo sapiens
  CDR3 for alpha chain variable domain of TCR clone 249527 (TRAV1-1, TRAJ15)
CAVFNQAGTALIF

SEQ ID NO: 499054 - protein, 13 aa, Homo sapiens
  CDR3 for beta chain variable domain of TCR clone 249527 (TRBV11-2, TRBJ2-5)
CASSFSSQETQYF

SEQ ID NO: 499055 - protein, 14 aa, Homo sapiens
  CDR3 for alpha chain variable domain of TCR clone 249528 (TRAV38-1, TRAJ45)
CASHSGGGADGLTL

SEQ ID NO: 499056 - protein, 13 aa, Homo sapiens
  CDR3 for beta chain variable domain of TCR clone 249528 (TRBV10-3, TRBJ1-2)
CAISERDSYGDTF

SEQ ID NO: 499057 - protein, 14 aa, Homo sapiens
  CDR3 for alpha chain variable domain of TCR clone 249529 (TRAV1-2, TRAJ8)
CAVREDTGFQKLVF

SEQ ID NO: 499058 - protein, 12 aa, Homo sapiens
  CDR3 for beta chain variable domain of TCR clone 249529 (TRBV28, TRBJ2-3)
CASRLYRDTQYF

SEQ ID NO: 499059 - protein, 16 aa, Homo sapiens
  CDR3 for alpha chain variable domain of TCR clone 249530 (TRAV16, TRAJ4)
CALSRMFSGGYNKLIF

SEQ ID NO: 499060 - protein, 15 aa, Homo sapiens
  CDR3 for beta chain variable domain of TCR clone 249530 (TRBV7-2, TRBJ1-6)
CASSLGPDRGMPLHF

SEQ ID NO: 499061 - protein, 14 aa, Homo sapiens
  CDR3 for alpha chain variable domain of TCR clone 249531 (TRAV35, TRAJ42)
CAGRYGGSQGNLIF

SEQ ID NO: 499062 - protein, 15 aa, Homo sapiens
  CDR3 for beta chain variable domain of TCR clone 249531 (TRBV7-3, TRBJ2-1)
CAGSPTGGGEVEQFF

SEQ ID NO: 499063 - protein, 13 aa, Homo sapiens
  CDR3 for alpha chain variable domain of TCR clone 249532 (TRAV8-3, TRAJ28)
CAVGAVGSYQLTF

SEQ ID NO: 499064 - protein, 15 aa, Homo sapiens
  CDR3 for beta chain variable domain of TCR clone 249532 (TRBV28, TRBJ2-7)
CASSLISGGSYEQYF

SEQ ID NO: 499065 - protein, 12 aa, Homo sapiens
  CDR3 for alpha chain variable domain of TCR clone 249533 (TRAV12-3, TRAJ17)
RAMTLTGNKLTF

SEQ ID NO: 499066 - protein, 15 aa, Homo sapiens
  CDR3 for beta chain variable domain of TCR clone 249533 (TRBV20-1, TRBJ2-7)
CSASDRVGGMDEQYF

SEQ ID NO: 499067 - protein, 14 aa, Homo sapiens
  CDR3 for alpha chain variable domain of TCR clone 249534 (TRAV27, TRAJ23)
CAGTFDNQGGKLIF

SEQ ID NO: 499068 - protein, 15 aa, Homo sapiens
  CDR3 for beta chain variable domain of TCR clone 249534 (TRBV7-3, TRBJ2-7)
CASSLTGQGKYEQYF

SEQ ID NO: 499069 - protein, 14 aa, Homo sapiens
  CDR3 for alpha chain variable domain of TCR clone 249535 (TRAV21, TRAJ22)
CAVFFSGSARQLTF

SEQ ID NO: 499070 - protein, 14 aa, Homo sapiens
  CDR3 for beta chain variable domain of TCR clone 249535 (TRBV5-7, TRBJ1-1)
CASSLAGDWTEAFF

SEQ ID NO: 499071 - protein, 15 aa, Homo sapiens
  CDR3 for alpha chain variable domain of TCR clone 249536 (TRAV12-3, TRAJ6)
CAMSATTGGSYIPTF

SEQ ID NO: 499072 - protein, 16 aa, Homo sapiens
  CDR3 for beta chain variable domain of TCR clone 249536 (TRBV7-9, TRBJ2-3)
CASSPWREVGTDTQYF

SEQ ID NO: 499073 - protein, 11 aa, Homo sapiens
  CDR3 for alpha chain variable domain of TCR clone 249537 (TRAV1-1, TRAJ23)
CAVRQGGKLIF

SEQ ID NO: 499074 - protein, 16 aa, Homo sapiens
  CDR3 for beta chain variable domain of TCR clone 249537 (TRBV27, TRBJ2-2)
CASSLRPGGAPGELFF

SEQ ID NO: 499075 - protein, 13 aa, Homo sapiens
  CDR3 for alpha chain variable domain of TCR clone 249538 (TRAV27, TRAJ8)
CAGGPTGFQKLVF

SEQ ID NO: 499076 - protein, 16 aa, Homo sapiens
  CDR3 for beta chain variable domain of TCR clone 249538 (TRBV7-9, TRBJ2-1)
CASSDVAGGSYNEQFF

SEQ ID NO: 499077 - protein, 15 aa, Homo sapiens
  CDR3 for alpha chain variable domain of TCR clone 249539 (TRAV8-3, TRAJ45)
CASSYSGGGADGLTF

SEQ ID NO: 499078 - protein, 14 aa, Homo sapiens
  CDR3 for beta chain variable domain of TCR clone 249539 (TRBV11-2, TRBJ2-7)
CASSSTGEGYEQYF

SEQ ID NO: 499079 - protein, 14 aa, Homo sapiens
  CDR3 for alpha chain variable domain of TCR clone 249540 (TRAV12-2, TRAJ17)
CAVLFKAASNKLTF

SEQ ID NO: 499080 - protein, 14 aa, Homo sapiens
  CDR3 for beta chain variable domain of TCR clone 249540 (TRBV7-8, TRBJ2-5)
CASSATGVQETQYF

SEQ ID NO: 499081 - protein, 17 aa, Homo sapiens
  CDR3 for alpha chain variable domain of TCR clone 249541 (TRAV8-6, TRAJ58)
CAVSSWVGETSGSRLTF

SEQ ID NO: 499082 - protein, 15 aa, Homo sapiens
  CDR3 for beta chain variable domain of TCR clone 249541 (TRBV6-5, TRBJ2-1)
CASSYGAGAGNEQFF

SEQ ID NO: 499083 - protein, 14 aa, Homo sapiens
  CDR3 for alpha chain variable domain of TCR clone 249542 (TRAV2, TRAJ37)
CAVEGSSNTGKLIF

SEQ ID NO: 499084 - protein, 15 aa, Homo sapiens
  CDR3 for beta chain variable domain of TCR clone 249542 (TRBV24-1, TRBJ2-4)
CATCDPRDRANIQYF

SEQ ID NO: 499085 - protein, 12 aa, Homo sapiens
  CDR3 for alpha chain variable domain of TCR clone 249543 (TRAV3, TRAJ20)
CAVRDGDYKLSF

SEQ ID NO: 499086 - protein, 14 aa, Homo sapiens
  CDR3 for beta chain variable domain of TCR clone 249543 (TRBV11-2, TRBJ2-7)
CASSSTGEGYEQYF

SEQ ID NO: 499087 - protein, 14 aa, Homo sapiens
  CDR3 for alpha chain variable domain of TCR clone 249544 (TRAV12-2, TRAJ24)
CAVTPADSWGKLQF

SEQ ID NO: 499088 - protein, 15 aa, Homo sapiens
  CDR3 for beta chain variable domain of TCR clone 249544 (TRBV27, TRBJ2-2)
CASSLEGPNTGELFF

SEQ ID NO: 499089 - protein, 18 aa, Homo sapiens
  CDR3 for alpha chain variable domain of TCR clone 249545 (TRAV12-2, )
CAVEDIQNPYPAVYQLRD

SEQ ID NO: 499090 - protein, 15 aa, Homo sapiens
  CDR3 for beta chain variable domain of TCR clone 249545 (TRBV11-1, TRBJ2-7)
CASSLNYGASYEQYF

SEQ ID NO: 499091 - protein, 14 aa, Homo sapiens
  CDR3 for alpha chain variable domain of TCR clone 249546 (TRAV9-2, TRAJ39)
CALYIYNAGNMPTF

SEQ ID NO: 499092 - protein, 12 aa, Homo sapiens
  CDR3 for beta chain variable domain of TCR clone 249546 (TRBV11-2, TRBJ2-2)
CASSLGGGELFF

SEQ ID NO: 499093 - protein, 15 aa, Homo sapiens
  CDR3 for alpha chain variable domain of TCR clone 249547 (TRAV12-1, TRAJ48)
CVVNISNFGNEKLTF

SEQ ID NO: 499094 - protein, 16 aa, Homo sapiens
  CDR3 for beta chain variable domain of TCR clone 249547 (TRBV27, TRBJ2-2)
CASSFRGLVRTGELFF

SEQ ID NO: 499095 - protein, 12 aa, Homo sapiens
  CDR3 for alpha chain variable domain of TCR clone 249548 (TRAV29/DV5, TRAJ49)
CAATDTGSQFYF

SEQ ID NO: 499096 - protein, 14 aa, Homo sapiens
  CDR3 for beta chain variable domain of TCR clone 249548 (TRBV25-1, TRBJ1-1)
CASTHLGGNTEAFF

SEQ ID NO: 499097 - protein, 15 aa, Homo sapiens
  CDR3 for alpha chain variable domain of TCR clone 249549 (TRAV3, TRAJ5)
CAVRDLDPGRRALTF

SEQ ID NO: 499098 - protein, 14 aa, Homo sapiens
  CDR3 for beta chain variable domain of TCR clone 249549 (TRBV25-1, TRBJ1-4)
CASSGGGQPEKLFF

SEQ ID NO: 499099 - protein, 15 aa, Homo sapiens
  CDR3 for alpha chain variable domain of TCR clone 249550 (TRAV13-1, TRAJ8)
CAASIPNTGFQKLVF

SEQ ID NO: 499100 - protein, 15 aa, Homo sapiens
  CDR3 for beta chain variable domain of TCR clone 249550 (TRBV7-9, TRBJ1-4)
CASSATGGNNEKLFF

SEQ ID NO: 499101 - protein, 14 aa, Homo sapiens
  CDR3 for alpha chain variable domain of TCR clone 249551 (TRAV12-2, TRAJ17)
CAVLFKAAGNTLTF

SEQ ID NO: 499102 - protein, 12 aa, Homo sapiens
  CDR3 for beta chain variable domain of TCR clone 249551 (TRBV11-2, TRBJ2-2)
CDSSLGGGELFF

SEQ ID NO: 499103 - protein, 12 aa, Homo sapiens
  CDR3 for alpha chain variable domain of TCR clone 249552 (TRAV12-3, TRAJ40)
CVMSSGTYKYIF

SEQ ID NO: 499104 - protein, 15 aa, Homo sapiens
  CDR3 for beta chain variable domain of TCR clone 249552 (TRBV7-3, TRBJ2-2)
CASSETGQGTGEPFF

SEQ ID NO: 499105 - protein, 14 aa, Homo sapiens
  CDR3 for alpha chain variable domain of TCR clone 249553 (TRAV26-1, TRAJ39)
CIVFTNNAGNMLTF

SEQ ID NO: 499106 - protein, 14 aa, Homo sapiens
  CDR3 for beta chain variable domain of TCR clone 249553 (TRBV20-1, TRBJ2-1)
CSAQIGGSANEQFF

SEQ ID NO: 499107 - protein, 14 aa, Homo sapiens
  CDR3 for alpha chain variable domain of TCR clone 249554 (TRAV36/DV7, TRAJ48)
CAQRRDFGNEKLNF

SEQ ID NO: 499108 - protein, 14 aa, Homo sapiens
  CDR3 for beta chain variable domain of TCR clone 249554 (TRBV28, TRBJ2-4)
CASTQVTGVNIQYF

SEQ ID NO: 499109 - protein, 14 aa, Homo sapiens
  CDR3 for alpha chain variable domain of TCR clone 249555 (TRAV3, TRAJ21)
CAVRDAYSFNKFYF

SEQ ID NO: 499110 - protein, 15 aa, Homo sapiens
  CDR3 for beta chain variable domain of TCR clone 249555 (TRBV18, TRBJ2-7)
CASSPLQGRTYEQYF

SEQ ID NO: 499111 - protein, 13 aa, Homo sapiens
  CDR3 for alpha chain variable domain of TCR clone 249556 (TRAV17, TRAJ9)
CATDYTGGFKTIF

SEQ ID NO: 499112 - protein, 18 aa, Homo sapiens
  CDR3 for beta chain variable domain of TCR clone 249556 (TRBV11-2, TRBJ2-3)
CASSLGGASRGAPNTQYF

SEQ ID NO: 499113 - protein, 17 aa, Homo sapiens
  CDR3 for alpha chain variable domain of TCR clone 249557 (TRAV27, TRAJ18)
CAGLHRGRGSTLGRLYF

SEQ ID NO: 499114 - protein, 16 aa, Homo sapiens
  CDR3 for beta chain variable domain of TCR clone 249557 (TRBV12-5, TRBJ2-5)
CASGPRTSGNQETQYF

SEQ ID NO: 499115 - protein, 16 aa, Homo sapiens
  CDR3 for alpha chain variable domain of TCR clone 249558 (TRAV30, TRAJ24)
CGTELVDADSWGKFQF

SEQ ID NO: 499116 - protein, 17 aa, Homo sapiens
  CDR3 for beta chain variable domain of TCR clone 249558 (TRBV20-1, TRBJ2-2)
CSASGSGQGGLTGELFF

SEQ ID NO: 499117 - protein, 15 aa, Homo sapiens
  CDR3 for alpha chain variable domain of TCR clone 249559 (TRAV3, TRAJ22)
CAVRDRGGSAKQLTF

SEQ ID NO: 499118 - protein, 14 aa, Homo sapiens
  CDR3 for beta chain variable domain of TCR clone 249559 (TRBV20-1, TRBJ1-1)
CSAQTRIGGTEAFF

SEQ ID NO: 499119 - protein, 16 aa, Homo sapiens
  CDR3 for alpha chain variable domain of TCR clone 249560 (TRAV1-2, TRAJ10)
CAVRGVLTGGGNKLTL

SEQ ID NO: 499120 - protein, 13 aa, Homo sapiens
  CDR3 for beta chain variable domain of TCR clone 249560 (TRBV12-4, TRBJ1-1)
CASSPGTGFEAFF

SEQ ID NO: 499121 - protein, 14 aa, Homo sapiens
  CDR3 for alpha chain variable domain of TCR clone 249561 (TRAV17, TRAJ57)
CATDPQGGSEKLVF

SEQ ID NO: 499122 - protein, 14 aa, Homo sapiens
  CDR3 for beta chain variable domain of TCR clone 249561 (TRBV7-9, TRBJ2-7)
CASSLDRPTDEQYF

SEQ ID NO: 499123 - protein, 16 aa, Homo sapiens
  CDR3 for alpha chain variable domain of TCR clone 249562 (TRAV3, TRAJ21)
CAVRDIERGNFNKFYF

SEQ ID NO: 499124 - protein, 12 aa, Homo sapiens
  CDR3 for beta chain variable domain of TCR clone 249562 (TRBV27, TRBJ2-7)
CQQFNDRYEQYF

SEQ ID NO: 499125 - protein, 15 aa, Homo sapiens
  CDR3 for alpha chain variable domain of TCR clone 249563 (TRAV12-3, TRAJ6)
CAMSATTGGSYIPTF

SEQ ID NO: 499126 - protein, 16 aa, Homo sapiens
  CDR3 for beta chain variable domain of TCR clone 249563 (TRBV7-9, TRBJ2-2)
CASSGFGGANTGELFF

SEQ ID NO: 499127 - protein, 13 aa, Homo sapiens
  CDR3 for alpha chain variable domain of TCR clone 249564 (TRAV12-3, TRAJ54)
CAMSVQGAQKLVF

SEQ ID NO: 499128 - protein, 14 aa, Homo sapiens
  CDR3 for beta chain variable domain of TCR clone 249564 (TRBV7-8, TRBJ2-7)
CASSPRDRVYEQYF

SEQ ID NO: 499129 - protein, 14 aa, Homo sapiens
  CDR3 for alpha chain variable domain of TCR clone 249565 (TRAV1-2, TRAJ8)
CAVREATGFQKLVF

SEQ ID NO: 499130 - protein, 13 aa, Homo sapiens
  CDR3 for beta chain variable domain of TCR clone 249565 (TRBV20-1, TRBJ1-4)
CSARTPYNEKLFF

SEQ ID NO: 499131 - protein, 15 aa, Homo sapiens
  CDR3 for alpha chain variable domain of TCR clone 249566 (TRAV13-1, TRAJ44)
CAASRNTGTASKLTF

SEQ ID NO: 499132 - protein, 13 aa, Homo sapiens
  CDR3 for beta chain variable domain of TCR clone 249566 (TRBV12-4, TRBJ1-2)
CASSLRQGKGYTF

SEQ ID NO: 499133 - protein, 12 aa, Homo sapiens
  CDR3 for alpha chain variable domain of TCR clone 249567 (TRAV12-2, TRAJ8)
CAVNTGFQKLVF

SEQ ID NO: 499134 - protein, 15 aa, Homo sapiens
  CDR3 for beta chain variable domain of TCR clone 249567 (TRBV7-8, TRBJ1-5)
CASSLEGRGLEPQHF

SEQ ID NO: 499135 - protein, 14 aa, Homo sapiens
  CDR3 for alpha chain variable domain of TCR clone 249568 (TRAV16, TRAJ39)
CALSKNNAGNMLTF

SEQ ID NO: 499136 - protein, 14 aa, Homo sapiens
  CDR3 for beta chain variable domain of TCR clone 249568 (TRBV19, TRBJ2-7)
CASTVQGRPYEQYF

SEQ ID NO: 499137 - protein, 14 aa, Homo sapiens
  CDR3 for alpha chain variable domain of TCR clone 249569 (TRAV1-2, TRAJ16)
CAVNRFSDGHKLLF

SEQ ID NO: 499138 - protein, 14 aa, Homo sapiens
  CDR3 for beta chain variable domain of TCR clone 249569 (TRBV7-9, TRBJ1-4)
CAITEGEANEKLFF

SEQ ID NO: 499139 - protein, 15 aa, Homo sapiens
  CDR3 for alpha chain variable domain of TCR clone 249570 (TRAV13-1, TRAJ42)
CAASIAGRSQGNLIF

SEQ ID NO: 499140 - protein, 15 aa, Homo sapiens
  CDR3 for beta chain variable domain of TCR clone 249570 (TRBV19, TRBJ2-1)
CASSIVRGEGREQFF

SEQ ID NO: 499141 - protein, 14 aa, Homo sapiens
  CDR3 for alpha chain variable domain of TCR clone 249571 (TRAV3, TRAJ48)
CAVKSNFGNEKLTF

SEQ ID NO: 499142 - protein, 14 aa, Homo sapiens
  CDR3 for beta chain variable domain of TCR clone 249571 (TRBV9, TRBJ2-7)
CASSVGVGSYEQYF

SEQ ID NO: 499143 - protein, 14 aa, Homo sapiens
  CDR3 for alpha chain variable domain of TCR clone 249572 (TRAV20, TRAJ26)
CAVQAAIYGQNFVF

SEQ ID NO: 499144 - protein, 14 aa, Homo sapiens
  CDR3 for beta chain variable domain of TCR clone 249572 (TRBV7-3, TRBJ2-1)
CASSLAGGTNEQFF

SEQ ID NO: 499145 - protein, 12 aa, Homo sapiens
  CDR3 for alpha chain variable domain of TCR clone 249573 (TRAV13-1, TRAJ49)
CAASPMGNQFYF

SEQ ID NO: 499146 - protein, 13 aa, Homo sapiens
  CDR3 for beta chain variable domain of TCR clone 249573 (TRBV20-1, TRBJ2-2)
RSASAAGTGELFF

SEQ ID NO: 499147 - protein, 14 aa, Homo sapiens
  CDR3 for alpha chain variable domain of TCR clone 249574 (TRAV12-2, TRAJ24)
CAVTPADSWGKLQF

SEQ ID NO: 499148 - protein, 15 aa, Homo sapiens
  CDR3 for beta chain variable domain of TCR clone 249574 (TRBV29-1, TRBJ2-3)
CSATRTDLSTDTQYF

SEQ ID NO: 499149 - protein, 13 aa, Homo sapiens
  CDR3 for alpha chain variable domain of TCR clone 249575 (TRAV22, TRAJ29)
CAVGGSGNTHLVF

SEQ ID NO: 499150 - protein, 13 aa, Homo sapiens
  CDR3 for beta chain variable domain of TCR clone 249575 (TRBV19, TRBJ2-7)
CASRKAGGSEQYF

SEQ ID NO: 499151 - protein, 12 aa, Homo sapiens
  CDR3 for alpha chain variable domain of TCR clone 249576 (TRAV8-6, TRAJ50)
CAVETSYDKVIF

SEQ ID NO: 499152 - protein, 13 aa, Homo sapiens
  CDR3 for beta chain variable domain of TCR clone 249576 (TRBV10-3, TRBJ2-7)
CASKLAVNYEQYF

SEQ ID NO: 499153 - protein, 16 aa, Homo sapiens
  CDR3 for alpha chain variable domain of TCR clone 249577 (TRAV26-1, TRAJ23)
CIVRVERYNQGGKLIF

SEQ ID NO: 499154 - protein, 12 aa, Homo sapiens
  CDR3 for beta chain variable domain of TCR clone 249577 (TRBV11-2, TRBJ2-1)
CASSPGNNEQFF

SEQ ID NO: 499155 - protein, 18 aa, Homo sapiens
  CDR3 for alpha chain variable domain of TCR clone 249578 (TRAV13-1, TRAJ52)
CAAKNPNAGGTSYGKLTF

SEQ ID NO: 499156 - protein, 13 aa, Homo sapiens
  CDR3 for beta chain variable domain of TCR clone 249578 (TRBV2, TRBJ2-2)
CASSEEVAGELFF

SEQ ID NO: 499157 - protein, 13 aa, Homo sapiens
  CDR3 for alpha chain variable domain of TCR clone 249579 (TRAV1-2, TRAJ12)
CAVSMDSSYKLIF

SEQ ID NO: 499158 - protein, 13 aa, Homo sapiens
  CDR3 for beta chain variable domain of TCR clone 249579 (TRBV4-1, TRBJ2-1)
CASSQAGGDEQFF

SEQ ID NO: 499159 - protein, 23 aa, Homo sapiens
  CDR3 for alpha chain variable domain of TCR clone 249580 (TRAV1-1, TRAJ11)
LLQELQMKDSASYFCAGYSTLTF

SEQ ID NO: 499160 - protein, 14 aa, Homo sapiens
  CDR3 for beta chain variable domain of TCR clone 249580 (TRBV19, TRBJ2-1)
CASPTFVLSGEQFF

SEQ ID NO: 499161 - protein, 14 aa, Homo sapiens
  CDR3 for alpha chain variable domain of TCR clone 249581 (TRAV8-4, TRAJ16)
CAVSPVGRWPEAAL

SEQ ID NO: 499162 - protein, 15 aa, Homo sapiens
  CDR3 for beta chain variable domain of TCR clone 249581 (TRBV7-3, TRBJ1-6)
CASSLGRGAGSHLHF

SEQ ID NO: 499163 - protein, 13 aa, Homo sapiens
  CDR3 for alpha chain variable domain of TCR clone 249582 (TRAV38-2/DV8, TRAJ53)
CASGGGSNYKLTF

SEQ ID NO: 499164 - protein, 16 aa, Homo sapiens
  CDR3 for beta chain variable domain of TCR clone 249582 (TRBV28, TRBJ1-5)
CACRFRGAVQNQPQHF

SEQ ID NO: 499165 - protein, 14 aa, Homo sapiens
  CDR3 for alpha chain variable domain of TCR clone 249583 (TRAV8-4, TRAJ30)
CAVSGMNRDDKIIF

SEQ ID NO: 499166 - protein, 14 aa, Homo sapiens
  CDR3 for beta chain variable domain of TCR clone 249583 (TRBV7-2, TRBJ2-1)
CASSRGGARNEQFF

SEQ ID NO: 499167 - protein, 16 aa, Homo sapiens
  CDR3 for alpha chain variable domain of TCR clone 249584 (TRAV3, TRAJ37)
CAVRPHGSGNTGKLIF

SEQ ID NO: 499168 - protein, 14 aa, Homo sapiens
  CDR3 for beta chain variable domain of TCR clone 249584 (TRBV27, TRBJ1-1)
CASSPQGKRAEAFF

SEQ ID NO: 499169 - protein, 12 aa, Homo sapiens
  CDR3 for alpha chain variable domain of TCR clone 249585 (TRAV2, TRAJ33)
CAVPDSNYQLIW

SEQ ID NO: 499170 - protein, 17 aa, Homo sapiens
  CDR3 for beta chain variable domain of TCR clone 249585 (TRBV6-5, TRBJ2-3)
CASIYGPSLYKSDTQYF

SEQ ID NO: 499171 - protein, 15 aa, Homo sapiens
  CDR3 for alpha chain variable domain of TCR clone 249586 (TRAV26-1, TRAJ29)
CIVRVEGSGNTPLGF

SEQ ID NO: 499172 - protein, 13 aa, Homo sapiens
  CDR3 for beta chain variable domain of TCR clone 249586 (TRBV10-3, TRBJ2-7)
CASKLAVNYEQYF

SEQ ID NO: 499173 - protein, 11 aa, Homo sapiens
  CDR3 for alpha chain variable domain of TCR clone 249587 (TRAV2, TRAJ13)
CASGGYQKVTF

SEQ ID NO: 499174 - protein, 17 aa, Homo sapiens
  CDR3 for beta chain variable domain of TCR clone 249587 (TRBV7-3, TRBJ2-3)
CTSSLMKRMRGADTQYF

SEQ ID NO: 499175 - protein, 14 aa, Homo sapiens
  CDR3 for alpha chain variable domain of TCR clone 249588 (TRAV1-2, TRAJ8)
CAVREDTGFQKLAF

SEQ ID NO: 499176 - protein, 14 aa, Homo sapiens
  CDR3 for beta chain variable domain of TCR clone 249588 (TRBV29-1, TRBJ2-3)
CSAGAGVGADTQYF

SEQ ID NO: 499177 - protein, 20 aa, Homo sapiens
  CDR3 for alpha chain variable domain of TCR clone 249589 (TRAV12-2, TRAJ52)
SPVIQPPARAGGTSYGKLTF

SEQ ID NO: 499178 - protein, 13 aa, Homo sapiens
  CDR3 for beta chain variable domain of TCR clone 249589 (TRBV11-1, TRBJ1-1)
CASSKQGRTEAFF

SEQ ID NO: 499179 - protein, 12 aa, Homo sapiens
  CDR3 for alpha chain variable domain of TCR clone 249590 (TRAV12-2, TRAJ20)
CAVKGGFGAGTT

SEQ ID NO: 499180 - protein, 13 aa, Homo sapiens
  CDR3 for beta chain variable domain of TCR clone 249590 (TRBV12-4, TRBJ2-7)
CASSPGQLYEQYF

SEQ ID NO: 499181 - protein, 13 aa, Homo sapiens
  CDR3 for alpha chain variable domain of TCR clone 249591 (TRAV16, TRAJ34)
CALRIWNTDKLIF

SEQ ID NO: 499182 - protein, 16 aa, Homo sapiens
  CDR3 for beta chain variable domain of TCR clone 249591 (TRBV2, TRBJ1-3)
CASSERGVNSGNTIYF

SEQ ID NO: 499183 - protein, 11 aa, Homo sapiens
  CDR3 for alpha chain variable domain of TCR clone 249592 (TRAV26-1, TRAJ9)
CIVTGGFKTIF

SEQ ID NO: 499184 - protein, 14 aa, Homo sapiens
  CDR3 for beta chain variable domain of TCR clone 249592 (TRBV19, TRBJ2-1)
CASPTFVLSGEQFF

SEQ ID NO: 499185 - protein, 15 aa, Homo sapiens
  CDR3 for alpha chain variable domain of TCR clone 249593 (TRAV17, TRAJ4)
CATGTWSGGYNKLIF

SEQ ID NO: 499186 - protein, 13 aa, Homo sapiens
  CDR3 for beta chain variable domain of TCR clone 249593 (TRBV12-4, TRBJ1-1)
CASSRPGNTEAFF

SEQ ID NO: 499187 - protein, 13 aa, Homo sapiens
  CDR3 for alpha chain variable domain of TCR clone 249594 (TRAV21, TRAJ3)
CCEPYSRASKIIF

SEQ ID NO: 499188 - protein, 12 aa, Homo sapiens
  CDR3 for beta chain variable domain of TCR clone 249594 (TRBV12-4, TRBJ1-2)
CASSFIWLHLRF

SEQ ID NO: 499189 - protein, 17 aa, Homo sapiens
  CDR3 for alpha chain variable domain of TCR clone 249595 (TRAV1-1, TRAJ11)
CAGYSTLTFGKGTMLLF

SEQ ID NO: 499190 - protein, 15 aa, Homo sapiens
  CDR3 for beta chain variable domain of TCR clone 249595 (TRBV6-5, TRBJ2-1)
CASRGDFDSYNEQFF

SEQ ID NO: 499191 - protein, 14 aa, Homo sapiens
  CDR3 for alpha chain variable domain of TCR clone 249596 (TRAV13-1, TRAJ4)
CAASLSGGYNKLTF

SEQ ID NO: 499192 - protein, 12 aa, Homo sapiens
  CDR3 for beta chain variable domain of TCR clone 249596 (TRBV20-1, TRBJ2-5)
CRVAGAGETQYF

SEQ ID NO: 499193 - protein, 14 aa, Homo sapiens
  CDR3 for alpha chain variable domain of TCR clone 249597 (TRAV8-1, TRAJ5)
CAVRTDTGRRALTF

SEQ ID NO: 499194 - protein, 15 aa, Homo sapiens
  CDR3 for beta chain variable domain of TCR clone 249597 (TRBV7-3, TRBJ2-1)
CASSPAGGGEVEQFF

SEQ ID NO: 499195 - protein, 13 aa, Homo sapiens
  CDR3 for alpha chain variable domain of TCR clone 249598 (TRAV12-3, TRAJ13)
CALSSGGYQKVTF

SEQ ID NO: 499196 - protein, 16 aa, Homo sapiens
  CDR3 for beta chain variable domain of TCR clone 249598 (TRBV7-3, TRBJ2-2)
CASSLKRGTLSGELFF

SEQ ID NO: 499197 - protein, 15 aa, Homo sapiens
  CDR3 for alpha chain variable domain of TCR clone 249599 (TRAV12-1, TRAJ26)
CVVNSWVTMVRILSL

SEQ ID NO: 499198 - protein, 15 aa, Homo sapiens
  CDR3 for beta chain variable domain of TCR clone 249599 (TRBV7-8, TRBJ1-5)
CASSLALGGQQPQHF

SEQ ID NO: 499199 - protein, 13 aa, Homo sapiens
  CDR3 for alpha chain variable domain of TCR clone 249600 (TRAV27, TRAJ6)
CAGGTRGSYIPTF

SEQ ID NO: 499200 - protein, 15 aa, Homo sapiens
  CDR3 for beta chain variable domain of TCR clone 249600 (TRBV2, TRBJ2-3)
CASIDFEKATDTQYF

SEQ ID NO: 499201 - protein, 12 aa, Homo sapiens
  CDR3 for alpha chain variable domain of TCR clone 249601 (TRAV3, TRAJ7)
CADLLWEQQTRF

SEQ ID NO: 499202 - protein, 15 aa, Homo sapiens
  CDR3 for beta chain variable domain of TCR clone 249601 (TRBV29-1, TRBJ2-1)
CSGRDRKSSYNEQFF

SEQ ID NO: 499203 - protein, 16 aa, Homo sapiens
  CDR3 for alpha chain variable domain of TCR clone 249602 (TRAV26-1, TRAJ37)
CIVRGDGSGNTGKLIF

SEQ ID NO: 499204 - protein, 12 aa, Homo sapiens
  CDR3 for beta chain variable domain of TCR clone 249602 (TRBV28, TRBJ2-7)
CASSFSSYEQYF

SEQ ID NO: 499205 - protein, 14 aa, Homo sapiens
  CDR3 for alpha chain variable domain of TCR clone 249603 (TRAV12-3, TRAJ12)
CAMSEVDSSYKLIF

SEQ ID NO: 499206 - protein, 12 aa, Homo sapiens
  CDR3 for beta chain variable domain of TCR clone 249603 (TRBV18, TRBJ1-4)
CTSSPSREKLFF

SEQ ID NO: 499207 - protein, 18 aa, Homo sapiens
  CDR3 for alpha chain variable domain of TCR clone 249604 (TRAV21, TRAJ52)
CAVRPSPAGGTSYGKLTF

SEQ ID NO: 499208 - protein, 13 aa, Homo sapiens
  CDR3 for beta chain variable domain of TCR clone 249604 (TRBV10-3, TRBJ2-1)
CAISEFSWREQFF

SEQ ID NO: 499209 - protein, 13 aa, Homo sapiens
  CDR3 for alpha chain variable domain of TCR clone 249605 (TRAV2, TRAJ29)
CAVYSSGNTPLVF

SEQ ID NO: 499210 - protein, 14 aa, Homo sapiens
  CDR3 for beta chain variable domain of TCR clone 249605 (TRBV7-9, TRBJ1-1)
CASSLGGLKTEAVF

SEQ ID NO: 499211 - protein, 11 aa, Homo sapiens
  CDR3 for alpha chain variable domain of TCR clone 249606 (TRAV3, TRAJ21)
CAVGNFNKFYF

SEQ ID NO: 499212 - protein, 20 aa, Homo sapiens
  CDR3 for beta chain variable domain of TCR clone 249606 (TRBV3-1, TRBJ2-6)
CASSPRPGLEGGAGANVLSF

SEQ ID NO: 499213 - protein, 14 aa, Homo sapiens
  CDR3 for alpha chain variable domain of TCR clone 249607 (TRAV21, TRAJ35)
CAVIPRGFGNVLHC

SEQ ID NO: 499214 - protein, 13 aa, Homo sapiens
  CDR3 for beta chain variable domain of TCR clone 249607 (TRBV13, TRBJ2-5)
CASSPEVGETQYF

SEQ ID NO: 499215 - protein, 13 aa, Homo sapiens
  CDR3 for alpha chain variable domain of TCR clone 249608 (TRAV8-4, TRAJ3)
CAGSDSGASKIIF

SEQ ID NO: 499216 - protein, 16 aa, Homo sapiens
  CDR3 for beta chain variable domain of TCR clone 249608 (TRBV7-9, TRBJ2-7)
CASSNHGGQEKYEQYF

SEQ ID NO: 499217 - protein, 14 aa, Homo sapiens
  CDR3 for alpha chain variable domain of TCR clone 249609 (TRAV3, TRAJ7)
CAVREEEREQQTRF

SEQ ID NO: 499218 - protein, 15 aa, Homo sapiens
  CDR3 for beta chain variable domain of TCR clone 249609 (TRBV6-3, TRBJ2-7)
CASSSPGTVFYEQYF

SEQ ID NO: 499219 - protein, 14 aa, Homo sapiens
  CDR3 for alpha chain variable domain of TCR clone 249610 (TRAV12-3, TRAJ10)
SHLSLTGGGNKLTF

SEQ ID NO: 499220 - protein, 13 aa, Homo sapiens
  CDR3 for beta chain variable domain of TCR clone 249610 (TRBV27, TRBJ1-1)
CASSLPIGAEAFF

SEQ ID NO: 499221 - protein, 17 aa, Homo sapiens
  CDR3 for alpha chain variable domain of TCR clone 249611 (TRAV13-1, TRAJ52)
CAAGRNAGGTSYGKLTF

SEQ ID NO: 499222 - protein, 15 aa, Homo sapiens
  CDR3 for beta chain variable domain of TCR clone 249611 (TRBV7-3, TRBJ2-1)
CASSLSSGSFDEQFF

SEQ ID NO: 499223 - protein, 14 aa, Homo sapiens
  CDR3 for alpha chain variable domain of TCR clone 249612 (TRAV26-1, TRAJ38)
CIADNAGNNHILNP

SEQ ID NO: 499224 - protein, 12 aa, Homo sapiens
  CDR3 for beta chain variable domain of TCR clone 249612 (TRBV11-2, TRBJ2-2)
CASSLGGGELFF

SEQ ID NO: 499225 - protein, 14 aa, Homo sapiens
  CDR3 for alpha chain variable domain of TCR clone 249613 (TRAV17, TRAJ17)
CATDEAAAGNKLTF

SEQ ID NO: 499226 - protein, 16 aa, Homo sapiens
  CDR3 for beta chain variable domain of TCR clone 249613 (TRBV19, TRBJ2-1)
CASSIETGSPYNEQFF

SEQ ID NO: 499227 - protein, 15 aa, Homo sapiens
  CDR3 for alpha chain variable domain of TCR clone 249614 (TRAV3, TRAJ22)
CAVRDRGGSSRQLTF

SEQ ID NO: 499228 - protein, 16 aa, Homo sapiens
  CDR3 for beta chain variable domain of TCR clone 249614 (TRBV5-4, TRBJ2-3)
CASQQPGAGGVDTQYF

SEQ ID NO: 499229 - protein, 15 aa, Homo sapiens
  CDR3 for alpha chain variable domain of TCR clone 249615 (TRAV26-1, TRAJ12)
IASSELMDRSYKLIF

SEQ ID NO: 499230 - protein, 11 aa, Homo sapiens
  CDR3 for beta chain variable domain of TCR clone 249615 (TRBV7-9, TRBJ2-3)
CASSPPDTQYF

SEQ ID NO: 499231 - protein, 12 aa, Homo sapiens
  CDR3 for alpha chain variable domain of TCR clone 249616 (TRAV12-2, TRAJ10)
WGITGGGNNLTF

SEQ ID NO: 499232 - protein, 16 aa, Homo sapiens
  CDR3 for beta chain variable domain of TCR clone 249616 (TRBV6-4, TRBJ1-2)
CASSEAVGDPNYGYTF

SEQ ID NO: 499233 - protein, 15 aa, Homo sapiens
  CDR3 for alpha chain variable domain of TCR clone 249617 (TRAV3, TRAJ20)
CAVRDVKLIDYKLRF

SEQ ID NO: 499234 - protein, 15 aa, Homo sapiens
  CDR3 for beta chain variable domain of TCR clone 249617 (TRBV7-9, TRBJ1-6)
CASSSPGRGNSPLHF

SEQ ID NO: 499235 - protein, 13 aa, Homo sapiens
  CDR3 for alpha chain variable domain of TCR clone 249618 (TRAV12-1, TRAJ33)
CGDAPDSNYQLIW

SEQ ID NO: 499236 - protein, 16 aa, Homo sapiens
  CDR3 for beta chain variable domain of TCR clone 249618 (TRBV10-3, TRBJ2-1)
CAISGVGDGGGGEQFF

SEQ ID NO: 499237 - protein, 16 aa, Homo sapiens
  CDR3 for alpha chain variable domain of TCR clone 249619 (TRAV30, TRAJ24)
CGTEIVDADSWGKFQF

SEQ ID NO: 499238 - protein, 14 aa, Homo sapiens
  CDR3 for beta chain variable domain of TCR clone 249619 (TRBV12-5, TRBJ2-5)
CASGSRTQRETQYF

SEQ ID NO: 499239 - protein, 14 aa, Homo sapiens
  CDR3 for alpha chain variable domain of TCR clone 249620 (TRAV2, TRAJ9)
CAVEDRSGGFKTIF

SEQ ID NO: 499240 - protein, 12 aa, Homo sapiens
  CDR3 for beta chain variable domain of TCR clone 249620 (TRBV19, TRBJ1-6)
CASKDWPGGLFF

SEQ ID NO: 499241 - protein, 12 aa, Homo sapiens
  CDR3 for alpha chain variable domain of TCR clone 249621 (TRAV12-2, TRAJ21)
CAVNRNFNKFYF

SEQ ID NO: 499242 - protein, 14 aa, Homo sapiens
  CDR3 for beta chain variable domain of TCR clone 249621 (TRBV12-5, TRBJ2-5)
CASGSRTHQETQYF

SEQ ID NO: 499243 - protein, 14 aa, Homo sapiens
  CDR3 for alpha chain variable domain of TCR clone 249622 (TRAV12-1, TRAJ17)
CVVNYKAAGNKLTF

SEQ ID NO: 499244 - protein, 17 aa, Homo sapiens
  CDR3 for beta chain variable domain of TCR clone 249622 (TRBV20-1, TRBJ2-1)
CSASSSGLVGSYSEQFF

SEQ ID NO: 499245 - protein, 12 aa, Homo sapiens
  CDR3 for alpha chain variable domain of TCR clone 249623 (TRAV17, TRAJ26)
CATGNYGQNFFF

SEQ ID NO: 499246 - protein, 16 aa, Homo sapiens
  CDR3 for beta chain variable domain of TCR clone 249623 (TRBV11-2, TRBJ2-2)
CASSLRTGNLIGELFF

SEQ ID NO: 499247 - protein, 15 aa, Homo sapiens
  CDR3 for alpha chain variable domain of TCR clone 249624 (TRAV3, TRAJ20)
LAVRDIKLSDYKLSF

SEQ ID NO: 499248 - protein, 16 aa, Homo sapiens
  CDR3 for beta chain variable domain of TCR clone 249624 (TRBV12-4, TRBJ2-1)
CASSAVGQGNGDEQFF

SEQ ID NO: 499249 - protein, 13 aa, Homo sapiens
  CDR3 for alpha chain variable domain of TCR clone 249625 (TRAV13-2, TRAJ13)
CAERPGGYQKVNF

SEQ ID NO: 499250 - protein, 14 aa, Homo sapiens
  CDR3 for beta chain variable domain of TCR clone 249625 (TRBV23-1, TRBJ2-5)
CASSFLRSQETQYF

SEQ ID NO: 499251 - protein, 14 aa, Homo sapiens
  CDR3 for alpha chain variable domain of TCR clone 249626 (TRAV23/DV6, TRAJ57)
CAAALKGGSEKLVF

SEQ ID NO: 499252 - protein, 16 aa, Homo sapiens
  CDR3 for beta chain variable domain of TCR clone 249626 (TRBV24-1, TRBJ2-3)
CATSDPGTGATDTQYF

SEQ ID NO: 499253 - protein, 15 aa, Homo sapiens
  CDR3 for alpha chain variable domain of TCR clone 249627 (TRAV3, TRAJ22)
CAVRDRGGSARQLTF

SEQ ID NO: 499254 - protein, 13 aa, Homo sapiens
  CDR3 for beta chain variable domain of TCR clone 249627 (TRBV7-9, TRBJ1-2)
CASSLKQYYGYTF

SEQ ID NO: 499255 - protein, 12 aa, Homo sapiens
  CDR3 for alpha chain variable domain of TCR clone 249628 (TRAV38-1, TRAJ32)
CAPLGATNKLIF

SEQ ID NO: 499256 - protein, 12 aa, Homo sapiens
  CDR3 for beta chain variable domain of TCR clone 249628 (TRBV12-5, TRBJ2-5)
CASGQGVETQYF

SEQ ID NO: 499257 - protein, 18 aa, Homo sapiens
  CDR3 for alpha chain variable domain of TCR clone 249629 (TRAV26-1, TRAJ22)
CVVRVALISSGSARQLTF

SEQ ID NO: 499258 - protein, 13 aa, Homo sapiens
  CDR3 for beta chain variable domain of TCR clone 249629 (TRBV13, TRBJ2-5)
CASSPEVGETQYF

SEQ ID NO: 499259 - protein, 16 aa, Homo sapiens
  CDR3 for alpha chain variable domain of TCR clone 249630 (TRAV3, TRAJ37)
CAVRPHCSGNTGKLIF

SEQ ID NO: 499260 - protein, 15 aa, Homo sapiens
  CDR3 for beta chain variable domain of TCR clone 249630 (TRBV6-3, TRBJ2-7)
CASSSPGTVFYEQYF

SEQ ID NO: 499261 - protein, 12 aa, Homo sapiens
  CDR3 for alpha chain variable domain of TCR clone 249631 (TRAV12-2, TRAJ8)
CAVNTGFHKLVF

SEQ ID NO: 499262 - protein, 15 aa, Homo sapiens
  CDR3 for beta chain variable domain of TCR clone 249631 (TRBV7-8, TRBJ1-5)
CASSLERRGLEAQHF

SEQ ID NO: 499263 - protein, 15 aa, Homo sapiens
  CDR3 for alpha chain variable domain of TCR clone 249632 (TRAV2, TRAJ32)
CAVANCGGATNKLIF

SEQ ID NO: 499264 - protein, 15 aa, Homo sapiens
  CDR3 for beta chain variable domain of TCR clone 249632 (TRBV7-7, TRBJ2-5)
CASSQLERSEETQYF

SEQ ID NO: 499265 - protein, 16 aa, Homo sapiens
  CDR3 for alpha chain variable domain of TCR clone 249633 (TRAV26-1, TRAJ23)
CIVRVHPYNQGGKLIF

SEQ ID NO: 499266 - protein, 13 aa, Homo sapiens
  CDR3 for beta chain variable domain of TCR clone 249633 (TRBV20-1, TRBJ2-5)
CSARGNYQETQYF

SEQ ID NO: 499267 - protein, 14 aa, Homo sapiens
  CDR3 for alpha chain variable domain of TCR clone 249634 (TRAV12-2, TRAJ17)
CAVLLKAAGNKLTF

SEQ ID NO: 499268 - protein, 14 aa, Homo sapiens
  CDR3 for beta chain variable domain of TCR clone 249634 (TRBV7-2, TRBJ2-7)
CASRSQGAAYEQYF

SEQ ID NO: 499269 - protein, 18 aa, Homo sapiens
  CDR3 for alpha chain variable domain of TCR clone 249635 (TRAV12-1, TRAJ26)
SSVIQPPTSVPYGQNFVF

SEQ ID NO: 499270 - protein, 14 aa, Homo sapiens
  CDR3 for beta chain variable domain of TCR clone 249635 (TRBV5-4, TRBJ2-1)
CASSLDQGLNEQFL

SEQ ID NO: 499271 - protein, 13 aa, Homo sapiens
  CDR3 for alpha chain variable domain of TCR clone 249636 (TRAV26-1, TRAJ34)
CIVRPWITVKLIF

SEQ ID NO: 499272 - protein, 14 aa, Homo sapiens
  CDR3 for beta chain variable domain of TCR clone 249636 (TRBV7-2, TRBJ2-7)
CASRSQGAAYEQYF

SEQ ID NO: 499273 - protein, 12 aa, Homo sapiens
  CDR3 for alpha chain variable domain of TCR clone 249637 (TRAV27, TRAJ35)
CAGADFGNVLHC

SEQ ID NO: 499274 - protein, 17 aa, Homo sapiens
  CDR3 for beta chain variable domain of TCR clone 249637 (TRBV4-1, TRBJ2-5)
CASSQDLTGGPIETQYF

SEQ ID NO: 499275 - protein, 12 aa, Homo sapiens
  CDR3 for alpha chain variable domain of TCR clone 249638 (TRAV17, TRAJ20)
CATALNDYTLSF

SEQ ID NO: 499276 - protein, 12 aa, Homo sapiens
  CDR3 for beta chain variable domain of TCR clone 249638 (TRBV10-3, TRBJ2-7)
CAHGADSGEQYF

SEQ ID NO: 499277 - protein, 14 aa, Homo sapiens
  CDR3 for alpha chain variable domain of TCR clone 249639 (TRAV26-1, TRAJ45)
CIEVTGGGADGLTF

SEQ ID NO: 499278 - protein, 13 aa, Homo sapiens
  CDR3 for beta chain variable domain of TCR clone 249639 (TRBV19, TRBJ1-3)
CASRLSLGNTIYF

SEQ ID NO: 499279 - protein, 13 aa, Homo sapiens
  CDR3 for alpha chain variable domain of TCR clone 249640 (TRAV38-2/DV8, TRAJ34)
CADRTWNTDKLIF

SEQ ID NO: 499280 - protein, 18 aa, Homo sapiens
  CDR3 for beta chain variable domain of TCR clone 249640 (TRBV6-6, TRBJ1-3)
CASSYSKWDSISGNTIYF

SEQ ID NO: 499281 - protein, 15 aa, Homo sapiens
  CDR3 for alpha chain variable domain of TCR clone 249641 (TRAV12-1, TRAJ23)
CGERSRCNQGGKLIF

SEQ ID NO: 499282 - protein, 15 aa, Homo sapiens
  CDR3 for beta chain variable domain of TCR clone 249641 (TRBV11-2, TRBJ1-2)
CASSLEGVQRNGYTF

SEQ ID NO: 499283 - protein, 11 aa, Homo sapiens
  CDR3 for alpha chain variable domain of TCR clone 249642 (TRAV21, TRAJ48)
CAVDGNEKLTF

SEQ ID NO: 499284 - protein, 15 aa, Homo sapiens
  CDR3 for beta chain variable domain of TCR clone 249642 (TRBV28, TRBJ2-1)
CASSIIAGGRSEQFF

SEQ ID NO: 499285 - protein, 21 aa, Homo sapiens
  CDR3 for alpha chain variable domain of TCR clone 249643 (TRAV12-2, TRAJ10)
CAVRGLPGRRKQTHLWDGHAA

SEQ ID NO: 499286 - protein, 14 aa, Homo sapiens
  CDR3 for beta chain variable domain of TCR clone 249643 (TRBV12-5, TRBJ2-5)
CASGSRTHQETQYF

SEQ ID NO: 499287 - protein, 16 aa, Homo sapiens
  CDR3 for alpha chain variable domain of TCR clone 249644 (TRAV30, TRAJ24)
CGTEIVDADSRGNSSL

SEQ ID NO: 499288 - protein, 15 aa, Homo sapiens
  CDR3 for beta chain variable domain of TCR clone 249644 (TRBV20-1, TRBJ2-7)
CSARDRVSGMDEQYF

SEQ ID NO: 499289 - protein, 13 aa, Homo sapiens
  CDR3 for alpha chain variable domain of TCR clone 249645 (TRAV17, TRAJ22)
CAHHSGSARQLTF

SEQ ID NO: 499290 - protein, 13 aa, Homo sapiens
  CDR3 for beta chain variable domain of TCR clone 249645 (TRBV7-9, TRBJ1-2)
CASSLKQNYGYTF

SEQ ID NO: 499291 - protein, 16 aa, Homo sapiens
  CDR3 for alpha chain variable domain of TCR clone 249646 (TRAV3, TRAJ10)
CAVRDMRAGGGNKLTF

SEQ ID NO: 499292 - protein, 15 aa, Homo sapiens
  CDR3 for beta chain variable domain of TCR clone 249646 (TRBV7-2, TRBJ1-5)
CASSRGKGDNQPQHF

SEQ ID NO: 499293 - protein, 15 aa, Homo sapiens
  CDR3 for alpha chain variable domain of TCR clone 249647 (TRAV2, TRAJ11)
CAVGGRNSGYSTLTF

SEQ ID NO: 499294 - protein, 13 aa, Homo sapiens
  CDR3 for beta chain variable domain of TCR clone 249647 (TRBV20-1, TRBJ1-1)
CSARVGGNTEAFF

SEQ ID NO: 499295 - protein, 14 aa, Homo sapiens
  CDR3 for alpha chain variable domain of TCR clone 249648 (TRAV2, TRAJ3)
CAVRPYSSASKIIF

SEQ ID NO: 499296 - protein, 17 aa, Homo sapiens
  CDR3 for beta chain variable domain of TCR clone 249648 (TRBV7-6, TRBJ2-5)
CASSSPQAGDHSETQYF

SEQ ID NO: 499297 - protein, 12 aa, Homo sapiens
  CDR3 for alpha chain variable domain of TCR clone 249649 (TRAV12-3, TRAJ17)
CAITLTGNKLTF

SEQ ID NO: 499298 - protein, 15 aa, Homo sapiens
  CDR3 for beta chain variable domain of TCR clone 249649 (TRBV20-1, TRBJ2-7)
CSARDQVSGMDEQYF

SEQ ID NO: 499299 - protein, 12 aa, Homo sapiens
  CDR3 for alpha chain variable domain of TCR clone 249650 (TRAV13-2, TRAJ23)
CAERHRGGKLFF

SEQ ID NO: 499300 - protein, 16 aa, Homo sapiens
  CDR3 for beta chain variable domain of TCR clone 249650 (TRBV20-1, TRBJ1-4)
CSAPGQGLLTNEKLFF

SEQ ID NO: 499301 - protein, 13 aa, Homo sapiens
  CDR3 for alpha chain variable domain of TCR clone 249651 (TRAV13-1, TRAJ40)
CAARTSGTYKYIF

SEQ ID NO: 499302 - protein, 17 aa, Homo sapiens
  CDR3 for beta chain variable domain of TCR clone 249651 (TRBV4-1, TRBJ2-3)
CASSRGYVSGGTDTQYF

SEQ ID NO: 499303 - protein, 13 aa, Homo sapiens
  CDR3 for alpha chain variable domain of TCR clone 249652 (TRAV16, TRAJ11)
CALTQSGYSTLTF

SEQ ID NO: 499304 - protein, 19 aa, Homo sapiens
  CDR3 for beta chain variable domain of TCR clone 249652 (TRBV5-1, TRBJ1-5)
CASSLAFLPGAISPSILVM

SEQ ID NO: 499305 - protein, 15 aa, Homo sapiens
  CDR3 for alpha chain variable domain of TCR clone 249653 (TRAV4, TRAJ28)
CLVEGSGAGSYQLTF

SEQ ID NO: 499306 - protein, 15 aa, Homo sapiens
  CDR3 for beta chain variable domain of TCR clone 249653 (TRBV11-3, TRBJ2-3)
CASLKDGREGDTQYF

SEQ ID NO: 499307 - protein, 12 aa, Homo sapiens
  CDR3 for alpha chain variable domain of TCR clone 249654 (TRAV1-2, TRAJ24)
CAVGGSWGKFQF

SEQ ID NO: 499308 - protein, 15 aa, Homo sapiens
  CDR3 for beta chain variable domain of TCR clone 249654 (TRBV6-1, TRBJ2-7)
CASSEGVSNPYEQYF

SEQ ID NO: 499309 - protein, 16 aa, Homo sapiens
  CDR3 for alpha chain variable domain of TCR clone 249655 (TRAV26-1, TRAJ52)
CIVSNAGGTSYGKLTF

SEQ ID NO: 499310 - protein, 16 aa, Homo sapiens
  CDR3 for beta chain variable domain of TCR clone 249655 (TRBV5-1, TRBJ2-1)
CASSLEGRGLYNEQYF

SEQ ID NO: 499311 - protein, 12 aa, Homo sapiens
  CDR3 for alpha chain variable domain of TCR clone 249656 (TRAV1-1, TRAJ30)
CAVRGRDDKIIF

SEQ ID NO: 499312 - protein, 15 aa, Homo sapiens
  CDR3 for beta chain variable domain of TCR clone 249656 (TRBV13, TRBJ1-5)
CASSRTGRGHQPQHF

SEQ ID NO: 499313 - protein, 18 aa, Homo sapiens
  CDR3 for alpha chain variable domain of TCR clone 249657 (TRAV29/DV5, TRAJ52)
CAAGFRGAGGTSYGKLTF

SEQ ID NO: 499314 - protein, 16 aa, Homo sapiens
  CDR3 for beta chain variable domain of TCR clone 249657 (TRBV2, TRBJ2-3)
CASSTSVEGVTDTQYF

SEQ ID NO: 499315 - protein, 14 aa, Homo sapiens
  CDR3 for alpha chain variable domain of TCR clone 249658 (TRAV12-2, TRAJ13)
CAVKKTGGYQKVTF

SEQ ID NO: 499316 - protein, 12 aa, Homo sapiens
  CDR3 for beta chain variable domain of TCR clone 249658 (TRBV6-5, TRBJ2-7)
CASYIYGYEQYF

SEQ ID NO: 499317 - protein, 15 aa, Homo sapiens
  CDR3 for alpha chain variable domain of TCR clone 249659 (TRAV12-1, TRAJ44)
CVVFVNTGTASKLTF

SEQ ID NO: 499318 - protein, 20 aa, Homo sapiens
  CDR3 for beta chain variable domain of TCR clone 249659 (TRBV28, TRBJ2-1)
CASTPIGRSPGLAGGNEQFF

SEQ ID NO: 499319 - protein, 14 aa, Homo sapiens
  CDR3 for alpha chain variable domain of TCR clone 249660 (TRAV12-1, TRAJ26)
CVVKGSNYGQNFVF

SEQ ID NO: 499320 - protein, 14 aa, Homo sapiens
  CDR3 for beta chain variable domain of TCR clone 249660 (TRBV11-2, TRBJ2-5)
CASSRTGGIETQYF

SEQ ID NO: 499321 - protein, 13 aa, Homo sapiens
  CDR3 for alpha chain variable domain of TCR clone 249661 (TRAV17, TRAJ5)
CAPMDTGRRALTF

SEQ ID NO: 499322 - protein, 15 aa, Homo sapiens
  CDR3 for beta chain variable domain of TCR clone 249661 (TRBV6-6, TRBJ2-5)
CASSPGGGLEEAQYF

SEQ ID NO: 499323 - protein, 12 aa, Homo sapiens
  CDR3 for alpha chain variable domain of TCR clone 249662 (TRAV8-3, TRAJ40)
GAVTSGTYKYIF

SEQ ID NO: 499324 - protein, 14 aa, Homo sapiens
  CDR3 for beta chain variable domain of TCR clone 249662 (TRBV12-4, TRBJ2-3)
CASSGQGSTDTQYF

SEQ ID NO: 499325 - protein, 11 aa, Homo sapiens
  CDR3 for alpha chain variable domain of TCR clone 249663 (TRAV27, TRAJ45)
CAGAQEEVLTD

SEQ ID NO: 499326 - protein, 17 aa, Homo sapiens
  CDR3 for beta chain variable domain of TCR clone 249663 (TRBV11-2, TRBJ2-1)
CASSLYPPGVEYNEQFC

SEQ ID NO: 499327 - protein, 17 aa, Homo sapiens
  CDR3 for alpha chain variable domain of TCR clone 249664 (TRAV3, TRAJ6)
CAVRDGPRAGGSYIPTC

SEQ ID NO: 499328 - protein, 14 aa, Homo sapiens
  CDR3 for beta chain variable domain of TCR clone 249664 (TRBV7-2, TRBJ2-7)
CAGSPKTSFYEQYF

SEQ ID NO: 499329 - protein, 12 aa, Homo sapiens
  CDR3 for alpha chain variable domain of TCR clone 249665 (TRAV13-2, TRAJ8)
CAPWLGFQKLVF

SEQ ID NO: 499330 - protein, 15 aa, Homo sapiens
  CDR3 for beta chain variable domain of TCR clone 249665 (TRBV5-1, TRBJ2-3)
CASSVTSGSTDTQYF

SEQ ID NO: 499331 - protein, 16 aa, Homo sapiens
  CDR3 for alpha chain variable domain of TCR clone 249666 (TRAV1-2, TRAJ10)
CAVRGVLTGGGNKLTF

SEQ ID NO: 499332 - protein, 15 aa, Homo sapiens
  CDR3 for beta chain variable domain of TCR clone 249666 (TRBV28, TRBJ1-5)
CASRHGTGFNQPQHF

SEQ ID NO: 499333 - protein, 13 aa, Homo sapiens
  CDR3 for alpha chain variable domain of TCR clone 249667 (TRAV21, TRAJ27)
CAARPGNAGKSTF

SEQ ID NO: 499334 - protein, 13 aa, Homo sapiens
  CDR3 for beta chain variable domain of TCR clone 249667 (TRBV7-3, TRBJ2-7)
CASSQAGGYEQYL

SEQ ID NO: 499335 - protein, 15 aa, Homo sapiens
  CDR3 for alpha chain variable domain of TCR clone 249668 (TRAV12-3, TRAJ27)
CAMRAYNTNAGKLTF

SEQ ID NO: 499336 - protein, 13 aa, Homo sapiens
  CDR3 for beta chain variable domain of TCR clone 249668 (TRBV11-2, TRBJ2-5)
CASGRGPSETQYF

SEQ ID NO: 499337 - protein, 13 aa, Homo sapiens
  CDR3 for alpha chain variable domain of TCR clone 249669 (TRAV26-1, TRAJ31)
CIVRVDGNARLMF

SEQ ID NO: 499338 - protein, 17 aa, Homo sapiens
  CDR3 for beta chain variable domain of TCR clone 249669 (TRBV11-2, TRBJ2-1)
CARSLYPPGVEYNEQFF

SEQ ID NO: 499339 - protein, 15 aa, Homo sapiens
  CDR3 for alpha chain variable domain of TCR clone 249670 (TRAV23/DV6, TRAJ13)
CAAWPGGGGYQKVTF

SEQ ID NO: 499340 - protein, 13 aa, Homo sapiens
  CDR3 for beta chain variable domain of TCR clone 249670 (TRBV7-2, TRBJ2-2)
CASSLAVTGELFF

SEQ ID NO: 499341 - protein, 15 aa, Homo sapiens
  CDR3 for alpha chain variable domain of TCR clone 249671 (TRAV29/DV5, TRAJ42)
CAAKTDGGSQGNLIF

SEQ ID NO: 499342 - protein, 15 aa, Homo sapiens
  CDR3 for beta chain variable domain of TCR clone 249671 (TRBV5-1, TRBJ2-2)
CASSSQGGNTRELFF

SEQ ID NO: 499343 - protein, 14 aa, Homo sapiens
  CDR3 for alpha chain variable domain of TCR clone 249672 (TRAV12-1, TRAJ3)
CVVNPGSSASKIIF

SEQ ID NO: 499344 - protein, 15 aa, Homo sapiens
  CDR3 for beta chain variable domain of TCR clone 249672 (TRBV6-5, TRBJ2-1)
CASSYDAGAGNEQFF

SEQ ID NO: 499345 - protein, 12 aa, Homo sapiens
  CDR3 for alpha chain variable domain of TCR clone 249673 (TRAV12-1, TRAJ40)
CVFYSGTYKYIF

SEQ ID NO: 499346 - protein, 12 aa, Homo sapiens
  CDR3 for beta chain variable domain of TCR clone 249673 (TRBV11-2, TRBJ2-7)
CASSLPTYEQYF

SEQ ID NO: 499347 - protein, 15 aa, Homo sapiens
  CDR3 for alpha chain variable domain of TCR clone 249674 (TRAV3, TRAJ3)
CAVRDGHSSASKIIF

SEQ ID NO: 499348 - protein, 17 aa, Homo sapiens
  CDR3 for beta chain variable domain of TCR clone 249674 (TRBV25-1, TRBJ2-7)
CASSDARVVFSSYEQFF

SEQ ID NO: 499349 - protein, 16 aa, Homo sapiens
  CDR3 for alpha chain variable domain of TCR clone 249675 (TRAV8-3, TRAJ28)
GAVPPQRGAGSYQLTF

SEQ ID NO: 499350 - protein, 13 aa, Homo sapiens
  CDR3 for beta chain variable domain of TCR clone 249675 (TRBV7-6, TRBJ2-3)
CASSLRSDNTQYF

SEQ ID NO: 499351 - protein, 14 aa, Homo sapiens
  CDR3 for alpha chain variable domain of TCR clone 249676 (TRAV1-2, TRAJ16)
CAVNRFSDGQKLLL

SEQ ID NO: 499352 - protein, 13 aa, Homo sapiens
  CDR3 for beta chain variable domain of TCR clone 249676 (TRBV7-3, TRBJ1-1)
CASSQDWGAEAFF

SEQ ID NO: 499353 - protein, 15 aa, Homo sapiens
  CDR3 for alpha chain variable domain of TCR clone 249677 (TRAV3, TRAJ22)
CAVRDRGGSARQLPF

SEQ ID NO: 499354 - protein, 16 aa, Homo sapiens
  CDR3 for beta chain variable domain of TCR clone 249677 (TRBV5-4, TRBJ2-3)
CASKQPGAGGSDTQYF

SEQ ID NO: 499355 - protein, 11 aa, Homo sapiens
  CDR3 for alpha chain variable domain of TCR clone 249678 (TRAV13-1, TRAJ22)
CAASSARQLTF

SEQ ID NO: 499356 - protein, 16 aa, Homo sapiens
  CDR3 for beta chain variable domain of TCR clone 249678 (TRBV20-1, TRBJ1-4)
CSAPGQGLLANEKLFF

SEQ ID NO: 499357 - protein, 15 aa, Homo sapiens
  CDR3 for alpha chain variable domain of TCR clone 249679 (TRAV21, TRAJ53)
CATLNSGGSNYQLTF

SEQ ID NO: 499358 - protein, 16 aa, Homo sapiens
  CDR3 for beta chain variable domain of TCR clone 249679 (TRBV9, TRBJ2-1)
CASSVGGGGNYNEQFF

SEQ ID NO: 499359 - protein, 15 aa, Homo sapiens
  CDR3 for alpha chain variable domain of TCR clone 249680 (TRAV8-3, TRAJ45)
CAVEGSGGGADGLTF

SEQ ID NO: 499360 - protein, 16 aa, Homo sapiens
  CDR3 for beta chain variable domain of TCR clone 249680 (TRBV6-5, TRBJ2-6)
CASSYPLSSWANVLTF

SEQ ID NO: 499361 - protein, 13 aa, Homo sapiens
  CDR3 for alpha chain variable domain of TCR clone 249681 (TRAV8-6, TRAJ40)
CAVSVTGTYKYLF

SEQ ID NO: 499362 - protein, 15 aa, Homo sapiens
  CDR3 for beta chain variable domain of TCR clone 249681 (TRBV4-1, TRBJ2-3)
CASSRGQGIPDTQYF

SEQ ID NO: 499363 - protein, 12 aa, Homo sapiens
  CDR3 for alpha chain variable domain of TCR clone 249682 (TRAV12-3, TRAJ17)
CAMTLTGNKLTF

SEQ ID NO: 499364 - protein, 15 aa, Homo sapiens
  CDR3 for beta chain variable domain of TCR clone 249682 (TRBV7-9, TRBJ1-4)
CAGSRTGGFNEKLFF

SEQ ID NO: 499365 - protein, 11 aa, Homo sapiens
  CDR3 for alpha chain variable domain of TCR clone 249683 (TRAV3, TRAJ21)
CAVGNFNKFYF

SEQ ID NO: 499366 - protein, 15 aa, Homo sapiens
  CDR3 for beta chain variable domain of TCR clone 249683 (TRBV11-1, TRBJ2-7)
CASSLNYGASYEQYF

SEQ ID NO: 499367 - protein, 16 aa, Homo sapiens
  CDR3 for alpha chain variable domain of TCR clone 249684 (TRAV1-1, TRAJ28)
CAVRDDSGAGSYQLTF

SEQ ID NO: 499368 - protein, 12 aa, Homo sapiens
  CDR3 for beta chain variable domain of TCR clone 249684 (TRBV11-2, TRBJ2-5)
CASSLDTQTQYY

SEQ ID NO: 499369 - protein, 16 aa, Homo sapiens
  CDR3 for alpha chain variable domain of TCR clone 249685 (TRAV10, TRAJ13)
CLVSARNSGGYQKVTF

SEQ ID NO: 499370 - protein, 19 aa, Homo sapiens
  CDR3 for beta chain variable domain of TCR clone 249685 (TRBV12-4, TRBJ2-1)
CASTLAFDPRDKEANEQFF

SEQ ID NO: 499371 - protein, 11 aa, Homo sapiens
  CDR3 for alpha chain variable domain of TCR clone 249686 (TRAV22, TRAJ27)
SAVLNAVKSTF

SEQ ID NO: 499372 - protein, 11 aa, Homo sapiens
  CDR3 for beta chain variable domain of TCR clone 249686 (TRBV19, TRBJ2-2)
CASRYSGELFF

SEQ ID NO: 499373 - protein, 19 aa, Homo sapiens
  CDR3 for alpha chain variable domain of TCR clone 249687 (TRAV1-2, TRAJ26)
CLLPLCCERPDNYGQNFVF

SEQ ID NO: 499374 - protein, 16 aa, Homo sapiens
  CDR3 for beta chain variable domain of TCR clone 249687 (TRBV7-8, TRBJ2-1)
CASSLAGTGRYNEQFF

SEQ ID NO: 499375 - protein, 14 aa, Homo sapiens
  CDR3 for alpha chain variable domain of TCR clone 249688 (TRAV27, TRAJ49)
CAGRPEGTGNQFYF

SEQ ID NO: 499376 - protein, 14 aa, Homo sapiens
  CDR3 for beta chain variable domain of TCR clone 249688 (TRBV18, TRBJ2-5)
CSSSPGVSQETQYF

SEQ ID NO: 499377 - protein, 16 aa, Homo sapiens
  CDR3 for alpha chain variable domain of TCR clone 249689 (TRAV26-1, TRAJ53)
CIVRVAMGGSNYKLTF

SEQ ID NO: 499378 - protein, 18 aa, Homo sapiens
  CDR3 for beta chain variable domain of TCR clone 249689 (TRBV19, TRBJ2-6)
CASSADRAGSSGANVLTF

SEQ ID NO: 499379 - protein, 14 aa, Homo sapiens
  CDR3 for alpha chain variable domain of TCR clone 249690 (TRAV9-2, TRAJ13)
CALRYSGGYQKVTF

SEQ ID NO: 499380 - protein, 14 aa, Homo sapiens
  CDR3 for beta chain variable domain of TCR clone 249690 (TRBV7-2, TRBJ2-7)
CASSPKTSFYEQYF

SEQ ID NO: 499381 - protein, 15 aa, Homo sapiens
  CDR3 for alpha chain variable domain of TCR clone 249691 (TRAV21, TRAJ53)
CAPLNSGGSNYKLTF

SEQ ID NO: 499382 - protein, 13 aa, Homo sapiens
  CDR3 for beta chain variable domain of TCR clone 249691 (TRBV4-1, TRBJ2-2)
CASSQENTGELFF

SEQ ID NO: 499383 - protein, 14 aa, Homo sapiens
  CDR3 for alpha chain variable domain of TCR clone 249692 (TRAV1-2, TRAJ8)
CAVREDTGFQKLGF

SEQ ID NO: 499384 - protein, 15 aa, Homo sapiens
  CDR3 for beta chain variable domain of TCR clone 249692 (TRBV7-9, TRBJ1-1)
CASSHRGTVNTEAFF

SEQ ID NO: 499385 - protein, 14 aa, Homo sapiens
  CDR3 for alpha chain variable domain of TCR clone 249693 (TRAV2, TRAJ9)
CAVGDRSGGFKTIF

SEQ ID NO: 499386 - protein, 13 aa, Homo sapiens
  CDR3 for beta chain variable domain of TCR clone 249693 (TRBV7-9, TRBJ1-2)
CASSLKQNYGYAF

SEQ ID NO: 499387 - protein, 11 aa, Homo sapiens
  CDR3 for alpha chain variable domain of TCR clone 249694 (TRAV21, TRAJ11)
CAVNGYITLTF

SEQ ID NO: 499388 - protein, 11 aa, Homo sapiens
  CDR3 for beta chain variable domain of TCR clone 249694 (TRBV19, TRBJ1-1)
CASSIGSEAFF

SEQ ID NO: 499389 - protein, 15 aa, Homo sapiens
  CDR3 for alpha chain variable domain of TCR clone 249695 (TRAV26-1, TRAJ29)
CIVRVEGSGNTPLVF

SEQ ID NO: 499390 - protein, 14 aa, Homo sapiens
  CDR3 for beta chain variable domain of TCR clone 249695 (TRBV28, TRBJ2-5)
CQQSGTGSIETQYF

SEQ ID NO: 499391 - protein, 15 aa, Homo sapiens
  CDR3 for alpha chain variable domain of TCR clone 249696 (TRAV26-1, TRAJ23)
CIVRELNNQGGKLIF

SEQ ID NO: 499392 - protein, 15 aa, Homo sapiens
  CDR3 for beta chain variable domain of TCR clone 249696 (TRBV7-3, TRBJ2-1)
CASSFGQSNYNEQFF

SEQ ID NO: 499393 - protein, 14 aa, Homo sapiens
  CDR3 for alpha chain variable domain of TCR clone 249697 (TRAV12-2, TRAJ13)
CAVKKTGGYQKVIF

SEQ ID NO: 499394 - protein, 12 aa, Homo sapiens
  CDR3 for beta chain variable domain of TCR clone 249697 (TRBV19, TRBJ2-1)
CASSRQGAEQFF

SEQ ID NO: 499395 - protein, 15 aa, Homo sapiens
  CDR3 for alpha chain variable domain of TCR clone 249698 (TRAV12-3, TRAJ11)
CAMSEENSGYSTLTF

SEQ ID NO: 499396 - protein, 16 aa, Homo sapiens
  CDR3 for beta chain variable domain of TCR clone 249698 (TRBV2, TRBJ2-3)
CASSGGGLTSTDTQYF

SEQ ID NO: 499397 - protein, 11 aa, Homo sapiens
  CDR3 for alpha chain variable domain of TCR clone 249699 (TRAV13-2, TRAJ54)
RAVQGAQKLVF

SEQ ID NO: 499398 - protein, 16 aa, Homo sapiens
  CDR3 for beta chain variable domain of TCR clone 249699 (TRBV19, TRBJ2-1)
CASSKAGPSSYNEQFF

SEQ ID NO: 499399 - protein, 14 aa, Homo sapiens
  CDR3 for alpha chain variable domain of TCR clone 249700 (TRAV8-4, TRAJ9)
CAVSDRTGGFKSIF

SEQ ID NO: 499400 - protein, 13 aa, Homo sapiens
  CDR3 for beta chain variable domain of TCR clone 249700 (TRBV11-2, TRBJ2-7)
CASSLGDSYEQYF

SEQ ID NO: 499401 - protein, 17 aa, Homo sapiens
  CDR3 for alpha chain variable domain of TCR clone 249701 (TRAV23/DV6, TRAJ57)
CAASSTLSQGGSEKLVF

SEQ ID NO: 499402 - protein, 13 aa, Homo sapiens
  CDR3 for beta chain variable domain of TCR clone 249701 (TRBV4-1, TRBJ2-2)
CASSQENTGELFF

SEQ ID NO: 499403 - protein, 17 aa, Homo sapiens
  CDR3 for alpha chain variable domain of TCR clone 249702 (TRAV3, TRAJ6)
CAVRDGMGRRKLHTYIL

SEQ ID NO: 499404 - protein, 15 aa, Homo sapiens
  CDR3 for beta chain variable domain of TCR clone 249702 (TRBV5-1, TRBJ2-7)
CASSLGDFTTYEQYF

SEQ ID NO: 499405 - protein, 12 aa, Homo sapiens
  CDR3 for alpha chain variable domain of TCR clone 249703 (TRAV16, TRAJ26)
CALRSYGQNFDF

SEQ ID NO: 499406 - protein, 14 aa, Homo sapiens
  CDR3 for beta chain variable domain of TCR clone 249703 (TRBV10-3, TRBJ2-1)
CAISSDLAYNEQFS

SEQ ID NO: 499407 - protein, 11 aa, Homo sapiens
  CDR3 for alpha chain variable domain of TCR clone 249704 (TRAV26-1, TRAJ37)
CIVRVGRKLIF

SEQ ID NO: 499408 - protein, 16 aa, Homo sapiens
  CDR3 for beta chain variable domain of TCR clone 249704 (TRBV3-1, TRBJ2-1)
CASSCLLTSGGNEQFF

SEQ ID NO: 499409 - protein, 11 aa, Homo sapiens
  CDR3 for alpha chain variable domain of TCR clone 249705 (TRAV12-1, TRAJ3)
CVVSSASKIIF

SEQ ID NO: 499410 - protein, 15 aa, Homo sapiens
  CDR3 for beta chain variable domain of TCR clone 249705 (TRBV11-2, TRBJ2-2)
CASSSDRVNAGELFF

SEQ ID NO: 499411 - protein, 14 aa, Homo sapiens
  CDR3 for alpha chain variable domain of TCR clone 249706 (TRAV1-2, TRAJ6)
YAVSLSGGSYIPPF

SEQ ID NO: 499412 - protein, 15 aa, Homo sapiens
  CDR3 for beta chain variable domain of TCR clone 249706 (TRBV2, TRBJ2-5)
CASSEQGLIGETQYF

SEQ ID NO: 499413 - protein, 15 aa, Homo sapiens
  CDR3 for alpha chain variable domain of TCR clone 249707 (TRAV3, TRAJ47)
CAVRDIGEYGNKLVL

SEQ ID NO: 499414 - protein, 14 aa, Homo sapiens
  CDR3 for beta chain variable domain of TCR clone 249707 (TRBV13, TRBJ2-5)
CASSLERVGETEYF

SEQ ID NO: 499415 - protein, 17 aa, Homo sapiens
  CDR3 for alpha chain variable domain of TCR clone 249708 (TRAV29/DV5, TRAJ24)
CAASGATDSWEIPVWSR

SEQ ID NO: 499416 - protein, 12 aa, Homo sapiens
  CDR3 for beta chain variable domain of TCR clone 249708 (TRBV11-2, TRBJ2-2)
CASSLPTGELFF

SEQ ID NO: 499417 - protein, 14 aa, Homo sapiens
  CDR3 for alpha chain variable domain of TCR clone 249709 (TRAV26-1, TRAJ21)
CIVRPPYNFYKFYF

SEQ ID NO: 499418 - protein, 11 aa, Homo sapiens
  CDR3 for beta chain variable domain of TCR clone 249709 (TRBV10-3, TRBJ2-7)
CAISEGLEQYF

SEQ ID NO: 499419 - protein, 17 aa, Homo sapiens
  CDR3 for alpha chain variable domain of TCR clone 249710 (TRAV2, TRAJ36)
CAVEDRGNWGKQPLLWE

SEQ ID NO: 499420 - protein, 14 aa, Homo sapiens
  CDR3 for beta chain variable domain of TCR clone 249710 (TRBV7-9, TRBJ2-5)
CASSLDTAQETQYF

SEQ ID NO: 499421 - protein, 13 aa, Homo sapiens
  CDR3 for alpha chain variable domain of TCR clone 249711 (TRAV8-2, TRAJ49)
CVVTPNTGNQFYF

SEQ ID NO: 499422 - protein, 15 aa, Homo sapiens
  CDR3 for beta chain variable domain of TCR clone 249711 (TRBV11-2, TRBJ2-1)
CAGSLTSGGYNEQFF

SEQ ID NO: 499423 - protein, 12 aa, Homo sapiens
  CDR3 for alpha chain variable domain of TCR clone 249712 (TRAV21, TRAJ33)
CAKMDSNYQLIW

SEQ ID NO: 499424 - protein, 15 aa, Homo sapiens
  CDR3 for beta chain variable domain of TCR clone 249712 (TRBV2, TRBJ1-1)
CASTEPGQGASGAFF

SEQ ID NO: 499425 - protein, 13 aa, Homo sapiens
  CDR3 for alpha chain variable domain of TCR clone 249713 (TRAV3, TRAJ27)
CAVMPLGAGKSTF

SEQ ID NO: 499426 - protein, 13 aa, Homo sapiens
  CDR3 for beta chain variable domain of TCR clone 249713 (TRBV7-9, TRBJ2-3)
CASSPGSTATQYS

SEQ ID NO: 499427 - protein, 12 aa, Homo sapiens
  CDR3 for alpha chain variable domain of TCR clone 249714 (TRAV20, TRAJ23)
CAVHSQGGKLIF

SEQ ID NO: 499428 - protein, 12 aa, Homo sapiens
  CDR3 for beta chain variable domain of TCR clone 249714 (TRBV7-6, TRBJ2-3)
CASSWAEDTQYF

SEQ ID NO: 499429 - protein, 10 aa, Homo sapiens
  CDR3 for alpha chain variable domain of TCR clone 249715 (TRAV1-2, TRAJ18)
CAVRGEAQPW

SEQ ID NO: 499430 - protein, 14 aa, Homo sapiens
  CDR3 for beta chain variable domain of TCR clone 249715 (TRBV7-2, TRBJ1-6)
CASSLQGANSPLHF

SEQ ID NO: 499431 - protein, 13 aa, Homo sapiens
  CDR3 for alpha chain variable domain of TCR clone 249716 (TRAV8-3, TRAJ28)
CAVGAVGSYQLTF

SEQ ID NO: 499432 - protein, 14 aa, Homo sapiens
  CDR3 for beta chain variable domain of TCR clone 249716 (TRBV18, TRBJ2-7)
CASSPRGGAYEQYF

SEQ ID NO: 499433 - protein, 15 aa, Homo sapiens
  CDR3 for alpha chain variable domain of TCR clone 249717 (TRAV38-1, TRAJ57)
CAFMDSQGGSEKLVF

SEQ ID NO: 499434 - protein, 14 aa, Homo sapiens
  CDR3 for beta chain variable domain of TCR clone 249717 (TRBV7-8, TRBJ2-3)
CASSLEAGTDTQYF

SEQ ID NO: 499435 - protein, 16 aa, Homo sapiens
  CDR3 for alpha chain variable domain of TCR clone 249718 (TRAV30, TRAJ24)
CGTEIVDADSWGKFQF

SEQ ID NO: 499436 - protein, 15 aa, Homo sapiens
  CDR3 for beta chain variable domain of TCR clone 249718 (TRBV20-1, TRBJ2-7)
CIARDRVSGMDEQYF

SEQ ID NO: 499437 - protein, 14 aa, Homo sapiens
  CDR3 for alpha chain variable domain of TCR clone 249719 (TRAV17, TRAJ22)
CATSPSGSARQLTF

SEQ ID NO: 499438 - protein, 15 aa, Homo sapiens
  CDR3 for beta chain variable domain of TCR clone 249719 (TRBV7-2, TRBJ2-3)
CASSLAGAFIDTQYF

SEQ ID NO: 499439 - protein, 11 aa, Homo sapiens
  CDR3 for alpha chain variable domain of TCR clone 249720 (TRAV12-2, TRAJ31)
CAILNNARLMF

SEQ ID NO: 499440 - protein, 16 aa, Homo sapiens
  CDR3 for beta chain variable domain of TCR clone 249720 (TRBV13, TRBJ2-2)
CASSPRTGGHTGELFC

SEQ ID NO: 499441 - protein, 14 aa, Homo sapiens
  CDR3 for alpha chain variable domain of TCR clone 249721 (TRAV35, TRAJ33)
CAGSSQDSNYQLIW

SEQ ID NO: 499442 - protein, 16 aa, Homo sapiens
  CDR3 for beta chain variable domain of TCR clone 249721 (TRBV11-2, TRBJ2-7)
CASSPTTGGVSYEQYF

SEQ ID NO: 499443 - protein, 17 aa, Homo sapiens
  CDR3 for alpha chain variable domain of TCR clone 249722 (TRAV8-3, TRAJ34)
CAIPGKLIFGTGTRLQV

SEQ ID NO: 499444 - protein, 17 aa, Homo sapiens
  CDR3 for beta chain variable domain of TCR clone 249722 (TRBV24-1, TRBJ2-1)
CATSDVSTSGTYNEQFF

SEQ ID NO: 499445 - protein, 22 aa, Homo sapiens
  CDR3 for alpha chain variable domain of TCR clone 249723 (TRAV2, TRAJ9)
CAVDPNTGGFKTILEQEQDYLL

SEQ ID NO: 499446 - protein, 13 aa, Homo sapiens
  CDR3 for beta chain variable domain of TCR clone 249723 (TRBV20-1, TRBJ2-1)
CSASTGTSNEQFF

SEQ ID NO: 499447 - protein, 18 aa, Homo sapiens
  CDR3 for alpha chain variable domain of TCR clone 249724 (TRAV26-2, TRAJ45)
CILRLWGYSGGGADGLTF

SEQ ID NO: 499448 - protein, 15 aa, Homo sapiens
  CDR3 for beta chain variable domain of TCR clone 249724 (TRBV2, TRBJ2-4)
CASSGTNLAKNIQYF

SEQ ID NO: 499449 - protein, 11 aa, Homo sapiens
  CDR3 for alpha chain variable domain of TCR clone 249725 (TRAV21, TRAJ11)
CAVNGYSTLTF

SEQ ID NO: 499450 - protein, 15 aa, Homo sapiens
  CDR3 for beta chain variable domain of TCR clone 249725 (TRBV11-2, TRBJ2-7)
CASSLMVGGSYEQYF

SEQ ID NO: 499451 - protein, 14 aa, Homo sapiens
  CDR3 for alpha chain variable domain of TCR clone 249726 (TRAV17, TRAJ17)
CATDDAAAGNKLNF

SEQ ID NO: 499452 - protein, 16 aa, Homo sapiens
  CDR3 for beta chain variable domain of TCR clone 249726 (TRBV19, TRBJ2-1)
CASSIETGSPYNEQFF

SEQ ID NO: 499453 - protein, 16 aa, Homo sapiens
  CDR3 for alpha chain variable domain of TCR clone 249727 (TRAV12-2, TRAJ10)
CAVKRVLTGGGNKLTF

SEQ ID NO: 499454 - protein, 12 aa, Homo sapiens
  CDR3 for beta chain variable domain of TCR clone 249727 (TRBV28, TRBJ2-7)
CASSFSSYEQYF

SEQ ID NO: 499455 - protein, 13 aa, Homo sapiens
  CDR3 for alpha chain variable domain of TCR clone 249728 (TRAV27, TRAJ41)
CAGEGNSGYALNF

SEQ ID NO: 499456 - protein, 15 aa, Homo sapiens
  CDR3 for beta chain variable domain of TCR clone 249728 (TRBV7-9, TRBJ2-1)
CASSLGWGRANEQFF

SEQ ID NO: 499457 - protein, 11 aa, Homo sapiens
  CDR3 for alpha chain variable domain of TCR clone 249729 (TRAV21, TRAJ20)
CAVDGDYKLSF

SEQ ID NO: 499458 - protein, 17 aa, Homo sapiens
  CDR3 for beta chain variable domain of TCR clone 249729 (TRBV11-2, TRBJ2-1)
CASSLYPPGVEYNEQFF

SEQ ID NO: 499459 - protein, 20 aa, Homo sapiens
  CDR3 for alpha chain variable domain of TCR clone 249730 (TRAV8-3, TRAJ44)
LSTSVLWVRLYTGTASKLTF

SEQ ID NO: 499460 - protein, 15 aa, Homo sapiens
  CDR3 for beta chain variable domain of TCR clone 249730 (TRBV7-3, TRBJ2-1)
CASSLAGAGADEQFF

SEQ ID NO: 499461 - protein, 13 aa, Homo sapiens
  CDR3 for alpha chain variable domain of TCR clone 249731 (TRAV8-3, TRAJ4)
WAFYSGGYNKLIF

SEQ ID NO: 499462 - protein, 16 aa, Homo sapiens
  CDR3 for beta chain variable domain of TCR clone 249731 (TRBV7-8, TRBJ2-3)
CASSTEGQRETDTQYF

SEQ ID NO: 499463 - protein, 10 aa, Homo sapiens
  CDR3 for alpha chain variable domain of TCR clone 249732 (TRAV3, TRAJ30)
CAVREIEIIF

SEQ ID NO: 499464 - protein, 14 aa, Homo sapiens
  CDR3 for beta chain variable domain of TCR clone 249732 (TRBV15, TRBJ2-3)
CATRSGTSTETQYF

SEQ ID NO: 499465 - protein, 14 aa, Homo sapiens
  CDR3 for alpha chain variable domain of TCR clone 249733 (TRAV20, TRAJ56)
CAVQFGGANSKLTF

SEQ ID NO: 499466 - protein, 15 aa, Homo sapiens
  CDR3 for beta chain variable domain of TCR clone 249733 (TRBV28, TRBJ1-3)
CASSMGWASGNTIYF

SEQ ID NO: 499467 - protein, 14 aa, Homo sapiens
  CDR3 for alpha chain variable domain of TCR clone 249734 (TRAV1-2, TRAJ16)
CAGNRFSDGQKLLF

SEQ ID NO: 499468 - protein, 16 aa, Homo sapiens
  CDR3 for beta chain variable domain of TCR clone 249734 (TRBV12-5, TRBJ2-5)
CASGPRTSGNQETQYF

SEQ ID NO: 499469 - protein, 16 aa, Homo sapiens
  CDR3 for alpha chain variable domain of TCR clone 249735 (TRAV3, TRAJ13)
CAVRDFESGGYQKVTF

SEQ ID NO: 499470 - protein, 16 aa, Homo sapiens
  CDR3 for beta chain variable domain of TCR clone 249735 (TRBV27, TRBJ2-5)
CASSYGPGGQKENQFF

SEQ ID NO: 499471 - protein, 16 aa, Homo sapiens
  CDR3 for alpha chain variable domain of TCR clone 249736 (TRAV26-1, TRAJ11)
CIVRVAKNSGYSTLTF

SEQ ID NO: 499472 - protein, 14 aa, Homo sapiens
  CDR3 for beta chain variable domain of TCR clone 249736 (TRBV5-7, TRBJ1-1)
CASSLAGDWTEAFF

SEQ ID NO: 499473 - protein, 17 aa, Homo sapiens
  CDR3 for alpha chain variable domain of TCR clone 249737 (TRAV3, TRAJ6)
CAVRDGPRAGGSYIRTF

SEQ ID NO: 499474 - protein, 15 aa, Homo sapiens
  CDR3 for beta chain variable domain of TCR clone 249737 (TRBV29-1, TRBJ2-5)
CSVEGLAVNQETQYF

SEQ ID NO: 499475 - protein, 15 aa, Homo sapiens
  CDR3 for alpha chain variable domain of TCR clone 249738 (TRAV27, TRAJ38)
CAARRNAGNNRKLIW

SEQ ID NO: 499476 - protein, 14 aa, Homo sapiens
  CDR3 for beta chain variable domain of TCR clone 249738 (TRBV2, TRBJ2-1)
CASSDRAYYNEQFF

SEQ ID NO: 499477 - protein, 14 aa, Homo sapiens
  CDR3 for alpha chain variable domain of TCR clone 249739 (TRAV8-3, TRAJ21)
CAVGLNPRSDKFYF

SEQ ID NO: 499478 - protein, 16 aa, Homo sapiens
  CDR3 for beta chain variable domain of TCR clone 249739 (TRBV7-9, TRBJ2-7)
CASSSPSANTGNEQYF

SEQ ID NO: 499479 - protein, 23 aa, Homo sapiens
  CDR3 for alpha chain variable domain of TCR clone 249740 (TRAV26-1, TRAJ38)
CIADNAGNNHIQNPDPAVYQLRD

SEQ ID NO: 499480 - protein, 17 aa, Homo sapiens
  CDR3 for beta chain variable domain of TCR clone 249740 (TRBV18, TRBJ2-1)
CASSKGLSGGADNEQFF

SEQ ID NO: 499481 - protein, 15 aa, Homo sapiens
  CDR3 for alpha chain variable domain of TCR clone 249741 (TRAV3, TRAJ17)
CAVRDTGAAGNKPTF

SEQ ID NO: 499482 - protein, 15 aa, Homo sapiens
  CDR3 for beta chain variable domain of TCR clone 249741 (TRBV20-1, TRBJ2-7)
CSARDRVSGMDEQYF

SEQ ID NO: 499483 - protein, 14 aa, Homo sapiens
  CDR3 for alpha chain variable domain of TCR clone 249742 (TRAV26-1, TRAJ38)
CIADNAGNNRKLIW

SEQ ID NO: 499484 - protein, 14 aa, Homo sapiens
  CDR3 for beta chain variable domain of TCR clone 249742 (TRBV20-1, TRBJ1-3)
CSASPTGAGKTIYF

SEQ ID NO: 499485 - protein, 17 aa, Homo sapiens
  CDR3 for alpha chain variable domain of TCR clone 249743 (TRAV3, TRAJ12)
CAVRDGGRLDSSYKLIF

SEQ ID NO: 499486 - protein, 13 aa, Homo sapiens
  CDR3 for beta chain variable domain of TCR clone 249743 (TRBV20-1, TRBJ1-1)
CSAPLGGGTEAFF

SEQ ID NO: 499487 - protein, 15 aa, Homo sapiens
  CDR3 for alpha chain variable domain of TCR clone 249744 (TRAV21, TRAJ45)
CAVSYSGGGADGLTF

SEQ ID NO: 499488 - protein, 13 aa, Homo sapiens
  CDR3 for beta chain variable domain of TCR clone 249744 (TRBV20-1, TRBJ2-5)
CSAATELQESQYF

SEQ ID NO: 499489 - protein, 14 aa, Homo sapiens
  CDR3 for alpha chain variable domain of TCR clone 249745 (TRAV12-1, TRAJ22)
CVVNVGGSARQLTF

SEQ ID NO: 499490 - protein, 14 aa, Homo sapiens
  CDR3 for beta chain variable domain of TCR clone 249745 (TRBV19, TRBJ2-1)
CASPTFVLSGEQFF

SEQ ID NO: 499491 - protein, 14 aa, Homo sapiens
  CDR3 for alpha chain variable domain of TCR clone 249746 (TRAV13-1, TRAJ10)
CAALFTGGGNKLTF

SEQ ID NO: 499492 - protein, 15 aa, Homo sapiens
  CDR3 for beta chain variable domain of TCR clone 249746 (TRBV10-3, TRBJ2-2)
CAISEGDRVAGELFF

SEQ ID NO: 499493 - protein, 17 aa, Homo sapiens
  CDR3 for alpha chain variable domain of TCR clone 249747 (TRAV3, TRAJ6)
CAVRDGPRAGGSYIPTF

SEQ ID NO: 499494 - protein, 15 aa, Homo sapiens
  CDR3 for beta chain variable domain of TCR clone 249747 (TRBV11-3, TRBJ2-7)
CASSPGPASSYEQYL

SEQ ID NO: 499495 - protein, 12 aa, Homo sapiens
  CDR3 for alpha chain variable domain of TCR clone 249748 (TRAV12-1, TRAJ40)
CVVYSGTYKYIF

SEQ ID NO: 499496 - protein, 16 aa, Homo sapiens
  CDR3 for beta chain variable domain of TCR clone 249748 (TRBV12-5, TRBJ2-5)
CASGPRTSGKQETQYF

SEQ ID NO: 499497 - protein, 14 aa, Homo sapiens
  CDR3 for alpha chain variable domain of TCR clone 249749 (TRAV29/DV5, TRAJ48)
CAAMALFGNEKLTF

SEQ ID NO: 499498 - protein, 19 aa, Homo sapiens
  CDR3 for beta chain variable domain of TCR clone 249749 (TRBV25-1, TRBJ2-2)
CAILVYRVDRGRKTGELFF

SEQ ID NO: 499499 - protein, 15 aa, Homo sapiens
  CDR3 for alpha chain variable domain of TCR clone 249750 (TRAV2, TRAJ15)
CAVEDRGQAGTALIF

SEQ ID NO: 499500 - protein, 13 aa, Homo sapiens
  CDR3 for beta chain variable domain of TCR clone 249750 (TRBV7-8, TRBJ2-7)
CASSLTGGREQYF

SEQ ID NO: 499501 - protein, 13 aa, Homo sapiens
  CDR3 for alpha chain variable domain of TCR clone 249751 (TRAV1-2, TRAJ9)
CAVLNTGGFKTIF

SEQ ID NO: 499502 - protein, 15 aa, Homo sapiens
  CDR3 for beta chain variable domain of TCR clone 249751 (TRBV10-2, TRBJ2-6)
CASSEQGTGANVLTF

SEQ ID NO: 499503 - protein, 13 aa, Homo sapiens
  CDR3 for alpha chain variable domain of TCR clone 249752 (TRAV2, TRAJ40)
CAVVTSGTYKYIF

SEQ ID NO: 499504 - protein, 17 aa, Homo sapiens
  CDR3 for beta chain variable domain of TCR clone 249752 (TRBV11-3, TRBJ2-5)
CASSLPGVRGGKETQYF

SEQ ID NO: 499505 - protein, 16 aa, Homo sapiens
  CDR3 for alpha chain variable domain of TCR clone 249753 (TRAV13-1, TRAJ17)
CAASKGVKAAGNKLTF

SEQ ID NO: 499506 - protein, 16 aa, Homo sapiens
  CDR3 for beta chain variable domain of TCR clone 249753 (TRBV11-2, TRBJ1-2)
CASSLDTGGADYGYTF

SEQ ID NO: 499507 - protein, 12 aa, Homo sapiens
  CDR3 for alpha chain variable domain of TCR clone 249754 (TRAV17, TRAJ20)
CATQSNDYKLSF

SEQ ID NO: 499508 - protein, 15 aa, Homo sapiens
  CDR3 for beta chain variable domain of TCR clone 249754 (TRBV11-1, TRBJ2-7)
CASSLNYGASYEQYF

SEQ ID NO: 499509 - protein, 14 aa, Homo sapiens
  CDR3 for alpha chain variable domain of TCR clone 249755 (TRAV2, TRAJ9)
CAVEDRSGGFKTIF

SEQ ID NO: 499510 - protein, 13 aa, Homo sapiens
  CDR3 for beta chain variable domain of TCR clone 249755 (TRBV7-3, TRBJ2-1)
CQQLSGGTNEQFF

SEQ ID NO: 499511 - protein, 16 aa, Homo sapiens
  CDR3 for alpha chain variable domain of TCR clone 249756 (TRAV3, TRAJ10)
CAVRDMSAGGGNKLTF

SEQ ID NO: 499512 - protein, 16 aa, Homo sapiens
  CDR3 for beta chain variable domain of TCR clone 249756 (TRBV7-2, TRBJ2-2)
CASSLGGVSNTGELFF

SEQ ID NO: 499513 - protein, 13 aa, Homo sapiens
  CDR3 for alpha chain variable domain of TCR clone 249757 (TRAV12-2, TRAJ24)
CAVSTDSWGKLQF

SEQ ID NO: 499514 - protein, 15 aa, Homo sapiens
  CDR3 for beta chain variable domain of TCR clone 249757 (TRBV7-2, TRBJ2-2)
CASGPTGANTGELFF

SEQ ID NO: 499515 - protein, 14 aa, Homo sapiens
  CDR3 for alpha chain variable domain of TCR clone 249758 (TRAV8-2, TRAJ4)
CVGSPSGGYNKLIF

SEQ ID NO: 499516 - protein, 15 aa, Homo sapiens
  CDR3 for beta chain variable domain of TCR clone 249758 (TRBV6-6, TRBJ2-7)
CASSYSYGGSYEQYF

SEQ ID NO: 499517 - protein, 11 aa, Homo sapiens
  CDR3 for alpha chain variable domain of TCR clone 249759 (TRAV21, TRAJ34)
CAVTNTDKLIS

SEQ ID NO: 499518 - protein, 17 aa, Homo sapiens
  CDR3 for beta chain variable domain of TCR clone 249759 (TRBV20-1, TRBJ2-1)
CSARSPSGGPPTMSSSS

SEQ ID NO: 499519 - protein, 13 aa, Homo sapiens
  CDR3 for alpha chain variable domain of TCR clone 249760 (TRAV19, TRAJ26)
CALTFDYGQYFVF

SEQ ID NO: 499520 - protein, 14 aa, Homo sapiens
  CDR3 for beta chain variable domain of TCR clone 249760 (TRBV7-8, TRBJ2-3)
CASSLEAGTDTQYF

SEQ ID NO: 499521 - protein, 14 aa, Homo sapiens
  CDR3 for alpha chain variable domain of TCR clone 249761 (TRAV12-2, TRAJ45)
CAVNKGGGADGLTF

SEQ ID NO: 499522 - protein, 15 aa, Homo sapiens
  CDR3 for beta chain variable domain of TCR clone 249761 (TRBV20-1, TRBJ2-7)
CSAESGTSGAYEQYF

SEQ ID NO: 499523 - protein, 14 aa, Homo sapiens
  CDR3 for alpha chain variable domain of TCR clone 249762 (TRAV12-2, TRAJ8)
CAVKENTGFQKLVF

SEQ ID NO: 499524 - protein, 13 aa, Homo sapiens
  CDR3 for beta chain variable domain of TCR clone 249762 (TRBV18, TRBJ1-2)
CASYASATEGYTF

SEQ ID NO: 499525 - protein, 11 aa, Homo sapiens
  CDR3 for alpha chain variable domain of TCR clone 249763 (TRAV2, TRAJ13)
CASGGYQKVTF

SEQ ID NO: 499526 - protein, 14 aa, Homo sapiens
  CDR3 for beta chain variable domain of TCR clone 249763 (TRBV7-6, TRBJ2-3)
CASSLGTVTDTQYC

SEQ ID NO: 499527 - protein, 16 aa, Homo sapiens
  CDR3 for alpha chain variable domain of TCR clone 249764 (TRAV12-3, TRAJ45)
CAMGWGSGGGADGLTF

SEQ ID NO: 499528 - protein, 18 aa, Homo sapiens
  CDR3 for beta chain variable domain of TCR clone 249764 (TRBV12-4, TRBJ2-2)
CASSFVAGTRGRTGELFF

SEQ ID NO: 499529 - protein, 12 aa, Homo sapiens
  CDR3 for alpha chain variable domain of TCR clone 249765 (TRAV12-3, TRAJ17)
CAMTLTGNKLTF

SEQ ID NO: 499530 - protein, 19 aa, Homo sapiens
  CDR3 for beta chain variable domain of TCR clone 249765 (TRBV28, TRBJ2-7)
CASSYSGTSRLGWVYEQYF

SEQ ID NO: 499531 - protein, 11 aa, Homo sapiens
  CDR3 for alpha chain variable domain of TCR clone 249766 (TRAV1-1, TRAJ23)
GAVRQGGKLIF

SEQ ID NO: 499532 - protein, 20 aa, Homo sapiens
  CDR3 for beta chain variable domain of TCR clone 249766 (TRBV7-8, TRBJ2-2)
CASSHLFPGPTIHITGELFF

SEQ ID NO: 499533 - protein, 13 aa, Homo sapiens
  CDR3 for alpha chain variable domain of TCR clone 249767 (TRAV23/DV6, TRAJ43)
CAASMGGNNDMRF

SEQ ID NO: 499534 - protein, 16 aa, Homo sapiens
  CDR3 for beta chain variable domain of TCR clone 249767 (TRBV7-9, TRBJ1-2)
CASSPGGGAINYGYTF

SEQ ID NO: 499535 - protein, 15 aa, Homo sapiens
  CDR3 for alpha chain variable domain of TCR clone 249768 (TRAV21, TRAJ53)
CATLNSGGSNYKLTF

SEQ ID NO: 499536 - protein, 14 aa, Homo sapiens
  CDR3 for beta chain variable domain of TCR clone 249768 (TRBV12-4, TRBJ2-7)
CASSRQGRSYEQYF

SEQ ID NO: 499537 - protein, 14 aa, Homo sapiens
  CDR3 for alpha chain variable domain of TCR clone 249769 (TRAV35, TRAJ50)
CAGHRKTSYDKVIF

SEQ ID NO: 499538 - protein, 16 aa, Homo sapiens
  CDR3 for beta chain variable domain of TCR clone 249769 (TRBV4-2, TRBJ2-3)
CASSQELAGDTDTQYF

SEQ ID NO: 499539 - protein, 14 aa, Homo sapiens
  CDR3 for alpha chain variable domain of TCR clone 249770 (TRAV13-2, TRAJ41)
CAEYLSNSGYALNF

SEQ ID NO: 499540 - protein, 16 aa, Homo sapiens
  CDR3 for beta chain variable domain of TCR clone 249770 (TRBV9, TRBJ2-1)
CASSVGGGGNYNEQFF

SEQ ID NO: 499541 - protein, 14 aa, Homo sapiens
  CDR3 for alpha chain variable domain of TCR clone 249771 (TRAV4, TRAJ26)
CLVGPHNYGQNFVF

SEQ ID NO: 499542 - protein, 16 aa, Homo sapiens
  CDR3 for beta chain variable domain of TCR clone 249771 (TRBV2, TRBJ2-1)
CASSVGGSLSYNEQFF

SEQ ID NO: 499543 - protein, 14 aa, Homo sapiens
  CDR3 for alpha chain variable domain of TCR clone 249772 (TRAV13-1, TRAJ44)
CAAKATGTASKLTF

SEQ ID NO: 499544 - protein, 13 aa, Homo sapiens
  CDR3 for beta chain variable domain of TCR clone 249772 (TRBV12-4, TRBJ1-2)
CASSSGLTVIATF

SEQ ID NO: 499545 - protein, 14 aa, Homo sapiens
  CDR3 for alpha chain variable domain of TCR clone 249773 (TRAV16, TRAJ33)
CALSAMDSNYQLIW

SEQ ID NO: 499546 - protein, 17 aa, Homo sapiens
  CDR3 for beta chain variable domain of TCR clone 249773 (TRBV25-1, TRBJ2-7)
CASSDTRVVFSSYEQYF

SEQ ID NO: 499547 - protein, 14 aa, Homo sapiens
  CDR3 for alpha chain variable domain of TCR clone 249774 (TRAV12-2, TRAJ13)
CAVKKTGGYQKVTF

SEQ ID NO: 499548 - protein, 15 aa, Homo sapiens
  CDR3 for beta chain variable domain of TCR clone 249774 (TRBV19, TRBJ1-1)
CASSIRSGGRTEAFF

SEQ ID NO: 499549 - protein, 15 aa, Homo sapiens
  CDR3 for alpha chain variable domain of TCR clone 249775 (TRAV35, TRAJ23)
CAGPLGNNQGGKLIF

SEQ ID NO: 499550 - protein, 14 aa, Homo sapiens
  CDR3 for beta chain variable domain of TCR clone 249775 (TRBV7-9, TRBJ1-1)
CASTPLQSYTDAFF

SEQ ID NO: 499551 - protein, 10 aa, Homo sapiens
  CDR3 for alpha chain variable domain of TCR clone 249776 (TRAV1-2, TRAJ34)
CALNTDKLIF

SEQ ID NO: 499552 - protein, 13 aa, Homo sapiens
  CDR3 for beta chain variable domain of TCR clone 249776 (TRBV10-1, TRBJ2-1)
CASSAGPDNEQFF

SEQ ID NO: 499553 - protein, 16 aa, Homo sapiens
  CDR3 for alpha chain variable domain of TCR clone 249777 (TRAV12-2, TRAJ6)
CAAPLAGSGGSYIPTF

SEQ ID NO: 499554 - protein, 13 aa, Homo sapiens
  CDR3 for beta chain variable domain of TCR clone 249777 (TRBV11-2, TRBJ1-1)
CASSFTENTEAFF

SEQ ID NO: 499555 - protein, 12 aa, Homo sapiens
  CDR3 for alpha chain variable domain of TCR clone 249778 (TRAV26-1, TRAJ43)
CIVRPRGEDMRF

SEQ ID NO: 499556 - protein, 16 aa, Homo sapiens
  CDR3 for beta chain variable domain of TCR clone 249778 (TRBV3-1, TRBJ2-1)
CASSQGGRRSFDEQFF

SEQ ID NO: 499557 - protein, 14 aa, Homo sapiens
  CDR3 for alpha chain variable domain of TCR clone 249779 (TRAV12-3, TRAJ10)
SHLPLTGGGNKLTF

SEQ ID NO: 499558 - protein, 11 aa, Homo sapiens
  CDR3 for beta chain variable domain of TCR clone 249779 (TRBV12-4, TRBJ2-5)
CASSFQGAQYF

SEQ ID NO: 499559 - protein, 15 aa, Homo sapiens
  CDR3 for alpha chain variable domain of TCR clone 249780 (TRAV13-1, TRAJ44)
CAASMGGGTASKLTF

SEQ ID NO: 499560 - protein, 14 aa, Homo sapiens
  CDR3 for beta chain variable domain of TCR clone 249780 (TRBV7-2, TRBJ2-5)
CASSPRGSSETQYF

SEQ ID NO: 499561 - protein, 20 aa, Homo sapiens
  CDR3 for alpha chain variable domain of TCR clone 249781 (TRAV21, TRAJ4)
AASQPGDSAPLAGGYNKLVF

SEQ ID NO: 499562 - protein, 19 aa, Homo sapiens
  CDR3 for beta chain variable domain of TCR clone 249781 (TRBV18, TRBJ1-3)
CASSPLSRTGMSSGNTIYF

SEQ ID NO: 499563 - protein, 11 aa, Homo sapiens
  CDR3 for alpha chain variable domain of TCR clone 249782 (TRAV1-1, TRAJ20)
CAVFNDYKLSF

SEQ ID NO: 499564 - protein, 15 aa, Homo sapiens
  CDR3 for beta chain variable domain of TCR clone 249782 (TRBV2, TRBJ2-5)
CASSSSVAGVETQYF

SEQ ID NO: 499565 - protein, 14 aa, Homo sapiens
  CDR3 for alpha chain variable domain of TCR clone 249783 (TRAV13-1, TRAJ9)
CAESALTGGFKTIF

SEQ ID NO: 499566 - protein, 16 aa, Homo sapiens
  CDR3 for beta chain variable domain of TCR clone 249783 (TRBV12-4, TRBJ2-3)
CASSFGTGGISDTQYF

SEQ ID NO: 499567 - protein, 14 aa, Homo sapiens
  CDR3 for alpha chain variable domain of TCR clone 249784 (TRAV35, TRAJ53)
CAGNSGGSNYKLTF

SEQ ID NO: 499568 - protein, 15 aa, Homo sapiens
  CDR3 for beta chain variable domain of TCR clone 249784 (TRBV7-9, TRBJ2-1)
CDSSLGWGRANEQFF

SEQ ID NO: 499569 - protein, 13 aa, Homo sapiens
  CDR3 for alpha chain variable domain of TCR clone 249785 (TRAV8-3, TRAJ20)
YAVGRPNDYKLSF

SEQ ID NO: 499570 - protein, 14 aa, Homo sapiens
  CDR3 for beta chain variable domain of TCR clone 249785 (TRBV12-5, TRBJ2-5)
CASGSRTHQETQYF

SEQ ID NO: 499571 - protein, 14 aa, Homo sapiens
  CDR3 for alpha chain variable domain of TCR clone 249786 (TRAV12-1, TRAJ15)
CLPPANQAGTALIF

SEQ ID NO: 499572 - protein, 14 aa, Homo sapiens
  CDR3 for beta chain variable domain of TCR clone 249786 (TRBV15, TRBJ2-5)
CATSMGGSGETQYF

SEQ ID NO: 499573 - protein, 13 aa, Homo sapiens
  CDR3 for alpha chain variable domain of TCR clone 249787 (TRAV3, TRAJ9)
CAFWNTGGFKTIF

SEQ ID NO: 499574 - protein, 17 aa, Homo sapiens
  CDR3 for beta chain variable domain of TCR clone 249787 (TRBV20-1, TRBJ1-5)
CSASLSPGQGGNQPQHF

SEQ ID NO: 499575 - protein, 13 aa, Homo sapiens
  CDR3 for alpha chain variable domain of TCR clone 249788 (TRAV12-1, TRAJ53)
CVVNAESNYKLTF

SEQ ID NO: 499576 - protein, 17 aa, Homo sapiens
  CDR3 for beta chain variable domain of TCR clone 249788 (TRBV13, TRBJ2-3)
CASSLSRVAGGRNTQYF

SEQ ID NO: 499577 - protein, 14 aa, Homo sapiens
  CDR3 for alpha chain variable domain of TCR clone 249789 (TRAV12-2, TRAJ17)
CAVLFKAVGNKLTF

SEQ ID NO: 499578 - protein, 17 aa, Homo sapiens
  CDR3 for beta chain variable domain of TCR clone 249789 (TRBV20-1, TRBJ2-2)
CSASGSGQGGVTGELFF

SEQ ID NO: 499579 - protein, 15 aa, Homo sapiens
  CDR3 for alpha chain variable domain of TCR clone 249790 (TRAV12-1, TRAJ45)
CVVLSGGGGADGLTF

SEQ ID NO: 499580 - protein, 13 aa, Homo sapiens
  CDR3 for beta chain variable domain of TCR clone 249790 (TRBV7-3, TRBJ1-1)
CASSQDGGAEAFF

SEQ ID NO: 499581 - protein, 15 aa, Homo sapiens
  CDR3 for alpha chain variable domain of TCR clone 249791 (TRAV8-2, TRAJ44)
CVVSPNTGTASKLNF

SEQ ID NO: 499582 - protein, 12 aa, Homo sapiens
  CDR3 for beta chain variable domain of TCR clone 249791 (TRBV11-2, TRBJ2-2)
CAVPRNTGELFF

SEQ ID NO: 499583 - protein, 14 aa, Homo sapiens
  CDR3 for alpha chain variable domain of TCR clone 249792 (TRAV12-2, TRAJ4)
CVVSPSGGHNKLIF

SEQ ID NO: 499584 - protein, 15 aa, Homo sapiens
  CDR3 for beta chain variable domain of TCR clone 249792 (TRBV4-1, TRBJ1-4)
CASSDTGGTNEKLFF

SEQ ID NO: 499585 - protein, 12 aa, Homo sapiens
  CDR3 for alpha chain variable domain of TCR clone 249793 (TRAV21, TRAJ23)
CAVGPQGGKLIF

SEQ ID NO: 499586 - protein, 13 aa, Homo sapiens
  CDR3 for beta chain variable domain of TCR clone 249793 (TRBV20-1, TRBJ2-7)
CSGRTGAGYEQYF

SEQ ID NO: 499587 - protein, 12 aa, Homo sapiens
  CDR3 for alpha chain variable domain of TCR clone 249794 (TRAV16, TRAJ10)
CSRTGGRNKLTF

SEQ ID NO: 499588 - protein, 13 aa, Homo sapiens
  CDR3 for beta chain variable domain of TCR clone 249794 (TRBV10-3, TRBJ2-7)
CASKLAVNYEQYF

SEQ ID NO: 499589 - protein, 14 aa, Homo sapiens
  CDR3 for alpha chain variable domain of TCR clone 249795 (TRAV9-2, TRAJ39)
CALYIYNAGNMLTF

SEQ ID NO: 499590 - protein, 17 aa, Homo sapiens
  CDR3 for beta chain variable domain of TCR clone 249795 (TRBV6-1, TRBJ1-3)
CTSGPACKGGGGNTIYF

SEQ ID NO: 499591 - protein, 12 aa, Homo sapiens
  CDR3 for alpha chain variable domain of TCR clone 249796 (TRAV1-1, TRAJ8)
CAGCTGFQKLLF

SEQ ID NO: 499592 - protein, 15 aa, Homo sapiens
  CDR3 for beta chain variable domain of TCR clone 249796 (TRBV7-9, TRBJ1-4)
CASSRTGGFNEKLFF

SEQ ID NO: 499593 - protein, 14 aa, Homo sapiens
  CDR3 for alpha chain variable domain of TCR clone 249797 (TRAV1-2, TRAJ16)
CAVNRFSDGQKLLF

SEQ ID NO: 499594 - protein, 17 aa, Homo sapiens
  CDR3 for beta chain variable domain of TCR clone 249797 (TRBV7-9, TRBJ1-6)
CASSSPGRGIHPSTLGT

SEQ ID NO: 499595 - protein, 15 aa, Homo sapiens
  CDR3 for alpha chain variable domain of TCR clone 249798 (TRAV8-6, TRAJ6)
CAVSFTSGGSYIPTF

SEQ ID NO: 499596 - protein, 13 aa, Homo sapiens
  CDR3 for beta chain variable domain of TCR clone 249798 (TRBV29-1, TRBJ2-1)
CSVEGGRVNEQFF

SEQ ID NO: 499597 - protein, 14 aa, Homo sapiens
  CDR3 for alpha chain variable domain of TCR clone 249799 (TRAV16, TRAJ32)
CALKSGGATNRLIF

SEQ ID NO: 499598 - protein, 13 aa, Homo sapiens
  CDR3 for beta chain variable domain of TCR clone 249799 (TRBV15, TRBJ1-6)
CATAGGLNSPLHF

SEQ ID NO: 499599 - protein, 15 aa, Homo sapiens
  CDR3 for alpha chain variable domain of TCR clone 249800 (TRAV8-4, TRAJ3)
CAVTGENLVQQCFQD

SEQ ID NO: 499600 - protein, 16 aa, Homo sapiens
  CDR3 for beta chain variable domain of TCR clone 249800 (TRBV4-2, TRBJ1-1)
CASSQAVFGMNTEAFF

SEQ ID NO: 499601 - protein, 16 aa, Homo sapiens
  CDR3 for alpha chain variable domain of TCR clone 249801 (TRAV30, TRAJ24)
CGTEIVDAESWGKFQF

SEQ ID NO: 499602 - protein, 17 aa, Homo sapiens
  CDR3 for beta chain variable domain of TCR clone 249801 (TRBV7-2, TRBJ2-7)
CASSPFGSSGPSPEQYF

SEQ ID NO: 499603 - protein, 12 aa, Homo sapiens
  CDR3 for alpha chain variable domain of TCR clone 249802 (TRAV17, TRAJ39)
CATGVAGNMLTF

SEQ ID NO: 499604 - protein, 14 aa, Homo sapiens
  CDR3 for beta chain variable domain of TCR clone 249802 (TRBV7-9, TRBJ1-2)
CASSRQGANYGDTF

SEQ ID NO: 499605 - protein, 14 aa, Homo sapiens
  CDR3 for alpha chain variable domain of TCR clone 249803 (TRAV27, TRAJ22)
CAGVSVLGKRQLTF

SEQ ID NO: 499606 - protein, 15 aa, Homo sapiens
  CDR3 for beta chain variable domain of TCR clone 249803 (TRBV5-1, TRBJ1-1)
CASSSTTGTNTEAFF

SEQ ID NO: 499607 - protein, 15 aa, Homo sapiens
  CDR3 for alpha chain variable domain of TCR clone 249804 (TRAV12-2, TRAJ37)
CAVNHGSSNTGKLIF

SEQ ID NO: 499608 - protein, 14 aa, Homo sapiens
  CDR3 for beta chain variable domain of TCR clone 249804 (TRBV7-2, TRBJ2-7)
CASRSQGAAYEQYF

SEQ ID NO: 499609 - protein, 17 aa, Homo sapiens
  CDR3 for alpha chain variable domain of TCR clone 249805 (TRAV3, TRAJ42)
CAVRDRDYGGSQENLIF

SEQ ID NO: 499610 - protein, 15 aa, Homo sapiens
  CDR3 for beta chain variable domain of TCR clone 249805 (TRBV6-6, TRBJ2-7)
CASSYSYGGSYEQYL

SEQ ID NO: 499611 - protein, 13 aa, Homo sapiens
  CDR3 for alpha chain variable domain of TCR clone 249806 (TRAV12-1, TRAJ30)
CVVNTYRDDKIIF

SEQ ID NO: 499612 - protein, 14 aa, Homo sapiens
  CDR3 for beta chain variable domain of TCR clone 249806 (TRBV29-1, TRBJ2-2)
CSVLAETNTGELFF

SEQ ID NO: 499613 - protein, 15 aa, Homo sapiens
  CDR3 for alpha chain variable domain of TCR clone 249807 (TRAV14/DV4, TRAJ36)
CAMREPQTGANNLFF

SEQ ID NO: 499614 - protein, 14 aa, Homo sapiens
  CDR3 for beta chain variable domain of TCR clone 249807 (TRBV25-1, TRBJ1-1)
CASTHLGGNTEAFF

SEQ ID NO: 499615 - protein, 16 aa, Homo sapiens
  CDR3 for alpha chain variable domain of TCR clone 249808 (TRAV30, TRAJ24)
CGTEVGDADSWGKFQF

SEQ ID NO: 499616 - protein, 16 aa, Homo sapiens
  CDR3 for beta chain variable domain of TCR clone 249808 (TRBV6-5, TRBJ2-6)
CASSYPLSSGANVLTF

SEQ ID NO: 499617 - protein, 13 aa, Homo sapiens
  CDR3 for alpha chain variable domain of TCR clone 249809 (TRAV12-2, TRAJ10)
CSVPTGGGNKLTF

SEQ ID NO: 499618 - protein, 16 aa, Homo sapiens
  CDR3 for beta chain variable domain of TCR clone 249809 (TRBV7-3, TRBJ2-1)
CASSLEGYRSYNEQFF

SEQ ID NO: 499619 - protein, 15 aa, Homo sapiens
  CDR3 for alpha chain variable domain of TCR clone 249810 (TRAV21, TRAJ38)
CAVRQDAGHNRKLIW

SEQ ID NO: 499620 - protein, 16 aa, Homo sapiens
  CDR3 for beta chain variable domain of TCR clone 249810 (TRBV4-2, TRBJ1-1)
CASRPLDGGGDTEAFF

SEQ ID NO: 499621 - protein, 17 aa, Homo sapiens
  CDR3 for alpha chain variable domain of TCR clone 249811 (TRAV3, TRAJ6)
CAVRDGMGRRKLHTYIW

SEQ ID NO: 499622 - protein, 15 aa, Homo sapiens
  CDR3 for beta chain variable domain of TCR clone 249811 (TRBV5-1, TRBJ2-7)
CASSLGDFTTYEQYF

SEQ ID NO: 499623 - protein, 14 aa, Homo sapiens
  CDR3 for alpha chain variable domain of TCR clone 249812 (TRAV1-2, TRAJ8)
CAVREDTGFQKLVF

SEQ ID NO: 499624 - protein, 14 aa, Homo sapiens
  CDR3 for beta chain variable domain of TCR clone 249812 (TRBV29-1, TRBJ1-4)
CSGTGTGGNEKLFF

SEQ ID NO: 499625 - protein, 14 aa, Homo sapiens
  CDR3 for alpha chain variable domain of TCR clone 249813 (TRAV26-1, TRAJ39)
CIVRGSRAGNMLTF

SEQ ID NO: 499626 - protein, 15 aa, Homo sapiens
  CDR3 for beta chain variable domain of TCR clone 249813 (TRBV7-9, TRBJ1-5)
CASSQGHQPNQTQHV

SEQ ID NO: 499627 - protein, 10 aa, Homo sapiens
  CDR3 for alpha chain variable domain of TCR clone 249814 (TRAV1-2, TRAJ20)
CALNDYKLSF

SEQ ID NO: 499628 - protein, 14 aa, Homo sapiens
  CDR3 for beta chain variable domain of TCR clone 249814 (TRBV7-2, TRBJ2-7)
CASSPKTSFYEQYF

SEQ ID NO: 499629 - protein, 13 aa, Homo sapiens
  CDR3 for alpha chain variable domain of TCR clone 249815 (TRAV23/DV6, TRAJ6)
CAAKKGGSYIPTF

SEQ ID NO: 499630 - protein, 15 aa, Homo sapiens
  CDR3 for beta chain variable domain of TCR clone 249815 (TRBV5-1, TRBJ1-2)
CASSSYGEFDYGYTF

SEQ ID NO: 499631 - protein, 14 aa, Homo sapiens
  CDR3 for alpha chain variable domain of TCR clone 249816 (TRAV26-1, TRAJ44)
CIVRPTGTASKLTF

SEQ ID NO: 499632 - protein, 13 aa, Homo sapiens
  CDR3 for beta chain variable domain of TCR clone 249816 (TRBV19, TRBJ1-2)
CASSQGQVYGYTF

SEQ ID NO: 499633 - protein, 17 aa, Homo sapiens
  CDR3 for alpha chain variable domain of TCR clone 249817 (TRAV38-1, TRAJ28)
FAFMKPTSGAGGYQPTF

SEQ ID NO: 499634 - protein, 15 aa, Homo sapiens
  CDR3 for beta chain variable domain of TCR clone 249817 (TRBV5-1, TRBJ2-4)
CASSLGGGGSYIQYF

SEQ ID NO: 499635 - protein, 14 aa, Homo sapiens
  CDR3 for alpha chain variable domain of TCR clone 249818 (TRAV1-2, TRAJ16)
CAVNRFSDGQKVLF

SEQ ID NO: 499636 - protein, 13 aa, Homo sapiens
  CDR3 for beta chain variable domain of TCR clone 249818 (TRBV10-3, TRBJ2-7)
CASKLAVNYEQYF

SEQ ID NO: 499637 - protein, 14 aa, Homo sapiens
  CDR3 for alpha chain variable domain of TCR clone 249819 (TRAV9-2, TRAJ39)
CALYIYNAGNMLTF

SEQ ID NO: 499638 - protein, 13 aa, Homo sapiens
  CDR3 for beta chain variable domain of TCR clone 249819 (TRBV10-2, TRBJ2-7)
CASGASGGYEQYF

SEQ ID NO: 499639 - protein, 12 aa, Homo sapiens
  CDR3 for alpha chain variable domain of TCR clone 249820 (TRAV3, TRAJ20)
CAVRDGDYKLSF

SEQ ID NO: 499640 - protein, 14 aa, Homo sapiens
  CDR3 for beta chain variable domain of TCR clone 249820 (TRBV5-1, TRBJ2-7)
CASSRGESLYEQYF

SEQ ID NO: 499641 - protein, 16 aa, Homo sapiens
  CDR3 for alpha chain variable domain of TCR clone 249821 (TRAV3, TRAJ37)
CAVRGKGSGNTGKLNF

SEQ ID NO: 499642 - protein, 13 aa, Homo sapiens
  CDR3 for beta chain variable domain of TCR clone 249821 (TRBV7-3, TRBJ1-1)
CASSQDWGAEAFF

SEQ ID NO: 499643 - protein, 14 aa, Homo sapiens
  CDR3 for alpha chain variable domain of TCR clone 249822 (TRAV16, TRAJ31)
CSKWRRGDNARLMF

SEQ ID NO: 499644 - protein, 17 aa, Homo sapiens
  CDR3 for beta chain variable domain of TCR clone 249822 (TRBV7-3, TRBJ2-5)
CASSLGSGRSGSETQYF

SEQ ID NO: 499645 - protein, 11 aa, Homo sapiens
  CDR3 for alpha chain variable domain of TCR clone 249823 (TRAV17, TRAJ49)
CATDAGNQFYF

SEQ ID NO: 499646 - protein, 12 aa, Homo sapiens
  CDR3 for beta chain variable domain of TCR clone 249823 (TRBV11-2, TRBJ2-1)
CASSPGNNEQFF

SEQ ID NO: 499647 - protein, 14 aa, Homo sapiens
  CDR3 for alpha chain variable domain of TCR clone 249824 (TRAV30, TRAJ33)
CGTVAPRSNSQLIW

SEQ ID NO: 499648 - protein, 16 aa, Homo sapiens
  CDR3 for beta chain variable domain of TCR clone 249824 (TRBV3-1, TRBJ2-5)
CASSPGQFNGLGTQYF

SEQ ID NO: 499649 - protein, 15 aa, Homo sapiens
  CDR3 for alpha chain variable domain of TCR clone 249825 (TRAV29/DV5, TRAJ49)
CAASLPSNTGTQFYF

SEQ ID NO: 499650 - protein, 13 aa, Homo sapiens
  CDR3 for beta chain variable domain of TCR clone 249825 (TRBV24-1, TRBJ2-2)
CATSDWSTGELFF

SEQ ID NO: 499651 - protein, 14 aa, Homo sapiens
  CDR3 for alpha chain variable domain of TCR clone 249826 (TRAV1-1, TRAJ33)
CSVRPEDSNYQLIW

SEQ ID NO: 499652 - protein, 15 aa, Homo sapiens
  CDR3 for beta chain variable domain of TCR clone 249826 (TRBV20-1, TRBJ2-1)
CSARSPGGPGNEQFF

SEQ ID NO: 499653 - protein, 12 aa, Homo sapiens
  CDR3 for alpha chain variable domain of TCR clone 249827 (TRAV3, TRAJ39)
CAVIEWCNMLTF

SEQ ID NO: 499654 - protein, 13 aa, Homo sapiens
  CDR3 for beta chain variable domain of TCR clone 249827 (TRBV7-9, TRBJ1-2)
CASSLKQNYGYTF

SEQ ID NO: 499655 - protein, 14 aa, Homo sapiens
  CDR3 for alpha chain variable domain of TCR clone 249828 (TRAV21, TRAJ58)
CAVGEETSGSRLTF

SEQ ID NO: 499656 - protein, 14 aa, Homo sapiens
  CDR3 for beta chain variable domain of TCR clone 249828 (TRBV7-2, TRBJ1-1)
CASSFLAGTTEAFF

SEQ ID NO: 499657 - protein, 15 aa, Homo sapiens
  CDR3 for alpha chain variable domain of TCR clone 249829 (TRAV1-2, TRAJ30)
CAVRPHGNRDDKIIF

SEQ ID NO: 499658 - protein, 13 aa, Homo sapiens
  CDR3 for beta chain variable domain of TCR clone 249829 (TRBV7-3, TRBJ2-1)
CASSLDSYNEQFF

SEQ ID NO: 499659 - protein, 17 aa, Homo sapiens
  CDR3 for alpha chain variable domain of TCR clone 249830 (TRAV3, TRAJ12)
CAVRDGGRMDSSYKLIF

SEQ ID NO: 499660 - protein, 15 aa, Homo sapiens
  CDR3 for beta chain variable domain of TCR clone 249830 (TRBV19, TRBJ2-1)
CAISRPGQNYNEQFF

SEQ ID NO: 499661 - protein, 13 aa, Homo sapiens
  CDR3 for alpha chain variable domain of TCR clone 249831 (TRAV22, TRAJ26)
CVVEHNYGQNFVF

SEQ ID NO: 499662 - protein, 16 aa, Homo sapiens
  CDR3 for beta chain variable domain of TCR clone 249831 (TRBV7-2, TRBJ2-6)
CASSGRRASGANVLTF

SEQ ID NO: 499663 - protein, 17 aa, Homo sapiens
  CDR3 for alpha chain variable domain of TCR clone 249832 (TRAV13-1, TRAJ52)
CAASSGAGGTSYGKLTF

SEQ ID NO: 499664 - protein, 15 aa, Homo sapiens
  CDR3 for beta chain variable domain of TCR clone 249832 (TRBV12-4, TRBJ1-5)
CANTRVSGFGQPQHF

SEQ ID NO: 499665 - protein, 12 aa, Homo sapiens
  CDR3 for alpha chain variable domain of TCR clone 249833 (TRAV21, TRAJ8)
CAVHTGLQKLVF

SEQ ID NO: 499666 - protein, 13 aa, Homo sapiens
  CDR3 for beta chain variable domain of TCR clone 249833 (TRBV6-3, TRBJ2-1)
CASSYDNYNEQFF

SEQ ID NO: 499667 - protein, 15 aa, Homo sapiens
  CDR3 for alpha chain variable domain of TCR clone 249834 (TRAV12-2, TRAJ53)
CAVNGGGGSNYKLTF

SEQ ID NO: 499668 - protein, 18 aa, Homo sapiens
  CDR3 for beta chain variable domain of TCR clone 249834 (TRBV7-9, TRBJ2-7)
CASSLTTSGSRTWYEQYF

SEQ ID NO: 499669 - protein, 15 aa, Homo sapiens
  CDR3 for alpha chain variable domain of TCR clone 249835 (TRAV26-1, TRAJ44)
CIARVPFGTASKLTF

SEQ ID NO: 499670 - protein, 13 aa, Homo sapiens
  CDR3 for beta chain variable domain of TCR clone 249835 (TRBV28, TRBJ2-7)
CASKAGGVYEQYF

SEQ ID NO: 499671 - protein, 18 aa, Homo sapiens
  CDR3 for alpha chain variable domain of TCR clone 249836 (TRAV21, TRAJ52)
CAARPSPAGGTSYGKMTF

SEQ ID NO: 499672 - protein, 17 aa, Homo sapiens
  CDR3 for beta chain variable domain of TCR clone 249836 (TRBV13, TRBJ2-3)
CASSLSRVAGGRNTQYF

SEQ ID NO: 499673 - protein, 16 aa, Homo sapiens
  CDR3 for alpha chain variable domain of TCR clone 249837 (TRAV3, TRAJ21)
CAVRDIERGNVNKFYF

SEQ ID NO: 499674 - protein, 13 aa, Homo sapiens
  CDR3 for beta chain variable domain of TCR clone 249837 (TRBV27, TRBJ2-7)
CASSLTTGYEQYF

SEQ ID NO: 499675 - protein, 14 aa, Homo sapiens
  CDR3 for alpha chain variable domain of TCR clone 249838 (TRAV26-2, TRAJ54)
CILSRIQGAQKLVF

SEQ ID NO: 499676 - protein, 16 aa, Homo sapiens
  CDR3 for beta chain variable domain of TCR clone 249838 (TRBV12-4, TRBJ1-5)
CASSRPVGGSNQPQHF

SEQ ID NO: 499677 - protein, 14 aa, Homo sapiens
  CDR3 for alpha chain variable domain of TCR clone 249839 (TRAV9-2, TRAJ39)
CALYNYNAGNMLTF

SEQ ID NO: 499678 - protein, 13 aa, Homo sapiens
  CDR3 for beta chain variable domain of TCR clone 249839 (TRBV7-2, TRBJ2-5)
CASSQTSVETQYF

SEQ ID NO: 499679 - protein, 14 aa, Homo sapiens
  CDR3 for alpha chain variable domain of TCR clone 249840 (TRAV12-2, TRAJ5)
CAVNRSTGRSALTF

SEQ ID NO: 499680 - protein, 15 aa, Homo sapiens
  CDR3 for beta chain variable domain of TCR clone 249840 (TRBV5-1, TRBJ2-1)
CASSLVANSYNEQFF

SEQ ID NO: 499681 - protein, 14 aa, Homo sapiens
  CDR3 for alpha chain variable domain of TCR clone 249841 (TRAV26-1, TRAJ38)
CIADNAGNNRKLIW

SEQ ID NO: 499682 - protein, 14 aa, Homo sapiens
  CDR3 for beta chain variable domain of TCR clone 249841 (TRBV7-3, TRBJ1-1)
CASSLGTGYTEAVF

SEQ ID NO: 499683 - protein, 16 aa, Homo sapiens
  CDR3 for alpha chain variable domain of TCR clone 249842 (TRAV3, TRAJ37)
CAVRPHGSGNTGKLTF

SEQ ID NO: 499684 - protein, 16 aa, Homo sapiens
  CDR3 for beta chain variable domain of TCR clone 249842 (TRBV7-9, TRBJ2-3)
CASSPWREVGTDTQYF

SEQ ID NO: 499685 - protein, 14 aa, Homo sapiens
  CDR3 for alpha chain variable domain of TCR clone 249843 (TRAV12-3, TRAJ6)
CAMSATGGSYITTF

SEQ ID NO: 499686 - protein, 12 aa, Homo sapiens
  CDR3 for beta chain variable domain of TCR clone 249843 (TRBV12-4, TRBJ2-7)
CASSLGGYEQYF

SEQ ID NO: 499687 - protein, 11 aa, Homo sapiens
  CDR3 for alpha chain variable domain of TCR clone 249844 (TRAV21, TRAJ41)
CSVRSGYALNF

SEQ ID NO: 499688 - protein, 13 aa, Homo sapiens
  CDR3 for beta chain variable domain of TCR clone 249844 (TRBV7-9, TRBJ1-2)
CASSLKQNYGYTF

SEQ ID NO: 499689 - protein, 13 aa, Homo sapiens
  CDR3 for alpha chain variable domain of TCR clone 249845 (TRAV1-1, TRAJ7)
CAVRDHGNNILAF

SEQ ID NO: 499690 - protein, 20 aa, Homo sapiens
  CDR3 for beta chain variable domain of TCR clone 249845 (TRBV28, TRBJ2-3)
CASSLGVRSTSGRSTDTQYF

SEQ ID NO: 499691 - protein, 14 aa, Homo sapiens
  CDR3 for alpha chain variable domain of TCR clone 249846 (TRAV8-6, TRAJ36)
CAVSEKDGANNLFF

SEQ ID NO: 499692 - protein, 13 aa, Homo sapiens
  CDR3 for beta chain variable domain of TCR clone 249846 (TRBV7-3, TRBJ2-1)
CASSLDSYNEQFF

SEQ ID NO: 499693 - protein, 14 aa, Homo sapiens
  CDR3 for alpha chain variable domain of TCR clone 249847 (TRAV17, TRAJ24)
CATLTTDSWGKFQF

SEQ ID NO: 499694 - protein, 16 aa, Homo sapiens
  CDR3 for beta chain variable domain of TCR clone 249847 (TRBV4-2, TRBJ2-7)
CASSQDSGSLRGEQYF

SEQ ID NO: 499695 - protein, 16 aa, Homo sapiens
  CDR3 for alpha chain variable domain of TCR clone 249848 (TRAV8-6, TRAJ39)
CAVMPMNNNAGNMLTF

SEQ ID NO: 499696 - protein, 16 aa, Homo sapiens
  CDR3 for beta chain variable domain of TCR clone 249848 (TRBV15, TRBJ2-5)
CATSRSLEAAQETQYF

SEQ ID NO: 499697 - protein, 12 aa, Homo sapiens
  CDR3 for alpha chain variable domain of TCR clone 249849 (TRAV17, TRAJ53)
CAFGGSNYKLTF

SEQ ID NO: 499698 - protein, 16 aa, Homo sapiens
  CDR3 for beta chain variable domain of TCR clone 249849 (TRBV11-2, TRBJ2-4)
CASSQEGRWGLDIQYF

SEQ ID NO: 499699 - protein, 18 aa, Homo sapiens
  CDR3 for alpha chain variable domain of TCR clone 249850 (TRAV21, TRAJ52)
CAVRPSPAGGTSYGKLTF

SEQ ID NO: 499700 - protein, 16 aa, Homo sapiens
  CDR3 for beta chain variable domain of TCR clone 249850 (TRBV7-3, TRBJ2-1)
CASSLEGYRSYKEQFF

SEQ ID NO: 499701 - protein, 14 aa, Homo sapiens
  CDR3 for alpha chain variable domain of TCR clone 249851 (TRAV21, TRAJ58)
CAVRRGRSGSRLTF

SEQ ID NO: 499702 - protein, 13 aa, Homo sapiens
  CDR3 for beta chain variable domain of TCR clone 249851 (TRBV7-2, TRBJ1-6)
SASSLKFDSPLHF

SEQ ID NO: 499703 - protein, 12 aa, Homo sapiens
  CDR3 for alpha chain variable domain of TCR clone 249852 (TRAV3, TRAJ20)
CAVRYHDYKLSF

SEQ ID NO: 499704 - protein, 13 aa, Homo sapiens
  CDR3 for beta chain variable domain of TCR clone 249852 (TRBV9, TRBJ2-7)
CASSVGQGGEQYF

SEQ ID NO: 499705 - protein, 13 aa, Homo sapiens
  CDR3 for alpha chain variable domain of TCR clone 249853 (TRAV12-1, TRAJ20)
CVVNRETDYKLSF

SEQ ID NO: 499706 - protein, 15 aa, Homo sapiens
  CDR3 for beta chain variable domain of TCR clone 249853 (TRBV14, TRBJ2-1)
CASSMGLAGGTKQFF

SEQ ID NO: 499707 - protein, 13 aa, Homo sapiens
  CDR3 for alpha chain variable domain of TCR clone 249854 (TRAV8-3, TRAJ28)
WAVGAGGSDQLTV

SEQ ID NO: 499708 - protein, 14 aa, Homo sapiens
  CDR3 for beta chain variable domain of TCR clone 249854 (TRBV7-2, TRBJ2-7)
CASRSQGAAYEQYF

SEQ ID NO: 499709 - protein, 13 aa, Homo sapiens
  CDR3 for alpha chain variable domain of TCR clone 249855 (TRAV2, TRAJ47)
CAVDLEYGNKLVF

SEQ ID NO: 499710 - protein, 17 aa, Homo sapiens
  CDR3 for beta chain variable domain of TCR clone 249855 (TRBV15, TRBJ1-5)
CATSRVKGIYSNQPQHF

SEQ ID NO: 499711 - protein, 13 aa, Homo sapiens
  CDR3 for alpha chain variable domain of TCR clone 249856 (TRAV36/DV7, TRAJ7)
CAGTRYGNNRPAF

SEQ ID NO: 499712 - protein, 14 aa, Homo sapiens
  CDR3 for beta chain variable domain of TCR clone 249856 (TRBV19, TRBJ2-1)
CASPTFVLSGEQFF

SEQ ID NO: 499713 - protein, 13 aa, Homo sapiens
  CDR3 for alpha chain variable domain of TCR clone 249857 (TRAV2, TRAJ24)
CAVTTDSWGKLQS

SEQ ID NO: 499714 - protein, 14 aa, Homo sapiens
  CDR3 for beta chain variable domain of TCR clone 249857 (TRBV13, TRBJ2-5)
CASSLGRGQETQYF

SEQ ID NO: 499715 - protein, 14 aa, Homo sapiens
  CDR3 for alpha chain variable domain of TCR clone 249858 (TRAV9-2, TRAJ39)
CALYIYNAGNMLTF

SEQ ID NO: 499716 - protein, 13 aa, Homo sapiens
  CDR3 for beta chain variable domain of TCR clone 249858 (TRBV28, TRBJ1-1)
CASSKQGWTEAFF

SEQ ID NO: 499717 - protein, 13 aa, Homo sapiens
  CDR3 for alpha chain variable domain of TCR clone 249859 (TRAV3, TRAJ15)
CAVRDPAGTAPIF

SEQ ID NO: 499718 - protein, 13 aa, Homo sapiens
  CDR3 for beta chain variable domain of TCR clone 249859 (TRBV2, TRBJ2-7)
CASSVGGSGEQYF

SEQ ID NO: 499719 - protein, 11 aa, Homo sapiens
  CDR3 for alpha chain variable domain of TCR clone 249860 (TRAV13-1, TRAJ40)
CAVSGTYKYIF

SEQ ID NO: 499720 - protein, 13 aa, Homo sapiens
  CDR3 for beta chain variable domain of TCR clone 249860 (TRBV19, TRBJ1-2)
CASSVPGQDGYTF

SEQ ID NO: 499721 - protein, 17 aa, Homo sapiens
  CDR3 for alpha chain variable domain of TCR clone 249861 (TRAV3, TRAJ6)
CAVREGPRAGGRYIPTF

SEQ ID NO: 499722 - protein, 14 aa, Homo sapiens
  CDR3 for beta chain variable domain of TCR clone 249861 (TRBV7-2, TRBJ2-7)
CASSPKTSFYEQYF

SEQ ID NO: 499723 - protein, 13 aa, Homo sapiens
  CDR3 for alpha chain variable domain of TCR clone 249862 (TRAV23/DV6, TRAJ58)
CAARLIRGFRLTF

SEQ ID NO: 499724 - protein, 13 aa, Homo sapiens
  CDR3 for beta chain variable domain of TCR clone 249862 (TRBV2, TRBJ1-6)
CADSGSYNSPLHF

SEQ ID NO: 499725 - protein, 23 aa, Homo sapiens
  CDR3 for alpha chain variable domain of TCR clone 249863 (TRAV30, TRAJ43)
CTLRPPSSVTQDPTSAALSDMRF

SEQ ID NO: 499726 - protein, 13 aa, Homo sapiens
  CDR3 for beta chain variable domain of TCR clone 249863 (TRBV12-4, TRBJ2-2)
CASSITGSGELFF

SEQ ID NO: 499727 - protein, 13 aa, Homo sapiens
  CDR3 for alpha chain variable domain of TCR clone 249864 (TRAV13-2, TRAJ13)
CAERPGGYQKGTF

SEQ ID NO: 499728 - protein, 14 aa, Homo sapiens
  CDR3 for beta chain variable domain of TCR clone 249864 (TRBV20-1, TRBJ2-5)
CSARYRGLQETQYF

SEQ ID NO: 499729 - protein, 14 aa, Homo sapiens
  CDR3 for alpha chain variable domain of TCR clone 249865 (TRAV26-1, TRAJ38)
CIADNAGNNRKLIW

SEQ ID NO: 499730 - protein, 13 aa, Homo sapiens
  CDR3 for beta chain variable domain of TCR clone 249865 (TRBV19, TRBJ2-7)
CASSPRQSYEQYF

SEQ ID NO: 499731 - protein, 14 aa, Homo sapiens
  CDR3 for alpha chain variable domain of TCR clone 249866 (TRAV14/DV4, TRAJ15)
CAMRRDQAGTALIF

SEQ ID NO: 499732 - protein, 17 aa, Homo sapiens
  CDR3 for beta chain variable domain of TCR clone 249866 (TRBV13, TRBJ2-3)
CASSLSRVAGGRNTQYF

SEQ ID NO: 499733 - protein, 13 aa, Homo sapiens
  CDR3 for alpha chain variable domain of TCR clone 249867 (TRAV17, TRAJ13)
CATDSGGYQKVTF

SEQ ID NO: 499734 - protein, 14 aa, Homo sapiens
  CDR3 for beta chain variable domain of TCR clone 249867 (TRBV11-2, TRBJ2-3)
CASSLGRGTDTQYF

SEQ ID NO: 499735 - protein, 14 aa, Homo sapiens
  CDR3 for alpha chain variable domain of TCR clone 249868 (TRAV1-2, TRAJ8)
CAVREDTGFPNLVF

SEQ ID NO: 499736 - protein, 16 aa, Homo sapiens
  CDR3 for beta chain variable domain of TCR clone 249868 (TRBV12-5, TRBJ2-5)
CASGPRTSGNQETQYF

SEQ ID NO: 499737 - protein, 14 aa, Homo sapiens
  CDR3 for alpha chain variable domain of TCR clone 249869 (TRAV26-1, TRAJ38)
CIADNAGNKRKLIW

SEQ ID NO: 499738 - protein, 12 aa, Homo sapiens
  CDR3 for beta chain variable domain of TCR clone 249869 (TRBV29-1, TRBJ2-3)
CSVTGGADTQYF

SEQ ID NO: 499739 - protein, 14 aa, Homo sapiens
  CDR3 for alpha chain variable domain of TCR clone 249870 (TRAV12-3, TRAJ15)
CAKIPPQAGTALIF

SEQ ID NO: 499740 - protein, 12 aa, Homo sapiens
  CDR3 for beta chain variable domain of TCR clone 249870 (TRBV11-2, TRBJ2-2)
CASSLGGGELFF

SEQ ID NO: 499741 - protein, 14 aa, Homo sapiens
  CDR3 for alpha chain variable domain of TCR clone 249871 (TRAV13-2, TRAJ9)
CAENLETGGFKTIF

SEQ ID NO: 499742 - protein, 15 aa, Homo sapiens
  CDR3 for beta chain variable domain of TCR clone 249871 (TRBV28, TRBJ2-5)
CQQFFPAGGWETQYF

SEQ ID NO: 499743 - protein, 13 aa, Homo sapiens
  CDR3 for alpha chain variable domain of TCR clone 249872 (TRAV2, TRAJ40)
CAVVTSGTYIYIF

SEQ ID NO: 499744 - protein, 16 aa, Homo sapiens
  CDR3 for beta chain variable domain of TCR clone 249872 (TRBV29-1, TRBJ1-2)
CSVEANRDIANYGYTF

SEQ ID NO: 499745 - protein, 12 aa, Homo sapiens
  CDR3 for alpha chain variable domain of TCR clone 249873 (TRAV1-2, TRAJ24)
CAVGGSWGKFQF

SEQ ID NO: 499746 - protein, 17 aa, Homo sapiens
  CDR3 for beta chain variable domain of TCR clone 249873 (TRBV11-2, TRBJ2-1)
CASSLYPPGVEYNERFF

SEQ ID NO: 499747 - protein, 18 aa, Homo sapiens
  CDR3 for alpha chain variable domain of TCR clone 249874 (TRAV29/DV5, TRAJ52)
QCTSVQQADGTSYGKLTF

SEQ ID NO: 499748 - protein, 13 aa, Homo sapiens
  CDR3 for beta chain variable domain of TCR clone 249874 (TRBV7-2, TRBJ1-1)
CASNLKGAKAAFF

SEQ ID NO: 499749 - protein, 14 aa, Homo sapiens
  CDR3 for alpha chain variable domain of TCR clone 249875 (TRAV20, TRAJ22)
CAVQVSGSARQLTF

SEQ ID NO: 499750 - protein, 13 aa, Homo sapiens
  CDR3 for beta chain variable domain of TCR clone 249875 (TRBV20-1, TRBJ2-5)
CSARERGKETQYF

SEQ ID NO: 499751 - protein, 14 aa, Homo sapiens
  CDR3 for alpha chain variable domain of TCR clone 249876 (TRAV12-2, TRAJ13)
CAVKKTGGYQKVTF

SEQ ID NO: 499752 - protein, 16 aa, Homo sapiens
  CDR3 for beta chain variable domain of TCR clone 249876 (TRBV20-1, TRBJ1-4)
CSAPGQGLLTNEKLLF

SEQ ID NO: 499753 - protein, 10 aa, Homo sapiens
  CDR3 for alpha chain variable domain of TCR clone 249877 (TRAV1-2, TRAJ20)
CALTDYKLSF

SEQ ID NO: 499754 - protein, 16 aa, Homo sapiens
  CDR3 for beta chain variable domain of TCR clone 249877 (TRBV20-1, TRBJ1-1)
CSARALTQGMNTEAFF

SEQ ID NO: 499755 - protein, 14 aa, Homo sapiens
  CDR3 for alpha chain variable domain of TCR clone 249878 (TRAV8-6, TRAJ54)
CAVSPELGAQKLVF

SEQ ID NO: 499756 - protein, 15 aa, Homo sapiens
  CDR3 for beta chain variable domain of TCR clone 249878 (TRBV4-1, TRBJ1-6)
CASSAGQGYNSPLHF

SEQ ID NO: 499757 - protein, 15 aa, Homo sapiens
  CDR3 for alpha chain variable domain of TCR clone 249879 (TRAV17, TRAJ16)
CATALRFSDGQKLLF

SEQ ID NO: 499758 - protein, 15 aa, Homo sapiens
  CDR3 for beta chain variable domain of TCR clone 249879 (TRBV13, TRBJ1-5)
CASSLGQGGVQPQHF

SEQ ID NO: 499759 - protein, 16 aa, Homo sapiens
  CDR3 for alpha chain variable domain of TCR clone 249880 (TRAV12-3, TRAJ52)
CAVSNAVGTSYGKLTF

SEQ ID NO: 499760 - protein, 15 aa, Homo sapiens
  CDR3 for beta chain variable domain of TCR clone 249880 (TRBV19, TRBJ2-1)
CASSRPGQNYNEQFF

SEQ ID NO: 499761 - protein, 14 aa, Homo sapiens
  CDR3 for alpha chain variable domain of TCR clone 249881 (TRAV4, TRAJ17)
CLVGDMAAGNKLTF

SEQ ID NO: 499762 - protein, 14 aa, Homo sapiens
  CDR3 for beta chain variable domain of TCR clone 249881 (TRBV4-1, TRBJ2-7)
CDSSPVAGGDEQYF

SEQ ID NO: 499763 - protein, 13 aa, Homo sapiens
  CDR3 for alpha chain variable domain of TCR clone 249882 (TRAV12-3, TRAJ54)
CALVPQGAQKLVF

SEQ ID NO: 499764 - protein, 15 aa, Homo sapiens
  CDR3 for beta chain variable domain of TCR clone 249882 (TRBV4-1, TRBJ2-2)
CASSQGARGTGELFF

SEQ ID NO: 499765 - protein, 15 aa, Homo sapiens
  CDR3 for alpha chain variable domain of TCR clone 249883 (TRAV26-1, TRAJ44)
CIVRIGTGTASKLTF

SEQ ID NO: 499766 - protein, 16 aa, Homo sapiens
  CDR3 for beta chain variable domain of TCR clone 249883 (TRBV12-4, TRBJ1-5)
CASSRPVGGSNQPQHF

SEQ ID NO: 499767 - protein, 17 aa, Homo sapiens
  CDR3 for alpha chain variable domain of TCR clone 249884 (TRAV3, TRAJ6)
CAVRDGPRAGGSYIPTF

SEQ ID NO: 499768 - protein, 20 aa, Homo sapiens
  CDR3 for beta chain variable domain of TCR clone 249884 (TRBV28, TRBJ2-1)
CASTPIGRSPGLAGGNEPFF

SEQ ID NO: 499769 - protein, 16 aa, Homo sapiens
  CDR3 for alpha chain variable domain of TCR clone 249885 (TRAV30, TRAJ24)
CGTEIVDADSWGKFQF

SEQ ID NO: 499770 - protein, 14 aa, Homo sapiens
  CDR3 for beta chain variable domain of TCR clone 249885 (TRBV5-1, TRBJ2-1)
CASSLFGEQASPHF

SEQ ID NO: 499771 - protein, 14 aa, Homo sapiens
  CDR3 for alpha chain variable domain of TCR clone 249886 (TRAV17, TRAJ6)
CATDASGGSYIPTF

SEQ ID NO: 499772 - protein, 13 aa, Homo sapiens
  CDR3 for beta chain variable domain of TCR clone 249886 (TRBV25-1, TRBJ2-5)
CASSESGRETQYF

SEQ ID NO: 499773 - protein, 16 aa, Homo sapiens
  CDR3 for alpha chain variable domain of TCR clone 249887 (TRAV27, TRAJ52)
CAGAGAGGTSYGKLTF

SEQ ID NO: 499774 - protein, 17 aa, Homo sapiens
  CDR3 for beta chain variable domain of TCR clone 249887 (TRBV24-1, TRBJ2-3)
CATCDLPSGEDTDTQYF

SEQ ID NO: 499775 - protein, 15 aa, Homo sapiens
  CDR3 for alpha chain variable domain of TCR clone 249888 (TRAV23/DV6, TRAJ12)
CAAIDLGAMDSSYKL

SEQ ID NO: 499776 - protein, 20 aa, Homo sapiens
  CDR3 for beta chain variable domain of TCR clone 249888 (TRBV7-8, TRBJ2-2)
CASSHLFPGPTIHITGELFF

SEQ ID NO: 499777 - protein, 18 aa, Homo sapiens
  CDR3 for alpha chain variable domain of TCR clone 249889 (TRAV12-3, TRAJ52)
CAMSVGGAGGTSYGKLTF

SEQ ID NO: 499778 - protein, 14 aa, Homo sapiens
  CDR3 for beta chain variable domain of TCR clone 249889 (TRBV3-1, TRBJ2-5)
CASSQGPDQETQYF

SEQ ID NO: 499779 - protein, 14 aa, Homo sapiens
  CDR3 for alpha chain variable domain of TCR clone 249890 (TRAV21, TRAJ45)
CAVSSGGGADGLTF

SEQ ID NO: 499780 - protein, 16 aa, Homo sapiens
  CDR3 for beta chain variable domain of TCR clone 249890 (TRBV11-2, TRBJ2-1)
CASSFGGSFVYNEQFF

SEQ ID NO: 499781 - protein, 14 aa, Homo sapiens
  CDR3 for alpha chain variable domain of TCR clone 249891 (TRAV8-3, TRAJ4)
CAVGAAGGYNKLIF

SEQ ID NO: 499782 - protein, 15 aa, Homo sapiens
  CDR3 for beta chain variable domain of TCR clone 249891 (TRBV12-4, TRBJ2-1)
CASSLLATGNNEQFF

SEQ ID NO: 499783 - protein, 15 aa, Homo sapiens
  CDR3 for alpha chain variable domain of TCR clone 249892 (TRAV8-2, TRAJ24)
CVVSDRTDSWGKLQF

SEQ ID NO: 499784 - protein, 11 aa, Homo sapiens
  CDR3 for beta chain variable domain of TCR clone 249892 (TRBV20-1, TRBJ1-2)
CSVQGAGGYTC

SEQ ID NO: 499785 - protein, 14 aa, Homo sapiens
  CDR3 for alpha chain variable domain of TCR clone 249893 (TRAV17, TRAJ57)
CATDPQGGSEKLVF

SEQ ID NO: 499786 - protein, 17 aa, Homo sapiens
  CDR3 for beta chain variable domain of TCR clone 249893 (TRBV5-1, TRBJ2-2)
CAGSLAGVSGGTGELFF

SEQ ID NO: 499787 - protein, 14 aa, Homo sapiens
  CDR3 for alpha chain variable domain of TCR clone 249894 (TRAV38-1, TRAJ45)
CAYYSGGGADGLTF

SEQ ID NO: 499788 - protein, 20 aa, Homo sapiens
  CDR3 for beta chain variable domain of TCR clone 249894 (TRBV28, TRBJ2-1)
WASTPIGRSPGLAGGNEQLF

SEQ ID NO: 499789 - protein, 14 aa, Homo sapiens
  CDR3 for alpha chain variable domain of TCR clone 249895 (TRAV1-2, TRAJ16)
CAVNRISDGQKLLF

SEQ ID NO: 499790 - protein, 12 aa, Homo sapiens
  CDR3 for beta chain variable domain of TCR clone 249895 (TRBV5-1, TRBJ2-5)
CASSWDEETQYF

SEQ ID NO: 499791 - protein, 13 aa, Homo sapiens
  CDR3 for alpha chain variable domain of TCR clone 249896 (TRAV1-2, TRAJ9)
CAASNTGGFKTIF

SEQ ID NO: 499792 - protein, 14 aa, Homo sapiens
  CDR3 for beta chain variable domain of TCR clone 249896 (TRBV4-2, TRBJ2-3)
CASSQERGTDTQYF

SEQ ID NO: 499793 - protein, 13 aa, Homo sapiens
  CDR3 for alpha chain variable domain of TCR clone 249897 (TRAV21, TRAJ27)
CAARPGNAGKSTF

SEQ ID NO: 499794 - protein, 14 aa, Homo sapiens
  CDR3 for beta chain variable domain of TCR clone 249897 (TRBV7-9, TRBJ1-1)
CASSSTKGNTEAFF

SEQ ID NO: 499795 - protein, 15 aa, Homo sapiens
  CDR3 for alpha chain variable domain of TCR clone 249898 (TRAV12-1, TRAJ48)
CVVNKVNFGNEKLTF

SEQ ID NO: 499796 - protein, 16 aa, Homo sapiens
  CDR3 for beta chain variable domain of TCR clone 249898 (TRBV7-9, TRBJ2-3)
CASSPWREVGTDTQYF

SEQ ID NO: 499797 - protein, 14 aa, Homo sapiens
  CDR3 for alpha chain variable domain of TCR clone 249899 (TRAV26-1, TRAJ38)
CIADNSGNNSKLIW

SEQ ID NO: 499798 - protein, 13 aa, Homo sapiens
  CDR3 for beta chain variable domain of TCR clone 249899 (TRBV20-1, TRBJ1-1)
CSARGGGNTEAFF

SEQ ID NO: 499799 - protein, 14 aa, Homo sapiens
  CDR3 for alpha chain variable domain of TCR clone 249900 (TRAV26-1, TRAJ21)
CIVRPPYNFNKFYF

SEQ ID NO: 499800 - protein, 15 aa, Homo sapiens
  CDR3 for beta chain variable domain of TCR clone 249900 (TRBV20-1, TRBJ2-7)
CSARDRVSGMDEQYF

SEQ ID NO: 499801 - protein, 21 aa, Homo sapiens
  CDR3 for alpha chain variable domain of TCR clone 249901 (TRAV26-1, TRAJ17)
CCVLLHRQSSGSKAAGTKLTF

SEQ ID NO: 499802 - protein, 14 aa, Homo sapiens
  CDR3 for beta chain variable domain of TCR clone 249901 (TRBV28, TRBJ1-2)
CASRIQGADYGYTF

SEQ ID NO: 499803 - protein, 19 aa, Homo sapiens
  CDR3 for alpha chain variable domain of TCR clone 249902 (TRAV17, TRAJ40)
TASRAADTASYFCASKYIF

SEQ ID NO: 499804 - protein, 17 aa, Homo sapiens
  CDR3 for beta chain variable domain of TCR clone 249902 (TRBV11-2, TRBJ2-4)
CAISFLALGGAGDIQYF

SEQ ID NO: 499805 - protein, 14 aa, Homo sapiens
  CDR3 for alpha chain variable domain of TCR clone 249903 (TRAV21, TRAJ12)
CAVRNGDSSYKLIF

SEQ ID NO: 499806 - protein, 14 aa, Homo sapiens
  CDR3 for beta chain variable domain of TCR clone 249903 (TRBV7-6, TRBJ2-7)
CASSLTGTGNEQYY

SEQ ID NO: 499807 - protein, 14 aa, Homo sapiens
  CDR3 for alpha chain variable domain of TCR clone 249904 (TRAV3, TRAJ34)
CAVRAPGNTDKLIF

SEQ ID NO: 499808 - protein, 17 aa, Homo sapiens
  CDR3 for beta chain variable domain of TCR clone 249904 (TRBV20-1, TRBJ2-7)
CSAAPGLAGGISYEQYF

SEQ ID NO: 499809 - protein, 20 aa, Homo sapiens
  CDR3 for alpha chain variable domain of TCR clone 249905 (TRAV21, TRAJ4)
AASQPGDSATLAGGYNKLIF

SEQ ID NO: 499810 - protein, 19 aa, Homo sapiens
  CDR3 for beta chain variable domain of TCR clone 249905 (TRBV18, TRBJ1-3)
CASSPLSRAGMSSGNTIYF

SEQ ID NO: 499811 - protein, 13 aa, Homo sapiens
  CDR3 for alpha chain variable domain of TCR clone 249906 (TRAV21, TRAJ20)
CAVGLRVDYKLSF

SEQ ID NO: 499812 - protein, 18 aa, Homo sapiens
  CDR3 for beta chain variable domain of TCR clone 249906 (TRBV7-6, TRBJ2-1)
CASSPRTSRMSSYNEQFF

SEQ ID NO: 499813 - protein, 14 aa, Homo sapiens
  CDR3 for alpha chain variable domain of TCR clone 249907 (TRAV1-2, TRAJ8)
CAVREDTGFQKLVF

SEQ ID NO: 499814 - protein, 13 aa, Homo sapiens
  CDR3 for beta chain variable domain of TCR clone 249907 (TRBV20-1, TRBJ2-7)
CSARGRGAYEQYF

SEQ ID NO: 499815 - protein, 15 aa, Homo sapiens
  CDR3 for alpha chain variable domain of TCR clone 249908 (TRAV13-1, TRAJ5)
CAASPGGHGQESTYF

SEQ ID NO: 499816 - protein, 17 aa, Homo sapiens
  CDR3 for beta chain variable domain of TCR clone 249908 (TRBV3-1, TRBJ2-2)
CASSQFRDKVDTGELFF

SEQ ID NO: 499817 - protein, 18 aa, Homo sapiens
  CDR3 for alpha chain variable domain of TCR clone 249909 (TRAV13-1, TRAJ52)
CAAKNPNAGGTSYGKLTF

SEQ ID NO: 499818 - protein, 18 aa, Homo sapiens
  CDR3 for beta chain variable domain of TCR clone 249909 (TRBV18, TRBJ1-1)
CASSLPGAPQGAGTEAFF

SEQ ID NO: 499819 - protein, 12 aa, Homo sapiens
  CDR3 for alpha chain variable domain of TCR clone 249910 (TRAV13-2, TRAJ23)
CAERHRGGKLIF

SEQ ID NO: 499820 - protein, 13 aa, Homo sapiens
  CDR3 for beta chain variable domain of TCR clone 249910 (TRBV7-9, TRBJ1-2)
CASSLKQNYSYTF

SEQ ID NO: 499821 - protein, 13 aa, Homo sapiens
  CDR3 for alpha chain variable domain of TCR clone 249911 (TRAV21, TRAJ57)
CSVTQGGSEKLGF

SEQ ID NO: 499822 - protein, 16 aa, Homo sapiens
  CDR3 for beta chain variable domain of TCR clone 249911 (TRBV29-1, TRBJ2-7)
CSVEDAEDGTAYEQYF

SEQ ID NO: 499823 - protein, 17 aa, Homo sapiens
  CDR3 for alpha chain variable domain of TCR clone 249912 (TRAV20, TRAJ42)
CAVQAWGYGGSKGNLIF

SEQ ID NO: 499824 - protein, 16 aa, Homo sapiens
  CDR3 for beta chain variable domain of TCR clone 249912 (TRBV29-1, TRBJ2-5)
CSVEGLAGDYQETQYF

SEQ ID NO: 499825 - protein, 15 aa, Homo sapiens
  CDR3 for alpha chain variable domain of TCR clone 249913 (TRAV27, TRAJ33)
CAGADIMDSNYQLIW

SEQ ID NO: 499826 - protein, 13 aa, Homo sapiens
  CDR3 for beta chain variable domain of TCR clone 249913 (TRBV28, TRBJ1-2)
CVSSLQGRGGYTF

SEQ ID NO: 499827 - protein, 17 aa, Homo sapiens
  CDR3 for alpha chain variable domain of TCR clone 249914 (TRAV26-1, TRAJ37)
CIVRVITVSSNTGKLIF

SEQ ID NO: 499828 - protein, 15 aa, Homo sapiens
  CDR3 for beta chain variable domain of TCR clone 249914 (TRBV10-3, TRBJ2-3)
CAISLTSGGTDTQYF

SEQ ID NO: 499829 - protein, 14 aa, Homo sapiens
  CDR3 for alpha chain variable domain of TCR clone 249915 (TRAV1-1, TRAJ30)
CAVRSLSRDDKIIF

SEQ ID NO: 499830 - protein, 14 aa, Homo sapiens
  CDR3 for beta chain variable domain of TCR clone 249915 (TRBV12-5, TRBJ2-5)
CASGSRTHQETQYF

SEQ ID NO: 499831 - protein, 12 aa, Homo sapiens
  CDR3 for alpha chain variable domain of TCR clone 249916 (TRAV12-2, TRAJ52)
IVGGTSYGKLTF

SEQ ID NO: 499832 - protein, 13 aa, Homo sapiens
  CDR3 for beta chain variable domain of TCR clone 249916 (TRBV12-4, TRBJ1-1)
CASSPGTGFEAFF

SEQ ID NO: 499833 - protein, 16 aa, Homo sapiens
  CDR3 for alpha chain variable domain of TCR clone 249917 (TRAV16, TRAJ4)
CALSRMFSGGYNKLIF

SEQ ID NO: 499834 - protein, 16 aa, Homo sapiens
  CDR3 for beta chain variable domain of TCR clone 249917 (TRBV7-6, TRBJ2-3)
CASSARTSRGTDTQYF

SEQ ID NO: 499835 - protein, 16 aa, Homo sapiens
  CDR3 for alpha chain variable domain of TCR clone 249918 (TRAV4, TRAJ22)
CLVGDLYSGSARQLTF

SEQ ID NO: 499836 - protein, 11 aa, Homo sapiens
  CDR3 for beta chain variable domain of TCR clone 249918 (TRBV7-8, TRBJ2-7)
CASSLSLEQYF

SEQ ID NO: 499837 - protein, 10 aa, Homo sapiens
  CDR3 for alpha chain variable domain of TCR clone 249919 (TRAV2, TRAJ32)
CAFTMVVLQT

SEQ ID NO: 499838 - protein, 16 aa, Homo sapiens
  CDR3 for beta chain variable domain of TCR clone 249919 (TRBV7-9, TRBJ2-7)
CASSYPDREGGYEQYF

SEQ ID NO: 499839 - protein, 17 aa, Homo sapiens
  CDR3 for alpha chain variable domain of TCR clone 249920 (TRAV3, TRAJ42)
CAVRDRDYGGSEGNLIF

SEQ ID NO: 499840 - protein, 12 aa, Homo sapiens
  CDR3 for beta chain variable domain of TCR clone 249920 (TRBV11-2, TRBJ2-1)
CASSPGNNEQFF

SEQ ID NO: 499841 - protein, 11 aa, Homo sapiens
  CDR3 for alpha chain variable domain of TCR clone 249921 (TRAV21, TRAJ48)
CAVDGNEKLTF

SEQ ID NO: 499842 - protein, 16 aa, Homo sapiens
  CDR3 for beta chain variable domain of TCR clone 249921 (TRBV12-4, TRBJ1-5)
CASSSGARGSNQPQHF

SEQ ID NO: 499843 - protein, 14 aa, Homo sapiens
  CDR3 for alpha chain variable domain of TCR clone 249922 (TRAV17, TRAJ16)
CATADFSDGQKLLF

SEQ ID NO: 499844 - protein, 12 aa, Homo sapiens
  CDR3 for beta chain variable domain of TCR clone 249922 (TRBV24-1, TRBJ1-1)
SATLYPDTEAFF

SEQ ID NO: 499845 - protein, 14 aa, Homo sapiens
  CDR3 for alpha chain variable domain of TCR clone 249923 (TRAV27, TRAJ52)
CAGAGGTSYGKLTF

SEQ ID NO: 499846 - protein, 15 aa, Homo sapiens
  CDR3 for beta chain variable domain of TCR clone 249923 (TRBV4-1, TRBJ2-1)
CASSQDLMGGNEQFF

SEQ ID NO: 499847 - protein, 11 aa, Homo sapiens
  CDR3 for alpha chain variable domain of TCR clone 249924 (TRAV23/DV6, TRAJ4)
APAGVYNKLIF

SEQ ID NO: 499848 - protein, 18 aa, Homo sapiens
  CDR3 for beta chain variable domain of TCR clone 249924 (TRBV4-1, TRBJ1-5)
CASSQDPRGQGLNQPQHF

SEQ ID NO: 499849 - protein, 14 aa, Homo sapiens
  CDR3 for alpha chain variable domain of TCR clone 249925 (TRAV26-1, TRAJ38)
CIADNAGNNRKLIW

SEQ ID NO: 499850 - protein, 13 aa, Homo sapiens
  CDR3 for beta chain variable domain of TCR clone 249925 (TRBV15, TRBJ1-6)
CATSGGLSSPLHF

SEQ ID NO: 499851 - protein, 11 aa, Homo sapiens
  CDR3 for alpha chain variable domain of TCR clone 249926 (TRAV3, TRAJ21)
CAVGNFNKFYF

SEQ ID NO: 499852 - protein, 14 aa, Homo sapiens
  CDR3 for beta chain variable domain of TCR clone 249926 (TRBV25-1, TRBJ1-1)
CASTRLGGNNEAFF

SEQ ID NO: 499853 - protein, 13 aa, Homo sapiens
  CDR3 for alpha chain variable domain of TCR clone 249927 (TRAV3, TRAJ17)
CAVPRAAGNKLHF

SEQ ID NO: 499854 - protein, 15 aa, Homo sapiens
  CDR3 for beta chain variable domain of TCR clone 249927 (TRBV7-2, TRBJ1-1)
CASRSATGWSTEAFF

SEQ ID NO: 499855 - protein, 15 aa, Homo sapiens
  CDR3 for alpha chain variable domain of TCR clone 249928 (TRAV3, TRAJ22)
CAVRDRGGSARQLTF

SEQ ID NO: 499856 - protein, 16 aa, Homo sapiens
  CDR3 for beta chain variable domain of TCR clone 249928 (TRBV9, TRBJ1-2)
CASSVEEKVSPYGYTF

SEQ ID NO: 499857 - protein, 13 aa, Homo sapiens
  CDR3 for alpha chain variable domain of TCR clone 249929 (TRAV8-3, TRAJ44)
CAVVPGTASKLTF

SEQ ID NO: 499858 - protein, 16 aa, Homo sapiens
  CDR3 for beta chain variable domain of TCR clone 249929 (TRBV6-1, TRBJ2-5)
CASSETLDRGAETQYF

SEQ ID NO: 499859 - protein, 12 aa, Homo sapiens
  CDR3 for alpha chain variable domain of TCR clone 249930 (TRAV1-2, TRAJ33)
CAALDSNYQLIW

SEQ ID NO: 499860 - protein, 13 aa, Homo sapiens
  CDR3 for beta chain variable domain of TCR clone 249930 (TRBV7-3, TRBJ2-5)
CASSFRGGETQYF

SEQ ID NO: 499861 - protein, 15 aa, Homo sapiens
  CDR3 for alpha chain variable domain of TCR clone 249931 (TRAV8-3, TRAJ11)
CAVGLWNSGYSTLTF

SEQ ID NO: 499862 - protein, 16 aa, Homo sapiens
  CDR3 for beta chain variable domain of TCR clone 249931 (TRBV28, TRBJ2-1)
CASSLWGRTSGTLQFF

SEQ ID NO: 499863 - protein, 15 aa, Homo sapiens
  CDR3 for alpha chain variable domain of TCR clone 249932 (TRAV12-3, TRAJ42)
CAMSGHGGSQGNLIF

SEQ ID NO: 499864 - protein, 13 aa, Homo sapiens
  CDR3 for beta chain variable domain of TCR clone 249932 (TRBV12-4, TRBJ1-1)
CASSPGTGFEAFF

SEQ ID NO: 499865 - protein, 16 aa, Homo sapiens
  CDR3 for alpha chain variable domain of TCR clone 249933 (TRAV3, TRAJ5)
CAVRNLMDTGRRALTF

SEQ ID NO: 499866 - protein, 14 aa, Homo sapiens
  CDR3 for beta chain variable domain of TCR clone 249933 (TRBV12-5, TRBJ2-5)
CASGSRTHQETQYF

SEQ ID NO: 499867 - protein, 15 aa, Homo sapiens
  CDR3 for alpha chain variable domain of TCR clone 249934 (TRAV34, TRAJ38)
CGADFTPGNNRKLIW

SEQ ID NO: 499868 - protein, 14 aa, Homo sapiens
  CDR3 for beta chain variable domain of TCR clone 249934 (TRBV12-5, TRBJ2-5)
CASGSRKHQETQYF

SEQ ID NO: 499869 - protein, 17 aa, Homo sapiens
  CDR3 for alpha chain variable domain of TCR clone 249935 (TRAV12-2, TRAJ4)
CAVNVRPVSGGYNKLIF

SEQ ID NO: 499870 - protein, 15 aa, Homo sapiens
  CDR3 for beta chain variable domain of TCR clone 249935 (TRBV5-1, TRBJ2-5)
CASSLGLAEQETQYF

SEQ ID NO: 499871 - protein, 16 aa, Homo sapiens
  CDR3 for alpha chain variable domain of TCR clone 249936 (TRAV38-1, TRAJ42)
CAFRMVRGGSQGNLIF

SEQ ID NO: 499872 - protein, 15 aa, Homo sapiens
  CDR3 for beta chain variable domain of TCR clone 249936 (TRBV7-2, TRBJ1-2)
CASSITWTGNYGYTF

SEQ ID NO: 499873 - protein, 10 aa, Homo sapiens
  CDR3 for alpha chain variable domain of TCR clone 249937 (TRAV5, TRAJ34)
CAEDTDKLIF

SEQ ID NO: 499874 - protein, 12 aa, Homo sapiens
  CDR3 for beta chain variable domain of TCR clone 249937 (TRBV11-2, TRBJ2-2)
CASSLGGGELFL

SEQ ID NO: 499875 - protein, 13 aa, Homo sapiens
  CDR3 for alpha chain variable domain of TCR clone 249938 (TRAV12-2, TRAJ39)
CAVNNNAGNMPTF

SEQ ID NO: 499876 - protein, 13 aa, Homo sapiens
  CDR3 for beta chain variable domain of TCR clone 249938 (TRBV2, TRBJ1-5)
CATAGPSNQPQHF

SEQ ID NO: 499877 - protein, 11 aa, Homo sapiens
  CDR3 for alpha chain variable domain of TCR clone 249939 (TRAV12-2, TRAJ26)
CAVEGGQNFVF

SEQ ID NO: 499878 - protein, 17 aa, Homo sapiens
  CDR3 for beta chain variable domain of TCR clone 249939 (TRBV20-1, TRBJ2-1)
CSASGGENTGTYNEQFF

SEQ ID NO: 499879 - protein, 12 aa, Homo sapiens
  CDR3 for alpha chain variable domain of TCR clone 249940 (TRAV17, TRAJ47)
CAPTVRGNKLVF

SEQ ID NO: 499880 - protein, 13 aa, Homo sapiens
  CDR3 for beta chain variable domain of TCR clone 249940 (TRBV7-2, TRBJ2-4)
CARSLAEGGIQYF

SEQ ID NO: 499881 - protein, 12 aa, Homo sapiens
  CDR3 for alpha chain variable domain of TCR clone 249941 (TRAV21, TRAJ11)
CAATSGYSTLTF

SEQ ID NO: 499882 - protein, 16 aa, Homo sapiens
  CDR3 for beta chain variable domain of TCR clone 249941 (TRBV28, TRBJ2-2)
CASSLEEGSNTGELFF

SEQ ID NO: 499883 - protein, 12 aa, Homo sapiens
  CDR3 for alpha chain variable domain of TCR clone 249942 (TRAV35, TRAJ49)
CAGWNTGSQFYF

SEQ ID NO: 499884 - protein, 15 aa, Homo sapiens
  CDR3 for beta chain variable domain of TCR clone 249942 (TRBV5-1, TRBJ2-7)
CASSLMTSGSNEQYF

SEQ ID NO: 499885 - protein, 13 aa, Homo sapiens
  CDR3 for alpha chain variable domain of TCR clone 249943 (TRAV13-1, TRAJ5)
CAASDTGRRALTF

SEQ ID NO: 499886 - protein, 16 aa, Homo sapiens
  CDR3 for beta chain variable domain of TCR clone 249943 (TRBV12-5, TRBJ2-5)
CASGPRTSGSQETQYF

SEQ ID NO: 499887 - protein, 11 aa, Homo sapiens
  CDR3 for alpha chain variable domain of TCR clone 249944 (TRAV2, TRAJ13)
CASGGYQKVTF

SEQ ID NO: 499888 - protein, 13 aa, Homo sapiens
  CDR3 for beta chain variable domain of TCR clone 249944 (TRBV6-1, TRBJ1-1)
CASSRQGNTEAVF

SEQ ID NO: 499889 - protein, 13 aa, Homo sapiens
  CDR3 for alpha chain variable domain of TCR clone 249945 (TRAV8-3, TRAJ42)
CARYGGSQGNLIF

SEQ ID NO: 499890 - protein, 14 aa, Homo sapiens
  CDR3 for beta chain variable domain of TCR clone 249945 (TRBV20-1, TRBJ2-1)
CSALDRGTYNEQLF

SEQ ID NO: 499891 - protein, 19 aa, Homo sapiens
  CDR3 for alpha chain variable domain of TCR clone 249946 (TRAV29/DV5, TRAJ49)
CSVLLCSKLTVDTGNQFYF

SEQ ID NO: 499892 - protein, 15 aa, Homo sapiens
  CDR3 for beta chain variable domain of TCR clone 249946 (TRBV11-1, TRBJ2-7)
CASSLNYGASYEQYF

SEQ ID NO: 499893 - protein, 16 aa, Homo sapiens
  CDR3 for alpha chain variable domain of TCR clone 249947 (TRAV30, TRAJ24)
CGTEIVDADSWGKFQF

SEQ ID NO: 499894 - protein, 17 aa, Homo sapiens
  CDR3 for beta chain variable domain of TCR clone 249947 (TRBV5-7, TRBJ2-7)
CASSLWRVLAGSYEQYF

SEQ ID NO: 499895 - protein, 14 aa, Homo sapiens
  CDR3 for alpha chain variable domain of TCR clone 249948 (TRAV1-2, TRAJ8)
GAVREDTGFQKLVF

SEQ ID NO: 499896 - protein, 14 aa, Homo sapiens
  CDR3 for beta chain variable domain of TCR clone 249948 (TRBV7-9, TRBJ1-1)
CASSLGGANTEAFF

SEQ ID NO: 499897 - protein, 18 aa, Homo sapiens
  CDR3 for alpha chain variable domain of TCR clone 249949 (TRAV26-2, TRAJ45)
CILRLWGYSGEGADGLTF

SEQ ID NO: 499898 - protein, 17 aa, Homo sapiens
  CDR3 for beta chain variable domain of TCR clone 249949 (TRBV28, TRBJ2-3)
CASSPTPAGGRVDTQYF

SEQ ID NO: 499899 - protein, 11 aa, Homo sapiens
  CDR3 for alpha chain variable domain of TCR clone 249950 (TRAV2, TRAJ33)
CAVDSNYQLIW

SEQ ID NO: 499900 - protein, 11 aa, Homo sapiens
  CDR3 for beta chain variable domain of TCR clone 249950 (TRBV7-9, TRBJ2-3)
CASSYTDTQYF

SEQ ID NO: 499901 - protein, 14 aa, Homo sapiens
  CDR3 for alpha chain variable domain of TCR clone 249951 (TRAV12-2, TRAJ13)
CAVKKTVGYQTVTF

SEQ ID NO: 499902 - protein, 14 aa, Homo sapiens
  CDR3 for beta chain variable domain of TCR clone 249951 (TRBV6-1, TRBJ1-3)
CASVQGGGGNTIYF

SEQ ID NO: 499903 - protein, 13 aa, Homo sapiens
  CDR3 for alpha chain variable domain of TCR clone 249952 (TRAV8-6, TRAJ54)
CAVSYQGAQKLVF

SEQ ID NO: 499904 - protein, 17 aa, Homo sapiens
  CDR3 for beta chain variable domain of TCR clone 249952 (TRBV19, TRBJ1-1)
CASSIAGRGLMNTEAFF

SEQ ID NO: 499905 - protein, 11 aa, Homo sapiens
  CDR3 for alpha chain variable domain of TCR clone 249953 (TRAV1-2, TRAJ20)
CAVSNDYKLSF

SEQ ID NO: 499906 - protein, 16 aa, Homo sapiens
  CDR3 for beta chain variable domain of TCR clone 249953 (TRBV29-1, TRBJ2-6)
CSVEDMTYSGANVLTF

SEQ ID NO: 499907 - protein, 12 aa, Homo sapiens
  CDR3 for alpha chain variable domain of TCR clone 249954 (TRAV12-3, TRAJ42)
CAPGGSQGNFIF

SEQ ID NO: 499908 - protein, 14 aa, Homo sapiens
  CDR3 for beta chain variable domain of TCR clone 249954 (TRBV5-4, TRBJ1-1)
CASSLDSRRDEAFF

SEQ ID NO: 499909 - protein, 18 aa, Homo sapiens
  CDR3 for alpha chain variable domain of TCR clone 249955 (TRAV26-2, TRAJ54)
CILRDVEVGIQGAQKLVC

SEQ ID NO: 499910 - protein, 17 aa, Homo sapiens
  CDR3 for beta chain variable domain of TCR clone 249955 (TRBV20-1, TRBJ1-5)
CSASLSPGQGGNQPQHF

SEQ ID NO: 499911 - protein, 13 aa, Homo sapiens
  CDR3 for alpha chain variable domain of TCR clone 249956 (TRAV16, TRAJ5)
CALTNTGRRALTS

SEQ ID NO: 499912 - protein, 15 aa, Homo sapiens
  CDR3 for beta chain variable domain of TCR clone 249956 (TRBV11-2, TRBJ2-4)
CASSRPGTGINIQYF

SEQ ID NO: 499913 - protein, 15 aa, Homo sapiens
  CDR3 for alpha chain variable domain of TCR clone 249957 (TRAV8-2, TRAJ40)
CVVLGTTSGTYKYIF

SEQ ID NO: 499914 - protein, 15 aa, Homo sapiens
  CDR3 for beta chain variable domain of TCR clone 249957 (TRBV2, TRBJ2-1)
CASSELAGSYNEQFF

SEQ ID NO: 499915 - protein, 16 aa, Homo sapiens
  CDR3 for alpha chain variable domain of TCR clone 249958 (TRAV1-2, TRAJ10)
CAVRGVLTGGGNKLTF

SEQ ID NO: 499916 - protein, 12 aa, Homo sapiens
  CDR3 for beta chain variable domain of TCR clone 249958 (TRBV7-2, TRBJ2-7)
CASSLGDREQYF

SEQ ID NO: 499917 - protein, 13 aa, Homo sapiens
  CDR3 for alpha chain variable domain of TCR clone 249959 (TRAV27, TRAJ40)
CAGPTSGTYKYIF

SEQ ID NO: 499918 - protein, 16 aa, Homo sapiens
  CDR3 for beta chain variable domain of TCR clone 249959 (TRBV20-1, TRBJ1-4)
CSAPGQGLLTNEKLFF

SEQ ID NO: 499919 - protein, 13 aa, Homo sapiens
  CDR3 for alpha chain variable domain of TCR clone 249960 (TRAV2, TRAJ40)
FSFFTSGTYKYIF

SEQ ID NO: 499920 - protein, 14 aa, Homo sapiens
  CDR3 for beta chain variable domain of TCR clone 249960 (TRBV19, TRBJ2-1)
CASPTFVLSGEQFF

SEQ ID NO: 499921 - protein, 12 aa, Homo sapiens
  CDR3 for alpha chain variable domain of TCR clone 249961 (TRAV21, TRAJ33)
CAKMDSNYQLIW

SEQ ID NO: 499922 - protein, 16 aa, Homo sapiens
  CDR3 for beta chain variable domain of TCR clone 249961 (TRBV5-4, TRBJ2-3)
CASQQPGAGGADTQYF

SEQ ID NO: 499923 - protein, 20 aa, Homo sapiens
  CDR3 for alpha chain variable domain of TCR clone 249962 (TRAV1-1, TRAJ37)
CLLLLRCERYGSGNTGKLIF

SEQ ID NO: 499924 - protein, 13 aa, Homo sapiens
  CDR3 for beta chain variable domain of TCR clone 249962 (TRBV7-3, TRBJ1-1)
CASSQDWGAEAFF

SEQ ID NO: 499925 - protein, 11 aa, Homo sapiens
  CDR3 for alpha chain variable domain of TCR clone 249963 (TRAV13-2, TRAJ31)
CAENMDARLML

SEQ ID NO: 499926 - protein, 15 aa, Homo sapiens
  CDR3 for beta chain variable domain of TCR clone 249963 (TRBV7-8, TRBJ1-2)
YASSLVRDGGLGYTF

SEQ ID NO: 499927 - protein, 13 aa, Homo sapiens
  CDR3 for alpha chain variable domain of TCR clone 249964 (TRAV23/DV6, TRAJ22)
CAPYSGSARQLTF

SEQ ID NO: 499928 - protein, 13 aa, Homo sapiens
  CDR3 for beta chain variable domain of TCR clone 249964 (TRBV6-1, TRBJ1-1)
CASSRQGNTEAVF

SEQ ID NO: 499929 - protein, 17 aa, Homo sapiens
  CDR3 for alpha chain variable domain of TCR clone 249965 (TRAV3, TRAJ6)
CAVRDGPRAGGSCIPTF

SEQ ID NO: 499930 - protein, 13 aa, Homo sapiens
  CDR3 for beta chain variable domain of TCR clone 249965 (TRBV10-3, TRBJ2-7)
CASKLAVNYEQYF

SEQ ID NO: 499931 - protein, 14 aa, Homo sapiens
  CDR3 for alpha chain variable domain of TCR clone 249966 (TRAV35, TRAJ40)
CAVSTTSGTYKYIF

SEQ ID NO: 499932 - protein, 16 aa, Homo sapiens
  CDR3 for beta chain variable domain of TCR clone 249966 (TRBV7-9, TRBJ1-2)
CASSLGFSSGEDDYTF

SEQ ID NO: 499933 - protein, 13 aa, Homo sapiens
  CDR3 for alpha chain variable domain of TCR clone 249967 (TRAV8-4, TRAJ9)
CAVSETGGFKTIF

SEQ ID NO: 499934 - protein, 14 aa, Homo sapiens
  CDR3 for beta chain variable domain of TCR clone 249967 (TRBV13, TRBJ2-5)
CASSVERVGETQYF

SEQ ID NO: 499935 - protein, 14 aa, Homo sapiens
  CDR3 for alpha chain variable domain of TCR clone 249968 (TRAV1-2, TRAJ8)
CAVIEDTGFQKLVF

SEQ ID NO: 499936 - protein, 14 aa, Homo sapiens
  CDR3 for beta chain variable domain of TCR clone 249968 (TRBV29-1, TRBJ2-5)
CSVETSGSGETQYF

SEQ ID NO: 499937 - protein, 14 aa, Homo sapiens
  CDR3 for alpha chain variable domain of TCR clone 249969 (TRAV16, TRAJ54)
CALSDGQGAQKLVF

SEQ ID NO: 499938 - protein, 13 aa, Homo sapiens
  CDR3 for beta chain variable domain of TCR clone 249969 (TRBV20-1, TRBJ2-4)
CSAPTWAGSIQYF

SEQ ID NO: 499939 - protein, 13 aa, Homo sapiens
  CDR3 for alpha chain variable domain of TCR clone 249970 (TRAV2, TRAJ15)
CAVASQAGTALIF

SEQ ID NO: 499940 - protein, 17 aa, Homo sapiens
  CDR3 for beta chain variable domain of TCR clone 249970 (TRBV7-3, TRBJ2-5)
CASSLGSGRSGSEAQYF

SEQ ID NO: 499941 - protein, 14 aa, Homo sapiens
  CDR3 for alpha chain variable domain of TCR clone 249971 (TRAV26-1, TRAJ38)
CIVDNAGNNRKLIW

SEQ ID NO: 499942 - protein, 13 aa, Homo sapiens
  CDR3 for beta chain variable domain of TCR clone 249971 (TRBV20-1, TRBJ1-1)
CSARGGGNTEAFF

SEQ ID NO: 499943 - protein, 16 aa, Homo sapiens
  CDR3 for alpha chain variable domain of TCR clone 249972 (TRAV3, TRAJ37)
CAVRVRGSGNTGKLIF

SEQ ID NO: 499944 - protein, 16 aa, Homo sapiens
  CDR3 for beta chain variable domain of TCR clone 249972 (TRBV7-7, TRBJ2-1)
CASSLASGTSYNEQFF

SEQ ID NO: 499945 - protein, 14 aa, Homo sapiens
  CDR3 for alpha chain variable domain of TCR clone 249973 (TRAV1-2, TRAJ16)
CAVNRFSDGQKLLF

SEQ ID NO: 499946 - protein, 12 aa, Homo sapiens
  CDR3 for beta chain variable domain of TCR clone 249973 (TRBV14, TRBJ2-7)
CASSRIKGEQYF

SEQ ID NO: 499947 - protein, 18 aa, Homo sapiens
  CDR3 for alpha chain variable domain of TCR clone 249974 (TRAV21, TRAJ53)
CAVKGGENSGGSNYKLTF

SEQ ID NO: 499948 - protein, 16 aa, Homo sapiens
  CDR3 for beta chain variable domain of TCR clone 249974 (TRBV10-3, TRBJ2-1)
CAISGVGDGGGGEQFF

SEQ ID NO: 499949 - protein, 15 aa, Homo sapiens
  CDR3 for alpha chain variable domain of TCR clone 249975 (TRAV17, TRAJ57)
CATGPSQGGSEKLVF

SEQ ID NO: 499950 - protein, 14 aa, Homo sapiens
  CDR3 for beta chain variable domain of TCR clone 249975 (TRBV4-2, TRBJ2-1)
CASGLDRAYNEQFF

SEQ ID NO: 499951 - protein, 14 aa, Homo sapiens
  CDR3 for alpha chain variable domain of TCR clone 249976 (TRAV1-2, TRAJ16)
CAVNRFSDGQKLLF

SEQ ID NO: 499952 - protein, 16 aa, Homo sapiens
  CDR3 for beta chain variable domain of TCR clone 249976 (TRBV11-2, TRBJ2-1)
CASSLERDGVDNEQFF

SEQ ID NO: 499953 - protein, 13 aa, Homo sapiens
  CDR3 for alpha chain variable domain of TCR clone 249977 (TRAV13-1, TRAJ40)
CAAISPGTYKYIF

SEQ ID NO: 499954 - protein, 12 aa, Homo sapiens
  CDR3 for beta chain variable domain of TCR clone 249977 (TRBV3-1, TRBJ2-1)
CARGGLGNEQFF

SEQ ID NO: 499955 - protein, 14 aa, Homo sapiens
  CDR3 for alpha chain variable domain of TCR clone 249978 (TRAV1-2, TRAJ8)
CAVREDTGFQKRVF

SEQ ID NO: 499956 - protein, 16 aa, Homo sapiens
  CDR3 for beta chain variable domain of TCR clone 249978 (TRBV12-4, TRBJ1-5)
CASSRPVGGSNQPQHF

SEQ ID NO: 499957 - protein, 12 aa, Homo sapiens
  CDR3 for alpha chain variable domain of TCR clone 249979 (TRAV20, TRAJ39)
CAVGNAGNMLTF

SEQ ID NO: 499958 - protein, 17 aa, Homo sapiens
  CDR3 for beta chain variable domain of TCR clone 249979 (TRBV25-1, TRBJ2-5)
CASSRRGGRGGQETQYF

SEQ ID NO: 499959 - protein, 12 aa, Homo sapiens
  CDR3 for alpha chain variable domain of TCR clone 249980 (TRAV21, TRAJ11)
CAATSGYSTLTF

SEQ ID NO: 499960 - protein, 14 aa, Homo sapiens
  CDR3 for beta chain variable domain of TCR clone 249980 (TRBV20-1, TRBJ2-7)
CSAPEVAGVGEQYF

SEQ ID NO: 499961 - protein, 12 aa, Homo sapiens
  CDR3 for alpha chain variable domain of TCR clone 249981 (TRAV22, TRAJ36)
CAVGTGANNLFF

SEQ ID NO: 499962 - protein, 14 aa, Homo sapiens
  CDR3 for beta chain variable domain of TCR clone 249981 (TRBV7-2, TRBJ2-7)
CASSPKTSFYEQYF

SEQ ID NO: 499963 - protein, 16 aa, Homo sapiens
  CDR3 for alpha chain variable domain of TCR clone 249982 (TRAV12-1, TRAJ53)
CVVTSGAGGINYKLTF

SEQ ID NO: 499964 - protein, 17 aa, Homo sapiens
  CDR3 for beta chain variable domain of TCR clone 249982 (TRBV4-1, TRBJ2-3)
CASSQGYVSGGTDTQYF

SEQ ID NO: 499965 - protein, 15 aa, Homo sapiens
  CDR3 for alpha chain variable domain of TCR clone 249983 (TRAV2, TRAJ15)
CAVEDRGQAGTALIF

SEQ ID NO: 499966 - protein, 13 aa, Homo sapiens
  CDR3 for beta chain variable domain of TCR clone 249983 (TRBV12-4, TRBJ2-1)
CASSLGGSRTQYF

SEQ ID NO: 499967 - protein, 17 aa, Homo sapiens
  CDR3 for alpha chain variable domain of TCR clone 249984 (TRAV26-1, TRAJ10)
CIVSFRGLTGGGNKLTF

SEQ ID NO: 499968 - protein, 15 aa, Homo sapiens
  CDR3 for beta chain variable domain of TCR clone 249984 (TRBV20-1, TRBJ2-7)
CSARKGLAESYEQYF

SEQ ID NO: 499969 - protein, 13 aa, Homo sapiens
  CDR3 for alpha chain variable domain of TCR clone 249985 (TRAV3, TRAJ21)
CAVREPDFNKFYF

SEQ ID NO: 499970 - protein, 13 aa, Homo sapiens
  CDR3 for beta chain variable domain of TCR clone 249985 (TRBV9, TRBJ2-1)
CASSPSGGNQQFF

SEQ ID NO: 499971 - protein, 16 aa, Homo sapiens
  CDR3 for alpha chain variable domain of TCR clone 249986 (TRAV30, TRAJ24)
CGTEIVDADSWGKFQF

SEQ ID NO: 499972 - protein, 15 aa, Homo sapiens
  CDR3 for beta chain variable domain of TCR clone 249986 (TRBV20-1, TRBJ2-7)
CSARDPVSGMDEQYF

SEQ ID NO: 499973 - protein, 13 aa, Homo sapiens
  CDR3 for alpha chain variable domain of TCR clone 249987 (TRAV1-2, TRAJ9)
CAALNTGGFKTIF

SEQ ID NO: 499974 - protein, 14 aa, Homo sapiens
  CDR3 for beta chain variable domain of TCR clone 249987 (TRBV13, TRBJ2-3)
CASSSGSPTDTQYS

SEQ ID NO: 499975 - protein, 14 aa, Homo sapiens
  CDR3 for alpha chain variable domain of TCR clone 249988 (TRAV14/DV4, TRAJ58)
CAMRARTSGSRLTF

SEQ ID NO: 499976 - protein, 18 aa, Homo sapiens
  CDR3 for beta chain variable domain of TCR clone 249988 (TRBV12-4, TRBJ1-5)
CASSVFLVGVGAYQPQHF

SEQ ID NO: 499977 - protein, 12 aa, Homo sapiens
  CDR3 for alpha chain variable domain of TCR clone 249989 (TRAV20, TRAJ39)
CAVGNAGNMLTF

SEQ ID NO: 499978 - protein, 14 aa, Homo sapiens
  CDR3 for beta chain variable domain of TCR clone 249989 (TRBV6-1, TRBJ1-3)
CASVQGGGGNTIYF

SEQ ID NO: 499979 - protein, 16 aa, Homo sapiens
  CDR3 for alpha chain variable domain of TCR clone 249990 (TRAV4, TRAJ22)
CLVGDLYSGSAMQLTF

SEQ ID NO: 499980 - protein, 14 aa, Homo sapiens
  CDR3 for beta chain variable domain of TCR clone 249990 (TRBV28, TRBJ2-3)
CASSWRGRADTQYF

SEQ ID NO: 499981 - protein, 12 aa, Homo sapiens
  CDR3 for alpha chain variable domain of TCR clone 249991 (TRAV12-3, TRAJ34)
CSMGYNTDKLIF

SEQ ID NO: 499982 - protein, 14 aa, Homo sapiens
  CDR3 for beta chain variable domain of TCR clone 249991 (TRBV5-7, TRBJ1-5)
CASSRTGGGQPQHF

SEQ ID NO: 499983 - protein, 12 aa, Homo sapiens
  CDR3 for alpha chain variable domain of TCR clone 249992 (TRAV20, TRAJ26)
CAAYNYGQNFVF

SEQ ID NO: 499984 - protein, 14 aa, Homo sapiens
  CDR3 for beta chain variable domain of TCR clone 249992 (TRBV25-1, TRBJ1-1)
CASTHLGGNTEAFF

SEQ ID NO: 499985 - protein, 15 aa, Homo sapiens
  CDR3 for alpha chain variable domain of TCR clone 249993 (TRAV21, TRAJ23)
CAVDQRKNQGGKLIF

SEQ ID NO: 499986 - protein, 13 aa, Homo sapiens
  CDR3 for beta chain variable domain of TCR clone 249993 (TRBV7-3, TRBJ1-1)
CASSQDWGAEAFF

SEQ ID NO: 499987 - protein, 11 aa, Homo sapiens
  CDR3 for alpha chain variable domain of TCR clone 249994 (TRAV21, TRAJ11)
CAVNGYSALTF

SEQ ID NO: 499988 - protein, 11 aa, Homo sapiens
  CDR3 for beta chain variable domain of TCR clone 249994 (TRBV19, TRBJ1-1)
CASSIGSGAFF

SEQ ID NO: 499989 - protein, 14 aa, Homo sapiens
  CDR3 for alpha chain variable domain of TCR clone 249995 (TRAV12-3, TRAJ21)
CAVEGHQGFNKFYF

SEQ ID NO: 499990 - protein, 16 aa, Homo sapiens
  CDR3 for beta chain variable domain of TCR clone 249995 (TRBV19, TRBJ2-1)
CASSKAGPSSYNEQFF

SEQ ID NO: 499991 - protein, 12 aa, Homo sapiens
  CDR3 for alpha chain variable domain of TCR clone 249996 (TRAV17, TRAJ53)
CAFGGSHYKLTF

SEQ ID NO: 499992 - protein, 16 aa, Homo sapiens
  CDR3 for beta chain variable domain of TCR clone 249996 (TRBV11-2, TRBJ2-4)
CASSQEGRGGLDIQYF

SEQ ID NO: 499993 - protein, 12 aa, Homo sapiens
  CDR3 for alpha chain variable domain of TCR clone 249997 (TRAV3, TRAJ20)
CAVRDHDYKLSF

SEQ ID NO: 499994 - protein, 15 aa, Homo sapiens
  CDR3 for beta chain variable domain of TCR clone 249997 (TRBV9, TRBJ1-6)
CASSVAGTGDSTLHL

SEQ ID NO: 499995 - protein, 16 aa, Homo sapiens
  CDR3 for alpha chain variable domain of TCR clone 249998 (TRAV8-3, TRAJ13)
CAVGAYPSWGYQKVTF

SEQ ID NO: 499996 - protein, 14 aa, Homo sapiens
  CDR3 for beta chain variable domain of TCR clone 249998 (TRBV19, TRBJ2-1)
CASGKSTQYNEQFF

SEQ ID NO: 499997 - protein, 16 aa, Homo sapiens
  CDR3 for alpha chain variable domain of TCR clone 249999 (TRAV30, TRAJ24)
CGTEIVDADSWGKFQF

SEQ ID NO: 499998 - protein, 15 aa, Homo sapiens
  CDR3 for beta chain variable domain of TCR clone 249999 (TRBV28, TRBJ2-2)
CASSLPGEGVGELFF

SEQ ID NO: 499999 - protein, 13 aa, Homo sapiens
  CDR3 for alpha chain variable domain of TCR clone 250000 (TRAV12-3, TRAJ47)
CAMKKEYGNKLVF

SEQ ID NO: 500000 - protein, 18 aa, Homo sapiens
  CDR3 for beta chain variable domain of TCR clone 250000 (TRBV24-1, TRBJ2-1)
CATSDLMFLGRGVHEQFF

SEQ ID NO: 500001 - protein, 14 aa, Homo sapiens
  CDR3 for alpha chain variable domain of TCR clone 250001 (TRAV12-2, TRAJ17)
CAALFKAAGNKLTF

SEQ ID NO: 500002 - protein, 18 aa, Homo sapiens
  CDR3 for beta chain variable domain of TCR clone 250001 (TRBV15, TRBJ2-3)
CATSRDGARSWDTDTQYF

SEQ ID NO: 500003 - protein, 15 aa, Homo sapiens
  CDR3 for alpha chain variable domain of TCR clone 250002 (TRAV20, TRAJ52)
CAVQAGGTSYGKLTF

SEQ ID NO: 500004 - protein, 12 aa, Homo sapiens
  CDR3 for beta chain variable domain of TCR clone 250002 (TRBV19, TRBJ2-1)
CASSQISNEQFF

SEQ ID NO: 500005 - protein, 13 aa, Homo sapiens
  CDR3 for alpha chain variable domain of TCR clone 250003 (TRAV8-4, TRAJ36)
CAVSVAGANNLFF

SEQ ID NO: 500006 - protein, 15 aa, Homo sapiens
  CDR3 for beta chain variable domain of TCR clone 250003 (TRBV7-2, TRBJ2-5)
CASSLEGQGVETQYF

SEQ ID NO: 500007 - protein, 11 aa, Homo sapiens
  CDR3 for alpha chain variable domain of TCR clone 250004 (TRAV2, TRAJ33)
CAVESNYQLIW

SEQ ID NO: 500008 - protein, 16 aa, Homo sapiens
  CDR3 for beta chain variable domain of TCR clone 250004 (TRBV15, TRBJ2-7)
CATSRDRGRRRGEQYF

SEQ ID NO: 500009 - protein, 14 aa, Homo sapiens
  CDR3 for alpha chain variable domain of TCR clone 250005 (TRAV35, TRAJ22)
CAGLRPGSARQLTF

SEQ ID NO: 500010 - protein, 13 aa, Homo sapiens
  CDR3 for beta chain variable domain of TCR clone 250005 (TRBV20-1, TRBJ2-7)
CSPTHTSGYEQYF

SEQ ID NO: 500011 - protein, 16 aa, Homo sapiens
  CDR3 for alpha chain variable domain of TCR clone 250006 (TRAV26-1, TRAJ40)
CIVRGYPTAGTYKYIF

SEQ ID NO: 500012 - protein, 14 aa, Homo sapiens
  CDR3 for beta chain variable domain of TCR clone 250006 (TRBV5-1, TRBJ1-4)
CASSSGQGGEKLFF

SEQ ID NO: 500013 - protein, 13 aa, Homo sapiens
  CDR3 for alpha chain variable domain of TCR clone 250007 (TRAV20, TRAJ37)
CAGCSSNTGKLIF

SEQ ID NO: 500014 - protein, 15 aa, Homo sapiens
  CDR3 for beta chain variable domain of TCR clone 250007 (TRBV19, TRBJ2-4)
CASRGPRRGENIQYF

SEQ ID NO: 500015 - protein, 14 aa, Homo sapiens
  CDR3 for alpha chain variable domain of TCR clone 250008 (TRAV13-1, TRAJ44)
CAAKATGSASKLTF

SEQ ID NO: 500016 - protein, 16 aa, Homo sapiens
  CDR3 for beta chain variable domain of TCR clone 250008 (TRBV15, TRBJ1-2)
CATSRGPRTGGGGYTF

SEQ ID NO: 500017 - protein, 11 aa, Homo sapiens
  CDR3 for alpha chain variable domain of TCR clone 250009 (TRAV1-2, TRAJ31)
CAVNNNARLMF

SEQ ID NO: 500018 - protein, 15 aa, Homo sapiens
  CDR3 for beta chain variable domain of TCR clone 250009 (TRBV11-3, TRBJ2-3)
CASLKDGREGDTQYF

SEQ ID NO: 500019 - protein, 16 aa, Homo sapiens
  CDR3 for alpha chain variable domain of TCR clone 250010 (TRAV12-2, TRAJ43)
CAGDDMRFGAGTRLTV

SEQ ID NO: 500020 - protein, 13 aa, Homo sapiens
  CDR3 for beta chain variable domain of TCR clone 250010 (TRBV7-8, TRBJ2-7)
CASSLTVGREQYF

SEQ ID NO: 500021 - protein, 16 aa, Homo sapiens
  CDR3 for alpha chain variable domain of TCR clone 250011 (TRAV12-3, TRAJ53)
CAMSPGSGGSNYKLTF

SEQ ID NO: 500022 - protein, 13 aa, Homo sapiens
  CDR3 for beta chain variable domain of TCR clone 250011 (TRBV7-3, TRBJ1-1)
CASSQGWGAEAFF

SEQ ID NO: 500023 - protein, 14 aa, Homo sapiens
  CDR3 for alpha chain variable domain of TCR clone 250012 (TRAV13-1, TRAJ13)
CAAIPLVGYQKVTF

SEQ ID NO: 500024 - protein, 15 aa, Homo sapiens
  CDR3 for beta chain variable domain of TCR clone 250012 (TRBV6-3, TRBJ2-7)
CASSSPGTVFYEQYF

SEQ ID NO: 500025 - protein, 15 aa, Homo sapiens
  CDR3 for alpha chain variable domain of TCR clone 250013 (TRAV3, TRAJ22)
CAVRDRGGSARKLTI

SEQ ID NO: 500026 - protein, 13 aa, Homo sapiens
  CDR3 for beta chain variable domain of TCR clone 250013 (TRBV7-3, TRBJ2-1)
CASSPVAYNEQFF

SEQ ID NO: 500027 - protein, 13 aa, Homo sapiens
  CDR3 for alpha chain variable domain of TCR clone 250014 (TRAV20, TRAJ31)
CAVQAWNNARPMF

SEQ ID NO: 500028 - protein, 12 aa, Homo sapiens
  CDR3 for beta chain variable domain of TCR clone 250014 (TRBV11-2, TRBJ2-2)
CASSLGGGELFF

SEQ ID NO: 500029 - protein, 13 aa, Homo sapiens
  CDR3 for alpha chain variable domain of TCR clone 250015 (TRAV12-2, TRAJ49)
CAVKPNTGNQFYF

SEQ ID NO: 500030 - protein, 15 aa, Homo sapiens
  CDR3 for beta chain variable domain of TCR clone 250015 (TRBV7-3, TRBJ2-6)
CASSLGGSGANVLTF

SEQ ID NO: 500031 - protein, 16 aa, Homo sapiens
  CDR3 for alpha chain variable domain of TCR clone 250016 (TRAV14/DV4, TRAJ15)
CAMREGPAQSGTALIF

SEQ ID NO: 500032 - protein, 12 aa, Homo sapiens
  CDR3 for beta chain variable domain of TCR clone 250016 (TRBV28, TRBJ2-6)
CAIKAGANVLTF

SEQ ID NO: 500033 - protein, 13 aa, Homo sapiens
  CDR3 for alpha chain variable domain of TCR clone 250017 (TRAV4, TRAJ42)
YLVGGGSQGNLIF

SEQ ID NO: 500034 - protein, 16 aa, Homo sapiens
  CDR3 for beta chain variable domain of TCR clone 250017 (TRBV5-1, TRBJ2-3)
CASSLQGRVGADTQYF

SEQ ID NO: 500035 - protein, 17 aa, Homo sapiens
  CDR3 for alpha chain variable domain of TCR clone 250018 (TRAV26-1, TRAJ37)
CIVRVITASSNTGKLIF

SEQ ID NO: 500036 - protein, 14 aa, Homo sapiens
  CDR3 for beta chain variable domain of TCR clone 250018 (TRBV5-4, TRBJ1-1)
CASSLDSRRDEAFF

SEQ ID NO: 500037 - protein, 14 aa, Homo sapiens
  CDR3 for alpha chain variable domain of TCR clone 250019 (TRAV1-2, TRAJ8)
CAVREDAGFQKLVF

SEQ ID NO: 500038 - protein, 12 aa, Homo sapiens
  CDR3 for beta chain variable domain of TCR clone 250019 (TRBV29-1, TRBJ2-3)
CSVTGGADTQYF

SEQ ID NO: 500039 - protein, 21 aa, Homo sapiens
  CDR3 for alpha chain variable domain of TCR clone 250020 (TRAV16, TRAJ22)
HLKKPFPQEEDSAMYLRQLTF

SEQ ID NO: 500040 - protein, 15 aa, Homo sapiens
  CDR3 for beta chain variable domain of TCR clone 250020 (TRBV7-9, TRBJ1-6)
CASSSPGRGNSPLHF

SEQ ID NO: 500041 - protein, 15 aa, Homo sapiens
  CDR3 for alpha chain variable domain of TCR clone 250021 (TRAV12-3, TRAJ49)
CAMAVTPNTGNQSYF

SEQ ID NO: 500042 - protein, 18 aa, Homo sapiens
  CDR3 for beta chain variable domain of TCR clone 250021 (TRBV4-1, TRBJ1-5)
CASSQDPRGQGLNQPQHF

SEQ ID NO: 500043 - protein, 15 aa, Homo sapiens
  CDR3 for alpha chain variable domain of TCR clone 250022 (TRAV26-1, TRAJ47)
CIVRVGWGYGNKLVF

SEQ ID NO: 500044 - protein, 13 aa, Homo sapiens
  CDR3 for beta chain variable domain of TCR clone 250022 (TRBV7-7, TRBJ2-5)
CASSRSGQETQYF

SEQ ID NO: 500045 - protein, 11 aa, Homo sapiens
  CDR3 for alpha chain variable domain of TCR clone 250023 (TRAV3, TRAJ21)
CAVGNLYKFYF

SEQ ID NO: 500046 - protein, 16 aa, Homo sapiens
  CDR3 for beta chain variable domain of TCR clone 250023 (TRBV19, TRBJ2-1)
CASSKAGPSSYNEQFF

SEQ ID NO: 500047 - protein, 13 aa, Homo sapiens
  CDR3 for alpha chain variable domain of TCR clone 250024 (TRAV17, TRAJ34)
CATDLYNTDKLIF

SEQ ID NO: 500048 - protein, 15 aa, Homo sapiens
  CDR3 for beta chain variable domain of TCR clone 250024 (TRBV20-1, TRBJ2-3)
CSATGTSVFTDTQYF

SEQ ID NO: 500049 - protein, 15 aa, Homo sapiens
  CDR3 for alpha chain variable domain of TCR clone 250025 (TRAV20, TRAJ39)
CAVQALLVAGNMLTF

SEQ ID NO: 500050 - protein, 14 aa, Homo sapiens
  CDR3 for beta chain variable domain of TCR clone 250025 (TRBV19, TRBJ2-1)
CASTTARTGNEQFF

SEQ ID NO: 500051 - protein, 13 aa, Homo sapiens
  CDR3 for alpha chain variable domain of TCR clone 250026 (TRAV27, TRAJ3)
ASLRGSSASKIIF

SEQ ID NO: 500052 - protein, 15 aa, Homo sapiens
  CDR3 for beta chain variable domain of TCR clone 250026 (TRBV28, TRBJ1-3)
CASSMGWGSGNAIYF

SEQ ID NO: 500053 - protein, 15 aa, Homo sapiens
  CDR3 for alpha chain variable domain of TCR clone 250027 (TRAV20, TRAJ43)
CAVQAGKSSNNDMRF

SEQ ID NO: 500054 - protein, 16 aa, Homo sapiens
  CDR3 for beta chain variable domain of TCR clone 250027 (TRBV20-1, TRBJ1-1)
CSARALTQGMNTEAFF

SEQ ID NO: 500055 - protein, 11 aa, Homo sapiens
  CDR3 for alpha chain variable domain of TCR clone 250028 (TRAV3, TRAJ21)
GAVGNFNKFYF

SEQ ID NO: 500056 - protein, 16 aa, Homo sapiens
  CDR3 for beta chain variable domain of TCR clone 250028 (TRBV19, TRBJ2-1)
CASSKAGPSPYNEQFF

SEQ ID NO: 500057 - protein, 12 aa, Homo sapiens
  CDR3 for alpha chain variable domain of TCR clone 250029 (TRAV3, TRAJ30)
CAVRDPDDKIIF

SEQ ID NO: 500058 - protein, 15 aa, Homo sapiens
  CDR3 for beta chain variable domain of TCR clone 250029 (TRBV6-5, TRBJ1-1)
CASTLRLGSGTEAFF

SEQ ID NO: 500059 - protein, 17 aa, Homo sapiens
  CDR3 for alpha chain variable domain of TCR clone 250030 (TRAV23/DV6, TRAJ57)
CAASSTLSQGGSEKLVL

SEQ ID NO: 500060 - protein, 14 aa, Homo sapiens
  CDR3 for beta chain variable domain of TCR clone 250030 (TRBV25-1, TRBJ1-1)
RASTHLGGNTEAFF

SEQ ID NO: 500061 - protein, 14 aa, Homo sapiens
  CDR3 for alpha chain variable domain of TCR clone 250031 (TRAV16, TRAJ42)
CALLAGGSQGNLIF

SEQ ID NO: 500062 - protein, 13 aa, Homo sapiens
  CDR3 for beta chain variable domain of TCR clone 250031 (TRBV12-4, TRBJ2-5)
CASSLGGSRTQYF

SEQ ID NO: 500063 - protein, 18 aa, Homo sapiens
  CDR3 for alpha chain variable domain of TCR clone 250032 (TRAV1-2, TRAJ18)
CAVRDMGDRGSTLGRLYF

SEQ ID NO: 500064 - protein, 16 aa, Homo sapiens
  CDR3 for beta chain variable domain of TCR clone 250032 (TRBV12-5, TRBJ2-5)
CASGPRTSGNQETQYF

SEQ ID NO: 500065 - protein, 10 aa, Homo sapiens
  CDR3 for alpha chain variable domain of TCR clone 250033 (TRAV21, TRAJ31)
CAVDNARLMF

SEQ ID NO: 500066 - protein, 15 aa, Homo sapiens
  CDR3 for beta chain variable domain of TCR clone 250033 (TRBV27, TRBJ1-5)
CASSSSGTGNQPQHF

SEQ ID NO: 500067 - protein, 14 aa, Homo sapiens
  CDR3 for alpha chain variable domain of TCR clone 250034 (TRAV12-2, TRAJ3)
CAVSLYSSASKIIF

SEQ ID NO: 500068 - protein, 16 aa, Homo sapiens
  CDR3 for beta chain variable domain of TCR clone 250034 (TRBV15, TRBJ2-5)
CATSRYLEAAQETQYF

SEQ ID NO: 500069 - protein, 16 aa, Homo sapiens
  CDR3 for alpha chain variable domain of TCR clone 250035 (TRAV16, TRAJ52)
CALSAAGGTSYGKLTF

SEQ ID NO: 500070 - protein, 13 aa, Homo sapiens
  CDR3 for beta chain variable domain of TCR clone 250035 (TRBV3-1, TRBJ1-5)
CASSQFGEQPQHF

SEQ ID NO: 500071 - protein, 14 aa, Homo sapiens
  CDR3 for alpha chain variable domain of TCR clone 250036 (TRAV23/DV6, TRAJ27)
CAASRDNNAGKSTF

SEQ ID NO: 500072 - protein, 13 aa, Homo sapiens
  CDR3 for beta chain variable domain of TCR clone 250036 (TRBV7-3, TRBJ1-1)
CASSQDWGAEAFF

SEQ ID NO: 500073 - protein, 13 aa, Homo sapiens
  CDR3 for alpha chain variable domain of TCR clone 250037 (TRAV1-1, TRAJ31)
CASYLNNDARLMF

SEQ ID NO: 500074 - protein, 13 aa, Homo sapiens
  CDR3 for beta chain variable domain of TCR clone 250037 (TRBV15, TRBJ1-6)
CATLGGLNSPLHF

SEQ ID NO: 500075 - protein, 14 aa, Homo sapiens
  CDR3 for alpha chain variable domain of TCR clone 250038 (TRAV13-1, TRAJ4)
CAATLPSGYNKLIF

SEQ ID NO: 500076 - protein, 14 aa, Homo sapiens
  CDR3 for beta chain variable domain of TCR clone 250038 (TRBV19, TRBJ2-1)
CASPTFVVSGEQFF

SEQ ID NO: 500077 - protein, 12 aa, Homo sapiens
  CDR3 for alpha chain variable domain of TCR clone 250039 (TRAV36/DV7, TRAJ37)
CACYGNTGKLIF

SEQ ID NO: 500078 - protein, 13 aa, Homo sapiens
  CDR3 for beta chain variable domain of TCR clone 250039 (TRBV2, TRBJ1-1)
CASSVLMNTEAFF

SEQ ID NO: 500079 - protein, 14 aa, Homo sapiens
  CDR3 for alpha chain variable domain of TCR clone 250040 (TRAV17, TRAJ9)
CATVTLGGGFKTIF

SEQ ID NO: 500080 - protein, 12 aa, Homo sapiens
  CDR3 for beta chain variable domain of TCR clone 250040 (TRBV7-2, TRBJ2-5)
CASSQYQETQYF

SEQ ID NO: 500081 - protein, 14 aa, Homo sapiens
  CDR3 for alpha chain variable domain of TCR clone 250041 (TRAV6, TRAJ40)
CALSPTSGTYKYIF

SEQ ID NO: 500082 - protein, 14 aa, Homo sapiens
  CDR3 for beta chain variable domain of TCR clone 250041 (TRBV11-3, TRBJ2-3)
CASSLAPATDTQYF

SEQ ID NO: 500083 - protein, 16 aa, Homo sapiens
  CDR3 for alpha chain variable domain of TCR clone 250042 (TRAV3, TRAJ10)
CAARDMRAGGGNKLTF

SEQ ID NO: 500084 - protein, 17 aa, Homo sapiens
  CDR3 for beta chain variable domain of TCR clone 250042 (TRBV5-1, TRBJ2-1)
CASSTGTSGYSYNEQFF

SEQ ID NO: 500085 - protein, 12 aa, Homo sapiens
  CDR3 for alpha chain variable domain of TCR clone 250043 (TRAV21, TRAJ13)
PGPSGGYQKVTF

SEQ ID NO: 500086 - protein, 15 aa, Homo sapiens
  CDR3 for beta chain variable domain of TCR clone 250043 (TRBV7-9, TRBJ1-6)
CASSSPGSGNSPLHF

SEQ ID NO: 500087 - protein, 14 aa, Homo sapiens
  CDR3 for alpha chain variable domain of TCR clone 250044 (TRAV1-2, TRAJ16)
CAVNRYSDGQKLLF

SEQ ID NO: 500088 - protein, 12 aa, Homo sapiens
  CDR3 for beta chain variable domain of TCR clone 250044 (TRBV24-1, TRBJ1-1)
CATLYPDTEAFF

SEQ ID NO: 500089 - protein, 13 aa, Homo sapiens
  CDR3 for alpha chain variable domain of TCR clone 250045 (TRAV8-4, TRAJ47)
CAVTALYGNKLVF

SEQ ID NO: 500090 - protein, 16 aa, Homo sapiens
  CDR3 for beta chain variable domain of TCR clone 250045 (TRBV19, TRBJ2-7)
CASSIGGQWPSSTSGR

SEQ ID NO: 500091 - protein, 14 aa, Homo sapiens
  CDR3 for alpha chain variable domain of TCR clone 250046 (TRAV35, TRAJ33)
CAGSSQDSNYQLIW

SEQ ID NO: 500092 - protein, 12 aa, Homo sapiens
  CDR3 for beta chain variable domain of TCR clone 250046 (TRBV5-1, TRBJ1-4)
AAWKDGNEKLFF

SEQ ID NO: 500093 - protein, 14 aa, Homo sapiens
  CDR3 for alpha chain variable domain of TCR clone 250047 (TRAV35, TRAJ22)
CAGLRPGSARQLTF

SEQ ID NO: 500094 - protein, 16 aa, Homo sapiens
  CDR3 for beta chain variable domain of TCR clone 250047 (TRBV11-3, TRBJ2-5)
CASSSVVAGSTETQYF

SEQ ID NO: 500095 - protein, 16 aa, Homo sapiens
  CDR3 for alpha chain variable domain of TCR clone 250048 (TRAV16, TRAJ52)
CALSAAGGTSYGKLTF

SEQ ID NO: 500096 - protein, 19 aa, Homo sapiens
  CDR3 for beta chain variable domain of TCR clone 250048 (TRBV19, TRBJ2-5)
CASSIGQVTDCFLGETQYF

SEQ ID NO: 500097 - protein, 17 aa, Homo sapiens
  CDR3 for alpha chain variable domain of TCR clone 250049 (TRAV3, TRAJ6)
CAVRDGPRAGGSYIPTF

SEQ ID NO: 500098 - protein, 18 aa, Homo sapiens
  CDR3 for beta chain variable domain of TCR clone 250049 (TRBV25-1, TRBJ1-2)
CASSVLQNGQGLIFGYTF

SEQ ID NO: 500099 - protein, 14 aa, Homo sapiens
  CDR3 for alpha chain variable domain of TCR clone 250050 (TRAV26-1, TRAJ49)
CIVRLTNTGNQFYF

SEQ ID NO: 500100 - protein, 12 aa, Homo sapiens
  CDR3 for beta chain variable domain of TCR clone 250050 (TRBV29-1, TRBJ2-3)
CSVTGGADTQYF

SEQ ID NO: 500101 - protein, 18 aa, Homo sapiens
  CDR3 for alpha chain variable domain of TCR clone 250051 (TRAV13-1, TRAJ52)
CAASKRSTGGTSYGKLTF

SEQ ID NO: 500102 - protein, 15 aa, Homo sapiens
  CDR3 for beta chain variable domain of TCR clone 250051 (TRBV20-1, TRBJ1-2)
CSATGGARGFYGYTF

SEQ ID NO: 500103 - protein, 14 aa, Homo sapiens
  CDR3 for alpha chain variable domain of TCR clone 250052 (TRAV13-1, TRAJ35)
CAASKGGFGNVLHC

SEQ ID NO: 500104 - protein, 16 aa, Homo sapiens
  CDR3 for beta chain variable domain of TCR clone 250052 (TRBV5-1, TRBJ2-7)
CASSLEGLAGLYEQYF

SEQ ID NO: 500105 - protein, 12 aa, Homo sapiens
  CDR3 for alpha chain variable domain of TCR clone 250053 (TRAV21, TRAJ36)
CCDQDWANNLFF

SEQ ID NO: 500106 - protein, 13 aa, Homo sapiens
  CDR3 for beta chain variable domain of TCR clone 250053 (TRBV7-9, TRBJ1-2)
CASSLKQNYGYTF

SEQ ID NO: 500107 - protein, 23 aa, Homo sapiens
  CDR3 for alpha chain variable domain of TCR clone 250054 (TRAV26-1, TRAJ38)
CIADNAGNNHIQNPDPAVYQLSD

SEQ ID NO: 500108 - protein, 16 aa, Homo sapiens
  CDR3 for beta chain variable domain of TCR clone 250054 (TRBV7-3, TRBJ2-1)
CASSKPLAGGYNEQFF

SEQ ID NO: 500109 - protein, 14 aa, Homo sapiens
  CDR3 for alpha chain variable domain of TCR clone 250055 (TRAV1-2, TRAJ16)
CAVNRFSDGQKLLF

SEQ ID NO: 500110 - protein, 15 aa, Homo sapiens
  CDR3 for beta chain variable domain of TCR clone 250055 (TRBV9, TRBJ1-6)
CASSVAGTGDSTLYF

SEQ ID NO: 500111 - protein, 13 aa, Homo sapiens
  CDR3 for alpha chain variable domain of TCR clone 250056 (TRAV21, TRAJ58)
CCETRRSGSRLTF

SEQ ID NO: 500112 - protein, 13 aa, Homo sapiens
  CDR3 for beta chain variable domain of TCR clone 250056 (TRBV7-2, TRBJ1-6)
CASSLKFDSPLHF

SEQ ID NO: 500113 - protein, 17 aa, Homo sapiens
  CDR3 for alpha chain variable domain of TCR clone 250057 (TRAV12-2, TRAJ36)
CAVKDNLFSGTGTRPTV

SEQ ID NO: 500114 - protein, 15 aa, Homo sapiens
  CDR3 for beta chain variable domain of TCR clone 250057 (TRBV28, TRBJ2-2)
CASTVAGANTGELFF

SEQ ID NO: 500115 - protein, 16 aa, Homo sapiens
  CDR3 for alpha chain variable domain of TCR clone 250058 (TRAV3, TRAJ23)
CAVEPLIYNQGGKLIF

SEQ ID NO: 500116 - protein, 11 aa, Homo sapiens
  CDR3 for beta chain variable domain of TCR clone 250058 (TRBV19, TRBJ1-1)
CASSIGSEAFF

SEQ ID NO: 500117 - protein, 11 aa, Homo sapiens
  CDR3 for alpha chain variable domain of TCR clone 250059 (TRAV27, TRAJ49)
CAGVPPNQLYF

SEQ ID NO: 500118 - protein, 14 aa, Homo sapiens
  CDR3 for beta chain variable domain of TCR clone 250059 (TRBV7-7, TRBJ2-2)
CASSRDRSTGELFF

SEQ ID NO: 500119 - protein, 17 aa, Homo sapiens
  CDR3 for alpha chain variable domain of TCR clone 250060 (TRAV12-2, TRAJ52)
CAVNPYAGGTSYRKLTF

SEQ ID NO: 500120 - protein, 16 aa, Homo sapiens
  CDR3 for beta chain variable domain of TCR clone 250060 (TRBV5-5, TRBJ2-2)
CASSGRREGATGELFF

SEQ ID NO: 500121 - protein, 12 aa, Homo sapiens
  CDR3 for alpha chain variable domain of TCR clone 250061 (TRAV12-3, TRAJ17)
CARTLTGNKLTF

SEQ ID NO: 500122 - protein, 15 aa, Homo sapiens
  CDR3 for beta chain variable domain of TCR clone 250061 (TRBV12-4, TRBJ2-5)
CASSPPTGLQETQYF

SEQ ID NO: 500123 - protein, 13 aa, Homo sapiens
  CDR3 for alpha chain variable domain of TCR clone 250062 (TRAV2, TRAJ24)
CAVPTDSWGKLQF

SEQ ID NO: 500124 - protein, 16 aa, Homo sapiens
  CDR3 for beta chain variable domain of TCR clone 250062 (TRBV5-1, TRBJ2-3)
CASTNSGGPSTDTQYF

SEQ ID NO: 500125 - protein, 13 aa, Homo sapiens
  CDR3 for alpha chain variable domain of TCR clone 250063 (TRAV29/DV5, TRAJ31)
CAASRNNNARIMF

SEQ ID NO: 500126 - protein, 14 aa, Homo sapiens
  CDR3 for beta chain variable domain of TCR clone 250063 (TRBV20-1, TRBJ1-5)
CSARDVTGFQPQHF

SEQ ID NO: 500127 - protein, 17 aa, Homo sapiens
  CDR3 for alpha chain variable domain of TCR clone 250064 (TRAV3, TRAJ12)
CAVRDGGRMDSSYKLIL

SEQ ID NO: 500128 - protein, 12 aa, Homo sapiens
  CDR3 for beta chain variable domain of TCR clone 250064 (TRBV19, TRBJ2-1)
CASSQISNEQFF

SEQ ID NO: 500129 - protein, 13 aa, Homo sapiens
  CDR3 for alpha chain variable domain of TCR clone 250065 (TRAV12-2, TRAJ37)
CAGGSGNTGKLIF

SEQ ID NO: 500130 - protein, 14 aa, Homo sapiens
  CDR3 for beta chain variable domain of TCR clone 250065 (TRBV19, TRBJ2-1)
CASPTFVLSGEQFF

SEQ ID NO: 500131 - protein, 15 aa, Homo sapiens
  CDR3 for alpha chain variable domain of TCR clone 250066 (TRAV3, TRAJ22)
SAVRDRGGSVRQLTF

SEQ ID NO: 500132 - protein, 14 aa, Homo sapiens
  CDR3 for beta chain variable domain of TCR clone 250066 (TRBV18, TRBJ2-5)
CASSPGVSQETQYF

SEQ ID NO: 500133 - protein, 14 aa, Homo sapiens
  CDR3 for alpha chain variable domain of TCR clone 250067 (TRAV1-2, TRAJ16)
CAVNRFSDGQKLLF

SEQ ID NO: 500134 - protein, 15 aa, Homo sapiens
  CDR3 for beta chain variable domain of TCR clone 250067 (TRBV6-3, TRBJ2-7)
CASSSPGTVFYEQYF

SEQ ID NO: 500135 - protein, 14 aa, Homo sapiens
  CDR3 for alpha chain variable domain of TCR clone 250068 (TRAV13-1, TRAJ35)
CAASKGGFGNVLHC

SEQ ID NO: 500136 - protein, 13 aa, Homo sapiens
  CDR3 for beta chain variable domain of TCR clone 250068 (TRBV7-3, TRBJ1-1)
CASSQDWGAEAAF

SEQ ID NO: 500137 - protein, 14 aa, Homo sapiens
  CDR3 for alpha chain variable domain of TCR clone 250069 (TRAV3, TRAJ34)
CALRAPGNTDNLIF

SEQ ID NO: 500138 - protein, 17 aa, Homo sapiens
  CDR3 for beta chain variable domain of TCR clone 250069 (TRBV20-1, TRBJ2-7)
CSATPGLARGISYEQYF

SEQ ID NO: 500139 - protein, 13 aa, Homo sapiens
  CDR3 for alpha chain variable domain of TCR clone 250070 (TRAV29/DV5, TRAJ47)
CAVSAEYGNKLVF

SEQ ID NO: 500140 - protein, 15 aa, Homo sapiens
  CDR3 for beta chain variable domain of TCR clone 250070 (TRBV7-9, TRBJ1-4)
CASSARTGGNEKLFF

SEQ ID NO: 500141 - protein, 12 aa, Homo sapiens
  CDR3 for alpha chain variable domain of TCR clone 250071 (TRAV2, TRAJ31)
CAVEDNNARLMF

SEQ ID NO: 500142 - protein, 14 aa, Homo sapiens
  CDR3 for beta chain variable domain of TCR clone 250071 (TRBV19, TRBJ2-5)
CASIMTGQQETQYF

SEQ ID NO: 500143 - protein, 14 aa, Homo sapiens
  CDR3 for alpha chain variable domain of TCR clone 250072 (TRAV12-2, TRAJ13)
CAVKKTGGYQKVNF

SEQ ID NO: 500144 - protein, 13 aa, Homo sapiens
  CDR3 for beta chain variable domain of TCR clone 250072 (TRBV10-3, TRBJ2-7)
CASKLAVNYEQYF

SEQ ID NO: 500145 - protein, 21 aa, Homo sapiens
  CDR3 for alpha chain variable domain of TCR clone 250073 (TRAV4, TRAJ30)
PRVSLSDTAVYYCLRDDKIIF

SEQ ID NO: 500146 - protein, 16 aa, Homo sapiens
  CDR3 for beta chain variable domain of TCR clone 250073 (TRBV12-5, TRBJ2-5)
CASGPRTSGNQETQYF

SEQ ID NO: 500147 - protein, 16 aa, Homo sapiens
  CDR3 for alpha chain variable domain of TCR clone 250074 (TRAV30, TRAJ24)
CGTEIVGADSGGKFQF

SEQ ID NO: 500148 - protein, 14 aa, Homo sapiens
  CDR3 for beta chain variable domain of TCR clone 250074 (TRBV12-5, TRBJ2-5)
CASGSRTHQETQYF

SEQ ID NO: 500149 - protein, 17 aa, Homo sapiens
  CDR3 for alpha chain variable domain of TCR clone 250075 (TRAV13-1, TRAJ52)
CAAGRNAGGTSYGKLTF

SEQ ID NO: 500150 - protein, 14 aa, Homo sapiens
  CDR3 for beta chain variable domain of TCR clone 250075 (TRBV28, TRBJ2-1)
CASSLNGRNNEQFF

SEQ ID NO: 500151 - protein, 12 aa, Homo sapiens
  CDR3 for alpha chain variable domain of TCR clone 250076 (TRAV30, TRAJ20)
CGTESNDYKVSF

SEQ ID NO: 500152 - protein, 15 aa, Homo sapiens
  CDR3 for beta chain variable domain of TCR clone 250076 (TRBV20-1, TRBJ2-7)
CSARDRVSGMDEQYF

SEQ ID NO: 500153 - protein, 15 aa, Homo sapiens
  CDR3 for alpha chain variable domain of TCR clone 250077 (TRAV17, TRAJ37)
CVTDHGSSNTGKLIF

SEQ ID NO: 500154 - protein, 14 aa, Homo sapiens
  CDR3 for beta chain variable domain of TCR clone 250077 (TRBV7-2, TRBJ2-3)
CASSRTSGADTQYF

SEQ ID NO: 500155 - protein, 14 aa, Homo sapiens
  CDR3 for alpha chain variable domain of TCR clone 250078 (TRAV35, TRAJ24)
CAGPRRDSWGKLQF

SEQ ID NO: 500156 - protein, 11 aa, Homo sapiens
  CDR3 for beta chain variable domain of TCR clone 250078 (TRBV7-9, TRBJ2-5)
CASSLSATQYF

SEQ ID NO: 500157 - protein, 15 aa, Homo sapiens
  CDR3 for alpha chain variable domain of TCR clone 250079 (TRAV2, TRAJ9)
CAVEDRGTGGFKTIF

SEQ ID NO: 500158 - protein, 14 aa, Homo sapiens
  CDR3 for beta chain variable domain of TCR clone 250079 (TRBV7-2, TRBJ2-5)
CASSLVVGQETQYF

SEQ ID NO: 500159 - protein, 13 aa, Homo sapiens
  CDR3 for alpha chain variable domain of TCR clone 250080 (TRAV12-3, TRAJ9)
CAMSADGGFKTIF

SEQ ID NO: 500160 - protein, 15 aa, Homo sapiens
  CDR3 for beta chain variable domain of TCR clone 250080 (TRBV5-5, TRBJ2-2)
CASSRQASGAGELFF

SEQ ID NO: 500161 - protein, 13 aa, Homo sapiens
  CDR3 for alpha chain variable domain of TCR clone 250081 (TRAV17, TRAJ39)
CATGNNAGNMLTF

SEQ ID NO: 500162 - protein, 17 aa, Homo sapiens
  CDR3 for beta chain variable domain of TCR clone 250081 (TRBV4-2, TRBJ2-1)
CASSQDSDQYLYNEQFF

SEQ ID NO: 500163 - protein, 15 aa, Homo sapiens
  CDR3 for alpha chain variable domain of TCR clone 250082 (TRAV35, TRAJ20)
CAGQRVGSNDYKLSF

SEQ ID NO: 500164 - protein, 13 aa, Homo sapiens
  CDR3 for beta chain variable domain of TCR clone 250082 (TRBV19, TRBJ2-7)
CASSKTGTHEQYF

SEQ ID NO: 500165 - protein, 15 aa, Homo sapiens
  CDR3 for alpha chain variable domain of TCR clone 250083 (TRAV21, TRAJ32)
CAVNSYGGATNKLIS

SEQ ID NO: 500166 - protein, 13 aa, Homo sapiens
  CDR3 for beta chain variable domain of TCR clone 250083 (TRBV4-2, TRBJ1-1)
CASSQAGNTEAFF

SEQ ID NO: 500167 - protein, 11 aa, Homo sapiens
  CDR3 for alpha chain variable domain of TCR clone 250084 (TRAV23/DV6, TRAJ48)
RAPRWGEKLTF

SEQ ID NO: 500168 - protein, 13 aa, Homo sapiens
  CDR3 for beta chain variable domain of TCR clone 250084 (TRBV12-4, TRBJ2-5)
CASSPGTEETQYL

SEQ ID NO: 500169 - protein, 14 aa, Homo sapiens
  CDR3 for alpha chain variable domain of TCR clone 250085 (TRAV13-1, TRAJ44)
CAAKATGPASKLTF

SEQ ID NO: 500170 - protein, 12 aa, Homo sapiens
  CDR3 for beta chain variable domain of TCR clone 250085 (TRBV7-2, TRBJ1-5)
CASSLWSQPQHF

SEQ ID NO: 500171 - protein, 14 aa, Homo sapiens
  CDR3 for alpha chain variable domain of TCR clone 250086 (TRAV8-1, TRAJ9)
CAVNAWTGGFKTIF

SEQ ID NO: 500172 - protein, 15 aa, Homo sapiens
  CDR3 for beta chain variable domain of TCR clone 250086 (TRBV11-3, TRBJ2-3)
CASLKDGREGDTQYF

SEQ ID NO: 500173 - protein, 15 aa, Homo sapiens
  CDR3 for alpha chain variable domain of TCR clone 250087 (TRAV2, TRAJ9)
CAVEDRGTGGFKTIF

SEQ ID NO: 500174 - protein, 13 aa, Homo sapiens
  CDR3 for beta chain variable domain of TCR clone 250087 (TRBV18, TRBJ2-5)
CASSPAGKETQYF

SEQ ID NO: 500175 - protein, 23 aa, Homo sapiens
  CDR3 for alpha chain variable domain of TCR clone 250088 (TRAV26-1, TRAJ38)
CIVRPLNAGNNHIQNPDPAVYQL

SEQ ID NO: 500176 - protein, 15 aa, Homo sapiens
  CDR3 for beta chain variable domain of TCR clone 250088 (TRBV7-9, TRBJ2-7)
CASSSSGLAVYEQYF

SEQ ID NO: 500177 - protein, 17 aa, Homo sapiens
  CDR3 for alpha chain variable domain of TCR clone 250089 (TRAV3, TRAJ6)
CAVRDGPRAGGSYIPTF

SEQ ID NO: 500178 - protein, 12 aa, Homo sapiens
  CDR3 for beta chain variable domain of TCR clone 250089 (TRBV7-2, TRBJ1-5)
CASSPQGQPQHF

SEQ ID NO: 500179 - protein, 11 aa, Homo sapiens
  CDR3 for alpha chain variable domain of TCR clone 250090 (TRAV21, TRAJ34)
CAHYNTDKLIF

SEQ ID NO: 500180 - protein, 16 aa, Homo sapiens
  CDR3 for beta chain variable domain of TCR clone 250090 (TRBV10-2, TRBJ1-1)
CDSSEFGEGASTEAFF

SEQ ID NO: 500181 - protein, 13 aa, Homo sapiens
  CDR3 for alpha chain variable domain of TCR clone 250091 (TRAV13-1, TRAJ20)
CAARVSNDYKLSF

SEQ ID NO: 500182 - protein, 16 aa, Homo sapiens
  CDR3 for beta chain variable domain of TCR clone 250091 (TRBV11-1, TRBJ1-1)
CATNPRDRAFNTVAFF

SEQ ID NO: 500183 - protein, 13 aa, Homo sapiens
  CDR3 for alpha chain variable domain of TCR clone 250092 (TRAV13-1, TRAJ20)
CAARVSNDYKLSF

SEQ ID NO: 500184 - protein, 15 aa, Homo sapiens
  CDR3 for beta chain variable domain of TCR clone 250092 (TRBV5-1, TRBJ2-1)
CASSPPRAPYNEQFF

SEQ ID NO: 500185 - protein, 12 aa, Homo sapiens
  CDR3 for alpha chain variable domain of TCR clone 250093 (TRAV12-2, TRAJ5)
CAVRAGRRALTF

SEQ ID NO: 500186 - protein, 10 aa, Homo sapiens
  CDR3 for beta chain variable domain of TCR clone 250093 (TRBV29-1, TRBJ1-2)
CSVDVSGYTF

SEQ ID NO: 500187 - protein, 15 aa, Homo sapiens
  CDR3 for alpha chain variable domain of TCR clone 250094 (TRAV8-3, TRAJ11)
CAVGLLNSGYSTLTF

SEQ ID NO: 500188 - protein, 17 aa, Homo sapiens
  CDR3 for beta chain variable domain of TCR clone 250094 (TRBV4-3, TRBJ1-2)
CASSSRLQAGGSVGDTF

SEQ ID NO: 500189 - protein, 15 aa, Homo sapiens
  CDR3 for alpha chain variable domain of TCR clone 250095 (TRAV17, TRAJ57)
CATGPSQGGSEKLVF

SEQ ID NO: 500190 - protein, 13 aa, Homo sapiens
  CDR3 for beta chain variable domain of TCR clone 250095 (TRBV28, TRBJ2-7)
CASTPGLAGEQYF

SEQ ID NO: 500191 - protein, 13 aa, Homo sapiens
  CDR3 for alpha chain variable domain of TCR clone 250096 (TRAV21, TRAJ57)
CAVTQGGSDKLVF

SEQ ID NO: 500192 - protein, 16 aa, Homo sapiens
  CDR3 for beta chain variable domain of TCR clone 250096 (TRBV7-3, TRBJ2-2)
CASSLKRGTLSGELFF

SEQ ID NO: 500193 - protein, 13 aa, Homo sapiens
  CDR3 for alpha chain variable domain of TCR clone 250097 (TRAV1-2, TRAJ9)
CAVLNTGGFKTNF

SEQ ID NO: 500194 - protein, 17 aa, Homo sapiens
  CDR3 for beta chain variable domain of TCR clone 250097 (TRBV13, TRBJ2-3)
CASSLSRVAGGRNTQYF

SEQ ID NO: 500195 - protein, 14 aa, Homo sapiens
  CDR3 for alpha chain variable domain of TCR clone 250098 (TRAV20, TRAJ56)
CAVQFGGANSKLTF

SEQ ID NO: 500196 - protein, 13 aa, Homo sapiens
  CDR3 for beta chain variable domain of TCR clone 250098 (TRBV12-4, TRBJ1-5)
CASSPDRAQPQHF

SEQ ID NO: 500197 - protein, 17 aa, Homo sapiens
  CDR3 for alpha chain variable domain of TCR clone 250099 (TRAV36/DV7, TRAJ52)
CAVAQRAGGTSYGKLTF

SEQ ID NO: 500198 - protein, 15 aa, Homo sapiens
  CDR3 for beta chain variable domain of TCR clone 250099 (TRBV4-1, TRBJ2-3)
CASSRGQGIPDTQYF

SEQ ID NO: 500199 - protein, 14 aa, Homo sapiens
  CDR3 for alpha chain variable domain of TCR clone 250100 (TRAV2, TRAJ16)
CAVERASDGQKLLF

SEQ ID NO: 500200 - protein, 12 aa, Homo sapiens
  CDR3 for beta chain variable domain of TCR clone 250100 (TRBV6-5, TRBJ2-7)
CASYIYGYEQYF

SEQ ID NO: 500201 - protein, 15 aa, Homo sapiens
  CDR3 for alpha chain variable domain of TCR clone 250101 (TRAV12-2, TRAJ8)
CAVREENTGFQKLVF

SEQ ID NO: 500202 - protein, 16 aa, Homo sapiens
  CDR3 for beta chain variable domain of TCR clone 250101 (TRBV20-1, TRBJ1-4)
CSAPGQGLLTNEKLFF

SEQ ID NO: 500203 - protein, 12 aa, Homo sapiens
  CDR3 for alpha chain variable domain of TCR clone 250102 (TRAV8-3, TRAJ27)
CAVGAEAGKSTF

SEQ ID NO: 500204 - protein, 20 aa, Homo sapiens
  CDR3 for beta chain variable domain of TCR clone 250102 (TRBV28, TRBJ2-1)
CASTPIGRSPGLAGGNEQFF

SEQ ID NO: 500205 - protein, 11 aa, Homo sapiens
  CDR3 for alpha chain variable domain of TCR clone 250103 (TRAV4, TRAJ23)
CLVAPGGKLIF

SEQ ID NO: 500206 - protein, 15 aa, Homo sapiens
  CDR3 for beta chain variable domain of TCR clone 250103 (TRBV7-2, TRBJ2-1)
GASSFQADEYNEQFF

SEQ ID NO: 500207 - protein, 15 aa, Homo sapiens
  CDR3 for alpha chain variable domain of TCR clone 250104 (TRAV12-2, TRAJ53)
CAVNGGGGSNYKLTY

SEQ ID NO: 500208 - protein, 17 aa, Homo sapiens
  CDR3 for beta chain variable domain of TCR clone 250104 (TRBV7-3, TRBJ2-3)
RASSLMKRMRGADTQYF

SEQ ID NO: 500209 - protein, 12 aa, Homo sapiens
  CDR3 for alpha chain variable domain of TCR clone 250105 (TRAV17, TRAJ20)
CATDSNDYKLSF

SEQ ID NO: 500210 - protein, 16 aa, Homo sapiens
  CDR3 for beta chain variable domain of TCR clone 250105 (TRBV6-1, TRBJ2-5)
CASSETLDRGAETQYF

SEQ ID NO: 500211 - protein, 13 aa, Homo sapiens
  CDR3 for alpha chain variable domain of TCR clone 250106 (TRAV8-1, TRAJ30)
CAVIRNRDDKIIF

SEQ ID NO: 500212 - protein, 14 aa, Homo sapiens
  CDR3 for beta chain variable domain of TCR clone 250106 (TRBV7-2, TRBJ1-6)
CDSSLQGANSPLHF

SEQ ID NO: 500213 - protein, 12 aa, Homo sapiens
  CDR3 for alpha chain variable domain of TCR clone 250107 (TRAV21, TRAJ31)
CAVSPARGRRMF

SEQ ID NO: 500214 - protein, 14 aa, Homo sapiens
  CDR3 for beta chain variable domain of TCR clone 250107 (TRBV28, TRBJ2-7)
CASSLLRISYEQYF

SEQ ID NO: 500215 - protein, 13 aa, Homo sapiens
  CDR3 for alpha chain variable domain of TCR clone 250108 (TRAV13-1, TRAJ11)
CEAVLAGYSTLTF

SEQ ID NO: 500216 - protein, 17 aa, Homo sapiens
  CDR3 for beta chain variable domain of TCR clone 250108 (TRBV25-1, TRBJ2-7)
CASSDARVVFSSYEQYF

SEQ ID NO: 500217 - protein, 12 aa, Homo sapiens
  CDR3 for alpha chain variable domain of TCR clone 250109 (TRAV27, TRAJ21)
CAAKEGFNKFYF

SEQ ID NO: 500218 - protein, 15 aa, Homo sapiens
  CDR3 for beta chain variable domain of TCR clone 250109 (TRBV25-1, TRBJ1-4)
CASSPGDSTNEKLFF

SEQ ID NO: 500219 - protein, 14 aa, Homo sapiens
  CDR3 for alpha chain variable domain of TCR clone 250110 (TRAV12-1, TRAJ30)
CVVRGMNRDDKIIF

SEQ ID NO: 500220 - protein, 16 aa, Homo sapiens
  CDR3 for beta chain variable domain of TCR clone 250110 (TRBV19, TRBJ2-7)
CASSLTGTSELGEQYF

SEQ ID NO: 500221 - protein, 15 aa, Homo sapiens
  CDR3 for alpha chain variable domain of TCR clone 250111 (TRAV25, TRAJ23)
CALAPNYNQGGQLIF

SEQ ID NO: 500222 - protein, 13 aa, Homo sapiens
  CDR3 for beta chain variable domain of TCR clone 250111 (TRBV11-3, TRBJ1-1)
CASSWDGNTEAFF

SEQ ID NO: 500223 - protein, 14 aa, Homo sapiens
  CDR3 for alpha chain variable domain of TCR clone 250112 (TRAV2, TRAJ3)
CAVDGYSSASKIIF

SEQ ID NO: 500224 - protein, 16 aa, Homo sapiens
  CDR3 for beta chain variable domain of TCR clone 250112 (TRBV20-1, TRBJ1-5)
CSAELPGQQTNQPQHF

SEQ ID NO: 500225 - protein, 12 aa, Homo sapiens
  CDR3 for alpha chain variable domain of TCR clone 250113 (TRAV1-1, TRAJ12)
CAVGDSSYKLFF

SEQ ID NO: 500226 - protein, 14 aa, Homo sapiens
  CDR3 for beta chain variable domain of TCR clone 250113 (TRBV20-1, TRBJ2-7)
CSAPELAGVGEQYF

SEQ ID NO: 500227 - protein, 12 aa, Homo sapiens
  CDR3 for alpha chain variable domain of TCR clone 250114 (TRAV3, TRAJ20)
CAVRDGDYKLSF

SEQ ID NO: 500228 - protein, 16 aa, Homo sapiens
  CDR3 for beta chain variable domain of TCR clone 250114 (TRBV7-3, TRBJ1-2)
CASSLGAPVPNYGYTF

SEQ ID NO: 500229 - protein, 10 aa, Homo sapiens
  CDR3 for alpha chain variable domain of TCR clone 250115 (TRAV36/DV7, TRAJ49)
CALTGNQFYF

SEQ ID NO: 500230 - protein, 15 aa, Homo sapiens
  CDR3 for beta chain variable domain of TCR clone 250115 (TRBV15, TRBJ2-3)
CATSGAGFGTDTQYF

SEQ ID NO: 500231 - protein, 12 aa, Homo sapiens
  CDR3 for alpha chain variable domain of TCR clone 250116 (TRAV27, TRAJ13)
CAGVRGYQKVTF

SEQ ID NO: 500232 - protein, 16 aa, Homo sapiens
  CDR3 for beta chain variable domain of TCR clone 250116 (TRBV12-4, TRBJ1-5)
CASRQPVEGSDQPQHF

SEQ ID NO: 500233 - protein, 15 aa, Homo sapiens
  CDR3 for alpha chain variable domain of TCR clone 250117 (TRAV26-1, TRAJ38)
CIVRAEGGNNRKLIW

SEQ ID NO: 500234 - protein, 14 aa, Homo sapiens
  CDR3 for beta chain variable domain of TCR clone 250117 (TRBV7-6, TRBJ2-5)
CASSSPAGSEAQYF

SEQ ID NO: 500235 - protein, 14 aa, Homo sapiens
  CDR3 for alpha chain variable domain of TCR clone 250118 (TRAV35, TRAJ13)
CAGSPSGGYQKVTF

SEQ ID NO: 500236 - protein, 13 aa, Homo sapiens
  CDR3 for beta chain variable domain of TCR clone 250118 (TRBV24-1, TRBJ1-4)
CATNNGRSEKLFF

SEQ ID NO: 500237 - protein, 15 aa, Homo sapiens
  CDR3 for alpha chain variable domain of TCR clone 250119 (TRAV12-2, TRAJ53)
CAVNGGGGSNYKLTF

SEQ ID NO: 500238 - protein, 13 aa, Homo sapiens
  CDR3 for beta chain variable domain of TCR clone 250119 (TRBV3-1, TRBJ1-1)
CASSPGVIIEAFF

SEQ ID NO: 500239 - protein, 12 aa, Homo sapiens
  CDR3 for alpha chain variable domain of TCR clone 250120 (TRAV12-2, TRAJ10)
WGVTGGGNKLTF

SEQ ID NO: 500240 - protein, 16 aa, Homo sapiens
  CDR3 for beta chain variable domain of TCR clone 250120 (TRBV13, TRBJ2-2)
CASSPRTGEHTGELFF

SEQ ID NO: 500241 - protein, 15 aa, Homo sapiens
  CDR3 for alpha chain variable domain of TCR clone 250121 (TRAV13-2, TRAJ58)
CVTAQKENSGSRLTF

SEQ ID NO: 500242 - protein, 14 aa, Homo sapiens
  CDR3 for beta chain variable domain of TCR clone 250121 (TRBV7-2, TRBJ2-3)
CASRRGLAADTQYF

SEQ ID NO: 500243 - protein, 18 aa, Homo sapiens
  CDR3 for alpha chain variable domain of TCR clone 250122 (TRAV12-3, TRAJ52)
CAMSVGGAGGTSYGKLTF

SEQ ID NO: 500244 - protein, 15 aa, Homo sapiens
  CDR3 for beta chain variable domain of TCR clone 250122 (TRBV27, TRBJ1-6)
CASSFDRGLGSTLLF

SEQ ID NO: 500245 - protein, 15 aa, Homo sapiens
  CDR3 for alpha chain variable domain of TCR clone 250123 (TRAV12-3, TRAJ5)
CAMSGVGTGRRALTF

SEQ ID NO: 500246 - protein, 15 aa, Homo sapiens
  CDR3 for beta chain variable domain of TCR clone 250123 (TRBV19, TRBJ1-1)
CASTSGQIQNTEAFF

SEQ ID NO: 500247 - protein, 19 aa, Homo sapiens
  CDR3 for alpha chain variable domain of TCR clone 250124 (TRAV13-1, TRAJ52)
CAASPYQNAGGTIYGKLTF

SEQ ID NO: 500248 - protein, 14 aa, Homo sapiens
  CDR3 for beta chain variable domain of TCR clone 250124 (TRBV19, TRBJ2-7)
CASTVQGRPYEQYF

SEQ ID NO: 500249 - protein, 15 aa, Homo sapiens
  CDR3 for alpha chain variable domain of TCR clone 250125 (TRAV1-2, TRAJ30)
CAVRPHGNRDDKIIF

SEQ ID NO: 500250 - protein, 13 aa, Homo sapiens
  CDR3 for beta chain variable domain of TCR clone 250125 (TRBV20-1, TRBJ1-1)
CSARGGGNTEAFF

SEQ ID NO: 500251 - protein, 18 aa, Homo sapiens
  CDR3 for alpha chain variable domain of TCR clone 250126 (TRAV26-1, TRAJ22)
CIARVALISSGSARQLTF

SEQ ID NO: 500252 - protein, 13 aa, Homo sapiens
  CDR3 for beta chain variable domain of TCR clone 250126 (TRBV13, TRBJ2-5)
CASSPEVGETQYF

SEQ ID NO: 500253 - protein, 13 aa, Homo sapiens
  CDR3 for alpha chain variable domain of TCR clone 250127 (TRAV16, TRAJ12)
CALRMDSSYKLIF

SEQ ID NO: 500254 - protein, 15 aa, Homo sapiens
  CDR3 for beta chain variable domain of TCR clone 250127 (TRBV10-3, TRBJ2-3)
CAISLTSGGTDTQYF

SEQ ID NO: 500255 - protein, 14 aa, Homo sapiens
  CDR3 for alpha chain variable domain of TCR clone 250128 (TRAV3, TRAJ7)
YAVREEEREQQTRF

SEQ ID NO: 500256 - protein, 12 aa, Homo sapiens
  CDR3 for beta chain variable domain of TCR clone 250128 (TRBV7-8, TRBJ2-7)
CASSLGDREQYF

SEQ ID NO: 500257 - protein, 14 aa, Homo sapiens
  CDR3 for alpha chain variable domain of TCR clone 250129 (TRAV17, TRAJ45)
CATASGGGADGLTF

SEQ ID NO: 500258 - protein, 15 aa, Homo sapiens
  CDR3 for beta chain variable domain of TCR clone 250129 (TRBV11-2, TRBJ2-1)
CTSSRNRGLMYEQFF

SEQ ID NO: 500259 - protein, 16 aa, Homo sapiens
  CDR3 for alpha chain variable domain of TCR clone 250130 (TRAV30, TRAJ24)
CGTEIVDADSWGKFQF

SEQ ID NO: 500260 - protein, 13 aa, Homo sapiens
  CDR3 for beta chain variable domain of TCR clone 250130 (TRBV2, TRBJ2-7)
CASSGGIAYEQYF

SEQ ID NO: 500261 - protein, 12 aa, Homo sapiens
  CDR3 for alpha chain variable domain of TCR clone 250131 (TRAV1-1, TRAJ39)
CAVPVVGNMLTF

SEQ ID NO: 500262 - protein, 16 aa, Homo sapiens
  CDR3 for beta chain variable domain of TCR clone 250131 (TRBV7-3, TRBJ2-1)
CASSLEGYRSYNEQFF

SEQ ID NO: 500263 - protein, 11 aa, Homo sapiens
  CDR3 for alpha chain variable domain of TCR clone 250132 (TRAV1-1, TRAJ31)
CAAFPNARLMF

SEQ ID NO: 500264 - protein, 17 aa, Homo sapiens
  CDR3 for beta chain variable domain of TCR clone 250132 (TRBV11-2, TRBJ2-1)
CASSLYPPGVEYNEQFF

SEQ ID NO: 500265 - protein, 10 aa, Homo sapiens
  CDR3 for alpha chain variable domain of TCR clone 250133 (TRAV17, TRAJ36)
CATVAGNLFF

SEQ ID NO: 500266 - protein, 16 aa, Homo sapiens
  CDR3 for beta chain variable domain of TCR clone 250133 (TRBV7-3, TRBJ2-1)
CASSLEGYRSYNEQFF

SEQ ID NO: 500267 - protein, 11 aa, Homo sapiens
  CDR3 for alpha chain variable domain of TCR clone 250134 (TRAV35, TRAJ30)
CAPGGDYKIIF

SEQ ID NO: 500268 - protein, 14 aa, Homo sapiens
  CDR3 for beta chain variable domain of TCR clone 250134 (TRBV7-6, TRBJ2-1)
CASSLGGGADEQFF

SEQ ID NO: 500269 - protein, 14 aa, Homo sapiens
  CDR3 for alpha chain variable domain of TCR clone 250135 (TRAV25, TRAJ12)
CAGCDMDSSYKLIF

SEQ ID NO: 500270 - protein, 15 aa, Homo sapiens
  CDR3 for beta chain variable domain of TCR clone 250135 (TRBV12-4, TRBJ2-5)
CASTLNSGRGETQYF

SEQ ID NO: 500271 - protein, 17 aa, Homo sapiens
  CDR3 for alpha chain variable domain of TCR clone 250136 (TRAV3, TRAJ42)
CAVRDRDYGGSQGNLIF

SEQ ID NO: 500272 - protein, 17 aa, Homo sapiens
  CDR3 for beta chain variable domain of TCR clone 250136 (TRBV4-2, TRBJ1-1)
CASTQFGGGSGNTEAFF

SEQ ID NO: 500273 - protein, 19 aa, Homo sapiens
  CDR3 for alpha chain variable domain of TCR clone 250137 (TRAV38-1, TRAJ53)
CAFMKHGLESGGSKYTLTF

SEQ ID NO: 500274 - protein, 13 aa, Homo sapiens
  CDR3 for beta chain variable domain of TCR clone 250137 (TRBV19, TRBJ2-7)
CASSPRQSYEQYF

SEQ ID NO: 500275 - protein, 19 aa, Homo sapiens
  CDR3 for alpha chain variable domain of TCR clone 250138 (TRAV27, TRAJ53)
ASTSVQSRNNGGSNYKLTF

SEQ ID NO: 500276 - protein, 14 aa, Homo sapiens
  CDR3 for beta chain variable domain of TCR clone 250138 (TRBV11-1, TRBJ2-7)
CASTFAVPSYEQYF

SEQ ID NO: 500277 - protein, 15 aa, Homo sapiens
  CDR3 for alpha chain variable domain of TCR clone 250139 (TRAV20, TRAJ43)
CAVQAGKSSNNNMRF

SEQ ID NO: 500278 - protein, 13 aa, Homo sapiens
  CDR3 for beta chain variable domain of TCR clone 250139 (TRBV27, TRBJ1-1)
CASSLSIGAEAFF

SEQ ID NO: 500279 - protein, 14 aa, Homo sapiens
  CDR3 for alpha chain variable domain of TCR clone 250140 (TRAV8-3, TRAJ39)
CAVGANNVGNMLTL

SEQ ID NO: 500280 - protein, 12 aa, Homo sapiens
  CDR3 for beta chain variable domain of TCR clone 250140 (TRBV28, TRBJ1-3)
CASVSSGNTIYF

SEQ ID NO: 500281 - protein, 14 aa, Homo sapiens
  CDR3 for alpha chain variable domain of TCR clone 250141 (TRAV12-2, TRAJ13)
CAVKKTGGYQKVTF

SEQ ID NO: 500282 - protein, 17 aa, Homo sapiens
  CDR3 for beta chain variable domain of TCR clone 250141 (TRBV13, TRBJ2-3)
CASSLSRVVGGRNTQYF

SEQ ID NO: 500283 - protein, 18 aa, Homo sapiens
  CDR3 for alpha chain variable domain of TCR clone 250142 (TRAV21, TRAJ52)
CAVRPSPAGGTSYGNLTL

SEQ ID NO: 500284 - protein, 17 aa, Homo sapiens
  CDR3 for beta chain variable domain of TCR clone 250142 (TRBV13, TRBJ2-3)
CASSLSRVAGGRNTQYF

SEQ ID NO: 500285 - protein, 19 aa, Homo sapiens
  CDR3 for alpha chain variable domain of TCR clone 250143 (TRAV26-1, TRAJ52)
CIVRVANNAGGTSYGKMTF

SEQ ID NO: 500286 - protein, 14 aa, Homo sapiens
  CDR3 for beta chain variable domain of TCR clone 250143 (TRBV19, TRBJ1-2)
CASSIGAGSYGYTF

SEQ ID NO: 500287 - protein, 12 aa, Homo sapiens
  CDR3 for alpha chain variable domain of TCR clone 250144 (TRAV21, TRAJ33)
CAKMDSNYQLIW

SEQ ID NO: 500288 - protein, 15 aa, Homo sapiens
  CDR3 for beta chain variable domain of TCR clone 250144 (TRBV12-4, TRBJ2-5)
CASSPPTGLQETEYF

SEQ ID NO: 500289 - protein, 14 aa, Homo sapiens
  CDR3 for alpha chain variable domain of TCR clone 250145 (TRAV34, TRAJ56)
CGADMAGANSKLTF

SEQ ID NO: 500290 - protein, 18 aa, Homo sapiens
  CDR3 for beta chain variable domain of TCR clone 250145 (TRBV4-1, TRBJ1-5)
CASSQDPRGQGLNQPQHF

SEQ ID NO: 500291 - protein, 15 aa, Homo sapiens
  CDR3 for alpha chain variable domain of TCR clone 250146 (TRAV12-2, TRAJ20)
CAVKGGFGAGTTVTV

SEQ ID NO: 500292 - protein, 13 aa, Homo sapiens
  CDR3 for beta chain variable domain of TCR clone 250146 (TRBV20-1, TRBJ1-1)
CSAGTVGNTEAFF

SEQ ID NO: 500293 - protein, 15 aa, Homo sapiens
  CDR3 for alpha chain variable domain of TCR clone 250147 (TRAV3, TRAJ4)
CAVRDGTGGSNKLIF

SEQ ID NO: 500294 - protein, 13 aa, Homo sapiens
  CDR3 for beta chain variable domain of TCR clone 250147 (TRBV12-5, TRBJ1-2)
CASGVRTGNGYTF

SEQ ID NO: 500295 - protein, 15 aa, Homo sapiens
  CDR3 for alpha chain variable domain of TCR clone 250148 (TRAV3, TRAJ17)
CAARDTGAAGNKLTF

SEQ ID NO: 500296 - protein, 17 aa, Homo sapiens
  CDR3 for beta chain variable domain of TCR clone 250148 (TRBV28, TRBJ2-2)
CASSLATGMGDAGELFF

SEQ ID NO: 500297 - protein, 11 aa, Homo sapiens
  CDR3 for alpha chain variable domain of TCR clone 250149 (TRAV38-2/DV8, TRAJ29)
CAYRGNTPLVF

SEQ ID NO: 500298 - protein, 13 aa, Homo sapiens
  CDR3 for beta chain variable domain of TCR clone 250149 (TRBV7-7, TRBJ2-2)
CASSLTSAGELFF

SEQ ID NO: 500299 - protein, 12 aa, Homo sapiens
  CDR3 for alpha chain variable domain of TCR clone 250150 (TRAV1-1, TRAJ8)
CAGGTGFQQLVF

SEQ ID NO: 500300 - protein, 19 aa, Homo sapiens
  CDR3 for beta chain variable domain of TCR clone 250150 (TRBV19, TRBJ2-5)
CASSIGQVTDFFLGETQYF

SEQ ID NO: 500301 - protein, 16 aa, Homo sapiens
  CDR3 for alpha chain variable domain of TCR clone 250151 (TRAV30, TRAJ24)
CGTEIVDADSWGKFQF

SEQ ID NO: 500302 - protein, 11 aa, Homo sapiens
  CDR3 for beta chain variable domain of TCR clone 250151 (TRBV6-1, TRBJ2-1)
CASISSNEQFF

SEQ ID NO: 500303 - protein, 16 aa, Homo sapiens
  CDR3 for alpha chain variable domain of TCR clone 250152 (TRAV12-3, TRAJ50)
CAMRDPMKTSYDKVIF

SEQ ID NO: 500304 - protein, 13 aa, Homo sapiens
  CDR3 for beta chain variable domain of TCR clone 250152 (TRBV4-1, TRBJ2-3)
CARSLDFTDTQYF

SEQ ID NO: 500305 - protein, 10 aa, Homo sapiens
  CDR3 for alpha chain variable domain of TCR clone 250153 (TRAV21, TRAJ31)
CAVDNARLKF

SEQ ID NO: 500306 - protein, 12 aa, Homo sapiens
  CDR3 for beta chain variable domain of TCR clone 250153 (TRBV28, TRBJ2-3)
CASRLYRDTQYF

SEQ ID NO: 500307 - protein, 14 aa, Homo sapiens
  CDR3 for alpha chain variable domain of TCR clone 250154 (TRAV3, TRAJ8)
CAVSLNTGFQKLVF

SEQ ID NO: 500308 - protein, 13 aa, Homo sapiens
  CDR3 for beta chain variable domain of TCR clone 250154 (TRBV23-1, TRBJ1-4)
CASRGKFNEKLFF

SEQ ID NO: 500309 - protein, 14 aa, Homo sapiens
  CDR3 for alpha chain variable domain of TCR clone 250155 (TRAV8-4, TRAJ34)
CAVRDPCDTDKLIF

SEQ ID NO: 500310 - protein, 13 aa, Homo sapiens
  CDR3 for beta chain variable domain of TCR clone 250155 (TRBV7-9, TRBJ2-5)
CASLSPGQETQYF

SEQ ID NO: 500311 - protein, 13 aa, Homo sapiens
  CDR3 for alpha chain variable domain of TCR clone 250156 (TRAV17, TRAJ5)
CALRGTGRRALNF

SEQ ID NO: 500312 - protein, 11 aa, Homo sapiens
  CDR3 for beta chain variable domain of TCR clone 250156 (TRBV6-3, TRBJ2-3)
CATGQADTQYF

SEQ ID NO: 500313 - protein, 15 aa, Homo sapiens
  CDR3 for alpha chain variable domain of TCR clone 250157 (TRAV4, TRAJ10)
CLVGDEEGGGNKLTF

SEQ ID NO: 500314 - protein, 13 aa, Homo sapiens
  CDR3 for beta chain variable domain of TCR clone 250157 (TRBV7-2, TRBJ2-7)
CASSSPSGSEQYF

SEQ ID NO: 500315 - protein, 14 aa, Homo sapiens
  CDR3 for alpha chain variable domain of TCR clone 250158 (TRAV8-1, TRAJ5)
CAVRTDTGRRALTF

SEQ ID NO: 500316 - protein, 16 aa, Homo sapiens
  CDR3 for beta chain variable domain of TCR clone 250158 (TRBV7-2, TRBJ1-3)
CASSSGRVLSGNTMYF

SEQ ID NO: 500317 - protein, 14 aa, Homo sapiens
  CDR3 for alpha chain variable domain of TCR clone 250159 (TRAV3, TRAJ27)
CAVRDDTNAGKSTF

SEQ ID NO: 500318 - protein, 15 aa, Homo sapiens
  CDR3 for beta chain variable domain of TCR clone 250159 (TRBV10-2, TRBJ2-6)
CASSEQGTGANVLTF

SEQ ID NO: 500319 - protein, 14 aa, Homo sapiens
  CDR3 for alpha chain variable domain of TCR clone 250160 (TRAV17, TRAJ39)
CATDPVRAVNMLTF

SEQ ID NO: 500320 - protein, 15 aa, Homo sapiens
  CDR3 for beta chain variable domain of TCR clone 250160 (TRBV13, TRBJ1-5)
CASSFGQGGVQPQHF

SEQ ID NO: 500321 - protein, 15 aa, Homo sapiens
  CDR3 for alpha chain variable domain of TCR clone 250161 (TRAV26-1, TRAJ28)
CIVRVAGAGSYQLTF

SEQ ID NO: 500322 - protein, 12 aa, Homo sapiens
  CDR3 for beta chain variable domain of TCR clone 250161 (TRBV7-8, TRBJ2-7)
CASSLGDREQYF

SEQ ID NO: 500323 - protein, 14 aa, Homo sapiens
  CDR3 for alpha chain variable domain of TCR clone 250162 (TRAV30, TRAJ26)
CGTEIVSYGQNFVF

SEQ ID NO: 500324 - protein, 15 aa, Homo sapiens
  CDR3 for beta chain variable domain of TCR clone 250162 (TRBV5-7, TRBJ2-7)
CASSLGPGRGHEQYF

SEQ ID NO: 500325 - protein, 14 aa, Homo sapiens
  CDR3 for alpha chain variable domain of TCR clone 250163 (TRAV27, TRAJ49)
CAGRPEGTGNQFSF

SEQ ID NO: 500326 - protein, 14 aa, Homo sapiens
  CDR3 for beta chain variable domain of TCR clone 250163 (TRBV18, TRBJ2-5)
CASSPGVSQETQYF

SEQ ID NO: 500327 - protein, 16 aa, Homo sapiens
  CDR3 for alpha chain variable domain of TCR clone 250164 (TRAV21, TRAJ52)
CAVTNAGGTSYGKLTF

SEQ ID NO: 500328 - protein, 13 aa, Homo sapiens
  CDR3 for beta chain variable domain of TCR clone 250164 (TRBV20-1, TRBJ2-3)
CSARLAGTDTQYY

SEQ ID NO: 500329 - protein, 14 aa, Homo sapiens
  CDR3 for alpha chain variable domain of TCR clone 250165 (TRAV1-2, TRAJ16)
CAVNRFSDGQKLLF

SEQ ID NO: 500330 - protein, 16 aa, Homo sapiens
  CDR3 for beta chain variable domain of TCR clone 250165 (TRBV28, TRBJ1-6)
CASSLIPGQRNSPLHF

SEQ ID NO: 500331 - protein, 16 aa, Homo sapiens
  CDR3 for alpha chain variable domain of TCR clone 250166 (TRAV17, TRAJ36)
CATVSLNWGKQPLLWD

SEQ ID NO: 500332 - protein, 14 aa, Homo sapiens
  CDR3 for beta chain variable domain of TCR clone 250166 (TRBV4-2, TRBJ2-1)
CASGLDRAYNEQFF

SEQ ID NO: 500333 - protein, 17 aa, Homo sapiens
  CDR3 for alpha chain variable domain of TCR clone 250167 (TRAV3, TRAJ38)
CAVRDCLNAGNNRKLIW

SEQ ID NO: 500334 - protein, 14 aa, Homo sapiens
  CDR3 for beta chain variable domain of TCR clone 250167 (TRBV6-6, TRBJ1-5)
CASSTFDSNQPQHF

SEQ ID NO: 500335 - protein, 14 aa, Homo sapiens
  CDR3 for alpha chain variable domain of TCR clone 250168 (TRAV1-2, TRAJ16)
CAVNRFSDGQKLRF

SEQ ID NO: 500336 - protein, 14 aa, Homo sapiens
  CDR3 for beta chain variable domain of TCR clone 250168 (TRBV20-1, TRBJ1-1)
CSAQTRIGGTEAFF

SEQ ID NO: 500337 - protein, 13 aa, Homo sapiens
  CDR3 for alpha chain variable domain of TCR clone 250169 (TRAV27, TRAJ45)
CRSSGGGADGLTF

SEQ ID NO: 500338 - protein, 15 aa, Homo sapiens
  CDR3 for beta chain variable domain of TCR clone 250169 (TRBV6-1, TRBJ2-1)
CASSEAAYSYNEQFF

SEQ ID NO: 500339 - protein, 13 aa, Homo sapiens
  CDR3 for alpha chain variable domain of TCR clone 250170 (TRAV13-2, TRAJ53)
CAENMGSNNKLTF

SEQ ID NO: 500340 - protein, 13 aa, Homo sapiens
  CDR3 for beta chain variable domain of TCR clone 250170 (TRBV4-1, TRBJ2-2)
CASSQENTGELFF

SEQ ID NO: 500341 - protein, 15 aa, Homo sapiens
  CDR3 for alpha chain variable domain of TCR clone 250171 (TRAV3, TRAJ5)
CAVRDLDMGRRELTF

SEQ ID NO: 500342 - protein, 13 aa, Homo sapiens
  CDR3 for beta chain variable domain of TCR clone 250171 (TRBV12-4, TRBJ2-7)
CASSPTETYEQYF

SEQ ID NO: 500343 - protein, 15 aa, Homo sapiens
  CDR3 for alpha chain variable domain of TCR clone 250172 (TRAV8-2, TRAJ40)
CVVLGTTSGTYKYIF

SEQ ID NO: 500344 - protein, 16 aa, Homo sapiens
  CDR3 for beta chain variable domain of TCR clone 250172 (TRBV7-3, TRBJ2-1)
WASSLEGYRSYNEQFF

SEQ ID NO: 500345 - protein, 11 aa, Homo sapiens
  CDR3 for alpha chain variable domain of TCR clone 250173 (TRAV26-1, TRAJ40)
CIVSGTYKYIF

SEQ ID NO: 500346 - protein, 13 aa, Homo sapiens
  CDR3 for beta chain variable domain of TCR clone 250173 (TRBV7-9, TRBJ2-7)
CASSFAGAYEQYF

SEQ ID NO: 500347 - protein, 19 aa, Homo sapiens
  CDR3 for alpha chain variable domain of TCR clone 250174 (TRAV2, TRAJ20)
ILQVREAAAAVYRDCKLSF

SEQ ID NO: 500348 - protein, 13 aa, Homo sapiens
  CDR3 for beta chain variable domain of TCR clone 250174 (TRBV15, TRBJ1-6)
CATSGGLNSPLHF

SEQ ID NO: 500349 - protein, 13 aa, Homo sapiens
  CDR3 for alpha chain variable domain of TCR clone 250175 (TRAV3, TRAJ20)
CAVRPLNDYKLSF

SEQ ID NO: 500350 - protein, 12 aa, Homo sapiens
  CDR3 for beta chain variable domain of TCR clone 250175 (TRBV6-1, TRBJ2-1)
CATYGLKNEQFF

SEQ ID NO: 500351 - protein, 16 aa, Homo sapiens
  CDR3 for alpha chain variable domain of TCR clone 250176 (TRAV26-1, TRAJ58)
CIVRVLGETSGSRLTF

SEQ ID NO: 500352 - protein, 17 aa, Homo sapiens
  CDR3 for beta chain variable domain of TCR clone 250176 (TRBV7-9, TRBJ2-7)
CASSFDGSRGGAYEQYF

SEQ ID NO: 500353 - protein, 16 aa, Homo sapiens
  CDR3 for alpha chain variable domain of TCR clone 250177 (TRAV30, TRAJ24)
CGTEIVDADSWGKFQF

SEQ ID NO: 500354 - protein, 14 aa, Homo sapiens
  CDR3 for beta chain variable domain of TCR clone 250177 (TRBV25-1, TRBJ1-1)
CASTHLGGNTQAFF

SEQ ID NO: 500355 - protein, 14 aa, Homo sapiens
  CDR3 for alpha chain variable domain of TCR clone 250178 (TRAV1-2, TRAJ6)
CAVSLSGGSYIPTF

SEQ ID NO: 500356 - protein, 15 aa, Homo sapiens
  CDR3 for beta chain variable domain of TCR clone 250178 (TRBV20-1, TRBJ2-7)
CSARDRVSGMDEQYF

SEQ ID NO: 500357 - protein, 11 aa, Homo sapiens
  CDR3 for alpha chain variable domain of TCR clone 250179 (TRAV17, TRAJ31)
CATDRTARLMF

SEQ ID NO: 500358 - protein, 14 aa, Homo sapiens
  CDR3 for beta chain variable domain of TCR clone 250179 (TRBV4-1, TRBJ2-2)
CASSQAVSTGELFF

SEQ ID NO: 500359 - protein, 12 aa, Homo sapiens
  CDR3 for alpha chain variable domain of TCR clone 250180 (TRAV13-2, TRAJ23)
CAERHRGGKLIF

SEQ ID NO: 500360 - protein, 15 aa, Homo sapiens
  CDR3 for beta chain variable domain of TCR clone 250180 (TRBV7-9, TRBJ1-6)
CASSPPGRGNSPLHF

SEQ ID NO: 500361 - protein, 14 aa, Homo sapiens
  CDR3 for alpha chain variable domain of TCR clone 250181 (TRAV1-2, TRAJ8)
CAVREDTGFQRLVF

SEQ ID NO: 500362 - protein, 12 aa, Homo sapiens
  CDR3 for beta chain variable domain of TCR clone 250181 (TRBV29-1, TRBJ2-3)
CSVTGGADTQYF

SEQ ID NO: 500363 - protein, 15 aa, Homo sapiens
  CDR3 for alpha chain variable domain of TCR clone 250182 (TRAV3, TRAJ5)
CAVRDGKTGRRALTF

SEQ ID NO: 500364 - protein, 15 aa, Homo sapiens
  CDR3 for beta chain variable domain of TCR clone 250182 (TRBV7-8, TRBJ2-1)
CASSLADSVYNEQFF

SEQ ID NO: 500365 - protein, 14 aa, Homo sapiens
  CDR3 for alpha chain variable domain of TCR clone 250183 (TRAV17, TRAJ31)
CATVLRNNNDRLMF

SEQ ID NO: 500366 - protein, 14 aa, Homo sapiens
  CDR3 for beta chain variable domain of TCR clone 250183 (TRBV25-1, TRBJ1-1)
CASTHLGGNNEAFF

SEQ ID NO: 500367 - protein, 13 aa, Homo sapiens
  CDR3 for alpha chain variable domain of TCR clone 250184 (TRAV27, TRAJ6)
CAGGTRESYIPTF

SEQ ID NO: 500368 - protein, 15 aa, Homo sapiens
  CDR3 for beta chain variable domain of TCR clone 250184 (TRBV11-2, TRBJ1-3)
CASSLSPLVRDTIYF

SEQ ID NO: 500369 - protein, 12 aa, Homo sapiens
  CDR3 for alpha chain variable domain of TCR clone 250185 (TRAV13-1, TRAJ48)
CAANFGNEKLTF

SEQ ID NO: 500370 - protein, 10 aa, Homo sapiens
  CDR3 for beta chain variable domain of TCR clone 250185 (TRBV20-1, TRBJ1-5)
QCQGDQPQHF

SEQ ID NO: 500371 - protein, 18 aa, Homo sapiens
  CDR3 for alpha chain variable domain of TCR clone 250186 (TRAV13-1, TRAJ52)
CAASKRSAGGTSYGKLTF

SEQ ID NO: 500372 - protein, 16 aa, Homo sapiens
  CDR3 for beta chain variable domain of TCR clone 250186 (TRBV6-5, TRBJ2-1)
CASSETLAGHYNEQFF

SEQ ID NO: 500373 - protein, 11 aa, Homo sapiens
  CDR3 for alpha chain variable domain of TCR clone 250187 (TRAV3, TRAJ20)
CAVRPSGTTTS

SEQ ID NO: 500374 - protein, 15 aa, Homo sapiens
  CDR3 for beta chain variable domain of TCR clone 250187 (TRBV6-5, TRBJ2-1)
CASSYDAGAGNEQFF

SEQ ID NO: 500375 - protein, 12 aa, Homo sapiens
  CDR3 for alpha chain variable domain of TCR clone 250188 (TRAV12-3, TRAJ4)
CAMTAAGTRLAV

SEQ ID NO: 500376 - protein, 14 aa, Homo sapiens
  CDR3 for beta chain variable domain of TCR clone 250188 (TRBV10-3, TRBJ1-1)
CAISDTDRGVEAFF

SEQ ID NO: 500377 - protein, 11 aa, Homo sapiens
  CDR3 for alpha chain variable domain of TCR clone 250189 (TRAV1-1, TRAJ20)
CAVFNDYKLSF

SEQ ID NO: 500378 - protein, 16 aa, Homo sapiens
  CDR3 for beta chain variable domain of TCR clone 250189 (TRBV29-1, TRBJ2-2)
CSVEKTSEGNTGELFV

SEQ ID NO: 500379 - protein, 13 aa, Homo sapiens
  CDR3 for alpha chain variable domain of TCR clone 250190 (TRAV8-2, TRAJ43)
SVVSDQGDNDMRF

SEQ ID NO: 500380 - protein, 12 aa, Homo sapiens
  CDR3 for beta chain variable domain of TCR clone 250190 (TRBV7-8, TRBJ2-7)
CASSLGDREQYF

SEQ ID NO: 500381 - protein, 17 aa, Homo sapiens
  CDR3 for alpha chain variable domain of TCR clone 250191 (TRAV12-2, TRAJ52)
CAVNPYAGGTSYVKLTF

SEQ ID NO: 500382 - protein, 15 aa, Homo sapiens
  CDR3 for beta chain variable domain of TCR clone 250191 (TRBV10-2, TRBJ2-6)
CASSEQGTGANVLTF

SEQ ID NO: 500383 - protein, 12 aa, Homo sapiens
  CDR3 for alpha chain variable domain of TCR clone 250192 (TRAV3, TRAJ27)
CAGRDKAGKSTF

SEQ ID NO: 500384 - protein, 13 aa, Homo sapiens
  CDR3 for beta chain variable domain of TCR clone 250192 (TRBV6-5, TRBJ2-5)
CASSPQGGETQYF

SEQ ID NO: 500385 - protein, 12 aa, Homo sapiens
  CDR3 for alpha chain variable domain of TCR clone 250193 (TRAV27, TRAJ9)
CAGESGGFKTIF

SEQ ID NO: 500386 - protein, 16 aa, Homo sapiens
  CDR3 for beta chain variable domain of TCR clone 250193 (TRBV28, TRBJ2-7)
CASSPWVATGDLSQYF

SEQ ID NO: 500387 - protein, 14 aa, Homo sapiens
  CDR3 for alpha chain variable domain of TCR clone 250194 (TRAV1-2, TRAJ16)
CAVNRFSDGQKLLF

SEQ ID NO: 500388 - protein, 16 aa, Homo sapiens
  CDR3 for beta chain variable domain of TCR clone 250194 (TRBV19, TRBJ2-2)
CASSAAGTGGTGELFF

SEQ ID NO: 500389 - protein, 15 aa, Homo sapiens
  CDR3 for alpha chain variable domain of TCR clone 250195 (TRAV17, TRAJ45)
CATAYSGGGADGLTF

SEQ ID NO: 500390 - protein, 11 aa, Homo sapiens
  CDR3 for beta chain variable domain of TCR clone 250195 (TRBV7-8, TRBJ2-7)
CASSLSIEQYF

SEQ ID NO: 500391 - protein, 15 aa, Homo sapiens
  CDR3 for alpha chain variable domain of TCR clone 250196 (TRAV17, TRAJ37)
CATDGGSSNTGKLTF

SEQ ID NO: 500392 - protein, 15 aa, Homo sapiens
  CDR3 for beta chain variable domain of TCR clone 250196 (TRBV28, TRBJ2-5)
CASSSGRTIQETQYF

SEQ ID NO: 500393 - protein, 18 aa, Homo sapiens
  CDR3 for alpha chain variable domain of TCR clone 250197 (TRAV16, TRAJ26)
CAPEEPWSEFCLWSRNQI

SEQ ID NO: 500394 - protein, 15 aa, Homo sapiens
  CDR3 for beta chain variable domain of TCR clone 250197 (TRBV7-2, TRBJ2-3)
CASSLTGTSTDTQYF

SEQ ID NO: 500395 - protein, 13 aa, Homo sapiens
  CDR3 for alpha chain variable domain of TCR clone 250198 (TRAV12-3, TRAJ13)
CAMSSGGYQEVTF

SEQ ID NO: 500396 - protein, 20 aa, Homo sapiens
  CDR3 for beta chain variable domain of TCR clone 250198 (TRBV7-8, TRBJ2-2)
CASSHLFPGPTIHITGELFF

SEQ ID NO: 500397 - protein, 13 aa, Homo sapiens
  CDR3 for alpha chain variable domain of TCR clone 250199 (TRAV38-2/DV8, TRAJ34)
CAYRTWNTDKLIF

SEQ ID NO: 500398 - protein, 13 aa, Homo sapiens
  CDR3 for beta chain variable domain of TCR clone 250199 (TRBV12-4, TRBJ2-7)
CASSPTETYEQYF

SEQ ID NO: 500399 - protein, 16 aa, Homo sapiens
  CDR3 for alpha chain variable domain of TCR clone 250200 (TRAV26-2, TRAJ48)
CILRPPFNFGNEKLPF

SEQ ID NO: 500400 - protein, 15 aa, Homo sapiens
  CDR3 for beta chain variable domain of TCR clone 250200 (TRBV20-1, TRBJ2-3)
CSARVEGTYTDTQYF

SEQ ID NO: 500401 - protein, 13 aa, Homo sapiens
  CDR3 for alpha chain variable domain of TCR clone 250201 (TRAV12-3, TRAJ47)
CSMKKEYGNKLVF

SEQ ID NO: 500402 - protein, 17 aa, Homo sapiens
  CDR3 for beta chain variable domain of TCR clone 250201 (TRBV11-2, TRBJ2-1)
CASSLYPPGVEYNEQFF

SEQ ID NO: 500403 - protein, 13 aa, Homo sapiens
  CDR3 for alpha chain variable domain of TCR clone 250202 (TRAV24, TRAJ49)
CASPQNTGNQFYF

SEQ ID NO: 500404 - protein, 14 aa, Homo sapiens
  CDR3 for beta chain variable domain of TCR clone 250202 (TRBV6-1, TRBJ1-3)
CASVQGGGGNTIYF

SEQ ID NO: 500405 - protein, 13 aa, Homo sapiens
  CDR3 for alpha chain variable domain of TCR clone 250203 (TRAV27, TRAJ41)
CAGEANSGYALNF

SEQ ID NO: 500406 - protein, 14 aa, Homo sapiens
  CDR3 for beta chain variable domain of TCR clone 250203 (TRBV7-2, TRBJ1-1)
CASSFLTGTTEAFF

SEQ ID NO: 500407 - protein, 18 aa, Homo sapiens
  CDR3 for alpha chain variable domain of TCR clone 250204 (TRAV8-4, TRAJ52)
CAVTRANAGGTSYGTLTF

SEQ ID NO: 500408 - protein, 12 aa, Homo sapiens
  CDR3 for beta chain variable domain of TCR clone 250204 (TRBV7-9, TRBJ1-1)
CASSLVRGEAFF

SEQ ID NO: 500409 - protein, 12 aa, Homo sapiens
  CDR3 for alpha chain variable domain of TCR clone 250205 (TRAV27, TRAJ35)
CAGADFGNVLHC

SEQ ID NO: 500410 - protein, 16 aa, Homo sapiens
  CDR3 for beta chain variable domain of TCR clone 250205 (TRBV7-3, TRBJ2-2)
CASSLKRGTLSGELFF

SEQ ID NO: 500411 - protein, 12 aa, Homo sapiens
  CDR3 for alpha chain variable domain of TCR clone 250206 (TRAV13-2, TRAJ23)
CAERHRGGKLIF

SEQ ID NO: 500412 - protein, 16 aa, Homo sapiens
  CDR3 for beta chain variable domain of TCR clone 250206 (TRBV20-1, TRBJ1-4)
CSAPGQGLLTYEKLFF

SEQ ID NO: 500413 - protein, 16 aa, Homo sapiens
  CDR3 for alpha chain variable domain of TCR clone 250207 (TRAV23/DV6, TRAJ9)
CAASIVGNTGGFKTIF

SEQ ID NO: 500414 - protein, 12 aa, Homo sapiens
  CDR3 for beta chain variable domain of TCR clone 250207 (TRBV11-3, TRBJ2-1)
CASSVQREGQFF

SEQ ID NO: 500415 - protein, 14 aa, Homo sapiens
  CDR3 for alpha chain variable domain of TCR clone 250208 (TRAV12-3, TRAJ10)
SHLPLTGGGNKLTF

SEQ ID NO: 500416 - protein, 14 aa, Homo sapiens
  CDR3 for beta chain variable domain of TCR clone 250208 (TRBV6-1, TRBJ1-3)
CASVQEGGGNTIYF

SEQ ID NO: 500417 - protein, 15 aa, Homo sapiens
  CDR3 for alpha chain variable domain of TCR clone 250209 (TRAV13-1, TRAJ44)
CAASRNTGTASKLTF

SEQ ID NO: 500418 - protein, 13 aa, Homo sapiens
  CDR3 for beta chain variable domain of TCR clone 250209 (TRBV12-5, TRBJ2-3)
CASGDRQSDTQYF

SEQ ID NO: 500419 - protein, 16 aa, Homo sapiens
  CDR3 for alpha chain variable domain of TCR clone 250210 (TRAV3, TRAJ3)
CAVRDRAKSSASKIIF

SEQ ID NO: 500420 - protein, 13 aa, Homo sapiens
  CDR3 for beta chain variable domain of TCR clone 250210 (TRBV24-1, TRBJ2-2)
CATSDWSTGELFF

SEQ ID NO: 500421 - protein, 14 aa, Homo sapiens
  CDR3 for alpha chain variable domain of TCR clone 250211 (TRAV1-2, TRAJ16)
CAVNRFSDGQKLPF

SEQ ID NO: 500422 - protein, 14 aa, Homo sapiens
  CDR3 for beta chain variable domain of TCR clone 250211 (TRBV18, TRBJ2-5)
CASSPGVSQETQYF

SEQ ID NO: 500423 - protein, 10 aa, Homo sapiens
  CDR3 for alpha chain variable domain of TCR clone 250212 (TRAV4, TRAJ33)
TLDSNYQLIW

SEQ ID NO: 500424 - protein, 15 aa, Homo sapiens
  CDR3 for beta chain variable domain of TCR clone 250212 (TRBV5-1, TRBJ1-1)
CASSWTGRGNTEAFF

SEQ ID NO: 500425 - protein, 13 aa, Homo sapiens
  CDR3 for alpha chain variable domain of TCR clone 250213 (TRAV23/DV6, TRAJ27)
CAASNTNAGKSTF

SEQ ID NO: 500426 - protein, 14 aa, Homo sapiens
  CDR3 for beta chain variable domain of TCR clone 250213 (TRBV19, TRBJ2-1)
SASPTFVLSGEQFF

SEQ ID NO: 500427 - protein, 16 aa, Homo sapiens
  CDR3 for alpha chain variable domain of TCR clone 250214 (TRAV13-1, TRAJ18)
CAASRMRGSTLGRLYF

SEQ ID NO: 500428 - protein, 16 aa, Homo sapiens
  CDR3 for beta chain variable domain of TCR clone 250214 (TRBV11-3, TRBJ1-1)
CASSSRGRTGYTEAFF

SEQ ID NO: 500429 - protein, 21 aa, Homo sapiens
  CDR3 for alpha chain variable domain of TCR clone 250215 (TRAV29/DV5, TRAJ52)
CSVLLCSKREAGGTSYGKLTF

SEQ ID NO: 500430 - protein, 14 aa, Homo sapiens
  CDR3 for beta chain variable domain of TCR clone 250215 (TRBV7-2, TRBJ1-6)
CASSLQGANSPLHF

SEQ ID NO: 500431 - protein, 13 aa, Homo sapiens
  CDR3 for alpha chain variable domain of TCR clone 250216 (TRAV29/DV5, TRAJ31)
CAASRNNNARLMF

SEQ ID NO: 500432 - protein, 13 aa, Homo sapiens
  CDR3 for beta chain variable domain of TCR clone 250216 (TRBV11-2, TRBJ1-1)
CASSLGNGAEAFF

SEQ ID NO: 500433 - protein, 15 aa, Homo sapiens
  CDR3 for alpha chain variable domain of TCR clone 250217 (TRAV26-1, TRAJ22)
CIVRVSFWFCKATDL

SEQ ID NO: 500434 - protein, 16 aa, Homo sapiens
  CDR3 for beta chain variable domain of TCR clone 250217 (TRBV4-3, TRBJ2-2)
CASSHLQGSGTGELFF

SEQ ID NO: 500435 - protein, 13 aa, Homo sapiens
  CDR3 for alpha chain variable domain of TCR clone 250218 (TRAV8-3, TRAJ48)
CAVVPFGNEKLTF

SEQ ID NO: 500436 - protein, 20 aa, Homo sapiens
  CDR3 for beta chain variable domain of TCR clone 250218 (TRBV11-2, TRBJ2-2)
LRTRPCISVPAALEAGSCFF

SEQ ID NO: 500437 - protein, 14 aa, Homo sapiens
  CDR3 for alpha chain variable domain of TCR clone 250219 (TRAV12-3, TRAJ12)
CAMSEVDSSYKLIF

SEQ ID NO: 500438 - protein, 17 aa, Homo sapiens
  CDR3 for beta chain variable domain of TCR clone 250219 (TRBV20-1, TRBJ2-1)
CSASSSGLAGSYNEQFF

SEQ ID NO: 500439 - protein, 16 aa, Homo sapiens
  CDR3 for alpha chain variable domain of TCR clone 250220 (TRAV35, TRAJ28)
CAGQKYSGAGSHQLTF

SEQ ID NO: 500440 - protein, 13 aa, Homo sapiens
  CDR3 for beta chain variable domain of TCR clone 250220 (TRBV19, TRBJ1-2)
CASSQGQVYGYAF

SEQ ID NO: 500441 - protein, 18 aa, Homo sapiens
  CDR3 for alpha chain variable domain of TCR clone 250221 (TRAV26-2, TRAJ45)
CILSLWGYSGGGADGLTF

SEQ ID NO: 500442 - protein, 17 aa, Homo sapiens
  CDR3 for beta chain variable domain of TCR clone 250221 (TRBV28, TRBJ2-3)
CASSPTPAGGRVDTRYF

SEQ ID NO: 500443 - protein, 14 aa, Homo sapiens
  CDR3 for alpha chain variable domain of TCR clone 250222 (TRAV1-1, TRAJ23)
CAVKAYNQGGKLIF

SEQ ID NO: 500444 - protein, 15 aa, Homo sapiens
  CDR3 for beta chain variable domain of TCR clone 250222 (TRBV7-2, TRBJ2-3)
CASTPTSGETGTQYF

SEQ ID NO: 500445 - protein, 10 aa, Homo sapiens
  CDR3 for alpha chain variable domain of TCR clone 250223 (TRAV12-3, TRAJ49)
CAMNDDQFYF

SEQ ID NO: 500446 - protein, 15 aa, Homo sapiens
  CDR3 for beta chain variable domain of TCR clone 250223 (TRBV20-1, TRBJ2-1)
CSARGIGGTYNEQFF

SEQ ID NO: 500447 - protein, 13 aa, Homo sapiens
  CDR3 for alpha chain variable domain of TCR clone 250224 (TRAV20, TRAJ31)
CAVQAIGGARLMF

SEQ ID NO: 500448 - protein, 15 aa, Homo sapiens
  CDR3 for beta chain variable domain of TCR clone 250224 (TRBV7-8, TRBJ2-1)
CASSLADSLYNEQFF

SEQ ID NO: 500449 - protein, 14 aa, Homo sapiens
  CDR3 for alpha chain variable domain of TCR clone 250225 (TRAV1-2, TRAJ16)
CAVNRFSDGQKLLF

SEQ ID NO: 500450 - protein, 13 aa, Homo sapiens
  CDR3 for beta chain variable domain of TCR clone 250225 (TRBV19, TRBJ1-2)
CARSVPGQDGYTF

SEQ ID NO: 500451 - protein, 11 aa, Homo sapiens
  CDR3 for alpha chain variable domain of TCR clone 250226 (TRAV2, TRAJ13)
CASGGYQKVTF

SEQ ID NO: 500452 - protein, 14 aa, Homo sapiens
  CDR3 for beta chain variable domain of TCR clone 250226 (TRBV7-9, TRBJ2-7)
CASSLVAGPYEQYF

SEQ ID NO: 500453 - protein, 15 aa, Homo sapiens
  CDR3 for alpha chain variable domain of TCR clone 250227 (TRAV4, TRAJ39)
CLVGPNNSAGNMLTF

SEQ ID NO: 500454 - protein, 16 aa, Homo sapiens
  CDR3 for beta chain variable domain of TCR clone 250227 (TRBV13, TRBJ2-2)
CASSPRTGENTGELFF

SEQ ID NO: 500455 - protein, 17 aa, Homo sapiens
  CDR3 for alpha chain variable domain of TCR clone 250228 (TRAV38-2/DV8, TRAJ48)
CAYRSVFGGLGNEKLTF

SEQ ID NO: 500456 - protein, 12 aa, Homo sapiens
  CDR3 for beta chain variable domain of TCR clone 250228 (TRBV11-2, TRBJ2-1)
CASSPGNNEQFF

SEQ ID NO: 500457 - protein, 13 aa, Homo sapiens
  CDR3 for alpha chain variable domain of TCR clone 250229 (TRAV8-3, TRAJ28)
CAVGAVGSYQLTF

SEQ ID NO: 500458 - protein, 16 aa, Homo sapiens
  CDR3 for beta chain variable domain of TCR clone 250229 (TRBV18, TRBJ1-4)
CASSLQTVATNEKLFF

SEQ ID NO: 500459 - protein, 14 aa, Homo sapiens
  CDR3 for alpha chain variable domain of TCR clone 250230 (TRAV12-3, TRAJ9)
CAMSPNTGGFQTIF

SEQ ID NO: 500460 - protein, 17 aa, Homo sapiens
  CDR3 for beta chain variable domain of TCR clone 250230 (TRBV4-1, TRBJ1-4)
CASSQEGPRGVEEKLFF

SEQ ID NO: 500461 - protein, 14 aa, Homo sapiens
  CDR3 for alpha chain variable domain of TCR clone 250231 (TRAV12-1, TRAJ17)
CVANYKAAGNKLTF

SEQ ID NO: 500462 - protein, 18 aa, Homo sapiens
  CDR3 for beta chain variable domain of TCR clone 250231 (TRBV20-1, TRBJ2-6)
CSAEATPTHGSGANVLTF

SEQ ID NO: 500463 - protein, 14 aa, Homo sapiens
  CDR3 for alpha chain variable domain of TCR clone 250232 (TRAV12-2, TRAJ13)
CAVNPSGGYQKVTF

SEQ ID NO: 500464 - protein, 16 aa, Homo sapiens
  CDR3 for beta chain variable domain of TCR clone 250232 (TRBV7-3, TRBJ2-2)
CASSLKRGTLSGELFF

SEQ ID NO: 500465 - protein, 18 aa, Homo sapiens
  CDR3 for alpha chain variable domain of TCR clone 250233 (TRAV8-3, TRAJ21)
CAVGALPPPGGTNFTLDL

SEQ ID NO: 500466 - protein, 16 aa, Homo sapiens
  CDR3 for beta chain variable domain of TCR clone 250233 (TRBV7-7, TRBJ2-1)
CASSLASGTSYNEQFF

SEQ ID NO: 500467 - protein, 15 aa, Homo sapiens
  CDR3 for alpha chain variable domain of TCR clone 250234 (TRAV8-3, TRAJ34)
DAADYFCAIPGKLIF

SEQ ID NO: 500468 - protein, 15 aa, Homo sapiens
  CDR3 for beta chain variable domain of TCR clone 250234 (TRBV5-7, TRBJ2-1)
CASSRRLAGDNEQFF

SEQ ID NO: 500469 - protein, 13 aa, Homo sapiens
  CDR3 for alpha chain variable domain of TCR clone 250235 (TRAV3, TRAJ20)
CAVRSLNDYKLSF

SEQ ID NO: 500470 - protein, 13 aa, Homo sapiens
  CDR3 for beta chain variable domain of TCR clone 250235 (TRBV7-3, TRBJ1-1)
CACSQDWGAEAFF

SEQ ID NO: 500471 - protein, 10 aa, Homo sapiens
  CDR3 for alpha chain variable domain of TCR clone 250236 (TRAV6, TRAJ13)
CVRTGTKLQV

SEQ ID NO: 500472 - protein, 15 aa, Homo sapiens
  CDR3 for beta chain variable domain of TCR clone 250236 (TRBV9, TRBJ1-6)
CASSVVGTGDSPLHF

SEQ ID NO: 500473 - protein, 12 aa, Homo sapiens
  CDR3 for alpha chain variable domain of TCR clone 250237 (TRAV2, TRAJ36)
CAELTGANNLFS

SEQ ID NO: 500474 - protein, 18 aa, Homo sapiens
  CDR3 for beta chain variable domain of TCR clone 250237 (TRBV19, TRBJ1-1)
CASSIDGGDYTGNTEAFF

SEQ ID NO: 500475 - protein, 22 aa, Homo sapiens
  CDR3 for alpha chain variable domain of TCR clone 250238 (TRAV8-4, TRAJ9)
CAVTFNTGGFKNYLWSRKRLFV

SEQ ID NO: 500476 - protein, 15 aa, Homo sapiens
  CDR3 for beta chain variable domain of TCR clone 250238 (TRBV7-9, TRBJ2-2)
CASSPETGAGGELFF

SEQ ID NO: 500477 - protein, 11 aa, Homo sapiens
  CDR3 for alpha chain variable domain of TCR clone 250239 (TRAV17, TRAJ36)
CAPTGANNLFF

SEQ ID NO: 500478 - protein, 14 aa, Homo sapiens
  CDR3 for beta chain variable domain of TCR clone 250239 (TRBV20-1, TRBJ2-4)
CSARDRGQGGTQYF

SEQ ID NO: 500479 - protein, 15 aa, Homo sapiens
  CDR3 for alpha chain variable domain of TCR clone 250240 (TRAV21, TRAJ13)
CAVRPTSGGYQKVTF

SEQ ID NO: 500480 - protein, 18 aa, Homo sapiens
  CDR3 for beta chain variable domain of TCR clone 250240 (TRBV11-3, TRBJ2-1)
CASSSYPGGRDSYNEQSF

SEQ ID NO: 500481 - protein, 19 aa, Homo sapiens
  CDR3 for alpha chain variable domain of TCR clone 250241 (TRAV29/DV5, TRAJ49)
CSVLPCSKLTVDTGNQFYF

SEQ ID NO: 500482 - protein, 17 aa, Homo sapiens
  CDR3 for beta chain variable domain of TCR clone 250241 (TRBV13, TRBJ2-3)
CASSLSRVAGGRNTQYF

SEQ ID NO: 500483 - protein, 13 aa, Homo sapiens
  CDR3 for alpha chain variable domain of TCR clone 250242 (TRAV8-3, TRAJ28)
CAVGAVGSYQLTF

SEQ ID NO: 500484 - protein, 15 aa, Homo sapiens
  CDR3 for beta chain variable domain of TCR clone 250242 (TRBV7-9, TRBJ1-5)
RASSQDHQPNQPQHF

SEQ ID NO: 500485 - protein, 11 aa, Homo sapiens
  CDR3 for alpha chain variable domain of TCR clone 250243 (TRAV8-3, TRAJ15)
CAVGPGTALIF

SEQ ID NO: 500486 - protein, 11 aa, Homo sapiens
  CDR3 for beta chain variable domain of TCR clone 250243 (TRBV11-2, TRBJ2-2)
CASSLPGELFF

SEQ ID NO: 500487 - protein, 16 aa, Homo sapiens
  CDR3 for alpha chain variable domain of TCR clone 250244 (TRAV4, TRAJ9)
CLVGDPNRPGGFKTIF

SEQ ID NO: 500488 - protein, 16 aa, Homo sapiens
  CDR3 for beta chain variable domain of TCR clone 250244 (TRBV28, TRBJ1-4)
CAISPPYRGRSEKLFF

SEQ ID NO: 500489 - protein, 15 aa, Homo sapiens
  CDR3 for alpha chain variable domain of TCR clone 250245 (TRAV8-4, TRAJ3)
CAVTGESLVQQCFQA

SEQ ID NO: 500490 - protein, 16 aa, Homo sapiens
  CDR3 for beta chain variable domain of TCR clone 250245 (TRBV4-2, TRBJ1-1)
CASSQAGFGMNTEAFF

SEQ ID NO: 500491 - protein, 13 aa, Homo sapiens
  CDR3 for alpha chain variable domain of TCR clone 250246 (TRAV30, TRAJ49)
CGTEPNTGNQFYF

SEQ ID NO: 500492 - protein, 14 aa, Homo sapiens
  CDR3 for beta chain variable domain of TCR clone 250246 (TRBV29-1, TRBJ2-1)
CSVEFRGIPFEQFS

SEQ ID NO: 500493 - protein, 14 aa, Homo sapiens
  CDR3 for alpha chain variable domain of TCR clone 250247 (TRAV13-2, TRAJ29)
CAENIEPGNTPPVF

SEQ ID NO: 500494 - protein, 14 aa, Homo sapiens
  CDR3 for beta chain variable domain of TCR clone 250247 (TRBV19, TRBJ2-2)
CATTGHANTGELFF

SEQ ID NO: 500495 - protein, 12 aa, Homo sapiens
  CDR3 for alpha chain variable domain of TCR clone 250248 (TRAV25, TRAJ31)
CAGHLNNARLRF

SEQ ID NO: 500496 - protein, 15 aa, Homo sapiens
  CDR3 for beta chain variable domain of TCR clone 250248 (TRBV6-5, TRBJ2-1)
CASSYDAGAGNEQFF

SEQ ID NO: 500497 - protein, 20 aa, Homo sapiens
  CDR3 for alpha chain variable domain of TCR clone 250249 (TRAV12-1, TRAJ42)
SSVIQPPTSVKGGSQGNLIF

SEQ ID NO: 500498 - protein, 18 aa, Homo sapiens
  CDR3 for beta chain variable domain of TCR clone 250249 (TRBV11-2, TRBJ2-3)
CAGSLGGAPRGAPNTQYF

SEQ ID NO: 500499 - protein, 17 aa, Homo sapiens
  CDR3 for alpha chain variable domain of TCR clone 250250 (TRAV38-2/DV8, TRAJ23)
CALSRKLIFGQGTELSV

SEQ ID NO: 500500 - protein, 17 aa, Homo sapiens
  CDR3 for beta chain variable domain of TCR clone 250250 (TRBV5-4, TRBJ2-1)
CASSSAGGRGPCNGQFF

SEQ ID NO: 500501 - protein, 14 aa, Homo sapiens
  CDR3 for alpha chain variable domain of TCR clone 250251 (TRAV1-2, TRAJ16)
CAVNRFSDGQKLLF

SEQ ID NO: 500502 - protein, 16 aa, Homo sapiens
  CDR3 for beta chain variable domain of TCR clone 250251 (TRBV10-2, TRBJ1-1)
CASSEFGEGASTEAFF

SEQ ID NO: 500503 - protein, 14 aa, Homo sapiens
  CDR3 for alpha chain variable domain of TCR clone 250252 (TRAV12-1, TRAJ43)
CVVNGLSNNNDMRF

SEQ ID NO: 500504 - protein, 13 aa, Homo sapiens
  CDR3 for beta chain variable domain of TCR clone 250252 (TRBV2, TRBJ1-4)
CASSELGVEKLFF

SEQ ID NO: 500505 - protein, 14 aa, Homo sapiens
  CDR3 for alpha chain variable domain of TCR clone 250253 (TRAV2, TRAJ9)
CAVEDRGGGFETIF

SEQ ID NO: 500506 - protein, 19 aa, Homo sapiens
  CDR3 for beta chain variable domain of TCR clone 250253 (TRBV25-1, TRBJ2-2)
CAILVYRVDRGRKTGELFF

SEQ ID NO: 500507 - protein, 13 aa, Homo sapiens
  CDR3 for alpha chain variable domain of TCR clone 250254 (TRAV12-3, TRAJ34)
CALRGYNTDKLIF

SEQ ID NO: 500508 - protein, 13 aa, Homo sapiens
  CDR3 for beta chain variable domain of TCR clone 250254 (TRBV29-1, TRBJ2-1)
CSVEGGRVNEQFF

SEQ ID NO: 500509 - protein, 15 aa, Homo sapiens
  CDR3 for alpha chain variable domain of TCR clone 250255 (TRAV27, TRAJ38)
CAARRNAGNNRKLIV

SEQ ID NO: 500510 - protein, 21 aa, Homo sapiens
  CDR3 for beta chain variable domain of TCR clone 250255 (TRBV24-1, TRBJ2-5)
ESAIPNQTALYFCATRETQYF

SEQ ID NO: 500511 - protein, 14 aa, Homo sapiens
  CDR3 for alpha chain variable domain of TCR clone 250256 (TRAV1-2, TRAJ29)
CAVRELTSATPLVF

SEQ ID NO: 500512 - protein, 13 aa, Homo sapiens
  CDR3 for beta chain variable domain of TCR clone 250256 (TRBV2, TRBJ2-7)
CASSVGGSGEQYF

SEQ ID NO: 500513 - protein, 13 aa, Homo sapiens
  CDR3 for alpha chain variable domain of TCR clone 250257 (TRAV27, TRAJ6)
CAGGTRGTYIPKF

SEQ ID NO: 500514 - protein, 14 aa, Homo sapiens
  CDR3 for beta chain variable domain of TCR clone 250257 (TRBV6-3, TRBJ1-1)
CASSYQRRDTEAFF

SEQ ID NO: 500515 - protein, 15 aa, Homo sapiens
  CDR3 for alpha chain variable domain of TCR clone 250258 (TRAV2, TRAJ11)
CAVGGRNSGYSTLTF

SEQ ID NO: 500516 - protein, 15 aa, Homo sapiens
  CDR3 for beta chain variable domain of TCR clone 250258 (TRBV28, TRBJ2-3)
CASSPDRQGANTQYF

SEQ ID NO: 500517 - protein, 13 aa, Homo sapiens
  CDR3 for alpha chain variable domain of TCR clone 250259 (TRAV20, TRAJ15)
CATINQAGTALIF

SEQ ID NO: 500518 - protein, 13 aa, Homo sapiens
  CDR3 for beta chain variable domain of TCR clone 250259 (TRBV12-4, TRBJ2-1)
CASRKPSNNEQFF

SEQ ID NO: 500519 - protein, 11 aa, Homo sapiens
  CDR3 for alpha chain variable domain of TCR clone 250260 (TRAV1-2, TRAJ20)
CAVANDYKLSF

SEQ ID NO: 500520 - protein, 15 aa, Homo sapiens
  CDR3 for beta chain variable domain of TCR clone 250260 (TRBV27, TRBJ1-5)
SASTFNRGSNQPQHF

SEQ ID NO: 500521 - protein, 15 aa, Homo sapiens
  CDR3 for alpha chain variable domain of TCR clone 250261 (TRAV26-1, TRAJ22)
CIVRVSFWFCKATAL

SEQ ID NO: 500522 - protein, 14 aa, Homo sapiens
  CDR3 for beta chain variable domain of TCR clone 250261 (TRBV18, TRBJ2-7)
CASSPRGGAYEQYF

SEQ ID NO: 500523 - protein, 15 aa, Homo sapiens
  CDR3 for alpha chain variable domain of TCR clone 250262 (TRAV12-2, TRAJ37)
CAVNHGSSNTGNLIF

SEQ ID NO: 500524 - protein, 14 aa, Homo sapiens
  CDR3 for beta chain variable domain of TCR clone 250262 (TRBV2, TRBJ2-3)
CASSEGQNTDTQYF

SEQ ID NO: 500525 - protein, 13 aa, Homo sapiens
  CDR3 for alpha chain variable domain of TCR clone 250263 (TRAV20, TRAJ37)
CAGCSSSTGKLIF

SEQ ID NO: 500526 - protein, 11 aa, Homo sapiens
  CDR3 for beta chain variable domain of TCR clone 250263 (TRBV12-3, TRBJ2-3)
CASTATDTQYF

SEQ ID NO: 500527 - protein, 15 aa, Homo sapiens
  CDR3 for alpha chain variable domain of TCR clone 250264 (TRAV1-2, TRAJ12)
CADARWMDSSYKLIF

SEQ ID NO: 500528 - protein, 15 aa, Homo sapiens
  CDR3 for beta chain variable domain of TCR clone 250264 (TRBV9, TRBJ1-6)
CASSVAGTGDSTLHF

SEQ ID NO: 500529 - protein, 13 aa, Homo sapiens
  CDR3 for alpha chain variable domain of TCR clone 250265 (TRAV16, TRAJ10)
CALLTGGGNKLTF

SEQ ID NO: 500530 - protein, 12 aa, Homo sapiens
  CDR3 for beta chain variable domain of TCR clone 250265 (TRBV28, TRBJ2-7)
CASTSNHYEQYF

SEQ ID NO: 500531 - protein, 14 aa, Homo sapiens
  CDR3 for alpha chain variable domain of TCR clone 250266 (TRAV1-2, TRAJ16)
CAVNRFSDGQKLLF

SEQ ID NO: 500532 - protein, 16 aa, Homo sapiens
  CDR3 for beta chain variable domain of TCR clone 250266 (TRBV15, TRBJ1-2)
CAASRGPRTGGGGYTF

SEQ ID NO: 500533 - protein, 14 aa, Homo sapiens
  CDR3 for alpha chain variable domain of TCR clone 250267 (TRAV1-2, TRAJ8)
CAVREDTGFQKLVF

SEQ ID NO: 500534 - protein, 14 aa, Homo sapiens
  CDR3 for beta chain variable domain of TCR clone 250267 (TRBV12-4, TRBJ1-4)
CASRMTGRSEKLFF

SEQ ID NO: 500535 - protein, 19 aa, Homo sapiens
  CDR3 for alpha chain variable domain of TCR clone 250268 (TRAV1-2, TRAJ29)
CLLPLCCERILSGNTPLVF

SEQ ID NO: 500536 - protein, 14 aa, Homo sapiens
  CDR3 for beta chain variable domain of TCR clone 250268 (TRBV25-1, TRBJ1-1)
CASTHLGGNTEAFF

SEQ ID NO: 500537 - protein, 15 aa, Homo sapiens
  CDR3 for alpha chain variable domain of TCR clone 250269 (TRAV17, TRAJ57)
CATGPSQGGSEKLVF

SEQ ID NO: 500538 - protein, 16 aa, Homo sapiens
  CDR3 for beta chain variable domain of TCR clone 250269 (TRBV11-2, TRBJ2-1)
CASSLERDGVDNEQFF

SEQ ID NO: 500539 - protein, 14 aa, Homo sapiens
  CDR3 for alpha chain variable domain of TCR clone 250270 (TRAV12-3, TRAJ7)
CAISEIGGNNRLAF

SEQ ID NO: 500540 - protein, 13 aa, Homo sapiens
  CDR3 for beta chain variable domain of TCR clone 250270 (TRBV9, TRBJ1-1)
CASSVARNPEAFF

SEQ ID NO: 500541 - protein, 16 aa, Homo sapiens
  CDR3 for alpha chain variable domain of TCR clone 250271 (TRAV30, TRAJ24)
CGTEIVDADSWGKFQF

SEQ ID NO: 500542 - protein, 12 aa, Homo sapiens
  CDR3 for beta chain variable domain of TCR clone 250271 (TRBV5-1, TRBJ2-1)
CASIGGYNEQFF

SEQ ID NO: 500543 - protein, 10 aa, Homo sapiens
  CDR3 for alpha chain variable domain of TCR clone 250272 (TRAV16, TRAJ22)
SAMYLRQLTF

SEQ ID NO: 500544 - protein, 12 aa, Homo sapiens
  CDR3 for beta chain variable domain of TCR clone 250272 (TRBV7-6, TRBJ2-5)
CASSLSQETQYF

SEQ ID NO: 500545 - protein, 14 aa, Homo sapiens
  CDR3 for alpha chain variable domain of TCR clone 250273 (TRAV1-1, TRAJ27)
CAVIYNTNSGKSTF

SEQ ID NO: 500546 - protein, 13 aa, Homo sapiens
  CDR3 for beta chain variable domain of TCR clone 250273 (TRBV7-9, TRBJ1-2)
CASSLKQNYGYTF

SEQ ID NO: 500547 - protein, 12 aa, Homo sapiens
  CDR3 for alpha chain variable domain of TCR clone 250274 (TRAV12-2, TRAJ52)
IGGGTSYGKLTF

SEQ ID NO: 500548 - protein, 13 aa, Homo sapiens
  CDR3 for beta chain variable domain of TCR clone 250274 (TRBV12-4, TRBJ1-1)
CASSPGTGVEAFF

SEQ ID NO: 500549 - protein, 11 aa, Homo sapiens
  CDR3 for alpha chain variable domain of TCR clone 250275 (TRAV12-3, TRAJ43)
CAMSVSNDMRF

SEQ ID NO: 500550 - protein, 14 aa, Homo sapiens
  CDR3 for beta chain variable domain of TCR clone 250275 (TRBV9, TRBJ2-7)
CASSVGVGSYEQYF

SEQ ID NO: 500551 - protein, 12 aa, Homo sapiens
  CDR3 for alpha chain variable domain of TCR clone 250276 (TRAV1-1, TRAJ8)
CAGGTGFKKLVF

SEQ ID NO: 500552 - protein, 15 aa, Homo sapiens
  CDR3 for beta chain variable domain of TCR clone 250276 (TRBV7-9, TRBJ1-4)
CASSRTGGFNDKLFF

SEQ ID NO: 500553 - protein, 17 aa, Homo sapiens
  CDR3 for alpha chain variable domain of TCR clone 250277 (TRAV36/DV7, TRAJ52)
CAVAQRAGGTSYGKLTF

SEQ ID NO: 500554 - protein, 11 aa, Homo sapiens
  CDR3 for beta chain variable domain of TCR clone 250277 (TRBV29-1, TRBJ2-5)
CGEDRTGTQYF

SEQ ID NO: 500555 - protein, 15 aa, Homo sapiens
  CDR3 for alpha chain variable domain of TCR clone 250278 (TRAV25, TRAJ52)
CAGTSGGTSDGKLTF

SEQ ID NO: 500556 - protein, 16 aa, Homo sapiens
  CDR3 for beta chain variable domain of TCR clone 250278 (TRBV15, TRBJ1-2)
CATSRGPRTGGGGYTF

SEQ ID NO: 500557 - protein, 15 aa, Homo sapiens
  CDR3 for alpha chain variable domain of TCR clone 250279 (TRAV9-2, TRAJ39)
CALNDRNNAGNMLTF

SEQ ID NO: 500558 - protein, 15 aa, Homo sapiens
  CDR3 for beta chain variable domain of TCR clone 250279 (TRBV10-3, TRBJ2-2)
CAISPGRTNTGELFF

SEQ ID NO: 500559 - protein, 17 aa, Homo sapiens
  CDR3 for alpha chain variable domain of TCR clone 250280 (TRAV3, TRAJ6)
CAVRDGPRAGGSNIPTF

SEQ ID NO: 500560 - protein, 14 aa, Homo sapiens
  CDR3 for beta chain variable domain of TCR clone 250280 (TRBV7-2, TRBJ2-7)
CASSPKTSCYEQYF

SEQ ID NO: 500561 - protein, 12 aa, Homo sapiens
  CDR3 for alpha chain variable domain of TCR clone 250281 (TRAV12-1, TRAJ40)
FVVSGETYKYIF

SEQ ID NO: 500562 - protein, 14 aa, Homo sapiens
  CDR3 for beta chain variable domain of TCR clone 250281 (TRBV7-9, TRBJ1-1)
CASSSTKGNTEAFF

SEQ ID NO: 500563 - protein, 14 aa, Homo sapiens
  CDR3 for alpha chain variable domain of TCR clone 250282 (TRAV1-1, TRAJ35)
CAVRSIGFGNVLHC

SEQ ID NO: 500564 - protein, 14 aa, Homo sapiens
  CDR3 for beta chain variable domain of TCR clone 250282 (TRBV6-1, TRBJ1-3)
CASVQGGGGNTIYF

SEQ ID NO: 500565 - protein, 15 aa, Homo sapiens
  CDR3 for alpha chain variable domain of TCR clone 250283 (TRAV8-2, TRAJ40)
CVVLGTTSGTYKYIF

SEQ ID NO: 500566 - protein, 16 aa, Homo sapiens
  CDR3 for beta chain variable domain of TCR clone 250283 (TRBV7-3, TRBJ2-1)
CASSIEGYRSYNEQFF

SEQ ID NO: 500567 - protein, 15 aa, Homo sapiens
  CDR3 for alpha chain variable domain of TCR clone 250284 (TRAV13-2, TRAJ40)
FAENRSRQGTYKYIF

SEQ ID NO: 500568 - protein, 15 aa, Homo sapiens
  CDR3 for beta chain variable domain of TCR clone 250284 (TRBV19, TRBJ2-1)
CASSMGWNSNNEQFF

SEQ ID NO: 500569 - protein, 11 aa, Homo sapiens
  CDR3 for alpha chain variable domain of TCR clone 250285 (TRAV16, TRAJ33)
CALHSNYRLIR

SEQ ID NO: 500570 - protein, 15 aa, Homo sapiens
  CDR3 for beta chain variable domain of TCR clone 250285 (TRBV4-1, TRBJ2-7)
CASSQQGQGFDEQYF

SEQ ID NO: 500571 - protein, 14 aa, Homo sapiens
  CDR3 for alpha chain variable domain of TCR clone 250286 (TRAV13-2, TRAJ26)
CAENLGNYGQNFVF

SEQ ID NO: 500572 - protein, 14 aa, Homo sapiens
  CDR3 for beta chain variable domain of TCR clone 250286 (TRBV19, TRBJ1-3)
CASNRGNSGNTIYV

SEQ ID NO: 500573 - protein, 14 aa, Homo sapiens
  CDR3 for alpha chain variable domain of TCR clone 250287 (TRAV19, TRAJ15)
CALSEDQAGTALIF

SEQ ID NO: 500574 - protein, 11 aa, Homo sapiens
  CDR3 for beta chain variable domain of TCR clone 250287 (TRBV29-1, TRBJ2-5)
CSEDRTGTQYF

SEQ ID NO: 500575 - protein, 16 aa, Homo sapiens
  CDR3 for alpha chain variable domain of TCR clone 250288 (TRAV38-1, TRAJ32)
CAFMPFLGGATNKLIL

SEQ ID NO: 500576 - protein, 13 aa, Homo sapiens
  CDR3 for beta chain variable domain of TCR clone 250288 (TRBV7-9, TRBJ2-7)
CASSFAGAYEQYF

SEQ ID NO: 500577 - protein, 14 aa, Homo sapiens
  CDR3 for alpha chain variable domain of TCR clone 250289 (TRAV1-2, TRAJ16)
CTVNRFSDGQKLLF

SEQ ID NO: 500578 - protein, 15 aa, Homo sapiens
  CDR3 for beta chain variable domain of TCR clone 250289 (TRBV9, TRBJ1-6)
CASSVAGSGDSPLHF

SEQ ID NO: 500579 - protein, 12 aa, Homo sapiens
  CDR3 for alpha chain variable domain of TCR clone 250290 (TRAV12-3, TRAJ3)
CALYSSASKIIF

SEQ ID NO: 500580 - protein, 16 aa, Homo sapiens
  CDR3 for beta chain variable domain of TCR clone 250290 (TRBV11-3, TRBJ2-3)
CASSLGPALGTDTQYL

SEQ ID NO: 500581 - protein, 11 aa, Homo sapiens
  CDR3 for alpha chain variable domain of TCR clone 250291 (TRAV13-2, TRAJ45)
NSGGGADGLTF

SEQ ID NO: 500582 - protein, 13 aa, Homo sapiens
  CDR3 for beta chain variable domain of TCR clone 250291 (TRBV25-1, TRBJ2-6)
CASRGPGANVLTF

SEQ ID NO: 500583 - protein, 11 aa, Homo sapiens
  CDR3 for alpha chain variable domain of TCR clone 250292 (TRAV3, TRAJ21)
CAVGNLNKLYF

SEQ ID NO: 500584 - protein, 17 aa, Homo sapiens
  CDR3 for beta chain variable domain of TCR clone 250292 (TRBV24-1, TRBJ2-1)
CATSDVSTSGTYNEQFF

SEQ ID NO: 500585 - protein, 12 aa, Homo sapiens
  CDR3 for alpha chain variable domain of TCR clone 250293 (TRAV27, TRAJ42)
CAGGGSQGNRIF

SEQ ID NO: 500586 - protein, 13 aa, Homo sapiens
  CDR3 for beta chain variable domain of TCR clone 250293 (TRBV19, TRBJ2-7)
CASSIRSSYEQYF

SEQ ID NO: 500587 - protein, 14 aa, Homo sapiens
  CDR3 for alpha chain variable domain of TCR clone 250294 (TRAV21, TRAJ21)
CAVGVEDNFNKFYF

SEQ ID NO: 500588 - protein, 17 aa, Homo sapiens
  CDR3 for beta chain variable domain of TCR clone 250294 (TRBV20-1, TRBJ2-2)
CSASGSGQGGLTGELLF

SEQ ID NO: 500589 - protein, 14 aa, Homo sapiens
  CDR3 for alpha chain variable domain of TCR clone 250295 (TRAV16, TRAJ17)
CALSGRAAGNKLTF

SEQ ID NO: 500590 - protein, 15 aa, Homo sapiens
  CDR3 for beta chain variable domain of TCR clone 250295 (TRBV4-1, TRBJ1-2)
CASSQGQGAAYGYTF

SEQ ID NO: 500591 - protein, 16 aa, Homo sapiens
  CDR3 for alpha chain variable domain of TCR clone 250296 (TRAV3, TRAJ10)
CSVRDMRAGGGNKLTF

SEQ ID NO: 500592 - protein, 19 aa, Homo sapiens
  CDR3 for beta chain variable domain of TCR clone 250296 (TRBV6-3, TRBJ1-2)
CASSYSKGRTGPPNYGYTF

SEQ ID NO: 500593 - protein, 14 aa, Homo sapiens
  CDR3 for alpha chain variable domain of TCR clone 250297 (TRAV1-2, TRAJ16)
CAVNRFSGGQKLLF

SEQ ID NO: 500594 - protein, 12 aa, Homo sapiens
  CDR3 for beta chain variable domain of TCR clone 250297 (TRBV11-2, TRBJ2-2)
CASSLGGGELFF

SEQ ID NO: 500595 - protein, 14 aa, Homo sapiens
  CDR3 for alpha chain variable domain of TCR clone 250298 (TRAV2, TRAJ9)
CAVEDRSGGFKTIF

SEQ ID NO: 500596 - protein, 20 aa, Homo sapiens
  CDR3 for beta chain variable domain of TCR clone 250298 (TRBV4-2, TRBJ2-7)
CASSQASGGNLRAVLRAGHQ

SEQ ID NO: 500597 - protein, 18 aa, Homo sapiens
  CDR3 for alpha chain variable domain of TCR clone 250299 (TRAV3, TRAJ17)
CAVRARQGGRSCRQQANF

SEQ ID NO: 500598 - protein, 14 aa, Homo sapiens
  CDR3 for beta chain variable domain of TCR clone 250299 (TRBV4-1, TRBJ2-2)
CASSQAVNTGELFF

SEQ ID NO: 500599 - protein, 15 aa, Homo sapiens
  CDR3 for alpha chain variable domain of TCR clone 250300 (TRAV3, TRAJ5)
CAVRDLDAGRRALTF

SEQ ID NO: 500600 - protein, 13 aa, Homo sapiens
  CDR3 for beta chain variable domain of TCR clone 250300 (TRBV12-4, TRBJ2-7)
CASSPTESYEQYF

SEQ ID NO: 500601 - protein, 13 aa, Homo sapiens
  CDR3 for alpha chain variable domain of TCR clone 250301 (TRAV17, TRAJ22)
CAHHSGSARQLTF

SEQ ID NO: 500602 - protein, 14 aa, Homo sapiens
  CDR3 for beta chain variable domain of TCR clone 250301 (TRBV16, TRBJ1-1)
CASSQAGLNTEAFF

SEQ ID NO: 500603 - protein, 19 aa, Homo sapiens
  CDR3 for alpha chain variable domain of TCR clone 250302 (TRAV1-2, TRAJ26)
CLLPLCCERPDNYGQNFVF

SEQ ID NO: 500604 - protein, 16 aa, Homo sapiens
  CDR3 for beta chain variable domain of TCR clone 250302 (TRBV7-2, TRBJ1-4)
CASSLAPGRRDEKLFF

SEQ ID NO: 500605 - protein, 14 aa, Homo sapiens
  CDR3 for alpha chain variable domain of TCR clone 250303 (TRAV8-3, TRAJ4)
CAVGAAGGYDKLIF

SEQ ID NO: 500606 - protein, 12 aa, Homo sapiens
  CDR3 for beta chain variable domain of TCR clone 250303 (TRBV19, TRBJ1-1)
CASMNRYTEAFF

SEQ ID NO: 500607 - protein, 14 aa, Homo sapiens
  CDR3 for alpha chain variable domain of TCR clone 250304 (TRAV17, TRAJ39)
CATDPVRAGNMLTF

SEQ ID NO: 500608 - protein, 15 aa, Homo sapiens
  CDR3 for beta chain variable domain of TCR clone 250304 (TRBV13, TRBJ1-5)
CASSFGQGGVQPQHS

SEQ ID NO: 500609 - protein, 10 aa, Homo sapiens
  CDR3 for alpha chain variable domain of TCR clone 250305 (TRAV23/DV6, TRAJ57)
CAASSTLSQG

SEQ ID NO: 500610 - protein, 13 aa, Homo sapiens
  CDR3 for beta chain variable domain of TCR clone 250305 (TRBV7-6, TRBJ1-2)
CASSLVADYGYTF

SEQ ID NO: 500611 - protein, 15 aa, Homo sapiens
  CDR3 for alpha chain variable domain of TCR clone 250306 (TRAV13-1, TRAJ52)
SYYNAGGTSYGKLTF

SEQ ID NO: 500612 - protein, 14 aa, Homo sapiens
  CDR3 for beta chain variable domain of TCR clone 250306 (TRBV12-4, TRBJ1-1)
CASSFDRVNTEAFF

SEQ ID NO: 500613 - protein, 14 aa, Homo sapiens
  CDR3 for alpha chain variable domain of TCR clone 250307 (TRAV13-1, TRAJ4)
CAATLPSGYNKLIF

SEQ ID NO: 500614 - protein, 11 aa, Homo sapiens
  CDR3 for beta chain variable domain of TCR clone 250307 (TRBV6-3, TRBJ2-3)
CATGQADTQYF

SEQ ID NO: 500615 - protein, 15 aa, Homo sapiens
  CDR3 for alpha chain variable domain of TCR clone 250308 (TRAV23/DV6, TRAJ48)
CAASKTNFGNEKLTF

SEQ ID NO: 500616 - protein, 14 aa, Homo sapiens
  CDR3 for beta chain variable domain of TCR clone 250308 (TRBV5-4, TRBJ1-1)
CASSLDSRRDEAFF

SEQ ID NO: 500617 - protein, 10 aa, Homo sapiens
  CDR3 for alpha chain variable domain of TCR clone 250309 (TRAV26-1, TRAJ22)
RSGSARQLTF

SEQ ID NO: 500618 - protein, 15 aa, Homo sapiens
  CDR3 for beta chain variable domain of TCR clone 250309 (TRBV6-3, TRBJ2-7)
CASSSPGTVFYEQYF

SEQ ID NO: 500619 - protein, 18 aa, Homo sapiens
  CDR3 for alpha chain variable domain of TCR clone 250310 (TRAV26-1, TRAJ52)
CIVRVEGAGGTSYGKLTF

SEQ ID NO: 500620 - protein, 14 aa, Homo sapiens
  CDR3 for beta chain variable domain of TCR clone 250310 (TRBV19, TRBJ2-1)
CASPTFVLSGEQFF

SEQ ID NO: 500621 - protein, 13 aa, Homo sapiens
  CDR3 for alpha chain variable domain of TCR clone 250311 (TRAV12-1, TRAJ17)
CVVNKAAGNKLTF

SEQ ID NO: 500622 - protein, 14 aa, Homo sapiens
  CDR3 for beta chain variable domain of TCR clone 250311 (TRBV18, TRBJ1-5)
CASSPGNSNQPQHF

SEQ ID NO: 500623 - protein, 16 aa, Homo sapiens
  CDR3 for alpha chain variable domain of TCR clone 250312 (TRAV30, TRAJ24)
CGTEIVDADSWGKFQF

SEQ ID NO: 500624 - protein, 14 aa, Homo sapiens
  CDR3 for beta chain variable domain of TCR clone 250312 (TRBV7-2, TRBJ2-2)
CASSLGQNTGELFF

SEQ ID NO: 500625 - protein, 12 aa, Homo sapiens
  CDR3 for alpha chain variable domain of TCR clone 250313 (TRAV22, TRAJ22)
CAPGGSARQLTF

SEQ ID NO: 500626 - protein, 13 aa, Homo sapiens
  CDR3 for beta chain variable domain of TCR clone 250313 (TRBV15, TRBJ1-6)
CATSWGLNSPLHF

SEQ ID NO: 500627 - protein, 12 aa, Homo sapiens
  CDR3 for alpha chain variable domain of TCR clone 250314 (TRAV13-1, TRAJ9)
CASHTGGFKTIF

SEQ ID NO: 500628 - protein, 18 aa, Homo sapiens
  CDR3 for beta chain variable domain of TCR clone 250314 (TRBV11-2, TRBJ2-3)
CASRLGGASRGAPNTQYF

SEQ ID NO: 500629 - protein, 15 aa, Homo sapiens
  CDR3 for alpha chain variable domain of TCR clone 250315 (TRAV20, TRAJ50)
CAVRQMKTSYDKVIF

SEQ ID NO: 500630 - protein, 15 aa, Homo sapiens
  CDR3 for beta chain variable domain of TCR clone 250315 (TRBV28, TRBJ2-4)
CAAGSGTLLMGIQYF

SEQ ID NO: 500631 - protein, 14 aa, Homo sapiens
  CDR3 for alpha chain variable domain of TCR clone 250316 (TRAV38-1, TRAJ45)
GAYYSGGGADGLTS

SEQ ID NO: 500632 - protein, 20 aa, Homo sapiens
  CDR3 for beta chain variable domain of TCR clone 250316 (TRBV28, TRBJ2-1)
CASTPIGRSPGLAGGNEQFF

SEQ ID NO: 500633 - protein, 14 aa, Homo sapiens
  CDR3 for alpha chain variable domain of TCR clone 250317 (TRAV1-2, TRAJ16)
CAVNRFSDGQKLLF

SEQ ID NO: 500634 - protein, 12 aa, Homo sapiens
  CDR3 for beta chain variable domain of TCR clone 250317 (TRBV20-1, TRBJ1-5)
CSAAGWGQPQHF

SEQ ID NO: 500635 - protein, 12 aa, Homo sapiens
  CDR3 for alpha chain variable domain of TCR clone 250318 (TRAV3, TRAJ31)
CAVRDGNARIMV

SEQ ID NO: 500636 - protein, 18 aa, Homo sapiens
  CDR3 for beta chain variable domain of TCR clone 250318 (TRBV7-2, TRBJ2-3)
CASSLKREGSGITDTQYF

SEQ ID NO: 500637 - protein, 14 aa, Homo sapiens
  CDR3 for alpha chain variable domain of TCR clone 250319 (TRAV8-3, TRAJ36)
CAVGPITGAHNLFF

SEQ ID NO: 500638 - protein, 15 aa, Homo sapiens
  CDR3 for beta chain variable domain of TCR clone 250319 (TRBV4-1, TRBJ2-1)
CASSQDPGNYNEQFF

SEQ ID NO: 500639 - protein, 14 aa, Homo sapiens
  CDR3 for alpha chain variable domain of TCR clone 250320 (TRAV8-4, TRAJ15)
CALTIREAGTALIF

SEQ ID NO: 500640 - protein, 17 aa, Homo sapiens
  CDR3 for beta chain variable domain of TCR clone 250320 (TRBV5-1, TRBJ2-7)
CASSRPEGREASYEQHF

SEQ ID NO: 500641 - protein, 14 aa, Homo sapiens
  CDR3 for alpha chain variable domain of TCR clone 250321 (TRAV13-1, TRAJ35)
CAASKGGIGNALHC

SEQ ID NO: 500642 - protein, 13 aa, Homo sapiens
  CDR3 for beta chain variable domain of TCR clone 250321 (TRBV7-3, TRBJ1-1)
CASSQDWGAEAFF

SEQ ID NO: 500643 - protein, 14 aa, Homo sapiens
  CDR3 for alpha chain variable domain of TCR clone 250322 (TRAV17, TRAJ24)
CATLTTDSWGKFQF

SEQ ID NO: 500644 - protein, 13 aa, Homo sapiens
  CDR3 for beta chain variable domain of TCR clone 250322 (TRBV11-2, TRBJ2-5)
CVSSFSSQETQYF

SEQ ID NO: 500645 - protein, 14 aa, Homo sapiens
  CDR3 for alpha chain variable domain of TCR clone 250323 (TRAV12-2, TRAJ17)
CAVLFKAAGNKLTF

SEQ ID NO: 500646 - protein, 12 aa, Homo sapiens
  CDR3 for beta chain variable domain of TCR clone 250323 (TRBV29-1, TRBJ2-3)
CSVTGGADTQHF

SEQ ID NO: 500647 - protein, 16 aa, Homo sapiens
  CDR3 for alpha chain variable domain of TCR clone 250324 (TRAV30, TRAJ24)
CGTEIVDADSWGKFQF

SEQ ID NO: 500648 - protein, 17 aa, Homo sapiens
  CDR3 for beta chain variable domain of TCR clone 250324 (TRBV20-1, TRBJ2-3)
CSAVSRTSGVSTDTQYF

SEQ ID NO: 500649 - protein, 18 aa, Homo sapiens
  CDR3 for alpha chain variable domain of TCR clone 250325 (TRAV26-1, TRAJ52)
CIVRVEGAGGTSYGKLTF

SEQ ID NO: 500650 - protein, 12 aa, Homo sapiens
  CDR3 for beta chain variable domain of TCR clone 250325 (TRBV3-1, TRBJ2-1)
CASSQGSSGQFF

SEQ ID NO: 500651 - protein, 19 aa, Homo sapiens
  CDR3 for alpha chain variable domain of TCR clone 250326 (TRAV10, TRAJ45)
PTSVWCGGYSGGGADGITF

SEQ ID NO: 500652 - protein, 14 aa, Homo sapiens
  CDR3 for beta chain variable domain of TCR clone 250326 (TRBV7-8, TRBJ2-3)
CASSLEAGTDTQYF

SEQ ID NO: 500653 - protein, 14 aa, Homo sapiens
  CDR3 for alpha chain variable domain of TCR clone 250327 (TRAV23/DV6, TRAJ8)
CAASKATGFQKLVF

SEQ ID NO: 500654 - protein, 15 aa, Homo sapiens
  CDR3 for beta chain variable domain of TCR clone 250327 (TRBV28, TRBJ2-3)
CASSPDRQGANTQYC

SEQ ID NO: 500655 - protein, 14 aa, Homo sapiens
  CDR3 for alpha chain variable domain of TCR clone 250328 (TRAV12-2, TRAJ13)
CAEKKTGGYRKVTF

SEQ ID NO: 500656 - protein, 15 aa, Homo sapiens
  CDR3 for beta chain variable domain of TCR clone 250328 (TRBV27, TRBJ2-1)
CASSNGGGSSNEQFF

SEQ ID NO: 500657 - protein, 14 aa, Homo sapiens
  CDR3 for alpha chain variable domain of TCR clone 250329 (TRAV29/DV5, TRAJ36)
CAARRKTGENNLFF

SEQ ID NO: 500658 - protein, 15 aa, Homo sapiens
  CDR3 for beta chain variable domain of TCR clone 250329 (TRBV9, TRBJ1-6)
CASSVAGTGDSPLHF

SEQ ID NO: 500659 - protein, 18 aa, Homo sapiens
  CDR3 for alpha chain variable domain of TCR clone 250330 (TRAV27, TRAJ21)
CAGVRQLQQILLCILYQT

SEQ ID NO: 500660 - protein, 14 aa, Homo sapiens
  CDR3 for beta chain variable domain of TCR clone 250330 (TRBV7-9, TRBJ1-4)
CASSLEGQSEKLFF

SEQ ID NO: 500661 - protein, 13 aa, Homo sapiens
  CDR3 for alpha chain variable domain of TCR clone 250331 (TRAV8-4, TRAJ10)
CAAFTGGGNNLTF

SEQ ID NO: 500662 - protein, 15 aa, Homo sapiens
  CDR3 for beta chain variable domain of TCR clone 250331 (TRBV2, TRBJ2-3)
CASSDFEKATDTQYF

SEQ ID NO: 500663 - protein, 11 aa, Homo sapiens
  CDR3 for alpha chain variable domain of TCR clone 250332 (TRAV21, TRAJ41)
YAVRSGYALNF

SEQ ID NO: 500664 - protein, 13 aa, Homo sapiens
  CDR3 for beta chain variable domain of TCR clone 250332 (TRBV7-9, TRBJ1-2)
CASSLKQNYGYTF

SEQ ID NO: 500665 - protein, 11 aa, Homo sapiens
  CDR3 for alpha chain variable domain of TCR clone 250333 (TRAV1-1, TRAJ30)
CAVSRADKIIF

SEQ ID NO: 500666 - protein, 16 aa, Homo sapiens
  CDR3 for beta chain variable domain of TCR clone 250333 (TRBV6-3, TRBJ2-3)
CASSQHSSGVSDTQYF

SEQ ID NO: 500667 - protein, 13 aa, Homo sapiens
  CDR3 for alpha chain variable domain of TCR clone 250334 (TRAV27, TRAJ49)
CAPRPYTGNQFYF

SEQ ID NO: 500668 - protein, 16 aa, Homo sapiens
  CDR3 for beta chain variable domain of TCR clone 250334 (TRBV4-1, TRBJ1-2)
CASCKDAGQVLYGYTF

SEQ ID NO: 500669 - protein, 12 aa, Homo sapiens
  CDR3 for alpha chain variable domain of TCR clone 250335 (TRAV13-1, TRAJ9)
CASHTGGFKTIF

SEQ ID NO: 500670 - protein, 13 aa, Homo sapiens
  CDR3 for beta chain variable domain of TCR clone 250335 (TRBV12-4, TRBJ1-2)
CASSSGSKGGYSF

SEQ ID NO: 500671 - protein, 12 aa, Homo sapiens
  CDR3 for alpha chain variable domain of TCR clone 250336 (TRAV27, TRAJ35)
CAGADFGNVLHC

SEQ ID NO: 500672 - protein, 14 aa, Homo sapiens
  CDR3 for beta chain variable domain of TCR clone 250336 (TRBV4-1, TRBJ2-5)
CASSRSGSGETQYF

SEQ ID NO: 500673 - protein, 22 aa, Homo sapiens
  CDR3 for alpha chain variable domain of TCR clone 250337 (TRAV12-2, TRAJ53)
SPVIQPPTSMPPILSSNYKLTF

SEQ ID NO: 500674 - protein, 13 aa, Homo sapiens
  CDR3 for beta chain variable domain of TCR clone 250337 (TRBV7-7, TRBJ2-3)
CASSLSRADTQYF

SEQ ID NO: 500675 - protein, 15 aa, Homo sapiens
  CDR3 for alpha chain variable domain of TCR clone 250338 (TRAV27, TRAJ33)
CAGADIMDSNYQLFW

SEQ ID NO: 500676 - protein, 13 aa, Homo sapiens
  CDR3 for beta chain variable domain of TCR clone 250338 (TRBV28, TRBJ1-2)
CASSLQGRGGYTF

SEQ ID NO: 500677 - protein, 13 aa, Homo sapiens
  CDR3 for alpha chain variable domain of TCR clone 250339 (TRAV20, TRAJ31)
CAVQAIGGARLMF

SEQ ID NO: 500678 - protein, 12 aa, Homo sapiens
  CDR3 for beta chain variable domain of TCR clone 250339 (TRBV28, TRBJ2-6)
CVIQAGANVLTF

SEQ ID NO: 500679 - protein, 14 aa, Homo sapiens
  CDR3 for alpha chain variable domain of TCR clone 250340 (TRAV1-2, TRAJ29)
CAVRELTSATPLVF

SEQ ID NO: 500680 - protein, 15 aa, Homo sapiens
  CDR3 for beta chain variable domain of TCR clone 250340 (TRBV6-6, TRBJ2-1)
CASSYLSGPRNEQFF

SEQ ID NO: 500681 - protein, 14 aa, Homo sapiens
  CDR3 for alpha chain variable domain of TCR clone 250341 (TRAV2, TRAJ10)
CLLLVTGGGNKLTF

SEQ ID NO: 500682 - protein, 14 aa, Homo sapiens
  CDR3 for beta chain variable domain of TCR clone 250341 (TRBV7-2, TRBJ2-7)
CASRSQGVAYEQYF

SEQ ID NO: 500683 - protein, 14 aa, Homo sapiens
  CDR3 for alpha chain variable domain of TCR clone 250342 (TRAV8-4, TRAJ9)
CAVRINTGGFKTIF

SEQ ID NO: 500684 - protein, 15 aa, Homo sapiens
  CDR3 for beta chain variable domain of TCR clone 250342 (TRBV10-2, TRBJ2-6)
CASSEQGTGANVMTF

SEQ ID NO: 500685 - protein, 16 aa, Homo sapiens
  CDR3 for alpha chain variable domain of TCR clone 250343 (TRAV21, TRAJ37)
CAVRTAGSSNTGKLIF

SEQ ID NO: 500686 - protein, 13 aa, Homo sapiens
  CDR3 for beta chain variable domain of TCR clone 250343 (TRBV7-9, TRBJ2-5)
CASLPSGRETQNF

SEQ ID NO: 500687 - protein, 16 aa, Homo sapiens
  CDR3 for alpha chain variable domain of TCR clone 250344 (TRAV3, TRAJ27)
CAVRDPQGTNAGKSTF

SEQ ID NO: 500688 - protein, 17 aa, Homo sapiens
  CDR3 for beta chain variable domain of TCR clone 250344 (TRBV4-1, TRBJ2-7)
CASSRGRGLQTSYEQYF

SEQ ID NO: 500689 - protein, 17 aa, Homo sapiens
  CDR3 for alpha chain variable domain of TCR clone 250345 (TRAV38-2/DV8, TRAJ38)
CAYRSARGAGNNRKLIC

SEQ ID NO: 500690 - protein, 14 aa, Homo sapiens
  CDR3 for beta chain variable domain of TCR clone 250345 (TRBV4-3, TRBJ1-1)
CASSQGWTPARAFF

SEQ ID NO: 500691 - protein, 13 aa, Homo sapiens
  CDR3 for alpha chain variable domain of TCR clone 250346 (TRAV12-2, TRAJ42)
CAVKRGSQGNLIF

SEQ ID NO: 500692 - protein, 12 aa, Homo sapiens
  CDR3 for beta chain variable domain of TCR clone 250346 (TRBV20-1, TRBJ1-1)
CSARHSGTEAFF

SEQ ID NO: 500693 - protein, 15 aa, Homo sapiens
  CDR3 for alpha chain variable domain of TCR clone 250347 (TRAV26-2, TRAJ13)
CILRDLSGGYQKVTF

SEQ ID NO: 500694 - protein, 14 aa, Homo sapiens
  CDR3 for beta chain variable domain of TCR clone 250347 (TRBV7-8, TRBJ2-3)
CASSLEAGTDTQYF

SEQ ID NO: 500695 - protein, 14 aa, Homo sapiens
  CDR3 for alpha chain variable domain of TCR clone 250348 (TRAV23/DV6, TRAJ4)
CAAPSSGGYNKLIF

SEQ ID NO: 500696 - protein, 17 aa, Homo sapiens
  CDR3 for beta chain variable domain of TCR clone 250348 (TRBV7-8, TRBJ2-6)
CASSAGTGGAGANVLTF

SEQ ID NO: 500697 - protein, 16 aa, Homo sapiens
  CDR3 for alpha chain variable domain of TCR clone 250349 (TRAV21, TRAJ45)
CAVSWGSGGGADGLTF

SEQ ID NO: 500698 - protein, 15 aa, Homo sapiens
  CDR3 for beta chain variable domain of TCR clone 250349 (TRBV7-2, TRBJ2-7)
CASSLSGALTYEQYF

SEQ ID NO: 500699 - protein, 17 aa, Homo sapiens
  CDR3 for alpha chain variable domain of TCR clone 250350 (TRAV3, TRAJ12)
CAVRDGGRMDSSYKLIF

SEQ ID NO: 500700 - protein, 14 aa, Homo sapiens
  CDR3 for beta chain variable domain of TCR clone 250350 (TRBV7-2, TRBJ1-1)
CASSFLTGTTEAFF

SEQ ID NO: 500701 - protein, 14 aa, Homo sapiens
  CDR3 for alpha chain variable domain of TCR clone 250351 (TRAV13-1, TRAJ9)
CAASALTGGFKTIF

SEQ ID NO: 500702 - protein, 14 aa, Homo sapiens
  CDR3 for beta chain variable domain of TCR clone 250351 (TRBV7-3, TRBJ2-1)
CASSLAGGTNEQFF

SEQ ID NO: 500703 - protein, 14 aa, Homo sapiens
  CDR3 for alpha chain variable domain of TCR clone 250352 (TRAV29/DV5, TRAJ45)
CAASFRGGADGLTF

SEQ ID NO: 500704 - protein, 13 aa, Homo sapiens
  CDR3 for beta chain variable domain of TCR clone 250352 (TRBV12-4, TRBJ2-2)
CASSITGSGELFF

SEQ ID NO: 500705 - protein, 13 aa, Homo sapiens
  CDR3 for alpha chain variable domain of TCR clone 250353 (TRAV12-2, TRAJ20)
CAVYPSNDYKLSF

SEQ ID NO: 500706 - protein, 13 aa, Homo sapiens
  CDR3 for beta chain variable domain of TCR clone 250353 (TRBV6-3, TRBJ2-7)
CASSFSGGYEQYF

SEQ ID NO: 500707 - protein, 11 aa, Homo sapiens
  CDR3 for alpha chain variable domain of TCR clone 250354 (TRAV2, TRAJ13)
CASGGYQKVTF

SEQ ID NO: 500708 - protein, 13 aa, Homo sapiens
  CDR3 for beta chain variable domain of TCR clone 250354 (TRBV7-2, TRBJ2-2)
CASSAVRAGELFF

SEQ ID NO: 500709 - protein, 14 aa, Homo sapiens
  CDR3 for alpha chain variable domain of TCR clone 250355 (TRAV1-2, TRAJ16)
CAVNRFSDGKKLLF

SEQ ID NO: 500710 - protein, 14 aa, Homo sapiens
  CDR3 for beta chain variable domain of TCR clone 250355 (TRBV7-2, TRBJ2-5)
CASSPLGQSETQYF

SEQ ID NO: 500711 - protein, 14 aa, Homo sapiens
  CDR3 for alpha chain variable domain of TCR clone 250356 (TRAV1-2, TRAJ16)
CAVNRFSEGQKLLF

SEQ ID NO: 500712 - protein, 13 aa, Homo sapiens
  CDR3 for beta chain variable domain of TCR clone 250356 (TRBV20-1, TRBJ2-2)
CSALSGGAGELFF

SEQ ID NO: 500713 - protein, 11 aa, Homo sapiens
  CDR3 for alpha chain variable domain of TCR clone 250357 (TRAV12-2, TRAJ31)
CAVTRWARLMF

SEQ ID NO: 500714 - protein, 13 aa, Homo sapiens
  CDR3 for beta chain variable domain of TCR clone 250357 (TRBV10-3, TRBJ2-7)
CASKLAVNYEQYF

SEQ ID NO: 500715 - protein, 12 aa, Homo sapiens
  CDR3 for alpha chain variable domain of TCR clone 250358 (TRAV27, TRAJ9)
CAGEPGGFKTIF

SEQ ID NO: 500716 - protein, 18 aa, Homo sapiens
  CDR3 for beta chain variable domain of TCR clone 250358 (TRBV10-2, TRBJ2-2)
CVSAPAVHRQADAGELFF

SEQ ID NO: 500717 - protein, 14 aa, Homo sapiens
  CDR3 for alpha chain variable domain of TCR clone 250359 (TRAV12-2, TRAJ17)
CAVLFKAAGNKLTF

SEQ ID NO: 500718 - protein, 13 aa, Homo sapiens
  CDR3 for beta chain variable domain of TCR clone 250359 (TRBV11-3, TRBJ2-3)
CASSHDTKDTQYF

SEQ ID NO: 500719 - protein, 12 aa, Homo sapiens
  CDR3 for alpha chain variable domain of TCR clone 250360 (TRAV29/DV5, TRAJ49)
CAATDTGNQSYF

SEQ ID NO: 500720 - protein, 19 aa, Homo sapiens
  CDR3 for beta chain variable domain of TCR clone 250360 (TRBV25-1, TRBJ2-2)
CAILVYRVDRGRKTGELFF

SEQ ID NO: 500721 - protein, 11 aa, Homo sapiens
  CDR3 for alpha chain variable domain of TCR clone 250361 (TRAV13-1, TRAJ40)
CSVSGTYKYIF

SEQ ID NO: 500722 - protein, 16 aa, Homo sapiens
  CDR3 for beta chain variable domain of TCR clone 250361 (TRBV10-3, TRBJ2-3)
CAISVSRLALTDTQYF

SEQ ID NO: 500723 - protein, 16 aa, Homo sapiens
  CDR3 for alpha chain variable domain of TCR clone 250362 (TRAV8-3, TRAJ42)
CAVGEGNGGSQGNLIF

SEQ ID NO: 500724 - protein, 14 aa, Homo sapiens
  CDR3 for beta chain variable domain of TCR clone 250362 (TRBV19, TRBJ2-1)
CASTTFVLSGEQFF

SEQ ID NO: 500725 - protein, 11 aa, Homo sapiens
  CDR3 for alpha chain variable domain of TCR clone 250363 (TRAV3, TRAJ21)
CAVGYFNKFYF

SEQ ID NO: 500726 - protein, 15 aa, Homo sapiens
  CDR3 for beta chain variable domain of TCR clone 250363 (TRBV19, TRBJ1-2)
CASSVGQVLNYGYTF

SEQ ID NO: 500727 - protein, 13 aa, Homo sapiens
  CDR3 for alpha chain variable domain of TCR clone 250364 (TRAV8-3, TRAJ40)
CAVDPSGTYKYIF

SEQ ID NO: 500728 - protein, 19 aa, Homo sapiens
  CDR3 for beta chain variable domain of TCR clone 250364 (TRBV11-2, TRBJ2-3)
CASSLTSGTRFRVTDTQYF

SEQ ID NO: 500729 - protein, 16 aa, Homo sapiens
  CDR3 for alpha chain variable domain of TCR clone 250365 (TRAV4, TRAJ22)
CLVGDLYSGSARQLTS

SEQ ID NO: 500730 - protein, 14 aa, Homo sapiens
  CDR3 for beta chain variable domain of TCR clone 250365 (TRBV28, TRBJ2-3)
RASSWRGRADTQYF

SEQ ID NO: 500731 - protein, 12 aa, Homo sapiens
  CDR3 for alpha chain variable domain of TCR clone 250366 (TRAV2, TRAJ33)
CAFMDSNYQLIW

SEQ ID NO: 500732 - protein, 12 aa, Homo sapiens
  CDR3 for beta chain variable domain of TCR clone 250366 (TRBV6-1, TRBJ2-7)
CASSEPLYEQYF

SEQ ID NO: 500733 - protein, 11 aa, Homo sapiens
  CDR3 for alpha chain variable domain of TCR clone 250367 (TRAV1-2, TRAJ20)
CAVANDYKPSF

SEQ ID NO: 500734 - protein, 16 aa, Homo sapiens
  CDR3 for beta chain variable domain of TCR clone 250367 (TRBV4-3, TRBJ1-6)
CASSQDPGVYNSTLHF

SEQ ID NO: 500735 - protein, 16 aa, Homo sapiens
  CDR3 for alpha chain variable domain of TCR clone 250368 (TRAV12-3, TRAJ52)
CAMGVLVVLAMESLNL

SEQ ID NO: 500736 - protein, 13 aa, Homo sapiens
  CDR3 for beta chain variable domain of TCR clone 250368 (TRBV20-1, TRBJ2-5)
CSARGDYQETQYF

SEQ ID NO: 500737 - protein, 12 aa, Homo sapiens
  CDR3 for alpha chain variable domain of TCR clone 250369 (TRAV8-1, TRAJ40)
CAVFSGTYKYIF

SEQ ID NO: 500738 - protein, 12 aa, Homo sapiens
  CDR3 for beta chain variable domain of TCR clone 250369 (TRBV7-9, TRBJ2-7)
CASSLEGYEQYF

SEQ ID NO: 500739 - protein, 13 aa, Homo sapiens
  CDR3 for alpha chain variable domain of TCR clone 250370 (TRAV17, TRAJ9)
CATDYTGVFKTIF

SEQ ID NO: 500740 - protein, 15 aa, Homo sapiens
  CDR3 for beta chain variable domain of TCR clone 250370 (TRBV6-3, TRBJ2-7)
CASSSPGTVFYEQYF

SEQ ID NO: 500741 - protein, 14 aa, Homo sapiens
  CDR3 for alpha chain variable domain of TCR clone 250371 (TRAV12-2, TRAJ40)
CAVKIPSGTYKYIF

SEQ ID NO: 500742 - protein, 12 aa, Homo sapiens
  CDR3 for beta chain variable domain of TCR clone 250371 (TRBV5-1, TRBJ2-7)
CASSLDSYEQYF

SEQ ID NO: 500743 - protein, 13 aa, Homo sapiens
  CDR3 for alpha chain variable domain of TCR clone 250372 (TRAV12-1, TRAJ21)
CVVTLYNFNKFYF

SEQ ID NO: 500744 - protein, 13 aa, Homo sapiens
  CDR3 for beta chain variable domain of TCR clone 250372 (TRBV10-3, TRBJ2-7)
CASKLAVNYEQYF

SEQ ID NO: 500745 - protein, 14 aa, Homo sapiens
  CDR3 for alpha chain variable domain of TCR clone 250373 (TRAV12-2, TRAJ13)
CAVKKTGGYQKVTF

SEQ ID NO: 500746 - protein, 13 aa, Homo sapiens
  CDR3 for beta chain variable domain of TCR clone 250373 (TRBV20-1, TRBJ1-6)
CSAPKGLGSPLHF

SEQ ID NO: 500747 - protein, 15 aa, Homo sapiens
  CDR3 for alpha chain variable domain of TCR clone 250374 (TRAV12-2, TRAJ32)
CAVNHYGGATNKLIF

SEQ ID NO: 500748 - protein, 16 aa, Homo sapiens
  CDR3 for beta chain variable domain of TCR clone 250374 (TRBV7-9, TRBJ2-1)
CASSLVLTGQGNEQFF

SEQ ID NO: 500749 - protein, 16 aa, Homo sapiens
  CDR3 for alpha chain variable domain of TCR clone 250375 (TRAV3, TRAJ10)
CAVRDMRAGGGNKLTF

SEQ ID NO: 500750 - protein, 20 aa, Homo sapiens
  CDR3 for beta chain variable domain of TCR clone 250375 (TRBV28, TRBJ2-1)
CASTPIGRSPGLAGGSEQFF

SEQ ID NO: 500751 - protein, 17 aa, Homo sapiens
  CDR3 for alpha chain variable domain of TCR clone 250376 (TRAV26-1, TRAJ53)
CIVRVDDSGGSNYKLTF

SEQ ID NO: 500752 - protein, 15 aa, Homo sapiens
  CDR3 for beta chain variable domain of TCR clone 250376 (TRBV20-1, TRBJ2-7)
CSARVPSAYFYEQYF

SEQ ID NO: 500753 - protein, 11 aa, Homo sapiens
  CDR3 for alpha chain variable domain of TCR clone 250377 (TRAV4, TRAJ28)
CLVGDNRPETL

SEQ ID NO: 500754 - protein, 13 aa, Homo sapiens
  CDR3 for beta chain variable domain of TCR clone 250377 (TRBV20-1, TRBJ2-7)
CSATHTSGYEQYF

SEQ ID NO: 500755 - protein, 13 aa, Homo sapiens
  CDR3 for alpha chain variable domain of TCR clone 250378 (TRAV17, TRAJ4)
CATKSGGYNKLIF

SEQ ID NO: 500756 - protein, 14 aa, Homo sapiens
  CDR3 for beta chain variable domain of TCR clone 250378 (TRBV20-1, TRBJ1-5)
CSARDDRGNQPQHI

SEQ ID NO: 500757 - protein, 13 aa, Homo sapiens
  CDR3 for alpha chain variable domain of TCR clone 250379 (TRAV12-3, TRAJ56)
CALATGANSKLTF

SEQ ID NO: 500758 - protein, 12 aa, Homo sapiens
  CDR3 for beta chain variable domain of TCR clone 250379 (TRBV10-2, TRBJ2-3)
CASSRESDTQYF

SEQ ID NO: 500759 - protein, 13 aa, Homo sapiens
  CDR3 for alpha chain variable domain of TCR clone 250380 (TRAV8-6, TRAJ41)
CAVSENSGYALNF

SEQ ID NO: 500760 - protein, 17 aa, Homo sapiens
  CDR3 for beta chain variable domain of TCR clone 250380 (TRBV7-2, TRBJ2-3)
CASSLEARGTSADTQYF

SEQ ID NO: 500761 - protein, 13 aa, Homo sapiens
  CDR3 for alpha chain variable domain of TCR clone 250381 (TRAV20, TRAJ37)
CAGCSSDTGKLIL

SEQ ID NO: 500762 - protein, 11 aa, Homo sapiens
  CDR3 for beta chain variable domain of TCR clone 250381 (TRBV12-4, TRBJ2-3)
CASTATDTQYF

SEQ ID NO: 500763 - protein, 14 aa, Homo sapiens
  CDR3 for alpha chain variable domain of TCR clone 250382 (TRAV13-1, TRAJ23)
CAASRLGRGGKLIF

SEQ ID NO: 500764 - protein, 13 aa, Homo sapiens
  CDR3 for beta chain variable domain of TCR clone 250382 (TRBV7-7, TRBJ2-5)
CASSRSGQENQYF

SEQ ID NO: 500765 - protein, 11 aa, Homo sapiens
  CDR3 for alpha chain variable domain of TCR clone 250383 (TRAV3, TRAJ21)
CFVGNFNKFYF

SEQ ID NO: 500766 - protein, 16 aa, Homo sapiens
  CDR3 for beta chain variable domain of TCR clone 250383 (TRBV19, TRBJ2-1)
CASSKAGPSSYNEQFF

SEQ ID NO: 500767 - protein, 14 aa, Homo sapiens
  CDR3 for alpha chain variable domain of TCR clone 250384 (TRAV1-2, TRAJ27)
CAVRSGTNAGKSTF

SEQ ID NO: 500768 - protein, 17 aa, Homo sapiens
  CDR3 for beta chain variable domain of TCR clone 250384 (TRBV7-3, TRBJ2-3)
CASSLMKRMRGADTQYF

SEQ ID NO: 500769 - protein, 15 aa, Homo sapiens
  CDR3 for alpha chain variable domain of TCR clone 250385 (TRAV13-1, TRAJ32)
CAASNGWWCYKQAHL

SEQ ID NO: 500770 - protein, 15 aa, Homo sapiens
  CDR3 for beta chain variable domain of TCR clone 250385 (TRBV20-1, TRBJ1-2)
CSAIRTGDFNYGYTF

SEQ ID NO: 500771 - protein, 14 aa, Homo sapiens
  CDR3 for alpha chain variable domain of TCR clone 250386 (TRAV35, TRAJ42)
CAGRHGGSQGNLLF

SEQ ID NO: 500772 - protein, 15 aa, Homo sapiens
  CDR3 for beta chain variable domain of TCR clone 250386 (TRBV7-9, TRBJ2-1)
CASSLGWGRANEQFF

SEQ ID NO: 500773 - protein, 11 aa, Homo sapiens
  CDR3 for alpha chain variable domain of TCR clone 250387 (TRAV12-2, TRAJ33)
CAVGSNYQLIW

SEQ ID NO: 500774 - protein, 13 aa, Homo sapiens
  CDR3 for beta chain variable domain of TCR clone 250387 (TRBV2, TRBJ1-5)
CATAGPGNQPQHF

SEQ ID NO: 500775 - protein, 13 aa, Homo sapiens
  CDR3 for alpha chain variable domain of TCR clone 250388 (TRAV12-3, TRAJ13)
CAISSGGYQKVTF

SEQ ID NO: 500776 - protein, 16 aa, Homo sapiens
  CDR3 for beta chain variable domain of TCR clone 250388 (TRBV4-1, TRBJ2-7)
CASSRGDILNSYEQYF

SEQ ID NO: 500777 - protein, 15 aa, Homo sapiens
  CDR3 for alpha chain variable domain of TCR clone 250389 (TRAV27, TRAJ38)
CAARRNAGNDRKRIW

SEQ ID NO: 500778 - protein, 13 aa, Homo sapiens
  CDR3 for beta chain variable domain of TCR clone 250389 (TRBV12-5, TRBJ2-3)
CASGDRQSDTQYF

SEQ ID NO: 500779 - protein, 13 aa, Homo sapiens
  CDR3 for alpha chain variable domain of TCR clone 250390 (TRAV13-1, TRAJ21)
CAASIYNFNKFYF

SEQ ID NO: 500780 - protein, 13 aa, Homo sapiens
  CDR3 for beta chain variable domain of TCR clone 250390 (TRBV11-1, TRBJ1-4)
CASSLMGDEKLFF

SEQ ID NO: 500781 - protein, 16 aa, Homo sapiens
  CDR3 for alpha chain variable domain of TCR clone 250391 (TRAV26-2, TRAJ45)
CTTASPIGGGADGLTF

SEQ ID NO: 500782 - protein, 20 aa, Homo sapiens
  CDR3 for beta chain variable domain of TCR clone 250391 (TRBV28, TRBJ2-1)
CASTPIGRSPGLAGGNEQIF

SEQ ID NO: 500783 - protein, 17 aa, Homo sapiens
  CDR3 for alpha chain variable domain of TCR clone 250392 (TRAV9-2, TRAJ45)
CALSGYYSGGGADGLTF

SEQ ID NO: 500784 - protein, 14 aa, Homo sapiens
  CDR3 for beta chain variable domain of TCR clone 250392 (TRBV19, TRBJ2-2)
CASSGQGIAGELFF

SEQ ID NO: 500785 - protein, 14 aa, Homo sapiens
  CDR3 for alpha chain variable domain of TCR clone 250393 (TRAV1-1, TRAJ27)
CAVIYNTNAGKSTF

SEQ ID NO: 500786 - protein, 13 aa, Homo sapiens
  CDR3 for beta chain variable domain of TCR clone 250393 (TRBV6-3, TRBJ2-7)
CASSLSGGYEQYF

SEQ ID NO: 500787 - protein, 16 aa, Homo sapiens
  CDR3 for alpha chain variable domain of TCR clone 250394 (TRAV4, TRAJ9)
CLVGDPNRPGGFKTIF

SEQ ID NO: 500788 - protein, 14 aa, Homo sapiens
  CDR3 for beta chain variable domain of TCR clone 250394 (TRBV4-2, TRBJ2-1)
CASGLDRAYNEQFF

SEQ ID NO: 500789 - protein, 12 aa, Homo sapiens
  CDR3 for alpha chain variable domain of TCR clone 250395 (TRAV27, TRAJ33)
CAGDGSNYQLIW

SEQ ID NO: 500790 - protein, 15 aa, Homo sapiens
  CDR3 for beta chain variable domain of TCR clone 250395 (TRBV6-5, TRBJ2-7)
CASSYATSGNYEQYF

SEQ ID NO: 500791 - protein, 22 aa, Homo sapiens
  CDR3 for alpha chain variable domain of TCR clone 250396 (TRAV8-6, TRAJ6)
CAVTLGEEATYLHLEEGPAFLF

SEQ ID NO: 500792 - protein, 15 aa, Homo sapiens
  CDR3 for beta chain variable domain of TCR clone 250396 (TRBV7-2, TRBJ1-1)
CASSTQGGANTEAFF

SEQ ID NO: 500793 - protein, 14 aa, Homo sapiens
  CDR3 for alpha chain variable domain of TCR clone 250397 (TRAV35, TRAJ33)
CAGSSLDSNYQLIC

SEQ ID NO: 500794 - protein, 15 aa, Homo sapiens
  CDR3 for beta chain variable domain of TCR clone 250397 (TRBV20-1, TRBJ2-7)
CSAESGTSGAYEQYF

SEQ ID NO: 500795 - protein, 11 aa, Homo sapiens
  CDR3 for alpha chain variable domain of TCR clone 250398 (TRAV12-1, TRAJ21)
CVVYNFNKFYF

SEQ ID NO: 500796 - protein, 13 aa, Homo sapiens
  CDR3 for beta chain variable domain of TCR clone 250398 (TRBV27, TRBJ2-1)
CASRTLGVGEQFF

SEQ ID NO: 500797 - protein, 21 aa, Homo sapiens
  CDR3 for alpha chain variable domain of TCR clone 250399 (TRAV8-4, TRAJ38)
CARLNAGNNHIQNPGPAVYQL

SEQ ID NO: 500798 - protein, 14 aa, Homo sapiens
  CDR3 for beta chain variable domain of TCR clone 250399 (TRBV7-8, TRBJ2-3)
CASSLEAGTDTQYF

SEQ ID NO: 500799 - protein, 15 aa, Homo sapiens
  CDR3 for alpha chain variable domain of TCR clone 250400 (TRAV3, TRAJ7)
CAVRDKDNGNKRLAS

SEQ ID NO: 500800 - protein, 19 aa, Homo sapiens
  CDR3 for beta chain variable domain of TCR clone 250400 (TRBV5-8, TRBJ2-3)
CASSFLGTSGSHRTDTQYF

SEQ ID NO: 500801 - protein, 15 aa, Homo sapiens
  CDR3 for alpha chain variable domain of TCR clone 250401 (TRAV17, TRAJ6)
CATDLPSGGSYVPTF

SEQ ID NO: 500802 - protein, 16 aa, Homo sapiens
  CDR3 for beta chain variable domain of TCR clone 250401 (TRBV4-1, TRBJ2-7)
CASSRDPTGYSYEQYF

SEQ ID NO: 500803 - protein, 14 aa, Homo sapiens
  CDR3 for alpha chain variable domain of TCR clone 250402 (TRAV14/DV4, TRAJ15)
CAMRRDQAGAALIF

SEQ ID NO: 500804 - protein, 16 aa, Homo sapiens
  CDR3 for beta chain variable domain of TCR clone 250402 (TRBV15, TRBJ2-3)
CATSRDLGIVTDTQYF

SEQ ID NO: 500805 - protein, 14 aa, Homo sapiens
  CDR3 for alpha chain variable domain of TCR clone 250403 (TRAV13-1, TRAJ29)
CAASKHSGNTPLVF

SEQ ID NO: 500806 - protein, 17 aa, Homo sapiens
  CDR3 for beta chain variable domain of TCR clone 250403 (TRBV13, TRBJ2-3)
CASSLSRVAGGRDTQYF

SEQ ID NO: 500807 - protein, 13 aa, Homo sapiens
  CDR3 for alpha chain variable domain of TCR clone 250404 (TRAV17, TRAJ9)
CATDYTGGFKTIF

SEQ ID NO: 500808 - protein, 19 aa, Homo sapiens
  CDR3 for beta chain variable domain of TCR clone 250404 (TRBV25-1, TRBJ2-2)
CAILVYRVDRGRKTGELFF

SEQ ID NO: 500809 - protein, 12 aa, Homo sapiens
  CDR3 for alpha chain variable domain of TCR clone 250405 (TRAV8-6, TRAJ43)
CAVSNNNNDMRF

SEQ ID NO: 500810 - protein, 15 aa, Homo sapiens
  CDR3 for beta chain variable domain of TCR clone 250405 (TRBV7-3, TRBJ2-6)
CASSSGGSGANVPTF

SEQ ID NO: 500811 - protein, 13 aa, Homo sapiens
  CDR3 for alpha chain variable domain of TCR clone 250406 (TRAV20, TRAJ54)
CAVQAGGAQKLVF

SEQ ID NO: 500812 - protein, 14 aa, Homo sapiens
  CDR3 for beta chain variable domain of TCR clone 250406 (TRBV4-1, TRBJ2-2)
RASSQAVNTGELFF

SEQ ID NO: 500813 - protein, 16 aa, Homo sapiens
  CDR3 for alpha chain variable domain of TCR clone 250407 (TRAV21, TRAJ17)
CAVRPGEEAAGNKLTF

SEQ ID NO: 500814 - protein, 13 aa, Homo sapiens
  CDR3 for beta chain variable domain of TCR clone 250407 (TRBV2, TRBJ1-4)
CASSERAGEKLFF

SEQ ID NO: 500815 - protein, 14 aa, Homo sapiens
  CDR3 for alpha chain variable domain of TCR clone 250408 (TRAV9-2, TRAJ39)
CALYIYNAGNMLTF

SEQ ID NO: 500816 - protein, 15 aa, Homo sapiens
  CDR3 for beta chain variable domain of TCR clone 250408 (TRBV27, TRBJ1-5)
CASSLGTGFNQTQHF

SEQ ID NO: 500817 - protein, 14 aa, Homo sapiens
  CDR3 for alpha chain variable domain of TCR clone 250409 (TRAV12-3, TRAJ10)
SHLPLTGGGNKLTF

SEQ ID NO: 500818 - protein, 11 aa, Homo sapiens
  CDR3 for beta chain variable domain of TCR clone 250409 (TRBV29-1, TRBJ2-5)
CSEDRTGNQYF

SEQ ID NO: 500819 - protein, 13 aa, Homo sapiens
  CDR3 for alpha chain variable domain of TCR clone 250410 (TRAV22, TRAJ29)
FAVGGSGNTPLVF

SEQ ID NO: 500820 - protein, 13 aa, Homo sapiens
  CDR3 for beta chain variable domain of TCR clone 250410 (TRBV4-2, TRBJ1-1)
CASSQAGDTEAFF

SEQ ID NO: 500821 - protein, 14 aa, Homo sapiens
  CDR3 for alpha chain variable domain of TCR clone 250411 (TRAV38-1, TRAJ40)
CALRPTSGTYKYIV

SEQ ID NO: 500822 - protein, 14 aa, Homo sapiens
  CDR3 for beta chain variable domain of TCR clone 250411 (TRBV25-1, TRBJ1-1)
CASTHLGGNTEAFF

SEQ ID NO: 500823 - protein, 14 aa, Homo sapiens
  CDR3 for alpha chain variable domain of TCR clone 250412 (TRAV1-2, TRAJ16)
CAVNWFSDGQKLLF

SEQ ID NO: 500824 - protein, 14 aa, Homo sapiens
  CDR3 for beta chain variable domain of TCR clone 250412 (TRBV7-2, TRBJ1-1)
CASSFLTGTTEAFF

SEQ ID NO: 500825 - protein, 15 aa, Homo sapiens
  CDR3 for alpha chain variable domain of TCR clone 250413 (TRAV2, TRAJ24)
CAVEVLTDSWGKFQF

SEQ ID NO: 500826 - protein, 11 aa, Homo sapiens
  CDR3 for beta chain variable domain of TCR clone 250413 (TRBV29-1, TRBJ2-5)
CSEDRTGTQYF

SEQ ID NO: 500827 - protein, 14 aa, Homo sapiens
  CDR3 for alpha chain variable domain of TCR clone 250414 (TRAV8-3, TRAJ4)
CAVGAAGGYNKLIF

SEQ ID NO: 500828 - protein, 15 aa, Homo sapiens
  CDR3 for beta chain variable domain of TCR clone 250414 (TRBV20-1, TRBJ2-5)
CSAPPRKGFGETQYF

SEQ ID NO: 500829 - protein, 14 aa, Homo sapiens
  CDR3 for alpha chain variable domain of TCR clone 250415 (TRAV1-2, TRAJ16)
CAVNRFSDGQKLPF

SEQ ID NO: 500830 - protein, 14 aa, Homo sapiens
  CDR3 for beta chain variable domain of TCR clone 250415 (TRBV20-1, TRBJ2-1)
CSAQIGGSANEQFF

SEQ ID NO: 500831 - protein, 12 aa, Homo sapiens
  CDR3 for alpha chain variable domain of TCR clone 250416 (TRAV12-3, TRAJ17)
CAMTLTGNKLTF

SEQ ID NO: 500832 - protein, 15 aa, Homo sapiens
  CDR3 for beta chain variable domain of TCR clone 250416 (TRBV11-3, TRBJ2-3)
CASLNDGREGDTQYF

SEQ ID NO: 500833 - protein, 12 aa, Homo sapiens
  CDR3 for alpha chain variable domain of TCR clone 250417 (TRAV12-3, TRAJ17)
CAMTLTGNKLTF

SEQ ID NO: 500834 - protein, 15 aa, Homo sapiens
  CDR3 for beta chain variable domain of TCR clone 250417 (TRBV2, TRBJ2-5)
CASSEAGTRQETQYF

SEQ ID NO: 500835 - protein, 14 aa, Homo sapiens
  CDR3 for alpha chain variable domain of TCR clone 250418 (TRAV1-2, TRAJ16)
CAVNRFSDGQKLLF

SEQ ID NO: 500836 - protein, 14 aa, Homo sapiens
  CDR3 for beta chain variable domain of TCR clone 250418 (TRBV9, TRBJ2-7)
CASGVGVGSYEQYF

SEQ ID NO: 500837 - protein, 19 aa, Homo sapiens
  CDR3 for alpha chain variable domain of TCR clone 250419 (TRAV38-1, TRAJ53)
CALMNHGLESGGSNYKLTF

SEQ ID NO: 500838 - protein, 13 aa, Homo sapiens
  CDR3 for beta chain variable domain of TCR clone 250419 (TRBV19, TRBJ2-7)
CASSPRQSYEQYF

SEQ ID NO: 500839 - protein, 14 aa, Homo sapiens
  CDR3 for alpha chain variable domain of TCR clone 250420 (TRAV2, TRAJ37)
CAVDFTINTGKLIF

SEQ ID NO: 500840 - protein, 12 aa, Homo sapiens
  CDR3 for beta chain variable domain of TCR clone 250420 (TRBV29-1, TRBJ2-3)
CSVTGGADTQYF

SEQ ID NO: 500841 - protein, 13 aa, Homo sapiens
  CDR3 for alpha chain variable domain of TCR clone 250421 (TRAV3, TRAJ27)
CSVRPLGAGKSTF

SEQ ID NO: 500842 - protein, 14 aa, Homo sapiens
  CDR3 for beta chain variable domain of TCR clone 250421 (TRBV25-1, TRBJ1-1)
CASTHLGGNTEASF

SEQ ID NO: 500843 - protein, 18 aa, Homo sapiens
  CDR3 for alpha chain variable domain of TCR clone 250422 (TRAV1-2, TRAJ18)
CAVRDMGDRGSTLGRLYF

SEQ ID NO: 500844 - protein, 13 aa, Homo sapiens
  CDR3 for beta chain variable domain of TCR clone 250422 (TRBV27, TRBJ1-4)
CASSLMGDEKLFF

SEQ ID NO: 500845 - protein, 13 aa, Homo sapiens
  CDR3 for alpha chain variable domain of TCR clone 250423 (TRAV21, TRAJ47)
CAISGLYGNKLVF

SEQ ID NO: 500846 - protein, 17 aa, Homo sapiens
  CDR3 for beta chain variable domain of TCR clone 250423 (TRBV15, TRBJ2-3)
CATSGTTSEEGTDTQYF

SEQ ID NO: 500847 - protein, 15 aa, Homo sapiens
  CDR3 for alpha chain variable domain of TCR clone 250424 (TRAV14/DV4, TRAJ10)
CAMRELTGGGNKLTF

SEQ ID NO: 500848 - protein, 18 aa, Homo sapiens
  CDR3 for beta chain variable domain of TCR clone 250424 (TRBV7-9, TRBJ2-7)
CASSLTTCGSRTWYEQYF

SEQ ID NO: 500849 - protein, 18 aa, Homo sapiens
  CDR3 for alpha chain variable domain of TCR clone 250425 (TRAV1-1, TRAJ42)
CAVSPSAFYGGSQGKLIF

SEQ ID NO: 500850 - protein, 14 aa, Homo sapiens
  CDR3 for beta chain variable domain of TCR clone 250425 (TRBV6-3, TRBJ2-7)
CASSYSTGGDEQYF

SEQ ID NO: 500851 - protein, 15 aa, Homo sapiens
  CDR3 for alpha chain variable domain of TCR clone 250426 (TRAV2, TRAJ9)
CAVEDRGTGGFKTIF

SEQ ID NO: 500852 - protein, 15 aa, Homo sapiens
  CDR3 for beta chain variable domain of TCR clone 250426 (TRBV11-2, TRBJ1-6)
CASTLRGTGNSPLHF

SEQ ID NO: 500853 - protein, 22 aa, Homo sapiens
  CDR3 for alpha chain variable domain of TCR clone 250427 (TRAV21, )
CAVKQDAGNNHIQNPDPAVYQL

SEQ ID NO: 500854 - protein, 17 aa, Homo sapiens
  CDR3 for beta chain variable domain of TCR clone 250427 (TRBV13, TRBJ2-3)
CASSLSRVAGGRNTQYF

SEQ ID NO: 500855 - protein, 14 aa, Homo sapiens
  CDR3 for alpha chain variable domain of TCR clone 250428 (TRAV12-3, TRAJ29)
CAMILLSGNTPLVF

SEQ ID NO: 500856 - protein, 13 aa, Homo sapiens
  CDR3 for beta chain variable domain of TCR clone 250428 (TRBV11-2, TRBJ1-1)
CASSLETSTEAFF

SEQ ID NO: 500857 - protein, 18 aa, Homo sapiens
  CDR3 for alpha chain variable domain of TCR clone 250429 (TRAV20, TRAJ4)
CAVKPYYMFSGGYNKLIF

SEQ ID NO: 500858 - protein, 13 aa, Homo sapiens
  CDR3 for beta chain variable domain of TCR clone 250429 (TRBV19, TRBJ2-3)
CATWDKITDTQYF

SEQ ID NO: 500859 - protein, 16 aa, Homo sapiens
  CDR3 for alpha chain variable domain of TCR clone 250430 (TRAV3, TRAJ13)
CAVRDPNYGGYQKVTF

SEQ ID NO: 500860 - protein, 13 aa, Homo sapiens
  CDR3 for beta chain variable domain of TCR clone 250430 (TRBV7-9, TRBJ2-7)
CARSLQGSYEQYF

SEQ ID NO: 500861 - protein, 11 aa, Homo sapiens
  CDR3 for alpha chain variable domain of TCR clone 250431 (TRAV27, TRAJ47)
SIVEYGNKLVF

SEQ ID NO: 500862 - protein, 18 aa, Homo sapiens
  CDR3 for beta chain variable domain of TCR clone 250431 (TRBV2, TRBJ2-1)
CASRGLAGGLRTYNEQFF

SEQ ID NO: 500863 - protein, 18 aa, Homo sapiens
  CDR3 for alpha chain variable domain of TCR clone 250432 (TRAV12-3, TRAJ52)
CAMSVGGAGGTSYGKLTF

SEQ ID NO: 500864 - protein, 14 aa, Homo sapiens
  CDR3 for beta chain variable domain of TCR clone 250432 (TRBV13, TRBJ2-3)
CASSLGGPQRPQYF

SEQ ID NO: 500865 - protein, 13 aa, Homo sapiens
  CDR3 for alpha chain variable domain of TCR clone 250433 (TRAV8-3, TRAJ21)
CAVGAYNFNKFYF

SEQ ID NO: 500866 - protein, 16 aa, Homo sapiens
  CDR3 for beta chain variable domain of TCR clone 250433 (TRBV19, TRBJ2-1)
CASSMGGGSSYNKQFF

SEQ ID NO: 500867 - protein, 12 aa, Homo sapiens
  CDR3 for alpha chain variable domain of TCR clone 250434 (TRAV8-6, TRAJ4)
CAVSDHPNKLIF

SEQ ID NO: 500868 - protein, 14 aa, Homo sapiens
  CDR3 for beta chain variable domain of TCR clone 250434 (TRBV19, TRBJ1-2)
CASSLQGQAYGYTF

SEQ ID NO: 500869 - protein, 13 aa, Homo sapiens
  CDR3 for alpha chain variable domain of TCR clone 250435 (TRAV12-2, TRAJ49)
CAVKPNTGNQFYF

SEQ ID NO: 500870 - protein, 14 aa, Homo sapiens
  CDR3 for beta chain variable domain of TCR clone 250435 (TRBV20-1, TRBJ2-5)
CSASDSGSGETQYF

SEQ ID NO: 500871 - protein, 13 aa, Homo sapiens
  CDR3 for alpha chain variable domain of TCR clone 250436 (TRAV20, TRAJ49)
CAVQARTGNQFYF

SEQ ID NO: 500872 - protein, 11 aa, Homo sapiens
  CDR3 for beta chain variable domain of TCR clone 250436 (TRBV11-2, TRBJ1-1)
CASSINTDAFF

SEQ ID NO: 500873 - protein, 14 aa, Homo sapiens
  CDR3 for alpha chain variable domain of TCR clone 250437 (TRAV17, TRAJ6)
CATNPAGGSYIPTF

SEQ ID NO: 500874 - protein, 15 aa, Homo sapiens
  CDR3 for beta chain variable domain of TCR clone 250437 (TRBV2, TRBJ2-5)
CASSGNVAAGETQYF

SEQ ID NO: 500875 - protein, 14 aa, Homo sapiens
  CDR3 for alpha chain variable domain of TCR clone 250438 (TRAV1-2, TRAJ16)
CAFNRFSDGQKLPF

SEQ ID NO: 500876 - protein, 15 aa, Homo sapiens
  CDR3 for beta chain variable domain of TCR clone 250438 (TRBV7-9, TRBJ1-6)
CASSSPGRGNSPLHF

SEQ ID NO: 500877 - protein, 14 aa, Homo sapiens
  CDR3 for alpha chain variable domain of TCR clone 250439 (TRAV3, TRAJ32)
CCERRAGATNKLIL

SEQ ID NO: 500878 - protein, 12 aa, Homo sapiens
  CDR3 for beta chain variable domain of TCR clone 250439 (TRBV6-1, TRBJ2-7)
CASSDYSYEQYF

SEQ ID NO: 500879 - protein, 14 aa, Homo sapiens
  CDR3 for alpha chain variable domain of TCR clone 250440 (TRAV13-1, TRAJ48)
CAASRSFGKEKLTF

SEQ ID NO: 500880 - protein, 15 aa, Homo sapiens
  CDR3 for beta chain variable domain of TCR clone 250440 (TRBV7-6, TRBJ2-5)
CASSKPTGPQETQYF

SEQ ID NO: 500881 - protein, 15 aa, Homo sapiens
  CDR3 for alpha chain variable domain of TCR clone 250441 (TRAV2, TRAJ37)
CAVEDGSSNTGKLIF

SEQ ID NO: 500882 - protein, 14 aa, Homo sapiens
  CDR3 for beta chain variable domain of TCR clone 250441 (TRBV4-1, TRBJ2-2)
CASSQAVNTGELFF

SEQ ID NO: 500883 - protein, 13 aa, Homo sapiens
  CDR3 for alpha chain variable domain of TCR clone 250442 (TRAV20, TRAJ37)
CAGCSSNKGKLIF

SEQ ID NO: 500884 - protein, 17 aa, Homo sapiens
  CDR3 for beta chain variable domain of TCR clone 250442 (TRBV28, TRBJ2-5)
CASSRQGGLAGAETQYF

SEQ ID NO: 500885 - protein, 13 aa, Homo sapiens
  CDR3 for alpha chain variable domain of TCR clone 250443 (TRAV8-6, TRAJ40)
CAVSVTGTYKYIF

SEQ ID NO: 500886 - protein, 15 aa, Homo sapiens
  CDR3 for beta chain variable domain of TCR clone 250443 (TRBV4-1, TRBJ2-3)
CASGRGQGIPGTQYF

SEQ ID NO: 500887 - protein, 13 aa, Homo sapiens
  CDR3 for alpha chain variable domain of TCR clone 250444 (TRAV23/DV6, TRAJ22)
CAPYYGSERQLTF

SEQ ID NO: 500888 - protein, 15 aa, Homo sapiens
  CDR3 for beta chain variable domain of TCR clone 250444 (TRBV11-2, TRBJ1-6)
CASGLDPWAVSPLHF

SEQ ID NO: 500889 - protein, 13 aa, Homo sapiens
  CDR3 for alpha chain variable domain of TCR clone 250445 (TRAV22, TRAJ29)
CAVGGSGNTPLVF

SEQ ID NO: 500890 - protein, 13 aa, Homo sapiens
  CDR3 for beta chain variable domain of TCR clone 250445 (TRBV18, TRBJ2-7)
CASSRSGSYEQYF

SEQ ID NO: 500891 - protein, 13 aa, Homo sapiens
  CDR3 for alpha chain variable domain of TCR clone 250446 (TRAV39, TRAJ48)
CAAVNFGNEKLTF

SEQ ID NO: 500892 - protein, 14 aa, Homo sapiens
  CDR3 for beta chain variable domain of TCR clone 250446 (TRBV7-2, TRBJ1-1)
CASSFLTGTTEAFF

SEQ ID NO: 500893 - protein, 13 aa, Homo sapiens
  CDR3 for alpha chain variable domain of TCR clone 250447 (TRAV12-3, TRAJ44)
CARTTGTASKPTF

SEQ ID NO: 500894 - protein, 15 aa, Homo sapiens
  CDR3 for beta chain variable domain of TCR clone 250447 (TRBV29-1, TRBJ1-2)
CSGLDVRGANYGYTF

SEQ ID NO: 500895 - protein, 16 aa, Homo sapiens
  CDR3 for alpha chain variable domain of TCR clone 250448 (TRAV1-2, TRAJ10)
CAVRGVLTGGGNKLTF

SEQ ID NO: 500896 - protein, 13 aa, Homo sapiens
  CDR3 for beta chain variable domain of TCR clone 250448 (TRBV4-1, TRBJ2-1)
CANSQVNEYEQFF

SEQ ID NO: 500897 - protein, 14 aa, Homo sapiens
  CDR3 for alpha chain variable domain of TCR clone 250449 (TRAV2, TRAJ23)
CAVGLRNQGGKLIF

SEQ ID NO: 500898 - protein, 13 aa, Homo sapiens
  CDR3 for beta chain variable domain of TCR clone 250449 (TRBV12-4, TRBJ2-5)
CTSSPGTEETQYF

SEQ ID NO: 500899 - protein, 14 aa, Homo sapiens
  CDR3 for alpha chain variable domain of TCR clone 250450 (TRAV1-2, TRAJ16)
CAVNRFSDGQKLLF

SEQ ID NO: 500900 - protein, 16 aa, Homo sapiens
  CDR3 for beta chain variable domain of TCR clone 250450 (TRBV2, TRBJ2-1)
CASRLNTASAYNEQFF

SEQ ID NO: 500901 - protein, 12 aa, Homo sapiens
  CDR3 for alpha chain variable domain of TCR clone 250451 (TRAV12-3, TRAJ17)
CAMTLTGNKLTS

SEQ ID NO: 500902 - protein, 15 aa, Homo sapiens
  CDR3 for beta chain variable domain of TCR clone 250451 (TRBV20-1, TRBJ2-7)
CSAGDRVSGMDEQYF

SEQ ID NO: 500903 - protein, 14 aa, Homo sapiens
  CDR3 for alpha chain variable domain of TCR clone 250452 (TRAV3, TRAJ37)
CAVKESGNTGKLIF

SEQ ID NO: 500904 - protein, 16 aa, Homo sapiens
  CDR3 for beta chain variable domain of TCR clone 250452 (TRBV3-1, TRBJ2-5)
CASSQDWASGQETQYF

SEQ ID NO: 500905 - protein, 16 aa, Homo sapiens
  CDR3 for alpha chain variable domain of TCR clone 250453 (TRAV3, TRAJ21)
CAVRDIESGNFNKFYF

SEQ ID NO: 500906 - protein, 15 aa, Homo sapiens
  CDR3 for beta chain variable domain of TCR clone 250453 (TRBV19, TRBJ2-1)
CASNAQGLAGREQFF

SEQ ID NO: 500907 - protein, 18 aa, Homo sapiens
  CDR3 for alpha chain variable domain of TCR clone 250454 (TRAV13-1, TRAJ52)
CAASKRSAGGTSYGKLTF

SEQ ID NO: 500908 - protein, 17 aa, Homo sapiens
  CDR3 for beta chain variable domain of TCR clone 250454 (TRBV25-1, TRBJ2-1)
CASSAYGQGRGVYEQFF

SEQ ID NO: 500909 - protein, 14 aa, Homo sapiens
  CDR3 for alpha chain variable domain of TCR clone 250455 (TRAV17, TRAJ53)
CGVGSGGSNYKLTF

SEQ ID NO: 500910 - protein, 13 aa, Homo sapiens
  CDR3 for beta chain variable domain of TCR clone 250455 (TRBV7-3, TRBJ1-1)
CASSQDWGAEAFF

SEQ ID NO: 500911 - protein, 15 aa, Homo sapiens
  CDR3 for alpha chain variable domain of TCR clone 250456 (TRAV17, TRAJ37)
CATDHGSTHTGKLIF

SEQ ID NO: 500912 - protein, 14 aa, Homo sapiens
  CDR3 for beta chain variable domain of TCR clone 250456 (TRBV7-2, TRBJ2-3)
CASSRTSGADTQYF

SEQ ID NO: 500913 - protein, 15 aa, Homo sapiens
  CDR3 for alpha chain variable domain of TCR clone 250457 (TRAV35, TRAJ40)
CAGQLGTSGTYKYIF

SEQ ID NO: 500914 - protein, 14 aa, Homo sapiens
  CDR3 for beta chain variable domain of TCR clone 250457 (TRBV7-3, TRBJ2-1)
CASSLAEGTNEQFF

SEQ ID NO: 500915 - protein, 15 aa, Homo sapiens
  CDR3 for alpha chain variable domain of TCR clone 250458 (TRAV38-1, TRAJ57)
CAFMDSQGGSEKLVF

SEQ ID NO: 500916 - protein, 16 aa, Homo sapiens
  CDR3 for beta chain variable domain of TCR clone 250458 (TRBV10-3, TRBJ2-1)
CAGRGGGRGDYNEQFF

SEQ ID NO: 500917 - protein, 13 aa, Homo sapiens
  CDR3 for alpha chain variable domain of TCR clone 250459 (TRAV10, TRAJ40)
CVVSAPGTYKYIF

SEQ ID NO: 500918 - protein, 13 aa, Homo sapiens
  CDR3 for beta chain variable domain of TCR clone 250459 (TRBV20-1, TRBJ2-3)
CSARLAGTDTQYL

SEQ ID NO: 500919 - protein, 12 aa, Homo sapiens
  CDR3 for alpha chain variable domain of TCR clone 250460 (TRAV12-1, TRAJ40)
CVFYSGTYKYIF

SEQ ID NO: 500920 - protein, 14 aa, Homo sapiens
  CDR3 for beta chain variable domain of TCR clone 250460 (TRBV7-9, TRBJ2-5)
CASSLDTAQGTQYF

SEQ ID NO: 500921 - protein, 14 aa, Homo sapiens
  CDR3 for alpha chain variable domain of TCR clone 250461 (TRAV12-2, TRAJ40)
CAVKIPSGTYKYIF

SEQ ID NO: 500922 - protein, 13 aa, Homo sapiens
  CDR3 for beta chain variable domain of TCR clone 250461 (TRBV28, TRBJ2-7)
CASTPGLAGEQYF

SEQ ID NO: 500923 - protein, 14 aa, Homo sapiens
  CDR3 for alpha chain variable domain of TCR clone 250462 (TRAV12-3, TRAJ15)
CAMVPPQAGTALIF

SEQ ID NO: 500924 - protein, 12 aa, Homo sapiens
  CDR3 for beta chain variable domain of TCR clone 250462 (TRBV11-2, TRBJ2-2)
CASSFGGGELFF

SEQ ID NO: 500925 - protein, 15 aa, Homo sapiens
  CDR3 for alpha chain variable domain of TCR clone 250463 (TRAV12-3, TRAJ6)
CAMSATTGGSYIPTF

SEQ ID NO: 500926 - protein, 15 aa, Homo sapiens
  CDR3 for beta chain variable domain of TCR clone 250463 (TRBV2, TRBJ2-2)
CASSRQGPNTGELFF

SEQ ID NO: 500927 - protein, 15 aa, Homo sapiens
  CDR3 for alpha chain variable domain of TCR clone 250464 (TRAV8-3, TRAJ45)
CAASYSGGGADGLTF

SEQ ID NO: 500928 - protein, 17 aa, Homo sapiens
  CDR3 for beta chain variable domain of TCR clone 250464 (TRBV7-8, TRBJ1-2)
CASSLRPLQGHLYGDTF

SEQ ID NO: 500929 - protein, 11 aa, Homo sapiens
  CDR3 for alpha chain variable domain of TCR clone 250465 (TRAV3, TRAJ21)
CAVGNFNRFYF

SEQ ID NO: 500930 - protein, 16 aa, Homo sapiens
  CDR3 for beta chain variable domain of TCR clone 250465 (TRBV19, TRBJ2-1)
CASSKSGPSSYNEQFF

SEQ ID NO: 500931 - protein, 13 aa, Homo sapiens
  CDR3 for alpha chain variable domain of TCR clone 250466 (TRAV12-1, TRAJ9)
CVVLNTAGFKTIF

SEQ ID NO: 500932 - protein, 13 aa, Homo sapiens
  CDR3 for beta chain variable domain of TCR clone 250466 (TRBV20-1, TRBJ1-1)
CSARGGGNTEAFF

SEQ ID NO: 500933 - protein, 13 aa, Homo sapiens
  CDR3 for alpha chain variable domain of TCR clone 250467 (TRAV17, TRAJ5)
CALRGTGRRALTF

SEQ ID NO: 500934 - protein, 15 aa, Homo sapiens
  CDR3 for beta chain variable domain of TCR clone 250467 (TRBV9, TRBJ1-6)
CASSVAGTGDSTLHF

SEQ ID NO: 500935 - protein, 13 aa, Homo sapiens
  CDR3 for alpha chain variable domain of TCR clone 250468 (TRAV21, TRAJ57)
CAVTQGGSEKLVF

SEQ ID NO: 500936 - protein, 14 aa, Homo sapiens
  CDR3 for beta chain variable domain of TCR clone 250468 (TRBV28, TRBJ2-1)
CASSYYTAYNEQFF

SEQ ID NO: 500937 - protein, 14 aa, Homo sapiens
  CDR3 for alpha chain variable domain of TCR clone 250469 (TRAV8-2, TRAJ33)
CVVSDEDSNYQLIW

SEQ ID NO: 500938 - protein, 12 aa, Homo sapiens
  CDR3 for beta chain variable domain of TCR clone 250469 (TRBV28, TRBJ2-3)
CASSLYRDTQYF

SEQ ID NO: 500939 - protein, 14 aa, Homo sapiens
  CDR3 for alpha chain variable domain of TCR clone 250470 (TRAV20, TRAJ22)
CAVQGAGSARQLTF

SEQ ID NO: 500940 - protein, 15 aa, Homo sapiens
  CDR3 for beta chain variable domain of TCR clone 250470 (TRBV9, TRBJ1-6)
CASSVAGTGDSPLHF

SEQ ID NO: 500941 - protein, 14 aa, Homo sapiens
  CDR3 for alpha chain variable domain of TCR clone 250471 (TRAV1-2, TRAJ16)
CAVTRFSDGQKLLF

SEQ ID NO: 500942 - protein, 13 aa, Homo sapiens
  CDR3 for beta chain variable domain of TCR clone 250471 (TRBV10-3, TRBJ2-7)
CASKLAVNYEQYF

SEQ ID NO: 500943 - protein, 14 aa, Homo sapiens
  CDR3 for alpha chain variable domain of TCR clone 250472 (TRAV12-2, TRAJ13)
CAVKKTGGYQKVTF

SEQ ID NO: 500944 - protein, 14 aa, Homo sapiens
  CDR3 for beta chain variable domain of TCR clone 250472 (TRBV5-5, TRBJ2-7)
CASSLGQGTDEQYF

SEQ ID NO: 500945 - protein, 15 aa, Homo sapiens
  CDR3 for alpha chain variable domain of TCR clone 250473 (TRAV12-1, TRAJ22)
CVVRISSGSARQLTF

SEQ ID NO: 500946 - protein, 16 aa, Homo sapiens
  CDR3 for beta chain variable domain of TCR clone 250473 (TRBV5-7, TRBJ2-7)
PAANEGGGRGSYGQCF

SEQ ID NO: 500947 - protein, 10 aa, Homo sapiens
  CDR3 for alpha chain variable domain of TCR clone 250474 (TRAV1-2, TRAJ20)
CALNDYKLSF

SEQ ID NO: 500948 - protein, 12 aa, Homo sapiens
  CDR3 for beta chain variable domain of TCR clone 250474 (TRBV7-9, TRBJ2-7)
CASSIKREEQYF

SEQ ID NO: 500949 - protein, 11 aa, Homo sapiens
  CDR3 for alpha chain variable domain of TCR clone 250475 (TRAV8-3, TRAJ20)
CCGCKRLQLSF

SEQ ID NO: 500950 - protein, 17 aa, Homo sapiens
  CDR3 for beta chain variable domain of TCR clone 250475 (TRBV13, TRBJ2-3)
CASSLSRVAGGRNTQYF

SEQ ID NO: 500951 - protein, 15 aa, Homo sapiens
  CDR3 for alpha chain variable domain of TCR clone 250476 (TRAV2, TRAJ24)
CAVEVLTDSRGKFQF

SEQ ID NO: 500952 - protein, 14 aa, Homo sapiens
  CDR3 for beta chain variable domain of TCR clone 250476 (TRBV19, TRBJ2-1)
CASSMGSGRRSSSS

SEQ ID NO: 500953 - protein, 14 aa, Homo sapiens
  CDR3 for alpha chain variable domain of TCR clone 250477 (TRAV12-2, TRAJ13)
CAVKKTGGYQKVTF

SEQ ID NO: 500954 - protein, 14 aa, Homo sapiens
  CDR3 for beta chain variable domain of TCR clone 250477 (TRBV5-1, TRBJ2-7)
GASSRGESLYEQYC

SEQ ID NO: 500955 - protein, 14 aa, Homo sapiens
  CDR3 for alpha chain variable domain of TCR clone 250478 (TRAV12-2, TRAJ45)
CAVNKGGGADGLTF

SEQ ID NO: 500956 - protein, 11 aa, Homo sapiens
  CDR3 for beta chain variable domain of TCR clone 250478 (TRBV12-4, TRBJ2-3)
CASTATDTQYF

SEQ ID NO: 500957 - protein, 16 aa, Homo sapiens
  CDR3 for alpha chain variable domain of TCR clone 250479 (TRAV3, TRAJ10)
CAVRDMRAGGGNKLTF

SEQ ID NO: 500958 - protein, 15 aa, Homo sapiens
  CDR3 for beta chain variable domain of TCR clone 250479 (TRBV11-3, TRBJ2-1)
CASSGGTSSLDEQFF

SEQ ID NO: 500959 - protein, 13 aa, Homo sapiens
  CDR3 for alpha chain variable domain of TCR clone 250480 (TRAV1-2, TRAJ9)
RAALNTGGFKTIL

SEQ ID NO: 500960 - protein, 14 aa, Homo sapiens
  CDR3 for beta chain variable domain of TCR clone 250480 (TRBV13, TRBJ2-3)
CASSSGSPTDTQYF

SEQ ID NO: 500961 - protein, 16 aa, Homo sapiens
  CDR3 for alpha chain variable domain of TCR clone 250481 (TRAV1-1, TRAJ28)
CAVRDDSGAGSYQLAF

SEQ ID NO: 500962 - protein, 12 aa, Homo sapiens
  CDR3 for beta chain variable domain of TCR clone 250481 (TRBV11-2, TRBJ2-5)
CASSLDTQTQYF

SEQ ID NO: 500963 - protein, 18 aa, Homo sapiens
  CDR3 for alpha chain variable domain of TCR clone 250482 (TRAV13-1, TRAJ10)
CAASKGRAVTGGGNKLTF

SEQ ID NO: 500964 - protein, 17 aa, Homo sapiens
  CDR3 for beta chain variable domain of TCR clone 250482 (TRBV13, TRBJ2-3)
CASSLSRVAGGRNTQYF

SEQ ID NO: 500965 - protein, 14 aa, Homo sapiens
  CDR3 for alpha chain variable domain of TCR clone 250483 (TRAV4, TRAJ26)
CLVGPPNYGQNFVF

SEQ ID NO: 500966 - protein, 17 aa, Homo sapiens
  CDR3 for beta chain variable domain of TCR clone 250483 (TRBV24-1, TRBJ2-1)
CATSDVSTSGTDNEQFF

SEQ ID NO: 500967 - protein, 15 aa, Homo sapiens
  CDR3 for alpha chain variable domain of TCR clone 250484 (TRAV2, TRAJ15)
CAVEDRGQAGTALIF

SEQ ID NO: 500968 - protein, 16 aa, Homo sapiens
  CDR3 for beta chain variable domain of TCR clone 250484 (TRBV9, TRBJ2-1)
CASSVGGGGNYNEQFF

SEQ ID NO: 500969 - protein, 12 aa, Homo sapiens
  CDR3 for alpha chain variable domain of TCR clone 250485 (TRAV13-1, TRAJ20)
CAARQNDYKLSF

SEQ ID NO: 500970 - protein, 14 aa, Homo sapiens
  CDR3 for beta chain variable domain of TCR clone 250485 (TRBV5-1, TRBJ2-7)
CASSFASGVNGQYF

SEQ ID NO: 500971 - protein, 15 aa, Homo sapiens
  CDR3 for alpha chain variable domain of TCR clone 250486 (TRAV12-3, TRAJ10)
CASYILTGGGNKLTY

SEQ ID NO: 500972 - protein, 15 aa, Homo sapiens
  CDR3 for beta chain variable domain of TCR clone 250486 (TRBV7-2, TRBJ1-6)
CASSLGPDRGMPLHF

SEQ ID NO: 500973 - protein, 18 aa, Homo sapiens
  CDR3 for alpha chain variable domain of TCR clone 250487 (TRAV21, TRAJ52)
CAVRPSPAGGTSYGKLTF

SEQ ID NO: 500974 - protein, 13 aa, Homo sapiens
  CDR3 for beta chain variable domain of TCR clone 250487 (TRBV20-1, TRBJ1-1)
CSAGVGGNTEAFF

SEQ ID NO: 500975 - protein, 16 aa, Homo sapiens
  CDR3 for alpha chain variable domain of TCR clone 250488 (TRAV13-1, TRAJ48)
CAASIFGNFGNEKLTF

SEQ ID NO: 500976 - protein, 14 aa, Homo sapiens
  CDR3 for beta chain variable domain of TCR clone 250488 (TRBV7-9, TRBJ2-2)
CASSLVQDTGELFF

SEQ ID NO: 500977 - protein, 14 aa, Homo sapiens
  CDR3 for alpha chain variable domain of TCR clone 250489 (TRAV38-1, TRAJ35)
CAFLTIGFGNVLHC

SEQ ID NO: 500978 - protein, 17 aa, Homo sapiens
  CDR3 for beta chain variable domain of TCR clone 250489 (TRBV28, TRBJ1-1)
CASSGDLLTESNTEAFF

SEQ ID NO: 500979 - protein, 15 aa, Homo sapiens
  CDR3 for alpha chain variable domain of TCR clone 250490 (TRAV35, TRAJ52)
CAGPRGGTSYGKLTF

SEQ ID NO: 500980 - protein, 12 aa, Homo sapiens
  CDR3 for beta chain variable domain of TCR clone 250490 (TRBV28, TRBJ2-3)
CASSLYRDTQYF

SEQ ID NO: 500981 - protein, 12 aa, Homo sapiens
  CDR3 for alpha chain variable domain of TCR clone 250491 (TRAV21, TRAJ6)
CAVNGGSYIPTF

SEQ ID NO: 500982 - protein, 13 aa, Homo sapiens
  CDR3 for beta chain variable domain of TCR clone 250491 (TRBV11-2, TRBJ1-1)
CASSFTENTEAFF

SEQ ID NO: 500983 - protein, 16 aa, Homo sapiens
  CDR3 for alpha chain variable domain of TCR clone 250492 (TRAV14/DV4, TRAJ53)
CAMREGGGGSNYKLTF

SEQ ID NO: 500984 - protein, 14 aa, Homo sapiens
  CDR3 for beta chain variable domain of TCR clone 250492 (TRBV7-3, TRBJ1-1)
CASSPTGGVSEAFF

SEQ ID NO: 500985 - protein, 11 aa, Homo sapiens
  CDR3 for alpha chain variable domain of TCR clone 250493 (TRAV12-1, TRAJ21)
CVVNNFNKFYF

SEQ ID NO: 500986 - protein, 15 aa, Homo sapiens
  CDR3 for beta chain variable domain of TCR clone 250493 (TRBV4-1, TRBJ1-4)
YASSDTGGTNEKLFF

SEQ ID NO: 500987 - protein, 13 aa, Homo sapiens
  CDR3 for alpha chain variable domain of TCR clone 250494 (TRAV8-6, TRAJ21)
CAVSPSSHNKFYF

SEQ ID NO: 500988 - protein, 14 aa, Homo sapiens
  CDR3 for beta chain variable domain of TCR clone 250494 (TRBV7-9, TRBJ2-5)
CASSLDTARETQYF

SEQ ID NO: 500989 - protein, 13 aa, Homo sapiens
  CDR3 for alpha chain variable domain of TCR clone 250495 (TRAV26-1, TRAJ20)
CIVRVESDYKLSF

SEQ ID NO: 500990 - protein, 11 aa, Homo sapiens
  CDR3 for beta chain variable domain of TCR clone 250495 (TRBV7-3, TRBJ2-2)
CASSLNSGGLA

SEQ ID NO: 500991 - protein, 11 aa, Homo sapiens
  CDR3 for alpha chain variable domain of TCR clone 250496 (TRAV16, TRAJ33)
CALHSNYQLIW

SEQ ID NO: 500992 - protein, 16 aa, Homo sapiens
  CDR3 for beta chain variable domain of TCR clone 250496 (TRBV24-1, TRBJ2-3)
CATSDRRQDLTDTQYF

SEQ ID NO: 500993 - protein, 12 aa, Homo sapiens
  CDR3 for alpha chain variable domain of TCR clone 250497 (TRAV3, TRAJ20)
CAVRDPDYKLSF

SEQ ID NO: 500994 - protein, 13 aa, Homo sapiens
  CDR3 for beta chain variable domain of TCR clone 250497 (TRBV9, TRBJ2-1)
CASSAGQGGDQFF

SEQ ID NO: 500995 - protein, 15 aa, Homo sapiens
  CDR3 for alpha chain variable domain of TCR clone 250498 (TRAV8-2, TRAJ28)
CVVSESGAGSYQLTF

SEQ ID NO: 500996 - protein, 13 aa, Homo sapiens
  CDR3 for beta chain variable domain of TCR clone 250498 (TRBV7-3, TRBJ2-1)
CASSPGSYNEQFF

SEQ ID NO: 500997 - protein, 15 aa, Homo sapiens
  CDR3 for alpha chain variable domain of TCR clone 250499 (TRAV14/DV4, TRAJ48)
CAMTLSNFGNEKLTF

SEQ ID NO: 500998 - protein, 19 aa, Homo sapiens
  CDR3 for beta chain variable domain of TCR clone 250499 (TRBV19, TRBJ2-2)
CASTRPGLAGGRVTGELFF

SEQ ID NO: 500999 - protein, 15 aa, Homo sapiens
  CDR3 for alpha chain variable domain of TCR clone 250500 (TRAV21, TRAJ53)
CATLNSGGSNYKLTF

SEQ ID NO: 501000 - protein, 16 aa, Homo sapiens
  CDR3 for beta chain variable domain of TCR clone 250500 (TRBV20-1, TRBJ1-2)
CSASMGQGVANYGYNF

SEQ ID NO: 501001 - protein, 17 aa, Homo sapiens
  CDR3 for alpha chain variable domain of TCR clone 250501 (TRAV8-4, TRAJ11)
CAVSARGENSGYSTLTF

SEQ ID NO: 501002 - protein, 14 aa, Homo sapiens
  CDR3 for beta chain variable domain of TCR clone 250501 (TRBV20-1, TRBJ2-1)
CSPNDEASYNEQFF

SEQ ID NO: 501003 - protein, 16 aa, Homo sapiens
  CDR3 for alpha chain variable domain of TCR clone 250502 (TRAV12-2, TRAJ40)
CAVIRGGTSGTYKYIF

SEQ ID NO: 501004 - protein, 12 aa, Homo sapiens
  CDR3 for beta chain variable domain of TCR clone 250502 (TRBV6-3, TRBJ2-7)
YASSLTPYEQYF

SEQ ID NO: 501005 - protein, 10 aa, Homo sapiens
  CDR3 for alpha chain variable domain of TCR clone 250503 (TRAV26-1, TRAJ22)
CIAGSRQLTF

SEQ ID NO: 501006 - protein, 13 aa, Homo sapiens
  CDR3 for beta chain variable domain of TCR clone 250503 (TRBV12-4, TRBJ1-2)
CASSLRQGKGYTF

SEQ ID NO: 501007 - protein, 15 aa, Homo sapiens
  CDR3 for alpha chain variable domain of TCR clone 250504 (TRAV27, TRAJ38)
RAARRNAGNNRKLLW

SEQ ID NO: 501008 - protein, 13 aa, Homo sapiens
  CDR3 for beta chain variable domain of TCR clone 250504 (TRBV12-5, TRBJ2-3)
CASGDRQSDTQYF

SEQ ID NO: 501009 - protein, 14 aa, Homo sapiens
  CDR3 for alpha chain variable domain of TCR clone 250505 (TRAV16, TRAJ54)
CALSLIQGAQKLVF

SEQ ID NO: 501010 - protein, 16 aa, Homo sapiens
  CDR3 for beta chain variable domain of TCR clone 250505 (TRBV11-2, TRBJ2-1)
CASSFGGSFVYNEQFF

SEQ ID NO: 501011 - protein, 17 aa, Homo sapiens
  CDR3 for alpha chain variable domain of TCR clone 250506 (TRAV4, TRAJ18)
CLVGERSVGSTLGRLYF

SEQ ID NO: 501012 - protein, 16 aa, Homo sapiens
  CDR3 for beta chain variable domain of TCR clone 250506 (TRBV12-4, TRBJ2-7)
CASRSTGTGPSYEQYF

SEQ ID NO: 501013 - protein, 16 aa, Homo sapiens
  CDR3 for alpha chain variable domain of TCR clone 250507 (TRAV30, TRAJ24)
CGTEIVDADSWGKFQF

SEQ ID NO: 501014 - protein, 14 aa, Homo sapiens
  CDR3 for beta chain variable domain of TCR clone 250507 (TRBV12-5, TRBJ2-5)
CASSSRTHQETQYY

SEQ ID NO: 501015 - protein, 14 aa, Homo sapiens
  CDR3 for alpha chain variable domain of TCR clone 250508 (TRAV1-2, TRAJ8)
CAVREDTGFEKLVF

SEQ ID NO: 501016 - protein, 12 aa, Homo sapiens
  CDR3 for beta chain variable domain of TCR clone 250508 (TRBV4-2, TRBJ1-2)
CASSHRQDGYTF

SEQ ID NO: 501017 - protein, 16 aa, Homo sapiens
  CDR3 for alpha chain variable domain of TCR clone 250509 (TRAV12-2, TRAJ28)
CAVITDSGAGSYQLTF

SEQ ID NO: 501018 - protein, 12 aa, Homo sapiens
  CDR3 for beta chain variable domain of TCR clone 250509 (TRBV9, TRBJ2-2)
CVSSLVTGELFF

SEQ ID NO: 501019 - protein, 13 aa, Homo sapiens
  CDR3 for alpha chain variable domain of TCR clone 250510 (TRAV35, TRAJ32)
CAGVGGATNKLIF

SEQ ID NO: 501020 - protein, 14 aa, Homo sapiens
  CDR3 for beta chain variable domain of TCR clone 250510 (TRBV7-3, TRBJ2-1)
CASSLAGGTNEQFF

SEQ ID NO: 501021 - protein, 16 aa, Homo sapiens
  CDR3 for alpha chain variable domain of TCR clone 250511 (TRAV1-2, TRAJ10)
CAVRGVLTGGGNTLTF

SEQ ID NO: 501022 - protein, 20 aa, Homo sapiens
  CDR3 for beta chain variable domain of TCR clone 250511 (TRBV7-8, TRBJ2-2)
CASSHLFPGPTIHITGELFF

SEQ ID NO: 501023 - protein, 14 aa, Homo sapiens
  CDR3 for alpha chain variable domain of TCR clone 250512 (TRAV8-6, TRAJ49)
CAVSVRYTGNKFYF

SEQ ID NO: 501024 - protein, 19 aa, Homo sapiens
  CDR3 for beta chain variable domain of TCR clone 250512 (TRBV28, TRBJ2-1)
CASSFSIRGSGRTRYEQFF

SEQ ID NO: 501025 - protein, 12 aa, Homo sapiens
  CDR3 for alpha chain variable domain of TCR clone 250513 (TRAV27, TRAJ9)
CAGESGGFKTIF

SEQ ID NO: 501026 - protein, 15 aa, Homo sapiens
  CDR3 for beta chain variable domain of TCR clone 250513 (TRBV5-1, TRBJ2-7)
CASSLGDFTTYEQYF

SEQ ID NO: 501027 - protein, 14 aa, Homo sapiens
  CDR3 for alpha chain variable domain of TCR clone 250514 (TRAV13-1, TRAJ35)
CAASKGGFGNVLHF

SEQ ID NO: 501028 - protein, 14 aa, Homo sapiens
  CDR3 for beta chain variable domain of TCR clone 250514 (TRBV7-9, TRBJ2-1)
CASSPRDSLYEQFF

SEQ ID NO: 501029 - protein, 12 aa, Homo sapiens
  CDR3 for alpha chain variable domain of TCR clone 250515 (TRAV26-1, TRAJ17)
CIVRSACNKLTF

SEQ ID NO: 501030 - protein, 15 aa, Homo sapiens
  CDR3 for beta chain variable domain of TCR clone 250515 (TRBV7-9, TRBJ2-2)
CASGPLDTFPGELFF

SEQ ID NO: 501031 - protein, 14 aa, Homo sapiens
  CDR3 for alpha chain variable domain of TCR clone 250516 (TRAV12-1, TRAJ12)
CVVNRPDSSYKLIF

SEQ ID NO: 501032 - protein, 15 aa, Homo sapiens
  CDR3 for beta chain variable domain of TCR clone 250516 (TRBV5-1, TRBJ1-1)
CASSLGMGTATEAFF

SEQ ID NO: 501033 - protein, 17 aa, Homo sapiens
  CDR3 for alpha chain variable domain of TCR clone 250517 (TRAV14/DV4, TRAJ28)
CAMRGTSSGAGSYQLTF

SEQ ID NO: 501034 - protein, 13 aa, Homo sapiens
  CDR3 for beta chain variable domain of TCR clone 250517 (TRBV28, TRBJ2-5)
CASSFAGGENQYF

SEQ ID NO: 501035 - protein, 11 aa, Homo sapiens
  CDR3 for alpha chain variable domain of TCR clone 250518 (TRAV12-3, TRAJ11)
CAMKGYSTLNF

SEQ ID NO: 501036 - protein, 16 aa, Homo sapiens
  CDR3 for beta chain variable domain of TCR clone 250518 (TRBV11-2, TRBJ2-3)
CASSLGVSGGQDTQYF

SEQ ID NO: 501037 - protein, 15 aa, Homo sapiens
  CDR3 for alpha chain variable domain of TCR clone 250519 (TRAV8-3, TRAJ45)
GASSYSGGGADGLTF

SEQ ID NO: 501038 - protein, 13 aa, Homo sapiens
  CDR3 for beta chain variable domain of TCR clone 250519 (TRBV7-9, TRBJ2-7)
CASSFAGAYEQYF

SEQ ID NO: 501039 - protein, 12 aa, Homo sapiens
  CDR3 for alpha chain variable domain of TCR clone 250520 (TRAV3, TRAJ43)
CAVRDPNNDMRF

SEQ ID NO: 501040 - protein, 17 aa, Homo sapiens
  CDR3 for beta chain variable domain of TCR clone 250520 (TRBV5-1, TRBJ2-7)
CASSNPEGREASYEQYF

SEQ ID NO: 501041 - protein, 13 aa, Homo sapiens
  CDR3 for alpha chain variable domain of TCR clone 250521 (TRAV13-2, TRAJ48)
CAEMDFGNEKLTF

SEQ ID NO: 501042 - protein, 11 aa, Homo sapiens
  CDR3 for beta chain variable domain of TCR clone 250521 (TRBV11-2, TRBJ1-1)
CASSINTEAFF

SEQ ID NO: 501043 - protein, 15 aa, Homo sapiens
  CDR3 for alpha chain variable domain of TCR clone 250522 (TRAV26-1, TRAJ44)
CIVRIGTGTASKLTF

SEQ ID NO: 501044 - protein, 15 aa, Homo sapiens
  CDR3 for beta chain variable domain of TCR clone 250522 (TRBV7-6, TRBJ2-1)
CASSSLAGEGNDQFF

SEQ ID NO: 501045 - protein, 17 aa, Homo sapiens
  CDR3 for alpha chain variable domain of TCR clone 250523 (TRAV4, TRAJ4)
CLVICFLVATISGFLEQ

SEQ ID NO: 501046 - protein, 14 aa, Homo sapiens
  CDR3 for beta chain variable domain of TCR clone 250523 (TRBV7-2, TRBJ1-1)
CASSFLTGTTEAFF

SEQ ID NO: 501047 - protein, 12 aa, Homo sapiens
  CDR3 for alpha chain variable domain of TCR clone 250524 (TRAV12-1, TRAJ9)
CVVNTGGFKTIF

SEQ ID NO: 501048 - protein, 13 aa, Homo sapiens
  CDR3 for beta chain variable domain of TCR clone 250524 (TRBV5-1, TRBJ2-1)
CASSLGTSNEQFF

SEQ ID NO: 501049 - protein, 16 aa, Homo sapiens
  CDR3 for alpha chain variable domain of TCR clone 250525 (TRAV3, TRAJ10)
CAVRDMNAGGGNKLTF

SEQ ID NO: 501050 - protein, 11 aa, Homo sapiens
  CDR3 for beta chain variable domain of TCR clone 250525 (TRBV20-1, TRBJ1-5)
CSAQGDQPQHF

SEQ ID NO: 501051 - protein, 13 aa, Homo sapiens
  CDR3 for alpha chain variable domain of TCR clone 250526 (TRAV38-1, TRAJ42)
CARWGGSQGNLIF

SEQ ID NO: 501052 - protein, 10 aa, Homo sapiens
  CDR3 for beta chain variable domain of TCR clone 250526 (TRBV2, TRBJ2-5)
SASSAATQYF

SEQ ID NO: 501053 - protein, 21 aa, Homo sapiens
  CDR3 for alpha chain variable domain of TCR clone 250527 (TRAV36/DV7, TRAJ39)
TATQTGDSAIYLPNAGNMLTF

SEQ ID NO: 501054 - protein, 15 aa, Homo sapiens
  CDR3 for beta chain variable domain of TCR clone 250527 (TRBV20-1, TRBJ2-7)
CSAESGTSGAYEQYF

SEQ ID NO: 501055 - protein, 16 aa, Homo sapiens
  CDR3 for alpha chain variable domain of TCR clone 250528 (TRAV12-3, TRAJ53)
CAMSPGSGDSNYKLTF

SEQ ID NO: 501056 - protein, 13 aa, Homo sapiens
  CDR3 for beta chain variable domain of TCR clone 250528 (TRBV7-3, TRBJ1-1)
CASSQDWGAEAFF

SEQ ID NO: 501057 - protein, 12 aa, Homo sapiens
  CDR3 for alpha chain variable domain of TCR clone 250529 (TRAV2, TRAJ10)
CASTGGGNKLTF

SEQ ID NO: 501058 - protein, 19 aa, Homo sapiens
  CDR3 for beta chain variable domain of TCR clone 250529 (TRBV7-2, TRBJ2-2)
CASRGQGRLGSCFLEKALG

SEQ ID NO: 501059 - protein, 13 aa, Homo sapiens
  CDR3 for alpha chain variable domain of TCR clone 250530 (TRAV12-1, TRAJ9)
RVVVNTGGFKTIF

SEQ ID NO: 501060 - protein, 13 aa, Homo sapiens
  CDR3 for beta chain variable domain of TCR clone 250530 (TRBV19, TRBJ1-2)
CASSVPGQDGYTF

SEQ ID NO: 501061 - protein, 17 aa, Homo sapiens
  CDR3 for alpha chain variable domain of TCR clone 250531 (TRAV3, TRAJ42)
CAVRDRDYGGSQGNLIF

SEQ ID NO: 501062 - protein, 15 aa, Homo sapiens
  CDR3 for beta chain variable domain of TCR clone 250531 (TRBV6-6, TRBJ2-7)
CASSYSSGGSYEQYF

SEQ ID NO: 501063 - protein, 12 aa, Homo sapiens
  CDR3 for alpha chain variable domain of TCR clone 250532 (TRAV17, TRAJ39)
CATGAAGNMLTY

SEQ ID NO: 501064 - protein, 14 aa, Homo sapiens
  CDR3 for beta chain variable domain of TCR clone 250532 (TRBV7-9, TRBJ1-2)
CASSRQGANYGYTF

SEQ ID NO: 501065 - protein, 13 aa, Homo sapiens
  CDR3 for alpha chain variable domain of TCR clone 250533 (TRAV38-1, TRAJ56)
CAPPTGANSKLTF

SEQ ID NO: 501066 - protein, 15 aa, Homo sapiens
  CDR3 for beta chain variable domain of TCR clone 250533 (TRBV7-9, TRBJ2-7)
CASSLARGVKNEQYF

SEQ ID NO: 501067 - protein, 13 aa, Homo sapiens
  CDR3 for alpha chain variable domain of TCR clone 250534 (TRAV13-1, TRAJ43)
CAASKNNNNDMRF

SEQ ID NO: 501068 - protein, 15 aa, Homo sapiens
  CDR3 for beta chain variable domain of TCR clone 250534 (TRBV5-1, TRBJ2-5)
CASSLGLAEQETQYF

SEQ ID NO: 501069 - protein, 13 aa, Homo sapiens
  CDR3 for alpha chain variable domain of TCR clone 250535 (TRAV2, TRAJ9)
CAVESTGGLKTIF

SEQ ID NO: 501070 - protein, 15 aa, Homo sapiens
  CDR3 for beta chain variable domain of TCR clone 250535 (TRBV10-3, TRBJ2-1)
CAVTFGGGTDNEQFF

SEQ ID NO: 501071 - protein, 21 aa, Homo sapiens
  CDR3 for alpha chain variable domain of TCR clone 250536 (TRAV1-2, TRAJ9)
CAALNTGGFKTILEQEQDYLL

SEQ ID NO: 501072 - protein, 13 aa, Homo sapiens
  CDR3 for beta chain variable domain of TCR clone 250536 (TRBV19, TRBJ1-2)
CASSVPGQDGYTF

SEQ ID NO: 501073 - protein, 15 aa, Homo sapiens
  CDR3 for alpha chain variable domain of TCR clone 250537 (TRAV17, TRAJ56)
CATEPFTGANSQLTF

SEQ ID NO: 501074 - protein, 15 aa, Homo sapiens
  CDR3 for beta chain variable domain of TCR clone 250537 (TRBV28, TRBJ1-5)
CASSRTGGYVQPQHF

SEQ ID NO: 501075 - protein, 15 aa, Homo sapiens
  CDR3 for alpha chain variable domain of TCR clone 250538 (TRAV35, TRAJ42)
CAGRNYGGSQGNLIF

SEQ ID NO: 501076 - protein, 13 aa, Homo sapiens
  CDR3 for beta chain variable domain of TCR clone 250538 (TRBV4-2, TRBJ1-1)
CASSQAGNTEAFF

SEQ ID NO: 501077 - protein, 14 aa, Homo sapiens
  CDR3 for alpha chain variable domain of TCR clone 250539 (TRAV35, TRAJ22)
YAGLRPGSARQLTF

SEQ ID NO: 501078 - protein, 15 aa, Homo sapiens
  CDR3 for beta chain variable domain of TCR clone 250539 (TRBV12-4, TRBJ2-5)
CTSSTPTGLQETQYF

SEQ ID NO: 501079 - protein, 14 aa, Homo sapiens
  CDR3 for alpha chain variable domain of TCR clone 250540 (TRAV17, TRAJ23)
CATALGGQGGKLIF

SEQ ID NO: 501080 - protein, 16 aa, Homo sapiens
  CDR3 for beta chain variable domain of TCR clone 250540 (TRBV12-4, TRBJ1-5)
CASSRPVGGSNQPQHF

SEQ ID NO: 501081 - protein, 13 aa, Homo sapiens
  CDR3 for alpha chain variable domain of TCR clone 250541 (TRAV29/DV5, TRAJ58)
CAGEETSGSRLTF

SEQ ID NO: 501082 - protein, 15 aa, Homo sapiens
  CDR3 for beta chain variable domain of TCR clone 250541 (TRBV11-2, TRBJ1-6)
CASTGFGAAVSPLHF

SEQ ID NO: 501083 - protein, 13 aa, Homo sapiens
  CDR3 for alpha chain variable domain of TCR clone 250542 (TRAV8-6, TRAJ9)
CAVWDNGGFKTIF

SEQ ID NO: 501084 - protein, 14 aa, Homo sapiens
  CDR3 for beta chain variable domain of TCR clone 250542 (TRBV2, TRBJ2-1)
CASSEALIYNEQFF

SEQ ID NO: 501085 - protein, 11 aa, Homo sapiens
  CDR3 for alpha chain variable domain of TCR clone 250543 (TRAV1-1, TRAJ23)
CAVRQGGKLIF

SEQ ID NO: 501086 - protein, 15 aa, Homo sapiens
  CDR3 for beta chain variable domain of TCR clone 250543 (TRBV11-2, TRBJ2-2)
CASSSDRVNAGELFF

SEQ ID NO: 501087 - protein, 13 aa, Homo sapiens
  CDR3 for alpha chain variable domain of TCR clone 250544 (TRAV35, TRAJ53)
CAGQESSNYKLTF

SEQ ID NO: 501088 - protein, 11 aa, Homo sapiens
  CDR3 for beta chain variable domain of TCR clone 250544 (TRBV29-1, TRBJ2-5)
CSEDRKGTQYF

SEQ ID NO: 501089 - protein, 12 aa, Homo sapiens
  CDR3 for alpha chain variable domain of TCR clone 250545 (TRAV8-3, TRAJ26)
CAGDNYGQNFVF

SEQ ID NO: 501090 - protein, 15 aa, Homo sapiens
  CDR3 for beta chain variable domain of TCR clone 250545 (TRBV6-5, TRBJ2-3)
CASSRSGGARDTQYF

SEQ ID NO: 501091 - protein, 15 aa, Homo sapiens
  CDR3 for alpha chain variable domain of TCR clone 250546 (TRAV13-1, TRAJ16)
CAARYQMARSRSLQG

SEQ ID NO: 501092 - protein, 13 aa, Homo sapiens
  CDR3 for beta chain variable domain of TCR clone 250546 (TRBV4-1, TRBJ2-1)
CASSQAGGDEQFF

SEQ ID NO: 501093 - protein, 14 aa, Homo sapiens
  CDR3 for alpha chain variable domain of TCR clone 250547 (TRAV2, TRAJ29)
CAVESYSGNTPLVF

SEQ ID NO: 501094 - protein, 15 aa, Homo sapiens
  CDR3 for beta chain variable domain of TCR clone 250547 (TRBV6-3, TRBJ2-7)
CASSSPGTVFYEQYF

SEQ ID NO: 501095 - protein, 14 aa, Homo sapiens
  CDR3 for alpha chain variable domain of TCR clone 250548 (TRAV29/DV5, TRAJ29)
CSARSNSGNTPLVF

SEQ ID NO: 501096 - protein, 17 aa, Homo sapiens
  CDR3 for beta chain variable domain of TCR clone 250548 (TRBV4-2, TRBJ2-1)
CASSQVSGLAMNNEQFF

SEQ ID NO: 501097 - protein, 12 aa, Homo sapiens
  CDR3 for alpha chain variable domain of TCR clone 250549 (TRAV3, TRAJ39)
CAVIEWSNMLTF

SEQ ID NO: 501098 - protein, 14 aa, Homo sapiens
  CDR3 for beta chain variable domain of TCR clone 250549 (TRBV7-8, TRBJ2-3)
CTSSFPDGQDTQYF

SEQ ID NO: 501099 - protein, 10 aa, Homo sapiens
  CDR3 for alpha chain variable domain of TCR clone 250550 (TRAV20, TRAJ22)
CAAPARRLTF

SEQ ID NO: 501100 - protein, 14 aa, Homo sapiens
  CDR3 for beta chain variable domain of TCR clone 250550 (TRBV19, TRBJ2-1)
CASSMGSGATEQFF

SEQ ID NO: 501101 - protein, 18 aa, Homo sapiens
  CDR3 for alpha chain variable domain of TCR clone 250551 (TRAV2, )
CAVGTSNSGYPEPLPCRV

SEQ ID NO: 501102 - protein, 13 aa, Homo sapiens
  CDR3 for beta chain variable domain of TCR clone 250551 (TRBV4-1, TRBJ2-1)
CASSQEVQYEQFF

SEQ ID NO: 501103 - protein, 18 aa, Homo sapiens
  CDR3 for alpha chain variable domain of TCR clone 250552 (TRAV8-6, TRAJ52)
CAVSRANAGGTSYGKLTF

SEQ ID NO: 501104 - protein, 14 aa, Homo sapiens
  CDR3 for beta chain variable domain of TCR clone 250552 (TRBV25-1, TRBJ1-1)
CASTHLGGNTEAFF

SEQ ID NO: 501105 - protein, 11 aa, Homo sapiens
  CDR3 for alpha chain variable domain of TCR clone 250553 (TRAV3, TRAJ21)
CAVGNFTKFYF

SEQ ID NO: 501106 - protein, 16 aa, Homo sapiens
  CDR3 for beta chain variable domain of TCR clone 250553 (TRBV7-6, TRBJ2-1)
CASSAPGPSSYNEQFF

SEQ ID NO: 501107 - protein, 10 aa, Homo sapiens
  CDR3 for alpha chain variable domain of TCR clone 250554 (TRAV38-2/DV8, TRAJ40)
CASGTYKYIF

SEQ ID NO: 501108 - protein, 14 aa, Homo sapiens
  CDR3 for beta chain variable domain of TCR clone 250554 (TRBV7-2, TRBJ2-7)
CASSPKTSFYEQYF

SEQ ID NO: 501109 - protein, 17 aa, Homo sapiens
  CDR3 for alpha chain variable domain of TCR clone 250555 (TRAV3, TRAJ42)
CAVRDRDYGGSQGNLIF

SEQ ID NO: 501110 - protein, 12 aa, Homo sapiens
  CDR3 for beta chain variable domain of TCR clone 250555 (TRBV7-3, TRBJ2-7)
CASSIKREEQYF

SEQ ID NO: 501111 - protein, 14 aa, Homo sapiens
  CDR3 for alpha chain variable domain of TCR clone 250556 (TRAV12-2, TRAJ36)
CAVKISTGANNLFF

SEQ ID NO: 501112 - protein, 14 aa, Homo sapiens
  CDR3 for beta chain variable domain of TCR clone 250556 (TRBV25-1, TRBJ1-2)
CASNDTTGVVGYTH

SEQ ID NO: 501113 - protein, 16 aa, Homo sapiens
  CDR3 for alpha chain variable domain of TCR clone 250557 (TRAV3, TRAJ37)
CAVRPHGSGNTGNESL

SEQ ID NO: 501114 - protein, 14 aa, Homo sapiens
  CDR3 for beta chain variable domain of TCR clone 250557 (TRBV25-1, TRBJ1-1)
CASTHLGGNTEAFF

SEQ ID NO: 501115 - protein, 15 aa, Homo sapiens
  CDR3 for alpha chain variable domain of TCR clone 250558 (TRAV8-3, TRAJ23)
CAVGDRYNQGGKLIV

SEQ ID NO: 501116 - protein, 22 aa, Homo sapiens
  CDR3 for beta chain variable domain of TCR clone 250558 (TRBV29-1, TRBJ2-5)
TVSNMSPEDSSIYLCSAGTQYF

SEQ ID NO: 501117 - protein, 13 aa, Homo sapiens
  CDR3 for alpha chain variable domain of TCR clone 250559 (TRAV1-2, TRAJ9)
CAALNTGGFKTIF

SEQ ID NO: 501118 - protein, 15 aa, Homo sapiens
  CDR3 for beta chain variable domain of TCR clone 250559 (TRBV11-3, TRBJ2-2)
CASSLGGRPTGELFF

SEQ ID NO: 501119 - protein, 11 aa, Homo sapiens
  CDR3 for alpha chain variable domain of TCR clone 250560 (TRAV27, TRAJ45)
CAGAQEEVLTD

SEQ ID NO: 501120 - protein, 17 aa, Homo sapiens
  CDR3 for beta chain variable domain of TCR clone 250560 (TRBV11-2, TRBJ2-1)
RASSLYPPGVAYNEQFF

SEQ ID NO: 501121 - protein, 10 aa, Homo sapiens
  CDR3 for alpha chain variable domain of TCR clone 250561 (TRAV30, TRAJ16)
CGTGGQKLLF

SEQ ID NO: 501122 - protein, 17 aa, Homo sapiens
  CDR3 for beta chain variable domain of TCR clone 250561 (TRBV11-2, TRBJ2-1)
CASSLYPPGVEYNEQFF

SEQ ID NO: 501123 - protein, 12 aa, Homo sapiens
  CDR3 for alpha chain variable domain of TCR clone 250562 (TRAV17, TRAJ31)
CATEQGNARLMF

SEQ ID NO: 501124 - protein, 11 aa, Homo sapiens
  CDR3 for beta chain variable domain of TCR clone 250562 (TRBV7-9, TRBJ2-1)
CASSLRDRATF

SEQ ID NO: 501125 - protein, 13 aa, Homo sapiens
  CDR3 for alpha chain variable domain of TCR clone 250563 (TRAV12-2, TRAJ39)
CAVNNIAGNMLTF

SEQ ID NO: 501126 - protein, 13 aa, Homo sapiens
  CDR3 for beta chain variable domain of TCR clone 250563 (TRBV2, TRBJ1-5)
CATAGPGNQPQHF

SEQ ID NO: 501127 - protein, 12 aa, Homo sapiens
  CDR3 for alpha chain variable domain of TCR clone 250564 (TRAV10, TRAJ34)
CVVRGKHRQAHL

SEQ ID NO: 501128 - protein, 14 aa, Homo sapiens
  CDR3 for beta chain variable domain of TCR clone 250564 (TRBV19, TRBJ2-1)
CASPTFVLSGEQFF

SEQ ID NO: 501129 - protein, 12 aa, Homo sapiens
  CDR3 for alpha chain variable domain of TCR clone 250565 (TRAV21, TRAJ56)
CAVGVNRSKLTF

SEQ ID NO: 501130 - protein, 15 aa, Homo sapiens
  CDR3 for beta chain variable domain of TCR clone 250565 (TRBV28, TRBJ1-3)
CASSMGWASGNTIYF

SEQ ID NO: 501131 - protein, 16 aa, Homo sapiens
  CDR3 for alpha chain variable domain of TCR clone 250566 (TRAV36/DV7, TRAJ30)
CAVETYGLDRDDKIIF

SEQ ID NO: 501132 - protein, 14 aa, Homo sapiens
  CDR3 for beta chain variable domain of TCR clone 250566 (TRBV7-2, TRBJ2-7)
CASRSQGAAYEQYF

SEQ ID NO: 501133 - protein, 12 aa, Homo sapiens
  CDR3 for alpha chain variable domain of TCR clone 250567 (TRAV23/DV6, TRAJ18)
CAASMNHRGSTL

SEQ ID NO: 501134 - protein, 15 aa, Homo sapiens
  CDR3 for beta chain variable domain of TCR clone 250567 (TRBV27, TRBJ2-7)
CASGPDQGRLYEQYF

SEQ ID NO: 501135 - protein, 17 aa, Homo sapiens
  CDR3 for alpha chain variable domain of TCR clone 250568 (TRAV36/DV7, TRAJ52)
CAVAQRAGGASYGKLTF

SEQ ID NO: 501136 - protein, 13 aa, Homo sapiens
  CDR3 for beta chain variable domain of TCR clone 250568 (TRBV19, TRBJ1-2)
CASSVPGQDGYTF

SEQ ID NO: 501137 - protein, 14 aa, Homo sapiens
  CDR3 for alpha chain variable domain of TCR clone 250569 (TRAV12-3, TRAJ9)
CALSVETGGFKTIF

SEQ ID NO: 501138 - protein, 14 aa, Homo sapiens
  CDR3 for beta chain variable domain of TCR clone 250569 (TRBV7-2, TRBJ2-7)
CASRSQGAAYEQYF

SEQ ID NO: 501139 - protein, 16 aa, Homo sapiens
  CDR3 for alpha chain variable domain of TCR clone 250570 (TRAV12-2, TRAJ6)
CAAPLAGSGGSYIPTF

SEQ ID NO: 501140 - protein, 16 aa, Homo sapiens
  CDR3 for beta chain variable domain of TCR clone 250570 (TRBV11-2, TRBJ2-2)
CASSLRTGNLIGELFF

SEQ ID NO: 501141 - protein, 13 aa, Homo sapiens
  CDR3 for alpha chain variable domain of TCR clone 250571 (TRAV38-1, TRAJ42)
CARWGGSQGNLIF

SEQ ID NO: 501142 - protein, 13 aa, Homo sapiens
  CDR3 for beta chain variable domain of TCR clone 250571 (TRBV7-2, TRBJ1-2)
CASSSRGAYGYTF

SEQ ID NO: 501143 - protein, 16 aa, Homo sapiens
  CDR3 for alpha chain variable domain of TCR clone 250572 (TRAV30, TRAJ24)
CGTEIVDADSWGKFQF

SEQ ID NO: 501144 - protein, 15 aa, Homo sapiens
  CDR3 for beta chain variable domain of TCR clone 250572 (TRBV15, TRBJ1-5)
CATSRGPVSNQPQHF

SEQ ID NO: 501145 - protein, 14 aa, Homo sapiens
  CDR3 for alpha chain variable domain of TCR clone 250573 (TRAV8-2, TRAJ23)
CVVSDDNQRGKLIF

SEQ ID NO: 501146 - protein, 13 aa, Homo sapiens
  CDR3 for beta chain variable domain of TCR clone 250573 (TRBV7-7, TRBJ2-2)
CASSLTSAGELFF

SEQ ID NO: 501147 - protein, 13 aa, Homo sapiens
  CDR3 for alpha chain variable domain of TCR clone 250574 (TRAV2, TRAJ40)
CAVVTAGTYKYIF

SEQ ID NO: 501148 - protein, 16 aa, Homo sapiens
  CDR3 for beta chain variable domain of TCR clone 250574 (TRBV2, TRBJ2-1)
CASSVGGSLSYNEQFF

SEQ ID NO: 501149 - protein, 18 aa, Homo sapiens
  CDR3 for alpha chain variable domain of TCR clone 250575 (TRAV12-3, TRAJ52)
CAMSVGGADGTSYGKLTF

SEQ ID NO: 501150 - protein, 15 aa, Homo sapiens
  CDR3 for beta chain variable domain of TCR clone 250575 (TRBV27, TRBJ1-6)
CASSFDRGLGSPLHF

SEQ ID NO: 501151 - protein, 14 aa, Homo sapiens
  CDR3 for alpha chain variable domain of TCR clone 250576 (TRAV23/DV6, TRAJ23)
CASGPYNQGGKLIF

SEQ ID NO: 501152 - protein, 17 aa, Homo sapiens
  CDR3 for beta chain variable domain of TCR clone 250576 (TRBV4-2, TRBJ1-1)
CASSKVATGGMNTEAFF

SEQ ID NO: 501153 - protein, 14 aa, Homo sapiens
  CDR3 for alpha chain variable domain of TCR clone 250577 (TRAV1-1, TRAJ27)
CAVIYNTNAGKSTF

SEQ ID NO: 501154 - protein, 15 aa, Homo sapiens
  CDR3 for beta chain variable domain of TCR clone 250577 (TRBV20-1, TRBJ1-5)
CSAKPPGQGPQHQHF

SEQ ID NO: 501155 - protein, 10 aa, Homo sapiens
  CDR3 for alpha chain variable domain of TCR clone 250578 (TRAV30, TRAJ48)
CGIGNEKLTF

SEQ ID NO: 501156 - protein, 17 aa, Homo sapiens
  CDR3 for beta chain variable domain of TCR clone 250578 (TRBV7-2, TRBJ1-4)
CASSFKAGPTTNEKLFF

SEQ ID NO: 501157 - protein, 14 aa, Homo sapiens
  CDR3 for alpha chain variable domain of TCR clone 250579 (TRAV16, TRAJ48)
CALTPGFGNEKLTF

SEQ ID NO: 501158 - protein, 14 aa, Homo sapiens
  CDR3 for beta chain variable domain of TCR clone 250579 (TRBV7-2, TRBJ2-7)
CASSFISGFSEQYF

SEQ ID NO: 501159 - protein, 10 aa, Homo sapiens
  CDR3 for alpha chain variable domain of TCR clone 250580 (TRAV1-2, TRAJ23)
CAGQGGKLIF

SEQ ID NO: 501160 - protein, 15 aa, Homo sapiens
  CDR3 for beta chain variable domain of TCR clone 250580 (TRBV5-1, TRBJ2-3)
CASSVTSGSTDTQYF

SEQ ID NO: 501161 - protein, 15 aa, Homo sapiens
  CDR3 for alpha chain variable domain of TCR clone 250581 (TRAV3, TRAJ22)
CAVRDRGGSASQLTF

SEQ ID NO: 501162 - protein, 18 aa, Homo sapiens
  CDR3 for beta chain variable domain of TCR clone 250581 (TRBV28, TRBJ2-1)
CASSSTSGRANSYNEQFF

SEQ ID NO: 501163 - protein, 18 aa, Homo sapiens
  CDR3 for alpha chain variable domain of TCR clone 250582 (TRAV12-3, TRAJ52)
CAMSVGGAGGASYGKLTF

SEQ ID NO: 501164 - protein, 17 aa, Homo sapiens
  CDR3 for beta chain variable domain of TCR clone 250582 (TRBV27, TRBJ1-6)
CASSFDRGLGSPLHLGT

SEQ ID NO: 501165 - protein, 13 aa, Homo sapiens
  CDR3 for alpha chain variable domain of TCR clone 250583 (TRAV8-4, TRAJ9)
CAVSETGGFKTIF

SEQ ID NO: 501166 - protein, 15 aa, Homo sapiens
  CDR3 for beta chain variable domain of TCR clone 250583 (TRBV6-3, TRBJ2-7)
CASSSPGTVFYEQYF

SEQ ID NO: 501167 - protein, 14 aa, Homo sapiens
  CDR3 for alpha chain variable domain of TCR clone 250584 (TRAV12-2, TRAJ9)
CAVNMEGGGFKTTF

SEQ ID NO: 501168 - protein, 14 aa, Homo sapiens
  CDR3 for beta chain variable domain of TCR clone 250584 (TRBV2, TRBJ2-5)
CASSEVLAQETQYF

SEQ ID NO: 501169 - protein, 13 aa, Homo sapiens
  CDR3 for alpha chain variable domain of TCR clone 250585 (TRAV13-2, TRAJ13)
CAERPGGYQKVTF

SEQ ID NO: 501170 - protein, 15 aa, Homo sapiens
  CDR3 for beta chain variable domain of TCR clone 250585 (TRBV2, TRBJ2-3)
CASSDFEKATDTQYF

SEQ ID NO: 501171 - protein, 17 aa, Homo sapiens
  CDR3 for alpha chain variable domain of TCR clone 250586 (TRAV3, TRAJ42)
CAVRDRDYGGSQGNFIF

SEQ ID NO: 501172 - protein, 16 aa, Homo sapiens
  CDR3 for beta chain variable domain of TCR clone 250586 (TRBV5-4, TRBJ2-3)
CASQQPGAGGADTQYF

SEQ ID NO: 501173 - protein, 12 aa, Homo sapiens
  CDR3 for alpha chain variable domain of TCR clone 250587 (TRAV20, TRAJ39)
CAVGNAGNMLTF

SEQ ID NO: 501174 - protein, 14 aa, Homo sapiens
  CDR3 for beta chain variable domain of TCR clone 250587 (TRBV5-4, TRBJ1-1)
CASSLDSRRDEAFF

SEQ ID NO: 501175 - protein, 16 aa, Homo sapiens
  CDR3 for alpha chain variable domain of TCR clone 250588 (TRAV29/DV5, TRAJ36)
CAASAHYQSGAYNLFF

SEQ ID NO: 501176 - protein, 16 aa, Homo sapiens
  CDR3 for beta chain variable domain of TCR clone 250588 (TRBV4-2, TRBJ2-3)
CASSQELAGDTDTQYF

SEQ ID NO: 501177 - protein, 15 aa, Homo sapiens
  CDR3 for alpha chain variable domain of TCR clone 250589 (TRAV3, TRAJ22)
CAVRDRGGSARQLTF

SEQ ID NO: 501178 - protein, 13 aa, Homo sapiens
  CDR3 for beta chain variable domain of TCR clone 250589 (TRBV7-8, TRBJ1-1)
CASSSDANTEAFF

SEQ ID NO: 501179 - protein, 14 aa, Homo sapiens
  CDR3 for alpha chain variable domain of TCR clone 250590 (TRAV13-1, TRAJ48)
CAASRSFGNEKLTF

SEQ ID NO: 501180 - protein, 14 aa, Homo sapiens
  CDR3 for beta chain variable domain of TCR clone 250590 (TRBV11-2, TRBJ2-5)
CASRPLAGRETQYF

SEQ ID NO: 501181 - protein, 12 aa, Homo sapiens
  CDR3 for alpha chain variable domain of TCR clone 250591 (TRAV35, TRAJ39)
LAPNNAGNMLTF

SEQ ID NO: 501182 - protein, 13 aa, Homo sapiens
  CDR3 for beta chain variable domain of TCR clone 250591 (TRBV10-3, TRBJ2-7)
CASKLAVNYEQYF

SEQ ID NO: 501183 - protein, 14 aa, Homo sapiens
  CDR3 for alpha chain variable domain of TCR clone 250592 (TRAV26-1, TRAJ34)
CIVRVAYNTDKLIF

SEQ ID NO: 501184 - protein, 15 aa, Homo sapiens
  CDR3 for beta chain variable domain of TCR clone 250592 (TRBV20-1, TRBJ2-7)
GSARVPAAYFYEQYF

SEQ ID NO: 501185 - protein, 15 aa, Homo sapiens
  CDR3 for alpha chain variable domain of TCR clone 250593 (TRAV29/DV5, TRAJ40)
CAASEGTSGTYKYIF

SEQ ID NO: 501186 - protein, 15 aa, Homo sapiens
  CDR3 for beta chain variable domain of TCR clone 250593 (TRBV27, TRBJ1-5)
CASKIQGAGDQPQHF

SEQ ID NO: 501187 - protein, 17 aa, Homo sapiens
  CDR3 for alpha chain variable domain of TCR clone 250594 (TRAV23/DV6, TRAJ58)
CAARLLRGETSGSRLTF

SEQ ID NO: 501188 - protein, 13 aa, Homo sapiens
  CDR3 for beta chain variable domain of TCR clone 250594 (TRBV12-4, TRBJ2-7)
CASSPTETYEQYF

SEQ ID NO: 501189 - protein, 12 aa, Homo sapiens
  CDR3 for alpha chain variable domain of TCR clone 250595 (TRAV21, TRAJ49)
CAVRNTGNQFYF

SEQ ID NO: 501190 - protein, 12 aa, Homo sapiens
  CDR3 for beta chain variable domain of TCR clone 250595 (TRBV7-9, TRBJ2-7)
CATRTDAYVQYF

SEQ ID NO: 501191 - protein, 10 aa, Homo sapiens
  CDR3 for alpha chain variable domain of TCR clone 250596 (TRAV3, TRAJ5)
RKTGRRALTF

SEQ ID NO: 501192 - protein, 15 aa, Homo sapiens
  CDR3 for beta chain variable domain of TCR clone 250596 (TRBV7-8, TRBJ2-1)
CASSLADSLYNEQFF

SEQ ID NO: 501193 - protein, 18 aa, Homo sapiens
  CDR3 for alpha chain variable domain of TCR clone 250597 (TRAV3, TRAJ42)
CAVRDPENYGGSQGNLIF

SEQ ID NO: 501194 - protein, 13 aa, Homo sapiens
  CDR3 for beta chain variable domain of TCR clone 250597 (TRBV7-2, TRBJ2-2)
CASSLAVTGELFF

SEQ ID NO: 501195 - protein, 16 aa, Homo sapiens
  CDR3 for alpha chain variable domain of TCR clone 250598 (TRAV17, TRAJ54)
CATDSDIIQGAQKLVF

SEQ ID NO: 501196 - protein, 14 aa, Homo sapiens
  CDR3 for beta chain variable domain of TCR clone 250598 (TRBV25-1, TRBJ2-7)
CASSEYRAPHEQYF

SEQ ID NO: 501197 - protein, 10 aa, Homo sapiens
  CDR3 for alpha chain variable domain of TCR clone 250599 (TRAV1-2, TRAJ18)
CAVRGEAQPW

SEQ ID NO: 501198 - protein, 11 aa, Homo sapiens
  CDR3 for beta chain variable domain of TCR clone 250599 (TRBV29-1, TRBJ2-5)
CSEDRTGTQYF

SEQ ID NO: 501199 - protein, 14 aa, Homo sapiens
  CDR3 for alpha chain variable domain of TCR clone 250600 (TRAV12-3, TRAJ9)
CAMSVETGGFKTIF

SEQ ID NO: 501200 - protein, 11 aa, Homo sapiens
  CDR3 for beta chain variable domain of TCR clone 250600 (TRBV5-6, TRBJ2-1)
CASSLGGEQFF

SEQ ID NO: 501201 - protein, 12 aa, Homo sapiens
  CDR3 for alpha chain variable domain of TCR clone 250601 (TRAV38-1, TRAJ47)
CAFETYGNKLVF

SEQ ID NO: 501202 - protein, 15 aa, Homo sapiens
  CDR3 for beta chain variable domain of TCR clone 250601 (TRBV5-7, TRBJ2-7)
GASSGGSPVPYEQYF

SEQ ID NO: 501203 - protein, 20 aa, Homo sapiens
  CDR3 for alpha chain variable domain of TCR clone 250602 (TRAV12-1, TRAJ42)
SSVIQPPTSVKGGSQGNLIF

SEQ ID NO: 501204 - protein, 15 aa, Homo sapiens
  CDR3 for beta chain variable domain of TCR clone 250602 (TRBV5-1, TRBJ1-2)
CASSYPGTGSSGYTF

SEQ ID NO: 501205 - protein, 15 aa, Homo sapiens
  CDR3 for alpha chain variable domain of TCR clone 250603 (TRAV12-3, TRAJ13)
CAMSARSGGYQKVTF

SEQ ID NO: 501206 - protein, 16 aa, Homo sapiens
  CDR3 for beta chain variable domain of TCR clone 250603 (TRBV20-1, TRBJ2-1)
CSARDIKKGMKNGKLL

SEQ ID NO: 501207 - protein, 13 aa, Homo sapiens
  CDR3 for alpha chain variable domain of TCR clone 250604 (TRAV30, TRAJ53)
CGTVTGSNYKLTF

SEQ ID NO: 501208 - protein, 13 aa, Homo sapiens
  CDR3 for beta chain variable domain of TCR clone 250604 (TRBV4-2, TRBJ1-1)
CASSQAGNTEAFF

SEQ ID NO: 501209 - protein, 13 aa, Homo sapiens
  CDR3 for alpha chain variable domain of TCR clone 250605 (TRAV8-6, TRAJ48)
CAGVNFGNGKLTF

SEQ ID NO: 501210 - protein, 16 aa, Homo sapiens
  CDR3 for beta chain variable domain of TCR clone 250605 (TRBV4-2, TRBJ2-6)
CASSQARSSGANVLTF

SEQ ID NO: 501211 - protein, 12 aa, Homo sapiens
  CDR3 for alpha chain variable domain of TCR clone 250606 (TRAV8-4, TRAJ43)
CAVSVNNNDMRF

SEQ ID NO: 501212 - protein, 13 aa, Homo sapiens
  CDR3 for beta chain variable domain of TCR clone 250606 (TRBV4-1, TRBJ1-1)
CASSRKMNTEAFF

SEQ ID NO: 501213 - protein, 14 aa, Homo sapiens
  CDR3 for alpha chain variable domain of TCR clone 250607 (TRAV1-2, TRAJ16)
CAVNRFSDGQKLLF

SEQ ID NO: 501214 - protein, 16 aa, Homo sapiens
  CDR3 for beta chain variable domain of TCR clone 250607 (TRBV9, TRBJ2-1)
CASSVGCGGNYNEQFF

SEQ ID NO: 501215 - protein, 18 aa, Homo sapiens
  CDR3 for alpha chain variable domain of TCR clone 250608 (TRAV21, TRAJ52)
CAVRPSPAGGTSYGKLTF

SEQ ID NO: 501216 - protein, 14 aa, Homo sapiens
  CDR3 for beta chain variable domain of TCR clone 250608 (TRBV18, TRBJ2-5)
CASSPRASSETQYF

SEQ ID NO: 501217 - protein, 14 aa, Homo sapiens
  CDR3 for alpha chain variable domain of TCR clone 250609 (TRAV12-3, TRAJ10)
SYLPLTGGGNKLTF

SEQ ID NO: 501218 - protein, 15 aa, Homo sapiens
  CDR3 for beta chain variable domain of TCR clone 250609 (TRBV7-9, TRBJ1-6)
CASSSPGRGNSPLHF

SEQ ID NO: 501219 - protein, 14 aa, Homo sapiens
  CDR3 for alpha chain variable domain of TCR clone 250610 (TRAV8-6, TRAJ13)
CAVSDRGGYQKVTF

SEQ ID NO: 501220 - protein, 14 aa, Homo sapiens
  CDR3 for beta chain variable domain of TCR clone 250610 (TRBV7-2, TRBJ1-1)
CASSFLTGTTEAFF

SEQ ID NO: 501221 - protein, 16 aa, Homo sapiens
  CDR3 for alpha chain variable domain of TCR clone 250611 (TRAV26-2, TRAJ57)
CILRDVGPGGTEKLVF

SEQ ID NO: 501222 - protein, 13 aa, Homo sapiens
  CDR3 for beta chain variable domain of TCR clone 250611 (TRBV18, TRBJ2-3)
CASSPGVTDTQYC

SEQ ID NO: 501223 - protein, 10 aa, Homo sapiens
  CDR3 for alpha chain variable domain of TCR clone 250612 (TRAV8-4, TRAJ43)
CAVSADDMRF

SEQ ID NO: 501224 - protein, 15 aa, Homo sapiens
  CDR3 for beta chain variable domain of TCR clone 250612 (TRBV5-1, TRBJ2-3)
CASSLTSGSTDTQYF

SEQ ID NO: 501225 - protein, 17 aa, Homo sapiens
  CDR3 for alpha chain variable domain of TCR clone 250613 (TRAV1-1, TRAJ4)
CALYNKLIFGAGTRLAV

SEQ ID NO: 501226 - protein, 15 aa, Homo sapiens
  CDR3 for beta chain variable domain of TCR clone 250613 (TRBV7-2, TRBJ2-2)
CASSTRTGYTGELFF

SEQ ID NO: 501227 - protein, 16 aa, Homo sapiens
  CDR3 for alpha chain variable domain of TCR clone 250614 (TRAV26-2, TRAJ48)
CILRPPFNFGNEKLNF

SEQ ID NO: 501228 - protein, 16 aa, Homo sapiens
  CDR3 for beta chain variable domain of TCR clone 250614 (TRBV20-1, TRBJ1-2)
CSASMGQGVANYGYTF

SEQ ID NO: 501229 - protein, 15 aa, Homo sapiens
  CDR3 for alpha chain variable domain of TCR clone 250615 (TRAV4, TRAJ39)
CLVGPNNNAGNMLTF

SEQ ID NO: 501230 - protein, 14 aa, Homo sapiens
  CDR3 for beta chain variable domain of TCR clone 250615 (TRBV13, TRBJ2-5)
CASSLERVGETQYF

SEQ ID NO: 501231 - protein, 14 aa, Homo sapiens
  CDR3 for alpha chain variable domain of TCR clone 250616 (TRAV8-4, TRAJ9)
CAGRINNGGFKTIF

SEQ ID NO: 501232 - protein, 15 aa, Homo sapiens
  CDR3 for beta chain variable domain of TCR clone 250616 (TRBV10-2, TRBJ2-6)
CASSEQGTGANVLTF

SEQ ID NO: 501233 - protein, 18 aa, Homo sapiens
  CDR3 for alpha chain variable domain of TCR clone 250617 (TRAV26-1, TRAJ5)
CIVRVVPPRDTGRRALTF

SEQ ID NO: 501234 - protein, 15 aa, Homo sapiens
  CDR3 for beta chain variable domain of TCR clone 250617 (TRBV7-9, TRBJ2-7)
CASSLPMGQANEQCC

SEQ ID NO: 501235 - protein, 14 aa, Homo sapiens
  CDR3 for alpha chain variable domain of TCR clone 250618 (TRAV17, TRAJ5)
CATVALTGRRALTF

SEQ ID NO: 501236 - protein, 14 aa, Homo sapiens
  CDR3 for beta chain variable domain of TCR clone 250618 (TRBV28, TRBJ2-7)
CASSPYGMAYEQCF

SEQ ID NO: 501237 - protein, 12 aa, Homo sapiens
  CDR3 for alpha chain variable domain of TCR clone 250619 (TRAV21, TRAJ33)
CAKMDSNYKLIW

SEQ ID NO: 501238 - protein, 16 aa, Homo sapiens
  CDR3 for beta chain variable domain of TCR clone 250619 (TRBV13, TRBJ2-2)
CASSPRTGEHTGELFF

SEQ ID NO: 501239 - protein, 12 aa, Homo sapiens
  CDR3 for alpha chain variable domain of TCR clone 250620 (TRAV3, TRAJ26)
CAVRDYGQNFVF

SEQ ID NO: 501240 - protein, 14 aa, Homo sapiens
  CDR3 for beta chain variable domain of TCR clone 250620 (TRBV19, TRBJ2-1)
CASPTFVLSGEQFF

SEQ ID NO: 501241 - protein, 11 aa, Homo sapiens
  CDR3 for alpha chain variable domain of TCR clone 250621 (TRAV1-2, TRAJ40)
CAVPGTYKYIF

SEQ ID NO: 501242 - protein, 17 aa, Homo sapiens
  CDR3 for beta chain variable domain of TCR clone 250621 (TRBV7-3, TRBJ2-3)
CASSLMKRMRGADTQYF

SEQ ID NO: 501243 - protein, 13 aa, Homo sapiens
  CDR3 for alpha chain variable domain of TCR clone 250622 (TRAV21, TRAJ20)
CAVGLRVDYKLSF

SEQ ID NO: 501244 - protein, 13 aa, Homo sapiens
  CDR3 for beta chain variable domain of TCR clone 250622 (TRBV6-1, TRBJ2-7)
CAGSRDREYEQYF

SEQ ID NO: 501245 - protein, 11 aa, Homo sapiens
  CDR3 for alpha chain variable domain of TCR clone 250623 (TRAV12-1, TRAJ40)
CGASGTYKYIF

SEQ ID NO: 501246 - protein, 15 aa, Homo sapiens
  CDR3 for beta chain variable domain of TCR clone 250623 (TRBV12-4, TRBJ2-1)
CASSPLSGRNNEQFF

SEQ ID NO: 501247 - protein, 13 aa, Homo sapiens
  CDR3 for alpha chain variable domain of TCR clone 250624 (TRAV35, TRAJ42)
CAGFPGSQGNLIF

SEQ ID NO: 501248 - protein, 14 aa, Homo sapiens
  CDR3 for beta chain variable domain of TCR clone 250624 (TRBV25-1, TRBJ1-1)
CASTHLGGNTEAFF

SEQ ID NO: 501249 - protein, 11 aa, Homo sapiens
  CDR3 for alpha chain variable domain of TCR clone 250625 (TRAV1-1, TRAJ20)
CAVFNDYKFSF

SEQ ID NO: 501250 - protein, 16 aa, Homo sapiens
  CDR3 for beta chain variable domain of TCR clone 250625 (TRBV29-1, TRBJ2-2)
CSVEKTSEGNTGELFF

SEQ ID NO: 501251 - protein, 13 aa, Homo sapiens
  CDR3 for alpha chain variable domain of TCR clone 250626 (TRAV12-1, TRAJ26)
CVVRRNYCQNFVF

SEQ ID NO: 501252 - protein, 14 aa, Homo sapiens
  CDR3 for beta chain variable domain of TCR clone 250626 (TRBV4-2, TRBJ2-1)
CASGLDRAYNEQFF

SEQ ID NO: 501253 - protein, 17 aa, Homo sapiens
  CDR3 for alpha chain variable domain of TCR clone 250627 (TRAV3, TRAJ6)
CAVRDGPRAGGSYIPTF

SEQ ID NO: 501254 - protein, 15 aa, Homo sapiens
  CDR3 for beta chain variable domain of TCR clone 250627 (TRBV5-1, TRBJ2-1)
CASSPPRAPTMSSSS

SEQ ID NO: 501255 - protein, 18 aa, Homo sapiens
  CDR3 for alpha chain variable domain of TCR clone 250628 (TRAV21, TRAJ52)
CAVRPSPAGGTSYGKLTF

SEQ ID NO: 501256 - protein, 16 aa, Homo sapiens
  CDR3 for beta chain variable domain of TCR clone 250628 (TRBV27, TRBJ1-1)
CASSSRGRTGYTEAFF

SEQ ID NO: 501257 - protein, 13 aa, Homo sapiens
  CDR3 for alpha chain variable domain of TCR clone 250629 (TRAV12-3, TRAJ7)
CAMSASGNNRLAF

SEQ ID NO: 501258 - protein, 14 aa, Homo sapiens
  CDR3 for beta chain variable domain of TCR clone 250629 (TRBV13, TRBJ2-5)
CASSLGPRGETPYF

SEQ ID NO: 501259 - protein, 12 aa, Homo sapiens
  CDR3 for alpha chain variable domain of TCR clone 250630 (TRAV38-1, TRAJ20)
FAFIWNDYKLSF

SEQ ID NO: 501260 - protein, 11 aa, Homo sapiens
  CDR3 for beta chain variable domain of TCR clone 250630 (TRBV29-1, TRBJ2-5)
CSEDRTGTQYF

SEQ ID NO: 501261 - protein, 18 aa, Homo sapiens
  CDR3 for alpha chain variable domain of TCR clone 250631 (TRAV21, TRAJ52)
CAVRPSPSGCTSYGKLTF

SEQ ID NO: 501262 - protein, 17 aa, Homo sapiens
  CDR3 for beta chain variable domain of TCR clone 250631 (TRBV13, TRBJ2-3)
CASSLSRVAGGRNTQYF

SEQ ID NO: 501263 - protein, 15 aa, Homo sapiens
  CDR3 for alpha chain variable domain of TCR clone 250632 (TRAV26-1, TRAJ20)
CIVRVAGSNDYKLSF

SEQ ID NO: 501264 - protein, 14 aa, Homo sapiens
  CDR3 for beta chain variable domain of TCR clone 250632 (TRBV7-9, TRBJ1-2)
CASSSNRGGDGYTF

SEQ ID NO: 501265 - protein, 22 aa, Homo sapiens
  CDR3 for alpha chain variable domain of TCR clone 250633 (TRAV27, )
CAARRNACNNHIQNPDPAVYQL

SEQ ID NO: 501266 - protein, 13 aa, Homo sapiens
  CDR3 for beta chain variable domain of TCR clone 250633 (TRBV12-5, TRBJ2-3)
CASGDRQSDTQYF

SEQ ID NO: 501267 - protein, 14 aa, Homo sapiens
  CDR3 for alpha chain variable domain of TCR clone 250634 (TRAV12-3, TRAJ10)
SHLPLTGGGNKLTF

SEQ ID NO: 501268 - protein, 16 aa, Homo sapiens
  CDR3 for beta chain variable domain of TCR clone 250634 (TRBV5-4, TRBJ2-2)
CASSLINPGGAGELFF

SEQ ID NO: 501269 - protein, 12 aa, Homo sapiens
  CDR3 for alpha chain variable domain of TCR clone 250635 (TRAV27, TRAJ33)
CAGDGSNYQLIW

SEQ ID NO: 501270 - protein, 14 aa, Homo sapiens
  CDR3 for beta chain variable domain of TCR clone 250635 (TRBV2, TRBJ1-5)
CASSAGGSNQPQHF

SEQ ID NO: 501271 - protein, 14 aa, Homo sapiens
  CDR3 for alpha chain variable domain of TCR clone 250636 (TRAV8-4, TRAJ8)
CAVSVGKGFQKLVF

SEQ ID NO: 501272 - protein, 15 aa, Homo sapiens
  CDR3 for beta chain variable domain of TCR clone 250636 (TRBV2, TRBJ2-3)
CASSGEGTGTDTQYF

SEQ ID NO: 501273 - protein, 11 aa, Homo sapiens
  CDR3 for alpha chain variable domain of TCR clone 250637 (TRAV8-3, TRAJ18)
CAVGGRQRLNP

SEQ ID NO: 501274 - protein, 11 aa, Homo sapiens
  CDR3 for beta chain variable domain of TCR clone 250637 (TRBV28, TRBJ2-6)
CHPGGANVLTF

SEQ ID NO: 501275 - protein, 15 aa, Homo sapiens
  CDR3 for alpha chain variable domain of TCR clone 250638 (TRAV3, TRAJ30)
CAVRDEYGRDDKNIF

SEQ ID NO: 501276 - protein, 16 aa, Homo sapiens
  CDR3 for beta chain variable domain of TCR clone 250638 (TRBV5-1, TRBJ2-5)
CASSLANHRGRETQYF

SEQ ID NO: 501277 - protein, 12 aa, Homo sapiens
  CDR3 for alpha chain variable domain of TCR clone 250639 (TRAV13-1, TRAJ41)
CAAVISGYALNF

SEQ ID NO: 501278 - protein, 16 aa, Homo sapiens
  CDR3 for beta chain variable domain of TCR clone 250639 (TRBV28, TRBJ2-7)
CASSLFFETGGPEQYF

SEQ ID NO: 501279 - protein, 11 aa, Homo sapiens
  CDR3 for alpha chain variable domain of TCR clone 250640 (TRAV12-3, TRAJ27)
CAMANAGKSTF

SEQ ID NO: 501280 - protein, 15 aa, Homo sapiens
  CDR3 for beta chain variable domain of TCR clone 250640 (TRBV5-7, TRBJ1-5)
CASRYGKLWDQPQHF

SEQ ID NO: 501281 - protein, 11 aa, Homo sapiens
  CDR3 for alpha chain variable domain of TCR clone 250641 (TRAV3, TRAJ21)
CAVGNFNKFYF

SEQ ID NO: 501282 - protein, 15 aa, Homo sapiens
  CDR3 for beta chain variable domain of TCR clone 250641 (TRBV5-1, TRBJ2-1)
CASSLEGLAANEQFF

SEQ ID NO: 501283 - protein, 14 aa, Homo sapiens
  CDR3 for alpha chain variable domain of TCR clone 250642 (TRAV26-1, TRAJ34)
CIVRVAYNTDKLIF

SEQ ID NO: 501284 - protein, 14 aa, Homo sapiens
  CDR3 for beta chain variable domain of TCR clone 250642 (TRBV12-5, TRBJ2-5)
CASGSRTHHETQYF

SEQ ID NO: 501285 - protein, 17 aa, Homo sapiens
  CDR3 for alpha chain variable domain of TCR clone 250643 (TRAV3, TRAJ38)
CAVRGCLNAGNNRKLMW

SEQ ID NO: 501286 - protein, 16 aa, Homo sapiens
  CDR3 for beta chain variable domain of TCR clone 250643 (TRBV20-1, TRBJ1-4)
CSAPGQGLLTNEKLFF

SEQ ID NO: 501287 - protein, 15 aa, Homo sapiens
  CDR3 for alpha chain variable domain of TCR clone 250644 (TRAV21, TRAJ53)
CATLNSGGSNYKLTF

SEQ ID NO: 501288 - protein, 15 aa, Homo sapiens
  CDR3 for beta chain variable domain of TCR clone 250644 (TRBV20-1, TRBJ2-7)
CSARDRFSGMDEQYF

SEQ ID NO: 501289 - protein, 14 aa, Homo sapiens
  CDR3 for alpha chain variable domain of TCR clone 250645 (TRAV25, TRAJ35)
FARRMEGFGNVLHC

SEQ ID NO: 501290 - protein, 13 aa, Homo sapiens
  CDR3 for beta chain variable domain of TCR clone 250645 (TRBV7-2, TRBJ1-4)
CASSLAGLEKLFF

SEQ ID NO: 501291 - protein, 14 aa, Homo sapiens
  CDR3 for alpha chain variable domain of TCR clone 250646 (TRAV12-2, TRAJ3)
CAVNSYSSASKIIF

SEQ ID NO: 501292 - protein, 12 aa, Homo sapiens
  CDR3 for beta chain variable domain of TCR clone 250646 (TRBV28, TRBJ2-3)
CASSLYRDTQYF

SEQ ID NO: 501293 - protein, 14 aa, Homo sapiens
  CDR3 for alpha chain variable domain of TCR clone 250647 (TRAV3, TRAJ8)
CAVSLNTGFQKLVF

SEQ ID NO: 501294 - protein, 16 aa, Homo sapiens
  CDR3 for beta chain variable domain of TCR clone 250647 (TRBV19, TRBJ2-1)
CASSKAGPSSYNEQFF

SEQ ID NO: 501295 - protein, 14 aa, Homo sapiens
  CDR3 for alpha chain variable domain of TCR clone 250648 (TRAV38-1, TRAJ57)
CAFMNTGGSEKLVF

SEQ ID NO: 501296 - protein, 12 aa, Homo sapiens
  CDR3 for beta chain variable domain of TCR clone 250648 (TRBV20-1, TRBJ1-5)
YSTSQGNQPQHF

SEQ ID NO: 501297 - protein, 16 aa, Homo sapiens
  CDR3 for alpha chain variable domain of TCR clone 250649 (TRAV1-2, TRAJ10)
CVVRGVLTGGGNKRNF

SEQ ID NO: 501298 - protein, 13 aa, Homo sapiens
  CDR3 for beta chain variable domain of TCR clone 250649 (TRBV4-1, TRBJ2-1)
CASSQVNEYEQFF

SEQ ID NO: 501299 - protein, 15 aa, Homo sapiens
  CDR3 for alpha chain variable domain of TCR clone 250650 (TRAV27, TRAJ52)
CAGAPVGTSYGKLTF

SEQ ID NO: 501300 - protein, 17 aa, Homo sapiens
  CDR3 for beta chain variable domain of TCR clone 250650 (TRBV24-1, TRBJ2-3)
CATSDFIGDPFTDTQYF

SEQ ID NO: 501301 - protein, 22 aa, Homo sapiens
  CDR3 for alpha chain variable domain of TCR clone 250651 (TRAV27, TRAJ41)
CAVRTQIPDIRNPDPAVYQLRD

SEQ ID NO: 501302 - protein, 16 aa, Homo sapiens
  CDR3 for beta chain variable domain of TCR clone 250651 (TRBV5-1, TRBJ2-3)
CASSLGLAVYTDTQYF

SEQ ID NO: 501303 - protein, 17 aa, Homo sapiens
  CDR3 for alpha chain variable domain of TCR clone 250652 (TRAV3, TRAJ38)
CAVRDCLNAGNNRMLIW

SEQ ID NO: 501304 - protein, 13 aa, Homo sapiens
  CDR3 for beta chain variable domain of TCR clone 250652 (TRBV23-1, TRBJ1-4)
CASRGKFNEKLFF

SEQ ID NO: 501305 - protein, 13 aa, Homo sapiens
  CDR3 for alpha chain variable domain of TCR clone 250653 (TRAV17, TRAJ21)
CATDGGNFNKFYF

SEQ ID NO: 501306 - protein, 16 aa, Homo sapiens
  CDR3 for beta chain variable domain of TCR clone 250653 (TRBV7-6, TRBJ2-1)
CASSAPGPSSYNEQFF

SEQ ID NO: 501307 - protein, 14 aa, Homo sapiens
  CDR3 for alpha chain variable domain of TCR clone 250654 (TRAV8-4, TRAJ8)
CAGSVGTGFQKLVF

SEQ ID NO: 501308 - protein, 15 aa, Homo sapiens
  CDR3 for beta chain variable domain of TCR clone 250654 (TRBV2, TRBJ2-3)
CASSGEGTGTDTQYF

SEQ ID NO: 501309 - protein, 17 aa, Homo sapiens
  CDR3 for alpha chain variable domain of TCR clone 250655 (TRAV3, TRAJ42)
CAVRDGDYGGSQGNIIF

SEQ ID NO: 501310 - protein, 15 aa, Homo sapiens
  CDR3 for beta chain variable domain of TCR clone 250655 (TRBV6-6, TRBJ2-7)
CASSYSYGGSYEQYF

SEQ ID NO: 501311 - protein, 15 aa, Homo sapiens
  CDR3 for alpha chain variable domain of TCR clone 250656 (TRAV38-1, TRAJ37)
CAFIHGSGNTGKLIF

SEQ ID NO: 501312 - protein, 13 aa, Homo sapiens
  CDR3 for beta chain variable domain of TCR clone 250656 (TRBV14, TRBJ2-1)
CASSQDRRNEQFF

SEQ ID NO: 501313 - protein, 13 aa, Homo sapiens
  CDR3 for alpha chain variable domain of TCR clone 250657 (TRAV12-2, TRAJ9)
CAVKWAGGFKTIF

SEQ ID NO: 501314 - protein, 15 aa, Homo sapiens
  CDR3 for beta chain variable domain of TCR clone 250657 (TRBV5-1, TRBJ1-4)
CASSWTADSDEKLFF

SEQ ID NO: 501315 - protein, 14 aa, Homo sapiens
  CDR3 for alpha chain variable domain of TCR clone 250658 (TRAV35, TRAJ10)
CAGILTGGGNKLTF

SEQ ID NO: 501316 - protein, 11 aa, Homo sapiens
  CDR3 for beta chain variable domain of TCR clone 250658 (TRBV29-1, TRBJ2-5)
CSEDRTGTQYF

SEQ ID NO: 501317 - protein, 16 aa, Homo sapiens
  CDR3 for alpha chain variable domain of TCR clone 250659 (TRAV3, TRAJ3)
CAVRDRAKSSASKIIF

SEQ ID NO: 501318 - protein, 16 aa, Homo sapiens
  CDR3 for beta chain variable domain of TCR clone 250659 (TRBV4-3, TRBJ2-1)
CASSPALDRGVNEQLF

SEQ ID NO: 501319 - protein, 13 aa, Homo sapiens
  CDR3 for alpha chain variable domain of TCR clone 250660 (TRAV21, TRAJ3)
CCEPYSSASKIIF

SEQ ID NO: 501320 - protein, 15 aa, Homo sapiens
  CDR3 for beta chain variable domain of TCR clone 250660 (TRBV7-3, TRBJ2-1)
CASSPTGGGDVEQFF

SEQ ID NO: 501321 - protein, 12 aa, Homo sapiens
  CDR3 for alpha chain variable domain of TCR clone 250661 (TRAV27, TRAJ49)
CAGVRTGNQFYF

SEQ ID NO: 501322 - protein, 13 aa, Homo sapiens
  CDR3 for beta chain variable domain of TCR clone 250661 (TRBV7-3, TRBJ1-1)
CASSQDWGAEAFF

SEQ ID NO: 501323 - protein, 14 aa, Homo sapiens
  CDR3 for alpha chain variable domain of TCR clone 250662 (TRAV3, TRAJ44)
CAVNNTGTASKLTF

SEQ ID NO: 501324 - protein, 17 aa, Homo sapiens
  CDR3 for beta chain variable domain of TCR clone 250662 (TRBV7-3, TRBJ2-2)
CASSLSGTSGGTRELFF

SEQ ID NO: 501325 - protein, 13 aa, Homo sapiens
  CDR3 for alpha chain variable domain of TCR clone 250663 (TRAV12-2, TRAJ15)
CAVFNQAGTALSF

SEQ ID NO: 501326 - protein, 14 aa, Homo sapiens
  CDR3 for beta chain variable domain of TCR clone 250663 (TRBV7-8, TRBJ1-5)
CQQPGGGADQPQHF

SEQ ID NO: 501327 - protein, 16 aa, Homo sapiens
  CDR3 for alpha chain variable domain of TCR clone 250664 (TRAV30, TRAJ24)
CGTEIVDADSWGKFQF

SEQ ID NO: 501328 - protein, 15 aa, Homo sapiens
  CDR3 for beta chain variable domain of TCR clone 250664 (TRBV19, TRBJ2-2)
CASSLNRGVTGELFF

SEQ ID NO: 501329 - protein, 16 aa, Homo sapiens
  CDR3 for alpha chain variable domain of TCR clone 250665 (TRAV40, TRAJ52)
CLLGNAGGTSYGKLTF

SEQ ID NO: 501330 - protein, 16 aa, Homo sapiens
  CDR3 for beta chain variable domain of TCR clone 250665 (TRBV7-3, TRBJ2-1)
CASSLVSGSSNNEQFF

SEQ ID NO: 501331 - protein, 14 aa, Homo sapiens
  CDR3 for alpha chain variable domain of TCR clone 250666 (TRAV12-2, TRAJ13)
CALKKTGGYQKVTF

SEQ ID NO: 501332 - protein, 17 aa, Homo sapiens
  CDR3 for beta chain variable domain of TCR clone 250666 (TRBV20-1, TRBJ2-2)
CSASGSGQGGLTGELFF

SEQ ID NO: 501333 - protein, 12 aa, Homo sapiens
  CDR3 for alpha chain variable domain of TCR clone 250667 (TRAV23/DV6, TRAJ16)
CAATGTGQKLLF

SEQ ID NO: 501334 - protein, 13 aa, Homo sapiens
  CDR3 for beta chain variable domain of TCR clone 250667 (TRBV27, TRBJ2-7)
CASSLTTGYEQYF

SEQ ID NO: 501335 - protein, 14 aa, Homo sapiens
  CDR3 for alpha chain variable domain of TCR clone 250668 (TRAV8-1, TRAJ4)
CAVKFSGGYNKLIF

SEQ ID NO: 501336 - protein, 22 aa, Homo sapiens
  CDR3 for beta chain variable domain of TCR clone 250668 (TRBV7-3, TRBJ2-5)
GASARDRVSLRPRDPVLRARHA

SEQ ID NO: 501337 - protein, 10 aa, Homo sapiens
  CDR3 for alpha chain variable domain of TCR clone 250669 (TRAV12-1, TRAJ37)
ARGNTGKLIF

SEQ ID NO: 501338 - protein, 15 aa, Homo sapiens
  CDR3 for beta chain variable domain of TCR clone 250669 (TRBV7-2, TRBJ2-3)
CASSLEKGGTDTQYF

SEQ ID NO: 501339 - protein, 14 aa, Homo sapiens
  CDR3 for alpha chain variable domain of TCR clone 250670 (TRAV35, TRAJ50)
CAGHRKTSYDKVII

SEQ ID NO: 501340 - protein, 13 aa, Homo sapiens
  CDR3 for beta chain variable domain of TCR clone 250670 (TRBV7-7, TRBJ2-3)
CASSLSRADTQYF

SEQ ID NO: 501341 - protein, 12 aa, Homo sapiens
  CDR3 for alpha chain variable domain of TCR clone 250671 (TRAV23/DV6, TRAJ17)
CAAKAAGNKLTF

SEQ ID NO: 501342 - protein, 14 aa, Homo sapiens
  CDR3 for beta chain variable domain of TCR clone 250671 (TRBV7-9, TRBJ2-5)
CASSPAQDQETQYF

SEQ ID NO: 501343 - protein, 15 aa, Homo sapiens
  CDR3 for alpha chain variable domain of TCR clone 250672 (TRAV1-2, TRAJ17)
CAVRGYGAAGNKLTF

SEQ ID NO: 501344 - protein, 16 aa, Homo sapiens
  CDR3 for beta chain variable domain of TCR clone 250672 (TRBV7-9, TRBJ1-2)
CASSLGFSSGEDGYTF

SEQ ID NO: 501345 - protein, 23 aa, Homo sapiens
  CDR3 for alpha chain variable domain of TCR clone 250673 (TRAV30, TRAJ43)
CTLRPPSSVTQEPTSAALSDMRF

SEQ ID NO: 501346 - protein, 14 aa, Homo sapiens
  CDR3 for beta chain variable domain of TCR clone 250673 (TRBV4-1, TRBJ2-2)
CASSQAVNTGELFF

SEQ ID NO: 501347 - protein, 14 aa, Homo sapiens
  CDR3 for alpha chain variable domain of TCR clone 250674 (TRAV1-2, TRAJ16)
CAVNRFSNGQKLLF

SEQ ID NO: 501348 - protein, 16 aa, Homo sapiens
  CDR3 for beta chain variable domain of TCR clone 250674 (TRBV27, TRBJ2-2)
CASSFRGLVRTGELFF

SEQ ID NO: 501349 - protein, 14 aa, Homo sapiens
  CDR3 for alpha chain variable domain of TCR clone 250675 (TRAV8-4, TRAJ9)
CAVILNTGGFKTLF

SEQ ID NO: 501350 - protein, 11 aa, Homo sapiens
  CDR3 for beta chain variable domain of TCR clone 250675 (TRBV7-9, TRBJ2-6)
CASPRANVLTF

SEQ ID NO: 501351 - protein, 21 aa, Homo sapiens
  CDR3 for alpha chain variable domain of TCR clone 250676 (TRAV13-1, TRAJ37)
CAATPKEIKRRKTNLWARDNF

SEQ ID NO: 501352 - protein, 13 aa, Homo sapiens
  CDR3 for beta chain variable domain of TCR clone 250676 (TRBV20-1, TRBJ2-7)
CSATSEDSYEQYF

SEQ ID NO: 501353 - protein, 17 aa, Homo sapiens
  CDR3 for alpha chain variable domain of TCR clone 250677 (TRAV12-2, TRAJ4)
CAVNVRPVSGGYNKLVF

SEQ ID NO: 501354 - protein, 17 aa, Homo sapiens
  CDR3 for beta chain variable domain of TCR clone 250677 (TRBV6-3, TRBJ2-1)
CASSYSSGTRGLDEQFF

SEQ ID NO: 501355 - protein, 12 aa, Homo sapiens
  CDR3 for alpha chain variable domain of TCR clone 250678 (TRAV13-1, TRAJ53)
AASGVSNYKLTF

SEQ ID NO: 501356 - protein, 16 aa, Homo sapiens
  CDR3 for beta chain variable domain of TCR clone 250678 (TRBV28, TRBJ2-6)
CASSNRRGSGANVLTF

SEQ ID NO: 501357 - protein, 14 aa, Homo sapiens
  CDR3 for alpha chain variable domain of TCR clone 250679 (TRAV4, TRAJ26)
CLVGPHNYGQNFVF

SEQ ID NO: 501358 - protein, 17 aa, Homo sapiens
  CDR3 for beta chain variable domain of TCR clone 250679 (TRBV24-1, TRBJ2-1)
CATSDVSTSGTYNEHFF

SEQ ID NO: 501359 - protein, 14 aa, Homo sapiens
  CDR3 for alpha chain variable domain of TCR clone 250680 (TRAV8-3, TRAJ4)
CAVGAAGGYNKLIF

SEQ ID NO: 501360 - protein, 14 aa, Homo sapiens
  CDR3 for beta chain variable domain of TCR clone 250680 (TRBV6-1, TRBJ1-6)
CASSEADLISPLHF

SEQ ID NO: 501361 - protein, 14 aa, Homo sapiens
  CDR3 for alpha chain variable domain of TCR clone 250681 (TRAV8-4, TRAJ40)
CAVIPTSGTYKYIF

SEQ ID NO: 501362 - protein, 15 aa, Homo sapiens
  CDR3 for beta chain variable domain of TCR clone 250681 (TRBV7-2, TRBJ2-1)
CASTSASGGYNEQFF

SEQ ID NO: 501363 - protein, 17 aa, Homo sapiens
  CDR3 for alpha chain variable domain of TCR clone 250682 (TRAV3, TRAJ6)
CAVRDGPRAGGSYTPTF

SEQ ID NO: 501364 - protein, 18 aa, Homo sapiens
  CDR3 for beta chain variable domain of TCR clone 250682 (TRBV28, TRBJ1-2)
CASRQQQWKRGSNYGYTF

SEQ ID NO: 501365 - protein, 15 aa, Homo sapiens
  CDR3 for alpha chain variable domain of TCR clone 250683 (TRAV8-3, TRAJ45)
CALSYSGGGADGLTF

SEQ ID NO: 501366 - protein, 13 aa, Homo sapiens
  CDR3 for beta chain variable domain of TCR clone 250683 (TRBV7-3, TRBJ2-1)
CASSLDSYNEQFF

SEQ ID NO: 501367 - protein, 16 aa, Homo sapiens
  CDR3 for alpha chain variable domain of TCR clone 250684 (TRAV3, TRAJ37)
CAVRPHCSGNTGKLIF

SEQ ID NO: 501368 - protein, 15 aa, Homo sapiens
  CDR3 for beta chain variable domain of TCR clone 250684 (TRBV29-1, TRBJ2-7)
CSVEFFDRGSYEQYF

SEQ ID NO: 501369 - protein, 14 aa, Homo sapiens
  CDR3 for alpha chain variable domain of TCR clone 250685 (TRAV1-2, TRAJ16)
CAVKRFSDGQKLLF

SEQ ID NO: 501370 - protein, 13 aa, Homo sapiens
  CDR3 for beta chain variable domain of TCR clone 250685 (TRBV7-6, TRBJ1-2)
CASSLVADYGYTF

SEQ ID NO: 501371 - protein, 15 aa, Homo sapiens
  CDR3 for alpha chain variable domain of TCR clone 250686 (TRAV23/DV6, TRAJ44)
CAASGGTGTASKLTF

SEQ ID NO: 501372 - protein, 15 aa, Homo sapiens
  CDR3 for beta chain variable domain of TCR clone 250686 (TRBV7-2, TRBJ1-2)
CASSPRAGWNYGYTF

SEQ ID NO: 501373 - protein, 13 aa, Homo sapiens
  CDR3 for alpha chain variable domain of TCR clone 250687 (TRAV23/DV6, TRAJ16)
CAASISDGQKLLF

SEQ ID NO: 501374 - protein, 12 aa, Homo sapiens
  CDR3 for beta chain variable domain of TCR clone 250687 (TRBV11-2, TRBJ2-4)
CASSSASGSEYF

SEQ ID NO: 501375 - protein, 13 aa, Homo sapiens
  CDR3 for alpha chain variable domain of TCR clone 250688 (TRAV23/DV6, TRAJ58)
CAARLIRGSRLTF

SEQ ID NO: 501376 - protein, 13 aa, Homo sapiens
  CDR3 for beta chain variable domain of TCR clone 250688 (TRBV2, TRBJ1-6)
CADSGSYNSHLHF

SEQ ID NO: 501377 - protein, 11 aa, Homo sapiens
  CDR3 for alpha chain variable domain of TCR clone 250689 (TRAV26-1, TRAJ37)
CIVRVGRKLIF

SEQ ID NO: 501378 - protein, 15 aa, Homo sapiens
  CDR3 for beta chain variable domain of TCR clone 250689 (TRBV4-3, TRBJ2-7)
CASSQDLGSSYEQYF

SEQ ID NO: 501379 - protein, 16 aa, Homo sapiens
  CDR3 for alpha chain variable domain of TCR clone 250690 (TRAV3, TRAJ37)
CAVRGKGSGNHGKLIF

SEQ ID NO: 501380 - protein, 15 aa, Homo sapiens
  CDR3 for beta chain variable domain of TCR clone 250690 (TRBV7-9, TRBJ1-6)
CASSSPGRGNSPLHF

SEQ ID NO: 501381 - protein, 15 aa, Homo sapiens
  CDR3 for alpha chain variable domain of TCR clone 250691 (TRAV24, TRAJ39)
CAFNGNNNAGNMLTF

SEQ ID NO: 501382 - protein, 15 aa, Homo sapiens
  CDR3 for beta chain variable domain of TCR clone 250691 (TRBV11-2, TRBJ1-6)
CASTLRGTGNSPLHF

SEQ ID NO: 501383 - protein, 14 aa, Homo sapiens
  CDR3 for alpha chain variable domain of TCR clone 250692 (TRAV12-1, TRAJ3)
CGAARYSSASKIIL

SEQ ID NO: 501384 - protein, 15 aa, Homo sapiens
  CDR3 for beta chain variable domain of TCR clone 250692 (TRBV7-2, TRBJ2-6)
CASSREGSGANVLTF

SEQ ID NO: 501385 - protein, 12 aa, Homo sapiens
  CDR3 for alpha chain variable domain of TCR clone 250693 (TRAV12-1, TRAJ40)
CVFYSGTYKYIF

SEQ ID NO: 501386 - protein, 21 aa, Homo sapiens
  CDR3 for beta chain variable domain of TCR clone 250693 (TRBV12-4, TRBJ2-2)
CTSVPAVWWRAPEDGPGSCFF

SEQ ID NO: 501387 - protein, 14 aa, Homo sapiens
  CDR3 for alpha chain variable domain of TCR clone 250694 (TRAV17, TRAJ57)
CATDPQGGSEKLVF

SEQ ID NO: 501388 - protein, 15 aa, Homo sapiens
  CDR3 for beta chain variable domain of TCR clone 250694 (TRBV27, TRBJ2-2)
CSSFRGLVRTGELFF

SEQ ID NO: 501389 - protein, 16 aa, Homo sapiens
  CDR3 for alpha chain variable domain of TCR clone 250695 (TRAV2, TRAJ20)
TTVQWSFRSNDYKLSF

SEQ ID NO: 501390 - protein, 12 aa, Homo sapiens
  CDR3 for beta chain variable domain of TCR clone 250695 (TRBV7-6, TRBJ2-3)
CASSTGTDTQYF

SEQ ID NO: 501391 - protein, 13 aa, Homo sapiens
  CDR3 for alpha chain variable domain of TCR clone 250696 (TRAV12-1, TRAJ34)
CGEPLRNTDKLIF

SEQ ID NO: 501392 - protein, 12 aa, Homo sapiens
  CDR3 for beta chain variable domain of TCR clone 250696 (TRBV11-2, TRBJ2-7)
CASSPPADEQYF

SEQ ID NO: 501393 - protein, 11 aa, Homo sapiens
  CDR3 for alpha chain variable domain of TCR clone 250697 (TRAV12-1, TRAJ3)
CVVSSASKIIF

SEQ ID NO: 501394 - protein, 13 aa, Homo sapiens
  CDR3 for beta chain variable domain of TCR clone 250697 (TRBV7-9, TRBJ1-2)
CASSLKQNYGYTF

SEQ ID NO: 501395 - protein, 14 aa, Homo sapiens
  CDR3 for alpha chain variable domain of TCR clone 250698 (TRAV1-2, TRAJ16)
CAVSRFSDGQKLLF

SEQ ID NO: 501396 - protein, 15 aa, Homo sapiens
  CDR3 for beta chain variable domain of TCR clone 250698 (TRBV9, TRBJ1-6)
CASSVAGTGDSHLHF

SEQ ID NO: 501397 - protein, 14 aa, Homo sapiens
  CDR3 for alpha chain variable domain of TCR clone 250699 (TRAV12-2, TRAJ48)
CAVNAFFGNEKLTF

SEQ ID NO: 501398 - protein, 13 aa, Homo sapiens
  CDR3 for beta chain variable domain of TCR clone 250699 (TRBV7-9, TRBJ1-2)
CASSLKQNYGYTF

SEQ ID NO: 501399 - protein, 15 aa, Homo sapiens
  CDR3 for alpha chain variable domain of TCR clone 250700 (TRAV8-6, TRAJ10)
CAVSDQAGGGNKRTF

SEQ ID NO: 501400 - protein, 15 aa, Homo sapiens
  CDR3 for beta chain variable domain of TCR clone 250700 (TRBV3-1, TRBJ2-5)
CASSANLGGPETQYF

SEQ ID NO: 501401 - protein, 15 aa, Homo sapiens
  CDR3 for alpha chain variable domain of TCR clone 250701 (TRAV12-3, TRAJ6)
CAMSASPGGSYIPTF

SEQ ID NO: 501402 - protein, 16 aa, Homo sapiens
  CDR3 for beta chain variable domain of TCR clone 250701 (TRBV20-1, TRBJ1-2)
CSASMGQGVANYGYTF

SEQ ID NO: 501403 - protein, 11 aa, Homo sapiens
  CDR3 for alpha chain variable domain of TCR clone 250702 (TRAV12-3, TRAJ20)
CAMSYDYKLSF

SEQ ID NO: 501404 - protein, 14 aa, Homo sapiens
  CDR3 for beta chain variable domain of TCR clone 250702 (TRBV7-2, TRBJ2-7)
CAISPKTSFYEQYF

SEQ ID NO: 501405 - protein, 11 aa, Homo sapiens
  CDR3 for alpha chain variable domain of TCR clone 250703 (TRAV29/DV5, TRAJ47)
CAATYGNKLVF

SEQ ID NO: 501406 - protein, 17 aa, Homo sapiens
  CDR3 for beta chain variable domain of TCR clone 250703 (TRBV7-9, TRBJ2-1)
CASSLAASYPSYNEQFF

SEQ ID NO: 501407 - protein, 12 aa, Homo sapiens
  CDR3 for alpha chain variable domain of TCR clone 250704 (TRAV12-2, TRAJ10)
WGVTGGGNKLTL

SEQ ID NO: 501408 - protein, 15 aa, Homo sapiens
  CDR3 for beta chain variable domain of TCR clone 250704 (TRBV20-1, TRBJ2-7)
CSARDRVSGMDEQYF

SEQ ID NO: 501409 - protein, 15 aa, Homo sapiens
  CDR3 for alpha chain variable domain of TCR clone 250705 (TRAV21, TRAJ53)
CATLNSGGSNYKLTF

SEQ ID NO: 501410 - protein, 13 aa, Homo sapiens
  CDR3 for beta chain variable domain of TCR clone 250705 (TRBV19, TRBJ2-7)
CASSTSGSYEQYF

SEQ ID NO: 501411 - protein, 14 aa, Homo sapiens
  CDR3 for alpha chain variable domain of TCR clone 250706 (TRAV14/DV4, TRAJ20)
CAMRESLNDYKLSF

SEQ ID NO: 501412 - protein, 15 aa, Homo sapiens
  CDR3 for beta chain variable domain of TCR clone 250706 (TRBV7-9, TRBJ1-6)
CASSSPGRGNSPLHF

SEQ ID NO: 501413 - protein, 14 aa, Homo sapiens
  CDR3 for alpha chain variable domain of TCR clone 250707 (TRAV12-2, TRAJ13)
RAVKKTGGYQKVTF

SEQ ID NO: 501414 - protein, 15 aa, Homo sapiens
  CDR3 for beta chain variable domain of TCR clone 250707 (TRBV28, TRBJ2-1)
CASRVGLDEYNEQFF

SEQ ID NO: 501415 - protein, 13 aa, Homo sapiens
  CDR3 for alpha chain variable domain of TCR clone 250708 (TRAV8-1, TRAJ32)
CAADGGATNKLIF

SEQ ID NO: 501416 - protein, 18 aa, Homo sapiens
  CDR3 for beta chain variable domain of TCR clone 250708 (TRBV12-3, TRBJ2-2)
CASSLVAGTRGRTGELFF

SEQ ID NO: 501417 - protein, 14 aa, Homo sapiens
  CDR3 for alpha chain variable domain of TCR clone 250709 (TRAV1-2, TRAJ8)
CAGREDTGFQKLVF

SEQ ID NO: 501418 - protein, 15 aa, Homo sapiens
  CDR3 for beta chain variable domain of TCR clone 250709 (TRBV5-4, TRBJ2-5)
CASSLAGGAKETQYF

SEQ ID NO: 501419 - protein, 15 aa, Homo sapiens
  CDR3 for alpha chain variable domain of TCR clone 250710 (TRAV8-3, TRAJ45)
CAPSYSGGGADGLTF

SEQ ID NO: 501420 - protein, 13 aa, Homo sapiens
  CDR3 for beta chain variable domain of TCR clone 250710 (TRBV10-3, TRBJ2-7)
CASKPAVNYEQYF

SEQ ID NO: 501421 - protein, 22 aa, Homo sapiens
  CDR3 for alpha chain variable domain of TCR clone 250711 (TRAV12-3, TRAJ10)
CREEETNSPLGQALSYKWHSIS

SEQ ID NO: 501422 - protein, 11 aa, Homo sapiens
  CDR3 for beta chain variable domain of TCR clone 250711 (TRBV11-2, TRBJ2-2)
CASSLPGELFF

SEQ ID NO: 501423 - protein, 14 aa, Homo sapiens
  CDR3 for alpha chain variable domain of TCR clone 250712 (TRAV12-3, TRAJ33)
CAMSAGDSNYQLIW

SEQ ID NO: 501424 - protein, 13 aa, Homo sapiens
  CDR3 for beta chain variable domain of TCR clone 250712 (TRBV19, TRBJ1-2)
CASSVPGQDGYTF

SEQ ID NO: 501425 - protein, 15 aa, Homo sapiens
  CDR3 for alpha chain variable domain of TCR clone 250713 (TRAV8-4, TRAJ37)
CAVSTRSCNTGKLIF

SEQ ID NO: 501426 - protein, 14 aa, Homo sapiens
  CDR3 for beta chain variable domain of TCR clone 250713 (TRBV7-3, TRBJ2-2)
CASSSGGYTGELFF

SEQ ID NO: 501427 - protein, 11 aa, Homo sapiens
  CDR3 for alpha chain variable domain of TCR clone 250714 (TRAV1-1, TRAJ23)
CAVRQGGKLIF

SEQ ID NO: 501428 - protein, 20 aa, Homo sapiens
  CDR3 for beta chain variable domain of TCR clone 250714 (TRBV7-8, TRBJ2-2)
RASSHLFPGPTIHITGELFF

SEQ ID NO: 501429 - protein, 13 aa, Homo sapiens
  CDR3 for alpha chain variable domain of TCR clone 250715 (TRAV35, TRAJ44)
CAGLSGTASKLTF

SEQ ID NO: 501430 - protein, 15 aa, Homo sapiens
  CDR3 for beta chain variable domain of TCR clone 250715 (TRBV7-9, TRBJ2-5)
CASSLEGGSGETQYF

SEQ ID NO: 501431 - protein, 14 aa, Homo sapiens
  CDR3 for alpha chain variable domain of TCR clone 250716 (TRAV1-2, TRAJ15)
CAVRDRQAGTALLF

SEQ ID NO: 501432 - protein, 17 aa, Homo sapiens
  CDR3 for beta chain variable domain of TCR clone 250716 (TRBV5-5, TRBJ1-2)
CASSLGSLDGQSEGDTF

SEQ ID NO: 501433 - protein, 11 aa, Homo sapiens
  CDR3 for alpha chain variable domain of TCR clone 250717 (TRAV12-2, TRAJ49)
CAVWAGNQFYF

SEQ ID NO: 501434 - protein, 16 aa, Homo sapiens
  CDR3 for beta chain variable domain of TCR clone 250717 (TRBV20-1, TRBJ2-2)
CSASASGIPGAGELFF

SEQ ID NO: 501435 - protein, 13 aa, Homo sapiens
  CDR3 for alpha chain variable domain of TCR clone 250718 (TRAV30, TRAJ31)
CGTEMTNNARLMF

SEQ ID NO: 501436 - protein, 13 aa, Homo sapiens
  CDR3 for beta chain variable domain of TCR clone 250718 (TRBV12-5, TRBJ2-3)
CASGDRQSDTQYF

SEQ ID NO: 501437 - protein, 12 aa, Homo sapiens
  CDR3 for alpha chain variable domain of TCR clone 250719 (TRAV12-3, TRAJ17)
CAMTLTGNKLTF

SEQ ID NO: 501438 - protein, 15 aa, Homo sapiens
  CDR3 for beta chain variable domain of TCR clone 250719 (TRBV20-1, TRBJ2-7)
CSARDRFSGTDEQYF

SEQ ID NO: 501439 - protein, 12 aa, Homo sapiens
  CDR3 for alpha chain variable domain of TCR clone 250720 (TRAV21, TRAJ56)
CAVGVNRSKLTF

SEQ ID NO: 501440 - protein, 13 aa, Homo sapiens
  CDR3 for beta chain variable domain of TCR clone 250720 (TRBV11-2, TRBJ2-1)
CASSLRLTHEQFF

SEQ ID NO: 501441 - protein, 14 aa, Homo sapiens
  CDR3 for alpha chain variable domain of TCR clone 250721 (TRAV3, TRAJ33)
CAVRDMGSNYQLIW

SEQ ID NO: 501442 - protein, 17 aa, Homo sapiens
  CDR3 for beta chain variable domain of TCR clone 250721 (TRBV19, TRBJ2-1)
CASSIWSAQTTHNEQFF

SEQ ID NO: 501443 - protein, 16 aa, Homo sapiens
  CDR3 for alpha chain variable domain of TCR clone 250722 (TRAV3, TRAJ21)
CAVRDIERGNFNKFYF

SEQ ID NO: 501444 - protein, 13 aa, Homo sapiens
  CDR3 for beta chain variable domain of TCR clone 250722 (TRBV4-2, TRBJ1-1)
CACSQAGNTEAFF

SEQ ID NO: 501445 - protein, 14 aa, Homo sapiens
  CDR3 for alpha chain variable domain of TCR clone 250723 (TRAV8-3, TRAJ30)
CAVGDMNRDDKLIF

SEQ ID NO: 501446 - protein, 17 aa, Homo sapiens
  CDR3 for beta chain variable domain of TCR clone 250723 (TRBV19, TRBJ2-2)
CASSRNPGGFGTGELFF

SEQ ID NO: 501447 - protein, 10 aa, Homo sapiens
  CDR3 for alpha chain variable domain of TCR clone 250724 (TRAV2, TRAJ15)
RGQAGTALIF

SEQ ID NO: 501448 - protein, 12 aa, Homo sapiens
  CDR3 for beta chain variable domain of TCR clone 250724 (TRBV11-2, TRBJ2-2)
RASSLGGGELFF

SEQ ID NO: 501449 - protein, 13 aa, Homo sapiens
  CDR3 for alpha chain variable domain of TCR clone 250725 (TRAV12-1, TRAJ43)
CVVSHHNNNDMRF

SEQ ID NO: 501450 - protein, 14 aa, Homo sapiens
  CDR3 for beta chain variable domain of TCR clone 250725 (TRBV5-5, TRBJ2-2)
CASSLLGDTGELFF

SEQ ID NO: 501451 - protein, 12 aa, Homo sapiens
  CDR3 for alpha chain variable domain of TCR clone 250726 (TRAV3, TRAJ27)
CAVRDGAGKSTF

SEQ ID NO: 501452 - protein, 15 aa, Homo sapiens
  CDR3 for beta chain variable domain of TCR clone 250726 (TRBV13, TRBJ2-2)
CASGYRGRRTGELFL

SEQ ID NO: 501453 - protein, 12 aa, Homo sapiens
  CDR3 for alpha chain variable domain of TCR clone 250727 (TRAV13-1, TRAJ27)
CAAHTNAGKSTF

SEQ ID NO: 501454 - protein, 14 aa, Homo sapiens
  CDR3 for beta chain variable domain of TCR clone 250727 (TRBV19, TRBJ2-2)
CASSTLHRSGELFF

SEQ ID NO: 501455 - protein, 15 aa, Homo sapiens
  CDR3 for alpha chain variable domain of TCR clone 250728 (TRAV3, TRAJ22)
CAVRDRGGSARQLTF

SEQ ID NO: 501456 - protein, 13 aa, Homo sapiens
  CDR3 for beta chain variable domain of TCR clone 250728 (TRBV10-3, TRBJ2-7)
CASTLAVNYEQYF

SEQ ID NO: 501457 - protein, 12 aa, Homo sapiens
  CDR3 for alpha chain variable domain of TCR clone 250729 (TRAV2, TRAJ9)
CAVGAGGFKTIF

SEQ ID NO: 501458 - protein, 13 aa, Homo sapiens
  CDR3 for beta chain variable domain of TCR clone 250729 (TRBV20-1, TRBJ1-1)
CSAPPGGHTEAFF

SEQ ID NO: 501459 - protein, 14 aa, Homo sapiens
  CDR3 for alpha chain variable domain of TCR clone 250730 (TRAV35, TRAJ13)
CAGSPSGGYQKVTF

SEQ ID NO: 501460 - protein, 17 aa, Homo sapiens
  CDR3 for beta chain variable domain of TCR clone 250730 (TRBV7-6, TRBJ2-5)
CASSPGLADPWGETQYY

SEQ ID NO: 501461 - protein, 13 aa, Homo sapiens
  CDR3 for alpha chain variable domain of TCR clone 250731 (TRAV21, TRAJ33)
CAVAGDSNYQLIW

SEQ ID NO: 501462 - protein, 17 aa, Homo sapiens
  CDR3 for beta chain variable domain of TCR clone 250731 (TRBV18, TRBJ2-1)
CASSKGLSGGADNEQFF

SEQ ID NO: 501463 - protein, 12 aa, Homo sapiens
  CDR3 for alpha chain variable domain of TCR clone 250732 (TRAV16, TRAJ26)
CASQDGGQNFVF

SEQ ID NO: 501464 - protein, 13 aa, Homo sapiens
  CDR3 for beta chain variable domain of TCR clone 250732 (TRBV25-1, TRBJ1-1)
CASSDRGRAEAFF

SEQ ID NO: 501465 - protein, 13 aa, Homo sapiens
  CDR3 for alpha chain variable domain of TCR clone 250733 (TRAV24, TRAJ5)
CACCGAGRRALTF

SEQ ID NO: 501466 - protein, 15 aa, Homo sapiens
  CDR3 for beta chain variable domain of TCR clone 250733 (TRBV11-2, TRBJ2-1)
CASSKNRGLIYEQFF

SEQ ID NO: 501467 - protein, 11 aa, Homo sapiens
  CDR3 for alpha chain variable domain of TCR clone 250734 (TRAV1-2, TRAJ20)
CAVANDYKLSF

SEQ ID NO: 501468 - protein, 13 aa, Homo sapiens
  CDR3 for beta chain variable domain of TCR clone 250734 (TRBV6-5, TRBJ2-7)
CASSGGSFYEQYF

SEQ ID NO: 501469 - protein, 14 aa, Homo sapiens
  CDR3 for alpha chain variable domain of TCR clone 250735 (TRAV1-2, TRAJ15)
CAVRDRQAGTALIF

SEQ ID NO: 501470 - protein, 14 aa, Homo sapiens
  CDR3 for beta chain variable domain of TCR clone 250735 (TRBV20-1, TRBJ1-1)
CSAQTRIGGTEAFF

SEQ ID NO: 501471 - protein, 11 aa, Homo sapiens
  CDR3 for alpha chain variable domain of TCR clone 250736 (TRAV17, TRAJ31)
CATSNNARLMF

SEQ ID NO: 501472 - protein, 16 aa, Homo sapiens
  CDR3 for beta chain variable domain of TCR clone 250736 (TRBV7-8, TRBJ2-4)
CASSAESTLAKIIQYF

SEQ ID NO: 501473 - protein, 16 aa, Homo sapiens
  CDR3 for alpha chain variable domain of TCR clone 250737 (TRAV8-4, TRAJ52)
CAVSDPGGTSYGKLTF

SEQ ID NO: 501474 - protein, 20 aa, Homo sapiens
  CDR3 for beta chain variable domain of TCR clone 250737 (TRBV19, TRBJ2-1)
CASSISRTVTSTRLNNEQFF

SEQ ID NO: 501475 - protein, 15 aa, Homo sapiens
  CDR3 for alpha chain variable domain of TCR clone 250738 (TRAV8-3, TRAJ40)
CAAPSLGSGTYKYIF

SEQ ID NO: 501476 - protein, 16 aa, Homo sapiens
  CDR3 for beta chain variable domain of TCR clone 250738 (TRBV7-3, TRBJ2-3)
SASSLSGYRPEDTQYF

SEQ ID NO: 501477 - protein, 13 aa, Homo sapiens
  CDR3 for alpha chain variable domain of TCR clone 250739 (TRAV26-1, TRAJ34)
CIVRGHNTDKLIF

SEQ ID NO: 501478 - protein, 15 aa, Homo sapiens
  CDR3 for beta chain variable domain of TCR clone 250739 (TRBV4-1, TRBJ2-7)
CASSQEWGTSYEQYF

SEQ ID NO: 501479 - protein, 11 aa, Homo sapiens
  CDR3 for alpha chain variable domain of TCR clone 250740 (TRAV12-2, TRAJ39)
CAVNNMLTFGG

SEQ ID NO: 501480 - protein, 16 aa, Homo sapiens
  CDR3 for beta chain variable domain of TCR clone 250740 (TRBV9, TRBJ2-7)
CASRAGPDRSPYEQYF

SEQ ID NO: 501481 - protein, 14 aa, Homo sapiens
  CDR3 for alpha chain variable domain of TCR clone 250741 (TRAV35, TRAJ33)
CWPRGRDSNYQLIW

SEQ ID NO: 501482 - protein, 14 aa, Homo sapiens
  CDR3 for beta chain variable domain of TCR clone 250741 (TRBV4-2, TRBJ1-5)
CASSQDSINQPQHF

SEQ ID NO: 501483 - protein, 14 aa, Homo sapiens
  CDR3 for alpha chain variable domain of TCR clone 250742 (TRAV13-1, TRAJ35)
CAASKGGFGNVLHC

SEQ ID NO: 501484 - protein, 16 aa, Homo sapiens
  CDR3 for beta chain variable domain of TCR clone 250742 (TRBV4-1, TRBJ2-5)
CASSQTFYGDQETQYF

SEQ ID NO: 501485 - protein, 14 aa, Homo sapiens
  CDR3 for alpha chain variable domain of TCR clone 250743 (TRAV12-3, TRAJ42)
CAMTYGGSQGNLIF

SEQ ID NO: 501486 - protein, 13 aa, Homo sapiens
  CDR3 for beta chain variable domain of TCR clone 250743 (TRBV20-1, TRBJ1-6)
CSAPLGVGSPLHF

SEQ ID NO: 501487 - protein, 14 aa, Homo sapiens
  CDR3 for alpha chain variable domain of TCR clone 250744 (TRAV12-2, TRAJ13)
CAVKETGGYQKVTF

SEQ ID NO: 501488 - protein, 14 aa, Homo sapiens
  CDR3 for beta chain variable domain of TCR clone 250744 (TRBV19, TRBJ2-1)
CASPTVVLSGEQFF

SEQ ID NO: 501489 - protein, 12 aa, Homo sapiens
  CDR3 for alpha chain variable domain of TCR clone 250745 (TRAV12-2, TRAJ20)
CAVRPSDYKLSF

SEQ ID NO: 501490 - protein, 14 aa, Homo sapiens
  CDR3 for beta chain variable domain of TCR clone 250745 (TRBV6-1, TRBJ2-7)
CASNRARPDYAQYF

SEQ ID NO: 501491 - protein, 15 aa, Homo sapiens
  CDR3 for alpha chain variable domain of TCR clone 250746 (TRAV17, TRAJ37)
CATDGGSSNTGKLNF

SEQ ID NO: 501492 - protein, 15 aa, Homo sapiens
  CDR3 for beta chain variable domain of TCR clone 250746 (TRBV28, TRBJ2-5)
CASSSGRTIQETQYF

SEQ ID NO: 501493 - protein, 12 aa, Homo sapiens
  CDR3 for alpha chain variable domain of TCR clone 250747 (TRAV12-3, TRAJ17)
CAMTLTGNRLTF

SEQ ID NO: 501494 - protein, 16 aa, Homo sapiens
  CDR3 for beta chain variable domain of TCR clone 250747 (TRBV24-1, TRBJ2-3)
CATSDRRQDLTDTQYF

SEQ ID NO: 501495 - protein, 14 aa, Homo sapiens
  CDR3 for alpha chain variable domain of TCR clone 250748 (TRAV8-4, TRAJ15)
CAVTIREAGTALIF

SEQ ID NO: 501496 - protein, 12 aa, Homo sapiens
  CDR3 for beta chain variable domain of TCR clone 250748 (TRBV7-9, TRBJ2-7)
CASSLEGYEQYF

SEQ ID NO: 501497 - protein, 13 aa, Homo sapiens
  CDR3 for alpha chain variable domain of TCR clone 250749 (TRAV13-1, TRAJ6)
CEASSGGSYIPTF

SEQ ID NO: 501498 - protein, 15 aa, Homo sapiens
  CDR3 for beta chain variable domain of TCR clone 250749 (TRBV12-4, TRBJ2-5)
CASSPPTGLQETQYF

SEQ ID NO: 501499 - protein, 15 aa, Homo sapiens
  CDR3 for alpha chain variable domain of TCR clone 250750 (TRAV8-6, TRAJ9)
SAVSDRDTGGFKTIF

SEQ ID NO: 501500 - protein, 16 aa, Homo sapiens
  CDR3 for beta chain variable domain of TCR clone 250750 (TRBV19, TRBJ2-3)
CASSPEWDRGTDTQYF

SEQ ID NO: 501501 - protein, 12 aa, Homo sapiens
  CDR3 for alpha chain variable domain of TCR clone 250751 (TRAV26-1, TRAJ31)
CIVRNNNARLMF

SEQ ID NO: 501502 - protein, 16 aa, Homo sapiens
  CDR3 for beta chain variable domain of TCR clone 250751 (TRBV20-1, TRBJ1-4)
CSAPGQGLLTNEKLFF

SEQ ID NO: 501503 - protein, 16 aa, Homo sapiens
  CDR3 for alpha chain variable domain of TCR clone 250752 (TRAV30, TRAJ24)
CGTEIVDADSWGKFQF

SEQ ID NO: 501504 - protein, 14 aa, Homo sapiens
  CDR3 for beta chain variable domain of TCR clone 250752 (TRBV4-2, TRBJ2-1)
CASGLDRAYNEQFC

SEQ ID NO: 501505 - protein, 18 aa, Homo sapiens
  CDR3 for alpha chain variable domain of TCR clone 250753 (TRAV21, TRAJ52)
CAVRPSPAGGTSYGTLTF

SEQ ID NO: 501506 - protein, 16 aa, Homo sapiens
  CDR3 for beta chain variable domain of TCR clone 250753 (TRBV7-3, TRBJ2-1)
CASSLEGYRSYNEQFF

SEQ ID NO: 501507 - protein, 14 aa, Homo sapiens
  CDR3 for alpha chain variable domain of TCR clone 250754 (TRAV17, TRAJ42)
CAQNYGGSQGHLIF

SEQ ID NO: 501508 - protein, 13 aa, Homo sapiens
  CDR3 for beta chain variable domain of TCR clone 250754 (TRBV20-1, TRBJ1-2)
CSAPRSGRYGYTF

SEQ ID NO: 501509 - protein, 14 aa, Homo sapiens
  CDR3 for alpha chain variable domain of TCR clone 250755 (TRAV27, TRAJ22)
CAGVSVLGKRQLTF

SEQ ID NO: 501510 - protein, 13 aa, Homo sapiens
  CDR3 for beta chain variable domain of TCR clone 250755 (TRBV20-1, TRBJ1-1)
CSARGGGNTEAFF

SEQ ID NO: 501511 - protein, 12 aa, Homo sapiens
  CDR3 for alpha chain variable domain of TCR clone 250756 (TRAV21, TRAJ11)
CAATSGYSTLTF

SEQ ID NO: 501512 - protein, 13 aa, Homo sapiens
  CDR3 for beta chain variable domain of TCR clone 250756 (TRBV20-1, TRBJ2-7)
QCPRAAGVGEQYF

SEQ ID NO: 501513 - protein, 12 aa, Homo sapiens
  CDR3 for alpha chain variable domain of TCR clone 250757 (TRAV12-3, TRAJ17)
CAMTLTGNKLTF

SEQ ID NO: 501514 - protein, 12 aa, Homo sapiens
  CDR3 for beta chain variable domain of TCR clone 250757 (TRBV7-9, TRBJ2-7)
CASSFDSYEQYF

SEQ ID NO: 501515 - protein, 13 aa, Homo sapiens
  CDR3 for alpha chain variable domain of TCR clone 250758 (TRAV24, TRAJ43)
CSFTRHNNNDMRF

SEQ ID NO: 501516 - protein, 12 aa, Homo sapiens
  CDR3 for beta chain variable domain of TCR clone 250758 (TRBV14, TRBJ2-5)
CASSQLKETQYF

SEQ ID NO: 501517 - protein, 11 aa, Homo sapiens
  CDR3 for alpha chain variable domain of TCR clone 250759 (TRAV21, TRAJ11)
CAVNGYSTPPL

SEQ ID NO: 501518 - protein, 11 aa, Homo sapiens
  CDR3 for beta chain variable domain of TCR clone 250759 (TRBV19, TRBJ1-1)
CASSIGSEAFF

SEQ ID NO: 501519 - protein, 17 aa, Homo sapiens
  CDR3 for alpha chain variable domain of TCR clone 250760 (TRAV26-1, TRAJ10)
CIVSFRGLPGGGNKLTF

SEQ ID NO: 501520 - protein, 13 aa, Homo sapiens
  CDR3 for beta chain variable domain of TCR clone 250760 (TRBV20-1, TRBJ2-3)
CSASRQAADTQYF

SEQ ID NO: 501521 - protein, 14 aa, Homo sapiens
  CDR3 for alpha chain variable domain of TCR clone 250761 (TRAV8-3, TRAJ36)
CAVGPITGANNLFF

SEQ ID NO: 501522 - protein, 15 aa, Homo sapiens
  CDR3 for beta chain variable domain of TCR clone 250761 (TRBV4-1, TRBJ2-1)
CASSQDPGNYNEQFY

SEQ ID NO: 501523 - protein, 13 aa, Homo sapiens
  CDR3 for alpha chain variable domain of TCR clone 250762 (TRAV21, TRAJ27)
CAARPGNAGKSTF

SEQ ID NO: 501524 - protein, 14 aa, Homo sapiens
  CDR3 for beta chain variable domain of TCR clone 250762 (TRBV7-6, TRBJ2-3)
CASSLGAVTDAQYF

SEQ ID NO: 501525 - protein, 15 aa, Homo sapiens
  CDR3 for alpha chain variable domain of TCR clone 250763 (TRAV26-1, TRAJ15)
CIVSDANQAGTALIF

SEQ ID NO: 501526 - protein, 13 aa, Homo sapiens
  CDR3 for beta chain variable domain of TCR clone 250763 (TRBV10-3, TRBJ2-7)
CAISEAGPYEQYF

SEQ ID NO: 501527 - protein, 16 aa, Homo sapiens
  CDR3 for alpha chain variable domain of TCR clone 250764 (TRAV3, TRAJ37)
CAVRPHGSGHTGKLIF

SEQ ID NO: 501528 - protein, 20 aa, Homo sapiens
  CDR3 for beta chain variable domain of TCR clone 250764 (TRBV28, TRBJ2-1)
CASTPIGRSPGLAGGNEQFF

SEQ ID NO: 501529 - protein, 11 aa, Homo sapiens
  CDR3 for alpha chain variable domain of TCR clone 250765 (TRAV2, TRAJ13)
CVSGGYQKVTF

SEQ ID NO: 501530 - protein, 14 aa, Homo sapiens
  CDR3 for beta chain variable domain of TCR clone 250765 (TRBV7-3, TRBJ2-1)
CASSLAGGTNEQFF

SEQ ID NO: 501531 - protein, 14 aa, Homo sapiens
  CDR3 for alpha chain variable domain of TCR clone 250766 (TRAV13-2, TRAJ17)
CAENSKTAGNKLTF

SEQ ID NO: 501532 - protein, 14 aa, Homo sapiens
  CDR3 for beta chain variable domain of TCR clone 250766 (TRBV19, TRBJ2-1)
CASPTFVLSGEQFF

SEQ ID NO: 501533 - protein, 13 aa, Homo sapiens
  CDR3 for alpha chain variable domain of TCR clone 250767 (TRAV8-3, TRAJ48)
CAVVPFGNEKLTF

SEQ ID NO: 501534 - protein, 19 aa, Homo sapiens
  CDR3 for beta chain variable domain of TCR clone 250767 (TRBV25-1, TRBJ2-2)
CAILVYRVDRGRKAGELFF

SEQ ID NO: 501535 - protein, 14 aa, Homo sapiens
  CDR3 for alpha chain variable domain of TCR clone 250768 (TRAV12-2, TRAJ17)
CAVLFKAAGNKLTF

SEQ ID NO: 501536 - protein, 17 aa, Homo sapiens
  CDR3 for beta chain variable domain of TCR clone 250768 (TRBV20-1, TRBJ2-2)
CSASGPGQGGLAGELFF

SEQ ID NO: 501537 - protein, 15 aa, Homo sapiens
  CDR3 for alpha chain variable domain of TCR clone 250769 (TRAV36/DV7, TRAJ53)
CAVEGSGGSNYKLTF

SEQ ID NO: 501538 - protein, 12 aa, Homo sapiens
  CDR3 for beta chain variable domain of TCR clone 250769 (TRBV7-8, TRBJ2-7)
CASSLGDREQYF

SEQ ID NO: 501539 - protein, 12 aa, Homo sapiens
  CDR3 for alpha chain variable domain of TCR clone 250770 (TRAV12-3, TRAJ17)
CAMTLTGNKLTF

SEQ ID NO: 501540 - protein, 13 aa, Homo sapiens
  CDR3 for beta chain variable domain of TCR clone 250770 (TRBV20-1, TRBJ2-5)
CSARATGEETQYF

SEQ ID NO: 501541 - protein, 15 aa, Homo sapiens
  CDR3 for alpha chain variable domain of TCR clone 250771 (TRAV8-3, TRAJ45)
CASSYSGGGADGLTF

SEQ ID NO: 501542 - protein, 14 aa, Homo sapiens
  CDR3 for beta chain variable domain of TCR clone 250771 (TRBV7-2, TRBJ2-7)
CASSLPPGQGPQYF

SEQ ID NO: 501543 - protein, 14 aa, Homo sapiens
  CDR3 for alpha chain variable domain of TCR clone 250772 (TRAV20, TRAJ17)
CAVRREAAGNKLTF

SEQ ID NO: 501544 - protein, 13 aa, Homo sapiens
  CDR3 for beta chain variable domain of TCR clone 250772 (TRBV23-1, TRBJ2-1)
CASNRETYNEQFI

SEQ ID NO: 501545 - protein, 14 aa, Homo sapiens
  CDR3 for alpha chain variable domain of TCR clone 250773 (TRAV16, TRAJ17)
CAPRIKAAGNKLTF

SEQ ID NO: 501546 - protein, 17 aa, Homo sapiens
  CDR3 for beta chain variable domain of TCR clone 250773 (TRBV7-2, TRBJ2-3)
CASSSYSGTRRADTQFF

SEQ ID NO: 501547 - protein, 15 aa, Homo sapiens
  CDR3 for alpha chain variable domain of TCR clone 250774 (TRAV25, TRAJ53)
CAATGGGGRNYKLTF

SEQ ID NO: 501548 - protein, 11 aa, Homo sapiens
  CDR3 for beta chain variable domain of TCR clone 250774 (TRBV11-3, TRBJ2-2)
CASSSGGELFF

SEQ ID NO: 501549 - protein, 14 aa, Homo sapiens
  CDR3 for alpha chain variable domain of TCR clone 250775 (TRAV17, TRAJ22)
CATSPSGSARQLSF

SEQ ID NO: 501550 - protein, 15 aa, Homo sapiens
  CDR3 for beta chain variable domain of TCR clone 250775 (TRBV4-1, TRBJ2-5)
CASSQWDLYQETQYF

SEQ ID NO: 501551 - protein, 13 aa, Homo sapiens
  CDR3 for alpha chain variable domain of TCR clone 250776 (TRAV36/DV7, TRAJ53)
CALSGGSDYKLTF

SEQ ID NO: 501552 - protein, 13 aa, Homo sapiens
  CDR3 for beta chain variable domain of TCR clone 250776 (TRBV28, TRBJ2-7)
CASSLPARYEQYF

SEQ ID NO: 501553 - protein, 14 aa, Homo sapiens
  CDR3 for alpha chain variable domain of TCR clone 250777 (TRAV1-2, TRAJ8)
CAVREDTGFQKLVF

SEQ ID NO: 501554 - protein, 11 aa, Homo sapiens
  CDR3 for beta chain variable domain of TCR clone 250777 (TRBV12-4, TRBJ2-3)
CASSSVRGRYF

SEQ ID NO: 501555 - protein, 15 aa, Homo sapiens
  CDR3 for alpha chain variable domain of TCR clone 250778 (TRAV23/DV6, TRAJ30)
CAASSQESRDDKIIF

SEQ ID NO: 501556 - protein, 17 aa, Homo sapiens
  CDR3 for beta chain variable domain of TCR clone 250778 (TRBV4-3, TRBJ2-1)
CASSQSSSGRASGEQFF

SEQ ID NO: 501557 - protein, 10 aa, Homo sapiens
  CDR3 for alpha chain variable domain of TCR clone 250779 (TRAV1-2, TRAJ20)
CALNDYKLSF

SEQ ID NO: 501558 - protein, 16 aa, Homo sapiens
  CDR3 for beta chain variable domain of TCR clone 250779 (TRBV20-1, TRBJ1-1)
SAVLGLTQGMNTEAFF

SEQ ID NO: 501559 - protein, 11 aa, Homo sapiens
  CDR3 for alpha chain variable domain of TCR clone 250780 (TRAV1-1, TRAJ23)
CAVRQGGKLIS

SEQ ID NO: 501560 - protein, 14 aa, Homo sapiens
  CDR3 for beta chain variable domain of TCR clone 250780 (TRBV19, TRBJ2-1)
CASPTFVLSGEQFF

SEQ ID NO: 501561 - protein, 14 aa, Homo sapiens
  CDR3 for alpha chain variable domain of TCR clone 250781 (TRAV9-2, TRAJ39)
CALYIYNAGNILTF

SEQ ID NO: 501562 - protein, 15 aa, Homo sapiens
  CDR3 for beta chain variable domain of TCR clone 250781 (TRBV12-5, TRBJ2-2)
CASGRLGGNTGELFF

SEQ ID NO: 501563 - protein, 14 aa, Homo sapiens
  CDR3 for alpha chain variable domain of TCR clone 250782 (TRAV12-2, TRAJ13)
CAVKKTGGYQKVTF

SEQ ID NO: 501564 - protein, 14 aa, Homo sapiens
  CDR3 for beta chain variable domain of TCR clone 250782 (TRBV18, TRBJ2-5)
CASSPRASSETQYF

SEQ ID NO: 501565 - protein, 13 aa, Homo sapiens
  CDR3 for alpha chain variable domain of TCR clone 250783 (TRAV29/DV5, TRAJ31)
CAASRNNNARLMF

SEQ ID NO: 501566 - protein, 12 aa, Homo sapiens
  CDR3 for beta chain variable domain of TCR clone 250783 (TRBV24-1, TRBJ1-1)
CATSDSDRGAFF

SEQ ID NO: 501567 - protein, 18 aa, Homo sapiens
  CDR3 for alpha chain variable domain of TCR clone 250784 (TRAV26-1, TRAJ23)
CIVRVGLEVWNQGGRLIF

SEQ ID NO: 501568 - protein, 16 aa, Homo sapiens
  CDR3 for beta chain variable domain of TCR clone 250784 (TRBV12-4, TRBJ2-5)
CASSFLVRGRQETQYF

SEQ ID NO: 501569 - protein, 15 aa, Homo sapiens
  CDR3 for alpha chain variable domain of TCR clone 250785 (TRAV34, TRAJ36)
CGAPSRLGGANKLFF

SEQ ID NO: 501570 - protein, 16 aa, Homo sapiens
  CDR3 for beta chain variable domain of TCR clone 250785 (TRBV4-3, TRBJ2-1)
CASSYRRLGSWDEQFF

SEQ ID NO: 501571 - protein, 16 aa, Homo sapiens
  CDR3 for alpha chain variable domain of TCR clone 250786 (TRAV20, TRAJ38)
CAVQASNSGNNRKLIW

SEQ ID NO: 501572 - protein, 16 aa, Homo sapiens
  CDR3 for beta chain variable domain of TCR clone 250786 (TRBV7-8, TRBJ2-6)
CASRVGDSSGANVLTF

SEQ ID NO: 501573 - protein, 13 aa, Homo sapiens
  CDR3 for alpha chain variable domain of TCR clone 250787 (TRAV14/DV4, TRAJ7)
CAMRGLWEQQTRF

SEQ ID NO: 501574 - protein, 15 aa, Homo sapiens
  CDR3 for beta chain variable domain of TCR clone 250787 (TRBV19, TRBJ2-1)
CASSINREPSHEQFF

SEQ ID NO: 501575 - protein, 13 aa, Homo sapiens
  CDR3 for alpha chain variable domain of TCR clone 250788 (TRAV8-4, TRAJ30)
YAVSVNRDDKIIF

SEQ ID NO: 501576 - protein, 13 aa, Homo sapiens
  CDR3 for beta chain variable domain of TCR clone 250788 (TRBV3-1, TRBJ2-2)
CASLARGSGELFF

SEQ ID NO: 501577 - protein, 13 aa, Homo sapiens
  CDR3 for alpha chain variable domain of TCR clone 250789 (TRAV17, TRAJ15)
CATDARAGTALIF

SEQ ID NO: 501578 - protein, 14 aa, Homo sapiens
  CDR3 for beta chain variable domain of TCR clone 250789 (TRBV12-4, TRBJ2-7)
CASSLGQAEYEQYF

SEQ ID NO: 501579 - protein, 16 aa, Homo sapiens
  CDR3 for alpha chain variable domain of TCR clone 250790 (TRAV12-2, TRAJ45)
CAVIFLSGGGADGLTF

SEQ ID NO: 501580 - protein, 12 aa, Homo sapiens
  CDR3 for beta chain variable domain of TCR clone 250790 (TRBV14, TRBJ2-5)
CASSQLKETQYF

SEQ ID NO: 501581 - protein, 13 aa, Homo sapiens
  CDR3 for alpha chain variable domain of TCR clone 250791 (TRAV24, TRAJ44)
CALLTGTASKLTF

SEQ ID NO: 501582 - protein, 16 aa, Homo sapiens
  CDR3 for beta chain variable domain of TCR clone 250791 (TRBV2, TRBJ2-3)
CASSTSVEGVTYTQYF

SEQ ID NO: 501583 - protein, 11 aa, Homo sapiens
  CDR3 for alpha chain variable domain of TCR clone 250792 (TRAV21, TRAJ7)
CAAYGNNRPAF

SEQ ID NO: 501584 - protein, 14 aa, Homo sapiens
  CDR3 for beta chain variable domain of TCR clone 250792 (TRBV4-1, TRBJ2-7)
CASSRTGVAFEQYF

SEQ ID NO: 501585 - protein, 18 aa, Homo sapiens
  CDR3 for alpha chain variable domain of TCR clone 250793 (TRAV26-1, TRAJ22)
CIVRVALISFGSARQLTF

SEQ ID NO: 501586 - protein, 14 aa, Homo sapiens
  CDR3 for beta chain variable domain of TCR clone 250793 (TRBV12-5, TRBJ2-5)
CASGSRTHQETQYF

SEQ ID NO: 501587 - protein, 13 aa, Homo sapiens
  CDR3 for alpha chain variable domain of TCR clone 250794 (TRAV2, TRAJ21)
CAVEDLNFNKFYF

SEQ ID NO: 501588 - protein, 15 aa, Homo sapiens
  CDR3 for beta chain variable domain of TCR clone 250794 (TRBV5-1, TRBJ2-1)
CASSLVANAYNEQFF

SEQ ID NO: 501589 - protein, 21 aa, Homo sapiens
  CDR3 for alpha chain variable domain of TCR clone 250795 (TRAV26-1, TRAJ17)
CCVLLYRQSSGSKAAGNKLTF

SEQ ID NO: 501590 - protein, 14 aa, Homo sapiens
  CDR3 for beta chain variable domain of TCR clone 250795 (TRBV28, TRBJ1-2)
CASRIQGANYGYAF

SEQ ID NO: 501591 - protein, 15 aa, Homo sapiens
  CDR3 for alpha chain variable domain of TCR clone 250796 (TRAV26-1, TRAJ44)
CIVRANTGTASKLTF

SEQ ID NO: 501592 - protein, 13 aa, Homo sapiens
  CDR3 for beta chain variable domain of TCR clone 250796 (TRBV20-1, TRBJ2-2)
CSALSGGAGELFF

SEQ ID NO: 501593 - protein, 12 aa, Homo sapiens
  CDR3 for alpha chain variable domain of TCR clone 250797 (TRAV12-3, TRAJ41)
CAMSYSGYALNF

SEQ ID NO: 501594 - protein, 13 aa, Homo sapiens
  CDR3 for beta chain variable domain of TCR clone 250797 (TRBV7-3, TRBJ2-1)
CAISLDSYNEQFF

SEQ ID NO: 501595 - protein, 16 aa, Homo sapiens
  CDR3 for alpha chain variable domain of TCR clone 250798 (TRAV20, TRAJ53)
CAVQDQPRGSNYKLTF

SEQ ID NO: 501596 - protein, 12 aa, Homo sapiens
  CDR3 for beta chain variable domain of TCR clone 250798 (TRBV7-9, TRBJ1-4)
CASSTDREKLFF

SEQ ID NO: 501597 - protein, 15 aa, Homo sapiens
  CDR3 for alpha chain variable domain of TCR clone 250799 (TRAV2, TRAJ24)
CAVVRLKNSWGKLQF

SEQ ID NO: 501598 - protein, 14 aa, Homo sapiens
  CDR3 for beta chain variable domain of TCR clone 250799 (TRBV11-2, TRBJ2-5)
CASSRTGGIETQYF

SEQ ID NO: 501599 - protein, 14 aa, Homo sapiens
  CDR3 for alpha chain variable domain of TCR clone 250800 (TRAV1-2, TRAJ16)
CAVNRFSDGQKLLF

SEQ ID NO: 501600 - protein, 16 aa, Homo sapiens
  CDR3 for beta chain variable domain of TCR clone 250800 (TRBV12-4, TRBJ2-5)
CASSFFVRGRQEIQFF

SEQ ID NO: 501601 - protein, 14 aa, Homo sapiens
  CDR3 for alpha chain variable domain of TCR clone 250801 (TRAV12-2, TRAJ13)
CAVKKTGGYQKVTF

SEQ ID NO: 501602 - protein, 14 aa, Homo sapiens
  CDR3 for beta chain variable domain of TCR clone 250801 (TRBV5-1, TRBJ2-3)
CASRGQTSTDTQYF

SEQ ID NO: 501603 - protein, 15 aa, Homo sapiens
  CDR3 for alpha chain variable domain of TCR clone 250802 (TRAV26-2, TRAJ21)
CNLSNTTSTNFTLDL

SEQ ID NO: 501604 - protein, 16 aa, Homo sapiens
  CDR3 for beta chain variable domain of TCR clone 250802 (TRBV4-2, TRBJ2-6)
CASSQARSSGANVLTF

SEQ ID NO: 501605 - protein, 17 aa, Homo sapiens
  CDR3 for alpha chain variable domain of TCR clone 250803 (TRAV38-2/DV8, TRAJ56)
CAYRSEAGTGANSKLTF

SEQ ID NO: 501606 - protein, 14 aa, Homo sapiens
  CDR3 for beta chain variable domain of TCR clone 250803 (TRBV11-1, TRBJ1-1)
CASSLEHPNTEAFF

SEQ ID NO: 501607 - protein, 11 aa, Homo sapiens
  CDR3 for alpha chain variable domain of TCR clone 250804 (TRAV2, TRAJ13)
CASGGYQKVTS

SEQ ID NO: 501608 - protein, 16 aa, Homo sapiens
  CDR3 for beta chain variable domain of TCR clone 250804 (TRBV20-1, TRBJ1-2)
CSASMGQGVANYGYTF

SEQ ID NO: 501609 - protein, 14 aa, Homo sapiens
  CDR3 for alpha chain variable domain of TCR clone 250805 (TRAV12-1, TRAJ17)
CVVNYKAAGNKLTF

SEQ ID NO: 501610 - protein, 12 aa, Homo sapiens
  CDR3 for beta chain variable domain of TCR clone 250805 (TRBV29-1, TRBJ2-3)
CSVTGGADTQYF

SEQ ID NO: 501611 - protein, 14 aa, Homo sapiens
  CDR3 for alpha chain variable domain of TCR clone 250806 (TRAV13-1, TRAJ40)
CAARGWAGTYKYIF

SEQ ID NO: 501612 - protein, 15 aa, Homo sapiens
  CDR3 for beta chain variable domain of TCR clone 250806 (TRBV7-8, TRBJ2-2)
CASSLDQGWTGELFF

SEQ ID NO: 501613 - protein, 14 aa, Homo sapiens
  CDR3 for alpha chain variable domain of TCR clone 250807 (TRAV12-2, TRAJ15)
CAPHTGQAGTALIF

SEQ ID NO: 501614 - protein, 14 aa, Homo sapiens
  CDR3 for beta chain variable domain of TCR clone 250807 (TRBV7-2, TRBJ1-1)
CASSFLTGTTEAVF

SEQ ID NO: 501615 - protein, 14 aa, Homo sapiens
  CDR3 for alpha chain variable domain of TCR clone 250808 (TRAV26-1, TRAJ38)
CIADNAGNNRKLIW

SEQ ID NO: 501616 - protein, 13 aa, Homo sapiens
  CDR3 for beta chain variable domain of TCR clone 250808 (TRBV20-1, TRBJ2-1)
CIARSSPRDEQFF

SEQ ID NO: 501617 - protein, 16 aa, Homo sapiens
  CDR3 for alpha chain variable domain of TCR clone 250809 (TRAV12-3, TRAJ53)
CAMSPGSGGSNYKLPS

SEQ ID NO: 501618 - protein, 11 aa, Homo sapiens
  CDR3 for beta chain variable domain of TCR clone 250809 (TRBV29-1, TRBJ2-5)
CSEDRTGTQYF

SEQ ID NO: 501619 - protein, 12 aa, Homo sapiens
  CDR3 for alpha chain variable domain of TCR clone 250810 (TRAV12-2, TRAJ10)
WGVTGGGNKLTF

SEQ ID NO: 501620 - protein, 17 aa, Homo sapiens
  CDR3 for beta chain variable domain of TCR clone 250810 (TRBV7-6, TRBJ2-5)
CASSPGLADPWGETQYF

SEQ ID NO: 501621 - protein, 11 aa, Homo sapiens
  CDR3 for alpha chain variable domain of TCR clone 250811 (TRAV27, TRAJ43)
CVRYNNNDMRF

SEQ ID NO: 501622 - protein, 14 aa, Homo sapiens
  CDR3 for beta chain variable domain of TCR clone 250811 (TRBV28, TRBJ2-7)
CASKPGPDLYEQYF

SEQ ID NO: 501623 - protein, 12 aa, Homo sapiens
  CDR3 for alpha chain variable domain of TCR clone 250812 (TRAV10, TRAJ6)
CVVSEGSYIPTF

SEQ ID NO: 501624 - protein, 15 aa, Homo sapiens
  CDR3 for beta chain variable domain of TCR clone 250812 (TRBV11-2, TRBJ2-1)
CASSLGTSGLNEQFF

SEQ ID NO: 501625 - protein, 13 aa, Homo sapiens
  CDR3 for alpha chain variable domain of TCR clone 250813 (TRAV20, TRAJ31)
CAVQAIGGARFMF

SEQ ID NO: 501626 - protein, 14 aa, Homo sapiens
  CDR3 for beta chain variable domain of TCR clone 250813 (TRBV2, TRBJ1-5)
CASSGTVSNQPQHF

SEQ ID NO: 501627 - protein, 11 aa, Homo sapiens
  CDR3 for alpha chain variable domain of TCR clone 250814 (TRAV8-4, TRAJ52)
SGGTSYGKLTF

SEQ ID NO: 501628 - protein, 13 aa, Homo sapiens
  CDR3 for beta chain variable domain of TCR clone 250814 (TRBV28, TRBJ2-2)
CASIGGLGGELFF

SEQ ID NO: 501629 - protein, 14 aa, Homo sapiens
  CDR3 for alpha chain variable domain of TCR clone 250815 (TRAV12-3, TRAJ7)
CAMSEIGGNNRLAF

SEQ ID NO: 501630 - protein, 13 aa, Homo sapiens
  CDR3 for beta chain variable domain of TCR clone 250815 (TRBV11-1, TRBJ1-1)
CASSKQGRTEAFF

SEQ ID NO: 501631 - protein, 17 aa, Homo sapiens
  CDR3 for alpha chain variable domain of TCR clone 250816 (TRAV3, TRAJ6)
CAVRDGPRAGGSYIPTF

SEQ ID NO: 501632 - protein, 15 aa, Homo sapiens
  CDR3 for beta chain variable domain of TCR clone 250816 (TRBV24-1, TRBJ2-1)
CATSGPGTLSAEQFF

SEQ ID NO: 501633 - protein, 12 aa, Homo sapiens
  CDR3 for alpha chain variable domain of TCR clone 250817 (TRAV9-2, TRAJ36)
CALKKGANNLFF

SEQ ID NO: 501634 - protein, 16 aa, Homo sapiens
  CDR3 for beta chain variable domain of TCR clone 250817 (TRBV20-1, TRBJ1-4)
CSAPRQGLLTNEKLFF

SEQ ID NO: 501635 - protein, 14 aa, Homo sapiens
  CDR3 for alpha chain variable domain of TCR clone 250818 (TRAV1-2, TRAJ8)
CAVREDTGFQKIVF

SEQ ID NO: 501636 - protein, 14 aa, Homo sapiens
  CDR3 for beta chain variable domain of TCR clone 250818 (TRBV15, TRBJ2-3)
CATRSGTSTDTQYF

SEQ ID NO: 501637 - protein, 12 aa, Homo sapiens
  CDR3 for alpha chain variable domain of TCR clone 250819 (TRAV16, TRAJ10)
CSRTGGGNKLTF

SEQ ID NO: 501638 - protein, 14 aa, Homo sapiens
  CDR3 for beta chain variable domain of TCR clone 250819 (TRBV7-2, TRBJ2-1)
CASGLGVGYNEQFF

SEQ ID NO: 501639 - protein, 13 aa, Homo sapiens
  CDR3 for alpha chain variable domain of TCR clone 250820 (TRAV21, TRAJ11)
CAVPNSGYSTLTF

SEQ ID NO: 501640 - protein, 14 aa, Homo sapiens
  CDR3 for beta chain variable domain of TCR clone 250820 (TRBV19, TRBJ2-1)
CASPTFVLSGEQFF

SEQ ID NO: 501641 - protein, 10 aa, Homo sapiens
  CDR3 for alpha chain variable domain of TCR clone 250821 (TRAV12-3, TRAJ18)
CAMSAQAQPW

SEQ ID NO: 501642 - protein, 13 aa, Homo sapiens
  CDR3 for beta chain variable domain of TCR clone 250821 (TRBV15, TRBJ1-6)
CATSGGLNSPLHF

SEQ ID NO: 501643 - protein, 15 aa, Homo sapiens
  CDR3 for alpha chain variable domain of TCR clone 250822 (TRAV8-3, TRAJ21)
CAVGALPPRGYKFYF

SEQ ID NO: 501644 - protein, 16 aa, Homo sapiens
  CDR3 for beta chain variable domain of TCR clone 250822 (TRBV28, TRBJ2-7)
CASSFPDRRLTYEQYF

SEQ ID NO: 501645 - protein, 14 aa, Homo sapiens
  CDR3 for alpha chain variable domain of TCR clone 250823 (TRAV12-1, TRAJ4)
CVVPLKSGYNKLIF

SEQ ID NO: 501646 - protein, 15 aa, Homo sapiens
  CDR3 for beta chain variable domain of TCR clone 250823 (TRBV10-3, TRBJ2-1)
CAIRNGTSGHNEQFF

SEQ ID NO: 501647 - protein, 14 aa, Homo sapiens
  CDR3 for alpha chain variable domain of TCR clone 250824 (TRAV12-3, TRAJ56)
CAISVTGANSKLTL

SEQ ID NO: 501648 - protein, 17 aa, Homo sapiens
  CDR3 for beta chain variable domain of TCR clone 250824 (TRBV20-1, TRBJ2-3)
CSASLLGRGGSADTQYF

SEQ ID NO: 501649 - protein, 13 aa, Homo sapiens
  CDR3 for alpha chain variable domain of TCR clone 250825 (TRAV21, TRAJ33)
CAVAGDSNYQLIW

SEQ ID NO: 501650 - protein, 15 aa, Homo sapiens
  CDR3 for beta chain variable domain of TCR clone 250825 (TRBV7-9, TRBJ1-6)
CASSSPGRGNSPLHF

SEQ ID NO: 501651 - protein, 14 aa, Homo sapiens
  CDR3 for alpha chain variable domain of TCR clone 250826 (TRAV12-2, TRAJ6)
CVPLRPGGSYIPTF

SEQ ID NO: 501652 - protein, 14 aa, Homo sapiens
  CDR3 for beta chain variable domain of TCR clone 250826 (TRBV18, TRBJ2-3)
CASSGLADTDTQYF

SEQ ID NO: 501653 - protein, 15 aa, Homo sapiens
  CDR3 for alpha chain variable domain of TCR clone 250827 (TRAV23/DV6, TRAJ30)
CAAGRQESRDDKIIF

SEQ ID NO: 501654 - protein, 16 aa, Homo sapiens
  CDR3 for beta chain variable domain of TCR clone 250827 (TRBV2, TRBJ2-4)
CASSEAPGGEQNIQYF

SEQ ID NO: 501655 - protein, 13 aa, Homo sapiens
  CDR3 for alpha chain variable domain of TCR clone 250828 (TRAV35, TRAJ57)
CAGTQGGSEKLVF

SEQ ID NO: 501656 - protein, 14 aa, Homo sapiens
  CDR3 for beta chain variable domain of TCR clone 250828 (TRBV5-1, TRBJ2-2)
CASSVVLGAGELFF

SEQ ID NO: 501657 - protein, 15 aa, Homo sapiens
  CDR3 for alpha chain variable domain of TCR clone 250829 (TRAV12-2, TRAJ56)
CAVNPFTGANSKLTF

SEQ ID NO: 501658 - protein, 14 aa, Homo sapiens
  CDR3 for beta chain variable domain of TCR clone 250829 (TRBV20-1, TRBJ1-1)
CSAQTRIGGTEAFF

SEQ ID NO: 501659 - protein, 17 aa, Homo sapiens
  CDR3 for alpha chain variable domain of TCR clone 250830 (TRAV36/DV7, TRAJ52)
CAVAQRAGGTSYGKLTF

SEQ ID NO: 501660 - protein, 15 aa, Homo sapiens
  CDR3 for beta chain variable domain of TCR clone 250830 (TRBV11-3, TRBJ2-7)
CASSPGPASSYEQYF

SEQ ID NO: 501661 - protein, 14 aa, Homo sapiens
  CDR3 for alpha chain variable domain of TCR clone 250831 (TRAV12-2, TRAJ40)
CAVKIPSGTYKYIF

SEQ ID NO: 501662 - protein, 13 aa, Homo sapiens
  CDR3 for beta chain variable domain of TCR clone 250831 (TRBV27, TRBJ2-5)
CASSLSSLETQYF

SEQ ID NO: 501663 - protein, 17 aa, Homo sapiens
  CDR3 for alpha chain variable domain of TCR clone 250832 (TRAV8-6, TRAJ8)
CAVKEGIVNTGFQKLVF

SEQ ID NO: 501664 - protein, 12 aa, Homo sapiens
  CDR3 for beta chain variable domain of TCR clone 250832 (TRBV19, TRBJ1-4)
CASKDWPGGLFF

SEQ ID NO: 501665 - protein, 10 aa, Homo sapiens
  CDR3 for alpha chain variable domain of TCR clone 250833 (TRAV23/DV6, TRAJ57)
CAASSTLSQG

SEQ ID NO: 501666 - protein, 15 aa, Homo sapiens
  CDR3 for beta chain variable domain of TCR clone 250833 (TRBV19, TRBJ2-2)
CASSPRTGWTGELFF

SEQ ID NO: 501667 - protein, 17 aa, Homo sapiens
  CDR3 for alpha chain variable domain of TCR clone 250834 (TRAV38-1, TRAJ28)
CAFMEPTSGAGSYQLTF

SEQ ID NO: 501668 - protein, 15 aa, Homo sapiens
  CDR3 for beta chain variable domain of TCR clone 250834 (TRBV5-1, TRBJ2-4)
CASSLGGGGSYIQYF

SEQ ID NO: 501669 - protein, 15 aa, Homo sapiens
  CDR3 for alpha chain variable domain of TCR clone 250835 (TRAV4, TRAJ28)
CLVAELWGWELPTPF

SEQ ID NO: 501670 - protein, 13 aa, Homo sapiens
  CDR3 for beta chain variable domain of TCR clone 250835 (TRBV12-4, TRBJ2-6)
CASSGTGANVLTF

SEQ ID NO: 501671 - protein, 14 aa, Homo sapiens
  CDR3 for alpha chain variable domain of TCR clone 250836 (TRAV1-2, TRAJ16)
CAVNRFSDGQKLIF

SEQ ID NO: 501672 - protein, 16 aa, Homo sapiens
  CDR3 for beta chain variable domain of TCR clone 250836 (TRBV20-1, TRBJ1-4)
CSAPGQGLLTTEKLFF

SEQ ID NO: 501673 - protein, 13 aa, Homo sapiens
  CDR3 for alpha chain variable domain of TCR clone 250837 (TRAV9-2, TRAJ12)
CARGEDSSYKLIF

SEQ ID NO: 501674 - protein, 14 aa, Homo sapiens
  CDR3 for beta chain variable domain of TCR clone 250837 (TRBV4-1, TRBJ2-2)
CASSQAVNTGELFF

SEQ ID NO: 501675 - protein, 16 aa, Homo sapiens
  CDR3 for alpha chain variable domain of TCR clone 250838 (TRAV1-2, TRAJ16)
CAVTGFQMARSCSLQG

SEQ ID NO: 501676 - protein, 15 aa, Homo sapiens
  CDR3 for beta chain variable domain of TCR clone 250838 (TRBV9, TRBJ1-6)
CASSVAGTGDSPLHF

SEQ ID NO: 501677 - protein, 18 aa, Homo sapiens
  CDR3 for alpha chain variable domain of TCR clone 250839 (TRAV13-1, TRAJ52)
CAAKNPNAGGTSYGKLTF

SEQ ID NO: 501678 - protein, 15 aa, Homo sapiens
  CDR3 for beta chain variable domain of TCR clone 250839 (TRBV28, TRBJ2-4)
CAAGSGTLLMGSQYF

SEQ ID NO: 501679 - protein, 15 aa, Homo sapiens
  CDR3 for alpha chain variable domain of TCR clone 250840 (TRAV16, TRAJ42)
CALRRGGGSQGNLIF

SEQ ID NO: 501680 - protein, 15 aa, Homo sapiens
  CDR3 for beta chain variable domain of TCR clone 250840 (TRBV5-1, TRBJ2-7)
CASSLGDFTTYEQYF

SEQ ID NO: 501681 - protein, 12 aa, Homo sapiens
  CDR3 for alpha chain variable domain of TCR clone 250841 (TRAV20, TRAJ39)
CAVGNAGNMLTF

SEQ ID NO: 501682 - protein, 12 aa, Homo sapiens
  CDR3 for beta chain variable domain of TCR clone 250841 (TRBV7-2, TRBJ1-6)
CASSLSSSPLHF

SEQ ID NO: 501683 - protein, 15 aa, Homo sapiens
  CDR3 for alpha chain variable domain of TCR clone 250842 (TRAV16, TRAJ17)
CALSGNKAAGNKLTF

SEQ ID NO: 501684 - protein, 16 aa, Homo sapiens
  CDR3 for beta chain variable domain of TCR clone 250842 (TRBV7-6, TRBJ1-6)
CSSSSLPAGEYSPLHF

SEQ ID NO: 501685 - protein, 15 aa, Homo sapiens
  CDR3 for alpha chain variable domain of TCR clone 250843 (TRAV8-3, TRAJ45)
CASSYSGGGADRLTF

SEQ ID NO: 501686 - protein, 13 aa, Homo sapiens
  CDR3 for beta chain variable domain of TCR clone 250843 (TRBV19, TRBJ1-2)
CASSVPGQDGYTF

SEQ ID NO: 501687 - protein, 12 aa, Homo sapiens
  CDR3 for alpha chain variable domain of TCR clone 250844 (TRAV2, TRAJ15)
CAVAQAGTALIF

SEQ ID NO: 501688 - protein, 15 aa, Homo sapiens
  CDR3 for beta chain variable domain of TCR clone 250844 (TRBV5-1, TRBJ2-5)
CASSFKGGDQETQYF

SEQ ID NO: 501689 - protein, 13 aa, Homo sapiens
  CDR3 for alpha chain variable domain of TCR clone 250845 (TRAV2, TRAJ40)
CAVVTSGTYKYIF

SEQ ID NO: 501690 - protein, 17 aa, Homo sapiens
  CDR3 for beta chain variable domain of TCR clone 250845 (TRBV7-3, TRBJ2-3)
CASSLMERMRGADTQYF

SEQ ID NO: 501691 - protein, 11 aa, Homo sapiens
  CDR3 for alpha chain variable domain of TCR clone 250846 (TRAV13-1, TRAJ40)
CAVSGTYIYIF

SEQ ID NO: 501692 - protein, 13 aa, Homo sapiens
  CDR3 for beta chain variable domain of TCR clone 250846 (TRBV19, TRBJ1-5)
CASSRGGNQPQHF

SEQ ID NO: 501693 - protein, 13 aa, Homo sapiens
  CDR3 for alpha chain variable domain of TCR clone 250847 (TRAV8-3, TRAJ48)
CAVGPFGNVKLTF

SEQ ID NO: 501694 - protein, 12 aa, Homo sapiens
  CDR3 for beta chain variable domain of TCR clone 250847 (TRBV11-2, TRBJ2-2)
CASSLGGGELFF

SEQ ID NO: 501695 - protein, 10 aa, Homo sapiens
  CDR3 for alpha chain variable domain of TCR clone 250848 (TRAV12-1, TRAJ23)
CVVSGGKLIF

SEQ ID NO: 501696 - protein, 12 aa, Homo sapiens
  CDR3 for beta chain variable domain of TCR clone 250848 (TRBV7-8, TRBJ2-1)
CASSLGHNEQFF

SEQ ID NO: 501697 - protein, 14 aa, Homo sapiens
  CDR3 for alpha chain variable domain of TCR clone 250849 (TRAV3, TRAJ21)
CAVESQANFNKFYF

SEQ ID NO: 501698 - protein, 10 aa, Homo sapiens
  CDR3 for beta chain variable domain of TCR clone 250849 (TRBV7-9, TRBJ2-1)
PTSGRNEQFF

SEQ ID NO: 501699 - protein, 15 aa, Homo sapiens
  CDR3 for alpha chain variable domain of TCR clone 250850 (TRAV4, TRAJ39)
CLVGPNNNVGNMLTF

SEQ ID NO: 501700 - protein, 14 aa, Homo sapiens
  CDR3 for beta chain variable domain of TCR clone 250850 (TRBV11-2, TRBJ2-5)
CASSRTGGIETQYF

SEQ ID NO: 501701 - protein, 14 aa, Homo sapiens
  CDR3 for alpha chain variable domain of TCR clone 250851 (TRAV2, TRAJ3)
CAVRPYSSASKIIF

SEQ ID NO: 501702 - protein, 14 aa, Homo sapiens
  CDR3 for beta chain variable domain of TCR clone 250851 (TRBV19, TRBJ2-1)
CASSDNQGANEQFF

SEQ ID NO: 501703 - protein, 15 aa, Homo sapiens
  CDR3 for alpha chain variable domain of TCR clone 250852 (TRAV17, TRAJ22)
CATVAPSGSARQLTF

SEQ ID NO: 501704 - protein, 14 aa, Homo sapiens
  CDR3 for beta chain variable domain of TCR clone 250852 (TRBV4-1, TRBJ2-2)
CASSQAVNSGELFF

SEQ ID NO: 501705 - protein, 13 aa, Homo sapiens
  CDR3 for alpha chain variable domain of TCR clone 250853 (TRAV12-3, TRAJ9)
CAMRNTGGFKTIF

SEQ ID NO: 501706 - protein, 14 aa, Homo sapiens
  CDR3 for beta chain variable domain of TCR clone 250853 (TRBV11-2, TRBJ2-7)
CASSSIREGYEQYF

SEQ ID NO: 501707 - protein, 13 aa, Homo sapiens
  CDR3 for alpha chain variable domain of TCR clone 250854 (TRAV27, TRAJ41)
CAGEGNSGYALNF

SEQ ID NO: 501708 - protein, 16 aa, Homo sapiens
  CDR3 for beta chain variable domain of TCR clone 250854 (TRBV28, TRBJ2-1)
CASSSPGLAKGDEQFF

SEQ ID NO: 501709 - protein, 11 aa, Homo sapiens
  CDR3 for alpha chain variable domain of TCR clone 250855 (TRAV21, TRAJ41)
CAVRSGYALNF

SEQ ID NO: 501710 - protein, 13 aa, Homo sapiens
  CDR3 for beta chain variable domain of TCR clone 250855 (TRBV7-9, TRBJ1-2)
CASSLKQNHGYTF

SEQ ID NO: 501711 - protein, 16 aa, Homo sapiens
  CDR3 for alpha chain variable domain of TCR clone 250856 (TRAV1-2, TRAJ10)
CAVIGVLTGGGNKLTF

SEQ ID NO: 501712 - protein, 16 aa, Homo sapiens
  CDR3 for beta chain variable domain of TCR clone 250856 (TRBV7-3, TRBJ2-1)
CASSKPLAGGYNEQFF

SEQ ID NO: 501713 - protein, 16 aa, Homo sapiens
  CDR3 for alpha chain variable domain of TCR clone 250857 (TRAV8-3, TRAJ52)
CAVQPAGGTSYGKMTF

SEQ ID NO: 501714 - protein, 15 aa, Homo sapiens
  CDR3 for beta chain variable domain of TCR clone 250857 (TRBV11-2, TRBJ2-7)
CASSLAGGVATEQYF

SEQ ID NO: 501715 - protein, 13 aa, Homo sapiens
  CDR3 for alpha chain variable domain of TCR clone 250858 (TRAV8-4, TRAJ30)
CAARFNRDDKIIF

SEQ ID NO: 501716 - protein, 13 aa, Homo sapiens
  CDR3 for beta chain variable domain of TCR clone 250858 (TRBV3-1, TRBJ2-2)
CASLARGSGELFF

SEQ ID NO: 501717 - protein, 13 aa, Homo sapiens
  CDR3 for alpha chain variable domain of TCR clone 250859 (TRAV20, TRAJ31)
CAVRAIGGARLMF

SEQ ID NO: 501718 - protein, 14 aa, Homo sapiens
  CDR3 for beta chain variable domain of TCR clone 250859 (TRBV2, TRBJ1-5)
CASSGTVSNQPQHF

SEQ ID NO: 501719 - protein, 16 aa, Homo sapiens
  CDR3 for alpha chain variable domain of TCR clone 250860 (TRAV4, TRAJ8)
CLVGDSGNTGFQKLVF

SEQ ID NO: 501720 - protein, 15 aa, Homo sapiens
  CDR3 for beta chain variable domain of TCR clone 250860 (TRBV15, TRBJ1-2)
CATSRVRASGSGHTF

SEQ ID NO: 501721 - protein, 15 aa, Homo sapiens
  CDR3 for alpha chain variable domain of TCR clone 250861 (TRAV2, TRAJ9)
CAVEDRGTGGFKTSF

SEQ ID NO: 501722 - protein, 19 aa, Homo sapiens
  CDR3 for beta chain variable domain of TCR clone 250861 (TRBV28, TRBJ2-7)
CASSYSGTSRLGWVYEQYF

SEQ ID NO: 501723 - protein, 18 aa, Homo sapiens
  CDR3 for alpha chain variable domain of TCR clone 250862 (TRAV21, TRAJ52)
CAVRPSPAGCTSYGKLTL

SEQ ID NO: 501724 - protein, 16 aa, Homo sapiens
  CDR3 for beta chain variable domain of TCR clone 250862 (TRBV13, TRBJ2-2)
CASSPRTGEHTGELFF

SEQ ID NO: 501725 - protein, 17 aa, Homo sapiens
  CDR3 for alpha chain variable domain of TCR clone 250863 (TRAV3, TRAJ12)
CAVSDGGRMDSSYKLIF

SEQ ID NO: 501726 - protein, 15 aa, Homo sapiens
  CDR3 for beta chain variable domain of TCR clone 250863 (TRBV5-1, TRBJ2-3)
CASSVTSGSTDTQYF

SEQ ID NO: 501727 - protein, 12 aa, Homo sapiens
  CDR3 for alpha chain variable domain of TCR clone 250864 (TRAV30, TRAJ43)
CGTEERGNDMRF

SEQ ID NO: 501728 - protein, 14 aa, Homo sapiens
  CDR3 for beta chain variable domain of TCR clone 250864 (TRBV28, TRBJ1-1)
CASSESGRGTEAFF

SEQ ID NO: 501729 - protein, 15 aa, Homo sapiens
  CDR3 for alpha chain variable domain of TCR clone 250865 (TRAV26-1, TRAJ40)
CIVRAVPSGTYKYIF

SEQ ID NO: 501730 - protein, 14 aa, Homo sapiens
  CDR3 for beta chain variable domain of TCR clone 250865 (TRBV19, TRBJ2-1)
CASKDPGLANEQFF

SEQ ID NO: 501731 - protein, 15 aa, Homo sapiens
  CDR3 for alpha chain variable domain of TCR clone 250866 (TRAV12-3, TRAJ22)
CSMRSSSGSARQLTF

SEQ ID NO: 501732 - protein, 18 aa, Homo sapiens
  CDR3 for beta chain variable domain of TCR clone 250866 (TRBV27, TRBJ2-1)
CASRRSGRGESSGNEQFF

SEQ ID NO: 501733 - protein, 13 aa, Homo sapiens
  CDR3 for alpha chain variable domain of TCR clone 250867 (TRAV17, TRAJ9)
CASDYTGGFKTIF

SEQ ID NO: 501734 - protein, 16 aa, Homo sapiens
  CDR3 for beta chain variable domain of TCR clone 250867 (TRBV7-7, TRBJ2-1)
CASSLASGASYNEQFF

SEQ ID NO: 501735 - protein, 14 aa, Homo sapiens
  CDR3 for alpha chain variable domain of TCR clone 250868 (TRAV4, TRAJ17)
CLVGDMAAGNKLTF

SEQ ID NO: 501736 - protein, 15 aa, Homo sapiens
  CDR3 for beta chain variable domain of TCR clone 250868 (TRBV18, TRBJ1-5)
CASSPSDRSNQPQHF

SEQ ID NO: 501737 - protein, 12 aa, Homo sapiens
  CDR3 for alpha chain variable domain of TCR clone 250869 (TRAV36/DV7, TRAJ54)
CAVVRGAQKLVF

SEQ ID NO: 501738 - protein, 16 aa, Homo sapiens
  CDR3 for beta chain variable domain of TCR clone 250869 (TRBV12-4, TRBJ2-2)
CASSFWIVGNTGELFF

SEQ ID NO: 501739 - protein, 13 aa, Homo sapiens
  CDR3 for alpha chain variable domain of TCR clone 250870 (TRAV27, TRAJ11)
CAGARSGYSTLTF

SEQ ID NO: 501740 - protein, 16 aa, Homo sapiens
  CDR3 for beta chain variable domain of TCR clone 250870 (TRBV10-2, TRBJ2-2)
CASSESRDRGFGELFF

SEQ ID NO: 501741 - protein, 14 aa, Homo sapiens
  CDR3 for alpha chain variable domain of TCR clone 250871 (TRAV1-2, TRAJ16)
CAVNRFSDGQKLLF

SEQ ID NO: 501742 - protein, 17 aa, Homo sapiens
  CDR3 for beta chain variable domain of TCR clone 250871 (TRBV20-1, TRBJ2-3)
CSAVSPGLAGGQDTQYF

SEQ ID NO: 501743 - protein, 16 aa, Homo sapiens
  CDR3 for alpha chain variable domain of TCR clone 250872 (TRAV12-1, TRAJ21)
CVVLSGYFGSGTKLNV

SEQ ID NO: 501744 - protein, 11 aa, Homo sapiens
  CDR3 for beta chain variable domain of TCR clone 250872 (TRBV29-1, TRBJ2-5)
CSEDRTGTQYF

SEQ ID NO: 501745 - protein, 12 aa, Homo sapiens
  CDR3 for alpha chain variable domain of TCR clone 250873 (TRAV9-2, TRAJ41)
CSLTNSGYALNF

SEQ ID NO: 501746 - protein, 14 aa, Homo sapiens
  CDR3 for beta chain variable domain of TCR clone 250873 (TRBV5-1, TRBJ1-1)
CASSLQGASTEAFF

SEQ ID NO: 501747 - protein, 13 aa, Homo sapiens
  CDR3 for alpha chain variable domain of TCR clone 250874 (TRAV23/DV6, TRAJ16)
CAASISDGHKLLF

SEQ ID NO: 501748 - protein, 15 aa, Homo sapiens
  CDR3 for beta chain variable domain of TCR clone 250874 (TRBV2, TRBJ2-2)
CASSRETVGTGELFF

SEQ ID NO: 501749 - protein, 14 aa, Homo sapiens
  CDR3 for alpha chain variable domain of TCR clone 250875 (TRAV38-1, TRAJ45)
CAYYSGGGADGLTF

SEQ ID NO: 501750 - protein, 13 aa, Homo sapiens
  CDR3 for beta chain variable domain of TCR clone 250875 (TRBV7-2, TRBJ2-2)
CASSLAVTGELFF

SEQ ID NO: 501751 - protein, 14 aa, Homo sapiens
  CDR3 for alpha chain variable domain of TCR clone 250876 (TRAV12-2, TRAJ36)
CAVNPPTGANNLFF

SEQ ID NO: 501752 - protein, 17 aa, Homo sapiens
  CDR3 for beta chain variable domain of TCR clone 250876 (TRBV27, TRBJ2-6)
CASSLTGFASGANDLTF

SEQ ID NO: 501753 - protein, 15 aa, Homo sapiens
  CDR3 for alpha chain variable domain of TCR clone 250877 (TRAV8-3, TRAJ11)
CAVGLLNSGYSTLTF

SEQ ID NO: 501754 - protein, 16 aa, Homo sapiens
  CDR3 for beta chain variable domain of TCR clone 250877 (TRBV4-1, TRBJ2-3)
CASSQSTSGAEHTQYF

SEQ ID NO: 501755 - protein, 13 aa, Homo sapiens
  CDR3 for alpha chain variable domain of TCR clone 250878 (TRAV2, TRAJ40)
CAVVTSGTYKYIF

SEQ ID NO: 501756 - protein, 18 aa, Homo sapiens
  CDR3 for beta chain variable domain of TCR clone 250878 (TRBV11-3, TRBJ2-1)
CASSSYPGGRDSYNEQFF

SEQ ID NO: 501757 - protein, 10 aa, Homo sapiens
  CDR3 for alpha chain variable domain of TCR clone 250879 (TRAV26-1, TRAJ40)
CIAGTYKYIF

SEQ ID NO: 501758 - protein, 13 aa, Homo sapiens
  CDR3 for beta chain variable domain of TCR clone 250879 (TRBV20-1, TRBJ1-2)
CSARGTADYGYTF

SEQ ID NO: 501759 - protein, 14 aa, Homo sapiens
  CDR3 for alpha chain variable domain of TCR clone 250880 (TRAV12-3, TRAJ9)
CAMSPNTGGCKTIF

SEQ ID NO: 501760 - protein, 12 aa, Homo sapiens
  CDR3 for beta chain variable domain of TCR clone 250880 (TRBV11-2, TRBJ2-2)
CASSLGGGELFF

SEQ ID NO: 501761 - protein, 16 aa, Homo sapiens
  CDR3 for alpha chain variable domain of TCR clone 250881 (TRAV26-1, TRAJ56)
CIVRARERGANSKLTF

SEQ ID NO: 501762 - protein, 15 aa, Homo sapiens
  CDR3 for beta chain variable domain of TCR clone 250881 (TRBV7-2, TRBJ1-1)
CASSLRANTEAFLDK

SEQ ID NO: 501763 - protein, 15 aa, Homo sapiens
  CDR3 for alpha chain variable domain of TCR clone 250882 (TRAV8-3, TRAJ6)
CAVGPLGGGSYIRTF

SEQ ID NO: 501764 - protein, 14 aa, Homo sapiens
  CDR3 for beta chain variable domain of TCR clone 250882 (TRBV19, TRBJ2-2)
CASSTGQGAGELFF

SEQ ID NO: 501765 - protein, 14 aa, Homo sapiens
  CDR3 for alpha chain variable domain of TCR clone 250883 (TRAV4, TRAJ43)
CLVGPIYNNNDMRF

SEQ ID NO: 501766 - protein, 21 aa, Homo sapiens
  CDR3 for beta chain variable domain of TCR clone 250883 (TRBV11-1, TRBJ2-1)
CASSARERLRPEGPSYNEQFF

SEQ ID NO: 501767 - protein, 14 aa, Homo sapiens
  CDR3 for alpha chain variable domain of TCR clone 250884 (TRAV27, TRAJ15)
CAGFDNHAGTALIF

SEQ ID NO: 501768 - protein, 11 aa, Homo sapiens
  CDR3 for beta chain variable domain of TCR clone 250884 (TRBV29-1, TRBJ1-1)
CSVEVGTRTFF

SEQ ID NO: 501769 - protein, 16 aa, Homo sapiens
  CDR3 for alpha chain variable domain of TCR clone 250885 (TRAV12-2, TRAJ6)
RAVRIQASGGSYIPTF

SEQ ID NO: 501770 - protein, 14 aa, Homo sapiens
  CDR3 for beta chain variable domain of TCR clone 250885 (TRBV2, TRBJ2-2)
CASSERRFTGELFF

SEQ ID NO: 501771 - protein, 16 aa, Homo sapiens
  CDR3 for alpha chain variable domain of TCR clone 250886 (TRAV8-3, TRAJ44)
CAVGTLMTGTASKLTY

SEQ ID NO: 501772 - protein, 15 aa, Homo sapiens
  CDR3 for beta chain variable domain of TCR clone 250886 (TRBV10-2, TRBJ2-6)
CASSEQGTGANVLTF

SEQ ID NO: 501773 - protein, 14 aa, Homo sapiens
  CDR3 for alpha chain variable domain of TCR clone 250887 (TRAV12-2, TRAJ45)
CALPERGGADGLTF

SEQ ID NO: 501774 - protein, 16 aa, Homo sapiens
  CDR3 for beta chain variable domain of TCR clone 250887 (TRBV7-3, TRBJ2-2)
CASSLKRGTLSGELFF

SEQ ID NO: 501775 - protein, 16 aa, Homo sapiens
  CDR3 for alpha chain variable domain of TCR clone 250888 (TRAV30, TRAJ24)
CGTEIVDADSWGKFQF

SEQ ID NO: 501776 - protein, 14 aa, Homo sapiens
  CDR3 for beta chain variable domain of TCR clone 250888 (TRBV7-9, TRBJ2-4)
CASSVAMGGNIQYF

SEQ ID NO: 501777 - protein, 13 aa, Homo sapiens
  CDR3 for alpha chain variable domain of TCR clone 250889 (TRAV21, TRAJ27)
CAARPGNAGKSTF

SEQ ID NO: 501778 - protein, 14 aa, Homo sapiens
  CDR3 for beta chain variable domain of TCR clone 250889 (TRBV7-9, TRBJ2-1)
CASRPTGLRNEQFF

SEQ ID NO: 501779 - protein, 16 aa, Homo sapiens
  CDR3 for alpha chain variable domain of TCR clone 250890 (TRAV27, TRAJ13)
CAGAKSDSGGYQKATF

SEQ ID NO: 501780 - protein, 15 aa, Homo sapiens
  CDR3 for beta chain variable domain of TCR clone 250890 (TRBV29-1, TRBJ2-1)
CSVGRHALFYNEQLV

SEQ ID NO: 501781 - protein, 12 aa, Homo sapiens
  CDR3 for alpha chain variable domain of TCR clone 250891 (TRAV27, TRAJ36)
ASTPAGANNLFF

SEQ ID NO: 501782 - protein, 13 aa, Homo sapiens
  CDR3 for beta chain variable domain of TCR clone 250891 (TRBV7-9, TRBJ2-3)
CARSPGSTDTQYF

SEQ ID NO: 501783 - protein, 13 aa, Homo sapiens
  CDR3 for alpha chain variable domain of TCR clone 250892 (TRAV3, TRAJ30)
CAVRDRGDDKIIF

SEQ ID NO: 501784 - protein, 11 aa, Homo sapiens
  CDR3 for beta chain variable domain of TCR clone 250892 (TRBV29-1, TRBJ2-5)
CSEDRTGTQYF

SEQ ID NO: 501785 - protein, 15 aa, Homo sapiens
  CDR3 for alpha chain variable domain of TCR clone 250893 (TRAV26-1, TRAJ39)
CIVRDGSDAGTMLTF

SEQ ID NO: 501786 - protein, 16 aa, Homo sapiens
  CDR3 for beta chain variable domain of TCR clone 250893 (TRBV29-1, TRBJ2-7)
CSVEVVGTSGSYEQYF

SEQ ID NO: 501787 - protein, 11 aa, Homo sapiens
  CDR3 for alpha chain variable domain of TCR clone 250894 (TRAV35, TRAJ39)
GLNNAGNMLTF

SEQ ID NO: 501788 - protein, 14 aa, Homo sapiens
  CDR3 for beta chain variable domain of TCR clone 250894 (TRBV20-1, TRBJ1-1)
CSAMGGTANTEAFF

SEQ ID NO: 501789 - protein, 16 aa, Homo sapiens
  CDR3 for alpha chain variable domain of TCR clone 250895 (TRAV17, TRAJ28)
CSTDEYSGAGSYQLTF

SEQ ID NO: 501790 - protein, 13 aa, Homo sapiens
  CDR3 for beta chain variable domain of TCR clone 250895 (TRBV7-9, TRBJ1-2)
CASRTGPNYGYTF

SEQ ID NO: 501791 - protein, 13 aa, Homo sapiens
  CDR3 for alpha chain variable domain of TCR clone 250896 (TRAV17, TRAJ9)
CATDYTGGFKTIF

SEQ ID NO: 501792 - protein, 15 aa, Homo sapiens
  CDR3 for beta chain variable domain of TCR clone 250896 (TRBV7-2, TRBJ2-2)
CASRRPGQNTGELFF

SEQ ID NO: 501793 - protein, 14 aa, Homo sapiens
  CDR3 for alpha chain variable domain of TCR clone 250897 (TRAV12-3, TRAJ10)
SHLPLTGGGNKLTF

SEQ ID NO: 501794 - protein, 14 aa, Homo sapiens
  CDR3 for beta chain variable domain of TCR clone 250897 (TRBV7-2, TRBJ2-2)
CASSLSSNTGELFF

SEQ ID NO: 501795 - protein, 17 aa, Homo sapiens
  CDR3 for alpha chain variable domain of TCR clone 250898 (TRAV12-2, TRAJ4)
CAVNVRPVSGGYNKLIF

SEQ ID NO: 501796 - protein, 14 aa, Homo sapiens
  CDR3 for beta chain variable domain of TCR clone 250898 (TRBV12-4, TRBJ1-6)
CASNLQGKGSPLHF

SEQ ID NO: 501797 - protein, 14 aa, Homo sapiens
  CDR3 for alpha chain variable domain of TCR clone 250899 (TRAV17, TRAJ35)
CATDRPGFGYVLHC

SEQ ID NO: 501798 - protein, 15 aa, Homo sapiens
  CDR3 for beta chain variable domain of TCR clone 250899 (TRBV28, TRBJ2-5)
CASSSGRVIQETQYF

SEQ ID NO: 501799 - protein, 14 aa, Homo sapiens
  CDR3 for alpha chain variable domain of TCR clone 250900 (TRAV8-3, TRAJ4)
CAVGAAGGYNKLIF

SEQ ID NO: 501800 - protein, 14 aa, Homo sapiens
  CDR3 for beta chain variable domain of TCR clone 250900 (TRBV25-1, TRBJ1-1)
CASTHLGGNTGAFF

SEQ ID NO: 501801 - protein, 12 aa, Homo sapiens
  CDR3 for alpha chain variable domain of TCR clone 250901 (TRAV12-1, TRAJ40)
CVVYSGTYKYIF

SEQ ID NO: 501802 - protein, 14 aa, Homo sapiens
  CDR3 for beta chain variable domain of TCR clone 250901 (TRBV7-9, TRBJ2-5)
CASSLDTAQQTQYF

SEQ ID NO: 501803 - protein, 15 aa, Homo sapiens
  CDR3 for alpha chain variable domain of TCR clone 250902 (TRAV3, TRAJ27)
CAVRGFTPMQANQPL

SEQ ID NO: 501804 - protein, 12 aa, Homo sapiens
  CDR3 for beta chain variable domain of TCR clone 250902 (TRBV11-2, TRBJ2-2)
CASSRGGGELFF

SEQ ID NO: 501805 - protein, 14 aa, Homo sapiens
  CDR3 for alpha chain variable domain of TCR clone 250903 (TRAV12-2, TRAJ9)
RAVNALEGGFKNIF

SEQ ID NO: 501806 - protein, 16 aa, Homo sapiens
  CDR3 for beta chain variable domain of TCR clone 250903 (TRBV19, TRBJ1-6)
CASSVAPVAGNSPLHF

SEQ ID NO: 501807 - protein, 16 aa, Homo sapiens
  CDR3 for alpha chain variable domain of TCR clone 250904 (TRAV3, TRAJ10)
CAVRDMRAGGGAKLTF

SEQ ID NO: 501808 - protein, 15 aa, Homo sapiens
  CDR3 for beta chain variable domain of TCR clone 250904 (TRBV5-1, TRBJ2-7)
CASSLNGGPAREQYF

SEQ ID NO: 501809 - protein, 12 aa, Homo sapiens
  CDR3 for alpha chain variable domain of TCR clone 250905 (TRAV12-1, TRAJ40)
CVVYSGTYKYIF

SEQ ID NO: 501810 - protein, 17 aa, Homo sapiens
  CDR3 for beta chain variable domain of TCR clone 250905 (TRBV11-3, TRBJ1-5)
CASSPLTVLRGNQPQHF

SEQ ID NO: 501811 - protein, 13 aa, Homo sapiens
  CDR3 for alpha chain variable domain of TCR clone 250906 (TRAV2, TRAJ24)
TTVPLVSWGRLQF

SEQ ID NO: 501812 - protein, 17 aa, Homo sapiens
  CDR3 for beta chain variable domain of TCR clone 250906 (TRBV5-1, TRBJ2-1)
CASSTGTSGYSYNEQFF

SEQ ID NO: 501813 - protein, 21 aa, Homo sapiens
  CDR3 for alpha chain variable domain of TCR clone 250907 (TRAV3, )
CAVRPTPDIQNPDPAVYQLRE

SEQ ID NO: 501814 - protein, 15 aa, Homo sapiens
  CDR3 for beta chain variable domain of TCR clone 250907 (TRBV11-3, TRBJ2-5)
CASSDTSGGIETQYF

SEQ ID NO: 501815 - protein, 13 aa, Homo sapiens
  CDR3 for alpha chain variable domain of TCR clone 250908 (TRAV12-2, TRAJ26)
CAVTDPYGQNFVF

SEQ ID NO: 501816 - protein, 12 aa, Homo sapiens
  CDR3 for beta chain variable domain of TCR clone 250908 (TRBV18, TRBJ2-7)
CASVYVGGEQYF

SEQ ID NO: 501817 - protein, 16 aa, Homo sapiens
  CDR3 for alpha chain variable domain of TCR clone 250909 (TRAV30, TRAJ24)
CGTEIVDAHSWGKFQF

SEQ ID NO: 501818 - protein, 13 aa, Homo sapiens
  CDR3 for beta chain variable domain of TCR clone 250909 (TRBV7-3, TRBJ1-1)
CASSQEWGAEAFC

SEQ ID NO: 501819 - protein, 15 aa, Homo sapiens
  CDR3 for alpha chain variable domain of TCR clone 250910 (TRAV26-1, TRAJ29)
CIVRVEGSGNTPLVF

SEQ ID NO: 501820 - protein, 17 aa, Homo sapiens
  CDR3 for beta chain variable domain of TCR clone 250910 (TRBV7-9, TRBJ2-5)
CASSPGLAGGGRETQYF

SEQ ID NO: 501821 - protein, 15 aa, Homo sapiens
  CDR3 for alpha chain variable domain of TCR clone 250911 (TRAV3, TRAJ20)
CAVRDIKLSDYKLSF

SEQ ID NO: 501822 - protein, 14 aa, Homo sapiens
  CDR3 for beta chain variable domain of TCR clone 250911 (TRBV25-1, TRBJ1-1)
CASTHLGGNTEAFF

SEQ ID NO: 501823 - protein, 16 aa, Homo sapiens
  CDR3 for alpha chain variable domain of TCR clone 250912 (TRAV30, TRAJ24)
CGTEIVDADSWGKFQF

SEQ ID NO: 501824 - protein, 14 aa, Homo sapiens
  CDR3 for beta chain variable domain of TCR clone 250912 (TRBV28, TRBJ1-1)
CASSESGRGTEAFF

SEQ ID NO: 501825 - protein, 13 aa, Homo sapiens
  CDR3 for alpha chain variable domain of TCR clone 250913 (TRAV2, TRAJ9)
CAVSGTGGFKTIF

SEQ ID NO: 501826 - protein, 15 aa, Homo sapiens
  CDR3 for beta chain variable domain of TCR clone 250913 (TRBV19, TRBJ2-7)
CASSPAGSGEALRYF

SEQ ID NO: 501827 - protein, 14 aa, Homo sapiens
  CDR3 for alpha chain variable domain of TCR clone 250914 (TRAV12-2, TRAJ40)
CAVKIPSGTYKYIF

SEQ ID NO: 501828 - protein, 14 aa, Homo sapiens
  CDR3 for beta chain variable domain of TCR clone 250914 (TRBV7-2, TRBJ1-1)
CAISFLTGTTEAFF

SEQ ID NO: 501829 - protein, 13 aa, Homo sapiens
  CDR3 for alpha chain variable domain of TCR clone 250915 (TRAV20, TRAJ37)
CAGCSSNTGNLNF

SEQ ID NO: 501830 - protein, 11 aa, Homo sapiens
  CDR3 for beta chain variable domain of TCR clone 250915 (TRBV12-4, TRBJ2-3)
CASTATDTQYF

SEQ ID NO: 501831 - protein, 15 aa, Homo sapiens
  CDR3 for alpha chain variable domain of TCR clone 250916 (TRAV12-3, TRAJ6)
CAMSTTTGGSYIPTF

SEQ ID NO: 501832 - protein, 14 aa, Homo sapiens
  CDR3 for beta chain variable domain of TCR clone 250916 (TRBV7-8, TRBJ2-7)
CASTFRGGPNEQYF

SEQ ID NO: 501833 - protein, 14 aa, Homo sapiens
  CDR3 for alpha chain variable domain of TCR clone 250917 (TRAV2, TRAJ9)
CAVEDRSGGFKTIF

SEQ ID NO: 501834 - protein, 15 aa, Homo sapiens
  CDR3 for beta chain variable domain of TCR clone 250917 (TRBV6-6, TRBJ2-7)
CASSYSYGGSYEQYL

SEQ ID NO: 501835 - protein, 14 aa, Homo sapiens
  CDR3 for alpha chain variable domain of TCR clone 250918 (TRAV16, TRAJ33)
CALSATDSNYQLIW

SEQ ID NO: 501836 - protein, 15 aa, Homo sapiens
  CDR3 for beta chain variable domain of TCR clone 250918 (TRBV9, TRBJ1-6)
CASSVAGTGDSPLHF

SEQ ID NO: 501837 - protein, 14 aa, Homo sapiens
  CDR3 for alpha chain variable domain of TCR clone 250919 (TRAV1-2, TRAJ8)
CAVRDPPGFQKLVF

SEQ ID NO: 501838 - protein, 19 aa, Homo sapiens
  CDR3 for beta chain variable domain of TCR clone 250919 (TRBV4-3, TRBJ2-7)
CASSQEFIGWQVTPYEQYF

SEQ ID NO: 501839 - protein, 14 aa, Homo sapiens
  CDR3 for alpha chain variable domain of TCR clone 250920 (TRAV26-1, TRAJ38)
CIADNAGNNRKLIW

SEQ ID NO: 501840 - protein, 15 aa, Homo sapiens
  CDR3 for beta chain variable domain of TCR clone 250920 (TRBV7-6, TRBJ1-4)
CATSLGAGAGEKLFF

SEQ ID NO: 501841 - protein, 14 aa, Homo sapiens
  CDR3 for alpha chain variable domain of TCR clone 250921 (TRAV13-1, TRAJ35)
CAASKGGFGNVLHC

SEQ ID NO: 501842 - protein, 17 aa, Homo sapiens
  CDR3 for beta chain variable domain of TCR clone 250921 (TRBV28, TRBJ2-5)
CASSRQGGLAGAETQYF

SEQ ID NO: 501843 - protein, 14 aa, Homo sapiens
  CDR3 for alpha chain variable domain of TCR clone 250922 (TRAV36/DV7, TRAJ40)
CAVETTSGTYKYIF

SEQ ID NO: 501844 - protein, 16 aa, Homo sapiens
  CDR3 for beta chain variable domain of TCR clone 250922 (TRBV20-1, TRBJ1-4)
CSAPGQGLLTNEKLFF

SEQ ID NO: 501845 - protein, 12 aa, Homo sapiens
  CDR3 for alpha chain variable domain of TCR clone 250923 (TRAV17, TRAJ57)
CATDGGSEKLVF

SEQ ID NO: 501846 - protein, 16 aa, Homo sapiens
  CDR3 for beta chain variable domain of TCR clone 250923 (TRBV12-4, TRBJ2-7)
CASSLIGGTGTYEQYF

SEQ ID NO: 501847 - protein, 14 aa, Homo sapiens
  CDR3 for alpha chain variable domain of TCR clone 250924 (TRAV12-2, TRAJ24)
CAVTPAYSWGKLQF

SEQ ID NO: 501848 - protein, 12 aa, Homo sapiens
  CDR3 for beta chain variable domain of TCR clone 250924 (TRBV3-1, TRBJ2-1)
CASSQGSSGQFF

SEQ ID NO: 501849 - protein, 14 aa, Homo sapiens
  CDR3 for alpha chain variable domain of TCR clone 250925 (TRAV12-2, TRAJ36)
CAVKISTGANNFFF

SEQ ID NO: 501850 - protein, 14 aa, Homo sapiens
  CDR3 for beta chain variable domain of TCR clone 250925 (TRBV25-1, TRBJ1-2)
CASSDTTGVVGYTF

SEQ ID NO: 501851 - protein, 11 aa, Homo sapiens
  CDR3 for alpha chain variable domain of TCR clone 250926 (TRAV21, TRAJ34)
CAPLDTDQLIF

SEQ ID NO: 501852 - protein, 16 aa, Homo sapiens
  CDR3 for beta chain variable domain of TCR clone 250926 (TRBV5-1, TRBJ2-3)
CASSLAGDRGTDTQYF

SEQ ID NO: 501853 - protein, 14 aa, Homo sapiens
  CDR3 for alpha chain variable domain of TCR clone 250927 (TRAV9-2, TRAJ39)
CALYIYNAGNMLTF

SEQ ID NO: 501854 - protein, 17 aa, Homo sapiens
  CDR3 for beta chain variable domain of TCR clone 250927 (TRBV9, TRBJ2-3)
CASSSTAGGPSTDTQYF

SEQ ID NO: 501855 - protein, 10 aa, Homo sapiens
  CDR3 for alpha chain variable domain of TCR clone 250928 (TRAV21, TRAJ5)
CAEPRRALTF

SEQ ID NO: 501856 - protein, 14 aa, Homo sapiens
  CDR3 for beta chain variable domain of TCR clone 250928 (TRBV6-3, TRBJ1-5)
CASSYVQGSQPQHF

SEQ ID NO: 501857 - protein, 19 aa, Homo sapiens
  CDR3 for alpha chain variable domain of TCR clone 250929 (TRAV36/DV7, TRAJ13)
CAVEAGPFLGVTRKLPLEL

SEQ ID NO: 501858 - protein, 16 aa, Homo sapiens
  CDR3 for beta chain variable domain of TCR clone 250929 (TRBV6-1, TRBJ2-5)
CASSETLDRGAETQYF

SEQ ID NO: 501859 - protein, 12 aa, Homo sapiens
  CDR3 for alpha chain variable domain of TCR clone 250930 (TRAV21, TRAJ33)
CAKMDSNYQLIW

SEQ ID NO: 501860 - protein, 15 aa, Homo sapiens
  CDR3 for beta chain variable domain of TCR clone 250930 (TRBV7-2, TRBJ1-2)
CASSLVSGGDYGYTF

SEQ ID NO: 501861 - protein, 13 aa, Homo sapiens
  CDR3 for alpha chain variable domain of TCR clone 250931 (TRAV17, TRAJ9)
CATDYTGGFKTIC

SEQ ID NO: 501862 - protein, 16 aa, Homo sapiens
  CDR3 for beta chain variable domain of TCR clone 250931 (TRBV7-7, TRBJ2-1)
CASSLASGTSYNEQFF

SEQ ID NO: 501863 - protein, 10 aa, Homo sapiens
  CDR3 for alpha chain variable domain of TCR clone 250932 (TRAV12-1, TRAJ20)
CVVNPRKLSF

SEQ ID NO: 501864 - protein, 15 aa, Homo sapiens
  CDR3 for beta chain variable domain of TCR clone 250932 (TRBV5-1, TRBJ2-1)
CPSSPPRAPYNEQFF

SEQ ID NO: 501865 - protein, 12 aa, Homo sapiens
  CDR3 for alpha chain variable domain of TCR clone 250933 (TRAV35, TRAJ31)
CAAASNNARLMF

SEQ ID NO: 501866 - protein, 13 aa, Homo sapiens
  CDR3 for beta chain variable domain of TCR clone 250933 (TRBV12-4, TRBJ2-5)
CASSLGGSRTQYF

SEQ ID NO: 501867 - protein, 13 aa, Homo sapiens
  CDR3 for alpha chain variable domain of TCR clone 250934 (TRAV3, TRAJ21)
CAVRELDFNKFYF

SEQ ID NO: 501868 - protein, 12 aa, Homo sapiens
  CDR3 for beta chain variable domain of TCR clone 250934 (TRBV28, TRBJ2-6)
CAIQAGANVLTF

SEQ ID NO: 501869 - protein, 15 aa, Homo sapiens
  CDR3 for alpha chain variable domain of TCR clone 250935 (TRAV26-1, TRAJ56)
CIVRAATGANSKLTF

SEQ ID NO: 501870 - protein, 16 aa, Homo sapiens
  CDR3 for beta chain variable domain of TCR clone 250935 (TRBV12-5, TRBJ2-5)
CASGPRTSGNQETQYF

SEQ ID NO: 501871 - protein, 14 aa, Homo sapiens
  CDR3 for alpha chain variable domain of TCR clone 250936 (TRAV38-1, TRAJ45)
CASHSGGGADGLTF

SEQ ID NO: 501872 - protein, 13 aa, Homo sapiens
  CDR3 for beta chain variable domain of TCR clone 250936 (TRBV10-3, TRBJ1-2)
CAISGRDSYGYSF

SEQ ID NO: 501873 - protein, 13 aa, Homo sapiens
  CDR3 for alpha chain variable domain of TCR clone 250937 (TRAV8-3, TRAJ28)
CAVGAVGSYQLTF

SEQ ID NO: 501874 - protein, 20 aa, Homo sapiens
  CDR3 for beta chain variable domain of TCR clone 250937 (TRBV4-3, TRBJ2-4)
CASSQGRWTGGLRSLNIQYF

SEQ ID NO: 501875 - protein, 12 aa, Homo sapiens
  CDR3 for alpha chain variable domain of TCR clone 250938 (TRAV8-4, TRAJ43)
CAVSVNNNDMRF

SEQ ID NO: 501876 - protein, 14 aa, Homo sapiens
  CDR3 for beta chain variable domain of TCR clone 250938 (TRBV7-9, TRBJ2-1)
CASSDNSGYNEQFF

SEQ ID NO: 501877 - protein, 15 aa, Homo sapiens
  CDR3 for alpha chain variable domain of TCR clone 250939 (TRAV20, TRAJ53)
CAVHASGGSNYKLTF

SEQ ID NO: 501878 - protein, 12 aa, Homo sapiens
  CDR3 for beta chain variable domain of TCR clone 250939 (TRBV7-8, TRBJ2-7)
CASSLGDREQYF

SEQ ID NO: 501879 - protein, 14 aa, Homo sapiens
  CDR3 for alpha chain variable domain of TCR clone 250940 (TRAV1-2, TRAJ8)
CAVREDTGFQKIVF

SEQ ID NO: 501880 - protein, 14 aa, Homo sapiens
  CDR3 for beta chain variable domain of TCR clone 250940 (TRBV29-1, TRBJ1-4)
CSVTGTGGNEKLFF

SEQ ID NO: 501881 - protein, 16 aa, Homo sapiens
  CDR3 for alpha chain variable domain of TCR clone 250941 (TRAV3, TRAJ37)
CAVRGKGSGNKGKLIL

SEQ ID NO: 501882 - protein, 13 aa, Homo sapiens
  CDR3 for beta chain variable domain of TCR clone 250941 (TRBV14, TRBJ2-7)
CASSQDRRYEQYF

SEQ ID NO: 501883 - protein, 13 aa, Homo sapiens
  CDR3 for alpha chain variable domain of TCR clone 250942 (TRAV8-3, TRAJ28)
CAVGAVGSYQLTF

SEQ ID NO: 501884 - protein, 17 aa, Homo sapiens
  CDR3 for beta chain variable domain of TCR clone 250942 (TRBV11-2, TRBJ2-1)
CASSLYPPRVEYNEQFF

SEQ ID NO: 501885 - protein, 15 aa, Homo sapiens
  CDR3 for alpha chain variable domain of TCR clone 250943 (TRAV8-3, TRAJ11)
CAVGLLNSGYSTLTF

SEQ ID NO: 501886 - protein, 16 aa, Homo sapiens
  CDR3 for beta chain variable domain of TCR clone 250943 (TRBV19, TRBJ2-3)
CDSSPGAASRTDTQYF

SEQ ID NO: 501887 - protein, 14 aa, Homo sapiens
  CDR3 for alpha chain variable domain of TCR clone 250944 (TRAV29/DV5, TRAJ36)
CAARRKTGANNLFF

SEQ ID NO: 501888 - protein, 14 aa, Homo sapiens
  CDR3 for beta chain variable domain of TCR clone 250944 (TRBV12-5, TRBJ2-5)
CARGSRTHQETQYF

SEQ ID NO: 501889 - protein, 16 aa, Homo sapiens
  CDR3 for alpha chain variable domain of TCR clone 250945 (TRAV20, TRAJ38)
CAVQASNAGNNRKPIW

SEQ ID NO: 501890 - protein, 16 aa, Homo sapiens
  CDR3 for beta chain variable domain of TCR clone 250945 (TRBV7-8, TRBJ2-6)
CASRVGDSSGANGLTF

SEQ ID NO: 501891 - protein, 15 aa, Homo sapiens
  CDR3 for alpha chain variable domain of TCR clone 250946 (TRAV26-1, TRAJ42)
CIVRVKGGSQGNLIS

SEQ ID NO: 501892 - protein, 16 aa, Homo sapiens
  CDR3 for beta chain variable domain of TCR clone 250946 (TRBV2, TRBJ2-4)
CASSEAPGGEQNIQYF

SEQ ID NO: 501893 - protein, 15 aa, Homo sapiens
  CDR3 for alpha chain variable domain of TCR clone 250947 (TRAV21, TRAJ53)
CATLNSGGSNCKLTF

SEQ ID NO: 501894 - protein, 15 aa, Homo sapiens
  CDR3 for beta chain variable domain of TCR clone 250947 (TRBV27, TRBJ2-1)
CASSNGGGSSNEQFF

SEQ ID NO: 501895 - protein, 14 aa, Homo sapiens
  CDR3 for alpha chain variable domain of TCR clone 250948 (TRAV16, TRAJ40)
CALHETYYLRNLQI

SEQ ID NO: 501896 - protein, 12 aa, Homo sapiens
  CDR3 for beta chain variable domain of TCR clone 250948 (TRBV7-3, TRBJ2-3)
CASSSLTDTQYF

SEQ ID NO: 501897 - protein, 13 aa, Homo sapiens
  CDR3 for alpha chain variable domain of TCR clone 250949 (TRAV3, TRAJ21)
CAVREPAFNKFYF

SEQ ID NO: 501898 - protein, 17 aa, Homo sapiens
  CDR3 for beta chain variable domain of TCR clone 250949 (TRBV7-3, TRBJ2-3)
CASSLMKRMRGADTQYF

SEQ ID NO: 501899 - protein, 13 aa, Homo sapiens
  CDR3 for alpha chain variable domain of TCR clone 250950 (TRAV30, TRAJ24)
CGTVTDSWGKLEF

SEQ ID NO: 501900 - protein, 14 aa, Homo sapiens
  CDR3 for beta chain variable domain of TCR clone 250950 (TRBV6-3, TRBJ2-2)
CASTYTPDTGELFF

SEQ ID NO: 501901 - protein, 15 aa, Homo sapiens
  CDR3 for alpha chain variable domain of TCR clone 250951 (TRAV12-2, TRAJ23)
CAVKPIYNQGGKLIF

SEQ ID NO: 501902 - protein, 16 aa, Homo sapiens
  CDR3 for beta chain variable domain of TCR clone 250951 (TRBV6-1, TRBJ2-5)
CASSETLDRGAETQYF

SEQ ID NO: 501903 - protein, 14 aa, Homo sapiens
  CDR3 for alpha chain variable domain of TCR clone 250952 (TRAV38-1, TRAJ45)
CAYYSGGGADGLTF

SEQ ID NO: 501904 - protein, 20 aa, Homo sapiens
  CDR3 for beta chain variable domain of TCR clone 250952 (TRBV28, TRBJ2-1)
CASTPIGRSPGLPGGNEQFF

SEQ ID NO: 501905 - protein, 15 aa, Homo sapiens
  CDR3 for alpha chain variable domain of TCR clone 250953 (TRAV29/DV5, TRAJ42)
CAAKTDGGSQGNLSF

SEQ ID NO: 501906 - protein, 15 aa, Homo sapiens
  CDR3 for beta chain variable domain of TCR clone 250953 (TRBV5-1, TRBJ2-2)
CASSSQGGNTGELFF

SEQ ID NO: 501907 - protein, 13 aa, Homo sapiens
  CDR3 for alpha chain variable domain of TCR clone 250954 (TRAV13-1, TRAJ5)
CAAEHTGRRALTF

SEQ ID NO: 501908 - protein, 13 aa, Homo sapiens
  CDR3 for beta chain variable domain of TCR clone 250954 (TRBV19, TRBJ1-1)
CASSITGESEAFF

SEQ ID NO: 501909 - protein, 15 aa, Homo sapiens
  CDR3 for alpha chain variable domain of TCR clone 250955 (TRAV8-1, TRAJ6)
CAVNTPPGGSYIPTF

SEQ ID NO: 501910 - protein, 13 aa, Homo sapiens
  CDR3 for beta chain variable domain of TCR clone 250955 (TRBV12-4, TRBJ2-1)
CQQFRTGASEQFF

SEQ ID NO: 501911 - protein, 12 aa, Homo sapiens
  CDR3 for alpha chain variable domain of TCR clone 250956 (TRAV21, TRAJ23)
CAVMLQGGKLIF

SEQ ID NO: 501912 - protein, 14 aa, Homo sapiens
  CDR3 for beta chain variable domain of TCR clone 250956 (TRBV7-2, TRBJ2-7)
CASRSQGAAYEQYF

SEQ ID NO: 501913 - protein, 14 aa, Homo sapiens
  CDR3 for alpha chain variable domain of TCR clone 250957 (TRAV20, TRAJ56)
CAVQFGGANSKLTF

SEQ ID NO: 501914 - protein, 14 aa, Homo sapiens
  CDR3 for beta chain variable domain of TCR clone 250957 (TRBV19, TRBJ2-2)
CASSIAGAFGELFF

SEQ ID NO: 501915 - protein, 11 aa, Homo sapiens
  CDR3 for alpha chain variable domain of TCR clone 250958 (TRAV12-3, TRAJ43)
CAMSVSNDMRF

SEQ ID NO: 501916 - protein, 14 aa, Homo sapiens
  CDR3 for beta chain variable domain of TCR clone 250958 (TRBV20-1, TRBJ1-1)
SAGLQVGGGTEAFF

SEQ ID NO: 501917 - protein, 16 aa, Homo sapiens
  CDR3 for alpha chain variable domain of TCR clone 250959 (TRAV17, TRAJ35)
CATAEGGIGFGKVLHC

SEQ ID NO: 501918 - protein, 19 aa, Homo sapiens
  CDR3 for beta chain variable domain of TCR clone 250959 (TRBV19, TRBJ2-5)
CASSIGQVTDFFLGETQYF

SEQ ID NO: 501919 - protein, 12 aa, Homo sapiens
  CDR3 for alpha chain variable domain of TCR clone 250960 (TRAV21, TRAJ13)
PGPSGGYQKVTF

SEQ ID NO: 501920 - protein, 15 aa, Homo sapiens
  CDR3 for beta chain variable domain of TCR clone 250960 (TRBV7-2, TRBJ2-1)
CASSSGLAGGNEQFF

SEQ ID NO: 501921 - protein, 18 aa, Homo sapiens
  CDR3 for alpha chain variable domain of TCR clone 250961 (TRAV26-1, TRAJ23)
CIVRVGLEVWNQGGKLIF

SEQ ID NO: 501922 - protein, 16 aa, Homo sapiens
  CDR3 for beta chain variable domain of TCR clone 250961 (TRBV12-4, TRBJ2-5)
CASSFFVRGRQETQYY

SEQ ID NO: 501923 - protein, 14 aa, Homo sapiens
  CDR3 for alpha chain variable domain of TCR clone 250962 (TRAV9-2, TRAJ39)
CALYIYNAGNMLTF

SEQ ID NO: 501924 - protein, 18 aa, Homo sapiens
  CDR3 for beta chain variable domain of TCR clone 250962 (TRBV12-4, TRBJ2-4)
CASSRTGAVDVAKNRQYF

SEQ ID NO: 501925 - protein, 14 aa, Homo sapiens
  CDR3 for alpha chain variable domain of TCR clone 250963 (TRAV17, TRAJ12)
CPILPMDSSYKLIF

SEQ ID NO: 501926 - protein, 15 aa, Homo sapiens
  CDR3 for beta chain variable domain of TCR clone 250963 (TRBV5-1, TRBJ1-1)
CASSLGEGENTEAFF

SEQ ID NO: 501927 - protein, 12 aa, Homo sapiens
  CDR3 for alpha chain variable domain of TCR clone 250964 (TRAV26-1, TRAJ39)
CIVRVEGNMLTF

SEQ ID NO: 501928 - protein, 12 aa, Homo sapiens
  CDR3 for beta chain variable domain of TCR clone 250964 (TRBV12-4, TRBJ2-7)
CASSLGGYEQYF

SEQ ID NO: 501929 - protein, 13 aa, Homo sapiens
  CDR3 for alpha chain variable domain of TCR clone 250965 (TRAV17, TRAJ5)
CAPMDTGRRALTF

SEQ ID NO: 501930 - protein, 14 aa, Homo sapiens
  CDR3 for beta chain variable domain of TCR clone 250965 (TRBV5-1, TRBJ2-7)
CASSWGQPSYEQYF

SEQ ID NO: 501931 - protein, 13 aa, Homo sapiens
  CDR3 for alpha chain variable domain of TCR clone 250966 (TRAV12-3, TRAJ20)
CAMRRSNDYKLSF

SEQ ID NO: 501932 - protein, 13 aa, Homo sapiens
  CDR3 for beta chain variable domain of TCR clone 250966 (TRBV7-9, TRBJ2-7)
CASSFAGAYEQYF

SEQ ID NO: 501933 - protein, 16 aa, Homo sapiens
  CDR3 for alpha chain variable domain of TCR clone 250967 (TRAV20, TRAJ22)
CAVQASSSGSARQLTF

SEQ ID NO: 501934 - protein, 13 aa, Homo sapiens
  CDR3 for beta chain variable domain of TCR clone 250967 (TRBV19, TRBJ1-2)
CASSVPGQDGYTF

SEQ ID NO: 501935 - protein, 14 aa, Homo sapiens
  CDR3 for alpha chain variable domain of TCR clone 250968 (TRAV8-1, TRAJ5)
CAVRTDTGRRALTF

SEQ ID NO: 501936 - protein, 15 aa, Homo sapiens
  CDR3 for beta chain variable domain of TCR clone 250968 (TRBV5-1, TRBJ2-5)
CASSFKGGDQETQYF

SEQ ID NO: 501937 - protein, 10 aa, Homo sapiens
  CDR3 for alpha chain variable domain of TCR clone 250969 (TRAV38-2/DV8, TRAJ40)
CASGTYKYIF

SEQ ID NO: 501938 - protein, 17 aa, Homo sapiens
  CDR3 for beta chain variable domain of TCR clone 250969 (TRBV5-5, TRBJ1-1)
CASSLRFRGLMNTEAFF

SEQ ID NO: 501939 - protein, 11 aa, Homo sapiens
  CDR3 for alpha chain variable domain of TCR clone 250970 (TRAV17, TRAJ36)
CAPTGANNLFF

SEQ ID NO: 501940 - protein, 13 aa, Homo sapiens
  CDR3 for beta chain variable domain of TCR clone 250970 (TRBV12-4, TRBJ2-7)
CASRPTETYEQLF

SEQ ID NO: 501941 - protein, 12 aa, Homo sapiens
  CDR3 for alpha chain variable domain of TCR clone 250971 (TRAV12-1, TRAJ40)
CVFYSGTYKYIF

SEQ ID NO: 501942 - protein, 12 aa, Homo sapiens
  CDR3 for beta chain variable domain of TCR clone 250971 (TRBV7-3, TRBJ2-1)
CDSSFINNEQFF

SEQ ID NO: 501943 - protein, 13 aa, Homo sapiens
  CDR3 for alpha chain variable domain of TCR clone 250972 (TRAV21, TRAJ27)
CAARRGNAGKSTF

SEQ ID NO: 501944 - protein, 15 aa, Homo sapiens
  CDR3 for beta chain variable domain of TCR clone 250972 (TRBV20-1, TRBJ2-7)
CSARDRVSGMDEQYF

SEQ ID NO: 501945 - protein, 13 aa, Homo sapiens
  CDR3 for alpha chain variable domain of TCR clone 250973 (TRAV30, TRAJ24)
CGTETDSWGKLQF

SEQ ID NO: 501946 - protein, 15 aa, Homo sapiens
  CDR3 for beta chain variable domain of TCR clone 250973 (TRBV25-1, TRBJ1-4)
CASSPGDSTNEKLFF

SEQ ID NO: 501947 - protein, 13 aa, Homo sapiens
  CDR3 for alpha chain variable domain of TCR clone 250974 (TRAV41, TRAJ48)
SVPVHFGNEKLTF

SEQ ID NO: 501948 - protein, 16 aa, Homo sapiens
  CDR3 for beta chain variable domain of TCR clone 250974 (TRBV12-5, TRBJ2-5)
CASGPRTSGNQETQYF

SEQ ID NO: 501949 - protein, 16 aa, Homo sapiens
  CDR3 for alpha chain variable domain of TCR clone 250975 (TRAV30, TRAJ24)
CGTEIADADSWGKSQL

SEQ ID NO: 501950 - protein, 14 aa, Homo sapiens
  CDR3 for beta chain variable domain of TCR clone 250975 (TRBV12-5, TRBJ2-5)
CASGSRTHQETQYF

SEQ ID NO: 501951 - protein, 12 aa, Homo sapiens
  CDR3 for alpha chain variable domain of TCR clone 250976 (TRAV8-3, TRAJ53)
CAVVGSNYKLTF

SEQ ID NO: 501952 - protein, 16 aa, Homo sapiens
  CDR3 for beta chain variable domain of TCR clone 250976 (TRBV7-9, TRBJ1-2)
CASSLGFSSGEDGYTF

SEQ ID NO: 501953 - protein, 16 aa, Homo sapiens
  CDR3 for alpha chain variable domain of TCR clone 250977 (TRAV3, TRAJ3)
CALRDRAKSSASKIIF

SEQ ID NO: 501954 - protein, 16 aa, Homo sapiens
  CDR3 for beta chain variable domain of TCR clone 250977 (TRBV20-1, TRBJ2-4)
CSATSLAELAKNIQYF

SEQ ID NO: 501955 - protein, 16 aa, Homo sapiens
  CDR3 for alpha chain variable domain of TCR clone 250978 (TRAV38-1, TRAJ32)
CAFMKGGGGATNKLIF

SEQ ID NO: 501956 - protein, 12 aa, Homo sapiens
  CDR3 for beta chain variable domain of TCR clone 250978 (TRBV11-2, TRBJ2-1)
CASSPGNNEQFF

SEQ ID NO: 501957 - protein, 13 aa, Homo sapiens
  CDR3 for alpha chain variable domain of TCR clone 250979 (TRAV21, TRAJ27)
CVARPGNAGKSTF

SEQ ID NO: 501958 - protein, 13 aa, Homo sapiens
  CDR3 for beta chain variable domain of TCR clone 250979 (TRBV7-3, TRBJ2-7)
CASSQAGGYEHYF

SEQ ID NO: 501959 - protein, 15 aa, Homo sapiens
  CDR3 for alpha chain variable domain of TCR clone 250980 (TRAV8-6, TRAJ11)
CAVSDRRSGYSTLTF

SEQ ID NO: 501960 - protein, 13 aa, Homo sapiens
  CDR3 for beta chain variable domain of TCR clone 250980 (TRBV29-1, TRBJ2-3)
SAALQGGADTQYF

SEQ ID NO: 501961 - protein, 13 aa, Homo sapiens
  CDR3 for alpha chain variable domain of TCR clone 250981 (TRAV13-1, TRAJ5)
CAASDTGRRALTF

SEQ ID NO: 501962 - protein, 14 aa, Homo sapiens
  CDR3 for beta chain variable domain of TCR clone 250981 (TRBV19, TRBJ2-2)
CASSTLHRSGELFF

SEQ ID NO: 501963 - protein, 13 aa, Homo sapiens
  CDR3 for alpha chain variable domain of TCR clone 250982 (TRAV17, TRAJ9)
CATYYTGGFKTIF

SEQ ID NO: 501964 - protein, 16 aa, Homo sapiens
  CDR3 for beta chain variable domain of TCR clone 250982 (TRBV7-7, TRBJ2-1)
RASSLASGTSYNEQFF

SEQ ID NO: 501965 - protein, 16 aa, Homo sapiens
  CDR3 for alpha chain variable domain of TCR clone 250983 (TRAV12-2, TRAJ45)
CAVKRNPGGGADGLTF

SEQ ID NO: 501966 - protein, 14 aa, Homo sapiens
  CDR3 for beta chain variable domain of TCR clone 250983 (TRBV29-1, TRBJ2-3)
CSAGAGVGADTQYF

SEQ ID NO: 501967 - protein, 11 aa, Homo sapiens
  CDR3 for alpha chain variable domain of TCR clone 250984 (TRAV1-1, TRAJ23)
CAVRQGGKLIF

SEQ ID NO: 501968 - protein, 14 aa, Homo sapiens
  CDR3 for beta chain variable domain of TCR clone 250984 (TRBV7-9, TRBJ2-2)
CASSGLADTGELFF

SEQ ID NO: 501969 - protein, 14 aa, Homo sapiens
  CDR3 for alpha chain variable domain of TCR clone 250985 (TRAV26-1, TRAJ48)
CIVQSNFGNEKLTF

SEQ ID NO: 501970 - protein, 13 aa, Homo sapiens
  CDR3 for beta chain variable domain of TCR clone 250985 (TRBV5-1, TRBJ2-5)
CASSVPPAETQYF

SEQ ID NO: 501971 - protein, 12 aa, Homo sapiens
  CDR3 for alpha chain variable domain of TCR clone 250986 (TRAV17, TRAJ20)
CATDANDYKLSF

SEQ ID NO: 501972 - protein, 13 aa, Homo sapiens
  CDR3 for beta chain variable domain of TCR clone 250986 (TRBV5-5, TRBJ1-2)
CASSFWRGEDYTF

SEQ ID NO: 501973 - protein, 12 aa, Homo sapiens
  CDR3 for alpha chain variable domain of TCR clone 250987 (TRAV8-3, TRAJ26)
CAGDNYVQNFVF

SEQ ID NO: 501974 - protein, 17 aa, Homo sapiens
  CDR3 for beta chain variable domain of TCR clone 250987 (TRBV7-8, TRBJ2-6)
CASSAGTGGAGANVLTF

SEQ ID NO: 501975 - protein, 12 aa, Homo sapiens
  CDR3 for alpha chain variable domain of TCR clone 250988 (TRAV12-3, TRAJ17)
CAMTLTGNKLTF

SEQ ID NO: 501976 - protein, 16 aa, Homo sapiens
  CDR3 for beta chain variable domain of TCR clone 250988 (TRBV12-4, TRBJ2-5)
WASSFFVRGRQETQYF

SEQ ID NO: 501977 - protein, 11 aa, Homo sapiens
  CDR3 for alpha chain variable domain of TCR clone 250989 (TRAV6, TRAJ41)
CAQNSGYALNF

SEQ ID NO: 501978 - protein, 15 aa, Homo sapiens
  CDR3 for beta chain variable domain of TCR clone 250989 (TRBV20-1, TRBJ1-5)
CSAFKNGQRNQPQHF

SEQ ID NO: 501979 - protein, 11 aa, Homo sapiens
  CDR3 for alpha chain variable domain of TCR clone 250990 (TRAV2, TRAJ31)
CAVYNNARLMF

SEQ ID NO: 501980 - protein, 16 aa, Homo sapiens
  CDR3 for beta chain variable domain of TCR clone 250990 (TRBV28, TRBJ1-6)
GASSSLLEGDNSPLHF

SEQ ID NO: 501981 - protein, 12 aa, Homo sapiens
  CDR3 for alpha chain variable domain of TCR clone 250991 (TRAV2, TRAJ10)
CASTGGGNKLTF

SEQ ID NO: 501982 - protein, 20 aa, Homo sapiens
  CDR3 for beta chain variable domain of TCR clone 250991 (TRBV7-8, TRBJ2-2)
CASCHLLPGPTIHITGELFF

SEQ ID NO: 501983 - protein, 16 aa, Homo sapiens
  CDR3 for alpha chain variable domain of TCR clone 250992 (TRAV12-1, TRAJ4)
CVVNMGPVGGYNKLIF

SEQ ID NO: 501984 - protein, 17 aa, Homo sapiens
  CDR3 for beta chain variable domain of TCR clone 250992 (TRBV4-3, TRBJ2-1)
CASSQFSSGRASGEQFV

SEQ ID NO: 501985 - protein, 12 aa, Homo sapiens
  CDR3 for alpha chain variable domain of TCR clone 250993 (TRAV3, TRAJ20)
CAVRDGDYKLSF

SEQ ID NO: 501986 - protein, 14 aa, Homo sapiens
  CDR3 for beta chain variable domain of TCR clone 250993 (TRBV4-2, TRBJ2-1)
CASGLDRAYNEQFF

SEQ ID NO: 501987 - protein, 14 aa, Homo sapiens
  CDR3 for alpha chain variable domain of TCR clone 250994 (TRAV21, TRAJ45)
CAVSSGGGADGLTF

SEQ ID NO: 501988 - protein, 15 aa, Homo sapiens
  CDR3 for beta chain variable domain of TCR clone 250994 (TRBV7-2, TRBJ1-2)
CASSLVSGGDYGYTF

SEQ ID NO: 501989 - protein, 18 aa, Homo sapiens
  CDR3 for alpha chain variable domain of TCR clone 250995 (TRAV26-1, TRAJ44)
CIVRVAGGGISTASKLTF

SEQ ID NO: 501990 - protein, 16 aa, Homo sapiens
  CDR3 for beta chain variable domain of TCR clone 250995 (TRBV20-1, TRBJ2-3)
CSAIFPIGGLTDTHYF

SEQ ID NO: 501991 - protein, 16 aa, Homo sapiens
  CDR3 for alpha chain variable domain of TCR clone 250996 (TRAV12-2, TRAJ40)
CAVIRGGTSGTYKYIF

SEQ ID NO: 501992 - protein, 13 aa, Homo sapiens
  CDR3 for beta chain variable domain of TCR clone 250996 (TRBV10-3, TRBJ2-7)
CASKLAVNYEQFF

SEQ ID NO: 501993 - protein, 12 aa, Homo sapiens
  CDR3 for alpha chain variable domain of TCR clone 250997 (TRAV8-3, TRAJ26)
CAGDNYVRILSL

SEQ ID NO: 501994 - protein, 17 aa, Homo sapiens
  CDR3 for beta chain variable domain of TCR clone 250997 (TRBV24-1, TRBJ2-1)
CATSDVSTSGTYNEQFF

SEQ ID NO: 501995 - protein, 14 aa, Homo sapiens
  CDR3 for alpha chain variable domain of TCR clone 250998 (TRAV38-2/DV8, TRAJ23)
CACRSQNQGGKLIF

SEQ ID NO: 501996 - protein, 13 aa, Homo sapiens
  CDR3 for beta chain variable domain of TCR clone 250998 (TRBV24-1, TRBJ2-1)
CATSAGPYNEQFF

SEQ ID NO: 501997 - protein, 12 aa, Homo sapiens
  CDR3 for alpha chain variable domain of TCR clone 250999 (TRAV22, TRAJ20)
CAVGGNDYKISF

SEQ ID NO: 501998 - protein, 13 aa, Homo sapiens
  CDR3 for beta chain variable domain of TCR clone 250999 (TRBV9, TRBJ1-1)
CASSVGTGTEAFF

SEQ ID NO: 501999 - protein, 16 aa, Homo sapiens
  CDR3 for alpha chain variable domain of TCR clone 251000 (TRAV25, TRAJ53)
CAGPKGSGGSNYKLTF

SEQ ID NO: 502000 - protein, 14 aa, Homo sapiens
  CDR3 for beta chain variable domain of TCR clone 251000 (TRBV19, TRBJ2-1)
CASPTFVLSGEQFF

SEQ ID NO: 502001 - protein, 13 aa, Homo sapiens
  CDR3 for alpha chain variable domain of TCR clone 251001 (TRAV38-2/DV8, TRAJ34)
CAYMTWNTDKLIF

SEQ ID NO: 502002 - protein, 18 aa, Homo sapiens
  CDR3 for beta chain variable domain of TCR clone 251001 (TRBV6-6, TRBJ1-3)
CASSYSKWDSISGNTIYF

SEQ ID NO: 502003 - protein, 13 aa, Homo sapiens
  CDR3 for alpha chain variable domain of TCR clone 251002 (TRAV16, TRAJ37)
FALGSGNTGKLIF

SEQ ID NO: 502004 - protein, 14 aa, Homo sapiens
  CDR3 for beta chain variable domain of TCR clone 251002 (TRBV19, TRBJ2-1)
CASPTFVLSGEQFF

SEQ ID NO: 502005 - protein, 13 aa, Homo sapiens
  CDR3 for alpha chain variable domain of TCR clone 251003 (TRAV26-1, TRAJ54)
CIVRVKGAQKLGF

SEQ ID NO: 502006 - protein, 15 aa, Homo sapiens
  CDR3 for beta chain variable domain of TCR clone 251003 (TRBV20-1, TRBJ2-1)
CSAQPGGGPYNEQFF

SEQ ID NO: 502007 - protein, 14 aa, Homo sapiens
  CDR3 for alpha chain variable domain of TCR clone 251004 (TRAV12-1, TRAJ3)
CGAARYSSASKIIF

SEQ ID NO: 502008 - protein, 15 aa, Homo sapiens
  CDR3 for beta chain variable domain of TCR clone 251004 (TRBV12-4, TRBJ1-1)
CASSLAVSRGAEAFF

SEQ ID NO: 502009 - protein, 15 aa, Homo sapiens
  CDR3 for alpha chain variable domain of TCR clone 251005 (TRAV13-1, TRAJ57)
CAASNTQGGSEKLVF

SEQ ID NO: 502010 - protein, 16 aa, Homo sapiens
  CDR3 for beta chain variable domain of TCR clone 251005 (TRBV19, TRBJ2-1)
CARSKAGPSSYNEQFF

SEQ ID NO: 502011 - protein, 13 aa, Homo sapiens
  CDR3 for alpha chain variable domain of TCR clone 251006 (TRAV21, TRAJ27)
CAARPGNAGKSTV

SEQ ID NO: 502012 - protein, 13 aa, Homo sapiens
  CDR3 for beta chain variable domain of TCR clone 251006 (TRBV13, TRBJ2-1)
CASILGGRGEQFF

SEQ ID NO: 502013 - protein, 12 aa, Homo sapiens
  CDR3 for alpha chain variable domain of TCR clone 251007 (TRAV12-3, TRAJ17)
CAMTLTGNKLTF

SEQ ID NO: 502014 - protein, 14 aa, Homo sapiens
  CDR3 for beta chain variable domain of TCR clone 251007 (TRBV5-1, TRBJ2-7)
CASSFGTGLYEQYF

SEQ ID NO: 502015 - protein, 14 aa, Homo sapiens
  CDR3 for alpha chain variable domain of TCR clone 251008 (TRAV8-3, TRAJ39)
CAVCANNAGNMLTF

SEQ ID NO: 502016 - protein, 16 aa, Homo sapiens
  CDR3 for beta chain variable domain of TCR clone 251008 (TRBV12-5, TRBJ2-5)
CASGPRTSGNQETQYF

SEQ ID NO: 502017 - protein, 16 aa, Homo sapiens
  CDR3 for alpha chain variable domain of TCR clone 251009 (TRAV26-1, TRAJ44)
IASSESRTGTASKLTF

SEQ ID NO: 502018 - protein, 20 aa, Homo sapiens
  CDR3 for beta chain variable domain of TCR clone 251009 (TRBV28, TRBJ2-1)
CASTPIGRSPGLAGGNEQFF

SEQ ID NO: 502019 - protein, 13 aa, Homo sapiens
  CDR3 for alpha chain variable domain of TCR clone 251010 (TRAV35, TRAJ48)
CAGHEFGNEKLTS

SEQ ID NO: 502020 - protein, 16 aa, Homo sapiens
  CDR3 for beta chain variable domain of TCR clone 251010 (TRBV12-5, TRBJ2-5)
CASGPRTSGNQETQYF

SEQ ID NO: 502021 - protein, 11 aa, Homo sapiens
  CDR3 for alpha chain variable domain of TCR clone 251011 (TRAV3, TRAJ21)
RAVANFNKFYF

SEQ ID NO: 502022 - protein, 16 aa, Homo sapiens
  CDR3 for beta chain variable domain of TCR clone 251011 (TRBV19, TRBJ2-1)
CASSKAGPSSYNEQFF

SEQ ID NO: 502023 - protein, 12 aa, Homo sapiens
  CDR3 for alpha chain variable domain of TCR clone 251012 (TRAV13-1, TRAJ27)
CAAHTNAGKSTF

SEQ ID NO: 502024 - protein, 16 aa, Homo sapiens
  CDR3 for beta chain variable domain of TCR clone 251012 (TRBV13, TRBJ2-2)
CASSPRTGEHTGELFF

SEQ ID NO: 502025 - protein, 22 aa, Homo sapiens
  CDR3 for alpha chain variable domain of TCR clone 251013 (TRAV3, TRAJ38)
CAVRDCLNAGNNHIQHPDPAVY

SEQ ID NO: 502026 - protein, 19 aa, Homo sapiens
  CDR3 for beta chain variable domain of TCR clone 251013 (TRBV7-2, TRBJ2-3)
CASSFLSRNWGGGTDTQYF

SEQ ID NO: 502027 - protein, 13 aa, Homo sapiens
  CDR3 for alpha chain variable domain of TCR clone 251014 (TRAV2, TRAJ40)
CAVVTSGTYKYIF

SEQ ID NO: 502028 - protein, 16 aa, Homo sapiens
  CDR3 for beta chain variable domain of TCR clone 251014 (TRBV12-4, TRBJ1-5)
CASSSGPRGSNQPQHF

SEQ ID NO: 502029 - protein, 15 aa, Homo sapiens
  CDR3 for alpha chain variable domain of TCR clone 251015 (TRAV3, TRAJ9)
CAVRDSNTGGFKTIF

SEQ ID NO: 502030 - protein, 14 aa, Homo sapiens
  CDR3 for beta chain variable domain of TCR clone 251015 (TRBV6-1, TRBJ1-5)
CASSEIRARQPQHF

SEQ ID NO: 502031 - protein, 14 aa, Homo sapiens
  CDR3 for alpha chain variable domain of TCR clone 251016 (TRAV1-2, TRAJ15)
CAVRDRQAGTALIF

SEQ ID NO: 502032 - protein, 13 aa, Homo sapiens
  CDR3 for beta chain variable domain of TCR clone 251016 (TRBV10-3, TRBJ2-7)
CASKLAVNYEQYF

SEQ ID NO: 502033 - protein, 12 aa, Homo sapiens
  CDR3 for alpha chain variable domain of TCR clone 251017 (TRAV4, TRAJ26)
CLVGDYGQNFVF

SEQ ID NO: 502034 - protein, 17 aa, Homo sapiens
  CDR3 for beta chain variable domain of TCR clone 251017 (TRBV25-1, TRBJ2-5)
CASSRRGGRGGQETQYF

SEQ ID NO: 502035 - protein, 15 aa, Homo sapiens
  CDR3 for alpha chain variable domain of TCR clone 251018 (TRAV26-1, TRAJ29)
CIVRVEGSGNTPLVF

SEQ ID NO: 502036 - protein, 15 aa, Homo sapiens
  CDR3 for beta chain variable domain of TCR clone 251018 (TRBV28, TRBJ2-5)
CASRPGQGSIETQYF

SEQ ID NO: 502037 - protein, 11 aa, Homo sapiens
  CDR3 for alpha chain variable domain of TCR clone 251019 (TRAV27, TRAJ20)
CAGLNDYKLSF

SEQ ID NO: 502038 - protein, 14 aa, Homo sapiens
  CDR3 for beta chain variable domain of TCR clone 251019 (TRBV6-1, TRBJ1-1)
CASTPLQMNTESFF

SEQ ID NO: 502039 - protein, 17 aa, Homo sapiens
  CDR3 for alpha chain variable domain of TCR clone 251020 (TRAV26-1, TRAJ37)
CIVRVITVSSNTGKLIF

SEQ ID NO: 502040 - protein, 13 aa, Homo sapiens
  CDR3 for beta chain variable domain of TCR clone 251020 (TRBV7-9, TRBJ2-1)
CASSSSNFNEQFF

SEQ ID NO: 502041 - protein, 12 aa, Homo sapiens
  CDR3 for alpha chain variable domain of TCR clone 251021 (TRAV13-1, TRAJ9)
CAASISHWRLQN

SEQ ID NO: 502042 - protein, 14 aa, Homo sapiens
  CDR3 for beta chain variable domain of TCR clone 251021 (TRBV7-2, TRBJ2-7)
CASSPKTSFYEQYF

SEQ ID NO: 502043 - protein, 16 aa, Homo sapiens
  CDR3 for alpha chain variable domain of TCR clone 251022 (TRAV1-2, TRAJ10)
CAVRGVLTGGGNKLTF

SEQ ID NO: 502044 - protein, 13 aa, Homo sapiens
  CDR3 for beta chain variable domain of TCR clone 251022 (TRBV11-3, TRBJ2-3)
CASSHDTKDTQYF

SEQ ID NO: 502045 - protein, 14 aa, Homo sapiens
  CDR3 for alpha chain variable domain of TCR clone 251023 (TRAV3, TRAJ9)
CAVRLNTGGFKTIF

SEQ ID NO: 502046 - protein, 13 aa, Homo sapiens
  CDR3 for beta chain variable domain of TCR clone 251023 (TRBV11-3, TRBJ1-1)
CATEEGLNTEAFF

SEQ ID NO: 502047 - protein, 15 aa, Homo sapiens
  CDR3 for alpha chain variable domain of TCR clone 251024 (TRAV8-6, TRAJ42)
CAVRGSKPRKSHLWK

SEQ ID NO: 502048 - protein, 13 aa, Homo sapiens
  CDR3 for beta chain variable domain of TCR clone 251024 (TRBV7-3, TRBJ1-1)
CASSQDWGAEAFF

SEQ ID NO: 502049 - protein, 17 aa, Homo sapiens
  CDR3 for alpha chain variable domain of TCR clone 251025 (TRAV35, TRAJ28)
CAGLQVYSGAGSYQLTF

SEQ ID NO: 502050 - protein, 13 aa, Homo sapiens
  CDR3 for beta chain variable domain of TCR clone 251025 (TRBV11-2, TRBJ2-5)
CASGHGAKETQYF

SEQ ID NO: 502051 - protein, 13 aa, Homo sapiens
  CDR3 for alpha chain variable domain of TCR clone 251026 (TRAV13-1, TRAJ40)
CAASKGGTYKYNF

SEQ ID NO: 502052 - protein, 10 aa, Homo sapiens
  CDR3 for beta chain variable domain of TCR clone 251026 (TRBV7-6, TRBJ1-2)
CASSLVADYG

SEQ ID NO: 502053 - protein, 12 aa, Homo sapiens
  CDR3 for alpha chain variable domain of TCR clone 251027 (TRAV12-3, TRAJ17)
CAMTLTGDKLTF

SEQ ID NO: 502054 - protein, 17 aa, Homo sapiens
  CDR3 for beta chain variable domain of TCR clone 251027 (TRBV7-3, TRBJ2-3)
CASSLMKRMRGADTQYF

SEQ ID NO: 502055 - protein, 22 aa, Homo sapiens
  CDR3 for alpha chain variable domain of TCR clone 251028 (TRAV21, )
CAVRQDAGDNHIQNPDPAVYQL

SEQ ID NO: 502056 - protein, 16 aa, Homo sapiens
  CDR3 for beta chain variable domain of TCR clone 251028 (TRBV4-2, TRBJ1-1)
CASRPLGGGGDTEAFF

SEQ ID NO: 502057 - protein, 13 aa, Homo sapiens
  CDR3 for alpha chain variable domain of TCR clone 251029 (TRAV16, TRAJ54)
CALKVRGAQKLVF

SEQ ID NO: 502058 - protein, 13 aa, Homo sapiens
  CDR3 for beta chain variable domain of TCR clone 251029 (TRBV20-1, TRBJ1-1)
CSARGGGNTEAVF

SEQ ID NO: 502059 - protein, 16 aa, Homo sapiens
  CDR3 for alpha chain variable domain of TCR clone 251030 (TRAV8-3, TRAJ44)
CAVGASNTGTASKLTF

SEQ ID NO: 502060 - protein, 13 aa, Homo sapiens
  CDR3 for beta chain variable domain of TCR clone 251030 (TRBV13, TRBJ2-5)
CASSPEVGETQYF

SEQ ID NO: 502061 - protein, 11 aa, Homo sapiens
  CDR3 for alpha chain variable domain of TCR clone 251031 (TRAV35, TRAJ30)
CAGPGDDKIIF

SEQ ID NO: 502062 - protein, 14 aa, Homo sapiens
  CDR3 for beta chain variable domain of TCR clone 251031 (TRBV7-6, TRBJ1-6)
CASSQAGGGSPRHF

SEQ ID NO: 502063 - protein, 13 aa, Homo sapiens
  CDR3 for alpha chain variable domain of TCR clone 251032 (TRAV30, TRAJ24)
CGTVTDSWGKLPF

SEQ ID NO: 502064 - protein, 16 aa, Homo sapiens
  CDR3 for beta chain variable domain of TCR clone 251032 (TRBV7-3, TRBJ2-2)
CASSLKRGTLSGELFF

SEQ ID NO: 502065 - protein, 12 aa, Homo sapiens
  CDR3 for alpha chain variable domain of TCR clone 251033 (TRAV12-3, TRAJ17)
CAMTLTGNKLTL

SEQ ID NO: 502066 - protein, 13 aa, Homo sapiens
  CDR3 for beta chain variable domain of TCR clone 251033 (TRBV5-1, TRBJ1-2)
CASSSTGVYGYTF

SEQ ID NO: 502067 - protein, 13 aa, Homo sapiens
  CDR3 for alpha chain variable domain of TCR clone 251034 (TRAV30, TRAJ20)
CGTEDRSDYKLSF

SEQ ID NO: 502068 - protein, 16 aa, Homo sapiens
  CDR3 for beta chain variable domain of TCR clone 251034 (TRBV19, TRBJ2-6)
CASSMSGLSGANILTF

SEQ ID NO: 502069 - protein, 13 aa, Homo sapiens
  CDR3 for alpha chain variable domain of TCR clone 251035 (TRAV36/DV7, TRAJ37)
CAAPFRNTGKLIF

SEQ ID NO: 502070 - protein, 16 aa, Homo sapiens
  CDR3 for beta chain variable domain of TCR clone 251035 (TRBV12-5, TRBJ2-5)
CASGPRTSGNQETQYF

SEQ ID NO: 502071 - protein, 11 aa, Homo sapiens
  CDR3 for alpha chain variable domain of TCR clone 251036 (TRAV12-2, TRAJ31)
CAILNNARLMF

SEQ ID NO: 502072 - protein, 13 aa, Homo sapiens
  CDR3 for beta chain variable domain of TCR clone 251036 (TRBV20-1, TRBJ1-1)
CSARLGQGAEAVF

SEQ ID NO: 502073 - protein, 13 aa, Homo sapiens
  CDR3 for alpha chain variable domain of TCR clone 251037 (TRAV3, TRAJ21)
CAVATSTNFTLDL

SEQ ID NO: 502074 - protein, 13 aa, Homo sapiens
  CDR3 for beta chain variable domain of TCR clone 251037 (TRBV27, TRBJ2-7)
CASSFSQGYEQYF

SEQ ID NO: 502075 - protein, 17 aa, Homo sapiens
  CDR3 for alpha chain variable domain of TCR clone 251038 (TRAV13-1, TRAJ52)
CAASSGAGGTSYGKLTF

SEQ ID NO: 502076 - protein, 15 aa, Homo sapiens
  CDR3 for beta chain variable domain of TCR clone 251038 (TRBV2, TRBJ2-1)
CASSELAGSCNEQFF

SEQ ID NO: 502077 - protein, 17 aa, Homo sapiens
  CDR3 for alpha chain variable domain of TCR clone 251039 (TRAV20, TRAJ4)
CAVQLVLFSGGYNKLIF

SEQ ID NO: 502078 - protein, 12 aa, Homo sapiens
  CDR3 for beta chain variable domain of TCR clone 251039 (TRBV4-1, TRBJ2-3)
CASSQGKDTQYF

SEQ ID NO: 502079 - protein, 11 aa, Homo sapiens
  CDR3 for alpha chain variable domain of TCR clone 251040 (TRAV12-3, TRAJ43)
SAMSVSNDMRF

SEQ ID NO: 502080 - protein, 13 aa, Homo sapiens
  CDR3 for beta chain variable domain of TCR clone 251040 (TRBV20-1, TRBJ1-1)
CCAPLGGGTEAFF

SEQ ID NO: 502081 - protein, 18 aa, Homo sapiens
  CDR3 for alpha chain variable domain of TCR clone 251041 (TRAV21, TRAJ52)
CAVRPSPAGGTSYGKLTS

SEQ ID NO: 502082 - protein, 16 aa, Homo sapiens
  CDR3 for beta chain variable domain of TCR clone 251041 (TRBV13, TRBJ2-3)
CQQPLQGSGGRNTQYF

SEQ ID NO: 502083 - protein, 14 aa, Homo sapiens
  CDR3 for alpha chain variable domain of TCR clone 251042 (TRAV26-1, TRAJ48)
CIVRTNFGHEKLTF

SEQ ID NO: 502084 - protein, 12 aa, Homo sapiens
  CDR3 for beta chain variable domain of TCR clone 251042 (TRBV20-1, TRBJ2-7)
CSASSGANEQYF

SEQ ID NO: 502085 - protein, 13 aa, Homo sapiens
  CDR3 for alpha chain variable domain of TCR clone 251043 (TRAV36/DV7, TRAJ21)
CAVEAYNFNNFYF

SEQ ID NO: 502086 - protein, 14 aa, Homo sapiens
  CDR3 for beta chain variable domain of TCR clone 251043 (TRBV6-1, TRBJ1-1)
CASSGTGLNTEAFF

SEQ ID NO: 502087 - protein, 14 aa, Homo sapiens
  CDR3 for alpha chain variable domain of TCR clone 251044 (TRAV8-3, TRAJ4)
CAVGAAGGHNKLIF

SEQ ID NO: 502088 - protein, 14 aa, Homo sapiens
  CDR3 for beta chain variable domain of TCR clone 251044 (TRBV12-5, TRBJ2-5)
CASGSRTHQETQYF

SEQ ID NO: 502089 - protein, 14 aa, Homo sapiens
  CDR3 for alpha chain variable domain of TCR clone 251045 (TRAV8-4, TRAJ17)
CAVSEGAAGNKLTF

SEQ ID NO: 502090 - protein, 13 aa, Homo sapiens
  CDR3 for beta chain variable domain of TCR clone 251045 (TRBV23-1, TRBJ1-4)
CASRGKFNEKLFF

SEQ ID NO: 502091 - protein, 15 aa, Homo sapiens
  CDR3 for alpha chain variable domain of TCR clone 251046 (TRAV25, TRAJ52)
CAGRPGGTSYGELTF

SEQ ID NO: 502092 - protein, 17 aa, Homo sapiens
  CDR3 for beta chain variable domain of TCR clone 251046 (TRBV7-8, TRBJ2-6)
CGSSAGTGGAGANVLTF

SEQ ID NO: 502093 - protein, 14 aa, Homo sapiens
  CDR3 for alpha chain variable domain of TCR clone 251047 (TRAV9-2, TRAJ39)
CALYIYNAGNMLTF

SEQ ID NO: 502094 - protein, 14 aa, Homo sapiens
  CDR3 for beta chain variable domain of TCR clone 251047 (TRBV6-3, TRBJ1-1)
CASSNLLPGAEAFF

SEQ ID NO: 502095 - protein, 15 aa, Homo sapiens
  CDR3 for alpha chain variable domain of TCR clone 251048 (TRAV38-1, TRAJ57)
CAFMDSQGGSEKLVF

SEQ ID NO: 502096 - protein, 16 aa, Homo sapiens
  CDR3 for beta chain variable domain of TCR clone 251048 (TRBV10-3, TRBJ2-1)
CASRGGGRGDYNEQLF

SEQ ID NO: 502097 - protein, 14 aa, Homo sapiens
  CDR3 for alpha chain variable domain of TCR clone 251049 (TRAV1-2, TRAJ16)
CAVNRFSDGQKLLF

SEQ ID NO: 502098 - protein, 16 aa, Homo sapiens
  CDR3 for beta chain variable domain of TCR clone 251049 (TRBV29-1, TRBJ2-7)
CSVGVVGTSGSYEQYF

SEQ ID NO: 502099 - protein, 14 aa, Homo sapiens
  CDR3 for alpha chain variable domain of TCR clone 251050 (TRAV12-1, TRAJ9)
CVVTGDTGGVKTIF

SEQ ID NO: 502100 - protein, 16 aa, Homo sapiens
  CDR3 for beta chain variable domain of TCR clone 251050 (TRBV29-1, TRBJ1-2)
CSVEANRDIANYGYTF

SEQ ID NO: 502101 - protein, 12 aa, Homo sapiens
  CDR3 for alpha chain variable domain of TCR clone 251051 (TRAV1-1, TRAJ43)
CAPRVSSNDMRF

SEQ ID NO: 502102 - protein, 14 aa, Homo sapiens
  CDR3 for beta chain variable domain of TCR clone 251051 (TRBV24-1, TRBJ2-5)
CATSDALKGETQYF

SEQ ID NO: 502103 - protein, 13 aa, Homo sapiens
  CDR3 for alpha chain variable domain of TCR clone 251052 (TRAV17, TRAJ34)
CATVYYNTDELIF

SEQ ID NO: 502104 - protein, 17 aa, Homo sapiens
  CDR3 for beta chain variable domain of TCR clone 251052 (TRBV7-8, TRBJ2-6)
CASSAGTGGAGANVLTF

SEQ ID NO: 502105 - protein, 12 aa, Homo sapiens
  CDR3 for alpha chain variable domain of TCR clone 251053 (TRAV12-1, TRAJ31)
CVAWNNNARLMF

SEQ ID NO: 502106 - protein, 15 aa, Homo sapiens
  CDR3 for beta chain variable domain of TCR clone 251053 (TRBV7-2, TRBJ1-5)
CASSLDRGQDQPQHF

SEQ ID NO: 502107 - protein, 13 aa, Homo sapiens
  CDR3 for alpha chain variable domain of TCR clone 251054 (TRAV1-2, TRAJ9)
CGALNTGGFKTIF

SEQ ID NO: 502108 - protein, 13 aa, Homo sapiens
  CDR3 for beta chain variable domain of TCR clone 251054 (TRBV19, TRBJ1-2)
CASSVPGQDGYTF

SEQ ID NO: 502109 - protein, 12 aa, Homo sapiens
  CDR3 for alpha chain variable domain of TCR clone 251055 (TRAV13-1, TRAJ16)
CAARNGGQKLLF

SEQ ID NO: 502110 - protein, 14 aa, Homo sapiens
  CDR3 for beta chain variable domain of TCR clone 251055 (TRBV20-1, TRBJ2-7)
CSARDPTGLDEQYF

SEQ ID NO: 502111 - protein, 10 aa, Homo sapiens
  CDR3 for alpha chain variable domain of TCR clone 251056 (TRAV12-1, TRAJ20)
CVVNPRKLSF

SEQ ID NO: 502112 - protein, 13 aa, Homo sapiens
  CDR3 for beta chain variable domain of TCR clone 251056 (TRBV20-1, TRBJ1-1)
YSAPLGGGTEAFF

SEQ ID NO: 502113 - protein, 14 aa, Homo sapiens
  CDR3 for alpha chain variable domain of TCR clone 251057 (TRAV12-2, TRAJ44)
CAVNKAGTASKLTF

SEQ ID NO: 502114 - protein, 16 aa, Homo sapiens
  CDR3 for beta chain variable domain of TCR clone 251057 (TRBV12-4, TRBJ1-5)
CASSRPVGGSNQPQHF

SEQ ID NO: 502115 - protein, 13 aa, Homo sapiens
  CDR3 for alpha chain variable domain of TCR clone 251058 (TRAV3, TRAJ21)
CAVREPDFNKFSF

SEQ ID NO: 502116 - protein, 14 aa, Homo sapiens
  CDR3 for beta chain variable domain of TCR clone 251058 (TRBV20-1, TRBJ2-3)
CSARGGTSTDTQYF

SEQ ID NO: 502117 - protein, 13 aa, Homo sapiens
  CDR3 for alpha chain variable domain of TCR clone 251059 (TRAV8-1, TRAJ30)
CAVIMNRDDKIIF

SEQ ID NO: 502118 - protein, 14 aa, Homo sapiens
  CDR3 for beta chain variable domain of TCR clone 251059 (TRBV7-2, TRBJ1-6)
CASSLQWANSPLHF

SEQ ID NO: 502119 - protein, 15 aa, Homo sapiens
  CDR3 for alpha chain variable domain of TCR clone 251060 (TRAV19, TRAJ20)
CALSEAPLNDYKLSF

SEQ ID NO: 502120 - protein, 15 aa, Homo sapiens
  CDR3 for beta chain variable domain of TCR clone 251060 (TRBV19, TRBJ2-4)
CASRGPRRGENIQYF

SEQ ID NO: 502121 - protein, 15 aa, Homo sapiens
  CDR3 for alpha chain variable domain of TCR clone 251061 (TRAV17, TRAJ54)
CATTRSEQGAQKMVF

SEQ ID NO: 502122 - protein, 16 aa, Homo sapiens
  CDR3 for beta chain variable domain of TCR clone 251061 (TRBV12-4, TRBJ2-3)
CASSLRLAETTDTQYF

SEQ ID NO: 502123 - protein, 14 aa, Homo sapiens
  CDR3 for alpha chain variable domain of TCR clone 251062 (TRAV9-2, TRAJ39)
CALYIYNAGNMLTF

SEQ ID NO: 502124 - protein, 14 aa, Homo sapiens
  CDR3 for beta chain variable domain of TCR clone 251062 (TRBV28, TRBJ2-2)
CASTRRSGDGELFF

SEQ ID NO: 502125 - protein, 13 aa, Homo sapiens
  CDR3 for alpha chain variable domain of TCR clone 251063 (TRAV2, TRAJ24)
CAVTTDSWGKLQF

SEQ ID NO: 502126 - protein, 14 aa, Homo sapiens
  CDR3 for beta chain variable domain of TCR clone 251063 (TRBV13, TRBJ2-5)
CASSLGRGQETQYS

SEQ ID NO: 502127 - protein, 16 aa, Homo sapiens
  CDR3 for alpha chain variable domain of TCR clone 251064 (TRAV3, TRAJ6)
CAVRHGMGRRKLHTYI

SEQ ID NO: 502128 - protein, 15 aa, Homo sapiens
  CDR3 for beta chain variable domain of TCR clone 251064 (TRBV9, TRBJ2-1)
CASSLAGSSYNEQFF

SEQ ID NO: 502129 - protein, 12 aa, Homo sapiens
  CDR3 for alpha chain variable domain of TCR clone 251065 (TRAV12-3, TRAJ17)
CAMTLTGNKLTF

SEQ ID NO: 502130 - protein, 17 aa, Homo sapiens
  CDR3 for beta chain variable domain of TCR clone 251065 (TRBV18, TRBJ2-1)
CASSKGLSGGADNEQFF

SEQ ID NO: 502131 - protein, 14 aa, Homo sapiens
  CDR3 for alpha chain variable domain of TCR clone 251066 (TRAV12-2, TRAJ5)
CTVNRSTGRRALTF

SEQ ID NO: 502132 - protein, 15 aa, Homo sapiens
  CDR3 for beta chain variable domain of TCR clone 251066 (TRBV20-1, TRBJ2-7)
CSARDRVSGMDEQYF

SEQ ID NO: 502133 - protein, 17 aa, Homo sapiens
  CDR3 for alpha chain variable domain of TCR clone 251067 (TRAV8-1, TRAJ43)
CAVTNDMRFGAGTRLTV

SEQ ID NO: 502134 - protein, 14 aa, Homo sapiens
  CDR3 for beta chain variable domain of TCR clone 251067 (TRBV19, TRBJ2-1)
CASPTFVLSGEQFF

SEQ ID NO: 502135 - protein, 17 aa, Homo sapiens
  CDR3 for alpha chain variable domain of TCR clone 251068 (TRAV13-1, TRAJ31)
CAPRDRLMFGDGTQLVV

SEQ ID NO: 502136 - protein, 16 aa, Homo sapiens
  CDR3 for beta chain variable domain of TCR clone 251068 (TRBV12-5, TRBJ2-5)
CASGPRTSGNHETQYF

SEQ ID NO: 502137 - protein, 14 aa, Homo sapiens
  CDR3 for alpha chain variable domain of TCR clone 251069 (TRAV8-3, TRAJ4)
CAVGSAGGYNKLIF

SEQ ID NO: 502138 - protein, 16 aa, Homo sapiens
  CDR3 for beta chain variable domain of TCR clone 251069 (TRBV7-2, TRBJ1-2)
CASSRQGGGANYGYTF

SEQ ID NO: 502139 - protein, 14 aa, Homo sapiens
  CDR3 for alpha chain variable domain of TCR clone 251070 (TRAV13-2, TRAJ9)
CAENSFTGGFKTIF

SEQ ID NO: 502140 - protein, 13 aa, Homo sapiens
  CDR3 for beta chain variable domain of TCR clone 251070 (TRBV19, TRBJ2-7)
CASSVDRTYEQYF

SEQ ID NO: 502141 - protein, 12 aa, Homo sapiens
  CDR3 for alpha chain variable domain of TCR clone 251071 (TRAV26-1, TRAJ17)
CIVRSAGNKLTF

SEQ ID NO: 502142 - protein, 15 aa, Homo sapiens
  CDR3 for beta chain variable domain of TCR clone 251071 (TRBV7-6, TRBJ1-2)
CSSSSGGRGGYGYTF

SEQ ID NO: 502143 - protein, 12 aa, Homo sapiens
  CDR3 for alpha chain variable domain of TCR clone 251072 (TRAV12-2, TRAJ49)
CAVLNTGNQFYF

SEQ ID NO: 502144 - protein, 16 aa, Homo sapiens
  CDR3 for beta chain variable domain of TCR clone 251072 (TRBV12-5, TRBJ2-5)
CASGPRTSGNQETQYF

SEQ ID NO: 502145 - protein, 14 aa, Homo sapiens
  CDR3 for alpha chain variable domain of TCR clone 251073 (TRAV12-3, TRAJ10)
SHLPLTGGGNKLTF

SEQ ID NO: 502146 - protein, 15 aa, Homo sapiens
  CDR3 for beta chain variable domain of TCR clone 251073 (TRBV20-1, TRBJ1-5)
CSAREGGYSNQPQHF

SEQ ID NO: 502147 - protein, 13 aa, Homo sapiens
  CDR3 for alpha chain variable domain of TCR clone 251074 (TRAV16, TRAJ28)
CAPTGAGSYQLTF

SEQ ID NO: 502148 - protein, 16 aa, Homo sapiens
  CDR3 for beta chain variable domain of TCR clone 251074 (TRBV28, TRBJ1-5)
CASSRTGQGWNQPQHF

SEQ ID NO: 502149 - protein, 13 aa, Homo sapiens
  CDR3 for alpha chain variable domain of TCR clone 251075 (TRAV12-1, TRAJ33)
CGDAPDSNYQLSW

SEQ ID NO: 502150 - protein, 15 aa, Homo sapiens
  CDR3 for beta chain variable domain of TCR clone 251075 (TRBV27, TRBJ2-1)
CASSNGGGSSNEQFF

SEQ ID NO: 502151 - protein, 14 aa, Homo sapiens
  CDR3 for alpha chain variable domain of TCR clone 251076 (TRAV3, TRAJ33)
CAVRDMDSNYQLIW

SEQ ID NO: 502152 - protein, 20 aa, Homo sapiens
  CDR3 for beta chain variable domain of TCR clone 251076 (TRBV7-3, TRBJ1-2)
CASSFPQGNDGELWLHLQFG

SEQ ID NO: 502153 - protein, 11 aa, Homo sapiens
  CDR3 for alpha chain variable domain of TCR clone 251077 (TRAV1-1, TRAJ23)
CAVRQGGKLIF

SEQ ID NO: 502154 - protein, 15 aa, Homo sapiens
  CDR3 for beta chain variable domain of TCR clone 251077 (TRBV5-1, TRBJ1-1)
CASSWTGRGNTEAFF

SEQ ID NO: 502155 - protein, 14 aa, Homo sapiens
  CDR3 for alpha chain variable domain of TCR clone 251078 (TRAV35, TRAJ13)
CSGSPSGGYQKVTF

SEQ ID NO: 502156 - protein, 13 aa, Homo sapiens
  CDR3 for beta chain variable domain of TCR clone 251078 (TRBV29-1, TRBJ1-1)
RSVGDSRNTEAFF

SEQ ID NO: 502157 - protein, 15 aa, Homo sapiens
  CDR3 for alpha chain variable domain of TCR clone 251079 (TRAV20, TRAJ58)
CAVQAGETSGSRLTF

SEQ ID NO: 502158 - protein, 15 aa, Homo sapiens
  CDR3 for beta chain variable domain of TCR clone 251079 (TRBV6-5, TRBJ2-3)
CASSRSGGARDTQYF

SEQ ID NO: 502159 - protein, 16 aa, Homo sapiens
  CDR3 for alpha chain variable domain of TCR clone 251080 (TRAV13-1, TRAJ22)
CAAKGGWSGSARQLTF

SEQ ID NO: 502160 - protein, 15 aa, Homo sapiens
  CDR3 for beta chain variable domain of TCR clone 251080 (TRBV9, TRBJ1-6)
CASSVAGTGDSPLHF

SEQ ID NO: 502161 - protein, 12 aa, Homo sapiens
  CDR3 for alpha chain variable domain of TCR clone 251081 (TRAV12-3, TRAJ17)
CVMTLTGNKLTF

SEQ ID NO: 502162 - protein, 15 aa, Homo sapiens
  CDR3 for beta chain variable domain of TCR clone 251081 (TRBV10-2, TRBJ2-6)
CASSEQGTGANVLTF

SEQ ID NO: 502163 - protein, 15 aa, Homo sapiens
  CDR3 for alpha chain variable domain of TCR clone 251082 (TRAV12-2, TRAJ43)
CAFDMRFGAGTRLTV

SEQ ID NO: 502164 - protein, 18 aa, Homo sapiens
  CDR3 for beta chain variable domain of TCR clone 251082 (TRBV20-1, TRBJ2-3)
CCASGLAGGPGTTDTQYF

SEQ ID NO: 502165 - protein, 13 aa, Homo sapiens
  CDR3 for alpha chain variable domain of TCR clone 251083 (TRAV12-3, TRAJ6)
CAMIPGGSYIPTF

SEQ ID NO: 502166 - protein, 19 aa, Homo sapiens
  CDR3 for beta chain variable domain of TCR clone 251083 (TRBV7-2, TRBJ2-3)
CASSFLSRNWGGGTDTQYF

SEQ ID NO: 502167 - protein, 14 aa, Homo sapiens
  CDR3 for alpha chain variable domain of TCR clone 251084 (TRAV17, TRAJ42)
CAQNYGGSHGNLIF

SEQ ID NO: 502168 - protein, 13 aa, Homo sapiens
  CDR3 for beta chain variable domain of TCR clone 251084 (TRBV20-1, TRBJ1-2)
CSAPRSGRYGYTF

SEQ ID NO: 502169 - protein, 14 aa, Homo sapiens
  CDR3 for alpha chain variable domain of TCR clone 251085 (TRAV3, TRAJ17)
CALRDAAAGNKLTF

SEQ ID NO: 502170 - protein, 16 aa, Homo sapiens
  CDR3 for beta chain variable domain of TCR clone 251085 (TRBV20-1, TRBJ1-2)
CSASMGQGVANYGYTF

SEQ ID NO: 502171 - protein, 15 aa, Homo sapiens
  CDR3 for alpha chain variable domain of TCR clone 251086 (TRAV30, TRAJ32)
CGTESEGGATNKLIQ

SEQ ID NO: 502172 - protein, 17 aa, Homo sapiens
  CDR3 for beta chain variable domain of TCR clone 251086 (TRBV5-4, TRBJ2-1)
CASSSAGGRGPYNEQFF

SEQ ID NO: 502173 - protein, 14 aa, Homo sapiens
  CDR3 for alpha chain variable domain of TCR clone 251087 (TRAV9-2, TRAJ39)
CALYIYNEGNMLTF

SEQ ID NO: 502174 - protein, 11 aa, Homo sapiens
  CDR3 for beta chain variable domain of TCR clone 251087 (TRBV11-2, TRBJ2-2)
CASSLPGELFF

SEQ ID NO: 502175 - protein, 14 aa, Homo sapiens
  CDR3 for alpha chain variable domain of TCR clone 251088 (TRAV12-2, TRAJ40)
CAVKIPSGTYKYIF

SEQ ID NO: 502176 - protein, 20 aa, Homo sapiens
  CDR3 for beta chain variable domain of TCR clone 251088 (TRBV28, TRBJ2-1)
CASTPIGRSPGLAGGNEQCF

SEQ ID NO: 502177 - protein, 15 aa, Homo sapiens
  CDR3 for alpha chain variable domain of TCR clone 251089 (TRAV29/DV5, TRAJ24)
CAASGATDSWGKFQF

SEQ ID NO: 502178 - protein, 12 aa, Homo sapiens
  CDR3 for beta chain variable domain of TCR clone 251089 (TRBV19, TRBJ1-1)
CASLTGNTEAFF

SEQ ID NO: 502179 - protein, 16 aa, Homo sapiens
  CDR3 for alpha chain variable domain of TCR clone 251090 (TRAV26-1, TRAJ37)
CIVRGDGSGNTGKLIF

SEQ ID NO: 502180 - protein, 15 aa, Homo sapiens
  CDR3 for beta chain variable domain of TCR clone 251090 (TRBV7-8, TRBJ2-5)
CASSDAAGSQETQYF

SEQ ID NO: 502181 - protein, 17 aa, Homo sapiens
  CDR3 for alpha chain variable domain of TCR clone 251091 (TRAV29/DV5, TRAJ29)
CAASEVLRGKHTSCLLK

SEQ ID NO: 502182 - protein, 16 aa, Homo sapiens
  CDR3 for beta chain variable domain of TCR clone 251091 (TRBV6-1, TRBJ2-1)
CASILRQGSSYNEQFF

SEQ ID NO: 502183 - protein, 16 aa, Homo sapiens
  CDR3 for alpha chain variable domain of TCR clone 251092 (TRAV3, TRAJ21)
CAVRDIERGNFNKFYF

SEQ ID NO: 502184 - protein, 13 aa, Homo sapiens
  CDR3 for beta chain variable domain of TCR clone 251092 (TRBV7-6, TRBJ1-2)
CASSLVADYGYTF

SEQ ID NO: 502185 - protein, 14 aa, Homo sapiens
  CDR3 for alpha chain variable domain of TCR clone 251093 (TRAV29/DV5, TRAJ44)
CAASALGTASKLTC

SEQ ID NO: 502186 - protein, 11 aa, Homo sapiens
  CDR3 for beta chain variable domain of TCR clone 251093 (TRBV29-1, TRBJ1-3)
CSVAIGNTIYF

SEQ ID NO: 502187 - protein, 17 aa, Homo sapiens
  CDR3 for alpha chain variable domain of TCR clone 251094 (TRAV3, TRAJ12)
CAVRDGGRMDSSYKLIF

SEQ ID NO: 502188 - protein, 15 aa, Homo sapiens
  CDR3 for beta chain variable domain of TCR clone 251094 (TRBV5-1, TRBJ2-1)
CASSPPRAPYKEQFF

SEQ ID NO: 502189 - protein, 13 aa, Homo sapiens
  CDR3 for alpha chain variable domain of TCR clone 251095 (TRAV22, TRAJ48)
CAVPNFGNEKLTF

SEQ ID NO: 502190 - protein, 15 aa, Homo sapiens
  CDR3 for beta chain variable domain of TCR clone 251095 (TRBV7-3, TRBJ2-1)
CASSPTGGGEVEQFF

SEQ ID NO: 502191 - protein, 12 aa, Homo sapiens
  CDR3 for alpha chain variable domain of TCR clone 251096 (TRAV3, TRAJ20)
CAVRDPDYKLSF

SEQ ID NO: 502192 - protein, 15 aa, Homo sapiens
  CDR3 for beta chain variable domain of TCR clone 251096 (TRBV7-2, TRBJ1-2)
CASSPRAGWNYGYTF

SEQ ID NO: 502193 - protein, 15 aa, Homo sapiens
  CDR3 for alpha chain variable domain of TCR clone 251097 (TRAV12-2, TRAJ11)
CAVNLRNSGYSTLTF

SEQ ID NO: 502194 - protein, 13 aa, Homo sapiens
  CDR3 for beta chain variable domain of TCR clone 251097 (TRBV7-2, TRBJ1-1)
CASNLKGAKVAFF

SEQ ID NO: 502195 - protein, 16 aa, Homo sapiens
  CDR3 for alpha chain variable domain of TCR clone 251098 (TRAV27, TRAJ13)
CAGAKSDSGGYQKVTF

SEQ ID NO: 502196 - protein, 17 aa, Homo sapiens
  CDR3 for beta chain variable domain of TCR clone 251098 (TRBV28, TRBJ2-5)
CASSRQGGLAGAETQYF

SEQ ID NO: 502197 - protein, 13 aa, Homo sapiens
  CDR3 for alpha chain variable domain of TCR clone 251099 (TRAV21, TRAJ27)
CAARPGIAGKSTF

SEQ ID NO: 502198 - protein, 16 aa, Homo sapiens
  CDR3 for beta chain variable domain of TCR clone 251099 (TRBV7-6, TRBJ2-1)
CIAVPAAWGGADEQFF

SEQ ID NO: 502199 - protein, 14 aa, Homo sapiens
  CDR3 for alpha chain variable domain of TCR clone 251100 (TRAV12-2, TRAJ13)
CAVKKTGGYQKVTF

SEQ ID NO: 502200 - protein, 13 aa, Homo sapiens
  CDR3 for beta chain variable domain of TCR clone 251100 (TRBV2, TRBJ1-5)
CATAGPGNQPQHF

SEQ ID NO: 502201 - protein, 15 aa, Homo sapiens
  CDR3 for alpha chain variable domain of TCR clone 251101 (TRAV26-1, TRAJ44)
CIVRANTGTASKLTF

SEQ ID NO: 502202 - protein, 16 aa, Homo sapiens
  CDR3 for beta chain variable domain of TCR clone 251101 (TRBV7-7, TRBJ2-1)
CASSLANGTSYNEQFF

SEQ ID NO: 502203 - protein, 15 aa, Homo sapiens
  CDR3 for alpha chain variable domain of TCR clone 251102 (TRAV12-2, TRAJ53)
CAVNGGGGSNYKLIF

SEQ ID NO: 502204 - protein, 14 aa, Homo sapiens
  CDR3 for beta chain variable domain of TCR clone 251102 (TRBV19, TRBJ2-2)
CASSTLHRSGELFF

SEQ ID NO: 502205 - protein, 16 aa, Homo sapiens
  CDR3 for alpha chain variable domain of TCR clone 251103 (TRAV21, TRAJ45)
CAVSWGSGGGADGLTF

SEQ ID NO: 502206 - protein, 13 aa, Homo sapiens
  CDR3 for beta chain variable domain of TCR clone 251103 (TRBV19, TRBJ1-2)
CASSQGQVYGYTF

SEQ ID NO: 502207 - protein, 15 aa, Homo sapiens
  CDR3 for alpha chain variable domain of TCR clone 251104 (TRAV8-3, TRAJ45)
CASSYSGGGADGLTF

SEQ ID NO: 502208 - protein, 15 aa, Homo sapiens
  CDR3 for beta chain variable domain of TCR clone 251104 (TRBV29-1, TRBJ2-6)
CSVGDRGSGANVLTF

SEQ ID NO: 502209 - protein, 13 aa, Homo sapiens
  CDR3 for alpha chain variable domain of TCR clone 251105 (TRAV12-1, TRAJ17)
CVVSKAAGNKLTF

SEQ ID NO: 502210 - protein, 17 aa, Homo sapiens
  CDR3 for beta chain variable domain of TCR clone 251105 (TRBV4-1, TRBJ2-5)
CASSQDPSGCPQETQYF

SEQ ID NO: 502211 - protein, 11 aa, Homo sapiens
  CDR3 for alpha chain variable domain of TCR clone 251106 (TRAV2, TRAJ13)
CASGGYQKVTF

SEQ ID NO: 502212 - protein, 17 aa, Homo sapiens
  CDR3 for beta chain variable domain of TCR clone 251106 (TRBV19, TRBJ2-3)
CASSTLGVAGVKDTQYF

SEQ ID NO: 502213 - protein, 13 aa, Homo sapiens
  CDR3 for alpha chain variable domain of TCR clone 251107 (TRAV21, TRAJ15)
CAVANQAGTALIF

SEQ ID NO: 502214 - protein, 14 aa, Homo sapiens
  CDR3 for beta chain variable domain of TCR clone 251107 (TRBV27, TRBJ2-2)
CASNLGAATGELFF

SEQ ID NO: 502215 - protein, 12 aa, Homo sapiens
  CDR3 for alpha chain variable domain of TCR clone 251108 (TRAV3, TRAJ39)
CAVIEWSNMLTF

SEQ ID NO: 502216 - protein, 13 aa, Homo sapiens
  CDR3 for beta chain variable domain of TCR clone 251108 (TRBV2, TRBJ2-1)
CASSGSSSGEQFF

SEQ ID NO: 502217 - protein, 13 aa, Homo sapiens
  CDR3 for alpha chain variable domain of TCR clone 251109 (TRAV30, TRAJ34)
CGTVGYNTDKLIF

SEQ ID NO: 502218 - protein, 16 aa, Homo sapiens
  CDR3 for beta chain variable domain of TCR clone 251109 (TRBV7-9, TRBJ1-2)
CASSLGFSSGQDGYTF

SEQ ID NO: 502219 - protein, 16 aa, Homo sapiens
  CDR3 for alpha chain variable domain of TCR clone 251110 (TRAV30, TRAJ24)
CGPEIVDADSWGEFQF

SEQ ID NO: 502220 - protein, 15 aa, Homo sapiens
  CDR3 for beta chain variable domain of TCR clone 251110 (TRBV7-9, TRBJ1-4)
CASSARTGGNEKLFF

SEQ ID NO: 502221 - protein, 13 aa, Homo sapiens
  CDR3 for alpha chain variable domain of TCR clone 251111 (TRAV4, TRAJ42)
CLVGGGSQGNLIF

SEQ ID NO: 502222 - protein, 15 aa, Homo sapiens
  CDR3 for beta chain variable domain of TCR clone 251111 (TRBV7-9, TRBJ1-6)
CASSSPGRGNSPLHY

SEQ ID NO: 502223 - protein, 14 aa, Homo sapiens
  CDR3 for alpha chain variable domain of TCR clone 251112 (TRAV12-2, TRAJ13)
CAVKNTGGLPESYL

SEQ ID NO: 502224 - protein, 17 aa, Homo sapiens
  CDR3 for beta chain variable domain of TCR clone 251112 (TRBV24-1, TRBJ2-1)
CATSDVSTSGTYNEQFF

SEQ ID NO: 502225 - protein, 13 aa, Homo sapiens
  CDR3 for alpha chain variable domain of TCR clone 251113 (TRAV21, TRAJ15)
CAVANQAGPALIF

SEQ ID NO: 502226 - protein, 14 aa, Homo sapiens
  CDR3 for beta chain variable domain of TCR clone 251113 (TRBV27, TRBJ2-2)
CASSLGAATGELFF

SEQ ID NO: 502227 - protein, 12 aa, Homo sapiens
  CDR3 for alpha chain variable domain of TCR clone 251114 (TRAV3, TRAJ27)
CAVRDGAGKSTF

SEQ ID NO: 502228 - protein, 14 aa, Homo sapiens
  CDR3 for beta chain variable domain of TCR clone 251114 (TRBV20-1, TRBJ2-7)
CSAQWGTSSPGQFF

SEQ ID NO: 502229 - protein, 13 aa, Homo sapiens
  CDR3 for alpha chain variable domain of TCR clone 251115 (TRAV21, TRAJ20)
CAVGLRVDYKLSF

SEQ ID NO: 502230 - protein, 16 aa, Homo sapiens
  CDR3 for beta chain variable domain of TCR clone 251115 (TRBV6-1, TRBJ2-1)
CASILRQGSSYNEQFF

SEQ ID NO: 502231 - protein, 14 aa, Homo sapiens
  CDR3 for alpha chain variable domain of TCR clone 251116 (TRAV26-1, TRAJ38)
CIADNACNSRKLIW

SEQ ID NO: 502232 - protein, 13 aa, Homo sapiens
  CDR3 for beta chain variable domain of TCR clone 251116 (TRBV4-1, TRBJ2-7)
CASSQGQAYEQYF

SEQ ID NO: 502233 - protein, 13 aa, Homo sapiens
  CDR3 for alpha chain variable domain of TCR clone 251117 (TRAV12-3, TRAJ13)
CAMTSGGYQIVTF

SEQ ID NO: 502234 - protein, 13 aa, Homo sapiens
  CDR3 for beta chain variable domain of TCR clone 251117 (TRBV20-1, TRBJ2-2)
CSALSGGAGELFF

SEQ ID NO: 502235 - protein, 16 aa, Homo sapiens
  CDR3 for alpha chain variable domain of TCR clone 251118 (TRAV30, TRAJ24)
CGTEIVDADSWGNSSL

SEQ ID NO: 502236 - protein, 14 aa, Homo sapiens
  CDR3 for beta chain variable domain of TCR clone 251118 (TRBV20-1, TRBJ1-1)
CSAQTRIGGTEAFF

SEQ ID NO: 502237 - protein, 14 aa, Homo sapiens
  CDR3 for alpha chain variable domain of TCR clone 251119 (TRAV12-3, TRAJ10)
SHLPLTGGGNKLTF

SEQ ID NO: 502238 - protein, 15 aa, Homo sapiens
  CDR3 for beta chain variable domain of TCR clone 251119 (TRBV25-1, TRBJ2-4)
CASSETESAKDIQYF

SEQ ID NO: 502239 - protein, 18 aa, Homo sapiens
  CDR3 for alpha chain variable domain of TCR clone 251120 (TRAV26-1, TRAJ37)
CIVRVDMHCSSNTGKLIF

SEQ ID NO: 502240 - protein, 15 aa, Homo sapiens
  CDR3 for beta chain variable domain of TCR clone 251120 (TRBV20-1, TRBJ2-7)
CSARVLASPLYEQYF

SEQ ID NO: 502241 - protein, 15 aa, Homo sapiens
  CDR3 for alpha chain variable domain of TCR clone 251121 (TRAV8-3, TRAJ20)
CAVEAKGYNDYKLSF

SEQ ID NO: 502242 - protein, 12 aa, Homo sapiens
  CDR3 for beta chain variable domain of TCR clone 251121 (TRBV7-2, TRBJ1-2)
CASRDSIYGYTF

SEQ ID NO: 502243 - protein, 23 aa, Homo sapiens
  CDR3 for alpha chain variable domain of TCR clone 251122 (TRAV26-1, TRAJ38)
CIADNAGNNHIQNPDPAVDQLRD

SEQ ID NO: 502244 - protein, 13 aa, Homo sapiens
  CDR3 for beta chain variable domain of TCR clone 251122 (TRBV10-3, TRBJ2-7)
CASKLAVNYEQYF

SEQ ID NO: 502245 - protein, 16 aa, Homo sapiens
  CDR3 for alpha chain variable domain of TCR clone 251123 (TRAV26-1, TRAJ23)
CIVRVHPYNQGGKLIF

SEQ ID NO: 502246 - protein, 15 aa, Homo sapiens
  CDR3 for beta chain variable domain of TCR clone 251123 (TRBV5-7, TRBJ2-7)
CASSTYFEGSYEQYF

SEQ ID NO: 502247 - protein, 14 aa, Homo sapiens
  CDR3 for alpha chain variable domain of TCR clone 251124 (TRAV26-1, TRAJ34)
CIVRVAYNTDKLIF

SEQ ID NO: 502248 - protein, 15 aa, Homo sapiens
  CDR3 for beta chain variable domain of TCR clone 251124 (TRBV20-1, TRBJ2-7)
CSARVPAAYFYEQYS

SEQ ID NO: 502249 - protein, 16 aa, Homo sapiens
  CDR3 for alpha chain variable domain of TCR clone 251125 (TRAV16, TRAJ52)
CALSAAGGTSYGKLTF

SEQ ID NO: 502250 - protein, 12 aa, Homo sapiens
  CDR3 for beta chain variable domain of TCR clone 251125 (TRBV11-2, TRBJ2-2)
CASSRPTGELFF

SEQ ID NO: 502251 - protein, 14 aa, Homo sapiens
  CDR3 for alpha chain variable domain of TCR clone 251126 (TRAV1-2, TRAJ6)
CAVSLSGGSYMPAF

SEQ ID NO: 502252 - protein, 15 aa, Homo sapiens
  CDR3 for beta chain variable domain of TCR clone 251126 (TRBV7-9, TRBJ2-7)
CASSPGGGLTYEQYF

SEQ ID NO: 502253 - protein, 15 aa, Homo sapiens
  CDR3 for alpha chain variable domain of TCR clone 251127 (TRAV3, TRAJ5)
CAVRDLETGRRALTF

SEQ ID NO: 502254 - protein, 13 aa, Homo sapiens
  CDR3 for beta chain variable domain of TCR clone 251127 (TRBV12-4, TRBJ2-7)
CASSPTGTYEQYF

SEQ ID NO: 502255 - protein, 13 aa, Homo sapiens
  CDR3 for alpha chain variable domain of TCR clone 251128 (TRAV3, TRAJ15)
CAVRDQSGTALIF

SEQ ID NO: 502256 - protein, 20 aa, Homo sapiens
  CDR3 for beta chain variable domain of TCR clone 251128 (TRBV23-1, TRBJ2-5)
CISAPAVPERVLLIQETQYF

SEQ ID NO: 502257 - protein, 14 aa, Homo sapiens
  CDR3 for alpha chain variable domain of TCR clone 251129 (TRAV12-1, TRAJ12)
CVVTSGDSSYKLIF

SEQ ID NO: 502258 - protein, 13 aa, Homo sapiens
  CDR3 for beta chain variable domain of TCR clone 251129 (TRBV27, TRBJ2-1)
CASRTLGVGEQFF

SEQ ID NO: 502259 - protein, 12 aa, Homo sapiens
  CDR3 for alpha chain variable domain of TCR clone 251130 (TRAV12-3, TRAJ17)
CAMTLTGNKLTF

SEQ ID NO: 502260 - protein, 16 aa, Homo sapiens
  CDR3 for beta chain variable domain of TCR clone 251130 (TRBV7-3, TRBJ2-2)
CASSLKRGALSGELFF

SEQ ID NO: 502261 - protein, 16 aa, Homo sapiens
  CDR3 for alpha chain variable domain of TCR clone 251131 (TRAV3, TRAJ37)
CAVRPHGSGNTGKLIF

SEQ ID NO: 502262 - protein, 15 aa, Homo sapiens
  CDR3 for beta chain variable domain of TCR clone 251131 (TRBV11-3, TRBJ2-3)
CASSLSGQGPNTQYF

SEQ ID NO: 502263 - protein, 18 aa, Homo sapiens
  CDR3 for alpha chain variable domain of TCR clone 251132 (TRAV13-1, TRAJ52)
CAASKRRDGGTSYGKLTF

SEQ ID NO: 502264 - protein, 13 aa, Homo sapiens
  CDR3 for beta chain variable domain of TCR clone 251132 (TRBV12-4, TRBJ1-2)
CASSLRQGKGYTF

SEQ ID NO: 502265 - protein, 14 aa, Homo sapiens
  CDR3 for alpha chain variable domain of TCR clone 251133 (TRAV8-4, TRAJ8)
CAVSVGTGFQNLVF

SEQ ID NO: 502266 - protein, 15 aa, Homo sapiens
  CDR3 for beta chain variable domain of TCR clone 251133 (TRBV2, TRBJ2-3)
CASSGEGTGTDTQYF

SEQ ID NO: 502267 - protein, 14 aa, Homo sapiens
  CDR3 for alpha chain variable domain of TCR clone 251134 (TRAV10, TRAJ17)
CVVVWTAAGNKLTF

SEQ ID NO: 502268 - protein, 15 aa, Homo sapiens
  CDR3 for beta chain variable domain of TCR clone 251134 (TRBV5-7, TRBJ2-5)
CASSIRDGLLVSQYF

SEQ ID NO: 502269 - protein, 14 aa, Homo sapiens
  CDR3 for alpha chain variable domain of TCR clone 251135 (TRAV12-3, TRAJ13)
CAMENSGGYQKVTF

SEQ ID NO: 502270 - protein, 13 aa, Homo sapiens
  CDR3 for beta chain variable domain of TCR clone 251135 (TRBV2, TRBJ1-5)
CATAGPGNQPQHF

SEQ ID NO: 502271 - protein, 14 aa, Homo sapiens
  CDR3 for alpha chain variable domain of TCR clone 251136 (TRAV2, TRAJ9)
CAVEDRSGGFKTIF

SEQ ID NO: 502272 - protein, 12 aa, Homo sapiens
  CDR3 for beta chain variable domain of TCR clone 251136 (TRBV12-4, TRBJ2-4)
CASSSSGNIRYY

SEQ ID NO: 502273 - protein, 14 aa, Homo sapiens
  CDR3 for alpha chain variable domain of TCR clone 251137 (TRAV26-1, TRAJ38)
CIADTAGNNRKLIW

SEQ ID NO: 502274 - protein, 20 aa, Homo sapiens
  CDR3 for beta chain variable domain of TCR clone 251137 (TRBV7-8, TRBJ2-2)
CASSHLFPGPTIHITGELFF

SEQ ID NO: 502275 - protein, 16 aa, Homo sapiens
  CDR3 for alpha chain variable domain of TCR clone 251138 (TRAV12-2, TRAJ13)
CAVDSAGAGGYQEVTF

SEQ ID NO: 502276 - protein, 13 aa, Homo sapiens
  CDR3 for beta chain variable domain of TCR clone 251138 (TRBV20-1, TRBJ2-7)
CSARPSTNYEQYF

SEQ ID NO: 502277 - protein, 13 aa, Homo sapiens
  CDR3 for alpha chain variable domain of TCR clone 251139 (TRAV36/DV7, TRAJ7)
CAGIRYGNNRLAF

SEQ ID NO: 502278 - protein, 14 aa, Homo sapiens
  CDR3 for beta chain variable domain of TCR clone 251139 (TRBV19, TRBJ2-1)
CASPTFVLSGEQFF

SEQ ID NO: 502279 - protein, 13 aa, Homo sapiens
  CDR3 for alpha chain variable domain of TCR clone 251140 (TRAV12-3, TRAJ7)
CAMTPYGNNRLAF

SEQ ID NO: 502280 - protein, 16 aa, Homo sapiens
  CDR3 for beta chain variable domain of TCR clone 251140 (TRBV20-1, TRBJ1-4)
CSARPYGGELNVKLFF

SEQ ID NO: 502281 - protein, 13 aa, Homo sapiens
  CDR3 for alpha chain variable domain of TCR clone 251141 (TRAV3, TRAJ21)
CAVREPDFNKFYF

SEQ ID NO: 502282 - protein, 11 aa, Homo sapiens
  CDR3 for beta chain variable domain of TCR clone 251141 (TRBV7-2, TRBJ2-3)
CASSLGDTQYF

SEQ ID NO: 502283 - protein, 13 aa, Homo sapiens
  CDR3 for alpha chain variable domain of TCR clone 251142 (TRAV2, TRAJ16)
CAVESSWGQKLLF

SEQ ID NO: 502284 - protein, 16 aa, Homo sapiens
  CDR3 for beta chain variable domain of TCR clone 251142 (TRBV5-1, TRBJ1-1)
CASSSGGNSLNTEAFF

SEQ ID NO: 502285 - protein, 13 aa, Homo sapiens
  CDR3 for alpha chain variable domain of TCR clone 251143 (TRAV2, TRAJ15)
CAVASQAGTALIF

SEQ ID NO: 502286 - protein, 17 aa, Homo sapiens
  CDR3 for beta chain variable domain of TCR clone 251143 (TRBV20-1, TRBJ2-2)
CSASGSGQGGLTGEQFF

SEQ ID NO: 502287 - protein, 15 aa, Homo sapiens
  CDR3 for alpha chain variable domain of TCR clone 251144 (TRAV29/DV5, TRAJ24)
CAASGATDSWGKFQF

SEQ ID NO: 502288 - protein, 14 aa, Homo sapiens
  CDR3 for beta chain variable domain of TCR clone 251144 (TRBV7-8, TRBJ2-3)
CASSSRDSTDTQYF

SEQ ID NO: 502289 - protein, 12 aa, Homo sapiens
  CDR3 for alpha chain variable domain of TCR clone 251145 (TRAV29/DV5, TRAJ43)
CAAPYNNNDMRF

SEQ ID NO: 502290 - protein, 17 aa, Homo sapiens
  CDR3 for beta chain variable domain of TCR clone 251145 (TRBV19, TRBJ2-6)
CAGSTGQVFSGANVLTF

SEQ ID NO: 502291 - protein, 14 aa, Homo sapiens
  CDR3 for alpha chain variable domain of TCR clone 251146 (TRAV12-2, TRAJ11)
CAVEGGSGYSTLTF

SEQ ID NO: 502292 - protein, 15 aa, Homo sapiens
  CDR3 for beta chain variable domain of TCR clone 251146 (TRBV20-1, TRBJ2-4)
CSARDLTGGPNIQYF

SEQ ID NO: 502293 - protein, 14 aa, Homo sapiens
  CDR3 for alpha chain variable domain of TCR clone 251147 (TRAV36/DV7, TRAJ40)
CAVETTSGTYKYIF

SEQ ID NO: 502294 - protein, 15 aa, Homo sapiens
  CDR3 for beta chain variable domain of TCR clone 251147 (TRBV7-9, TRBJ1-4)
CSSGARTGGNEKLFF

SEQ ID NO: 502295 - protein, 16 aa, Homo sapiens
  CDR3 for alpha chain variable domain of TCR clone 251148 (TRAV26-1, TRAJ36)
CIVRVPDQTGANNLFF

SEQ ID NO: 502296 - protein, 14 aa, Homo sapiens
  CDR3 for beta chain variable domain of TCR clone 251148 (TRBV7-2, TRBJ2-7)
CACSPKTSFYEQYF

SEQ ID NO: 502297 - protein, 13 aa, Homo sapiens
  CDR3 for alpha chain variable domain of TCR clone 251149 (TRAV20, TRAJ20)
CCSAGYNDYKLSF

SEQ ID NO: 502298 - protein, 13 aa, Homo sapiens
  CDR3 for beta chain variable domain of TCR clone 251149 (TRBV19, TRBJ2-5)
CASSETAPETQYF

SEQ ID NO: 502299 - protein, 19 aa, Homo sapiens
  CDR3 for alpha chain variable domain of TCR clone 251150 (TRAV1-2, TRAJ26)
CLFPLCCERPDNYGQNFVF

SEQ ID NO: 502300 - protein, 11 aa, Homo sapiens
  CDR3 for beta chain variable domain of TCR clone 251150 (TRBV12-4, TRBJ2-3)
CASTATDTQYF

SEQ ID NO: 502301 - protein, 14 aa, Homo sapiens
  CDR3 for alpha chain variable domain of TCR clone 251151 (TRAV12-2, TRAJ13)
CAVKKTGGYKKVTF

SEQ ID NO: 502302 - protein, 11 aa, Homo sapiens
  CDR3 for beta chain variable domain of TCR clone 251151 (TRBV11-2, TRBJ2-2)
CASSLPGELFF

SEQ ID NO: 502303 - protein, 14 aa, Homo sapiens
  CDR3 for alpha chain variable domain of TCR clone 251152 (TRAV3, TRAJ16)
CAVSLFSDGQKLLF

SEQ ID NO: 502304 - protein, 14 aa, Homo sapiens
  CDR3 for beta chain variable domain of TCR clone 251152 (TRBV18, TRBJ1-2)
CASSPDRVVYGYTF

SEQ ID NO: 502305 - protein, 14 aa, Homo sapiens
  CDR3 for alpha chain variable domain of TCR clone 251153 (TRAV38-1, TRAJ29)
CAFITPSGNTPLVF

SEQ ID NO: 502306 - protein, 17 aa, Homo sapiens
  CDR3 for beta chain variable domain of TCR clone 251153 (TRBV20-1, TRBJ2-1)
CSASSSGLAGSYNEQFF

SEQ ID NO: 502307 - protein, 14 aa, Homo sapiens
  CDR3 for alpha chain variable domain of TCR clone 251154 (TRAV4, TRAJ9)
CLVGSGTGGFKTIF

SEQ ID NO: 502308 - protein, 14 aa, Homo sapiens
  CDR3 for beta chain variable domain of TCR clone 251154 (TRBV7-9, TRBJ2-4)
CASGLAMGGNIQYF

SEQ ID NO: 502309 - protein, 15 aa, Homo sapiens
  CDR3 for alpha chain variable domain of TCR clone 251155 (TRAV3, TRAJ22)
CAVRDRGGSARQLTF

SEQ ID NO: 502310 - protein, 16 aa, Homo sapiens
  CDR3 for beta chain variable domain of TCR clone 251155 (TRBV5-4, TRBJ2-3)
CASQQSGAGGADTQYF

SEQ ID NO: 502311 - protein, 15 aa, Homo sapiens
  CDR3 for alpha chain variable domain of TCR clone 251156 (TRAV21, TRAJ53)
CATLNSGGSNYKLTF

SEQ ID NO: 502312 - protein, 12 aa, Homo sapiens
  CDR3 for beta chain variable domain of TCR clone 251156 (TRBV5-4, TRBJ2-7)
CASSVEAYEQYF

SEQ ID NO: 502313 - protein, 13 aa, Homo sapiens
  CDR3 for alpha chain variable domain of TCR clone 251157 (TRAV13-1, TRAJ43)
CAASLSNNNDMRF

SEQ ID NO: 502314 - protein, 14 aa, Homo sapiens
  CDR3 for beta chain variable domain of TCR clone 251157 (TRBV5-1, TRBJ2-5)
CASSLAGRQETQYF

SEQ ID NO: 502315 - protein, 15 aa, Homo sapiens
  CDR3 for alpha chain variable domain of TCR clone 251158 (TRAV40, TRAJ45)
CLLGDLGGGADGLTF

SEQ ID NO: 502316 - protein, 12 aa, Homo sapiens
  CDR3 for beta chain variable domain of TCR clone 251158 (TRBV24-1, TRBJ1-1)
CATLDPDTEAFF

SEQ ID NO: 502317 - protein, 16 aa, Homo sapiens
  CDR3 for alpha chain variable domain of TCR clone 251159 (TRAV13-1, TRAJ18)
CAASRMRGSTLGRLYF

SEQ ID NO: 502318 - protein, 16 aa, Homo sapiens
  CDR3 for beta chain variable domain of TCR clone 251159 (TRBV27, TRBJ1-1)
CASSTRGRTGYTEAFF

SEQ ID NO: 502319 - protein, 17 aa, Homo sapiens
  CDR3 for alpha chain variable domain of TCR clone 251160 (TRAV3, TRAJ38)
CAVRDCLNAGNNRKLIW

SEQ ID NO: 502320 - protein, 14 aa, Homo sapiens
  CDR3 for beta chain variable domain of TCR clone 251160 (TRBV2, TRBJ2-7)
CASSLTSGGYEQYF

SEQ ID NO: 502321 - protein, 13 aa, Homo sapiens
  CDR3 for alpha chain variable domain of TCR clone 251161 (TRAV35, TRAJ36)
CAGPRIGANNLFF

SEQ ID NO: 502322 - protein, 15 aa, Homo sapiens
  CDR3 for beta chain variable domain of TCR clone 251161 (TRBV28, TRBJ2-5)
CASSPPWSYQETHYF

SEQ ID NO: 502323 - protein, 16 aa, Homo sapiens
  CDR3 for alpha chain variable domain of TCR clone 251162 (TRAV3, TRAJ21)
CAVRDIERGNFNKFYF

SEQ ID NO: 502324 - protein, 13 aa, Homo sapiens
  CDR3 for beta chain variable domain of TCR clone 251162 (TRBV29-1, TRBJ1-1)
CSVESGFGTEAFF

SEQ ID NO: 502325 - protein, 15 aa, Homo sapiens
  CDR3 for alpha chain variable domain of TCR clone 251163 (TRAV21, TRAJ24)
CAARSSTDRWGKLQF

SEQ ID NO: 502326 - protein, 19 aa, Homo sapiens
  CDR3 for beta chain variable domain of TCR clone 251163 (TRBV14, TRBJ2-1)
CASSQDQLWEAPEYNEQFF

SEQ ID NO: 502327 - protein, 14 aa, Homo sapiens
  CDR3 for alpha chain variable domain of TCR clone 251164 (TRAV14/DV4, TRAJ20)
CAMREVYNDYKLSF

SEQ ID NO: 502328 - protein, 15 aa, Homo sapiens
  CDR3 for beta chain variable domain of TCR clone 251164 (TRBV28, TRBJ2-7)
CASSSISGGSYEQYF

SEQ ID NO: 502329 - protein, 13 aa, Homo sapiens
  CDR3 for alpha chain variable domain of TCR clone 251165 (TRAV13-2, TRAJ13)
CADLSGGYQKVTF

SEQ ID NO: 502330 - protein, 15 aa, Homo sapiens
  CDR3 for beta chain variable domain of TCR clone 251165 (TRBV19, TRBJ1-1)
CASSIGEGRNTEAFF

SEQ ID NO: 502331 - protein, 14 aa, Homo sapiens
  CDR3 for alpha chain variable domain of TCR clone 251166 (TRAV1-2, TRAJ16)
CAVNRFSDGQKLLF

SEQ ID NO: 502332 - protein, 15 aa, Homo sapiens
  CDR3 for beta chain variable domain of TCR clone 251166 (TRBV6-3, TRBJ2-7)
CACSSPGTVFYEQYF

SEQ ID NO: 502333 - protein, 10 aa, Homo sapiens
  CDR3 for alpha chain variable domain of TCR clone 251167 (TRAV36/DV7, TRAJ49)
CALTGNQFYF

SEQ ID NO: 502334 - protein, 13 aa, Homo sapiens
  CDR3 for beta chain variable domain of TCR clone 251167 (TRBV4-1, TRBJ2-7)
CASSHGQAYEQYF

SEQ ID NO: 502335 - protein, 20 aa, Homo sapiens
  CDR3 for alpha chain variable domain of TCR clone 251168 (TRAV4, TRAJ29)
CCVLLPRGCVPFSGNPPLVF

SEQ ID NO: 502336 - protein, 12 aa, Homo sapiens
  CDR3 for beta chain variable domain of TCR clone 251168 (TRBV6-1, TRBJ2-7)
CASSDYSYEQYF

SEQ ID NO: 502337 - protein, 13 aa, Homo sapiens
  CDR3 for alpha chain variable domain of TCR clone 251169 (TRAV12-1, TRAJ5)
CGFTDTGRRALTF

SEQ ID NO: 502338 - protein, 13 aa, Homo sapiens
  CDR3 for beta chain variable domain of TCR clone 251169 (TRBV19, TRBJ1-2)
CASSVPGQDGYTF

SEQ ID NO: 502339 - protein, 14 aa, Homo sapiens
  CDR3 for alpha chain variable domain of TCR clone 251170 (TRAV13-1, TRAJ36)
CAAIYQTGANNLFC

SEQ ID NO: 502340 - protein, 15 aa, Homo sapiens
  CDR3 for beta chain variable domain of TCR clone 251170 (TRBV5-1, TRBJ1-1)
CASSPLGGSNTEAFF

SEQ ID NO: 502341 - protein, 11 aa, Homo sapiens
  CDR3 for alpha chain variable domain of TCR clone 251171 (TRAV12-3, TRAJ27)
CAMANAGKSTF

SEQ ID NO: 502342 - protein, 16 aa, Homo sapiens
  CDR3 for beta chain variable domain of TCR clone 251171 (TRBV7-9, TRBJ1-2)
CASSPGGGAINYGYTF

SEQ ID NO: 502343 - protein, 16 aa, Homo sapiens
  CDR3 for alpha chain variable domain of TCR clone 251172 (TRAV12-1, TRAJ12)
CVVNTLLMDSSYKLIF

SEQ ID NO: 502344 - protein, 13 aa, Homo sapiens
  CDR3 for beta chain variable domain of TCR clone 251172 (TRBV14, TRBJ2-7)
CASSQDRRYEQYS

SEQ ID NO: 502345 - protein, 13 aa, Homo sapiens
  CDR3 for alpha chain variable domain of TCR clone 251173 (TRAV29/DV5, TRAJ31)
CAASRNNNARLML

SEQ ID NO: 502346 - protein, 13 aa, Homo sapiens
  CDR3 for beta chain variable domain of TCR clone 251173 (TRBV7-2, TRBJ2-4)
CASSWEHANIQYF

SEQ ID NO: 502347 - protein, 11 aa, Homo sapiens
  CDR3 for alpha chain variable domain of TCR clone 251174 (TRAV21, TRAJ27)
CAVRMQANQPL

SEQ ID NO: 502348 - protein, 15 aa, Homo sapiens
  CDR3 for beta chain variable domain of TCR clone 251174 (TRBV11-2, TRBJ2-2)
CASSSDRVNAGELFF

SEQ ID NO: 502349 - protein, 17 aa, Homo sapiens
  CDR3 for alpha chain variable domain of TCR clone 251175 (TRAV17, TRAJ6)
CAVRDGPRAGGSYIPTF

SEQ ID NO: 502350 - protein, 14 aa, Homo sapiens
  CDR3 for beta chain variable domain of TCR clone 251175 (TRBV7-2, TRBJ2-7)
CASSPRTSFYEQYF

SEQ ID NO: 502351 - protein, 14 aa, Homo sapiens
  CDR3 for alpha chain variable domain of TCR clone 251176 (TRAV12-2, TRAJ13)
CAVKKTGGYQKVTF

SEQ ID NO: 502352 - protein, 15 aa, Homo sapiens
  CDR3 for beta chain variable domain of TCR clone 251176 (TRBV27, TRBJ2-1)
CASSNGGGSSNVHFF

SEQ ID NO: 502353 - protein, 12 aa, Homo sapiens
  CDR3 for alpha chain variable domain of TCR clone 251177 (TRAV8-4, TRAJ31)
CAVSDSNARLMF

SEQ ID NO: 502354 - protein, 17 aa, Homo sapiens
  CDR3 for beta chain variable domain of TCR clone 251177 (TRBV27, TRBJ2-3)
CASSFFPPNTSTDTQYF

SEQ ID NO: 502355 - protein, 13 aa, Homo sapiens
  CDR3 for alpha chain variable domain of TCR clone 251178 (TRAV12-2, TRAJ37)
CAGGSGNTGKLTF

SEQ ID NO: 502356 - protein, 17 aa, Homo sapiens
  CDR3 for beta chain variable domain of TCR clone 251178 (TRBV4-2, TRBJ2-3)
CASSQDPIAGVGDTQYF

SEQ ID NO: 502357 - protein, 10 aa, Homo sapiens
  CDR3 for alpha chain variable domain of TCR clone 251179 (TRAV26-1, TRAJ40)
CIAGTYKYIF

SEQ ID NO: 502358 - protein, 17 aa, Homo sapiens
  CDR3 for beta chain variable domain of TCR clone 251179 (TRBV20-1, TRBJ2-2)
CSASGSGQGGLTGELFF

SEQ ID NO: 502359 - protein, 14 aa, Homo sapiens
  CDR3 for alpha chain variable domain of TCR clone 251180 (TRAV3, TRAJ33)
CAVRHMDSNYQVIW

SEQ ID NO: 502360 - protein, 19 aa, Homo sapiens
  CDR3 for beta chain variable domain of TCR clone 251180 (TRBV7-3, TRBJ1-2)
CASSFPQGNDGELWLHLRF

SEQ ID NO: 502361 - protein, 15 aa, Homo sapiens
  CDR3 for alpha chain variable domain of TCR clone 251181 (TRAV12-2, TRAJ53)
CAVNGGGGSNYKLTF

SEQ ID NO: 502362 - protein, 13 aa, Homo sapiens
  CDR3 for beta chain variable domain of TCR clone 251181 (TRBV10-2, TRBJ2-6)
CASKSAGANVLTF

SEQ ID NO: 502363 - protein, 16 aa, Homo sapiens
  CDR3 for alpha chain variable domain of TCR clone 251182 (TRAV26-1, TRAJ53)
CIVRVAMGGSNSKLTF

SEQ ID NO: 502364 - protein, 16 aa, Homo sapiens
  CDR3 for beta chain variable domain of TCR clone 251182 (TRBV7-8, TRBJ2-6)
CASRVGDSSGANVLTF

SEQ ID NO: 502365 - protein, 13 aa, Homo sapiens
  CDR3 for alpha chain variable domain of TCR clone 251183 (TRAV21, TRAJ57)
CAVTQGGSDKLVF

SEQ ID NO: 502366 - protein, 16 aa, Homo sapiens
  CDR3 for beta chain variable domain of TCR clone 251183 (TRBV29-1, TRBJ2-7)
CSVEDAEDGTAYEQYF

SEQ ID NO: 502367 - protein, 13 aa, Homo sapiens
  CDR3 for alpha chain variable domain of TCR clone 251184 (TRAV12-2, TRAJ34)
YAVRGYNTDKLIF

SEQ ID NO: 502368 - protein, 15 aa, Homo sapiens
  CDR3 for beta chain variable domain of TCR clone 251184 (TRBV28, TRBJ2-1)
CASRTGAGVLARQFF

SEQ ID NO: 502369 - protein, 15 aa, Homo sapiens
  CDR3 for alpha chain variable domain of TCR clone 251185 (TRAV8-3, TRAJ45)
CSSSYSGGGAYGLTF

SEQ ID NO: 502370 - protein, 13 aa, Homo sapiens
  CDR3 for beta chain variable domain of TCR clone 251185 (TRBV10-3, TRBJ2-7)
CASKLAVNYEQYF

SEQ ID NO: 502371 - protein, 14 aa, Homo sapiens
  CDR3 for alpha chain variable domain of TCR clone 251186 (TRAV35, TRAJ50)
CASHRKTSYDKVIF

SEQ ID NO: 502372 - protein, 15 aa, Homo sapiens
  CDR3 for beta chain variable domain of TCR clone 251186 (TRBV6-3, TRBJ2-7)
CASSSPGTVFYEQYF

SEQ ID NO: 502373 - protein, 18 aa, Homo sapiens
  CDR3 for alpha chain variable domain of TCR clone 251187 (TRAV8-4, TRAJ52)
CAVTRAKAGGTSYGKLTF

SEQ ID NO: 502374 - protein, 20 aa, Homo sapiens
  CDR3 for beta chain variable domain of TCR clone 251187 (TRBV19, TRBJ2-1)
CASSISRTVTSTRLNNEQFF

SEQ ID NO: 502375 - protein, 11 aa, Homo sapiens
  CDR3 for alpha chain variable domain of TCR clone 251188 (TRAV13-2, TRAJ20)
CADSNDYKLSF

SEQ ID NO: 502376 - protein, 11 aa, Homo sapiens
  CDR3 for beta chain variable domain of TCR clone 251188 (TRBV29-1, TRBJ2-5)
CSEDRTGTQYF

SEQ ID NO: 502377 - protein, 14 aa, Homo sapiens
  CDR3 for alpha chain variable domain of TCR clone 251189 (TRAV12-2, TRAJ13)
CAVKKTGGYQKVTF

SEQ ID NO: 502378 - protein, 15 aa, Homo sapiens
  CDR3 for beta chain variable domain of TCR clone 251189 (TRBV28, TRBJ2-1)
CASSIIAGGISEQFF

SEQ ID NO: 502379 - protein, 15 aa, Homo sapiens
  CDR3 for alpha chain variable domain of TCR clone 251190 (TRAV29/DV5, TRAJ29)
CAASERSSGNTPLVF

SEQ ID NO: 502380 - protein, 13 aa, Homo sapiens
  CDR3 for beta chain variable domain of TCR clone 251190 (TRBV28, TRBJ2-7)
CASTPGLAGEQYF

SEQ ID NO: 502381 - protein, 11 aa, Homo sapiens
  CDR3 for alpha chain variable domain of TCR clone 251191 (TRAV12-3, TRAJ43)
CAMSVSNDMRF

SEQ ID NO: 502382 - protein, 15 aa, Homo sapiens
  CDR3 for beta chain variable domain of TCR clone 251191 (TRBV3-1, TRBJ2-5)
CASSANLGGPETQYF

SEQ ID NO: 502383 - protein, 16 aa, Homo sapiens
  CDR3 for alpha chain variable domain of TCR clone 251192 (TRAV8-3, TRAJ44)
CAVGASNTGTASKLTF

SEQ ID NO: 502384 - protein, 14 aa, Homo sapiens
  CDR3 for beta chain variable domain of TCR clone 251192 (TRBV7-6, TRBJ2-3)
CASSLGTVTDTRYF

SEQ ID NO: 502385 - protein, 12 aa, Homo sapiens
  CDR3 for alpha chain variable domain of TCR clone 251193 (TRAV20, TRAJ37)
CALPSNTGKLIF

SEQ ID NO: 502386 - protein, 14 aa, Homo sapiens
  CDR3 for beta chain variable domain of TCR clone 251193 (TRBV19, TRBJ2-1)
CASPTFVLRGEQFF

SEQ ID NO: 502387 - protein, 14 aa, Homo sapiens
  CDR3 for alpha chain variable domain of TCR clone 251194 (TRAV8-6, TRAJ53)
CAAHVLGSNYKLTF

SEQ ID NO: 502388 - protein, 15 aa, Homo sapiens
  CDR3 for beta chain variable domain of TCR clone 251194 (TRBV20-1, TRBJ2-3)
CSAEPLAGHGDTQYF

SEQ ID NO: 502389 - protein, 17 aa, Homo sapiens
  CDR3 for alpha chain variable domain of TCR clone 251195 (TRAV3, TRAJ42)
CAVRDRDYGGSQGNLIF

SEQ ID NO: 502390 - protein, 15 aa, Homo sapiens
  CDR3 for beta chain variable domain of TCR clone 251195 (TRBV5-1, TRBJ2-7)
CASSLNGGPAREQYF

SEQ ID NO: 502391 - protein, 15 aa, Homo sapiens
  CDR3 for alpha chain variable domain of TCR clone 251196 (TRAV12-1, TRAJ44)
CVVSSNTGTASKLTF

SEQ ID NO: 502392 - protein, 17 aa, Homo sapiens
  CDR3 for beta chain variable domain of TCR clone 251196 (TRBV11-2, TRBJ2-1)
CASSLYPPGVEYNEQFF

SEQ ID NO: 502393 - protein, 13 aa, Homo sapiens
  CDR3 for alpha chain variable domain of TCR clone 251197 (TRAV3, TRAJ20)
CAVRDTPRYKLSF

SEQ ID NO: 502394 - protein, 14 aa, Homo sapiens
  CDR3 for beta chain variable domain of TCR clone 251197 (TRBV10-3, TRBJ2-2)
CAASSRVNTGELFF

SEQ ID NO: 502395 - protein, 15 aa, Homo sapiens
  CDR3 for alpha chain variable domain of TCR clone 251198 (TRAV17, TRAJ28)
CATVASGAGSYQLTF

SEQ ID NO: 502396 - protein, 13 aa, Homo sapiens
  CDR3 for beta chain variable domain of TCR clone 251198 (TRBV5-4, TRBJ2-5)
CASSRQEGETQYF

SEQ ID NO: 502397 - protein, 14 aa, Homo sapiens
  CDR3 for alpha chain variable domain of TCR clone 251199 (TRAV8-2, TRAJ39)
CVVSAQNAGNMLTF

SEQ ID NO: 502398 - protein, 15 aa, Homo sapiens
  CDR3 for beta chain variable domain of TCR clone 251199 (TRBV11-3, TRBJ2-1)
CASSLAGQTYNEQFF

SEQ ID NO: 502399 - protein, 12 aa, Homo sapiens
  CDR3 for alpha chain variable domain of TCR clone 251200 (TRAV8-4, TRAJ43)
CAVRGNNNDMRL

SEQ ID NO: 502400 - protein, 14 aa, Homo sapiens
  CDR3 for beta chain variable domain of TCR clone 251200 (TRBV11-2, TRBJ1-2)
CASSLGTANYGYTF

SEQ ID NO: 502401 - protein, 14 aa, Homo sapiens
  CDR3 for alpha chain variable domain of TCR clone 251201 (TRAV1-2, TRAJ16)
CAVNRFSDGQKLLF

SEQ ID NO: 502402 - protein, 14 aa, Homo sapiens
  CDR3 for beta chain variable domain of TCR clone 251201 (TRBV7-9, TRBJ2-2)
CASSVGHRTGELFF

SEQ ID NO: 502403 - protein, 13 aa, Homo sapiens
  CDR3 for alpha chain variable domain of TCR clone 251202 (TRAV2, TRAJ15)
CAVASQAGTALLF

SEQ ID NO: 502404 - protein, 15 aa, Homo sapiens
  CDR3 for beta chain variable domain of TCR clone 251202 (TRBV7-3, TRBJ2-2)
CASSETGQGTGELFF

SEQ ID NO: 502405 - protein, 11 aa, Homo sapiens
  CDR3 for alpha chain variable domain of TCR clone 251203 (TRAV12-3, TRAJ43)
CAISVSNDMRF

SEQ ID NO: 502406 - protein, 12 aa, Homo sapiens
  CDR3 for beta chain variable domain of TCR clone 251203 (TRBV20-1, TRBJ1-1)
QCSTWGGTEAFF

SEQ ID NO: 502407 - protein, 13 aa, Homo sapiens
  CDR3 for alpha chain variable domain of TCR clone 251204 (TRAV12-3, TRAJ7)
CAKSASGNNRLAF

SEQ ID NO: 502408 - protein, 14 aa, Homo sapiens
  CDR3 for beta chain variable domain of TCR clone 251204 (TRBV13, TRBJ2-5)
CASSLGPRGETQYF

SEQ ID NO: 502409 - protein, 15 aa, Homo sapiens
  CDR3 for alpha chain variable domain of TCR clone 251205 (TRAV34, TRAJ38)
CGADFTPGNNRKLIW

SEQ ID NO: 502410 - protein, 16 aa, Homo sapiens
  CDR3 for beta chain variable domain of TCR clone 251205 (TRBV12-5, TRBJ2-5)
CASGSRTSGNQETQYF

SEQ ID NO: 502411 - protein, 17 aa, Homo sapiens
  CDR3 for alpha chain variable domain of TCR clone 251206 (TRAV12-2, TRAJ48)
CASNEKLTFGTGTRLTI

SEQ ID NO: 502412 - protein, 15 aa, Homo sapiens
  CDR3 for beta chain variable domain of TCR clone 251206 (TRBV5-1, TRBJ2-1)
YVSSQAGYWWNEQFF

SEQ ID NO: 502413 - protein, 11 aa, Homo sapiens
  CDR3 for alpha chain variable domain of TCR clone 251207 (TRAV17, TRAJ43)
CDTPRSNDMRF

SEQ ID NO: 502414 - protein, 15 aa, Homo sapiens
  CDR3 for beta chain variable domain of TCR clone 251207 (TRBV11-2, TRBJ2-1)
CASSLGTSGLNEQFL

SEQ ID NO: 502415 - protein, 15 aa, Homo sapiens
  CDR3 for alpha chain variable domain of TCR clone 251208 (TRAV12-2, TRAJ43)
CAFDMRFGAGTRLTV

SEQ ID NO: 502416 - protein, 15 aa, Homo sapiens
  CDR3 for beta chain variable domain of TCR clone 251208 (TRBV28, TRBJ2-1)
CASSIIAGGRSEQFF

SEQ ID NO: 502417 - protein, 15 aa, Homo sapiens
  CDR3 for alpha chain variable domain of TCR clone 251209 (TRAV26-1, TRAJ9)
CIVRESNTGGFKTIF

SEQ ID NO: 502418 - protein, 11 aa, Homo sapiens
  CDR3 for beta chain variable domain of TCR clone 251209 (TRBV7-6, TRBJ2-5)
CASSFPETQYF

SEQ ID NO: 502419 - protein, 10 aa, Homo sapiens
  CDR3 for alpha chain variable domain of TCR clone 251210 (TRAV2, TRAJ34)
CAVVNDKLIF

SEQ ID NO: 502420 - protein, 15 aa, Homo sapiens
  CDR3 for beta chain variable domain of TCR clone 251210 (TRBV5-1, TRBJ2-3)
CASSVTSGSTDTQYF

SEQ ID NO: 502421 - protein, 15 aa, Homo sapiens
  CDR3 for alpha chain variable domain of TCR clone 251211 (TRAV12-2, TRAJ53)
CAVNGGGGSNYKLTF

SEQ ID NO: 502422 - protein, 17 aa, Homo sapiens
  CDR3 for beta chain variable domain of TCR clone 251211 (TRBV5-1, TRBJ2-2)
CASSLAGLSGGTGELFF

SEQ ID NO: 502423 - protein, 14 aa, Homo sapiens
  CDR3 for alpha chain variable domain of TCR clone 251212 (TRAV23/DV6, TRAJ27)
CAASRDTNAGKSTF

SEQ ID NO: 502424 - protein, 13 aa, Homo sapiens
  CDR3 for beta chain variable domain of TCR clone 251212 (TRBV20-1, TRBJ1-5)
CSASGRGYQPQHF

SEQ ID NO: 502425 - protein, 16 aa, Homo sapiens
  CDR3 for alpha chain variable domain of TCR clone 251213 (TRAV30, TRAJ24)
CGTEIVDADSWGKFQF

SEQ ID NO: 502426 - protein, 17 aa, Homo sapiens
  CDR3 for beta chain variable domain of TCR clone 251213 (TRBV5-5, TRBJ2-7)
CASSLLFRGTSSYEQYF

SEQ ID NO: 502427 - protein, 12 aa, Homo sapiens
  CDR3 for alpha chain variable domain of TCR clone 251214 (TRAV12-3, TRAJ3)
CAIDSSASKIIF

SEQ ID NO: 502428 - protein, 17 aa, Homo sapiens
  CDR3 for beta chain variable domain of TCR clone 251214 (TRBV7-9, TRBJ2-3)
WASSLEEAGAYPGTQYF

SEQ ID NO: 502429 - protein, 15 aa, Homo sapiens
  CDR3 for alpha chain variable domain of TCR clone 251215 (TRAV29/DV5, TRAJ8)
CAASGRHTGFQKLVF

SEQ ID NO: 502430 - protein, 15 aa, Homo sapiens
  CDR3 for beta chain variable domain of TCR clone 251215 (TRBV5-1, TRBJ2-1)
CASSGSGRTYNEQFF

SEQ ID NO: 502431 - protein, 16 aa, Homo sapiens
  CDR3 for alpha chain variable domain of TCR clone 251216 (TRAV3, TRAJ37)
CAVRGKGSGNTGKLIF

SEQ ID NO: 502432 - protein, 15 aa, Homo sapiens
  CDR3 for beta chain variable domain of TCR clone 251216 (TRBV6-1, TRBJ2-1)
CASSEAAYSYNEQFF

SEQ ID NO: 502433 - protein, 12 aa, Homo sapiens
  CDR3 for alpha chain variable domain of TCR clone 251217 (TRAV3, TRAJ43)
CAVRDPNNDMRV

SEQ ID NO: 502434 - protein, 14 aa, Homo sapiens
  CDR3 for beta chain variable domain of TCR clone 251217 (TRBV13, TRBJ2-5)
CASSLGPRGETQYF

SEQ ID NO: 502435 - protein, 12 aa, Homo sapiens
  CDR3 for alpha chain variable domain of TCR clone 251218 (TRAV17, TRAJ9)
CATTRLQNYLWS

SEQ ID NO: 502436 - protein, 14 aa, Homo sapiens
  CDR3 for beta chain variable domain of TCR clone 251218 (TRBV7-9, TRBJ2-2)
CASSGLADTGELFF

SEQ ID NO: 502437 - protein, 15 aa, Homo sapiens
  CDR3 for alpha chain variable domain of TCR clone 251219 (TRAV29/DV5, TRAJ42)
CAAKTDGGSQGNLIF

SEQ ID NO: 502438 - protein, 15 aa, Homo sapiens
  CDR3 for beta chain variable domain of TCR clone 251219 (TRBV9, TRBJ1-6)
CASSVAGTGDSPLHF

SEQ ID NO: 502439 - protein, 15 aa, Homo sapiens
  CDR3 for alpha chain variable domain of TCR clone 251220 (TRAV8-4, TRAJ48)
CAVSAAYFGNEKLTF

SEQ ID NO: 502440 - protein, 12 aa, Homo sapiens
  CDR3 for beta chain variable domain of TCR clone 251220 (TRBV11-2, TRBJ2-2)
CASSLGGGELFF

SEQ ID NO: 502441 - protein, 16 aa, Homo sapiens
  CDR3 for alpha chain variable domain of TCR clone 251221 (TRAV1-2, TRAJ10)
CAVRGVLTGGGNKLTF

SEQ ID NO: 502442 - protein, 15 aa, Homo sapiens
  CDR3 for beta chain variable domain of TCR clone 251221 (TRBV6-5, TRBJ2-5)
CASSPLAGGIETQYF

SEQ ID NO: 502443 - protein, 16 aa, Homo sapiens
  CDR3 for alpha chain variable domain of TCR clone 251222 (TRAV12-1, TRAJ45)
CVVIRYSGGGADGLTF

SEQ ID NO: 502444 - protein, 15 aa, Homo sapiens
  CDR3 for beta chain variable domain of TCR clone 251222 (TRBV7-2, TRBJ2-1)
CASSSGLAGGNEQFF

SEQ ID NO: 502445 - protein, 13 aa, Homo sapiens
  CDR3 for alpha chain variable domain of TCR clone 251223 (TRAV12-2, TRAJ47)
CAVFMEYGNKLVF

SEQ ID NO: 502446 - protein, 14 aa, Homo sapiens
  CDR3 for beta chain variable domain of TCR clone 251223 (TRBV4-1, TRBJ1-5)
CASSQGPTNQRQHF

SEQ ID NO: 502447 - protein, 14 aa, Homo sapiens
  CDR3 for alpha chain variable domain of TCR clone 251224 (TRAV35, TRAJ13)
CAGSPSGGYQKVTF

SEQ ID NO: 502448 - protein, 14 aa, Homo sapiens
  CDR3 for beta chain variable domain of TCR clone 251224 (TRBV4-1, TRBJ2-2)
CASSQAVDTGELFF

SEQ ID NO: 502449 - protein, 14 aa, Homo sapiens
  CDR3 for alpha chain variable domain of TCR clone 251225 (TRAV13-1, TRAJ26)
CAASSAPYGQNFVF

SEQ ID NO: 502450 - protein, 17 aa, Homo sapiens
  CDR3 for beta chain variable domain of TCR clone 251225 (TRBV25-1, TRBJ2-5)
CAGSRRGGRGGQETQYF

SEQ ID NO: 502451 - protein, 15 aa, Homo sapiens
  CDR3 for alpha chain variable domain of TCR clone 251226 (TRAV34, TRAJ38)
CGADFTPGNNRKLIW

SEQ ID NO: 502452 - protein, 14 aa, Homo sapiens
  CDR3 for beta chain variable domain of TCR clone 251226 (TRBV7-2, TRBJ1-3)
CASSRLRSGNTIYF

SEQ ID NO: 502453 - protein, 16 aa, Homo sapiens
  CDR3 for alpha chain variable domain of TCR clone 251227 (TRAV30, TRAJ24)
CGTGIVDADSWGKFQF

SEQ ID NO: 502454 - protein, 14 aa, Homo sapiens
  CDR3 for beta chain variable domain of TCR clone 251227 (TRBV12-5, TRBJ2-5)
CASDSRTHQETQYF

SEQ ID NO: 502455 - protein, 12 aa, Homo sapiens
  CDR3 for alpha chain variable domain of TCR clone 251228 (TRAV12-1, TRAJ31)
CVSWNNNARLMF

SEQ ID NO: 502456 - protein, 13 aa, Homo sapiens
  CDR3 for beta chain variable domain of TCR clone 251228 (TRBV10-1, TRBJ1-1)
CASQGQTNTEAFF

SEQ ID NO: 502457 - protein, 12 aa, Homo sapiens
  CDR3 for alpha chain variable domain of TCR clone 251229 (TRAV1-1, TRAJ30)
CAVRGRDDKIIF

SEQ ID NO: 502458 - protein, 16 aa, Homo sapiens
  CDR3 for beta chain variable domain of TCR clone 251229 (TRBV27, TRBJ2-2)
CASSFRGLVRTGELFF

SEQ ID NO: 502459 - protein, 15 aa, Homo sapiens
  CDR3 for alpha chain variable domain of TCR clone 251230 (TRAV12-3, TRAJ6)
CEMSATTGGSYIPTF

SEQ ID NO: 502460 - protein, 15 aa, Homo sapiens
  CDR3 for beta chain variable domain of TCR clone 251230 (TRBV28, TRBJ2-5)
CASSPPWSYQETQYF

SEQ ID NO: 502461 - protein, 14 aa, Homo sapiens
  CDR3 for alpha chain variable domain of TCR clone 251231 (TRAV1-2, TRAJ16)
CAVNRFSDGQKLLF

SEQ ID NO: 502462 - protein, 16 aa, Homo sapiens
  CDR3 for beta chain variable domain of TCR clone 251231 (TRBV4-2, TRBJ2-7)
CASSQEGLANSYEQYF

SEQ ID NO: 502463 - protein, 14 aa, Homo sapiens
  CDR3 for alpha chain variable domain of TCR clone 251232 (TRAV1-2, TRAJ15)
CAVRDRQAGTALIF

SEQ ID NO: 502464 - protein, 15 aa, Homo sapiens
  CDR3 for beta chain variable domain of TCR clone 251232 (TRBV7-2, TRBJ2-1)
CASSLASGGVNEQFF

SEQ ID NO: 502465 - protein, 15 aa, Homo sapiens
  CDR3 for alpha chain variable domain of TCR clone 251233 (TRAV8-4, TRAJ29)
CVVSEDFRGNTPLVF

SEQ ID NO: 502466 - protein, 18 aa, Homo sapiens
  CDR3 for beta chain variable domain of TCR clone 251233 (TRBV20-1, TRBJ2-6)
CSARTLAGGPSGANVLTF

SEQ ID NO: 502467 - protein, 17 aa, Homo sapiens
  CDR3 for alpha chain variable domain of TCR clone 251234 (TRAV25, TRAJ45)
CAGPFWRSGGGADGLTF

SEQ ID NO: 502468 - protein, 14 aa, Homo sapiens
  CDR3 for beta chain variable domain of TCR clone 251234 (TRBV19, TRBJ2-3)
CASSVGRGSDTQYF

SEQ ID NO: 502469 - protein, 11 aa, Homo sapiens
  CDR3 for alpha chain variable domain of TCR clone 251235 (TRAV3, TRAJ21)
CAVGNVNKFYF

SEQ ID NO: 502470 - protein, 16 aa, Homo sapiens
  CDR3 for beta chain variable domain of TCR clone 251235 (TRBV19, TRBJ2-1)
CDSSKAGPSSYNEQFF

SEQ ID NO: 502471 - protein, 10 aa, Homo sapiens
  CDR3 for alpha chain variable domain of TCR clone 251236 (TRAV1-2, TRAJ31)
CVSEDARLMI

SEQ ID NO: 502472 - protein, 14 aa, Homo sapiens
  CDR3 for beta chain variable domain of TCR clone 251236 (TRBV19, TRBJ2-1)
CASPTFVLGGEQFF

SEQ ID NO: 502473 - protein, 15 aa, Homo sapiens
  CDR3 for alpha chain variable domain of TCR clone 251237 (TRAV17, TRAJ57)
CATGPSKGGSEKLAV

SEQ ID NO: 502474 - protein, 16 aa, Homo sapiens
  CDR3 for beta chain variable domain of TCR clone 251237 (TRBV12-4, TRBJ1-5)
CASSRPVGGSNQPQHF

SEQ ID NO: 502475 - protein, 16 aa, Homo sapiens
  CDR3 for alpha chain variable domain of TCR clone 251238 (TRAV13-1, TRAJ17)
CAASKGVEAAGNKLTF

SEQ ID NO: 502476 - protein, 15 aa, Homo sapiens
  CDR3 for beta chain variable domain of TCR clone 251238 (TRBV20-1, TRBJ1-5)
CSAREGGYSNQPQHF

SEQ ID NO: 502477 - protein, 17 aa, Homo sapiens
  CDR3 for alpha chain variable domain of TCR clone 251239 (TRAV3, TRAJ6)
CAARDGPRAGGSYIPTF

SEQ ID NO: 502478 - protein, 20 aa, Homo sapiens
  CDR3 for beta chain variable domain of TCR clone 251239 (TRBV28, TRBJ2-1)
WASTPIGRSPGLAGGNEQFF

SEQ ID NO: 502479 - protein, 16 aa, Homo sapiens
  CDR3 for alpha chain variable domain of TCR clone 251240 (TRAV26-1, TRAJ13)
CIVSPKDSGGYQKVTF

SEQ ID NO: 502480 - protein, 11 aa, Homo sapiens
  CDR3 for beta chain variable domain of TCR clone 251240 (TRBV12-4, TRBJ2-3)
CASTATDTQYF

SEQ ID NO: 502481 - protein, 15 aa, Homo sapiens
  CDR3 for alpha chain variable domain of TCR clone 251241 (TRAV12-2, TRAJ53)
CAVNGGGGSNYKLTF

SEQ ID NO: 502482 - protein, 14 aa, Homo sapiens
  CDR3 for beta chain variable domain of TCR clone 251241 (TRBV11-2, TRBJ2-7)
CASSLVPGGDEQYF

SEQ ID NO: 502483 - protein, 13 aa, Homo sapiens
  CDR3 for alpha chain variable domain of TCR clone 251242 (TRAV29/DV5, TRAJ31)
CAASRNNNARLMF

SEQ ID NO: 502484 - protein, 16 aa, Homo sapiens
  CDR3 for beta chain variable domain of TCR clone 251242 (TRBV20-1, TRBJ1-4)
CSAPGQGLLTNEKLFF

SEQ ID NO: 502485 - protein, 12 aa, Homo sapiens
  CDR3 for alpha chain variable domain of TCR clone 251243 (TRAV17, TRAJ43)
CATDAFPADMRF

SEQ ID NO: 502486 - protein, 13 aa, Homo sapiens
  CDR3 for beta chain variable domain of TCR clone 251243 (TRBV6-4, TRBJ1-5)
CASSADLNQPQHF

SEQ ID NO: 502487 - protein, 18 aa, Homo sapiens
  CDR3 for alpha chain variable domain of TCR clone 251244 (TRAV26-2, TRAJ54)
CILRDVEVGIQGAQKLGF

SEQ ID NO: 502488 - protein, 17 aa, Homo sapiens
  CDR3 for beta chain variable domain of TCR clone 251244 (TRBV20-1, TRBJ1-5)
CSASFSPGQGGNQPQHF

SEQ ID NO: 502489 - protein, 17 aa, Homo sapiens
  CDR3 for alpha chain variable domain of TCR clone 251245 (TRAV13-1, TRAJ31)
CAPRDRLMFGDGTQLVV

SEQ ID NO: 502490 - protein, 20 aa, Homo sapiens
  CDR3 for beta chain variable domain of TCR clone 251245 (TRBV19, TRBJ2-1)
CASSISRTVTSTRLNNEQFF

SEQ ID NO: 502491 - protein, 14 aa, Homo sapiens
  CDR3 for alpha chain variable domain of TCR clone 251246 (TRAV24, TRAJ42)
YAQNYGGSQGNLIF

SEQ ID NO: 502492 - protein, 15 aa, Homo sapiens
  CDR3 for beta chain variable domain of TCR clone 251246 (TRBV19, TRBJ1-5)
CASSIPGGAGQPQHF

SEQ ID NO: 502493 - protein, 16 aa, Homo sapiens
  CDR3 for alpha chain variable domain of TCR clone 251247 (TRAV20, TRAJ10)
CAVLRGLTGGGNKLTF

SEQ ID NO: 502494 - protein, 12 aa, Homo sapiens
  CDR3 for beta chain variable domain of TCR clone 251247 (TRBV28, TRBJ2-7)
CASSRSGYEQYF

SEQ ID NO: 502495 - protein, 15 aa, Homo sapiens
  CDR3 for alpha chain variable domain of TCR clone 251248 (TRAV2, TRAJ15)
CAVEERGQAGTALIF

SEQ ID NO: 502496 - protein, 15 aa, Homo sapiens
  CDR3 for beta chain variable domain of TCR clone 251248 (TRBV9, TRBJ1-6)
CASSVAGTGDSPLHF

SEQ ID NO: 502497 - protein, 14 aa, Homo sapiens
  CDR3 for alpha chain variable domain of TCR clone 251249 (TRAV17, TRAJ9)
CATPTRAGGFKTIF

SEQ ID NO: 502498 - protein, 18 aa, Homo sapiens
  CDR3 for beta chain variable domain of TCR clone 251249 (TRBV11-2, TRBJ2-3)
CASSLGGASRGAPNTQYF

SEQ ID NO: 502499 - protein, 19 aa, Homo sapiens
  CDR3 for alpha chain variable domain of TCR clone 251250 (TRAV26-1, TRAJ52)
CIVRAHRNAGGTSDGKLTF

SEQ ID NO: 502500 - protein, 13 aa, Homo sapiens
  CDR3 for beta chain variable domain of TCR clone 251250 (TRBV27, TRBJ1-1)
CASSLSIGAEAFF

SEQ ID NO: 502501 - protein, 13 aa, Homo sapiens
  CDR3 for alpha chain variable domain of TCR clone 251251 (TRAV12-3, TRAJ9)
CAMRNTGGFKTIF

SEQ ID NO: 502502 - protein, 15 aa, Homo sapiens
  CDR3 for beta chain variable domain of TCR clone 251251 (TRBV20-1, TRBJ2-7)
CSARDRFSGMDEQYF

SEQ ID NO: 502503 - protein, 14 aa, Homo sapiens
  CDR3 for alpha chain variable domain of TCR clone 251252 (TRAV2, TRAJ23)
RAVIIYNQGGKLTF

SEQ ID NO: 502504 - protein, 13 aa, Homo sapiens
  CDR3 for beta chain variable domain of TCR clone 251252 (TRBV20-1, TRBJ2-3)
CSATSGGAGTQYF

SEQ ID NO: 502505 - protein, 16 aa, Homo sapiens
  CDR3 for alpha chain variable domain of TCR clone 251253 (TRAV38-1, TRAJ42)
CAFRLVRGGSQGNLIF

SEQ ID NO: 502506 - protein, 15 aa, Homo sapiens
  CDR3 for beta chain variable domain of TCR clone 251253 (TRBV9, TRBJ1-6)
CASSVAGTGDSPLHF

SEQ ID NO: 502507 - protein, 15 aa, Homo sapiens
  CDR3 for alpha chain variable domain of TCR clone 251254 (TRAV3, TRAJ20)
CAVRDIKLSDYQLSF

SEQ ID NO: 502508 - protein, 15 aa, Homo sapiens
  CDR3 for beta chain variable domain of TCR clone 251254 (TRBV7-9, TRBJ1-6)
CASSSPGRGNSPLHF

SEQ ID NO: 502509 - protein, 13 aa, Homo sapiens
  CDR3 for alpha chain variable domain of TCR clone 251255 (TRAV21, TRAJ45)
AVSSGGGADGLTF

SEQ ID NO: 502510 - protein, 15 aa, Homo sapiens
  CDR3 for beta chain variable domain of TCR clone 251255 (TRBV6-1, TRBJ2-4)
CASSEAVWTINIQYF

SEQ ID NO: 502511 - protein, 13 aa, Homo sapiens
  CDR3 for alpha chain variable domain of TCR clone 251256 (TRAV13-1, TRAJ39)
CSKYSNAGKMLTF

SEQ ID NO: 502512 - protein, 14 aa, Homo sapiens
  CDR3 for beta chain variable domain of TCR clone 251256 (TRBV25-1, TRBJ1-1)
CASTHLGGNTEAFF

SEQ ID NO: 502513 - protein, 13 aa, Homo sapiens
  CDR3 for alpha chain variable domain of TCR clone 251257 (TRAV13-1, TRAJ37)
CAARSGNTGKLIF

SEQ ID NO: 502514 - protein, 14 aa, Homo sapiens
  CDR3 for beta chain variable domain of TCR clone 251257 (TRBV12-4, TRBJ2-3)
CTSSLGQGTDTQYF

SEQ ID NO: 502515 - protein, 12 aa, Homo sapiens
  CDR3 for alpha chain variable domain of TCR clone 251258 (TRAV13-1, TRAJ49)
CAASPMGNQFYF

SEQ ID NO: 502516 - protein, 13 aa, Homo sapiens
  CDR3 for beta chain variable domain of TCR clone 251258 (TRBV20-1, TRBJ2-2)
YSASAAGTGELFF

SEQ ID NO: 502517 - protein, 13 aa, Homo sapiens
  CDR3 for alpha chain variable domain of TCR clone 251259 (TRAV12-1, TRAJ16)
CVVNGPDGQKLLF

SEQ ID NO: 502518 - protein, 15 aa, Homo sapiens
  CDR3 for beta chain variable domain of TCR clone 251259 (TRBV6-3, TRBJ2-7)
CASSSPGTAFYEQYF

SEQ ID NO: 502519 - protein, 13 aa, Homo sapiens
  CDR3 for alpha chain variable domain of TCR clone 251260 (TRAV12-1, TRAJ39)
CVVNDNAGNMLTL

SEQ ID NO: 502520 - protein, 14 aa, Homo sapiens
  CDR3 for beta chain variable domain of TCR clone 251260 (TRBV27, TRBJ2-3)
CASSPLGTTDTQYF

SEQ ID NO: 502521 - protein, 14 aa, Homo sapiens
  CDR3 for alpha chain variable domain of TCR clone 251261 (TRAV8-1, TRAJ39)
CAVNASNAGNMLTF

SEQ ID NO: 502522 - protein, 16 aa, Homo sapiens
  CDR3 for beta chain variable domain of TCR clone 251261 (TRBV24-1, TRBJ2-3)
CATSDPGTGATDTQYF

SEQ ID NO: 502523 - protein, 15 aa, Homo sapiens
  CDR3 for alpha chain variable domain of TCR clone 251262 (TRAV25, TRAJ52)
CAGTSGGTSYGKLTF

SEQ ID NO: 502524 - protein, 16 aa, Homo sapiens
  CDR3 for beta chain variable domain of TCR clone 251262 (TRBV15, TRBJ1-2)
CATSRGPRRGGGGYTF

SEQ ID NO: 502525 - protein, 12 aa, Homo sapiens
  CDR3 for alpha chain variable domain of TCR clone 251263 (TRAV21, TRAJ29)
CAVTSGNTPLVF

SEQ ID NO: 502526 - protein, 14 aa, Homo sapiens
  CDR3 for beta chain variable domain of TCR clone 251263 (TRBV12-4, TRBJ1-4)
CASRMTGRSEKLFF

SEQ ID NO: 502527 - protein, 22 aa, Homo sapiens
  CDR3 for alpha chain variable domain of TCR clone 251264 (TRAV3, TRAJ38)
CAVRDCLNAGNNHIQNPDPAVY

SEQ ID NO: 502528 - protein, 13 aa, Homo sapiens
  CDR3 for beta chain variable domain of TCR clone 251264 (TRBV12-4, TRBJ1-2)
CASSVRQGKGYTF

SEQ ID NO: 502529 - protein, 14 aa, Homo sapiens
  CDR3 for alpha chain variable domain of TCR clone 251265 (TRAV17, TRAJ16)
CATADFSDGQKLLF

SEQ ID NO: 502530 - protein, 14 aa, Homo sapiens
  CDR3 for beta chain variable domain of TCR clone 251265 (TRBV5-1, TRBJ2-3)
CASSPNVGTDTQYF

SEQ ID NO: 502531 - protein, 15 aa, Homo sapiens
  CDR3 for alpha chain variable domain of TCR clone 251266 (TRAV27, TRAJ53)
CRAINSGGSNYKLTF

SEQ ID NO: 502532 - protein, 17 aa, Homo sapiens
  CDR3 for beta chain variable domain of TCR clone 251266 (TRBV13, TRBJ2-3)
CASSLSRVAGGRNTQYF

SEQ ID NO: 502533 - protein, 14 aa, Homo sapiens
  CDR3 for alpha chain variable domain of TCR clone 251267 (TRAV17, TRAJ45)
CATASGGGADGLTF

SEQ ID NO: 502534 - protein, 15 aa, Homo sapiens
  CDR3 for beta chain variable domain of TCR clone 251267 (TRBV11-2, TRBJ2-1)
CASSHNRGLMYEQFF

SEQ ID NO: 502535 - protein, 15 aa, Homo sapiens
  CDR3 for alpha chain variable domain of TCR clone 251268 (TRAV25, TRAJ10)
CAGPLLTGGGNKLTF

SEQ ID NO: 502536 - protein, 10 aa, Homo sapiens
  CDR3 for beta chain variable domain of TCR clone 251268 (TRBV2, TRBJ2-1)
CASSGVEQFF

SEQ ID NO: 502537 - protein, 18 aa, Homo sapiens
  CDR3 for alpha chain variable domain of TCR clone 251269 (TRAV26-1, TRAJ52)
CIVRVEGAGGTSYGKLTF

SEQ ID NO: 502538 - protein, 14 aa, Homo sapiens
  CDR3 for beta chain variable domain of TCR clone 251269 (TRBV7-2, TRBJ1-2)
CASSQTGSTYGYTF

SEQ ID NO: 502539 - protein, 12 aa, Homo sapiens
  CDR3 for alpha chain variable domain of TCR clone 251270 (TRAV13-1, TRAJ21)
CAAKEGFNKFYF

SEQ ID NO: 502540 - protein, 13 aa, Homo sapiens
  CDR3 for beta chain variable domain of TCR clone 251270 (TRBV11-2, TRBJ2-5)
CASSFSSQETQYF

SEQ ID NO: 502541 - protein, 14 aa, Homo sapiens
  CDR3 for alpha chain variable domain of TCR clone 251271 (TRAV12-1, TRAJ11)
CVVRPNSGYSTLTF

SEQ ID NO: 502542 - protein, 15 aa, Homo sapiens
  CDR3 for beta chain variable domain of TCR clone 251271 (TRBV28, TRBJ2-5)
CASSSGRTIQETQYF

SEQ ID NO: 502543 - protein, 13 aa, Homo sapiens
  CDR3 for alpha chain variable domain of TCR clone 251272 (TRAV2, TRAJ20)
GAVEDPSEYKLSF

SEQ ID NO: 502544 - protein, 16 aa, Homo sapiens
  CDR3 for beta chain variable domain of TCR clone 251272 (TRBV25-1, TRBJ2-7)
CASSELTGGGIYEQYF

SEQ ID NO: 502545 - protein, 13 aa, Homo sapiens
  CDR3 for alpha chain variable domain of TCR clone 251273 (TRAV12-3, TRAJ33)
CAMSVNSNYQLIW

SEQ ID NO: 502546 - protein, 13 aa, Homo sapiens
  CDR3 for beta chain variable domain of TCR clone 251273 (TRBV7-2, TRBJ2-2)
CASSLEVTEELFF

SEQ ID NO: 502547 - protein, 15 aa, Homo sapiens
  CDR3 for alpha chain variable domain of TCR clone 251274 (TRAV3, TRAJ3)
CAVRDRDSSASKIIF

SEQ ID NO: 502548 - protein, 14 aa, Homo sapiens
  CDR3 for beta chain variable domain of TCR clone 251274 (TRBV5-4, TRBJ1-1)
CASSLDSRRDESFF

SEQ ID NO: 502549 - protein, 11 aa, Homo sapiens
  CDR3 for alpha chain variable domain of TCR clone 251275 (TRAV12-2, TRAJ39)
CAVSNMLTFGG

SEQ ID NO: 502550 - protein, 16 aa, Homo sapiens
  CDR3 for beta chain variable domain of TCR clone 251275 (TRBV9, TRBJ2-7)
CASSAGPDRSPYEQYF

SEQ ID NO: 502551 - protein, 20 aa, Homo sapiens
  CDR3 for alpha chain variable domain of TCR clone 251276 (TRAV12-1, TRAJ42)
SSVIQPPTSVKGGSQGNLFF

SEQ ID NO: 502552 - protein, 14 aa, Homo sapiens
  CDR3 for beta chain variable domain of TCR clone 251276 (TRBV25-1, TRBJ1-2)
CASSDTTGVVGYTF

SEQ ID NO: 502553 - protein, 12 aa, Homo sapiens
  CDR3 for alpha chain variable domain of TCR clone 251277 (TRAV21, TRAJ39)
CALNNAGNMLTF

SEQ ID NO: 502554 - protein, 14 aa, Homo sapiens
  CDR3 for beta chain variable domain of TCR clone 251277 (TRBV12-4, TRBJ2-3)
CASSLISGTDTQYF

SEQ ID NO: 502555 - protein, 11 aa, Homo sapiens
  CDR3 for alpha chain variable domain of TCR clone 251278 (TRAV13-1, TRAJ30)
CAESRDDKIIF

SEQ ID NO: 502556 - protein, 15 aa, Homo sapiens
  CDR3 for beta chain variable domain of TCR clone 251278 (TRBV18, TRBJ1-1)
CASSPSSWVNTEAFF

SEQ ID NO: 502557 - protein, 12 aa, Homo sapiens
  CDR3 for alpha chain variable domain of TCR clone 251279 (TRAV3, TRAJ31)
CAVRDGNAILMF

SEQ ID NO: 502558 - protein, 18 aa, Homo sapiens
  CDR3 for beta chain variable domain of TCR clone 251279 (TRBV7-2, TRBJ2-3)
CASSLTREGGGITDTQYF

SEQ ID NO: 502559 - protein, 12 aa, Homo sapiens
  CDR3 for alpha chain variable domain of TCR clone 251280 (TRAV12-2, TRAJ47)
CAVAEYGNKLVF

SEQ ID NO: 502560 - protein, 16 aa, Homo sapiens
  CDR3 for beta chain variable domain of TCR clone 251280 (TRBV10-3, TRBJ2-1)
CAISGVGDGGGGEQFF

SEQ ID NO: 502561 - protein, 15 aa, Homo sapiens
  CDR3 for alpha chain variable domain of TCR clone 251281 (TRAV8-6, TRAJ10)
CAVSDQAGGGNKLTF

SEQ ID NO: 502562 - protein, 13 aa, Homo sapiens
  CDR3 for beta chain variable domain of TCR clone 251281 (TRBV9, TRBJ2-1)
CASSVGQGGEQFF

SEQ ID NO: 502563 - protein, 11 aa, Homo sapiens
  CDR3 for alpha chain variable domain of TCR clone 251282 (TRAV2, TRAJ33)
CAVDSNYQLIW

SEQ ID NO: 502564 - protein, 15 aa, Homo sapiens
  CDR3 for beta chain variable domain of TCR clone 251282 (TRBV7-2, TRBJ2-3)
CASSSTGLETDTQYF

SEQ ID NO: 502565 - protein, 20 aa, Homo sapiens
  CDR3 for alpha chain variable domain of TCR clone 251283 (TRAV21, TRAJ22)
SLVTQPPTLKSSGSATQLTF

SEQ ID NO: 502566 - protein, 16 aa, Homo sapiens
  CDR3 for beta chain variable domain of TCR clone 251283 (TRBV7-3, TRBJ2-2)
CASSLKRGTLSGELFF

SEQ ID NO: 502567 - protein, 12 aa, Homo sapiens
  CDR3 for alpha chain variable domain of TCR clone 251284 (TRAV12-3, TRAJ5)
CAMDTGRRALTF

SEQ ID NO: 502568 - protein, 15 aa, Homo sapiens
  CDR3 for beta chain variable domain of TCR clone 251284 (TRBV5-1, TRBJ2-3)
CASSVTSGSTDTQYF

SEQ ID NO: 502569 - protein, 11 aa, Homo sapiens
  CDR3 for alpha chain variable domain of TCR clone 251285 (TRAV29/DV5, TRAJ49)
CAAVPGNQYYF

SEQ ID NO: 502570 - protein, 17 aa, Homo sapiens
  CDR3 for beta chain variable domain of TCR clone 251285 (TRBV4-2, TRBJ1-1)
CASTQFGGGSGNTEAFF

SEQ ID NO: 502571 - protein, 17 aa, Homo sapiens
  CDR3 for alpha chain variable domain of TCR clone 251286 (TRAV8-6, TRAJ58)
CAVSSWVGETSGSRLTF

SEQ ID NO: 502572 - protein, 15 aa, Homo sapiens
  CDR3 for beta chain variable domain of TCR clone 251286 (TRBV12-4, TRBJ2-5)
CASSPPTGLQETQYF

SEQ ID NO: 502573 - protein, 17 aa, Homo sapiens
  CDR3 for alpha chain variable domain of TCR clone 251287 (TRAV3, TRAJ6)
CAVRDGPRAGGTYIPTF

SEQ ID NO: 502574 - protein, 14 aa, Homo sapiens
  CDR3 for beta chain variable domain of TCR clone 251287 (TRBV7-2, TRBJ2-7)
CASRPKTSFYEQYF

SEQ ID NO: 502575 - protein, 13 aa, Homo sapiens
  CDR3 for alpha chain variable domain of TCR clone 251288 (TRAV1-2, TRAJ12)
CAVPMDSSYKLIF

SEQ ID NO: 502576 - protein, 15 aa, Homo sapiens
  CDR3 for beta chain variable domain of TCR clone 251288 (TRBV27, TRBJ2-5)
CASSLMPSGGETQYF

SEQ ID NO: 502577 - protein, 23 aa, Homo sapiens
  CDR3 for alpha chain variable domain of TCR clone 251289 (TRAV8-4, TRAJ38)
CAVRNAGNNHIQNPDPAVYQLRD

SEQ ID NO: 502578 - protein, 16 aa, Homo sapiens
  CDR3 for beta chain variable domain of TCR clone 251289 (TRBV13, TRBJ2-2)
CASSPRTGEHTGELFF

SEQ ID NO: 502579 - protein, 14 aa, Homo sapiens
  CDR3 for alpha chain variable domain of TCR clone 251290 (TRAV23/DV6, TRAJ22)
CAASVSGSARQLTF

SEQ ID NO: 502580 - protein, 13 aa, Homo sapiens
  CDR3 for beta chain variable domain of TCR clone 251290 (TRBV2, TRBJ1-1)
CASSVLMNTEAFF

SEQ ID NO: 502581 - protein, 15 aa, Homo sapiens
  CDR3 for alpha chain variable domain of TCR clone 251291 (TRAV12-1, TRAJ45)
CVVLSGGGGADGLTL

SEQ ID NO: 502582 - protein, 14 aa, Homo sapiens
  CDR3 for beta chain variable domain of TCR clone 251291 (TRBV11-2, TRBJ2-5)
CASSRTGGIETQYF

SEQ ID NO: 502583 - protein, 15 aa, Homo sapiens
  CDR3 for alpha chain variable domain of TCR clone 251292 (TRAV2, TRAJ15)
CAVEDRGQAGTALIF

SEQ ID NO: 502584 - protein, 14 aa, Homo sapiens
  CDR3 for beta chain variable domain of TCR clone 251292 (TRBV11-1, TRBJ1-1)
CASSLEHPNTEAFF

SEQ ID NO: 502585 - protein, 14 aa, Homo sapiens
  CDR3 for alpha chain variable domain of TCR clone 251293 (TRAV20, TRAJ42)
CAVQAGGSQGNLIF

SEQ ID NO: 502586 - protein, 13 aa, Homo sapiens
  CDR3 for beta chain variable domain of TCR clone 251293 (TRBV12-5, TRBJ2-3)
CASGDRQSDTQYF

SEQ ID NO: 502587 - protein, 16 aa, Homo sapiens
  CDR3 for alpha chain variable domain of TCR clone 251294 (TRAV12-3, TRAJ53)
CAISPGSGGSNYKLTF

SEQ ID NO: 502588 - protein, 16 aa, Homo sapiens
  CDR3 for beta chain variable domain of TCR clone 251294 (TRBV4-2, TRBJ1-1)
CASSQAGFGMNTEAFF

SEQ ID NO: 502589 - protein, 13 aa, Homo sapiens
  CDR3 for alpha chain variable domain of TCR clone 251295 (TRAV27, TRAJ6)
CAGGTRGNYIPTF

SEQ ID NO: 502590 - protein, 12 aa, Homo sapiens
  CDR3 for beta chain variable domain of TCR clone 251295 (TRBV12-4, TRBJ2-3)
CASSTLPDTQYF

SEQ ID NO: 502591 - protein, 12 aa, Homo sapiens
  CDR3 for alpha chain variable domain of TCR clone 251296 (TRAV2, TRAJ10)
WASTGGGNKLTF

SEQ ID NO: 502592 - protein, 14 aa, Homo sapiens
  CDR3 for beta chain variable domain of TCR clone 251296 (TRBV7-2, TRBJ2-2)
CASRGQGAAGELFV

SEQ ID NO: 502593 - protein, 14 aa, Homo sapiens
  CDR3 for alpha chain variable domain of TCR clone 251297 (TRAV13-1, TRAJ44)
CAAKAIGTASKLTF

SEQ ID NO: 502594 - protein, 14 aa, Homo sapiens
  CDR3 for beta chain variable domain of TCR clone 251297 (TRBV19, TRBJ2-2)
CASSTLHRSGELFF

SEQ ID NO: 502595 - protein, 17 aa, Homo sapiens
  CDR3 for alpha chain variable domain of TCR clone 251298 (TRAV17, TRAJ28)
CATDPRRGGAGRYPLTF

SEQ ID NO: 502596 - protein, 16 aa, Homo sapiens
  CDR3 for beta chain variable domain of TCR clone 251298 (TRBV25-1, TRBJ1-1)
CASSGDRDRGRIEAFF

SEQ ID NO: 502597 - protein, 17 aa, Homo sapiens
  CDR3 for alpha chain variable domain of TCR clone 251299 (TRAV12-2, TRAJ52)
CAVNPYAGGTSYGKLTF

SEQ ID NO: 502598 - protein, 16 aa, Homo sapiens
  CDR3 for beta chain variable domain of TCR clone 251299 (TRBV5-5, TRBJ2-2)
CASSGRREGVTGELFF

SEQ ID NO: 502599 - protein, 14 aa, Homo sapiens
  CDR3 for alpha chain variable domain of TCR clone 251300 (TRAV1-2, TRAJ15)
CAVRDRQAGTALIF

SEQ ID NO: 502600 - protein, 13 aa, Homo sapiens
  CDR3 for beta chain variable domain of TCR clone 251300 (TRBV7-3, TRBJ2-1)
CASSLDSYNEQFF

SEQ ID NO: 502601 - protein, 14 aa, Homo sapiens
  CDR3 for alpha chain variable domain of TCR clone 251301 (TRAV12-2, TRAJ24)
CAVTPADSWGKLQF

SEQ ID NO: 502602 - protein, 15 aa, Homo sapiens
  CDR3 for beta chain variable domain of TCR clone 251301 (TRBV28, TRBJ2-7)
CASSPGGRGFYEQYF

SEQ ID NO: 502603 - protein, 12 aa, Homo sapiens
  CDR3 for alpha chain variable domain of TCR clone 251302 (TRAV3, TRAJ20)
CAVRDPDYKLSF

SEQ ID NO: 502604 - protein, 15 aa, Homo sapiens
  CDR3 for beta chain variable domain of TCR clone 251302 (TRBV3-1, TRBJ2-7)
CASSQAPSGSYEQYF

SEQ ID NO: 502605 - protein, 14 aa, Homo sapiens
  CDR3 for alpha chain variable domain of TCR clone 251303 (TRAV23/DV6, TRAJ58)
CAGMRETSGSRLTF

SEQ ID NO: 502606 - protein, 13 aa, Homo sapiens
  CDR3 for beta chain variable domain of TCR clone 251303 (TRBV28, TRBJ2-7)
CASRSSGVYEQNF

SEQ ID NO: 502607 - protein, 13 aa, Homo sapiens
  CDR3 for alpha chain variable domain of TCR clone 251304 (TRAV27, TRAJ8)
CAGGPTGFQKLVF

SEQ ID NO: 502608 - protein, 14 aa, Homo sapiens
  CDR3 for beta chain variable domain of TCR clone 251304 (TRBV4-2, TRBJ2-1)
CASGLDRAYNEHFF

SEQ ID NO: 502609 - protein, 15 aa, Homo sapiens
  CDR3 for alpha chain variable domain of TCR clone 251305 (TRAV8-3, TRAJ37)
CAVGAPSSNPSKLIF

SEQ ID NO: 502610 - protein, 15 aa, Homo sapiens
  CDR3 for beta chain variable domain of TCR clone 251305 (TRBV11-2, TRBJ1-2)
CASSQMRGLNYGYTF

SEQ ID NO: 502611 - protein, 20 aa, Homo sapiens
  CDR3 for alpha chain variable domain of TCR clone 251306 (TRAV25, TRAJ21)
TATQTTDVGTYPLSFKKFYF

SEQ ID NO: 502612 - protein, 14 aa, Homo sapiens
  CDR3 for beta chain variable domain of TCR clone 251306 (TRBV20-1, TRBJ2-7)
CSAPELAGVGEQYF

SEQ ID NO: 502613 - protein, 12 aa, Homo sapiens
  CDR3 for alpha chain variable domain of TCR clone 251307 (TRAV35, TRAJ43)
CAGAYNNNDMRF

SEQ ID NO: 502614 - protein, 14 aa, Homo sapiens
  CDR3 for beta chain variable domain of TCR clone 251307 (TRBV4-1, TRBJ2-5)
CASSQDLALETQYF

SEQ ID NO: 502615 - protein, 14 aa, Homo sapiens
  CDR3 for alpha chain variable domain of TCR clone 251308 (TRAV12-2, TRAJ33)
CAVKRARGNYQLIW

SEQ ID NO: 502616 - protein, 12 aa, Homo sapiens
  CDR3 for beta chain variable domain of TCR clone 251308 (TRBV24-1, TRBJ2-3)
CATSDSTDTQYF

SEQ ID NO: 502617 - protein, 15 aa, Homo sapiens
  CDR3 for alpha chain variable domain of TCR clone 251309 (TRAV14/DV4, TRAJ12)
CAMREGCDSSYKLIF

SEQ ID NO: 502618 - protein, 16 aa, Homo sapiens
  CDR3 for beta chain variable domain of TCR clone 251309 (TRBV2, TRBJ2-5)
CASGETQGVGEETQYF

SEQ ID NO: 502619 - protein, 14 aa, Homo sapiens
  CDR3 for alpha chain variable domain of TCR clone 251310 (TRAV9-2, TRAJ39)
CAPYIYNAGNMPTF

SEQ ID NO: 502620 - protein, 17 aa, Homo sapiens
  CDR3 for beta chain variable domain of TCR clone 251310 (TRBV9, TRBJ2-3)
CASRSTAGGPSTDTQYF

SEQ ID NO: 502621 - protein, 15 aa, Homo sapiens
  CDR3 for alpha chain variable domain of TCR clone 251311 (TRAV2, TRAJ8)
CAVEDLNTGFQKLVF

SEQ ID NO: 502622 - protein, 12 aa, Homo sapiens
  CDR3 for beta chain variable domain of TCR clone 251311 (TRBV29-1, TRBJ2-3)
CSVTGGADTQYF

SEQ ID NO: 502623 - protein, 13 aa, Homo sapiens
  CDR3 for alpha chain variable domain of TCR clone 251312 (TRAV12-2, TRAJ52)
CAVSGTSYGKLTF

SEQ ID NO: 502624 - protein, 16 aa, Homo sapiens
  CDR3 for beta chain variable domain of TCR clone 251312 (TRBV24-1, TRBJ2-3)
CATSDPGTGATDTQYF

SEQ ID NO: 502625 - protein, 15 aa, Homo sapiens
  CDR3 for alpha chain variable domain of TCR clone 251313 (TRAV23/DV6, TRAJ18)
CAARYRGSTLGRLYF

SEQ ID NO: 502626 - protein, 13 aa, Homo sapiens
  CDR3 for beta chain variable domain of TCR clone 251313 (TRBV5-7, TRBJ2-6)
CASTSSGANVLTF

SEQ ID NO: 502627 - protein, 14 aa, Homo sapiens
  CDR3 for alpha chain variable domain of TCR clone 251314 (TRAV8-1, TRAJ23)
CAVGTYNQGGKLIF

SEQ ID NO: 502628 - protein, 17 aa, Homo sapiens
  CDR3 for beta chain variable domain of TCR clone 251314 (TRBV13, TRBJ2-3)
CASSLSRVAGGRNTQYF

SEQ ID NO: 502629 - protein, 18 aa, Homo sapiens
  CDR3 for alpha chain variable domain of TCR clone 251315 (TRAV1-2, TRAJ36)
CAVRDRRMGQTVANNLFF

SEQ ID NO: 502630 - protein, 15 aa, Homo sapiens
  CDR3 for beta chain variable domain of TCR clone 251315 (TRBV28, TRBJ2-1)
CASSIIAGGRSEQFF

SEQ ID NO: 502631 - protein, 17 aa, Homo sapiens
  CDR3 for alpha chain variable domain of TCR clone 251316 (TRAV3, TRAJ38)
CAVRDCLNAGNNRKLIW

SEQ ID NO: 502632 - protein, 19 aa, Homo sapiens
  CDR3 for beta chain variable domain of TCR clone 251316 (TRBV7-2, TRBJ2-3)
CASSFLSRNWGGGTDTQYF

SEQ ID NO: 502633 - protein, 10 aa, Homo sapiens
  CDR3 for alpha chain variable domain of TCR clone 251317 (TRAV12-2, TRAJ20)
CAVHLYKLSF

SEQ ID NO: 502634 - protein, 14 aa, Homo sapiens
  CDR3 for beta chain variable domain of TCR clone 251317 (TRBV10-3, TRBJ2-2)
CAISEVSHSGELFF

SEQ ID NO: 502635 - protein, 13 aa, Homo sapiens
  CDR3 for alpha chain variable domain of TCR clone 251318 (TRAV36/DV7, TRAJ37)
CAVFSSNTGKLIF

SEQ ID NO: 502636 - protein, 11 aa, Homo sapiens
  CDR3 for beta chain variable domain of TCR clone 251318 (TRBV19, TRBJ2-7)
CASGNSYEQYF

SEQ ID NO: 502637 - protein, 14 aa, Homo sapiens
  CDR3 for alpha chain variable domain of TCR clone 251319 (TRAV4, TRAJ26)
CLVGPHNYGQNFVF

SEQ ID NO: 502638 - protein, 17 aa, Homo sapiens
  CDR3 for beta chain variable domain of TCR clone 251319 (TRBV24-1, TRBJ2-1)
CATSDVSTSGTSNEQFF

SEQ ID NO: 502639 - protein, 15 aa, Homo sapiens
  CDR3 for alpha chain variable domain of TCR clone 251320 (TRAV12-1, TRAJ9)
CVVSFGDTGGFQIIF

SEQ ID NO: 502640 - protein, 14 aa, Homo sapiens
  CDR3 for beta chain variable domain of TCR clone 251320 (TRBV19, TRBJ2-1)
CASPTFVLSGEQFF

SEQ ID NO: 502641 - protein, 15 aa, Homo sapiens
  CDR3 for alpha chain variable domain of TCR clone 251321 (TRAV3, TRAJ5)
CAVRDLDTGRRALTF

SEQ ID NO: 502642 - protein, 15 aa, Homo sapiens
  CDR3 for beta chain variable domain of TCR clone 251321 (TRBV13, TRBJ2-1)
CASSLLSGLNNEQFF

SEQ ID NO: 502643 - protein, 15 aa, Homo sapiens
  CDR3 for alpha chain variable domain of TCR clone 251322 (TRAV25, TRAJ52)
CAGRPGGTSYGKLTF

SEQ ID NO: 502644 - protein, 17 aa, Homo sapiens
  CDR3 for beta chain variable domain of TCR clone 251322 (TRBV7-8, TRBJ2-6)
CASIGGAGGAGANVLTF

SEQ ID NO: 502645 - protein, 14 aa, Homo sapiens
  CDR3 for alpha chain variable domain of TCR clone 251323 (TRAV38-1, TRAJ40)
CALRPTSGTYKYIF

SEQ ID NO: 502646 - protein, 14 aa, Homo sapiens
  CDR3 for beta chain variable domain of TCR clone 251323 (TRBV19, TRBJ2-1)
CASPTFVLGGEQFF

SEQ ID NO: 502647 - protein, 14 aa, Homo sapiens
  CDR3 for alpha chain variable domain of TCR clone 251324 (TRAV1-2, TRAJ8)
CAVREDTGYQKLVF

SEQ ID NO: 502648 - protein, 12 aa, Homo sapiens
  CDR3 for beta chain variable domain of TCR clone 251324 (TRBV11-2, TRBJ2-1)
CASSPGNNEQFF

SEQ ID NO: 502649 - protein, 15 aa, Homo sapiens
  CDR3 for alpha chain variable domain of TCR clone 251325 (TRAV26-1, TRAJ29)
CIVRVTNSGNTPLVF

SEQ ID NO: 502650 - protein, 12 aa, Homo sapiens
  CDR3 for beta chain variable domain of TCR clone 251325 (TRBV20-1, TRBJ1-2)
CSASWQGYDYTF

SEQ ID NO: 502651 - protein, 13 aa, Homo sapiens
  CDR3 for alpha chain variable domain of TCR clone 251326 (TRAV12-1, TRAJ6)
CVVFPGGSYIPTF

SEQ ID NO: 502652 - protein, 14 aa, Homo sapiens
  CDR3 for beta chain variable domain of TCR clone 251326 (TRBV20-1, TRBJ1-3)
CSGSPTGAGNTIYF

SEQ ID NO: 502653 - protein, 14 aa, Homo sapiens
  CDR3 for alpha chain variable domain of TCR clone 251327 (TRAV27, TRAJ23)
CAGLSYNQGGKLTF

SEQ ID NO: 502654 - protein, 11 aa, Homo sapiens
  CDR3 for beta chain variable domain of TCR clone 251327 (TRBV12-4, TRBJ2-3)
CASTATDTQYF

SEQ ID NO: 502655 - protein, 11 aa, Homo sapiens
  CDR3 for alpha chain variable domain of TCR clone 251328 (TRAV1-2, TRAJ40)
CAVPGTYKCIF

SEQ ID NO: 502656 - protein, 16 aa, Homo sapiens
  CDR3 for beta chain variable domain of TCR clone 251328 (TRBV7-3, TRBJ2-2)
CASSLKRGTLSGELFF

SEQ ID NO: 502657 - protein, 11 aa, Homo sapiens
  CDR3 for alpha chain variable domain of TCR clone 251329 (TRAV2, TRAJ13)
CASGGYQKVTF

SEQ ID NO: 502658 - protein, 14 aa, Homo sapiens
  CDR3 for beta chain variable domain of TCR clone 251329 (TRBV7-3, TRBJ2-1)
CASSLAGGTNEQFS

SEQ ID NO: 502659 - protein, 15 aa, Homo sapiens
  CDR3 for alpha chain variable domain of TCR clone 251330 (TRAV16, TRAJ12)
CSKWPLRDSSYKLIF

SEQ ID NO: 502660 - protein, 13 aa, Homo sapiens
  CDR3 for beta chain variable domain of TCR clone 251330 (TRBV4-2, TRBJ1-1)
CASSQAGTTEAFF

SEQ ID NO: 502661 - protein, 12 aa, Homo sapiens
  CDR3 for alpha chain variable domain of TCR clone 251331 (TRAV25, TRAJ11)
CAGASGYSTLTF

SEQ ID NO: 502662 - protein, 15 aa, Homo sapiens
  CDR3 for beta chain variable domain of TCR clone 251331 (TRBV2, TRBJ2-1)
CASSEEREGDNEQFF

SEQ ID NO: 502663 - protein, 15 aa, Homo sapiens
  CDR3 for alpha chain variable domain of TCR clone 251332 (TRAV3, TRAJ22)
CAVRDRGGSERQLTF

SEQ ID NO: 502664 - protein, 14 aa, Homo sapiens
  CDR3 for beta chain variable domain of TCR clone 251332 (TRBV19, TRBJ2-1)
CASSRLASINEQFF

SEQ ID NO: 502665 - protein, 14 aa, Homo sapiens
  CDR3 for alpha chain variable domain of TCR clone 251333 (TRAV21, TRAJ38)
CAVANAGNNRKLIW

SEQ ID NO: 502666 - protein, 14 aa, Homo sapiens
  CDR3 for beta chain variable domain of TCR clone 251333 (TRBV19, TRBJ2-1)
CASPTFVLSGEQFF

SEQ ID NO: 502667 - protein, 12 aa, Homo sapiens
  CDR3 for alpha chain variable domain of TCR clone 251334 (TRAV16, TRAJ56)
CAPTGANSKLTF

SEQ ID NO: 502668 - protein, 16 aa, Homo sapiens
  CDR3 for beta chain variable domain of TCR clone 251334 (TRBV7-9, TRBJ1-2)
CASSLGFASGEDGYTF

SEQ ID NO: 502669 - protein, 16 aa, Homo sapiens
  CDR3 for alpha chain variable domain of TCR clone 251335 (TRAV3, TRAJ37)
CAVRPHGSGNTGKLIV

SEQ ID NO: 502670 - protein, 14 aa, Homo sapiens
  CDR3 for beta chain variable domain of TCR clone 251335 (TRBV25-1, TRBJ1-1)
CASTHLGGNTEAFF

SEQ ID NO: 502671 - protein, 15 aa, Homo sapiens
  CDR3 for alpha chain variable domain of TCR clone 251336 (TRAV12-1, TRAJ6)
CVVNCPLRRKLHTYI

SEQ ID NO: 502672 - protein, 16 aa, Homo sapiens
  CDR3 for beta chain variable domain of TCR clone 251336 (TRBV6-6, TRBJ2-1)
CASSYSFSGSYNEQFF

SEQ ID NO: 502673 - protein, 15 aa, Homo sapiens
  CDR3 for alpha chain variable domain of TCR clone 251337 (TRAV8-3, TRAJ45)
CASSYSGGGADGLTF

SEQ ID NO: 502674 - protein, 13 aa, Homo sapiens
  CDR3 for beta chain variable domain of TCR clone 251337 (TRBV10-3, TRBJ2-7)
CASKLAVCYEQYF

SEQ ID NO: 502675 - protein, 13 aa, Homo sapiens
  CDR3 for alpha chain variable domain of TCR clone 251338 (TRAV12-3, TRAJ33)
RAMSVNSNYQLIW

SEQ ID NO: 502676 - protein, 11 aa, Homo sapiens
  CDR3 for beta chain variable domain of TCR clone 251338 (TRBV7-3, TRBJ2-5)
CASSLSETQYF

SEQ ID NO: 502677 - protein, 13 aa, Homo sapiens
  CDR3 for alpha chain variable domain of TCR clone 251339 (TRAV8-3, TRAJ48)
CAEVPFGNEKLTF

SEQ ID NO: 502678 - protein, 19 aa, Homo sapiens
  CDR3 for beta chain variable domain of TCR clone 251339 (TRBV25-1, TRBJ2-2)
CAILVYRVDRGRKTGELFF

SEQ ID NO: 502679 - protein, 14 aa, Homo sapiens
  CDR3 for alpha chain variable domain of TCR clone 251340 (TRAV26-1, TRAJ39)
CIVRGSRAVNMLTF

SEQ ID NO: 502680 - protein, 15 aa, Homo sapiens
  CDR3 for beta chain variable domain of TCR clone 251340 (TRBV28, TRBJ2-5)
CASSPGQGSIETQYF

SEQ ID NO: 502681 - protein, 14 aa, Homo sapiens
  CDR3 for alpha chain variable domain of TCR clone 251341 (TRAV2, TRAJ9)
CAVEDRSGGFKTIF

SEQ ID NO: 502682 - protein, 12 aa, Homo sapiens
  CDR3 for beta chain variable domain of TCR clone 251341 (TRBV11-2, TRBJ2-4)
CASSSASGSEYF

SEQ ID NO: 502683 - protein, 14 aa, Homo sapiens
  CDR3 for alpha chain variable domain of TCR clone 251342 (TRAV1-2, TRAJ16)
CAGNRFSDGQKLLF

SEQ ID NO: 502684 - protein, 15 aa, Homo sapiens
  CDR3 for beta chain variable domain of TCR clone 251342 (TRBV7-2, TRBJ2-7)
CASSTPGLTRGEQYF

SEQ ID NO: 502685 - protein, 14 aa, Homo sapiens
  CDR3 for alpha chain variable domain of TCR clone 251343 (TRAV12-2, TRAJ40)
CAVKIPSGTYKYIF

SEQ ID NO: 502686 - protein, 13 aa, Homo sapiens
  CDR3 for beta chain variable domain of TCR clone 251343 (TRBV7-2, TRBJ2-4)
CASSREHANIQYF

SEQ ID NO: 502687 - protein, 12 aa, Homo sapiens
  CDR3 for alpha chain variable domain of TCR clone 251344 (TRAV25, TRAJ30)
CRRVDRDDKIIF

SEQ ID NO: 502688 - protein, 17 aa, Homo sapiens
  CDR3 for beta chain variable domain of TCR clone 251344 (TRBV7-9, TRBJ2-6)
CASSFGAGYSGANVLTF

SEQ ID NO: 502689 - protein, 16 aa, Homo sapiens
  CDR3 for alpha chain variable domain of TCR clone 251345 (TRAV12-3, TRAJ53)
CAMSPGSGGSNYKLTF

SEQ ID NO: 502690 - protein, 16 aa, Homo sapiens
  CDR3 for beta chain variable domain of TCR clone 251345 (TRBV4-2, TRBJ1-1)
CASSQAGFEMNTEAFF

SEQ ID NO: 502691 - protein, 16 aa, Homo sapiens
  CDR3 for alpha chain variable domain of TCR clone 251346 (TRAV13-2, TRAJ28)
CAEKSYSGAGSYQLTF

SEQ ID NO: 502692 - protein, 16 aa, Homo sapiens
  CDR3 for beta chain variable domain of TCR clone 251346 (TRBV19, TRBJ2-1)
CASSKAGPSAYNEQFF

SEQ ID NO: 502693 - protein, 13 aa, Homo sapiens
  CDR3 for alpha chain variable domain of TCR clone 251347 (TRAV12-1, TRAJ21)
CVVTLYNFNKFYF

SEQ ID NO: 502694 - protein, 20 aa, Homo sapiens
  CDR3 for beta chain variable domain of TCR clone 251347 (TRBV7-8, TRBJ2-1)
CASSFAHRRAGVRSYNEQFF

SEQ ID NO: 502695 - protein, 15 aa, Homo sapiens
  CDR3 for alpha chain variable domain of TCR clone 251348 (TRAV13-1, TRAJ17)
CAASIERAAGNKLTC

SEQ ID NO: 502696 - protein, 14 aa, Homo sapiens
  CDR3 for beta chain variable domain of TCR clone 251348 (TRBV7-9, TRBJ2-1)
CASSPRDSLYEQFF

SEQ ID NO: 502697 - protein, 16 aa, Homo sapiens
  CDR3 for alpha chain variable domain of TCR clone 251349 (TRAV12-2, TRAJ10)
CAVNRGLTGGGNKPTF

SEQ ID NO: 502698 - protein, 12 aa, Homo sapiens
  CDR3 for beta chain variable domain of TCR clone 251349 (TRBV28, TRBJ2-7)
CASSFSSYEQYF

SEQ ID NO: 502699 - protein, 23 aa, Homo sapiens
  CDR3 for alpha chain variable domain of TCR clone 251350 (TRAV26-1, TRAJ38)
CIADNAGNNHIQNPDPAVYQLRD

SEQ ID NO: 502700 - protein, 15 aa, Homo sapiens
  CDR3 for beta chain variable domain of TCR clone 251350 (TRBV20-1, TRBJ2-7)
RSARDRVSGMDEQYF

SEQ ID NO: 502701 - protein, 13 aa, Homo sapiens
  CDR3 for alpha chain variable domain of TCR clone 251351 (TRAV2, TRAJ15)
CAVASQAGTALIF

SEQ ID NO: 502702 - protein, 15 aa, Homo sapiens
  CDR3 for beta chain variable domain of TCR clone 251351 (TRBV28, TRBJ1-2)
CASSRWGASNYGYTF

SEQ ID NO: 502703 - protein, 10 aa, Homo sapiens
  CDR3 for alpha chain variable domain of TCR clone 251352 (TRAV26-1, TRAJ40)
CIAGTYKYIF

SEQ ID NO: 502704 - protein, 15 aa, Homo sapiens
  CDR3 for beta chain variable domain of TCR clone 251352 (TRBV19, TRBJ2-1)
CASSSPGVPLDEQFF
